United States Patent Application Publication US 2005/0228172 A9 - sequence listing, part 56

SEQ ID NO: 234689 - DNA, 648 bp, Homo sapiens
cggttcaacaggtaaaaaaatgttgatgtcatatctcttttacatgtgttcctatctggaagttgttctaacatgatctactgttaattaaatgtttgaaattttaaaaatgttatatgacaggattattttgctgttactggtaaaaataataagtagaaaaatgaatagagcttcattattttgttaactttctcctttattcaattaaaattagattggtaacaaatattatacactaaattaaatttttaagtggcagtgttataaaatgtgattttaattaagataaattgcttctttaatgactaaagagactgaaatttcaattatttgattcactattcaaactataaatttaattattaaccttaatatttatataaaacaatgaaattcttctgtacatgctgattacagtaaacatctattattgtcaagcttagaaaatataacccctcttgtcagcttcagtgctcagaggagttaaaaaactgatacataatatgtctttcataataaggttaataaatttaaattactgacttaaaaagtataaaagcgaagcagttcatatttttatgttgaawaatgaaatgtattcttactttaattttagttttactttaaaaataaaaatgggattgg

SEQ ID NO: 234690 - DNA, 648 bp, Homo sapiens
cggttcaacaggtaaaaaaatgttgatgtcatatctcttttacatgtgttcctatctggaagttgttctaacatgatctactgttaattaaatgtttgaaattttaaaaatgttatatgacaggattattttgctgttactggtaaaaataataagtagaaaaatgaatagagcttcattattttgttaactttctcctttattcaattaaaattagattggtaacaaatattatacactaaattaaatttttaagtggcagtgttataaaatgtgattttaattaagataaattgcttctttaatgactaaagagactgaaatttcaattatttgattcactattcaaactataaatttaattattaaccttaatatttatataaaacaatgaaattcttctgtacatgctgattacagtaaacatctattattgtcaagcttagaaaatataacccctcttgtcagcttcagtgctcagaggagttaaaaaactgatacataatatgtctttcataataaggttaataaatttaaattactgacttaaaaagtataaaagcgaagcagttcatatttttatgttgaaawatgaaatgtattcttactttaattttagttttactttaaaaataaaaatgggattgg

SEQ ID NO: 234691 - DNA, 543 bp, Homo sapiens
aacattatttataaataatacctccctccctttgtaaaggcaacgtagcacaagagagatggattaaagggtacagyggaggccgggcatggtagctcacacctgtaatcccatcactgggggaggctgaggcaggtggatcacgaggtcaggagtcccagaccagcctggacaagatagccaaacctcatctctactaaaaatacaaaaattagtggggagtggcagcacacgcctataatcctagctacttgggaggctgaagcagaattgcttgaacccaggaggcggaggttgcagtgaactaagatcatgccattgcactccagcctgggcaacaagagcaaaactccgtctaaaaaaaaaaaaaaaaggggggagggaacagggctctaatggaagtagtcattcttaagttaattaccaagtcaaggactatctctcaatgtttagtgctttaagaaaactttcatcaggtactagatctattacctatgcgtatgggaaaggtgacatttgatccctgctttgaatataaaataa

SEQ ID NO: 234692 - DNA, 603 bp, Homo sapiens
cggctgaaacaaggaaaactgcccaggtacttagattattggatttttttacatatactatatttagaaataatgcaattatgactgtattatgatacctagacagtttcacattaagttacacattaatgtttgcaagatacactaaggttagtaaaggaggctaattgtggctgtagttattctgcccaggggctttcacatgcaccccaggaggctgctcaaaacaatgagtatcaacacatttataatcacttaatggcatacttattgatgaatcatattccaattactaacaaccgaaattcagttttgtggaaggcatggtaaatgatatacctgtttgtccagccaggacraacaatgagtatttgtcaagagcctcctgtttgcttaacaaacattgtttagcaaggacccaatactgggtaaacaactgttgcatttagttttcaaactgaacatttcttaattttatagtgaagattgagtgtagaatcttatggtagctgtgaaatggtatgtagctaggtgattattatctagaatcttaatgtattaaatcacagtttagtgacgttaatattttacaaattaaagata

SEQ ID NO: 234693 - DNA, 588 bp, Homo sapiens
ggaggctgggacgtctaagatctaggcatcagcagatttggtgtctggcgaggggctattwcctgattcatagatggcaccatacagctgtatcttcacatggtgaaaggagctagctagctttctgctggagtgcagtggtgcgatctcagctcactgcaacctctgcctcccatgttcaagcaattcttctgcctcagcctcctgagtagctgggattacaggtgcacaccaccatgcccagctaatttttgtatttttttagtagagatggggttttgccatgttggccaggctgatctcaaactcctgaccttgtgctccaccagccgtggcttcccaaagtgctgggatttcagctatgagccaccacacctggcctctgccatctcttttattaaagcactaattccaatcatgagggctctgccctcataatctaaacacctccccaaagaccccacctcccaacaccatcaccctgggggttaagatttcagcatatgaaattttgaagtttacaaactttctgaccatagcaaacatgaagatatatttatgcttgatttcaaattttgtaaacttctt

SEQ ID NO: 234694 - DNA, 649 bp, Homo sapiens
cagcctgcctgcacataggttatcacctttataaacacaattggataagtaactagtgactatggtcttcaaatactgacactaactttttttttgtttgttttgagacaaagtctagctctgtcccccagactggagtgcaatggcacaatcttggctcactgcaacctccactctctgggttcaagcgattctcatgcctcagcctcctgagtagctggactacaggcactcgccaccgcacccggctaatttttgtatttttatgagagatggggtttcatgttggccargctggtctcaaactcctgacctcaagtgatccgtccaccttggcctaccaaagtcctgggattacaggcatgagccagtgcacccagcctccaacactaaatattgttaagatttttctaggttgttttgttgctgtatttgcaactgcagataagactaatggtttctttgtgataatgagttaagcagccttgatgtctaatatataagatacttgaggaactcttatgcttgctttattctgtaaacatttattcactgagaggctatgagacagtaccaaaagcatacatctgaaaatatcagttcagaacgcatgttactcatgttaaggttggccagtatgaaaccatat

SEQ ID NO: 234695 - DNA, 649 bp, Homo sapiens
cagcctgcctgcacataggttatcacctttataaacacaattggataagtaactagtgactatggtcttcaaatactgacactaactttttttttgtttgttttgagacaaagtctagctctgtcccccagactggagtgcaatggcacaatcttggctcactgcaacctccactctctgggttcaagcgattctcatgcctcagcctcctgagtagctggactacaggcactcgccaccgcacccggctaatttttgtatttttatgagagatggggtttcatgttggccaagctggtctcaaactcctgacctcaagtgatccgtccaccttggcctaccaaagtcctgggattacaggcatgagccastgcacccagcctccaacactaaatattgttaagatttttctaggttgttttgttgctgtatttgcaactgcagataagactaatggtttctttgtgataatgagttaagcagccttgatgtctaatatataagatacttgaggaactcttatgcttgctttattctgtaaacatttattcactgagaggctatgagacagtaccaaaagcatacatctgaaaatatcagttcagaacgcatgttactcatgttaaggttggccagtatgaaaccatat

SEQ ID NO: 234696 - DNA, 617 bp, Homo sapiens
tctccttaccattacaatattcagtaatcacataatgtgtttgtttgctgtcgtttgtttgtttaactgtttttgttgttgttgtatgtttgttcctatttttattgttccttcagtctttttcccattgggtttaaccaactctatcagacttgataaaatttgaaggaaaattccaaattatggggaacaaggcctctgaagtggctaaattccccaccaccacccctgacaccctgccacaacacatgcacacaaaggtggtgtagtgggggagaaaatggacagcaaaagggaaaaagaaatgaattttttttttaattttaactactaaaggggctttatttacataacaaggccacctttttactagccaggccaaactgaaagaacaatggctgtccacccatgctggagttcaacagctaaggttctgccttctttttttttttttcttccaccaggacaccctgggtttggttcctgaatccagccctttctggtttgatacttggtacttctgaaatagcagcaatttctcctagctgaaatatgataatgagatttaaaaaaatttttaaaggagctcartggttaagcttaattaaaagtcatta

SEQ ID NO: 234697 - DNA, 552 bp, Homo sapiens
ctggcccaccctcatccctgcctctgccccagaaatgtgcaagtccacgtttgggggtctttctggggctgctggctcccgtgggcaagagtagagcccagggggtcttgtttttgttttctcagctctgtgtacacttgtgcctttaataaaacctacagcttttctgaggtcaggacagtaaatctgaaaaccctgcatcactgtcttgtgagggcagccagtgcctcttggatgggagccacagttcactgccctgcgtctccctgcagacaaggtaaccatggcccaagatgaagctggctgctgggtcacagtyacctgtcagggacggggcctccagatcctctcctgcttggccaagagccctggccagggtataagcaagagggataaaggtctccagtctgcggaggcgagagggccagaggagcatgtgacttccattggggtgggggctgttgggccccagaagcacagtgccccaatgctgtggagaagacggcgaccacagactctgattctctcacaggctcctggccaaatggacca

SEQ ID NO: 234698 - DNA, 598 bp, Homo sapiens
ttctctcattcattgataaattgctagacacttgggtgcctctgttttctcctttgtagaatgggactaagaacagtacctgcctcctgagaattctgtgtgttaataccttagaagtgtgcctgctcctgcgtagtgctcaaagggttacccagtaatattgttctttcattcatctcttccatcttacacatcctctgggaacccgtggtgccaggcctccaggttgggggtgtagaaatgaatatgacatgactcttgccctcaggaggttcatggttgagcaggaaataagccacactaccattttgtagggcacaaccagtgatacaaacatgccatggagtgcaaaggacagagcccaaaatctgcccaggaggggaggattgaagaggacttgcttacccacaggcttgaaggatgtgaagaggtttccagtagatgaagaagacagaagggaattctaggaagtgggaacrgaatgaacaagttatagagacataacatacctgggtactaggggaatggctggtcacttgtatgtgtgagtgggcacaggacgccacatgcctggtgaacatgctgcaaagacaggtca

SEQ ID NO: 234699 - DNA, 639 bp, Homo sapiens
  misc_feature (1)...(639): n = A,T,C or G
nnnnnnnnnnnnnnnnnnnnnnnnnnngccaaacataataagactaaaacttattgtgcaaataaattggtccttctataatgtgtctttggtagaaatggaaactgaagagataaaaattatgtttcagaagaaaactacagtacacctgttattggattctaaccctgactattttttttttgagtttgtattatttgcctacaatttggactgaatcctgaattttttcctgtctacaagtctccaaactgatgtttccaaatttgtcttccattttctgacttggactcaatgaaattgctattaccgtttttcctgaggccctgcaagctgaagctcatacataaacaacttgtgacatgcaaactacagataagaaaagtatatcagatggccactgcctacttccacattaactgaagatgctcctaatctaacatcaagaaacctcaactgactgccctccaggctctaaggaaacaggtttttagattgttccaaacattaacctctgttttctttctgagattcygtctgcagcaccagctcctgaaatgaaacaggactggccgattcccagaaatgggagactttgcatactcaactcttaacatgatttttctctccacagccaca

SEQ ID NO: 234700 - DNA, 376 bp, Homo sapiens
tttatcagctccaatattttcttatgaagtctttaggtttttccaaatataagatcatatcatttccaaacaagggtaatttgacttcttccttttcagtttggatgtctttatttctttctcttgtctgattcctctaaatagaaattccagtactatgttgaataacagttaaaagtgggcatctttgtcatgttccagatcttagaagaaaggctttcagtttctttccattcagtatgatgccagctgtgggtctgtcrtaagtggattttattatgttgaaatattgtccttttatacccagtttttgagatattgaattttatccaatgttatttcagcaccaattgaaataatcatatgggttttatcc

SEQ ID NO: 234701 - DNA, 588 bp, Homo sapiens
tcttactgtgcttaagttgtgtgtacaagcaacatggtttatcttgaacattagctttccctatggggctctgaaatttggtaggcagaggtaattacttgactagctcccagttaaattattactgatgagtcactaattaacttccctggtagacaacccttcttacaagttgtcacgacttattggtagaagaattgatcatgtcttgtgtggctgtattgggaggggactcttggaagctttcatctggtattcccccaaataaattttagctattataactatatgctgagttakgcaagtcctcacagttatccccaaatgtgcagggtagtctttgatacccttaacaagagcacatattatataccaagcattattatagatgcattatatccattattatatttgtgctcaaaaaaaaccctgtaagattgtggggtttttaaattgttttttttttttttgtttctttgttttttgagatggagtttcactcttattgcccaggctggagtgcagtagcacgatcttgactcactgcaacctccactcccaggttcaaactattctcctgcctcagat

SEQ ID NO: 234702 - DNA, 488 bp, Homo sapiens
ctatcttaaaactcttttataaataaaatttatatctatgaaggaaatctccaattttaaggatgtctgcytatgtgtgttcgaaactcttaccatcttttaaatttacataataagtcatacctttgtttaaggtgcttttctggccatcctgtcttaagtgaacttttatttaagcagatttttttccttagtttgagaaaatgatgatacaatatttaggcctaaaatcttagctctgtgcttatgaaatttaaatttttctgttccacctaagagttgtccctttagaaattcaaatttcttgtctagtacacaattgcttagggtaatgaaacaggtaattggatgattggaaggctcaatggggaaaagaaaagctatttaaaagccagcaaatgaaaatcctttatgaaagctatatgatctgtttctgtgtgtttgtatctgtatatgtgtatgtgatatttggtaaataaagctagctt

SEQ ID NO: 234703 - DNA, 488 bp, Homo sapiens
ctatcttaaaactcttttataaataaaatttatatctatgaaggaaatctccaattttaaggatgtctgcttatgtgtgttcgaaactcttaccatcttttaaatttacataataagtcatacctttgtttaaggtgcttttctggccatcctgtcttaagtgaacttttatttaagcagatttttttccttagtttgagaaaatgatgatacaatatttaggcctaaaatcttagctctgtgcttatgaaatttaaatttttctgttccacctaagagttgtccctttagaaattcaaatttcttgyctagtacacaattgcttagggtaatgaaacaggtaattggatgattggaaggctcaatggggaaaagaaaagctatttaaaagccagcaaatgaaaatcctttatgaaagctatatgatctgtttctgtgtgtttgtatctgtatatgtgtatgtgatatttggtaaataaagctagctt

SEQ ID NO: 234704 - DNA, 534 bp, Homo sapiens
  misc_feature (1)...(534): n = A,T,C or G
nnnnnnnnnnnnnnnnaaaggtagactctttcctagccytgacgtgtcaatcatttgtgaaatcatgtctaagtttccagctccagtgatgttattagccacctttcagtgtatcatcttttatgggtaaatcaggatctcatcaactgttctacaccaatgaataatctcctaccagtttctgcctaccatcccctcctgatctgtcctgagtattagaaatggaccacatgtccgaaagaattttgacttagtttttaaagctaagaatataacttttaaattcttatgccattttttagtgagcaaaactaaaaatgcagccaaccagagcattccaaaacattatagagcccatccatagatatcattttagcctgtgaagtgtgaaactgtttctgggaataaggagaataaaattctaacaaatggcagaaatattaaaaaaaaatcaacatagtaaatgacattaagaaaaagacttatttcatcaattaaaacccttgagggcatatcagaaataatagaaataca

SEQ ID NO: 234705 - DNA, 553 bp, Homo sapiens
ttcgaagcctaagaacaatgaaggcttatgaatgactttgtcactactctttaccacacaataatatccttcccttcttttaaaatttgtctcaaacctctttattttatgaaggtttccataattgattccataatctcccagatttttcatctttatgacaaaacttctatcactttagccctaaattatctacttttatatatctcagtcactttgtacttacatgtaggtttctttttctggctttcccactgtgtgatagggattaaaacttgtgtttcctttaataatgagatactaaattagaaaagaacaatamctaacaataccctaacagcctaagcaactgctcttaccatttctcttattctgtgtctcatctatatgaacatcagagatacagctatccactatcttcttctcacttaagcactttgatctgctgttaaatagtctgaatttgtaatatgatatttaacagatgcatcagtatatttatggatgtttgtaccctccaaatctcatattgacatgtaatccccaatgttga

SEQ ID NO: 234706 - DNA, 488 bp, Homo sapiens
actcactctctcaagacagaaggtttgaacaaagctgggtcacttactggtttatgatctctcaagcattactattctgcaatgcctgatgactagtgtcttgaaaaccaatgtttaaaggtttttaattagcttttcttcttctccctctttctcttcctccattggtcaagttaggaatataaatctggtccttgtgttttcatcttggctgttgtagaagttctttcttgtacttattaattatattaaaaacaacaacaagcaagggccactatgagcttgaaaatataatcttrccactttatttagtaaataaattggcctaaaataatataatttaattttcgggctatctcaaaatgcttaaccacttgaggaataattatacagctccttattggtcattttttatcagaattaatacattttaattttaattgttggtattttaatttttatacctattacttcatggcaagtgctca

SEQ ID NO: 234707 - DNA, 495 bp, Homo sapiens
tttttactattaattggttctttttgttagtttgagagagggcctcactcaactcaggctgtagtgcagtggtgccatcatggttcatttcagccttgaactcttgggctccagcagtgctccagactcagcctcctgagtagctatgattacagaaatgtgccaccacacccagctattttttcttatttttttttwaatttttttgtagatacagggtctcactatttgcccaggcaatgattttagttttgattttgagaaaatttttctgtttttttcccctttttaaaattatgcaatcatgtatttgtgattattcctctcctccctcagtgctttggaactgttacataaaaacatttgaagtagatttgtattgatctaattgagagtttacaacagctattttcacagtgcctttgtcagtctacacttattaccaataattaccttttctcatttaaaagagaaacaaaacaaccgtaacaaaaa

SEQ ID NO: 234708 - DNA, 309 bp, Homo sapiens
aaaaggacacatgcaaccatatgttcatagcaacactattcacaatagcaaaatattgaattaatccaggtgcccatcaaaggtgaattggataaagaatatttgttacatgtatactgcggaatactatgaagttattaagaagatcaaaatcggccaggtgcagtggctcatgcctgyaatcccagcactttgggaggccgaggcaggtggatcaccttaggtcaggggttcaagaccagtctggccaaaatgctgaaaacccatctctactaaaaatacaaaaatcagccacatgtggttgcgggc

SEQ ID NO: 234709 - DNA, 635 bp, Homo sapiens
aaaatcaaatgtcttctatttacttcctccaaaaagaaacttttaagaaattagtctactttccagtttgaatatttgagcatctaaattaaaaattattttagataccatgtataattgatattattatagtactggtctttctgtgcctggcttatttaatctagaataatgttctctagatttatccatggtattgcaagtgacagtttttgaaggcacattgtattccattgtgtatatatgccaccttttttaaatgattaattcattgatgggtactttggttgcttccatatgttggccattatgaacgatcctgcaatgaacgtggtaatgcagtcacctggggtgggggtgtacgggaaaagggcagatgatggtcaaagtgtttcaaaagtttcactgagacaggaagagtragttctggtgattgatttcacaacatggtgactgtagttaataatgtgttacatatttcaaaactgctaaaagagtggattttaaatgttcttagcacaaataagcaagtatataaggttagatatgtttgttagccgaattcgttcactacacaaggtatacatgtatcaaaacatcacattgtacctcacaaatatagaaaattattattt

SEQ ID NO: 234710 - DNA, 476 bp, Homo sapiens
gatatatatgtatgtatgtatgtatgtatgtttatataaatatatataatcatctctcccgtcaatggaagttgagattaaacattgacaccttatacctcacaagttgcagatgtttttcaggaacaactatcagccatctgagtatctttgtgtttcttcaaacccatacccaaccaattcccaaatagtcaccatcccatttggccttgctttgttcattactatcttcctggtttacatttttaattatttttcaactcagataagtgaactcatatttctgactctaggattcttccaaccaacatacacattttactggagaaaaattttcttcaatcatctggctttgaccgtaccactctctggctcataaacttccagtggtctacatactcctctatatttcattctgctccttggttwgtgtttgcagtccaccacagtctgaatccagacaggcttatctccca

SEQ ID NO: 234711 - DNA, 580 bp, Homo sapiens
accaggtccctcccacaacacgtgggccttataggaattacaattcaagatgagatttgggtggggacacagccaaaccatacaaaacgggccrtgagaactatttcccagatggggaaaccttcaacaaattgagggtaactgatcttctcaagatcatactttatcaggggttgagctgagctttatatttggatcaaaactcccaggactgttctgtgctcctttctcttctccagtgttgcaagcttgaaaaggccgaaattggaagtcaagaaaggaattaatcacatatcgacgattagtgccttattttgggacagaaagagctgtctttggaaaggcaagcactgggaatctagccttgcctccctcatcaacaactgtgatattgtcaagtgggtatgtggaattctgtacctgagttcctcctcctttgtggatacagtactaagtaattgctgaggctttggcagtgctcacattttgtgactttagcatcagttgggctttttggtggggttgtggatacttcccagtcacccggagcttttaacacatttatcagagggcacaaaat

SEQ ID NO: 234712 - DNA, 474 bp, Homo sapiens
caattcttagttgtctcccttctaaatgtactagccccttagatatttttcccctcccttaatatagttgcctacttttggaaaactactctttaccaagcaccataggcatacccatctgcaaatgggcataattctaagcatttgtcaagagaattatcattgtttgattgaagatgctgggttcaaaggctctagcctttgggaaagtaaaaatgttcaggatagatatagaaactaagcctcccaggactgattggtatgtctttagacttctaacagtcttagacatcaaatgcatcatcactgtgacactggtgaatataaatgggctggcaaaatmttttagatgaggaaaattgagatttgatggatcagctctctctgcaatatagatgatctctaatctaaatgtaaattcctatctcttggaaagttataaaggagttctaagagaatagtaatgtcaaaaac

SEQ ID NO: 234713 - DNA, 601 bp, Homo sapiens
aaggttttgatagaattgggtgagtaccagaactgtttgggggcatttctcagtctgctctgtcaaccagaattctgggggttctgaatggccttgagaaactgccctgacaaccttcagttctgacctctgagctgtcgctgttcaaaagacctttaggatgttgaagtccacttcctatttgagatgcccctccatccatcttttgcactatccaacattagcttcacctcctgaaagtccctagaggtgattccagggaacccagaccctctgaaggcggtcaacattatgggggttggggggatgcagccagccctgagaccactgggagctataagggacagcattctctttttaatggtgggtwtaaggcagtcatcaaaccaagctgagcaaatccactgcccaagcaacgggcagtaacacaggaaggaagaagggaagtactatacaaagtgtgagtgtgctggagtttgaaataatgggaacatcagccctacatttcagaatagaagagcagcatatttagaaacgaaggcaaggcctggcattccttcctgttagccaagattagaaggagctgtgagaggggtagatt

SEQ ID NO: 234714 - DNA, 441 bp, Homo sapiens
aggcaagagattaagtaacttgcctaaagtcacacagctaataaatgtcagggccagcatttacatctgggaggggaactcaggagcctacattcttgtctcagtaagtgctttaagaatttgctagctcttattattattatcatcatgagttcccatttatcaatcagtcacaagaatttactaagagtatatgcttagcactgtgttagttattgcaggctytatcaacaaaatatatgtgacaggatttctgcttgtgaggagtttatcatctagttggagtgagatatgaacaatatggatgaaatgatttgataacaagtgccaaatagcatagtatggactcaaaatgcagtagaaatggacttagttactgaaaggatcattgggtagttgactagttaggaaagtttactagagacagtactacttgaattc

SEQ ID NO: 234715 - DNA, 441 bp, Homo sapiens
aggcaagagattaagtaacttgcctaaagtcacacagctaataaatgtcagggccagcatttacatctgggaggggaactcaggagcctacattcttgtctcagtaagtgctttaagaatttgctagctcttattattattatcatcatgagttcccatttatcaatcagtcacaagaatttactaagagtatatgcttagcactgtgttagttattgcaggctttatcaacaaartatatgtgacaggatttctgcttgtgaggagtttatcatctagttggagtgagatatgaacaatatggatgaaatgatttgataacaagtgccaaatagcatagtatggactcaaaatgcagtagaaatggacttagttactgaaaggatcattgggtagttgactagttaggaaagtttactagagacagtactacttgaattc

SEQ ID NO: 234716 - DNA, 552 bp, Homo sapiens
gtagataaaacaagaagcagatgccatctaggagtttcatagctagagagaagtcaatgcctgcttcaaaacttcaaaggacaggctgaatttctttgtaggggctaatgcagctggtgactttcagttgaagtgagtgctgattgatcatttcaaaaatcctgcagcctataagaattatgctaaatctactatgcctgtgatctataaatggaagaacaaagcctggatgacagcacatctgcttacagcatggtttattgagtgttttaggcccactgctgagacctactactcaraaaaaaagattcttttcaaaatattacagcacattgaccatgaacctggtcacccaaaagctctgatggagatgtttttaatacaaggagattcattttgctttcatgcctgctaatacaacatctatttagatcaaggggtcattttaactttgaagtcttactatttaagaaatatatttggtaaggctatagctgctgtaggtagtgattgattcctctggtggatccaagcaaaatcaattgaaaacta

SEQ ID NO: 234717 - DNA, 636 bp, Homo sapiens
tgcggcaagttatccagaagatctagataagataatcgacgaaggtggctacactacaacagattttcagtgtagataaaacaagaagcagatgccatctaggagtttcatagctagagagaagtcaatgcctgcttcaaaacttcaaaggacaggctgaatttctttgtaggggctaatgcagctggtgactttcagttgaagtgagtgctgattgatcatttcaaaaatcctgcagcctataagaattatgctaaatctactatgcctgtgatctataaatggaagaacaaagcctggatgacagcacatctgcttacagcatggtttattgagtgttttaggcccactgctgagacctactactcagaaaaaaagattcttttcaaaatattacagcacattgaccatgaacctggwcacccaaaagctctgatggagatgtttttaatacaaggagattcattttgctttcatgcctgctaatacaacatctatttagatcaaggggtcattttaactttgaagtcttactatttaagaaatatatttggtaaggctatagctgctgtaggtagtgattgattcctctggtggatccaagcaaaatcaattgaaaactatctaaaaggattc

SEQ ID NO: 234718 - DNA, 613 bp, Homo sapiens
agtcatttcttgagatggagtctattcctgttaaagatgctgtgaacattgttgaaatgacaagaaaagatttagaaagtcaaatttagttgataaagcagcagcagggtttgagaggactgattcaaattttgaaagaagttctactgtgggtaaaatactaccaaatagcatctcatgctatatagaaatatttagtgaaagaagaatcaattgattcagcacacttcatttttgacttattttcagaaactgccacagctaccccaatattcagcaaccaccaccctgacctgtcagcgagcagcygtcaacatggaagcaagaccctccaccagaaaaaagatcacaacttgctgaaggctaagatgattgttagcaattatttatttatttgagatggactcttgctctgtcgcccaggctggagtgcagtggtgagatctcggctcactgcaaactccacctcctgggttcaagcgattctcctgcctcagcctcctgagtagctgggattacaggtgtgcaccaccacgcgcgctactttttgtgtttttagtagaggtgaggtttcaccgtgttggtcaggctggtctcgtatacctgacctcat

SEQ ID NO: 234719 - DNA, 594 bp, Homo sapiens
  misc_feature (1)...(594): n = A,T,C or G
ttttgtgtttttagtagaggtgaggtttcaccgtgttggtcaggctggtctcgtatacctgacctcatgatttgtccgcctcagcctcccagagtgctgggattacaggcatgagccacggcgcccagccgattgttagcatttttaaatatattttaaattaaggtatgtacrtagtttttaaatgtataatgctactgcacacttaatagagtacagtatagcataaatgtaactgttatatgcactgggaacccccaaaatgcatgtgacttgctttattgctttactgtggtggtctggaaccaatattgctttactgtggtggtctgtaatatctcccagggatgcctgtatacaagctntcaaaacagcccttaaaaaaaaaaaaaaaagaaattcttcctccaaagtgatttaggtttggttttcctttaacatacaataaatctctatagattttatacctatttcttacatataaacatagcatatataatatatacaaaatatataatatattccatctataaaaatataagcataaactttatgaagaaaaaaataagaaatcttggaggaaaaatacttgct

SEQ ID NO: 234720 - DNA, 414 bp, Homo sapiens
tcctgggggattttccacaggttcaaatcctgaatcatgggagactgctcccatggtgataagcattatccaacttaatgtcctgctcttcttccttgatacagcagccttgggacacattcccatccttcttctcccggctcctgctgtgatttcaccgtacagtccgtttcctcccttagccaatccagcagatccccagcagagatgagagtctaacaacagacctakcaggctcaggggactttgagagtcccaactcatctacccaggtactcctctcccaattttaggggttctacttccctattagggttctaatcttgggacaagagacttgctgaagctgagaatacaaaattctctgaaacagagctcctctttacaattgagccttcttctgactgcaggaga

SEQ ID NO: 234721 - DNA, 545 bp, Homo sapiens
tcctgggttcgagtattcttctccaggaactggaattgtctatcttagattggttttccaaactctgagacagagttgtgagcagaaggtttattgggggaatgcttgcagaacagagacctgtaagcacatgaggactgtgcagtgggaaaagccatcaggtcataaatgaggacttgtctgatcctgtggggagctctggagctggggggcgcattttagagtggtgccaaattgaagaaagagagacaggcttttgtagcccacatccctcagtcactgmgcacaagccatccctaggacggggcgtgtattgcctccaagggcaaatctcagtgaggacccagctgttagtttcagcgagggtcagcagccaggtgagatggtgagatgggatcggtacatcagccctgaagacggtatctggggagagcaacataatagtcacctttccctgtgtgttaggggtaggtgtgggggctggagcatggggggaaggaggagacagagaagaaagaacatggagggccttgaaagagaggcag

SEQ ID NO: 234722 - DNA, 574 bp, Homo sapiens
ctggtaggtaagtctcacatctctggtagtgatcctgggttgatttccctctacaaatggggcatgatcagttgtctttactccatagagattcctcttgttcatgcactctcttgcaacccccacttcccaccctgcatctatacttttgaaaatatatttcatgttatttttctacttggaaacagaggggaaatccaaattcttaactcacagcacaatgtttcttgaatgacagaagtcttccaagtatggagcrtattgaacctcccttttctacttccttaacactaccttcgtttttaccactaccctttttcagcaaacaagggacttcattccattttcaacctacttgtatcctgaagcatctggcatagttaacactcctatcttgccttcatcagcaaatatgtagtgagtctctgtcacacgctaggagccagggagaccagtgtcaagagatatcctggaacaaatgccttctaaactcagatacaattattagtgaatccatgaaatgttgacaatgtttcaagctgagggcaaacatgcggaaagacatatagttgag

SEQ ID NO: 234723 - DNA, 539 bp, Homo sapiens
gaaaaaagagaaagacagacacacacacacacacacacacacacacacacacacacacacacacacacacacacagagggaggcataaggtagggagtgtgtggggaggagagaggtggtggagattctagacaaaggctggttagaaaagccagcttaggagctgtgagtctttctctccaggtaaagacagaagtgagtattagatgtcttgtggaattaaggtgatctggggaagtttattygatgtcttttggaattaaaggtgatttggtgaagtttattacgagctctctgttctctcctttgtaacctcagtgacttaaaatacacacatacaaaaccacaaaacccctgagatatactggaaacaaaatcaaccccaagtcacttatcattatctcaaaggaaaaaaacttacaaggcttcctcaggcacctatttataaatttcatcactgagaatctctgactttctcagagaaaacactgcgcttgcaccccaaatgatcaggaatcacaactcgaatgagcacaaag

SEQ ID NO: 234724 - DNA, 552 bp, Homo sapiens
tctttgatgactgtcaaagattctataagatgcagaacactgtgactcatgggtgagctccctcagaaatgaagaactctcccccataattttagaatggctatagattagtaatgatgggtgtggatgaacgctgctgtgcactcattttaaaccaacaaaacaaataaattgtacacacatacaaatcatcacacacatctgcctctttctgtgtttagtcacaaaaagccaccagtcctcctttaactggcaaatctacttgttgatttctagtctttactcttcaccatgctmacaattctgaaatggttaactagtccctaatccctaatttttaatttttttttttcaatggagtatccctctgtcacccagactggagtacagtagcatgatctcagctcactacaacctctgcctcgtaggttcaaatgattctcatgcctcagcctcccgagtagctgggagcacaggcgtgccccaccatgcctggctaatttttgtgttttaactagagacggggcttcaccatgttggccaggctggtct

SEQ ID NO: 234725 - DNA, 619 bp, Homo sapiens
tatgccaggcactactcatggcagagtgaagacaaagaaaagtgtaagctctggttgatgactttcttgaaaaacattyctaatgggtcaacaaatcaaagagtcaaggtacagaacaaagccattcaccacgttctccctcaggttcacgtgctggcagacattaccatatgctctcaatcttggatctccttctcaacagtttctctgcttaccaaatatatgcttcaagaaggagaaaccctttcctgatcagggtaaaccctttcatgatcctgttcagaaaatgataagcactgtctcatgtttattctacgacaaccagaagcatatctaaacaacctaagagagcaccttttgatgtgtggcaggtagctccggaaatgattctgagtatagaaaaaaagaatggatccacaaaagcaactggggtggggggagtaagctaaagatgagctgactttcagaatcataagtgtttttactttacttttggctagctgatgccagagaggcttcccattccaactagagcagtaatatcccatctttacctaccgagttttcgcttctgtcattctggcctcacagagcatgacgttttgatgccatacttgtt

SEQ ID NO: 234726 - DNA, 619 bp, Homo sapiens
tatgccaggcactactcatggcagagtgaagacaaagaaaagtgtaagctctggttgatgactttcttgaaaaacattcctaatgggtcaacaaatcaaagagtcaaggtacagaacaaagccattcaccacgttctccctcaggttcacgtgctggcagacattaccatatgctctcaatcttggatctccttctcaacagtttctctgcttaccaaatatatgcttcaagaaggagaaaccctttcctgatcagggtaaaccctttcatgatcctgttcagaaaatgataagcactgtctcatrtttattctacgacaaccagaagcatatctaaacaacctaagagagcaccttttgatgtgtggcaggtagctccggaaatgattctgagtatagaaaaaaagaatggatccacaaaagcaactggggtggggggagtaagctaaagatgagctgactttcagaatcataagtgtttttactttacttttggctagctgatgccagagaggcttcccattccaactagagcagtaatatcccatctttacctaccgagttttcgcttctgtcattctggcctcacagagcatgacgttttgatgccatacttgtt

SEQ ID NO: 234727 - DNA, 571 bp, Homo sapiens
attggactggccttttggcgagtcagcaattcagttctggcccaatctaaatacaccctgggggtctctgcctttctctctggttcttctgtgatgttttcctctactttcttctcccaatatcattgtcctttgggagtacagcaaaaaaggctgagtaccaaatgagactttacaggcagaatgagaattgcacatgtataacttaatttaatccatataggcagaaccaagatcataaagcmtctcagtatgacagacgaggccaagagagcataccagtttaaacgaactgcaaaggaacatcatcataaatcttccattgcttttgcgttttttattgtgcagtgttggattttgtaatattattcttcagaacaaactaaaatctcaagaggaagatctattttcagttaaagccttccacaagtaactttaatttttggaatcctaaatcatcgtcttcatttccacctccttcccccaccctccataggaacttacataaagtgtaacaaattttattactccaataaggaagaataaatcccctttcacttattattaaaaa

SEQ ID NO: 234728 - DNA, 571 bp, Homo sapiens
attggactggccttttggcgagtcagcaattcagttctggcccaatctaaatacaccctgggggtctctgcctttctctctggttcttctgtgatgttttcctctactttcttctcccaatatcattgtcctttgggagtacagcaaaaaaggctgagtaccaaatgagactttacaggcagaatgagaattgcacatgtataacttaatttaatccatataggcagaaccaagatcataaagcctctcagtatgacagacgaggccaagagagcataccagtttaaacgaactgcaaaggaacatcatcataaatcttccattgcttttgcgttttttattgtgcartgttggattttgtaatattattcttcagaacaaactaaaatctcaagaggaagatctattttcagttaaagccttccacaagtaactttaatttttggaatcctaaatcatcgtcttcatttccacctccttcccccaccctccataggaacttacataaagtgtaacaaattttattactccaataaggaagaataaatcccctttcacttattattaaaaa

SEQ ID NO: 234729 - DNA, 575 bp, Homo sapiens
atgtgcagggagaaaattactaagttagtgcatcgcactaactgtggtttagataatggttttaggtagtagattgagatggtattaaatgacagagtatcatacaatgggtaagctcttttcacctctcttcgaaacctcctaagtattatcaaggagaatacttcagcttgatgctcctataccttaagctcctctctaatacaagtatgtttacaaaagggagaggcatcattctaaatatttgaggtacacaacaatatcattacaattttatartatgacttttatttttgtcatcttattttaagatttctctttaattagagctaacatatcatttttctttagaataaatgtatttaaaccaataagcaaatagtttaagttaaaagaatattgacaatacaagtgacactccaatatggcaaacctgtggattgttacacaatgcatgaagttggtaagcactggacagttgtattctttgctcttgagaaccaccatctgggttattttgcatggggttatattctgttcctgagtatttttttcattagacttcaaatctaagt

SEQ ID NO: 234730 - DNA, 488 bp, Homo sapiens
ctggtatcatgacaagctaagccagaaaccttgagactagtccactaagagttgcctaaattcaatagttgtaataggttgaaattttgaaattgactaatactgacacaggagtttctgtcaggaataaataatcttcttaaaatacttaattcaaaactcaagaaatatttgggaacttttaaaatatatttcgaacaaggctttgaaatcatatatatgtattataactataatttatacattagtgaatatgtatgacttaatggttaattctacgtgtcaacttggctaagccatggaacacagatatccaatcaaatgccagtctagatgttcttattgaggtactttttaggtaagattatcacttaagtcaatagcctttcagtaaagcagattactttccataatgtagatgtaccttatccaatytgttgcaggcctcaagagaaaaagactgagatcctcagaggaagagggaattc

SEQ ID NO: 234731 - DNA, 547 bp, Homo sapiens
ccagttcccagtctctggtgatagggctattttttcaccctgatacagggaggctacccctttcagataaatttttatggtttgctgcatgcaggaagagacagatgagctagccctctgtgaaactacaatttctccaatgttttccaaataatcagaataccaatctggtatatttgggaatgtcacatctttccctccacagtaagttgacacataaaattattcataacaaatatatcccttggtctctgctgctggtagacagggcactcagyagcagccatagccaagcttaccttggtaagttgaagaccatgttgctgagcccatatataacctctgttcttgccaccatggccactttgtccataagcctattaggaaatggcaggagtgagtggagaaagaagtggacttgtatctactgaatgtgccttcctaacaacttcatttttaaaatcgtcctcttcttaggtcacactgtggtaagcattcatttgacacacaaatatcttcatggtttttttgcctatttagagagctc

SEQ ID NO: 234732 - DNA, 459 bp, Homo sapiens
aagcattttgcatactcctcctagcacaccatcagtacttaacaaatgttaaattccggaaactcccctgactactggagctctgatttctaggtaagttcctaattctttttcaaatgtagtttttttcttatgttacctatccctctgttctctaataaaggcaattttccacccagtagtggttagtactctgaattaacttatctaaatcartgaaaataatagtgaacctctgctttattgtgttatatgggaaacattgttatcactgatttcgttatatcacatttaatccacccagtaattccaagaggacactaggtttcatagagtttaatgagagacaagaaataagagcttggttttatactctcactccttatcataataatcaaactcagtgatatttcacagacctatgagttttataaaatacctgaatctggttgtgtatat

SEQ ID NO: 234733 - DNA, 463 bp, Homo sapiens
gctactcgggaggctgaggcaggagaatcgcttgaacctgggaggcggaggttgcggtgagccgagatcgtgccattgcactccagcctgggcaaaaagagcgaaactccgtctcaaaaaaaaaaaaaaaaaaaaaaaaaargaagcaagaaaagtattaaacctaagagaagcaaaaggttattcaagagtggaaaaggaataatatgggttcatactacttgggtcacttatgcataatatttacctagttaaaataatgtaaatagtgaatattgtttaacaaaattaccttttttttttttgagacagggatctcactctgttgcccaggttggagtgcagtggtgtgatcagagctcactgcaaccttaacttcctgggctcaagggatccttctgcctcagtttcccaagtacctgagactacaggtgcacaccattacacctggctaattaaaaaa

SEQ ID NO: 234734 - DNA, 488 bp, Homo sapiens
gaattccaacttatttccaggatacttcggtccctttaaaaattttctgcttgccccttttactttagctttcacagtattgctgagtagctacccaagcaaagcagggggacatcttgaatcagaggtggaatcygcaatgaaaggatctgtgatatttcaatcccccaagcgaggaaaggggaataatttagtgtaggctgaagggctaaggggaccgtgaaaggacctgttggaggtagataaggtggagaagccagccaaattccagccactgcctgttaggcatacccccaatccctcattgaggcatctacatctcataagcatctgaaattcaacgtgagcaaaactgaactcctcattttgtcttgctcaaaacagactgttaccccatctcagtttatggtaacttcttccttccagttaatcagcccaaacatcaagaagtcgtctttggctccttttgttttttcatatatatattt

SEQ ID NO: 234735 - DNA, 422 bp, Homo sapiens
agaatcacttttaacatctatttttctagcatacaactcaaaactcttccagcctctacctattaaccagttccaaagccgcttccacatgtttaggtatttgttataccagcaccccacttctttgtatcaaaatctgtattagcctggattctccagaaaaacagaaccaatagggtgtagatrtatagatagatctagatacagatatatctttcagttctgtttctctaaaaaatccagaccaatacagacatgtctatagacatagacatacacatcatatataatccaaatatgtctatagatatagataggtatctaaatctatctatatataaccatatatatagaacgattataacaaactgactcacatgattatgcaggctgagaagtcccaagatctgcagctgacaagc

SEQ ID NO: 234736 - DNA, 548 bp, Homo sapiens
aatctgtattagcctggattctccagaaaaacagaaccaatagggtgtagatgtatagatagatctagatacagatatatctttcagttctgtttctctaaaaaatccagaccaatacagacatgtctatagacatagacatacacatcatatataatccaaatatgtctatagatatagataggtatctaaatctatctatatataamcatatatatagaacgattataacaaactgactcacatgattatgcaggctgagaagtcccaagatctgcagctgacaagctgaagacccaagagagtcaatggtatttctagcccaagttagaaggcctgacaactaggaaaaccagtaatgtaagtcttcatctgagtctgaatccgaaagcaggaaaagagcaatgttccagcttgaagagagtcaggcatagagaaagaattctgtcttactcagcctttttgttctatccaggtcttccatggattggatgaggcccatccacattgggaaggcaatctgctttgctgaacctactgattcaaat

SEQ ID NO: 234737 - DNA, 431 bp, Homo sapiens
tgaaaggccagctctgtgaacacaacataagagaagtcaattatgagaagtcaggattggcaggaaacagttgagttgggtaataccaatctggctgtccagagagcagaaggaatcccctttcccagacaacagggactctgaggaaatctggatatccaactgacacactgatcctttctcaaggttggaagcagaccaggatgtcaaacactcactgttgtcattgtaaccttgtagttctgatcttcccttgccaktgatacctgctgtgttgggctcttttgtggctctgtgaactcattctgtgcctggagctctgaagtatgtttaacagtgtgctcccaaaattcatgttcacccagaacctcagaatgtaaccttatgtggaaatagggtctttacagatataattaagataaggaccaaaa

SEQ ID NO: 234738 - DNA, 431 bp, Homo sapiens
tgaaaggccagctctgtgaacacaacataagagaagtcaattatgagaagtcaggattggcaggaaacagttgagttgggtaataccaatctggctgtccagagagcagaaggaatcccctttcccagacaacagggactctgaggaaatctggatatccaactgacacactgatcctttctcaaggttggaagcagaccaggatgtcaaacactcactgttgtcattgtaaccttgtagttctgatcttcccttgccagtgatacctgctgtgttgggctcttttgtggctctgtgaaytcattctgtgcctggagctctgaagtatgtttaacagtgtgctcccaaaattcatgttcacccagaacctcagaatgtaaccttatgtggaaatagggtctttacagatataattaagataaggaccaaaa

SEQ ID NO: 234739 - DNA, 601 bp, Homo sapiens
catgcaaccaaccattaatcttcctctgctctctgcccacttggacaccagagtccaggcagccagtgtagaaaaggcctaaactttatctccctgcctttccttcatctttatctttcctgaggatccatataggaaacagcgagctagagagttaagcctgggcttagatgccccagcagggagcagttagggtgagcagttatttctgatcttttctgtgttctctgcaggtaaaggcctagcatctcatgatttagtgtggtggttctcaaagtatggtcctggcacaagcaacatcaccatcacctgggagcttgttaaaaatgcagaatcttgggccataacccagatatactgaatctgaaattctggggacagagcccattaatctgcatttttaaagccctccaggtgattctgttgcacactaaagttggagaacccctgttcttcactaactattgtttagtggaatamcaaaaaaaaaaaaaaaaaaaaaggagaaagaaattagcactgaagccagtagaatgcagaaggttgggattttcaaaaccagtcttgtagctgtcatatttagaatcacaatatcctatct

SEQ ID NO: 234740 - DNA, 520 bp, Homo sapiens
cctccttgctctttattctctcttgcctgctgccacatgagaagtgtctcttcctcttccaccatcgttgtaagttgcctgaggcctccccagccccgctgaactgtgactcaattaaacctcttttctttataaattacccagtcctgagtacgtctttaaagcagtatgaaaatggactaatacagtcacctaggctggaaaccctgcagactcaactctcttggccctcaggtctgccagggagaaaatggtatgagcatgcaactaaggcaggtgaaagtagcacagggaaaccagactggagaaaccataagtcagctagccatggtagtggwgaccctgtcattgaaggacttttttattttagtagacaaaaatgaagataccactagaaagaccagaacatctgtgtttcagtgacagtcacagggagactactaagctctcctgttttctcactgggacaacaggaagtaggacagactcactggactatataaaaatttcagggaggatc

SEQ ID NO: 234741 - DNA, 475 bp, Homo sapiens
agatctctgggaaagaggtaagacattctcttattggtagaccacatgctcagtcatttaatctaaatgctatatatcccaaggtgaaaaaagagatatcatttatatctgctatcttagaaacacagggaaaataaattcctttattatagtaattcagtaagggtctaataaatagattctatctagattttgtaatacatcaaaaaagaggattaaagaagtagcaccaaccttctgaatcatggtattaattagatttgcctctttccttttaaggraaaacaattctttgcacatcatgaccactcaacattttttaactgaagtattctgagattttaaagaattgttgaaacatgttgcattattcctaactaaccatctcatcagctataaaaaaatcaatcatcaagtttaataaggatattgttgaataagtcttatagttccttgagaaacattttttttgcat

SEQ ID NO: 234742 - DNA, 509 bp, Homo sapiens
ggactctattgcttcctagacctgtgctctgaccccacctggggaaagggtaacagcgtcactgggcaggggctgtgcaggcagctgcagcccctaccgggaaggtagtgaaatggtgagaagcaggtgattctgagcagaggctccaaacccctgctcatactctatcatcccatcagacttcacttacaaaacacaaattcaaaggtaaaaataagaacaccaagactgcagagtactgagcctcaagtgcaggacggggagggaaaggagcccttctgagaactcctaatcaaaccctcattaaactggccctgctcccatgccatcaaaaattctgatatattctccttagttatgacaaagtcactttgtcagaaactagtgtgttcttcaatgtgttggctatcaaaatcatctccagaactttacacataaattcctgggtcacactaaagagrtttctgttggattacagaaatccaacaggaatgttggaagaaattatt

SEQ ID NO: 234743 - DNA, 585 bp, Homo sapiens
gattcaaagaaccatgcagaatctttccctagactttattgttgttatttgccacctttaaatcttagcaatgtggcatcttatctacaattcactgaattaaatgtgaaaagagggggttaaggtatagtgaacacgcagaagacttctaattactgaatggatttataccatccaggatttataccatctcccagctggtgccaggtaaaggtagcagcaatacccagcatcactgttattgaccttcttagctagccaccaagctcactagtgccatattcactttggctgccaaaatataacaggacagcaccactataatttagaatgagcaaagagaggtaatgctcactttattaaataaagttaaaatttaatgaaacaaagtcagagtttgataggcatataagcgggagatagacaacartcaatcagcagcaaacaaagtatatggagataattatgtaaaatcaaaaaagaggcacctggctgggcacggtggctcatgcctgtaatcccagcactttgggagtctgaagtgggtagatcaggagtttgaaaccagcctggccaaaatggtga

SEQ ID NO: 234744 - DNA, 528 bp, Homo sapiens
ttatacatattttgaaggtacatgtcatattttgatacattgtccaattattacatcagggtaattgagatatccatctcctyaaacatttatcttttctttatttaggaaacataatccttttcttctagtgaatttgaaataatataataaattattgttaactgtaatttccctaccatgttatcgaatgctagaacgtattccttctatctaactgtacttttgtacccattaactaacttctctttattccaccttactttccttcctagcctctggtagtcaccattctactctcaaggtccatgagatctacatttttagctcctacatatgagtgacaacatgtgatgtttgtcttcctgtgtctggcttatttcacttagcataatcatctccacttccatccttgttactgcaaatgacaagattttaatcttttttgtggctgaataatattccattatttgttggtccattgataaacatttcatattttgaatagtgctgcagtaaacaggtagc

SEQ ID NO: 234745 - DNA, 597 bp, Homo sapiens
caaactgcagctcccaggcagccacgatcacaacagtaaacaacagatactacacagtgcactgtagtcaataaattacatgagatatttaacactctattataaaatccgctttgcattagataattttgcccaactgtaggctaatgtcagggttctgagcacacttaaggtagactaggctaaactatgctatttggcatattaggtgtattaagtgcattttcaacttatgatagtttcagcttacaatgggttcatcggaaggtaactcccatcttaagtcaaggagcatctgtattcccatagaatatgcatcttacactttaggtagtgttctattccatttggtaagcatagcttctttaaccttttttttggtttgatcctatcaaggaatatctaatttctatggcagcaggcttatttgtttttgtttgtgtgtgtgtgtttttaggaggtttagcagaatacttctggtattctgtcttgcaayggtgacgaatctggctcaccatgtattttaaaacaattaatgtttccaaagtagaactccagggacataacatggtatgatattggattgtatgaatggct

SEQ ID NO: 234746 - DNA, 509 bp, Homo sapiens
acccctggcttgggctcacagcacaaaccctccatcttgctgactacactgagtgattgctgacctgcatctctctggggtggagcccccasgagacaaccaaatggcccatggccacagccactactaagatctcttcctctgctgcctctaagctggggaaggaacataaacactgagattgtcccagagctacagtgggcagcccaggagtgccaagttgtgagctacaggcagcactcaagggggagaggagtccacactttcagagaactgagagagagcatggctgcagctgtgaggaaacataggggagccacataactgagcaagagtctactaactgaacaatatgcctcagtgtcacccactggatcacaccccaaggcttcaacaccaaaaatatctcactaacatacctctgaagctacaggcaagaagtcagcttcaaatagagaccctacacaaagccttggtccagtgaaaacgtccaaaaaagaggtctattg

SEQ ID NO: 234747 - DNA, 471 bp, Homo sapiens
tgtactgaatgtatagatcaatttgagaagaaattacttttctttaaatattgagttttcctatctattgaaatagtrtatctctgaatttatctaaatctcctttaatgtaacataattatcttattacatgtattcctaagtactttgtttgttttgtggattctgtcaatatcatccatttttgtagtatattctctcaactatttgttgctagttgaagtagacatagtgaattgaccctcagttttattaccagccttttccagagtcaccacctgattgccattgtcattcccagaagaggatggacagctaaaatctacatcttgcagattctcaagttagttttatctttatgaatagcttccaccaattatatacatttatgggagattcggaaggcaaaagtaagacagaaatcggctgggcacaatggctcacgcttgtaatcccagcactttgggaggc

SEQ ID NO: 234748 - DNA, 561 bp, Homo sapiens
gtggaaggcacctcttcagtggatggcaggagagagaatgaatgccagcaagcagaggaaatgccagatgcttaygaaaccatcagatcttgtaatgactcactcactatcacaattacacaatgggggaagccgcccccatgattcaattaccttccactgggtccctcctatgacacctagggattatggggattataattcaagatgagatttgggtggggcatagccaaaccatattaggggctattaaaatggtgcaggggagagttgtcaatagtagcagtggagagtaagtgataagtacagaggttcaagagatttttagaagctaaaatcaataggaaactttctagaggtctcacatagtgaaccttagaagtatgggcaaaagcctaagttgatgaggcactcatcttcttctttgttgaaaggtacatggcatttatgtgacatcagcagaggcggctgctgaagaaggtagacaggtaataggccattgtatgccagaagtttcaatcagaaacagaacagccaaagttaaggcaagatagtggccaa

SEQ ID NO: 234749 - DNA, 568 bp, Homo sapiens
agatcttgtaatgactcactcactatcacaattacacaatgggggaagccgcccccatgattcarttaccttccactgggtccctcctatgacacctagggattatggggattataattcaagatgagatttgggtggggcatagccaaaccatattaggggctattaaaatggtgcaggggagagttgtcaatagtagcagtggagagtaagtgataagtacagaggttcaagagatttttagaagctaaaatcaataggaaactttctagaggtctcacatagtgaaccttagaagtatgggcaaaagcctaagttgatgaggcactcatcttcttctttgttgaaaggtacatggcatttatgtgacatcagcagaggcggctgctgaagaaggtagacaggtaataggccattgtatgccagaagtttcaatcagaaacagaacagccaaagttaaggcaagatagtggccaagctaaggcgagcagcaacagctgggatctctcttgggaaggctccttgaatgaagcaactaagttgacattcaatgcaggctgtatatggg

SEQ ID NO: 234750 - DNA, 436 bp, Homo sapiens
gaagtatgggcaaaagcctaagttgatgaggcactcatcttcttctttgttgaaaggtacatggcatttatgtgacatcagcagaggcrgctgctgaagaaggtagacaggtaataggccattgtatgccagaagtttcaatcagaaacagaacagccaaagttaaggcaagatagtggccaagctaaggcgagcagcaacagctgggatctctcttgggaaggctccttgaatgaagcaactaagttgacattcaatgcaggctgtatatggggtggtttagattctcaggcagatctgctcatttgccaaagtaaccctagaaagctaaacctgccaagccacctgacttatctctgtaactgtttgatgtgttctctctctttctaggttgcaacacaatagtcagggttcctcatccctccctcactgaaga

SEQ ID NO: 234751 - DNA, 623 bp, Homo sapiens
cacttttatttgatttttgtgtgtaatgagaggtaggggtctagtttcattcttctaaatatagttacccaattctttggttaaatttattcctaagcattttattttttgtagctattataaatgaggttgctttcttaatttctttttcagatttattgctgttagtgtatagaaatgctgctgatttttgtatgttgattttgtatcctacaactttactaaatttgtgtatcagttctatgagttttttaatggaggctggtttttctaaatataaaagtatgtcatctgcaaacaataataatttgactttttttcaaatttgaatgyctttttatttctttttcttgcctaatttctctgattaggacttctaatactatgttgagtaaaagtggtgaaaccagtgcagtatgatattaactgtgtgattgttatatatagcctttatcatcttaaggtatattgttaacagaatcgaaaacaaaaaccatataattttttcaatagatgctgaaaaagcattcaataaaactcagaaaagtctattttgctcaccattttaccttcagattcttgcataaaacatctcatcatacttattccatcctctgaagagt

SEQ ID NO: 234752 - DNA, 542 bp, Homo sapiens
catcctaactgaattaatgcaggaacagaaaaccaaataccacatgttctcacttayaagtgggagttaaacattgggtacatctggacacaaagataagaaccatagagactggggactacttaaagtgggagaggggaggggagcaagggctgaaaaactacccattggtactatgctcactacctgggtgatgagatcatttgtaccccaaacctcagcatcatgcaatatcgccatgtaacaaacctatatgtataccccctgaaatctaaaataaaacttgaaattgtttttaaaaaattactatccaaaggaaaatatcagtgctatgcatctgaaacctaagaacaatgttttattaaaattacaatgacaaaaataactatctattcagttatttgctctatttgctccctgagaggcacttactataatctcacaggcattcagtgacagtcactttcatttaaaggctccgatttgcttctgttactcagttctatttatgagagaggctactatgtttactacgtgagttt

SEQ ID NO: 234753 - DNA, 542 bp, Homo sapiens
catcctaactgaattaatgcaggaacagaaaaccaaataccacatgttctcacttacaagtgggagttaaacattgggtacatctggacacaaagataagaaccatagagactggggactacttaaagtgggagaggggaggggagcaagggctgaaaaactacccattggtactatgctcactacctgggtgatgagatcatttgtaccccaaacctcagcatcatgcaatatcgccatgtaacaaacctatatgtataccccctgaaatctaaaataaaacttgaaattgtttttaaaaaattactatccaaaggaaaatatcagtgctatgcatctgaaacctaagaacamtgttttattaaaattacaatgacaaaaataactatctattcagttatttgctctatttgctccctgagaggcacttactataatctcacaggcattcagtgacagtcactttcatttaaaggctccgatttgcttctgttactcagttctatttatgagagaggctactatgtttactacgtgagttt

SEQ ID NO: 234754 - DNA, 609 bp, Homo sapiens
tttgcctgccttataagactgttgtgaggttagcattggctaatgtgtatgaaagccctttgcaaacatattaggtattagtattagtgttaatgttgatagaatttataaatatataacacttattgaacatttactatgtgtcagaatactgtgctaagtgctgcccatgagttattgcattgattcttcatgacaatcctacagagataggcattcttgttttctgtctttcatagttagaaggattaaggtgtggagaggttaactcatttccctgagatcgcacagtaagagctggaggcctggatcagaactcgtgctcttaatcactgaagctaaatagtctttccataagactttttttcttccttctcaaagttattgggtttacacttttaaaaataaaatttaaaatatctacatcaaaacctgtttcctttatatgtttctaatgctgattttataccagtattgtacctaaggacayatttggatttacaatcagaaaaaatatcttcaggagcaataatgatgcagaattttcccagaaagcttttgataaaaacagataggatacttaaaatgatctataaccttaacagactc

SEQ ID NO: 234755 - DNA, 400 bp, Homo sapiens
gcttatatactggttagaaccaggctctaggattgagtttgaaggaaggcatcctataagtcagagttgtgctccattctagtccaaaaccacacattgtctttcatcattgccccattggcagatcactgtacccaaggttgacctgacaaattcatacccacctctgcagcctgggtgcagggtgtatctaccagtcctcctgatttagatttaatctgtcatctcacatgaaatmtaattttccctcccaaacaacctgagtttctctgcctgtccaaggccactggcagccttatcgatattcttggagctgtcatttccctcgttcacttctctcaggctagactccctccccttttagtaggcttgtcttagctaagaagtctctgagtaccag

SEQ ID NO: 234756 - DNA, 530 bp, Homo sapiens
ttttttttttaaccttcttaaagcatcctatggtattttggctctagacttgtgacattttgtcttctttcctaaaggcacagggagagttagggagccatctgtgcttgccctcagtactgtgtttaagagataaataagcaattacttctctcctcaggcaagctcttttgtttgtcaggaagtctctgtcttgatcctgtctcagtaaacagaaaaagatatgtagcaattccacagccatagaagactgtggctggcttcagactacattcatagaaatacaacatatggactgattaaagtacaatcccattgtactctgcatatcttcattctgcaaacatttcctatgtattacgcagtggacactgggccacatgttaggattcagggctaaaaagacagtccctacactctagaaactcaggcagaagggagagagacatggtgacaaacaattgtcataggatgatgtaataattttaataggtatttgttcraaaacaggaggtgtgtagggggatgga

SEQ ID NO: 234757 - DNA, 484 bp, Homo sapiens
taaacctctttttctttataaattacccagtctcaggtatgtctttattagcagcatgaggacagactaatacaccatttatagcactttgcttggtaaattcaactcattgttgaataaattgatgaaagaatatttgacccctttcttttacatactttccacataaaaataaatattatttgtgtcatatcattttgcaayataacctaattcaggcccacagcatcgtattttgttccttgtcagtgtccctgtctaagtggtattagtgactctttgctcttttttctcagatctagtatcacagaaacatgagtggcatatttctaaaacacagatctgatccttttaatctctcataataaaagcattcaccaaaggacaaagttcaaatctgttttcattttacaacaggtgcttcacagtcttagcctaatacacagttccaactccacacactctccagaattatttccacgta

SEQ ID NO: 234758 - DNA, 484 bp, Homo sapiens
taaacctctttttctttataaattacccagtctcaggtatgtctttattagcagcatgaggacagactaatacaccatttatagcactttgcttggtaaattcaactcattgttgaataaattgatgaaagaatatttgacccctttcttttacatactttccacataaaaataaatattatttgtgtcatatcattttgcaatataacctaattcaggcccacagcatcgtattttgttccttgtcagtgtccctgtctaagtggtattagtgactctttgctcttttttctcagatctagtatcacagaaacatgagtggcatatttctaaaacayagatctgatccttttaatctctcataataaaagcattcaccaaaggacaaagttcaaatctgttttcattttacaacaggtgcttcacagtcttagcctaatacacagttccaactccacacactctccagaattatttccacgta

SEQ ID NO: 234759 - DNA, 588 bp, Homo sapiens
taaaaattgtacccagaagtgggagaaaacttttaatgtgagagagaaatatttcaaattgtttaacaagaaaaattataacataaataatttctgactcataagtatagtttttagacaaaaatcactagtagtgtataagtgcaaaattttctttctatagctgtwttgttatatatttagaagcttatttaattcagtaacatttaaatatacttccaaacatatataatctaatatatgattttaaaaacatttttattcaatatacaaaactaatcaacacaaaagataaatagtgtattaaaataacaggatttttctattttctttgggtttcttaaaatggaattcaaataaagcatgaactaaagatgtcagtcttattaatcattccgtaagaatcataggtattcttcacatctccaatagaatagagtatcatattttttattccttttttttatgttggcaactaaatacttaagtcatttactttcacctcttttttaagcgtctttaagactgcaagtttagaagacgtaccactataccataaaaaaagattttttgttgttcaattctgta

SEQ ID NO: 234760 - DNA, 595 bp, Homo sapiens
cttcttggtattatttctatttttattgtaattgttatgcaagagtgtgyttggtatgcttttttaaaatttatttagacttgctttattgctgagtatgtggtcagtcttagattatgttctctctgcagataagaagaatgaatattctttggtttttaggtggaatatcctgtaaatgtctattgggttcaattggtcatgtgtcaaatttaagcacagaaatcctttgttagttttctgtcttgatggtctgtctaatgctgtcagcaggttgttgaagtccccccactattattgtgtggctgtctaaatcttttcctaggtcaagttgaagttgttttataaatctaaatgttcccatcttgggtgcatatatatttaggatagttaagtcttgttaaatccaacactctattgttatgtaatgctgctctttgtacttttttactgtggttggtgtacagtctgttttatctgatataacaatatcagttcctcctcttttccatttgaatggtagatctttctccatccctttactttgagctgataagtgtcattacttatgagacgtagcttttaaagacagcaa

SEQ ID NO: 234761 - DNA, 595 bp, Homo sapiens
cttcttggtattatttctatttttattgtaattgttatgcaagagtgtgtttggtatgcttttttaaaatttatttagacttgctttattgctgagtatgtggtcagtcttagattatgttctctctgcagataagaagaatgaatattctttggtttttaggtggaatatcctgtaaatgtctattgggttcaattggtcatgtgtcaaatttaagcacagaaatcctttgttagttttctgtcttgatggtctgtctaatgctgtcagcaggttgttgaagtccccccactattattgtgtggctgtctaaatcttttcctaggtcaagttgaagttgttttataaatctaaatgttcccatcttgggtgcatatatatttaggatagttaagtcttgttaaatccaacactctattgttatgtaatgctgctctttgtacttttttactgtggttggtgtacagtctgttttatctgatataacaatatcagttcctcctcttttccatttgaatggtagatctttctccatccctttactttgagctgataagtgtcattacktatgagacgtagcttttaaagacagcaa

SEQ ID NO: 234762 - DNA, 627 bp, Homo sapiens
tcatttgtttctcgaaaaaactgaaagcagcacatttggaacatacaattgctagaacatacaatttcctggaaatgtatatgggtgatccagcatgtatgagcagtcttaagaaagtatacctttacacttttctttaagagaaaaacctcaacgctcagaaatatatttcaattatattcttgataaaaatgatcatgaatattcattgtttcttctataaccaatatgatgataaatcctttgtatgaattactctaatttattccacacggtaagccattattatccccattttacaaatgaggaaaccaaggcctagggagatttaaggaaccactccaaggtgacagaattaacaagtaaccaagacagaattaaacccaaattaggaaccccagagcctaagcttttagcaacaatgtagacactatytcttcctgttaaattatatctaacctggttaaaccaggctgctatcttccaagccctttatttttgtgtgatgtggactgctttaacagtcataggtcacgtctcaacttaagactggtttatatgcagattacttctacactatagatctttcatctgctctatttaaatgtatgtttggccagatgcagt

SEQ ID NO: 234763 - DNA, 423 bp, Homo sapiens
gaactctccatttctcctggatacatggacatacgtactgagtagaaatgaagagcttgggctgggtgggggagagcattaggaaaaatagcaaatgcatgctgggcttaaaacctagaagatggctgacaggtgcagcaaaccaccatggcacacatttacctatgaaacaaacctgcacatccttcacacgtacttccagaacttaaaaatttaaattaaaaaaagaaaagaaatgagcagctcatctggaacagacagaaatgcagagtctaatcctaracacagtccacacattggtttctggaccaaacattctattactctgccatttctaccaactggtcaggttaaaactttattaaggctggaatttggccctccccagttgcaccatgaagagaaaatatttaaagaaaggtg

SEQ ID NO: 234764 - DNA, 494 bp, Homo sapiens
aatttaatagtaaaatgagtgcatctaataattctttgtatgtacatgctctgtggtcatgcatttcacaaattaaatggcagaatacttgtaggatatgattataatgatccaagtaaatgatcctcaaccaattcaagattatgtgattaagaccccaaggagctaaagcaagcagtttgctttgttaccttttagcttctcgaataacccattttgtgttaatttatgtgaaagggaagaagttagctctttaaaaattaacttagagttttctgtgtcattagtttggaatttgggagtaagtgggttactccttaatttccaaataartctatctgtaacaccttgtccataatctacatttaaatggtttcgaatatgattggcctagcttcctagcagttgttgagtcgagcataatttatgaactttcagagtcatatgcggtatcttcagacatcatcggaaaagaaaattatatgttttagttt

SEQ ID NO: 234765 - DNA, 535 bp, Homo sapiens
tagaaatattctatagtaaggacctaacaggattcacattaaacagaacttgactataaactaatggattcctactacagataataggaaatgtgkttttttttttatttttttgaaacagggtctcactttgccacccaggctggagtggggtgacatgatcatggctcactgcagtctcgactcctgggctgaagtgatcttcccacctcagccttctaagtagctgggattacaggcacacatcaccacacccagctaatttttttgtagagacggggttttgccacattgcccaggctggtctcgaactcctgagctcaagcgatccacctgccttggcctcccaaagtgctgggattacaggcataagccaccatgcctggccaggaaatgtttttaaagactctggttcctacaaaatttgcaaagaattgtgaaaactgtctatccacttctttaaattttaatttttgttggtttatatttcaaatattacattgtcaattaggattattatgaccatagatgacac

SEQ ID NO: 234766 - DNA, 608 bp, Homo sapiens
gttgttttggtgcattcattggatttcctatgtagataatgtcatctgcaaacagagacagttttatttcttacttcccaaactacatgccttttatttctttttcctgcctattgcagtggctaccatgtccagaattatgttaagagtggyaagatcagacactcctggctgttccctatcttagagggaaagtatgatgttggctgtaggtttctggtagatgctctttatgaagtgagaaagttcacctctattcctagtttgctgggagttttgtgtttttttaatcatgaattgttgttagattttatcaaatatttttaactgtcaattaacatgatcatatgattctccttcttcagcctgttcatatggtggattactttataaattttcaaatattgaaccagccgtgcatacctggaataaacctcgcttggttgtgatgtattattgcttttacaccttgatgaatctgatttgcttataatgtattaaggatttttgtgtgaaatacatatggtaatagtactttcagtgagtctgtgaatggtaaatactcctaatcttgtttatcttaaagtaggctctttttgccctcactc

SEQ ID NO: 234767 - DNA, 608 bp, Homo sapiens
gttgttttggtgcattcattggatttcctatgtagataatgtcatctgcaaacagagacagttttatttcttacttcccaaactacatgccttttatttctttttcctgcctattgcagtggctaccatgtccagaattatgttaagagtggtaagatcagacastcctggctgttccctatcttagagggaaagtatgatgttggctgtaggtttctggtagatgctctttatgaagtgagaaagttcacctctattcctagtttgctgggagttttgtgtttttttaatcatgaattgttgttagattttatcaaatatttttaactgtcaattaacatgatcatatgattctccttcttcagcctgttcatatggtggattactttataaattttcaaatattgaaccagccgtgcatacctggaataaacctcgcttggttgtgatgtattattgcttttacaccttgatgaatctgatttgcttataatgtattaaggatttttgtgtgaaatacatatggtaatagtactttcagtgagtctgtgaatggtaaatactcctaatcttgtttatcttaaagtaggctctttttgccctcactc

SEQ ID NO: 234768 - DNA, 531 bp, Homo sapiens
gtggaggttgcagtgagttgagatcacaccactgcactccagcctgggtgacaagagcaaaactccgtctcacaaaaaaaaaaaaaaaaaaaaaaaaaaagaaagaaagaaagaaacaggagaacctaaatcttctctaagacctctctcactgctaagactgtttcctcctcatagtccctgatcactgaaagtccctctaaaataatggtgcctgagggttsacacctttgtcattcatcacatcttctcctcacttcaggccatgcttttttacctatgtcccatctgcaaagtaatcctagaagatatattttttttggtaaaaggcatagaatctctcaggtccatattaactaaacaattgcttcaaagtttgagaaatctcttctagagtttcaacccaggaattttaatcacaagagattcctaaggatatctgaccaactttgttttttaaagtaagcacaaatgcatcatgaatccacatgatcttttacaagaacattctttcttatgggtgaattggga

SEQ ID NO: 234769 - DNA, 618 bp, Homo sapiens
ggcttactgcaacctccgcctcctgggttcaagcaattctcatgcctcagcctcccaagtagctggaattacaggcatgcgaccatacgcagagctaatttttgtatttttagtagagttggggtttccccatgttggacaggctggtctaaaactcctgacctcaagtgatccgcccacctcggcctcccaaagtgctgggattacaggtgcaagccaccatgcctggccagtgattatgcgtcttgtaaacraatttttggggtctaacttttccaaaatttctatctggttttctttcttcccttctaagagtctgtatcttcttccctgccctgggctttattcttttctagagatcctggcagtcattatgaccatgccctttatggcacatccaaggtcagtgttcatgcgtgtcctccctcgttcattccctagtatgggtggatatagctgtgttacatgctgaatcctgctacccactgtgcaatggaggggtcagagtcttgtggaaggagagctggagagccagggagaatacaggacttttcttcaccttgggttgaggcagaactcatgaaaaacaatgaagcaaggaataatttcgttttgcac

SEQ ID NO: 234770 - DNA, 409 bp, Homo sapiens
caccagttcaaaatgatctgatgcttacacttaatcactcaaatagcactttcatatacttaatcttcaaaattataatctgaggcctttttgtgggttggtgaagagccactggctatgaacctgtttgcctttaactaagtaatcttgaaggagacaattcctccagcttcagattcctcctccataaaactaggatgattcctcgagcagctcccaccatgaacaacctatgaatgtttaagacattgactagatagaaactgatcctttctcacaaaatgttttgtgagatgtctcccttattcytgctacgatgtcctgaacatctactatatgccaggtgctgggttaagtacttctcacacactgcctctgatctgcaaaccaacttgctgggcaggaattc

SEQ ID NO: 234771 - DNA, 403 bp, Homo sapiens
taggacatctaactcttgtgtttgacttaatgggattcaaatttgcacrtgtgtggttttctgaatgtggcctacagtttcacttggatcttcatattctttttcatcataatctgtaaaagcagaaaaaaagaccattggaaagaaatgctgtatgaaactttctgaaaatggatagaaccagaaatgatgctgacaggagttttagaaatgaaaaatagagagtattcagaccaaatataagtaaattagcataaatcagcattctctgatttccacgcctacttacccaagttggttgactcaacagctgctaagactacagctgtgtgaatcctccacatttttttttttttttgcatggaaaagtgtttcagtttgtcattgcttcatcatttcgaat

SEQ ID NO: 234772 - DNA, 541 bp, Homo sapiens
tagttttaattagtactcccttttttatcctagtatattttttcattctctctccctgaatgccaayagagtaatccccagctatgaaaacaaatattaaaaaaaataaaacttgtgatgtaagccttatggctttttccatgggtataatcccaacaattaatctcccacttacctagtgtcaagggtagtcaaagctggcacgtttgtaatacaaaaatgacaaagtttttctttttttctctgagaaatgtaaggaaagtgtagaggaaggaaagtactccaggacaagaggatgtaaaaaaaatctcaatggctccttccagtcccactttccagtcctctgagtgtttatccagtgcagtatttgagagagtttggtgagaaagatcacgcactgcatccttcagaatataaacccacacctcaagcttagaggcctgaaaatgaccacgaaaaacacacttttcatggtgctgggtagagggctatcatttcaagaaagcaaacattcctcaccaagtggttgcgacctttatct

SEQ ID NO: 234773 - DNA, 599 bp, Homo sapiens
taatattccttatattgaatgtcaggagaaatatattcatatatattatttccattaatgcattttaataayatatttagaatgttacattatttagcatctcagtagcaataaatagttttttatttctttatctttttaacactttgtaaagaaaatacattttactggtaagttatgcattgcataggggaaaacaaatggacaaaatgaacatatgaaaatcagctatgccttaatgattatattttatgtattttaaatatagtattcctaaatctattttacaaatgatgctcagtaaaatccttaacctctccattgcagcaggttcccagcatgaaggggctaaactaacaaagctaggggcctggcattagccccccagagttactgcaagcaggcctggagtactaaactaatctttggccccctgagatcttccagagacaaagtcaatcgactgaacccaccatattcctctatcaaactcccaagggaatcaaagaagataaaagcaaataccttatccaaagggcagcaacttccaagattgaaggaacatctgcccacacagattagaatgtaccagcatgaga

SEQ ID NO: 234774 - DNA, 554 bp, Homo sapiens
aagaatttcacatagatttttgttgcatcagcccaacaataatacgtcatacttacttatatttcactgcccagagatagttatacagttctgcctaataggtgaatatttaaacaactcatcagaacaaactgaatatttgcaaaatataactgtttcctacaaatgcaatgygacaaaggtgtaaaattatttatttatttcacaaatgcacatggaacaccaaatgtgaactaagatttcaatgacaaaaaaaaaaaaccacacctaccttcccagttcttatatgcaaggaatttaatgtctaattccaattttcattgaataatctagactaagctgtcctaggaaaagggagtaaatgtagatagaaaatgacatattcccttgtactgccccatttatctcatcagtcattctgctttaaaggaattatctggtcacattttatcttctattcacatctgctactttcaggacctttctttccctcctctttctttgagattttcagttgctgctctgccttgtcttctgtgtccattcttagctcc

SEQ ID NO: 234775 - DNA, 554 bp, Homo sapiens
aagaatttcacatagatttttgttgcatcagcccaacaataatacgtcatacttacttatatttcactgcccagagatagttatacagttctgcctaataggtgaatatttaaacaactcatcagaacaaactgaatatttgcaaaatataactgtttcctacaaatgcaatgtgacaaaggtgtaaaattatttatttatttcacaaatgcacatggaacaccaaatgtgaactaagatttcaatgacaaaaaaaaaaaaccacacctaccttcccagttcttatatgcaaggaatttaatgtctaattccaattttcattgaataatctagactaagctgtcctaggaaaagggagtaaatgtagatagaaaatgacatattcccttgtactgccccatttatctcatcagtcattctgctttaaaggwattatctggtcacattttatcttctattcacatctgctactttcaggacctttctttccctcctctttctttgagattttcagttgctgctctgccttgtcttctgtgtccattcttagctcc

SEQ ID NO: 234776 - DNA, 554 bp, Homo sapiens
aagaatttcacatagatttttgttgcatcagcccaacaataatacgtcatacttacttatatttcactgcccagagatagttatacagttctgcctaataggtgaatatttaaacaactcatcagaacaaactgaatatttgcaaaatataactgtttcctacaaatgcaatgtgacaaaggtgtaaaattatttatttatttcacaaatgcacatggaacaccaaatgtgaactaagatttcaatgacaaaaaaaaaaaaccacacctaccttcccagttcttatatgcaaggaatttaatgtctaattccaattttcattgaataatctagactaagctgtcctaggaaaagggagtaaatgtagatagaaaatgacatattcccttgtactgccccatttatctcatcagtcattctgctttaaaggaattatctggtcacattttatcttctattcacatctgctactttcaggaccttkctttccctcctctttctttgagattttcagttgctgctctgccttgtcttctgtgtccattcttagctcc

SEQ ID NO: 234777 - DNA, 568 bp, Homo sapiens
aattccacagaaatacaaaaaaaaaaaaaaaccttcaagtaatattacaaacatgtctatgcacacaaactagaaaacctagaaaaactgataaattcctggaaatacaccttgcagatttgaactaggaagaaattgcaccctgaacagagaaataatgagttccaaaattaaataagttatacaacgcctaccaaccagcaaaaggcttggaccagatatatccacagctgaattctaccagatgtataaagaagagctgcatcatttctrctgaaactattccaaaaacattgagaaggagcaactcctcctcactgattctatgagtcatgcatcattctgatatcaaaacctggcagaacacaacaacaataacaacaaaagaaaacttcaagccagtattcttgatggacataaatccaaaaatcctcagaaacaaacaaacaaacaaaaactagcaaaccaaatccagcagcattctaaaagctcattcaccatgatcaagtaggctttatccctgtgatgcaaggttggttcaacatatgcaaagttagtaaatatgatt

SEQ ID NO: 234778 - DNA, 640 bp, Homo sapiens
aatttgtctaaggagtaaaagtcctcatgataaagtgataacacaaaggaatcattaattcctcaacatgtatttgcttgacgtacrttttgtgatcaaataattatagtgatttcctttgataaaaataataattaccttttgcctttaatttcaaacataagctatgaaccaaatactggagaatttttgcaagtggcataaaaacaatttatgtctgcctatctgctgtgaaagttgtataataaaaagatacaacacataccatgcaaaatttaaatgtgaacaaattaagagcaaagttgtaatggacatttatttttcactgggtttttttaaagcataattattagtgttttttaaaactatagttcagatacttatcaaatattatcagtgggtataccatatttttaaacatttcctagaaaatgaaatgttttatttaaatctttttgtgaataatattcaaaacttcatgccataattttccagagaagttgctgacacttaggtagcacaaactctgacctgttcaggtcacttaatgattatgtttaagggtaatttggggggcaaagttgtagggattcacatttcctgctcagcacataattgcaacagctgaggggttaggagg

SEQ ID NO: 234779 - DNA, 583 bp, Homo sapiens
aacaaaactcatcatatttcattacagcatgtggaaattgtgaagtatctttttcttatatatgttaattactcagtaaaaaattagagtatcgctgaaatctgtataccraagttgaaaaagacaaagaaaacttatagaatgtatgggaggtggtgaaaagataattaaaagattcaaaatcaaaattaatataacagaatttgtattttaagaaaaatgtaaagtgttccaaaaagtatgtctccttctctggcagtaattatcctattgctataatataataaataggttttgagtaactgttttgtggccgatttaagcagcaatccaggtaaacagcacacctggatttccttcagtaagggagcaggaaatgacaatttaatttttcagcaaaaacattttatctttgtttacagacattttgtgtgtgtgtgtgtgtgaatgtttctcacaaattgcaaaggccccccaccagtcttaacaaagaatttatttgaccattaactatatttcatgcgtaacatatattttatgacatgaattatattttgaatttagatttatacattttgttaat

SEQ ID NO: 234780 - DNA, 563 bp, Homo sapiens
tggtttattacagcgaaaggctacacagcaaaatcagcaaagggaaaaggcttatggggcaaagtccagcggacaccacgtacaagtttccaagaaacctctcccattcgagtcgcacagatgagagtacagatggtccccaacttacaattttttgactttacattgggtttatcagagtattatakgcatttgtgacttacaatattttcaacttacaatggttttataaggtgtaacaccactgtaggtcaagaaacatctgtgattcatagcaatgagttgtaacaccagttgtggaatgtcctctagataagttcattagagacttaatgctaactgcttagcacataccacatttccagactttcagaaataaagcaattgtttagaaaaaccatcattgtttttacaaactgtttaggtactacacaccatgcttatcagttagggaatgacgagatccctttcagaaatccaagttcccagacaccagccactggtcaactttgcaaaaagatcattctaatcacagcagtctcaggtctgttatgttaaccctt

SEQ ID NO: 234781 - DNA, 516 bp, Homo sapiens
ctaatgttaaatgatgagttaatgggtgcagcacaccaacatggcacacgtatacatatgtaacaaacctgcacgttgtgcacatgtaccctaaaacttaaagtataaacaaaacaaaacaaaacagtctgattgtggatatagagaaagtgytactggtttggatagaaaatcaaaccaaccacaacattcccttaaaccaaagcctaatccagaacaaggccttaactctcttaaattctgtgaaaactgagagaggacaggaagctgcagatgtttgaagttagcagaggttgtttataacatttaatgaaagaagtcatctccataacataaaagtgtaagatgaagtagcaagtgttaatgggtaagctatagcaacttatctggaaaatttagctaagatcattgttgaaggtggctacactgaacaagagatttttaatatagatgaaaataccttctatggaaggatgccgtgtaaaactttcataactagagagaagtcaatgcctg

SEQ ID NO: 234782 - DNA, 562 bp, Homo sapiens
caaattgtaaagatgtttagtgagctatgatattcaaatccagggaaaagaaaaaagatagatttagagaactaatatcttacagttcagatatttagaaaataataatttttattcaaaacctttttccrtaggctaagtcattcacagtatatttattggaaaactatgttagtgttattgcttcattagaatgacttcatttcaattactagcttttcatcagttgtagagtatcaattttataatcacatttcaggagaagataaactgtgtatgaaatgtactttgatacacaggcattaatatataaaaagggtcagtatattcaaagaaatatgttaagtgtcttcctatatttgacaatgtctacatagatgtattaaattttgtgagtactatggatctcatataaaatatatttgacttagggcctgtcgggggatggtgggctaggggagggataacattaggagaaatacctaatgtagatgatgggttgatgggtgcagcaaaccaccatagcaagtgtatacctatgtaacaaacctgcacgtcctgc

SEQ ID NO: 234783 - DNA, 562 bp, Homo sapiens
caaattgtaaagatgtttagtgagctatgatattcaaatccagggaaaagaaaaaagatagatttagagaactaatatcttacagttcagatatttagaaaataataatttttattcaaaacctttttccataggctaagtcattcacagtatatttattggaaaactatgttagtgttattgcttcattagaatgacttcatttcaattactagcttttcatcagttgtagagtatcaattttataatcacatttcaggagaagataaactgtgtatgaaatgtactttgatacacaggcattaatatataaaaagggtcagtatattcaaagaaatatgktaagtgtcttcctatatttgacaatgtctacatagatgtattaaattttgtgagtactatggatctcatataaaatatatttgacttagggcctgtcgggggatggtgggctaggggagggataacattaggagaaatacctaatgtagatgatgggttgatgggtgcagcaaaccaccatagcaagtgtatacctatgtaacaaacctgcacgtcctgc

SEQ ID NO: 234784 - DNA, 454 bp, Homo sapiens
atgaattctaaaaagcagatgtaaagtctctcctgaaaatgttggcatagtaaataaaaataaagttcataattataaaagttctcttgtctttctcaacattgactcccatagtttgctttttctttgatatcttttttcccacaaagatctaagatactgttcatttgcttatgtttttcccaactctgatactttattttacatgctgccttcacacacatcttgacaccccaagccctgattgagtaggagttgatcagtattttgttgttgtgtcttcacaaattctgtaagwgatctagtactttcgtttccattgtaataaaatacctgctttatcttagaatattgggataatggttaatggacatttcaagaaacattagcaccttggatttagaatgctgtacaaggaagaaaacacttgtaattttaattattttgtcattgt

SEQ ID NO: 234785 - DNA, 539 bp, Homo sapiens
caattgttctgggaatctctacttttggctatttcttctgtggctaataaagcaatttttgaatatagtagcctaaaattctctccacatagaaagaagatgcttagatttgctggttcaaattatgctggacttctagaaatgcatttttaacaggcttggtttacaaagggaattgctgttaatcccagagcacatttgttttcccaaaatagcatcatttaaatcaagaatcaggagcataatgaaaaacagagagaagtgggatagaagatgctgcttargaatatgtcttgaacaacatatgtttgcttatataggatatgtctgatgtggatttagaatcactaaggcagagattgaatttacaaaagccagggcataaggaaggaaacataaccaggaatctacttgaaaaggttattggaacaagttcactatatgtaacagaaaaatggaaaggaagacagtatttgaagtggcagataggattcaaccaggctcacatagaattctctcagaaaactaaatgaaaggaa

SEQ ID NO: 234786 - DNA, 372 bp, Homo sapiens
tatatatgtgtgtctacacatatgggttatatgtatgtgtttaaccatacttggctacaaaactgaaatttgtccttcaagttagacccttacccttagtgtgccccaaatctacctgcagcctcctgtggaaaaatggccagagttttctctaggatgttatatagctagtgatgaatttttgcttcaaagaccttagcttactgcatattgtctggtaagctgyttatcattcctttcaaaatatagtttcaaacactgtcaatgaagtatttctaatgtgaccgtaaagtatgaaagaaaagatccttttcagttattgttaatctatactgggagggtccgggtgacaaatgcagaacaataacatgc

SEQ ID NO: 234787 - DNA, 582 bp, Homo sapiens
acaaattcttaagaaaatctgtatcagaattagaattcaaagaatggcgatactccttgatttctgattatttagcattttgtttttgtcttggtgtgcatagagctagttgagggatttggaactatgggtaaagtaaatctggcagccaaaattaaggcctgttaacgaaatgcttactgatataggtggcactctaaccccatgctaaaagatgtcaaaattaagaatttattggataaagtcttttctgaaaacaattttcttggtcactataattggtaaaatgtcaaccagtcaatagtctgggaacaaagttagatgtacagatgaatctctatacagatagagtgaggcaaggttctagctctcttggagctgggttatggkggccctggctaacatgaaatccgtggtgctcttttagctacagcctgtggtagaaactaggtcaaatattcagcccagctcaaatttccctgttagtcttaggaaggacaacattagtactaaatgacttagactccctgaccacagctaatccagcaggagtttacctttggcttgaaagtgcccaattag

SEQ ID NO: 234788 - DNA, 420 bp, Homo sapiens
gaagaagaaaactttttctctgtctccctttttctccctcattccctgtcatttctctttgacaagaaaaaggatatcaccaatccttatatatctccaaatggggctttggatagaagatggggcttattagtcttatcaaagtccaccttagtgaagagcaaatagacattttcattggaagaatgcagacatagggctaggagttggagtgggaagctaccagatgaaagtggcactgtatttttcattagaagaaygcagaaaagggctcccagatggaagtggcactgtatcttctcacattgatgcctgaaatccttgtgccccaatggactgtatctgatgtatttagacctattggatttttacctgcccatactgattccatagacaagactatgagttggactatcatca

SEQ ID NO: 234789 - DNA, 428 bp, Homo sapiens
agaataactgtgtgggtaaatatttttatttttttcaaatttttaatagataattcattctctgaaatgaaaacaaagtattatactatcaaatttatarcatatgtagaagtggttgacaataatattacaaaagtgggaatataacctaaaaatatgattatttttgtgtttattctgcctgtgattcattgagtttcttggatctgtgaccttctaatttttattaaatttggcaagttttgtcaattatttctttgaatactttcttctgtcctttctatttacccttctctgtgcctccaattgtttttctattagcatgtttaacatttccccacacgtaattgatactcagctcatttttcttccattatttttatttatcccctctgtatttaattttggattatttctttgcctaggtc

SEQ ID NO: 234790 - DNA, 586 bp, Homo sapiens
cattgatgggggtaatggcaactctgtactctcttcacaatttttctgtaaatctaaaatggctctaaaattaacagtttattttgaaaaagagagaacaggtaaacttataaagacaggaacaaaactaaaattaatacagactgttcattagacagtaggaaaaaatgcttgaagagctgaaagaagaaaaccataaacttaaaattttatattcatcaaaaatgkactccagatccttcctattacatatagaaacacgacataaatgttaactatcagtcttcctatcagcattgtactgatgaactaactcatcaaacaaaaagaaatatgagctattaggttgggaaagtgtgatagattgaatttcagcccaaattctttctcccctctttatatctgttcttttcgtatacaagtttcaagtactgtccaagtctgggcaggaaattttactcagcccttaatgttgtgattcatagctttggccacgtgctgtttgtaaacaagacacaaatagagacttcgcacatacttagataattggacttgtttacctttgcacctctactttcaccatgag

SEQ ID NO: 234791 - DNA, 552 bp, Homo sapiens
aatatctacaaagtaggctgggtgtggtggctcatgcctgtaattccaacactttgggaggctgaggcaggcagatcacgaggtcaggagatcgagaccatcttggccaatatggtgaaaccctgtctgtactaaaaagacaagaattagctgggcgtggtggcgtgcacctgtagtcccagctactcaggaggctgaggcaggagaatcacttgaacctgggaggcagaggctgcagtgagacaagatcatgccatggcactacagcctgggtgagagagtgagaccctgtctcaaaaaaaaaaaaaaaaaaaaaaaagaaaatatccggaaagtgaaaatggagaggaaatagaaatgtatttttaatgaacattttgatacaaatttcatcatttaatgattcaccaatttcttacattaatttgaattaagcattkaattcaaagagacaggagcattcattgatatatatgggcttttaaaaattccatcctttataaatagacaaggtttgggctacaaaaattatatttttatcatggaaaaatt

SEQ ID NO: 234792 - DNA, 620 bp, Homo sapiens
taaatgggtcttttgttcattaatcctgtgagactgcaagaaattcatctctagttgtttttacctcctatctatcacagcttcaaaatttaacaaaaaatatggaaggataaattttctctgtgaatgattctccagtgctccaattttgtgactcttcactgtggraccatcaaaaattcctcttgtttttctgtctttcataaggatcctgtctgtcagtaggtttgtcctatttcagattccaaaactgcattccggtttagaatgaccccaaggggatgcaaattcccagctcacagctaaaaacttatttcctatctgtaatttttattcctatagtcctcattgcttccaccgttcactgaatcttttttatttttatttttccctatcaaataaatatatattgacaaataaaaattgtttatatttaagatgtatcatgcgatgttttgatacgtgtatacattgtgaagtgactaccacactcaagctcattaatgtatccattacctcatatagttaccttttgtgtgtgtggtgagaacagttaagatctattctcttagtaaatttcaagtttacagtgcattgttattaactgtaatcattatgct

SEQ ID NO: 234793 - DNA, 596 bp, Homo sapiens
catcctttgattttataatttaagatttctcctttttcaaacaccatttggtgagatagaaagcattagagataaaacacatatattaatctatgtggtggctctttcytctgcttaaagccattctctataatcctcataaagatctaacacccccactccagtatttcctatgtttctttagttctccattatttcctatttgtgcagtatcccacatgctcagggtgttataaaaggctgcaaattaatgaacatgtgctgcctttgttcggggattttatattataaatttgtttttatttattctacacatggttggttgtagtttgtcctccaaaatgaaatgaaattggtattattacagaaagatgactgagtcatattatgatagagactaatttctctgacctagtagactaaaagttttctgtagtctcttaatgagactccttttatagcatttgtatctttgtgcttaattattcttagtataaatatttagaaattgatgcatcgttttacttctatggcatgtcataaagctattttttcaaaaaaattgttttgtgtataatgtcatgcgaaaaagaatt

SEQ ID NO: 234794 - DNA, 590 bp, Homo sapiens
ccaaacaaaatgtgaaagaaagaatccctgacttcttatggcttataatctaataaaatggtcatacagttcacaataaccattataaatgcataaactatattggatgttgaaagtaatatgtactaggagaaaaatcacattaataaaaaaataaagatcaaattaaaaggaattgtgaaaaaatgagtttgaaattgagcgggtgtgttagttcttactgtggtaacaaacgactttaacaaactcaatgatttgcaacagaaatatttctcactctcacttgatatgatctgcagcastggtaggtcagctctggctctgctccacatgtctggttaatttcagtattcagatagaaagaatgccattttttaagaaaaggaagaaacataaatacaatattcctacagtcaggtgaggtggatatataatgggagcaacactctcatacatagtcttatctaatactctaatataccagaatctactatcttggtaacagatattaagtttccttccttttttattcaacatcattcgccccatcactaagaaagatacaaagatacctcaatattcacttaatg

SEQ ID NO: 234795 - DNA, 535 bp, Homo sapiens
tgtatgttgcatgaagacaaagaccatgtcagtcttgaccaatattgtattacagttctttaagagarcaaatgagtgaatggaagaatggaagtctcttccagccctgttacaatatacatctgttattttgtgtgtccagcattcactccacatttatctcatagcaggacttctgttttcccaagggactttcaagtttcctactctcagcccactatttaattagtcttgttagatgatgctgtgttaactcattagtacactccatctctctggctacagaacctaagtctcagggatttggggaaaacttttaggctggaatttttggttgtaagaaaacctgtgcattttaaaggttaccatatggtaaattccttgctgagaatgaagttaacatagactaagaaaaagcaaccagaaatagagagtgcacacacacacacacacacacacacacacacacactcaaagcaagagaaagaaaaagatagagagagagcattctggtgaatttggcttgttttggcca

SEQ ID NO: 234796 - DNA, 535 bp, Homo sapiens
tgtatgttgcatgaagacaaagaccatgtcagtcttgaccaatattgtattacagttctttaagagagcaaatgagtgaatggaagaatggaartctcttccagccctgttacaatatacatctgttattttgtgtgtccagcattcactccacatttatctcatagcaggacttctgttttcccaagggactttcaagtttcctactctcagcccactatttaattagtcttgttagatgatgctgtgttaactcattagtacactccatctctctggctacagaacctaagtctcagggatttggggaaaacttttaggctggaatttttggttgtaagaaaacctgtgcattttaaaggttaccatatggtaaattccttgctgagaatgaagttaacatagactaagaaaaagcaaccagaaatagagagtgcacacacacacacacacacacacacacacacacactcaaagcaagagaaagaaaaagatagagagagagcattctggtgaatttggcttgttttggcca

SEQ ID NO: 234797 - DNA, 535 bp, Homo sapiens
tgtatgttgcatgaagacaaagaccatgtcagtcttgaccaatattgtattacagttctttaagagagcaaatgagtgaatggaagaatggaagtctcttccagccctgttacaatatacatctgttattttgtgtgtccagcattcactccacatttatctcatagcaggacttctgttttcccaagggactttcaagtttcctactctcagcccactatttaattagtcttgttagrtgatgctgtgttaactcattagtacactccatctctctggctacagaacctaagtctcagggatttggggaaaacttttaggctggaatttttggttgtaagaaaacctgtgcattttaaaggttaccatatggtaaattccttgctgagaatgaagttaacatagactaagaaaaagcaaccagaaatagagagtgcacacacacacacacacacacacacacacacacactcaaagcaagagaaagaaaaagatagagagagagcattctggtgaatttggcttgttttggcca

SEQ ID NO: 234798 - DNA, 634 bp, Homo sapiens
caccctttggggaaaagaaatatgctgtcctattacaactatgctactgctatgcctttaaaccaaatggtgcatatctctgtaaagcctgtgggagttactgattatgaatctcaagggctcttgttcgaaactggcttctttgaagtgcaggacatacacacacacagcagtcgtagatattggatggagaccctgctgagtggttaagtctctgcttgctgtgtctaaaccatttggcmggcacaacaatcttcttttccttcacaagcttaaatttgtcccatttggcaaaccaatagtagacctccatcaatgcataaaatcatccaatcatgtttattggcaactaaaaatattatacaagggtgtgaatcaatttagtatcttgtacttcacttagaatcattgaagacctatctatcttttagtgtatattgaaaagattatatatcaaggaaaggtgaacatcctaactaataatatctagtatattttggcaataaataatttcaaagcctagtatatcttatttggccctatgcatttctgtatagaaggtaggaaagtcaccctgagcagtgatgcaaaaattattgtttatttttgaaataaatagaaacctgaccatatt

SEQ ID NO: 234799 - DNA, 427 bp, Homo sapiens
tgtttaaaaataagttatctgcattatattagtcagggtactccagagaaacaaaacatatatatatatayatacacacacacacacatacacacacacacatatatatacatatatacacacatatatatacacacatatatacccacacatatatatatatggaaatagatttaaggaattatcttatgggattctagtaagcgacaagttggaaatctataaaggcagtcttgcaggctggaggctcagagaagagttgatgctacagtcataagcctgaaggcagtatagtgacagaatttcttcttccttgttgaacctcattctctcttaaggcctgcaagtgattgtctgaggcccacccaaattatgaagtgtaatctactttattcaaagtctatggatttaaatgtcaatcatgtcc

SEQ ID NO: 234800 - DNA, 467 bp, Homo sapiens
tatatataaaactgtaaagtataattataamtggtcatacatctttcttaatagtaaaaaacaagcattgttccataaaaggccattatttgttttaaatatctttaaaaaaaaacaacttagaggacaggaaaaaagcatattaatttttgcacgtatatataaaagggaagaaaataaacagaaaagcaataactatttgaagaaaaagacagtaacgggggattttcaataaggactttgttaaataaatttttctatttttaactgttgcgggtacatattaggtgcatatatttatggggtacatgagatactttaatacaggcatgcaatgtgtaacattcacatcatggaaaatggggtatccatcccctcaagcattcatcttttgcgttatgattatactcttttagttatttttgaatgtactataaattattgttgccatagtcaccctgttatgc

SEQ ID NO: 234801 - DNA, 452 bp, Homo sapiens
accatatttattaagtgacagacctcagacgttattctgtactacttatttctatctttcttttaggactatcaggcaaaattcagcccccaatatttcacataggttcttttctatttttcctaagtggcagccggtctgagaaataaagggacagagtacaaaagagagaaattttaaagctgggtgtccgggggagacatcacatgtcagtaggttccgtcatgctccacaagccccaaaaccagcaagtttttattagtgattttcaaaaggggagggartgtacgaatagggtgtgagtcacagagatcacatgcttcacaaggtaataagatatcacaaggtaaatggaggcagggtgagatcacaggaccggggcaaaattaaaattgctaatgaagtttcgagcacacattgtcattgataacatctcatgagcagacagggtt

SEQ ID NO: 234802 - DNA, 452 bp, Homo sapiens
accatatttattaagtgacagacctcagacgttattctgtactacttatttctatctttcttttaggactatcaggcaaaattcagcccccaatatttcacataggttcttttctatttttcctaagtggcagccggtctgagaaataaagggacagagtacaaaagagagaaattttaaagctgggtgtccgggggagacatcacatgtcagtaggttccgtcatgctccacaagccccaaaaccagcaagtttttattagtgattttcaaaaggggagggagtgtacgaatagggtgtgagtcacagagatcacatgcttcacaaggtaataagatatcacaaggtaaatggaggcagggtgagaycacaggaccggggcaaaattaaaattgctaatgaagtttcgagcacacattgtcattgataacatctcatgagcagacagggtt

SEQ ID NO: 234803 - DNA, 586 bp, Homo sapiens
ccaggcttatttcatcccacagctacgaccataaaagacagccgcccccaaagcggccattttcgaggcctcccctcagggacacattctctttctcagggatgttccttgctgaggaaaataattcagtgacatttctcccatttgcttttgaaagaagagaaatacagctctgttggcctggctcaccagcagtcagagtttacggttatctctcttgttccctgaacatattgttcaaacacacatgctctacaaacaatctgtgcagttaacacaattatcacagggtcctgagatgacagacatcctcctcagcttaygaagatgacaggattaagagattaaagtaaagacaggcatagaaaatcacaagggtattgattggggaagtggtaagtgtccatgaaatcttcacaatttatgttcagagactgcagtaatgacaggcataagaaattataaaagtattaatttggggaactaacaaatgtccatgaaatcttcacaatttacgttcttctgccatggcttcaggcggtccctccgttcggggtccctgactttccgcaacataggacctaac

SEQ ID NO: 234804 - DNA, 521 bp, Homo sapiens
accccatttctacttaaaaaatacaaaaaaaattagctgggcatggtggtatgcacctgtaatcccagctactcaggaggctgaggcaggagaaccgcttgaacctgggaggcagaggttgcagtgagctgagatcgcaccattgcactccagactgggggacaagaacaagactytgtctcaaaaaaaaaaaaaaaagggaccaagattatgatggtacagaaacaaacatagcagattatttaggaaaattcagattgtatatgtgatctagaacagtgtttctcaaaaaaatgtgcatatttctcctggtgatcttgttaacatgaaaactctgattcagtagttctggggtatggcctgggcctggggttctgcattttttttattctgcatttctaacaagctctcagatcatacacatcttactggtctgtagacctctgagtagcaatcatagaatacagcaatgttcactgattgtggagacactttctcaaaagagtttctgcagcgcagga

SEQ ID NO: 234805 - DNA, 588 bp, Homo sapiens
ccgggcgcagtggctcacgcctgtaatcccagcactttgggaggccaaggcgggtggatcacctgaggtcaggagttcgagaccagcctggccaacactttgaaaccccatttctacttaaaaaatacaaaaaaaattagctgggcatggtggtatgcacctgtaatcccagctactcaggaggctgaggcaggagaaccgcttgaacctgggaggcagaggttgcagtgagctgagatcgcaccattgcactccagactgggggacaagaacaagactctgtctcaaaaaaaaaaaaaaaagggaccaagattatgatggtacagaaacaaacatagcagattatttaggaaaattcagattgtatatgtgatctagaacagygtttctcaaaaaaatgtgcatatttctcctggtgatcttgttaacatgaaaactctgattcagtagttctggggtatggcctgggcctggggttctgcattttttttattctgcatttctaacaagctctcagatcatacacatcttactggtctgtagacctctgagtagcaatcatagaatacagcaatgttcactgattgt

SEQ ID NO: 234806 - DNA, 546 bp, Homo sapiens
ctgaatttttatataacaaaggtttacaaaattctgagtgcagtaaatcagaagagagtatgtttttaaattactgaatagaaaaaatatataacctttgaaattaaagtggaatttttaaagtagagaatttcccattttaaacaaatttttgaaacttatatgattgaccaggcatagtggctcacacctgtaagactagcacttaggaggctgaggtgggagaatccctggtgctcaagagttcaagaccagcctgggcaatgccataggaagactctgtctttacccaaaaaawaagagaaaaaaattaaaaagaaaattaggccaggtgcagcgactcacgcctgtaatctcaacactttggaaggccaaagcatgtggatcacttgaggccagaagttagactctagcccagccaaaacaataaaaccccatctctacctaaaatacaaaaatgagctggacatggtggtgcatgtctgtaatcccggctactcaggaggctgaggcatgagaatcacttgaatgcgggaggcagagatt

SEQ ID NO: 234807 - DNA, 493 bp, Homo sapiens
ttcgttaaaactaagatagaaggaaaatgaggacattgtaaatcagtccctgaaagtactctcttgcaagactcatgttgatcctaggttcctccctctccccagycccactccatcaccagttacctagtcctctgaaattttccttctcaatatacttagaatctttctcctctgctctctatcatcactaccaaaactcacttccttgtcttttctctcacccagactattaaaatatattaactcaccaccctgatcattcctggtcagctagaagaaatgacctggaatcctaagtcaaaatatttaataaaacagcaccaattaaacctcagttttaaaacttttaacatatactctttcaattcttgagaacagcagttgaaacaaaaataaaaacgtaaagtttgttcctgtcacaaaaaaaacttgggaccataacgtccccctgccccctaactaggaaggtgctgagaggccaaagaatgac

SEQ ID NO: 234808 - DNA, 583 bp, Homo sapiens
ttaagtttgatttggattaattcaacttgtgggaagaatctttagatgaagctgttatttttatttaaataaatttatgctttctactagaatggactggaattgagaagatcaatgatttgcagcatttaaattgggtaaaatattcaaaagaatcacagagataacttatttaataagttttccctttgaggaaaaaaagttaaagataagtactctgaagaaaggcagaaaagatactacttgtgaaaattggggtgaaatattttgacatttcaatacaaaagtattagacttttaaaaccaccaattaaatggaattagcccagagcttacaaaatacaagagttacaaagaaaatctttttcaaactatattatagtctacagagaaatgycaactgaaggtgtcaacaatttcaaatgtattcacaacaacacaacacaagaaaaatgcagcacctccaatttgcgattagatgaaaaaaaaactgtagtacttaagtggaagaagccagacacagaaggctacatgatgtatgattccatttacataacattctggaaaaggcaaaattaaagag

SEQ ID NO: 234809 - DNA, 467 bp, Homo sapiens
attttaagtaatctagagatgatttaaagtatacgggaggatttgagtaggttatatgcaaatactatgcyattttatatggggggcctgagcttctgtggatttgggtattcaagggggtcctggaacaaatccccccactgccagatatcaaaggtgactgtatataaccagtagaaaatacatatttaacctagtgctgtcaaattgctttctagaacagtggtaccaatcattaaatatattctttaatataatctgcattcaaaatatataatttcattaaaatatactaaatatattgagtagaagttgccagatacatagataatttaagtctactttgaaggtttataataaaaataaagcagttggcctagatcatcctaaagcattgccctgggactatagctagtatgtaagcacatcagaaatcagaatgtgaacacagcatttatcattccttc

SEQ ID NO: 234810 - DNA, 607 bp, Homo sapiens
tctaatcttatgtctaacaatatcagatattttaagcatccacttctatgctttgtgagaaaaacctaagtccaagatgggataaatttcattaggtaatattttcttcatgcaatcagtggatcagagtgtcatatatttttggtgccctattgtaccaaacacagagttaggtacatatttctatgaataattgttgattggttgtttttaaaaaataactgtcaaactatctactggactttcatttttcattcaaagaactttaaaataaatcttgaagatgccctcacaatgaaaacatcattaagaacagacttttcttataagacccaatagaatgtcttgaacatagttccagacacagctaaattcaataaatatattaacaaaatgctgtrattattataggttaagataaagataaatgtcaccccttcttttatgtattgagtatatatttcccaattagttgactgaaattaattatagagggaaagaggagggtttgccaaaggtatatacatcttcctatgattagattaaaatcagacattaaatcgattctgtaatactgaaatagataacagacacaaaactttagaag

SEQ ID NO: 234811 - DNA, 566 bp, Homo sapiens
gaccgccatgccaggacttacttccccatgggactggggaacagctattcttcaggccccttgcctgccagcccctcccacggcacctgcctggctgccccacagggttgtgtgcatggtgcagcctccactgcccagcctggatgctttcctgcacstgattatgtttccagcaacctaggaaggctttggatcccccagcacacctggaacccgaatccaagggtccagaggatagagcagcaagaaaatcctagcacccagggctggagcacacagctaaggagtgcctagctgagatctgtggccagcaccagagcaggagaggagcccacagtctcagagcatgaagggggtgagatgcgcaagtttgtgggctgtagtgtgagtggggcatgcctcactccacagggctggcccacaaagggtgtggcctatctccctgctgtggcctctgctcaaagagcaccccagcccagaacacctcacaaaagaaatgcaggcacagtgccagtggttgcagggggctctgacaaggctcgggagcagacctggtgaggaggtta

SEQ ID NO: 234812 - DNA, 566 bp, Homo sapiens
gaccgccatgccaggacttacttccccatgggactggggaacagctattcttcaggccccttgcctgccagcccctcccacggcacctgcctggctgccccacagggttgtgtgcatggtgcagcctccactgcccagcctggatgctttcctgcacctgattatgtttccagcaacctaggaaggctttggatcccccagcacacctggaacccgaatccaagggtccagaggatagagcagcaagaaaatccyagcacccagggctggagcacacagctaaggagtgcctagctgagatctgtggccagcaccagagcaggagaggagcccacagtctcagagcatgaagggggtgagatgcgcaagtttgtgggctgtagtgtgagtggggcatgcctcactccacagggctggcccacaaagggtgtggcctatctccctgctgtggcctctgctcaaagagcaccccagcccagaacacctcacaaaagaaatgcaggcacagtgccagtggttgcagggggctctgacaaggctcgggagcagacctggtgaggaggtta

SEQ ID NO: 234813 - DNA, 566 bp, Homo sapiens
gaccgccatgccaggacttacttccccatgggactggggaacagctattcttcaggccccttgcctgccagcccctcccacggcacctgcctggctgccccacagggttgtgtgcatggtgcagcctccactgcccagcctggatgctttcctgcacctgattatgtttccagcaacctaggaaggctttggatcccccagcacacctggaacccgaatccaagggtccagaggatagagcagcaagaaaatcctagcacccagggctggagcacacagctaaggagtgcctagctgagatctgtggccagcaccagagcaggagaggagcccacagtctcagagcatgaagggggtgagatgckcaagtttgtgggctgtagtgtgagtggggcatgcctcactccacagggctggcccacaaagggtgtggcctatctccctgctgtggcctctgctcaaagagcaccccagcccagaacacctcacaaaagaaatgcaggcacagtgccagtggttgcagggggctctgacaaggctcgggagcagacctggtgaggaggtta

SEQ ID NO: 234814 - DNA, 566 bp, Homo sapiens
gaccgccatgccaggacttacttccccatgggactggggaacagctattcttcaggccccttgcctgccagcccctcccacggcacctgcctggctgccccacagggttgtgtgcatggtgcagcctccactgcccagcctggatgctttcctgcacctgattatgtttccagcaacctaggaaggctttggatcccccagcacacctggaacccgaatccaagggtccagaggatagagcagcaagaaaatcctagcacccagggctggagcacacagctaaggagtgcctagctgagatctgtggccagcaccagagcaggagaggagcccacagtctcagagcatgaagggggtgagatgcgcaagtttgtgggctgtagtgtgagtggggcatgcctcactccacagggctggcccacaaagggtgtggcctatctccctgctgtggcctctgctcaaagagcaccccagcccagaacacctcacaaaagaaatgcaggcacagtgccagtggtygcagggggctctgacaaggctcgggagcagacctggtgaggaggtta

SEQ ID NO: 234815 - DNA, 562 bp, Homo sapiens
tggaaccccatcaggccagcagcagacctctcagcagaattggaagagataatttatgaaagcaagaaggtccctgaggaggtgagtagmacttataacccaatttctggtggaagatttgttctcaaggaggaaggagctatttttctacttagatgcaatagaagaatagaaggttgaccgaaagaacatgtgtctttaacaaacacttatgaggtgcctatcactgtcttaggagctttacaaatgcctgtcactgtcttaggagctttacaaacatcaacaatacaatgctccttacaaccttgtgaggtaatattattattcccatactacagatgagaaaacaaaggcacagtcacgtaactaggaaggaacagagacaatttgatcccaagcagtctggctacagagttcacaattatagcccttagttctatgtctcactttaaggagaggttcaatcatataaattaatttgtccatttatttaaatagtttataagacaataaaggatggcataccagtgattaatacaaggacttggagggagaagaaaaa

SEQ ID NO: 234816 - DNA, 562 bp, Homo sapiens
tggaaccccatcaggccagcagcagacctctcagcagaattggaagagataatttatgaaagcaagaaggtccctgaggaggtgagtagcacttataacccaatttctggtggaagatttgttctcaaggaggaaggagctatttttctacttagatgcaatagaagaatagaaggttgaccgaaagaacatgtgtctttaacaaacacttatgaggtgcctatcactgtcttaggagctttacaaatgcctgtcactgtcttaggagctttacaaacatcaacaatacaatgctccttacaaccttgtgaggtaatattattattcccatactacagatgagaaaacaaaggcacagtcacgtaactaggaaggaacagagacaatytgatcccaagcagtctggctacagagttcacaattatagcccttagttctatgtctcactttaaggagaggttcaatcatataaattaatttgtccatttatttaaatagtttataagacaataaaggatggcataccagtgattaatacaaggacttggagggagaagaaaaa

SEQ ID NO: 234817 - DNA, 622 bp, Homo sapiens
aatttttaagttagaaagttctcacctattttattttctgtgtgatatgaggagratacatcacctgtagagggggaaaaattgtttaggattatctcctctaatcctccaactctctcataaaagtggcactatcattccctctactcagcaatgcaaaatgaggctcagagaaattaaggaactctcccaaagccacttagtcaatatttggcagtgtgacagcagaaacttgttcttaattggtatgctctttggaacaatctgaaattcctacatgtagccaggtagcatatgactgcaaagtgggaagtaaattctaaaggtcatagggtacaaatttgaggcctaagaatatttaccatagctgtatgtatagatttctaatgttttatgagcattagccagtctctgaaaatgcaaatcacctgtagatgaaaagacgcctctccaactcccagccaaaagaagagtacaccagtgctgttagtttccactgctcaatttagcctttcaaatacactcaatttgtataaggtagcatagatgatttgcagtggtttcaatgtgaagctaacattaaaggtgatttgaagctgttcatcatttcttactgcaaggt

SEQ ID NO: 234818 - DNA, 622 bp, Homo sapiens
aatttttaagttagaaagttctcacctattttattttctgtgtgatatgaggagaatacatcacctgtagagggggaaaaattgtttaggattatctcctctaatcctccaactctctcataaaagtggcactatcattccctctactcagcaatgcaaaatgaggctcagagaaattaaggaactctcccaaagccacttagtcaatatttggcagtgtgacagcagaaacttgttcttaattggtatgctctttggaacaatctgaaattcctacatgtagccaggtagcatatgactgcaaagtgggaagtaaattctaaaggtcatagggtacaaatttgaggcctaagaatatttaccatagctgtatgtatagatttctaatgttttatgagcattagccagtctctgaaaatgcaaatcacctgtagatgaaaagacgcctctccaactcccagccaaaagaagagtacaccagtgctgttagtttccactgctcaatttagcctttcaaatacactcaatttgtataaggtagcatagatgatttgyagtggtttcaatgtgaagctaacattaaaggtgatttgaagctgttcatcatttcttactgcaaggt

SEQ ID NO: 234819 - DNA, 587 bp, Homo sapiens
taggagaattttggattttggatttttggatctgggatgttcaacctgttgtgatgctcactgtggaaaatgcatgtctgaaaatttttaaatgcataatctcaataagaaaaaaacattaactttctgatgtctatttgtcgggatggacatagacacaaaattttaaaagtttgtttatggcgayttttatagttcaatagattttcaaaatatgtagcttaatatatgagtatatcttttatgcattttctgtttaatcattttttccgaagggacttaatcactctaaaattacaaaccttcacttaaattgttatcttattctttcattattatcttcgtccatttgtcctgctgtaacaaaatacatgagaatgggtaatttataaaaaacagaaacttatttctcacatttctgaaggcggggaagttcaagatcaagaagccagctggttcagtgtctcctgaggacccattccttatagaaggcactgtcaaggtgtcctcacatagtgcaaggtagaaggaaaattggcctaagctagctccctttagccattttacaaggcactaatccattcatg

SEQ ID NO: 234820 - DNA, 611 bp, Homo sapiens
ttgtaaatcacttaaagactaaacaaaaatcgataatatgcctgataatttttagactgcaaaagcccatatttgatacctggaaaaaaattcaaatatatcatttatctccatttacacccatatctcagggatacctataagcaaatttgctattccattaagatgacagagattagaaaacagtctgcaggcgatttattctgccacatgctgttctgagttacatgctcatgagattgctttgcaaatacattaaaattcactcatttctgccaattattttcttggattgctaaatygttatctacattattcatatctgtctgtatcccaaggatgctacttgaaatggcagaaagtataaagccccaaaacaatacagtaccaaacttttatacagaattaaagagacgaggctgtttgtacccagatcttgccaagttgtcccaagggctgaattgattaagatggtagctgacttgttacctctttatgacataccagtgggacatgatccaccagttaaggagttatggtatagatcatatttggcattgtattaatatattgtcacttaaagagaaaatcttctcctaaaagaagaaatc

SEQ ID NO: 234821 - DNA, 454 bp, Homo sapiens
tattataagccacaaaatgatgggtagattgaaactaagaggcaagaagtgtaactaaaacaatatgcttccctttcccggtgataacagtactaggataaaatgtcacttcctatctttaagttaactaataccgagaccaagtaaaataagctagttgtatgctccaggaattacctgctcccagatgataagactgtgagcaaatacacatggtacttaccaagagtaacaacttactcaccaagamttgttttgacagcctcacttctcagcaacaaccaattccaaagttacagcttcagtagaaactgtcaattccaattcctttcctattctgtaagctccaccttaaaaccacccagttcatggcctaaaacttaaaaaatatgctccccctgacttttatcttttgagcttttgctaagactctctcaaaacagagtttttcctt

SEQ ID NO: 234822 - DNA, 454 bp, Homo sapiens
tattataagccacaaaatgatgggtagattgaaactaagaggcaagaagtgtaactaaaacaatatgcttccctttcccggtgataacagtactaggataaaatgtcacttcctatctttaagttaactaataccgagaccaagtaaaataagctagttgtatgctccaggaattacctgctcccagatgataagactgtgagcaaatacacatggtacttaccaagagtaacaacttactcaccaagaattgttttgacagcctcacttctcagcaacaaccaattccaaagttacagcttcagtagaaactgtcaattccaattcctttcctattctgtaagctccaccttaaaaccacccagttcatggcctaaaacttaaaaaatatgctccccctgacttttatcttttgagcttttgckaagactctctcaaaacagagtttttcctt

SEQ ID NO: 234823 - DNA, 542 bp, Homo sapiens
agcaaatacacatggtacttaccaagagtaacaacttactcaccaagaattgttttgacagcctcacttctcagcaacaaccaattccaaagttacagcttcagtagaaactgtcaattccaattcctttcctattctgtaagctccaccttaaaaccacccagttcatggcctaaaacttaaaaaatatgctccccctgacttttatcttttgagcttttgctaagactctctcaaaacagagtttttccttattgcaaaaggcttaataaacttagcttgtctcaatcccacgtttttctggtagtccttggggactttaagtcaacaacagaattcataagccaatcagaagctgtagaacctgtgctttaaacggctaaagctctgggactaatgtaaaaggtatttatttgaaggcagaaatgcctctttgcayattatgtttgccatctgagaacatctttttcttgcaatgtatttattactgggctgacgactaataaccacgtacttgttcaagcagttttggagagaatatg

SEQ ID NO: 234824 - DNA, 547 bp, Homo sapiens
cctcatacattttgtccaaatcatttatatttactcttcaagacacacacagcaggtaccatatttcatcaaatcaaagacacaattaactgtaatattcactattattttatgttatatttaaaaacaaaaatactgccagttgaaccatgatgcaccattaaatttaataccatgcctcaactttaagatgtattctggttttggagatggtaaaatattttccagaaaatgtgtgtattagaatccataaaatacaacattcctgttgggagcaggccccccaaaatctggccataaactggycccaaaactggccataaataaaatctctgcagcactgtaacatgttcataatggccctaacgaccaagctggaagcttgtgggtttaagggaatgagggcaaggaacacctggtctgcccagggtggaaaaccccttaaaggcattcttaagccacaaacaatagcatgagcgatctgtgccttaaggacatgcttctgctgcagttaaccagcccaacctattcctttaattcggcccat

SEQ ID NO: 234825 - DNA, 542 bp, Homo sapiens
gggaactcccatttataaaactataagatcttctgagacttattcaccacaagaacagtatgggggaaactgcccccatgagtcaattatctccctctggccccacccttgacatgtgggattattacaattcaaggtgagatttgggtgaggacrtagccaaaccttatcactagatctcagaaaaatcaaaaaattttattcaaggccacgctacttcttaatgaactacaattctgatgtgcccattcacactatatcattttcactctacttcctatccacaagaacatcaacaattaatgagtaaatgtatccttaactcttgtaccaatatattcagagaagttttaggttcacagcaaaatttagcaaaaattacaaattctcatatgcactccctgcccccacacatatatttcctgtacattatcaatagctcccatgagaatgatacatttgttacaactggtgaacctatactgacacatcataattacccaaagtacataggttacattggggttcactcttagtgacat

SEQ ID NO: 234826 - DNA, 573 bp, Homo sapiens
ttgtaaataaatctgctataaacatccatgtgcaggtttttgtacatacataagttttcaactaaattgggtaaaagcagggagtatgactgctggatagtgtaagagtatgcttagttttgtaagaaattgacaaactgtcttccagagtagctgcactattttgcattcccaccagcaattaatgagagctgttggtccacaccctcaccagcatttagtgtgggtcagtgttctggattctgtttattctaatatgtctgtagtagtatctcacttctgttttaatttttatttccctsatgacatatgatgttgagcaacttttcacatgtttatttgtcatctgtatgccttctttgttgaagtctctggtaaggtctttggcccacttttaatcaggtttgttgtgttcttattgtagattctcaagagttctttgtatattttggataacagtcctttatcagatgtgtcttttgcaaatattcaaatattttctcccagtctgaggcttgttttctcattctcttgacatcatctttttcagagaagggcttttaaattgtagtg

SEQ ID NO: 234827 - DNA, 367 bp, Homo sapiens
tcatagtttttgcctttttttttttaatggaatcttgctcttgttgcccaggctggaatacaatggcatgattttggctcactgcaatctccacctcctgggttcaagagattctcctgcctcagcctcacgagtagttgggattacaggagcctgccaccatacccagccaatttttctatttttagtagagacagcatttcrccatattggccaggctggtctcgaactcttgacctagtgatccgaccaccttggcctcccaaagtgctgggattataggcatgagtcactgcacccagccagtttttgcattttgcacttacgtctatgatccactttgagttgatttttgtgaaggatgtaa

SEQ ID NO: 234828 - DNA, 585 bp, Homo sapiens
caagtggaatttattgcaggaatgcaagcttgatctatcagttcaactcgtagatacatacacaggagaaytgaaaacgtatatttacacacaaacttctacacagatgttcataatagcattatttacaatagccccaaggtggaaacaactcaaatggtcatcagctgatgaactgacaaataaaatgtggtttatgcatacaatgaaatattcagttataaacagaaatgaaatactggggtacatgctacaaaacaggtgaaatctaataaattcttcattaaagtatgagctgcatttgtccatagattagaggtatgacttttggatattctaatttgaaaaagagcccacttcattctatctaaccagcagtggatgcttgatgctggatatcacagttgagcaaggagctgtacatttttggatatttggaagtctaagtatgacttccaggttttgatccagggataggagacttttatcccaattgcatagggaggagttctaacaacattccatccatattgcaaaacatgtagttgtaacctttttgaataaaggaataacttaagaaaaagt

SEQ ID NO: 234829 - DNA, 585 bp, Homo sapiens
caagtggaatttattgcaggaatgcaagcttgatctatcagttcaactcgtagatacatacacaggagaattgaaaacgtatatttacacacaaacttctacacagatgttcataatagcattatttacaatagccccaaggtggaaacaactcaaatggtcatcagctgatgaactgacaaataaaatgtggtttatgcatacaatgaaatattcagttataaacagaaatgaaatactggggtacatgctacaaaacaggtgaaatctaataaattcttcattaaagtatgagctgcatttgtccatagattagaggtatgacttttggatattctaatttgaaaaagagcccacttcattctatctaaccagcagtggatgcttgatgctggatatcacagttgagcaaggagctgtacatttttggatatttggaagtctaagtatgacttccaggttttgatccagggataggagacttttatcccaattgcatagggaggagttctaacaacattccatccatattgcaaaacatgtagttgtaacctttttgaataaargaataacttaagaaaaagt

SEQ ID NO: 234830 - DNA, 536 bp, Homo sapiens
attagcgtagctctcttcatccatcctcacagggtacaaaaagattgggaaatcctgcttcaggcccacactgcttctctagctgaagggaggcaaagcagaaataaatctccaacttccctgaagcatacggaaggcttccctatgcattttgtgacaaactgaaaattagttrttgataatatttctttcacatgaaagtacagaacgtactctattctccatcccagaccccactccaaacaaaatctgttatttgaagtccacataaataaccgactctggtctatttatgtaactattgttgtaatcagcattacacattcttagcttacaaccaaggtgtctttatgtttcatcaataaaaactaagatggaatgttcacacagaaagtgttttctttcatctgctacactgacagggaattgtcatactcagcgttatttcctagtcatttattactgacttgtctgaatgaataggtacctggctctatctaagtttaaagaaaactgtatctacattttttaaagaa

SEQ ID NO: 234831 - DNA, 479 bp, Homo sapiens
ttcctagactttctcctgggcagcttcccaaagtgccttttcagacatgtttttatttttgtcttcattttgagacagggtctcactctatggcccaggctggactgcagtggcatgatcatggctcactgcaacctcgacctcctaggctcaagagatcctcctgcctcagcctcccaaaaagctgggaacataggcgctcaccaccaagcccagwtaattttttttttttttggattgttttgtagacatgaagtctcactatgttgccaggctggtctcaaactcctgggctcaagtgatcctcccacctcagcctcccaaagtgctgggattgctggcatgagtcactgcacccagcccccgatgtctttttctaatcacctcctctcttgaagctttaatactataagtatatcagatatctctttgtgtacatctgttacctatacctgtgctttatacataaaaagaatgtg

SEQ ID NO: 234832 - DNA, 511 bp, Homo sapiens
agcttcccaaagtgccttttcagacatgtttttatttttgtcttcattttgagacagggtctcactctatggcccaggctggactgcagtggcatgatcatggctcactgcaacctcgacctcctaggctcaagagatcctcctgcctcagcctcccaaaaagctgggaacataggcgctcaccaccaagcccagataattttttttttttttggattgttttgtagacatgaagtctcactatgttgccaggctggtctcaaactcctgggctcaagtgatcctcccacctcagcctcccaaagtgctgggattgctggcatgagtcactgcacccagcccccgatgtctttttctaatcacctcctctcttgaagctttaatactataagtatatcagatatctctttgtgtacatctgttacctatacctgtgctttatacataaaaagaatgtgacttttttgctccmaaagaaccaattttcatcaccttgagggggaagggagca

SEQ ID NO: 234833 - DNA, 599 bp, Homo sapiens
tcttataaacagagcccgtatgtttattttttacattatctttcttatgtccaataaaatactttccctttaataatcctgtaacattgcattcaaataattttgaaatgaaataggtatcataaaactttagaatgagaagtgaagygataaaggaataatttcttatatcttgggacagctgtgatgtaagcatttttataatcccatcttacagatgaggaaacaaagctaaagataaagtaaatcatctagggtcacatgtaaaccacatggaagacccaaaactggaacccagttttatgaaaggagcaatggtttatatggggcataataactatccaatgaaatacaaagcaattccctgggtcatcactgcaccccctgcactgctatgacaattcggcagttagaaccttggagaaataaatgccaccacttaaaggaagtcactcatgtaaccatgagcattcattaaggcctgaggctctttctctagtaacatcagccttctatagtcaatcctaaatttgtatattgttttcattgatgctggaataactttgggttgattgaattcctctggataaacaaaatat

SEQ ID NO: 234834 - DNA, 599 bp, Homo sapiens
tcttataaacagagcccgtatgtttattttttacattatctttcttatgtccaataaaatactttccctttaataatcctgtaacattgcattcaaataattttgaaatgaaataggtatcataaaactttagaatgagaagtgaagtgataaaggaataatttcttatatcttgggacagctgtgatgtaagcatttttataatcccatcttacagatgaggaaacaaagctaaagrtaaagtaaatcatctagggtcacatgtaaaccacatggaagacccaaaactggaacccagttttatgaaaggagcaatggtttatatggggcataataactatccaatgaaatacaaagcaattccctgggtcatcactgcaccccctgcactgctatgacaattcggcagttagaaccttggagaaataaatgccaccacttaaaggaagtcactcatgtaaccatgagcattcattaaggcctgaggctctttctctagtaacatcagccttctatagtcaatcctaaatttgtatattgttttcattgatgctggaataactttgggttgattgaattcctctggataaacaaaatat

SEQ ID NO: 234835 - DNA, 642 bp, Homo sapiens
  misc_feature (1)...(642): n = A,T,C or G
nnnnnnnnnnnnnnnnnnnnnnttttttgttgaaattgtcttttttgtgcaaagctgacaaattttagaccaaattgctgttggttatgttttcagaaaggtagatcttaataatgacatttaatttttctttttgaacaaatgaatgagttttaagaatgtttytacaaagacagagtcctatttaaattttacatgaaagcaaactctaatttaaaaaataataccttaatgatgtgtaattacttgcttgagaataagttgcgtcttaattagtcccctttatcttcatatgcacctgaaattgttattgtgaataaagcattcaaagcacagtccatttttaaaacaatactctgcagtataggaaactgaaaaggtttgggttaggaaggcaaggtaatttatgacaaatcattagtttctaatggcatttgatccagtttttgagggaattgataaaataattaacagagtttggaaaactttccattgcaaataacatagaattatggtcatgagccacttagcgacattttggtcaatgatggactgcatatacaataatggtcttataagattataatatcgtatttttactgtatcttctctatgtttagatacacaaataccactgtgtta

SEQ ID NO: 234836 - DNA, 485 bp, Homo sapiens
tagataattccattattttataatctaatctttaccctcctttcaatgctgacttgactacattaatgacattatgtaaaataatgtagaatagaaatatgagaatgagcatcttgacattttctggattttaaagtaaatattttaacattttgtaattgaatagggtagttgcagtaggccttcggtggacacatgtcatgtaagtatgttcctttctgtttatcacttgttaagggttttttttttttttagtaagaaaataacactgcattttgtcaaatgattttctgcatctaatgaggttattagtatttttccatttttcaaaataagctaacatgttaaattgcatttatagttttccttttcttttcttttttttttcttttgatgggaagtacatttaaaacatacctagcatacytggaataaactcaaatgcgtcataatataaactctctccccatctgccccctgttttt

SEQ ID NO: 234837 - DNA, 450 bp, Homo sapiens
gctggtaccaattcttctttgaatgtctaatagaatttagctgtgaatctgtctggacctggactttttttttgttgggaatttttttactaccactttaatcttgctgcttattattgatctgttcagagattctatatcttcctagtttaatctaggagagttgtrtatttccaggaatttatctggatcctctaggttttctagtttatgagcataaaggtgttcatagtagctttgaataagcttttgtatttctttggtatcagtaattgtggtgtcagtaatcccatttcatttctaattgagcttatttggatcctctctcctcttttcttggttagtcttgcttatggtctatcaattttattgtcttttcaaagaaccagctttttgtttcatttgtctttggtattattttgttgctgatgtttccatttcatttagttc

SEQ ID NO: 234838 - DNA, 631 bp, Homo sapiens
acatcattactgactaaagtccataatgtactcagatgtccttagtttttatcgactctctttctttcactttacaattttgtccaggatgaatgtgttctgtgtccctttgatatacattcatcaatgtggttagtytgttttgagcgcttccttacatgactatatatgtgatccaagtttctttcctatatagttttccttctccttaaacaatttcttctaatacttacagcaaacctaggtttgctagtgattaattcctttagtttttatttgtctgagaaactctttattttctccttcacttttgaaggataaatgttacaggttacagaattctataattgtgttgcttttcttcaatactgtaaatactacattccactttctttctttttttttttccatggtttccagtaagtatactggatttctgcaattgtttctctgtaggaaagatgtttccccctgcccttgcttctttcaagagattcatttttgtctttttttttaatttagtttaaccaccatatgccttggtaggggtgtgtgtgtgtatgcatgttggtgtttatcctgtatagtgttctctgaactgttttgaacatgtgttttgatgtctgtcatt

SEQ ID NO: 234839 - DNA, 631 bp, Homo sapiens
acatcattactgactaaagtccataatgtactcagatgtccttagtttttatcgactctctttctttcactttacaattttgtccaggatgaatgtgttctgtgtccctttgatatacattcatcaatgtggttagtctgttttgagcgcttccttacatgactatatatgtgatccaagtttctttcctatatagttttccttctccttaaacaatttcttctaatacttacagcaaacctaggtttgctagtgattaattccttyagtttttatttgtctgagaaactctttattttctccttcacttttgaaggataaatgttacaggttacagaattctataattgtgttgcttttcttcaatactgtaaatactacattccactttctttctttttttttttccatggtttccagtaagtatactggatttctgcaattgtttctctgtaggaaagatgtttccccctgcccttgcttctttcaagagattcatttttgtctttttttttaatttagtttaaccaccatatgccttggtaggggtgtgtgtgtgtatgcatgttggtgtttatcctgtatagtgttctctgaactgttttgaacatgtgttttgatgtctgtcatt

SEQ ID NO: 234840 - DNA, 569 bp, Homo sapiens
aaagagttgggtcatcctctccaacgcaaacaaaacatatttataatactgtcattgcatttataaacgtattctgtaacagaaaaaaaaagatttgtccagtatacagctaactgtacatttagtagaatagcagtttttatttttaaaattaattttgctttttgttcttctattattttccccaaatacagtaagagatgtaacttggctataattaaaaatgaacaaataatagctcattcaattcatttcattaattcatctttttgtgcttttaggtcaatttgctgctttcagtgctgcaagatattacagaagtttatgtagtgacagttagttatactaaatgttatatttcaaagtagctaattgaaaacttctatagactggacttcaaatatttttgcatcagctaaactgtggaatttacacaattgaaaaaactagacttatctgacactttgctgatttaagaaaagaagacwaatatattttcaaaagcttagcccttctaccaaatgactgacaagtagttcttcaagtgcggtgcagggataggaaccctc

SEQ ID NO: 234841 - DNA, 600 bp, Homo sapiens
taattaattagaactaacatgaccaacaccctcctcctcttcccacccgcttcccacaccccctcaaaaaagagagatgaaaaaataataataataaaatacacaggctgtttgagatttctaatacctttctggcaaaggtccctggaaaggtgactttaaatggtcatgggcctttagaaataaggacaagtagccagtgagacataatcagctgctgttgaaaatagaatgatatgacatagatactattgtgcaattgttgcacaaaacaattcaacagatggcccatcacaaaaataagcaatttcattgttctttttaagtgccttctattactgtccatgaataatcaaaaggcactgcagtcacttccagcacagccagcctctgctaaccttcacaaacacaaatattccttctaccaaaaaaaaaaaaaacaaaaaaaaccacctttcaagaatggctartatagtcccttaaaaaaataacttgtgacaatacaagaaatgcataatacagatgaaactattccatccaagttaggtttattgatcttttctaaaattattttttaaattcacaattacgaagtaagct

SEQ ID NO: 234842 - DNA, 579 bp, Homo sapiens
tgtgttaattttacttttagcacagggtaaggaaggcttttcctttaaatgtccttgggaaaacaaataaaaaaaaatattttaacaccagataaggacaagcatagtcagaaagaaaattccagaatatcccacaaagatgaaacgagcacaagaaaacgtgraacagacccagcacatattaggcagtatgtattataactcttcccacgaaagtccagtggaaaagggcctagcacagattatgtctgaaagacaaaattctcattccaccctaatccatgagcctctgggaggcagactgaaggaatttacgcctgccctcttgtgagagtggaaaaaactcaaaccgtttttcctctgctctcacacgacaaccatcaacacagaagatgtctgtgacaaaatgtgtatgagtttctccccatgcaccaagcaaacaatcacttctgcagcagacatcagatgagtgttctccaattcatttctgacactatctagagatactgtaatatcccacagattgaaggcccaatcccacaagactgcccaccacttctgatgccaattacaagctcc

SEQ ID NO: 234843 - DNA, 525 bp, Homo sapiens
caggtcaatgttttatgttgcattggcatttcctttaaagcatttggtcttcamcaaaccagattatgttaaagtacatttgttttaaaccaaacttttttgtcaacacttataatttcgtgttatattttatgactaattatactttttttgctttataatgttgcaattgatatttaataaaattgtatccattgttagtagtagcctgcaaaatgttttcttaaaacaaattgctaaaatacattaaatataaaaaggctgtgcattttcagcacaattattgaatagttaaatagtaggaatttgaatttagtcatggtttaaaattgatgatgaactctttaggtcttctgtaaaacactaagaaattgcagtgtcatatagtgaccatattagtaattaatattaaatattttgaaattagtaaagcaaattgattttatgttcagcctgttaccttaggcctaatgattatggttctttatgcagtgtttctttttgcccaaataatataacaaaaac

SEQ ID NO: 234844 - DNA, 525 bp, Homo sapiens
caggtcaatgttttatgttgcattggcatttcctttaaagcatttggtcttcaacaaaccagattatgttaaagtacatttgttttaaaccaaacttttttgtcaacacttataatttcgtgttatattttatgactaattatactttttttgctttataatgttgcaattgatatttaataaaattgtatccattgttagtagtagcctgcaaaatsttttcttaaaacaaattgctaaaatacattaaatataaaaaggctgtgcattttcagcacaattattgaatagttaaatagtaggaatttgaatttagtcatggtttaaaattgatgatgaactctttaggtcttctgtaaaacactaagaaattgcagtgtcatatagtgaccatattagtaattaatattaaatattttgaaattagtaaagcaaattgattttatgttcagcctgttaccttaggcctaatgattatggttctttatgcagtgtttctttttgcccaaataatataacaaaaac

SEQ ID NO: 234845 - DNA, 525 bp, Homo sapiens
caggtcaatgttttatgttgcattggcatttcctttaaagcatttggtcttcaacaaaccagattatgttaaagtacatttgttttaaaccaaacttttttgtcaacacttataatttcgtgttatattttatgactaattatactttttttgctttataatgttgcaattgatatttaataaaattgtatccattgttagtagtagcctgcaaaatgttttcttaaaacaaattgctaaaatacattaaatataaaaaggctgtgcattttcagcacaattattgaatagttaaatagtaggaatttgaatttagtcatggtttaaaattgatgatgaactctttaggtcttctgtaaaacactaagaaattgcrgtgtcatatagtgaccatattagtaattaatattaaatattttgaaattagtaaagcaaattgattttatgttcagcctgttaccttaggcctaatgattatggttctttatgcagtgtttctttttgcccaaataatataacaaaaac

SEQ ID NO: 234846 - DNA, 565 bp, Homo sapiens
aagctttccaaatacactgaacccacaactcaaaagagtaggggaaggagttagtcacagacaactggagactcaaaggatggagctcaaaggatgtactgaggaggccagtgcttttaaaaacaggttcttcatgctcaggttaggggctgctggtcaacacttgagattttcattcatttgccagggggaaatagtaatttgtacatttcttaacagctcccagatgactattaagtataagcaaacctgagaattattatcaaayatcctacccatccacaacacagtgattaagttttctgattcatctatgtttaataatttaatacaatctactctggaaagaacaaagtacattttactcagaaaaatttctgttaaaaacgtataagtttagaagaaagaggtccctataagaaaaatattttgtttgaacttcttgtataatacgtaaagacttgaaggaacaagcaaaacatttagcggaagaaatcatgaaagctgtgtaacaaaacatgatattgtaccgatggcttaataattgagatccctttatacactg

SEQ ID NO: 234847 - DNA, 550 bp, Homo sapiens
gcttcccttgaggttagaaggtaatactcatgtatgcctattccctagagcgggtgggtactcataacactgtaacagctctcccaagaagtttctcctctacttctctgacactttttaaaaaatatctttgatttctggttgaaggctcaaagaatcatgtaacagtttcttggatccatttctttagtaaacctgtatatgtagggaagaatatatctcatactcaggtgtcttatcatctattggtgcctcaatagaaactaggacaaacagaaagaagtctgttctaagatccttttagaaatataggcacgaataagcagacacattatagaacctaggtgaaagcagcgttactatatatcacaccagggtttaaatatttcttaaatttatgtcatttccsccgtctatatttacccatatctttgttcaaaagtttataatctgtaacaagtactgttgaagtcacttgtctctgatttgggttttatcccagttaaatctgttcttcaaaatacctttggattggttgatctgaaatgca

SEQ ID NO: 234848 - DNA, 569 bp, Homo sapiens
actctctttatttttagctaactttcacattatttattattggaagctttttwaaatttcttgcaatatgctgcaacagtaggtttaacctttgtattttgcatgcaatttctctctctctttttttttcttctcagctgtactatgtctagatactcctgtgcctgtctgcctgcctttctctcttctagccgccctccctcccttcctgctttccttccttttcagctcactcaacgtgggaagccctgtgaatcttctctctgcctaaacagaatgtgaaacttccctgggactgttgggttctgtatcctccctgctctggtggggcttgaaggtacagctgggagctctcatctttgtgcaattttgttagtagtctgggacggtggaggaactcttgcaagctcagggcacagcccgttctgcaggcgatgcccttgggtgtccgcttattgccccgatttaggaaggagtttgttctctgccagatacaaggacccctgtgtgggctcctcccatccccatggaagcagagaaagagggggatggggcaggggggagttgcc

SEQ ID NO: 234849 - DNA, 569 bp, Homo sapiens
actctctttatttttagctaactttcacattatttattattggaagcttttttaaatttcttgcaatatgctgcaacagtaggtttaacctttgtrttttgcatgcaatttctctctctctttttttttcttctcagctgtactatgtctagatactcctgtgcctgtctgcctgcctttctctcttctagccgccctccctcccttcctgctttccttccttttcagctcactcaacgtgggaagccctgtgaatcttctctctgcctaaacagaatgtgaaacttccctgggactgttgggttctgtatcctccctgctctggtggggcttgaaggtacagctgggagctctcatctttgtgcaattttgttagtagtctgggacggtggaggaactcttgcaagctcagggcacagcccgttctgcaggcgatgcccttgggtgtccgcttattgccccgatttaggaaggagtttgttctctgccagatacaaggacccctgtgtgggctcctcccatccccatggaagcagagaaagagggggatggggcaggggggagttgcc

SEQ ID NO: 234850 - DNA, 569 bp, Homo sapiens
actctctttatttttagctaactttcacattatttattattggaagcttttttaaatttcttgcaatatgctgcaacagtaggtttaacctttgtattttgcaygcaatttctctctctctttttttttcttctcagctgtactatgtctagatactcctgtgcctgtctgcctgcctttctctcttctagccgccctccctcccttcctgctttccttccttttcagctcactcaacgtgggaagccctgtgaatcttctctctgcctaaacagaatgtgaaacttccctgggactgttgggttctgtatcctccctgctctggtggggcttgaaggtacagctgggagctctcatctttgtgcaattttgttagtagtctgggacggtggaggaactcttgcaagctcagggcacagcccgttctgcaggcgatgcccttgggtgtccgcttattgccccgatttaggaaggagtttgttctctgccagatacaaggacccctgtgtgggctcctcccatccccatggaagcagagaaagagggggatggggcaggggggagttgcc

SEQ ID NO: 234851 - DNA, 569 bp, Homo sapiens
actctctttatttttagctaactttcacattatttattattggaagcttttttaaatttcttgcaatatgctgcaacagtaggtttaacctttgtattttgcatgcaatttctctctctctttttttttcttctcagctgtactatgtctagatactcctgtgcctgtctgcctgcctttctctcttctagccgccctccctcccttcctgctttccttccttttcagctcactcaacgtgggaagccctgtgaatcttctctctgcctaaacagaatgtgaaacttccctgggactgttgggttctgtatcctccctgctctggtggggcttgaaggtacagctggragctctcatctttgtgcaattttgttagtagtctgggacggtggaggaactcttgcaagctcagggcacagcccgttctgcaggcgatgcccttgggtgtccgcttattgccccgatttaggaaggagtttgttctctgccagatacaaggacccctgtgtgggctcctcccatccccatggaagcagagaaagagggggatggggcaggggggagttgcc

SEQ ID NO: 234852 - DNA, 277 bp, Homo sapiens
cctgtctctccacctctcgcctgagttcctgtctctccacctctcgcctgagttcctgtctctccaccatctctcacctgagttcctgtctctccacctctcgcctgagttcctgtctctccaccatctctcacctgagttcctgtctctccacctctcgcctgagttcctgtctytccaccatctctcacttgagttcctgtctctccacctctcgcctgagttcctatctctccaccatctctcacttgagttcctgtctctccacctctcgcct

SEQ ID NO: 234853 - DNA, 277 bp, Homo sapiens
cctgtctctccacctctcgcctgagttcctgtctctccacctctcgcctgagttcctgtctctccaccatctctcacctgagttcctgtctctccacctctcgcctgagttcctgtctctccaccatctctcacctgagttcctgtctctccacctctcgcctgagttcctgtctctccaccatctctcacytgagttcctgtctctccacctctcgcctgagttcctatctctccaccatctctcacttgagttcctgtctctccacctctcgcct

SEQ ID NO: 234854 - DNA, 277 bp, Homo sapiens
cctgtctctccacctctcgcctgagttcctgtctctccacctctcgcctgagttcctgtctctccaccatctctcacctgagttcctgtctctccacctctcgcctgagttcctgtctctccaccatctctcacctgagttcctgtctctccacctctcgcctgagttcctgtctctccaccatctctcacttgagttcctgtctctccacctctcgcctgagttcctatctctccaccatctctcacytgagttcctgtctctccacctctcgcct

SEQ ID NO: 234855 - DNA, 420 bp, Homo sapiens
aaaaggaagaaaaaaaaaaccttcaccaggatattcctcctgaggaaaatgactttttaaagcttttgcaatgccraaaaaatacaaatgtgtggatatcacttacacttccaataaaagatgacagcaacgtggactcgtcaagtggacgccatggtctccaggtgaagccactttctattcagcaaaagagaggaaatggagggtgatagctgccagcacccacagtgctccagatgcggcctggggcgggtgtacgctcccttgcagcttcacactgaccgaggcaaacactgctattgcagctcttttgagattaaaccactaagaatctaagaaaccagatgactgccaaggcaaactcagctccttctcgcatgagatcagggcagaacccagactgattccacagcctgtgcc

SEQ ID NO: 234856 - DNA, 286 bp, Homo sapiens
gattcaatgacctccccctgggtccctcccacaacacatgggaattctgggagatacaattgaagttgagatttgaatggggacacagccaaaccrtatcagtagtgtcccctgtctctcaaaaaaggaaagaattaatcaaccaaaggagaaatctgagtggctgtggctagtgctctgggctgggcatggacagtagtcccagggaagcctccctgtcacgaattatggtggccaattaaccatgtcagccgtagtttcatcataaccagagtttcaaagagag

SEQ ID NO: 234857 - DNA, 562 bp, Homo sapiens
tggctgccagacaatcatccaggctttttagaaaataactgataattttaccaataactgatgattttaccaataactgataaaagaagcaaacgcattgtagtcacggaaactctgctatgcatatgatctttaccaggtctcgtgtggcaagatacatcagaagagcactcgaagaaaatgttctgaacttgaacatgacagtggagatgttggggtaccagcgaatgggacggctgaccaatgcataaccttctccatcaaattgaatagtcccctcactatcttccacctgaggactgagaagagagacatttcacatgaatcagatcatatctattcrgtctgtcattattcaatgcatcactgaatagcaatgagactataggctgttgtagggcaggaaataccctaaatacatcttcattccttccacttatctccatctctactgccaccgtgctagaataagtaaaaaccacctctcacctttcatgaggtgtgcaataactaagtcattagtttttttaagtgctttatgttttgtaaaagcacttggtag

SEQ ID NO: 234858 - DNA, 562 bp, Homo sapiens
tggctgccagacaatcatccaggctttttagaaaataactgataattttaccaataactgatgattttaccaataactgataaaagaagcaaacgcattgtagtcacggaaactctgctatgcatatgatctttaccaggtctcgtgtggcaagatacatcagaagagcactcgaagaaaatgttctgaacttgaacatgacagtggagatgttggggtaccagcgaatgggacggctgaccaatgcataaccttctccatcaaattgaatagtcccctcactatcttccacctgaggactgagaagagagacatttcacatgaatcagatcatatctattcagtctgtcattattcaatgcatcactgaatagcaatgagactataggctgttgtagggcaggaaataccctaaatacatcttcattccttccacttatctccatctctactgccaccgtgctagaataagtaaaaaccacctctcacctttcatgaggtgtgcaataactaartcattagtttttttaagtgctttatgttttgtaaaagcacttggtag

SEQ ID NO: 234859 - DNA, 555 bp, Homo sapiens
gtcagaaaatgtggctaaatgtgagattcacaaaataatatttactcttattgcttcttccaagttaacattgcaaaatataggagtggtacatcacgttcttcttttmtcttgccacagctatagttgggtccttcattcttctttctttcatctaccccatacactgcttctggatttatatttaaaaagcacagctctgattatactgtgttccatgctcaaagctttcagcttatcctaaccagtgaggcttatcccaagtaccagtgttgttaaatgaaattgcttaactgattattgaaggcctgacgagacctggcctctgttgatctttctggttatgtgtttcctttatcaattactctgggcaaactggacttctttttcctaaatggaccctaaaacttccttctcccactgccttggtttaagtcattccctcttctcagaatactctccctgttacctgactccacccccaactccccagcactatcccacctcaatgcctggctcaaatccttcccttcaggaaatcttcaggccctacta

SEQ ID NO: 234860 - DNA, 555 bp, Homo sapiens
gtcagaaaatgtggctaaatgtgagattcacaaaataatatttactcttattgcttcttccaagttaacattgcaaaatataggagtggtacatcacgttcttcttttctcttgccacagctatagttgggtccttcattcttctttctttcatctaccccatacactgcttctggatttatatttaaaaagcacagctctgattatactgtgttccatgctcaaagctttcagcttatcctaaccagtgaggcttatcccaagtaccagtgttgttaaatgaaattgcttaactgattattgaaggcctgacragacctggcctctgttgatctttctggttatgtgtttcctttatcaattactctgggcaaactggacttctttttcctaaatggaccctaaaacttccttctcccactgccttggtttaagtcattccctcttctcagaatactctccctgttacctgactccacccccaactccccagcactatcccacctcaatgcctggctcaaatccttcccttcaggaaatcttcaggccctacta

SEQ ID NO: 234861 - DNA, 560 bp, Homo sapiens
tcagaaaatgtggctaaatgtgagattcacaaaataatatttactcttattgcttcttccaagttaacattgcaaaatataggagtggtacatcacgttcttcttttctcttgccacagctatagttgggtccttcattcttctttctttcatctaccccatacactgcttctggatttatatttaaaaagcacagctctgattatactgtgttccatgctcaaagctttcagcttatcctaaccagtgaggcttatcccaagtaccagtgttgttaaatgaaattgcttaactgattattgaaggcctgacgagacctggcctctgttgatctttctggttatgtgtttcctttatcaattactctgggcaaactggacttctttttcctaaatggaccctaaaacttccttctcccactgccttggtttaagtcattccctcttctcagaatactctccctgttacctgactccacccccaactccccagcactatcccacctcaatgcctggctsaaatccttcccttcaggaaatcttcaggccctactagaggtg

SEQ ID NO: 234862 - DNA, 623 bp, Homo sapiens
tctccaaaaaataaaaataaatatatatataaaaactgtatctaaacatcatataaatgtgtatgtctaatatgattttatgttaagtatatatacacacagagacacacaactattttatagtattggaggtcatatagccttgattagagcatgggctcaagtcagactgctggtattcaaatcccagcactgtaaccgaccatctgtgtgaatttgggaaagctacctgtccaatctatttctcagtttcccatccaagtactaaccrggcccaaccctgcttagcttttgagatcagaaaagatcggatgctttcagggtgatttggccatagactatttctgtttcctcatctgtcaaatgaggatattaacagcacagacatcaaagactttgtatcagagttttaaaagataatgtttgttcaatgactcacatatactgaacgtttaataaatggcataagtactatgtagtaatgataataatgagtactttcaccagcccagggctaaacaattttcattcaatattatatgtaattctcataacggctctgtaaaatatagtctttctacttttagtcgagttaataagaattagctatcttaagcaaccaa

SEQ ID NO: 234863 - DNA, 628 bp, Homo sapiens
gaattcttcattaaacaaagaatgataaaatttcaggtagtcttacttttgtgtagatactcaatcagttggtatatctgggcaatgccttcctccgtcagtggggacccaaatatcactcctttttctgaaaaaccatatgatatgacagggctatatttcacacaaatagtacaaaatcatcatacctaaaaccactcaagcatcctattttacaattcagcaagcattttcacatggtcagtaaacaaaaaccttagaactggaagtgcaccagaaaacgcgagcaggacaactctcaatcagctctctctaagttcaatattagactgtaggttccctgaagggaaagaccatcttcttattcaagtaagaagcatatatctagtaagtaaggagatatctagygtgttagtatttaatttaacaaacaaacagaaggccaggcatggtggctcacacctgtaatcccagcgctttgggaggctgaggtgggaggactgcttgaggccaggagtttgagaccagcctgggcaacatagtgagaccccatctctacaaaaaatagagaacagtcaggcatggtgtcatgcacctgtagtcccagctagtgggaggctgaaacaga

SEQ ID NO: 234864 - DNA, 550 bp, Homo sapiens
aaatgggttagagtgaggatcatgcagggactggacccaggtgatatggatcctattttcttatctaaagtaacacagggagcaaccagcaggattccaggcccatttagattgcctgcaggaaagctcacacatttcctcttcctctcccaccaactgtaacacaaatgcggggaatactttgaagtcctaaagagggtaacaaaatcaggagccaggatggtgagatctgttcttctcctaacaaggagaggcatgacctaccttgctgctttcagaaaatcaggctcattttttctggtgggacctgaacctgcagatgggataaagaccataccaatcacttttacaaagagaaatagaaacagacataaatccaaatgcagacacaaacacaattgaattcaaatagagtactcctaaaccaattcccacaaagggaaaaattgagagagaagttctaaaatcttgtytcaagcccaaaaggcatgacagatgactcatgcaaagtccaagtggcatacaagccaaaaatagcagtatgaatgac

SEQ ID NO: 234865 - DNA, 414 bp, Homo sapiens
tcaatctattttcacataaacatcagagatacgaatattattatatcacatattttcttaaaaccttccatgcctttcattatatggttgaaacctctgtccctatgctcatttccagaaactccccacccaggccttatggtcaayagccctgtactccttagcaggctgtttctcaagcattgctcctctctattttgcctttatgttcacgtttcccaatttgtctgcatcttgtcttcccttctccaaataaggatcaactactgcacaatgtagtaaaatacaaatattttagtataatacctttgtatgccacaagatttgttggaataaatgtgtatgactactttgtttgattttgttttctgaagacataaataaaacaaaatcaaacacggtagtcacacacat

SEQ ID NO: 234866 - DNA, 448 bp, Homo sapiens
tcactctttgtattgtacagctctacaggttttaacaaatgcataaagtcatgtattcatcaatatcatatcataaagaatagtttcagggccataaaaatctcctgtactccacctattcatcctccctgcaaatcttttgcaaccactcatccttttactgtcactatagtcttgccttttcaagaatgtcatacagttggaatcgtgtaatatgtagccttttctgattggctgcattcacttaacaatacacayttaaagttcttctatatcttttcatcgcttggcagctttctgttcataactgacaagtcttccattatatcattatactataatcatttatctgttcacctattgaaggacatcgttgtttcttttaaattttgagaatgatgaaaaagccactatcaacatttatatgaaagtttttttctatagatag

SEQ ID NO: 234867 - DNA, 522 bp, Homo sapiens
ttcttctatatcttttcatcgcttggcagctttctgttcataactgacaagtcttccattatatcattatastataatcatttatctgttcacctattgaaggacatcgttgtttcttttaaattttgagaatgatgaaaaagccactatcaacatttatatgaaagtttttttctatagatagaagtcttcaactcatttaagtaaataccaaaggacattactgctggatcatagagtttagatttgtaagaaactttcaaactgtcgtccaaagtgagtataccgttgggtttttcaaccaaaaatgaatgagagtgttgtgctccacatcctcatcagcatttagcgtcgtaagtgttttttatttttgccattgtaatagtagtaacactgtgtcattgttgtttttatttcaattgtctaatgacatacaatgttaaacatctttttgtatgtttattttcacaagaccagatgagtttgttggtcaattctaccaaacattgaaggaagaaatga

SEQ ID NO: 234868 - DNA, 548 bp, Homo sapiens
aggaattaagatgtggtgtggggccgggtgcagcggctcatgcctgtaatcccagcactttggtaggcttaggtgggaggatcacaaggtcaggagatcgagaccatcctggtcaacatggtgaaaccacrtctctgctaaaaatacaaaaatcagctgggcgtggtggtgcgtgcctgtagtcccagctactcgggaggctgaggcaggagattcgcttgaacccgggaggtggaggttgtagtgagccgagattgggccactgcattccagcctggtgacagagtaagactttgttgccctgccctaccccccaccccccaaaaaaaagatgtggtgtgggatggcttatataagtgaccttagaagagaacaagaaaaggttttctcataatggaacctaggaatttaggttaaaggattaattggaaagaaagggaaaatgctatgggatattttctttttcacatttgaatgctgatcactctcatactttaattatttttccctaattccttcacagagaaataagggatactaatttgcag

SEQ ID NO: 234869 - DNA, 604 bp, Homo sapiens
gcactgaggccaaagagacatcatgtgaccagctatttgtaataagctggtgtgttgagttgaagactacacctccaaggttgaatggtccccaagatttctctatttactgcctaagttagagtctttactggaaaaactactaccatcatgcaatcttaccacatcaaccccacctaaaagtgtgctttcctgtctgtagcagctggactcaggaaatgcaagtttcagtgagcaatctcagccttcttcagtccgcaagtctgggggatatcccctttttccactaygggaaagaagaaactttaacaagtttggttcaggcagttacttgtcaattcccttactctatttaaatatgatcatctaattacatagtgatagaatgttcactctttatataatatttatacctctttgaagataaatgcatactcagtgaaagatgacttcttggtctctggatattaccattctccttaatcaacaggactgtatagcaggattgtgtgactttcccgagttcaaaatgttagtaagtggcagagctggtatacaaattcagatgcaaaaacccaaattctcaactacaacttcaattatc

SEQ ID NO: 234870 - DNA, 594 bp, Homo sapiens
agtaatgagtactcaaaatctgttaattagttgttaaaaatgaatttcccaaacttaaaatctttttaaacaaacagttcatttataaagggtatttaagaaaaatgaaattattcacaaagcagggatgcaacctgaatccaataaactraataaattgctggcacctgaatccatgaccaagctgtttctcatttatggtttctgtttttcttggcctccctttctattctggcaaaatgtggtgttgacattataattgcagatgaagctaataataacatgttttgcagaagctctttctagcaaggtgtaaaataccacattggtctaccttgttagagtcagtgaaagccaaaaataatcaatatgacatgaaagataactgcatttcctttcaaatttgcataatgttaggggaaaagagtcaaactcattttcacatgttttctggttgggaaaatatatatcaagactttttgactgaattgtatagtgatagtgcataacttaattctgttttgaatagaggactttgctctttttcgggctcagcagaatactctagttggttaggttggcttcagaaatata

SEQ ID NO: 234871 - DNA, 610 bp, Homo sapiens
  misc_feature (1)...(610): n = A,T,C or G
tggtccatactggtgttggcagtggctgtgacaggttgcatgggtcagtccccaggcctacaggtgggttcttgctgtggttgtggtagcaggttgggtgggcctgacctaggactctgggaggggttctctggtgccaacaatgattgcctggactggatgttccccagacccctccagaaggcatgttcaggcactgcagagccagagtttggctgggaagacttttcttcaagcmtactggtggtgaattcaggcattggccgtggtatgcttgggtagaacaatttctaggaccaaagtcctacttgggtggagatggaaggggctgtgctccacccttgtactgggaagggaagggtttctttattggcattaaccatatgcaggcagctggagagnnnnnnnnnnnnnnnnnnnnnnnnnnnnnnnnnnnnnnnnnnnnnnnnnnnnnnnnnnnnnnnnnnnnnnnnnnnnnnnnnnnnnnnnnnnnnnnnnnnntcaattgtattgcagcttctcttctgcagacagtgtggcctttgtcaatgacttatgcttcagtcatggaggcagcagctgaagagtgagcactttataagtgttttgg

SEQ ID NO: 234872 - DNA, 593 bp, Homo sapiens
accaagcttcctacagactgacggtaaccagtaactgaaccccagaggaatggtaagtaaggtacacttattcctgggaaacatgggactcctttgagagacagctttggcttaagggctccatgatagaattaccaaacattctttagactataaggcaatctagggggctttcaccaacctttcctccctttccttcaagcagggctagacttttatcaagtctagtgcttctctcaaagaaaaatttcactggacagagttaaatggtcaaagaagactttttttccaagattgcaatgggaaagagagagatcaaattcaactcctctgaaagaaaagctgggagagttatttagccctggggtgagctagtggaaaagtgctggaggacattaggaagaggwtggtcaatgtgattaggcatctgtgtttgctaattggcccttattatggtcaggcttctaccctagcacagacactgggagagacagagacactacctttcttgaagattatatttcaaagagctggttcccaggtatttgagaaagacattcctgggttttggaagtggcaagaggctgggagaa

SEQ ID NO: 234873 - DNA, 606 bp, Homo sapiens
cgataaagtaattgaagaatgagtgcctattagctggyaaattggattgaggtattcatttaaacaaaatatgtacagggtatgcatgctgaaagtttccagtgttgttggaaaatatcgaagccctaaataaatggagtgacagactgtgttaatggattggaagattaacatcatgaagatatctattcttcctaaatttatttataggcttaatgtaattcccatcaaaatctccataaggtgtttttgtagacataaacaaaattattctgaaataatgtcaaaaggcttaggtcctgaaattgataaaacaatcctgacaaagaagaataaagctcaaggaatcactctacccaatattatggcttactatgtagctaccaatatgtgaaattggtagaaagaacagaatagagaacacaaaataggcccatacaaatattcaactgatttttgacaaaactgcaaaagcaattcaatggaggaaggacagtacattgaaaaaatagtgctagagcaattggatatccatggacaaaaaaataaatcttgacctaaatgtcctaccttatatatagaaattaactcaaaatgaattctaaa

SEQ ID NO: 234874 - DNA, 606 bp, Homo sapiens
cgataaagtaattgaagaatgagtgcctattagctggtaaattggattgaggtattcatttaaacaaaatatgtacagggtatgcatgctgaaagtttccagtgttgttggaaaatatygaagccctaaataaatggagtgacagactgtgttaatggattggaagattaacatcatgaagatatctattcttcctaaatttatttataggcttaatgtaattcccatcaaaatctccataaggtgtttttgtagacataaacaaaattattctgaaataatgtcaaaaggcttaggtcctgaaattgataaaacaatcctgacaaagaagaataaagctcaaggaatcactctacccaatattatggcttactatgtagctaccaatatgtgaaattggtagaaagaacagaatagagaacacaaaataggcccatacaaatattcaactgatttttgacaaaactgcaaaagcaattcaatggaggaaggacagtacattgaaaaaatagtgctagagcaattggatatccatggacaaaaaaataaatcttgacctaaatgtcctaccttatatatagaaattaactcaaaatgaattctaaa

SEQ ID NO: 234875 - DNA, 600 bp, Homo sapiens
tattctctgattaataacattctgctttcaagccatttagcatctgattgaaaggttgagagaatctacaagaaacttgcttatgagtttgaagtcccatgccttttttaggaaaactagctttacataaccacaaagtgtaataacttattacttcataatgttctttctgagtcctaaaatggtgctagtattctgtttcaattttatagccctttgagatggttgattaatctagaatagtatggaaaacatgacagccaaatagttttaaaacaacagaaaaaatgttgactgtaatatttttcttatattgttttctttttacaagggaatgttcttaaaagcttccacactgataataaaagtctttataaaactgatgctgtttctcacactccattaaacagccccttttatcttygaatatgatgtgaaagcaaactatttatactatgttaactttagtttttaaattgctttttgaaaataaacatgaaaataaaaataaatatgtctgagacccaagaaatggccaagcaaatgtaattcattttataagggtcattaaagccttgcatctctgttgtattgaaatag

SEQ ID NO: 234876 - DNA, 599 bp, Homo sapiens
gtcattatcttggtcatctcattgggcatgaaggtcctggaagtctgttatcagaacttaagtcaaagggtaagtctcctgggcagcatcttctgagtgtccaccacatcttttcactctggctctcattttctcctgaatagtgtcctatgraggaacattgttagatgtgaccattttgggttagtgagtgagatggtggttgttggcacgctgttgccttttttttttttttttcttttttagatagagatggggtttcgccattttgcctaggctagtctcaaactcctggtctcaagcgatccgcccatcttggcctcctaaagtgctgggattagaggcatgagccaccgcgcccagccagtagtctactcttgactgggaattgatttgaggaatcttcaggaaagcccccacttctgcaccatcttaaactgcttttctgaactgatttttttttcccaatcttttcgcaagaggttcattctgatatcttaggaacatacagtatgaatttttaaaatttttcttatcttcaaggaagccacatatgcaatcaatcgtattgatttcctttgaatgttgcaggctgggtt

SEQ ID NO: 234877 - DNA, 599 bp, Homo sapiens
gtcattatcttggtcatctcattgggcatgaaggtcctggaagtctgttatcagaacttaagtcaaagggtaagtctcctgggcagcatcttctgagtgtccaccacatcttttcactctggctctcattttctcctgaatagtgtcctatgaaggaacattgttagatgtgaccattttgggttagtgagtgagatggtggttgttggcacgctgttgycttttttttttttttttcttttttagatagagatggggtttcgccattttgcctaggctagtctcaaactcctggtctcaagcgatccgcccatcttggcctcctaaagtgctgggattagaggcatgagccaccgcgcccagccagtagtctactcttgactgggaattgatttgaggaatcttcaggaaagcccccacttctgcaccatcttaaactgcttttctgaactgatttttttttcccaatcttttcgcaagaggttcattctgatatcttaggaacatacagtatgaatttttaaaatttttcttatcttcaaggaagccacatatgcaatcaatcgtattgatttcctttgaatgttgcaggctgggtt

SEQ ID NO: 234878 - DNA, 585 bp, Homo sapiens
gtctgacatacacatgctcagaacatagggaacaactcccatagggaacaacccccaatgaggaacaatcctgtaaagttctaatataaaataagagaccggtgctgtcctatgacggcagcaataacaaggacataaaacaaacaagcaaaaagttggaaggaccccaagtatttttgtaacctgctgaagagctgaatgccagagcaggaaaagtctggcaatcttaacagaaatgtcagaaaaattctcttrcaaagggcttcctctgacagtcttctttcttctctacaaaggctagattacagtgatgggaaaggactatcagtacacagaatcatgtagggatgttggttgcaattagtgcagtgaagggactttccagagtctggggtacgcatgttttttgagagtagggtagatgtaacttttgtctatactggagattgcttaatagacaaaaaaaaaaaaaaactgaaactgctactactggcaggttaatatactgccagtatataattaagtaaagccaaaaacatatctggaactacagaggaaaaataaccctctatgagcacatctgct

SEQ ID NO: 234879 - DNA, 576 bp, Homo sapiens
aaatcataataggcaatgaaaataagcctttaccaccttagttcgagaaagcaatatttggaacagggaaaatatattggttgtattggtggctacaggcttaggggtgaggtcttgggttttgaggtatagggaaccagaagaaagaataaggggatattctcccacaaggataaagaaaatcagagggttcttgggaatagctatttatagaggacttccatcatggagaactcctgattttacatgtgcaaggtagaaaagtgataaattccagctctrccacctatgagctatgtaattgggcaggtagttaactttttttgagcttcaacactattatcttaaaaacagaaatcatgatgctacctatcagggcgattgcaaaaattaaaggaaaacatatataaaacactttgtataatatctgactcaataattggttgttgttcttatgaatgttgtatggaataacaatcaagaaaatccccttaaaggtgttaaaactctttgcctcttatcccatattcctatattcaccgttagttatacacacataatgtcatgaagtgtcta

SEQ ID NO: 234880 - DNA, 402 bp, Homo sapiens
aatatctgactcaataattggttgttgttcttatgaatgttgtatggaataacaatcaagaaaatccccttaaaggtgttaaaactctttgcctcttatcccatattcctatattcaccgttagttatacacacataatgtcatgaagtgtctaaacaatactacaactactaactaattaactctaattgattggaactgtgtaagcaatactgctggtttactgttttcctgcaccaactagcatgagttgatgctgtgaagrtagagttttggtgctgctgtcatatttaatgcattcaaatttaaaagagaaacagcatgaatattacttagaaattcatacctttctaaggaagtttactctcttagattatcacactttataccttagatattttg

SEQ ID NO: 234881 - DNA, 547 bp, Homo sapiens
aaacttttagaattacaaaaaaatgtggtttttaataaaatatttttctccctcattattgaagacgatgttaccatacaactgagatggtttaaacttcagatgctccatagcagatatttgttttttactttctttcatgtcaggctgcttctttcwaattggtcattactagacattttcattgcaataatatttattatttttatgtcttttgaagcctttaacccagaaaggcctctaagtacgttttggatcataaaataaatggaaaaatctttaatcttaaataatcattagtttagcaaatatttctgttgatggttttcactggaacagagcttgctgatatgattgtaagtgtaggataaggccacccagttcagataattctcttccagagtaggacttctaagttggaaaacaataaagactataaggttgtttaaaaccatgcttattttacttatagataattcaggcattgacatatgtattatgtcatttgcaaatgatcattaagaatctctacttgggggatagataa

SEQ ID NO: 234882 - DNA, 547 bp, Homo sapiens
aaacttttagaattacaaaaaaatgtggtttttaataaaatatttttctccctcattattgaagacgatgttaccatacaactgagatggtttaaacttcagatgctccatagcagatatttgttttttactttctttcatgtcaggctgcttctttcawattggtcattactagacattttcattgcaataatatttattatttttatgtcttttgaagcctttaacccagaaaggcctctaagtacgttttggatcataaaataaatggaaaaatctttaatcttaaataatcattagtttagcaaatatttctgttgatggttttcactggaacagagcttgctgatatgattgtaagtgtaggataaggccacccagttcagataattctcttccagagtaggacttctaagttggaaaacaataaagactataaggttgtttaaaaccatgcttattttacttatagataattcaggcattgacatatgtattatgtcatttgcaaatgatcattaagaatctctacttgggggatagataa

SEQ ID NO: 234883 - DNA, 571 bp, Homo sapiens
aagaatcagggaatgaggtgagtagtacctgtctctctgtcccccttttctccccctcctcaggcaaaatcccttccctccttcagctgcaatgagacatcagaaagggccaacgacttactagttatcttgtgatccatttaggaaaagagcaaagtaattgcaccatggttagaatactcagtatataaacaagaattyaagttctaatatctgcgatagacttattaaagaaagaaataatagtagattagattgaagtttatccttataataacttgtctcttgctctcttgcattcacatttgttttcttgagatgagataaaagatttaatttactgagaatttgttatgtatgaaaataatattcatttcctccagcctttcaatttttttgtcacgaagttttgtataatatatacctttatagacatattttcatcttttctacatatgtgggaatgccaaatgaaagccatttttcctcaatataacatttttaacaagagttcttaaaataatgattccccagttaatgtatacatatacatttgcaaaatagcaagttc

SEQ ID NO: 234884 - DNA, 571 bp, Homo sapiens
aagaatcagggaatgaggtgagtagtacctgtctctctgtcccccttttctccccctcctcaggcaaaatcccttccctccttcagctgcaatgagacatcagaaagggccaacgacttactagttatcttgtgatccatttaggaaaagagcaaagtaattgcaccatggttagaatactcagtatataaacaagaattcaagttctaatatctgcratagacttattaaagaaagaaataatagtagattagattgaagtttatccttataataacttgtctcttgctctcttgcattcacatttgttttcttgagatgagataaaagatttaatttactgagaatttgttatgtatgaaaataatattcatttcctccagcctttcaatttttttgtcacgaagttttgtataatatatacctttatagacatattttcatcttttctacatatgtgggaatgccaaatgaaagccatttttcctcaatataacatttttaacaagagttcttaaaataatgattccccagttaatgtatacatatacatttgcaaaatagcaagttc

SEQ ID NO: 234885 - DNA, 571 bp, Homo sapiens
aagaatcagggaatgaggtgagtagtacctgtctctctgtcccccttttctccccctcctcaggcaaaatcccttccctccttcagctgcaatgagacatcagaaagggccaacgacttactagttatcttgtgatccatttaggaaaagagcaaagtaattgcaccatggttagaatactcagtatataaacaagaattcaagttctaatatctgcgatagacttattaaagaaagaaataatagtagattagattgaagtttatccttataataacttgtctcttgctctcttgcattcacatttgttttcttgagatgagataaaagatttaatttactgagaatttgttatgtatgaaaataatattcatttcctccagcctttcaatttttttgtcacgaagttttgtataatatatacctttatagacatattttcatcttttctacatatgtgggaatgccaaatgaaarccatttttcctcaatataacatttttaacaagagttcttaaaataatgattccccagttaatgtatacatatacatttgcaaaatagcaagttc

SEQ ID NO: 234886 - DNA, 571 bp, Homo sapiens
aagaatcagggaatgaggtgagtagtacctgtctctctgtcccccttttctccccctcctcaggcaaaatcccttccctccttcagctgcaatgagacatcagaaagggccaacgacttactagttatcttgtgatccatttaggaaaagagcaaagtaattgcaccatggttagaatactcagtatataaacaagaattcaagttctaatatctgcgatagacttattaaagaaagaaataatagtagattagattgaagtttatccttataataacttgtctcttgctctcttgcattcacatttgttttcttgagatgagataaaagatttaatttactgagaatttgttatgtatgaaaataatattcatttcctccagcctttcaatttttttgtcacgaagttttgtataatatatacctttatagacatattttcatcttttctacatatgtgggaatgccaaatgaaagccatttttcctcaatataacatttttaacaagagttcttaaaataatgattccccakttaatgtatacatatacatttgcaaaatagcaagttc

SEQ ID NO: 234887 - DNA, 437 bp, Homo sapiens
tctgctgtttcatgtacttgaggaatgyaaatatttgagatctgcagctacagacaaatcaatagccttgtggttccatttgttcccttctagcttttaattctgatttttgacagtttctgaatatggtaagttatagccctgcattactaagagcaataaaatataaatatatcaattcctaatgaatttaaataacttgtgaaataaatcaaggagcccggaaaatttaaatgataaaatttaaggatgagattcatgtgctatttgctgactaatgtaaaaaaaaaattcaacctgtttatgactaatgttaaatcttaaaatttaaattgcacatgaccttggtctgttttgtttcactatgattatgactaatccctcccaaatttataacagttgaactaatgcaatgttgactgtcaacagttgaattc

SEQ ID NO: 234888 - DNA, 436 bp, Homo sapiens
ctgctgtttcatgtacttgaggaatgcaaatatttgagawctgcagctacagacaaatcaatagccttgtggttccatttgttcccttctagcttttaattctgatttttgacagtttctgaatatggtaagttatagccctgcattactaagagcaataaaatataaatatatcaattcctaatgaatttaaataacttgtgaaataaatcaaggagcccggaaaatttaaatgataaaatttaaggatgagattcatgtgctatttgctgactaatgtaaaaaaaaaattcaacctgtttatgactaatgttaaatcttaaaatttaaattgcacatgaccttggtctgttttgtttcactatgattatgactaatccctcccaaatttataacagttgaactaatgcaatgttgactgtcaacagttgaattc

SEQ ID NO: 234889 - DNA, 581 bp, Homo sapiens
agtcatcatattgttctatctaacatcagaacttattccttctatatgagtgtatgtattttttttttttagatttgggggatatatacatatatttgtttgttaaatgggtatatttggtgatgctgggatttggacttctagtgaacccatcttctaaacagtgaacgtagtacccagtaggtagttcttcaaccctttactccctccctcctttcctcccctcttttggagtccccaktgtctattgttttcacctttatgtccatgtgtacccattgtttagctcccatttatacatgagaaaatgtggtatttgattttctgttgatgcataaattcacataggacactggcctcctgctgcatccatgttgctgcaaatgaaatgactttattctttatggctgcatagtattccatggtctatatgtaccacagtttctttatccattccactgttgatggatacttaggttgattctatgactttgctattgtgaatagtgctacaataaacataaaaatgcaggtgtctttttgataaaacatttttttttttcttttgggtagatactcag

SEQ ID NO: 234890 - DNA, 430 bp, Homo sapiens
gggagtttaggaagctgatggtgaggatcagggcagatgactgccagtattgcttggaatatgtaaatcaaccattggagaggagggcaacatgtataacattataggagcttttgactggtttctstgcttagtagggaagaaaattcagaaagaacaagtgtagctccccgattctgactaaattcacccataagaaagcccctaaagttttctgacccttcactttgctgatgtattttatgcatatgaaatgatacaggtgaaaactctttgagatggatcataatgtataaatataggttattataacatattataaataattgtattacattttatatattaagtatacatatgtatataaggcatatgtgctattgcacttttttattgtatacattgtattgtttttttccttcaagaagtt

SEQ ID NO: 234891 - DNA, 586 bp, Homo sapiens
ttgctgaaacctgtatttattttactagcattacttatgtaagaaaggaagaagttattgcaaaaaaaatctatatcatacccacagttgcatatagcaatttatattaaagttaattacaatttaaacgtccattcctagccacaatttatcagtaatcatacgtgtttgttggctaccatattgttaatagtgcagatttagagaacattttgatagtcacataaaattctgctgaacaataatagtatactttgtataaactatatataccatgtatatactttgtatactataatgcatacattttgtaagtttgggaggtaattgttagtaggttaaatattaatgattaataaaaagttcaatttcctaatacaaacatraaagggcaatacaatttcacatcacagaccttttaaaataacatcagagtttaagtgaggattatttaacaataaattatttaagttaatgaaggatatcccaagagaacttcttgcaaacaaactagccaggactcaatttcacgatgacaagatttcgagtaactttaaatgtgacaagaaaggacgtttgccccaat

SEQ ID NO: 234892 - DNA, 581 bp, Homo sapiens
ctttgtgtctggtgggcagggggtgatagtacctgtaaagataagctatcaatttacattgctatggcaaaaatttaacagaaacaccttaaatgatcttgcagctcactaggaatttcctcatgggcaaaatttgggtggggtgggggcataggggggcatgtagctttcatcttgtagccatcttatttaggaaccaaaggtggaggcaggtttgygtgacccagttcccagcttgacccttcccattggcttaatgagtttggggtcccaagatttaatttcctttcacagagtatattttccacattccctgtgatgtatgtatgtaaacaccatacacagaggaaagaaaagaggtttaagattaccgtgtttcactcctctatgaaattcttagtcacatcccgtgatccttaatttataatccaaactcaacagggcatgcaagtttcttcaggacccttctcgtttgcatctgacaacttttgagtctatattctggccatagtgactgtctcgtggccctcctcatgcatgacttgtggtccacacaactttcatccctttgcaaatgctgc

SEQ ID NO: 234893 - DNA, 581 bp, Homo sapiens
ctttgtgtctggtgggcagggggtgatagtacctgtaaagataagctatcaatttacattgctatggcaaaaatttaacagaaacaccttaaatgatcttgcagctcactaggaatttcctcatgggcaaaatttgggtggggtgggggcataggggggcatgtagctttcatcttgtagccatcttatttaggaaccaaaggtggaggcaggtttgtgtgacccagttcccagcttgacccttcccattggcttaatgagtttggggtcccaagatttaatttcctttcacagagtatattttccacattccctgtgatgtatgtatgtaaacaccatacacagaggaaagaaaagaggtttaagattaccgtgtttcactcctctatgaaattcttagtcayatcccgtgatccttaatttataatccaaactcaacagggcatgcaagtttcttcaggacccttctcgtttgcatctgacaacttttgagtctatattctggccatagtgactgtctcgtggccctcctcatgcatgacttgtggtccacacaactttcatccctttgcaaatgctgc

SEQ ID NO: 234894 - DNA, 445 bp, Homo sapiens
aacattgtattataatcaggtttataatcaggttaacagatgcttcataaacatcacctttgacaactgcatgaaattccactgtatgactccaaatgtaatttactgaactgttctattaatggaaatttatgcaattttaatatttctattcatatagatatatggcaatacagatatttgaacaacattttttttctgatttaggatgttttctttagacagattccatgtggaaatatgaggtcaaaaattagaaatatttttaaacctttgataaatagcrttttccatactgtttcctacctcgttgtaagtacaagtttgtccacctggcttcctaagttggtcaacataaatttgcaccaacttaacatctgaaatataataatatacactgaggttcttagcataatttgtgtttcttttaaattggcattgctga

SEQ ID NO: 234895 - DNA, 543 bp, Homo sapiens
atggcatgcagttcagaacggggtcttccaaatacaggccctgacttggtcattgcaggccatgtgtctttgacaaaacacctttgcccaattacttttatagtgaaaaggggacaataatagtgcctactttctaaagttgctgagagggttgcattagaatgtcttcaaaaagcttatcacattgcctgtcacaaagtgatattaatgattatgttcataataccattaaaaaatttattactttctaagcaggaaaaaaaaaattcaaatttaggacagtcccataataagaattaatttattttaacaaataaagttatggcttttgttttaaattgaaatagataatttaagtactttctcttaattattttataaaatgtatggtgttttaacatatgcaaagttgatatcaattctattttcttaatctctcaaagttgccacattgctatagaaataactgtaaaaacatktgatttttccttccacttgtatctgaacagcatttactcatttaatccaaaagctgaagagatg

SEQ ID NO: 234896 - DNA, 617 bp, Homo sapiens
tgcattatgaaacatacgtaagtaaaaccttttaaaggaaaatatttaaaaagtaaatatattgcaagtcctaatattttctccctgcattccaaaggattgcacaattgcagctttttaaattgagatgcaattagcacagactggtggatttctatggtctttattgcccaggccctactttcrgttcccaggaacaagaaagttttgggatttgtgatcaagtcagaccagcttccaagcttagtgaagctagaacataagcatgcagcttataagggaggacccaggtagagtggtaatgagagccttacttgtagtcagagcacttactatccaaaactgtggcctcatgcagggcacaagcaccctcaacctcaatttctaatacgggtttatttgaggagtagaaaagaataaaatacaggttgaacatctgtaatctgaaaatctaaatctgaaatttttcaaaactataaactttttgagttctggcatgatatcacaagttgaaaatcccacatctgacctcatagtcaaaacacagtcaaaactttgtttcatgcacaataaatattacataaaattatcttctagattttgtgtataaggtggat

SEQ ID NO: 234897 - DNA, 529 bp, Homo sapiens
gcaatgaacataaatgcctaaactctgcagtgttggtgctcacattcttgtaaataaatacacaattgtccctgcatggaggccaggcactctagaatattaggggaccttgttctcacatggtggcatccctggatagatgacacaactggcttttctgatgctgtttcatactttggcccagaatccggcaacattttctgtcatgataagacagaggttatgtagaaaaggaaacagactcactttgtatctcttacaggttgtgatctggccaaaaaataatagctgtgcctatagccctaaggtgctgctttctggaagcgccagaattctggttccttttccttggtattcctgccctcctgctagttgactacatttataagagaaaagaataccaagaaattaggcagaacacgtggagtgtgtgtctgtgaagtgtgtgcctgtatatgttagtggggcatccagaagaacgtgggtggtgtgtrtgtgtgtgtgtgtgtgtgtgtgtgtgtgtttttgg

SEQ ID NO: 234898 - DNA, 462 bp, Homo sapiens
cactgatgattccatctgaatattgctttgtcattgttttgattagaaacaataaatggtgttgacaaactctgggaatgatttttataatgaaagagaatagtgaaagtggagaagtttcaataaatgatttttaaataaaatgcttttcttgaatataaaaaacatrgtgttggcagatgacattgtaggaaatattactccaagatagactggtaagccttttaccctttccacttctctgtcacttcttgtctttctagaacatctcattactttcctttatgaattcttcccccaaggctctggtgttaggggcagccttcattttccatttcagttcaagggacttaccacttaatttaagtttcctcaagtctgaccctcaactccaaagttccactcatcatttcactttttagagcagagatcacctgcatgatagtgtacctattgatggtc

SEQ ID NO: 234899 - DNA, 595 bp, Homo sapiens
ttaacactcaagtttaatgtttacataataactgagtacaaagaccaagatttgaaaagaagttttttatgtgcgtattacttagagcataatccaactaaaccagtggaactaaaaactttcaagcctagaaagtttagattcttagaataattttttttgacatggtttttctttgtcatgaaggctagagtacactggagaaatcacagctcgctgccacttctacctcttgggcctatgtgatcctcccacctcagcctcacgggtagctgggaccacaggcgtgcgccaccacatccagctaatattttctatttttttgtagagacagaatcttgttattaaacatgaacaaatgggataaactraaagaaagattaattcagtctaccaagactaaattagaaagaaattaaaaatcggaacagacctataaccagtaaggagaagaaaaaatattgccctggttgatctcaaactcctggcctcaagcagtcctcctgcctcagcctccaaaagtgctgggattataggtgtgaggcactgtgcccagcccatgtaaattatcgaagagcccaaagagcttttgctt

SEQ ID NO: 234900 - DNA, 377 bp, Homo sapiens
gaattcttcccccaaggctctggtgttaggggcagccttcattttccatttcagttcaagggacttaccacttaatttaagtttcctcaagtctgaccctcaactccaaagttccactcatcatttcactttttagagcagagatcacctgcatgatagtgtacctattgatggtccctgatgtttcagaggcccctacttgtatattcagatgagaatatcaacagggccttcctcacataactgtaggaaaaggtcaaaacccagaccccatagagagacctgggacacttctaatttaygaatgcaatttttaaaaagatttaaaaattaaatgctatgacacaaaatacaatacaataggagtgagtgattca

SEQ ID NO: 234901 - DNA, 643 bp, Homo sapiens
tctcccaccttttatgctaccttataaatagctcttctccaatccttccgtttcttttcattctcacttcaaacacaccagactcagccaccatcaccttactcaaaagcacaaatatttttctaatcagtcttcaattcagtcttgccactttgcctattcattcaccacacataagtcaaaataatgtgtttagatcctacattttatcatttgattcccctgctttaaaactttagtgtcattccatagctaataagataaaataaaaattcttacctcggttatcctacaagtattgrttcatctggctgtgcctaaacctcaccattcttgcatacaataatccacccctttacattctaccttcatgatcttattttagtttcttgaacatgccaagcttctttccaattcaatgtattttgcatttgttacttatatacttgtctgtctctgaaaaacagctcccgttcattacccagctttcactatttcaagatctcaacttaaatatcacattcacagtttttcacgaagccccctctacccctgtctgttgtgagtcactgctcctgtcattcactcttccagtgctgggtgcttttcctttaaaggaccaaccatttttagaatatttaca

SEQ ID NO: 234902 - DNA, 643 bp, Homo sapiens
tctcccaccttttatgctaccttataaatagctcttctccaatccttccgtttcttttcattctcacttcaaacacaccagactcagccaccatcaccttactcaaaagcacaaatatttttctaatcagtcttcaattcagtcttgccactttgcctattcattcaccacacataagtcaaaataatgtgtttagatcctacattttatcatttgattcccctgctttaaaactttagtgtcattccatagctaataagataaaataaaaattcttacctcggttatcctacaagtattggttcatctggctgtgcctaaacctcaccattcttgcatacaataatccacccctttacattctaccttcatgatcttattttagtttcttgaacatgccaagcttctttccaattcartgtattttgcatttgttacttatatacttgtctgtctctgaaaaacagctcccgttcattacccagctttcactatttcaagatctcaacttaaatatcacattcacagtttttcacgaagccccctctacccctgtctgttgtgagtcactgctcctgtcattcactcttccagtgctgggtgcttttcctttaaaggaccaaccatttttagaatatttaca

SEQ ID NO: 234903 - DNA, 601 bp, Homo sapiens
cttttgttgaatttatttattagttctgacaggtttttgtgtgtgtgtgtgtgaaatccttaggagtttcttcatataagatcatgtcatctgtgagtagagattattttatttcttttcatttttgattattttatttctttttcttgttaaattgctcacactagaacttcagtacaatattgaatagaagtggcatgagtgacatccttgcctcgttcctgaccttaggggaaaagcattcaggttttaactgttgaatatgttgctagtggtgagcttattggatatggcctttattatgtttggtaatttccttctattcctagtttgttgagtgattttattatgacagaacattaaattttttcaaattctttttctgtatatcttgagatgatcatgtgatttttatcctttattctgttaatgtggtgtatcaccttgattaatttttgtctgttgaactatcctttcatcatagggataaattccacttggtaaaaaagtatataatcctcttagtgsgctgttgaatttgatttgttaatattttgttgagatttttacatgcatattcatcaggaatattgacttgtag

SEQ ID NO: 234904 - DNA, 612 bp, Homo sapiens
gtgtttaattactcatagtaatttawtataaccctttatatttctgtggcatcaatgtctcctctttcatttctaattctcttcatttaactattttctctcttttcttagtttagataaatgtttatcaagtttatctatcttttcagaaaacagctattagttttggttttttattgtttctattctctattttatttatttttgttctaaccttcattattttctcctttctggtagctttggatccagtttggtcttttcctagtttatcaagttgtagaattaggttgattatttgagatctttctcctttttaagatctttcttcttttttaatgtcagtgttcattgcaatatacttctctcttactactgcttttgctgcatgccataaaattgggtatgctgtgacttattttcatttgtctcaagatatttctaatttcccatttgattactttttaattcagtggttgttccagagtgtattgtttaattttcaactattagtgaactttctaggttcattttggtatttatttctaatttcattccactgtagttagaaaacatacttttgataagttagtcctcttaaatttgttagga

SEQ ID NO: 234905 - DNA, 593 bp, Homo sapiens
atagggtaatttcactttttcctccattttggatgtctctaatctctttttcttgtctaattactcttagaactttgtattactttattttcacactactctaaagatactacttgagactggctaatttataaacaaaagaagcataactgactcacagttccatgtagctgaggagggctcaggaaacttacaatcatggaagaaggtgaagggggagcaggcatcttcttcataaggcagcaggagagagagagcaaagggggaactgtcaaacacttttaaaaccatcagctcttataagagctccctatcatgagaacagcatgggggaaaccacctccatgaccaatcacctcctaccctctgaccaggacccccctttgatacatggggattccacacctggctaattttttgtagttttagtagagacggggtttcaccatgttagccaggatggtctcaatctcctgacctcatratccgcccgtcttggcctcccaaaatgctgggattacaggcgtgaaccaccatgcctggctgtgttaattcttctttaagtgatgagtagaattcaccagtgaagccat

SEQ ID NO: 234906 - DNA, 408 bp, Homo sapiens
gtgcaggtggccaaggggcagcaggacatggctaggggtgggacacaatcaaatcagagatgtttcctatacytgaatggtctctcatacatctcactgcagtgctgtctccttggtgcagagtacacacaggaaaatcttttgaggctacatcacttggttggactggagcatggctacgaagaaaactattggggccaatccccaacctctaaacttcacagatttatttttccatcaaactattgacatacggcaacattgagaacttcagcatcatcgaaacctccgccaggtgtcttgcagagccgtcacagttcacatcagcatactgcacaaacaaaaaagacttgaagaatgagggaattgaatacacagcgttctcgagcctgagagatatgctgggag

SEQ ID NO: 234907 - DNA, 408 bp, Homo sapiens
ggtgcaggtggccaaggggcagcaggacatggctaggggtgggacacaatcaaatcagagatgtttcctatacttgaatggtctctcatacatctcactgcagtgctgtctccttggtgcagagtacacacaggaaaatcttttgaggctacatcacttggttggactggagcatggctacraagaaaactattggggccaatccccaacctctaaacttcacagatttatttttccatcaaactattgacatacggcaacattgagaacttcagcatcatcgaaacctccgccaggtgtcttgcagagccgtcacagttcacatcagcatactgcacaaacaaaaaagacttgaagaatgagggaattgaatacacagcgttctcgagcctgagagatatgctggga

SEQ ID NO: 234908 - DNA, 350 bp, Homo sapiens
gacacaatcaaatcagagatgtttcctatacttgaatggtctctcatacatctcactgcagtgctgtctccttggtgcagagtacacacaggaaaatcttttgaggctacatcacttggttggactggagcatggctacgaagaaaactattggggccaatccccaacctstaaacttcacagatttatttttccatcaaactattgacatacggcaacattgagaacttcagcatcatcgaaacctccgccaggtgtcttgcagagccgtcacagttcacatcagcatactgcacaaacaaaaaagacttgaagaatgagggaattgaatacacagcgttctcgagcct

SEQ ID NO: 234909 - DNA, 408 bp, Homo sapiens
gtgcaggtggccaaggggcagcaggacatggctaggggtgggacacaatcaaatcagagatgtttcctatacttgaatggtctctcatacatctcactgcagtgctgtctccttggtgcagagtacacacaggaaaatcttttgaggctacatcacttggttggactggagcatggctacgaagaaaactattggggccaatccccaacctctaaacttcacagatttatttttccatcaaactattgacatacggcaacattgagaacttcarcatcatcgaaacctccgccaggtgtcttgcagagccgtcacagttcacatcagcatactgcacaaacaaaaaagacttgaagaatgagggaattgaatacacagcgttctcgagcctgagagatatgctgggag

SEQ ID NO: 234910 - DNA, 350 bp, Homo sapiens
gacacaatcaaatcagagatgtttcctatacttgaatggtctctcatacatctcactgcagtgctgtctccttggtgcagagtacacacaggaaaatcttttgaggctacatcacttggttggactggagcatggctacgaagaaaactattggggccaatccccaacctctaaacttcacagatttatttttccatcaaactattgacatacggcaacattgagaacttcagcatcatcgaaacctccgccaggtgtcttgcagagccgtcacagttcacatcagcatactgcacaaacaaaaaagacwtgaagaatgagggaattgaatacacagcgttctcgagcct

SEQ ID NO: 234911 - DNA, 408 bp, Homo sapiens
ggtgcaggtggccaaggggcagcaggacatggctaggggtgggacacaatcaaatcagagatgtttcctatacttgaatggtctctcatacatctcactgcagtgctgtctccttggtgcagagtacacacaggaaaatcttttgaggctacatcacttggttggactggagcatggctacgaagaaaactattggggccaatccccaacctctaaacttcacagatttatttttccatcaaactattgacatacggcaacattgagaacttcagcatcatcgaaacctccgccaggtgtcttgcagagccgtcacagttcacatcagcatactgcacaaacaaaaaagacttgaagaaygagggaattgaatacacagcgttctcgagcctgagagatatgctggga

SEQ ID NO: 234912 - DNA, 568 bp, Homo sapiens
aaaagctttctctcagtagtttatttcattctcagtggataaaaccaacagcctcatggtgctcatggtgctgtagaaaggcagccccccagcagtgggaaggtccgctccttaaagccctccctgctttaagccgcctggacagcgtctgctttagttcctgcttggtgcatccctttgggctacgtggtgggctgtggaatggcccccggggtgcccgcatcctactccctggaatctgtggctatgtccctttacgaggcaaaggagactttgcagatgtgatttagttaaatgtactgaggtggggggtgatcttggattatctgggtggggcccatgtaattacagggtccttgtgagaggaaggcaggaaggccagagagagaaggagaygtgacagagaaagccgactgaagcaggtgacaggacagtgtgtccaaggagtgtgggcagccctggagtccgggaaaggcaggggcaatgatcctccagaggagtgtccagcatgagccagctatgcctacacctgggtcttaagccagtcagacccattttggacatcctg

SEQ ID NO: 234913 - DNA, 438 bp, Homo sapiens
tcagtataaatttatacatacataaaaasatgcattagaaatttatattagaaaccttaagatttgtcaattaatatatctgtgatgaaagtctattagaaatgaaaatgtagattgcagctgggactattacagttcttttttaattttttaatttttaaaattctttaaaatgttttagagaagaaataaatccactaaacaatccacaaagaaagccgtctgtcttaaagtttcccatgttcataaaacccctgaaatgtgtagtttttctttggtaatttaatttctgctgtctctgtccatccatttgtgattaatcatagatttattttatcttattatttcaatagtttttggggaacaggtggtgtttggttacatggatttctttaggtgtgatttctgagattttgttgcactcatcacccaagcagt

SEQ ID NO: 234914 - DNA, 438 bp, Homo sapiens
tcagtataaatttatacatacataaaaagatgcattagaaatttatattagaaaccttaagatttgtcaattaatatatctgtgatgaaagtctattasaaatgaaaatgtagattgcagctgggactattacagttcttttttaattttttaatttttaaaattctttaaaatgttttagagaagaaataaatccactaaacaatccacaaagaaagccgtctgtcttaaagtttcccatgttcataaaacccctgaaatgtgtagtttttctttggtaatttaatttctgctgtctctgtccatccatttgtgattaatcatagatttattttatcttattatttcaatagtttttggggaacaggtggtgtttggttacatggatttctttaggtgtgatttctgagattttgttgcactcatcacccaagcagt

SEQ ID NO: 234915 - DNA, 584 bp, Homo sapiens
atccaatctttaaaacccatcatttcttttacccatccattcatttactaggtaagtatttgttgtgcatctcctgtgtgctaagcatcacgctctaccgtgggaatacaacgattaagacccagtcccctgcccacggagagccctgtgcgtttatggataagacaggcaagatggcaggcgatgacagagtcttgagatraagtcacatggctacacctggctgttctctagacgcatcagaaagaggaaatgattcaggcattgagcgttctgggaaggactcatctgatttttaatacttcattattaaaatgttaagcaacagaaacatgctttgacttagggagatccaaaaaacctacatttgatttcaaattctgctacatgcttgctctatgaccttaaacaaatgacttagcctttcggagtttccttatctttaaatggggataataatatgaaccccaggatatttgacaaaattatatagtaaatacagaattctaagtactgaataagtaattgttgctattccatacacttatttaaaacttagcctcttgggaaaagcatatggtaaa

SEQ ID NO: 234916 - DNA, 450 bp, Homo sapiens
agaattctaagtactgaataagtaattgttgctattccatacacttatttaaaacttagcctcttgggaaaagcatatggtaaaactcaggcttcttctacacccgtgtctttcaggatgggggagaaaatggcagaggggctcaaacacaaggcttagcccccacctattctgtgctctttccacccaaacacatggaatcaagctgccacggaagcagaagcctggggagaacaggaaacaaaaacgcagagatactgagttcaygagtgactgcagtgttagaagaggtgtggggctgaatgggagtgtggggacatgttagaaaatcgctctcagaggagttaccacaaagaaaagctttctttctgatttttacatcccatcactcaaattactgtaacctacaaaattcatgaatatgcactagttccccattgcactaggtat

SEQ ID NO: 234917 - DNA, 627 bp, Homo sapiens
acccttggtcatcgtgttcttctcatccaagcttgctgagagcacccatttacctctacggtggaacccgggtataccaggaggcacccgagtggagccctaggcatgttcctccctgccccactgtgtacaagcagccacagctcctctcaatgaccagggtccatttcctcagccacctcctgaggacagctccggaagcagggttacttggtgtctcacagtcaagtagcctgccttcaccaaggccagcagcacccaagaaacatttctcaaggctgcctaatcctstgttgcagatggcaaggccttgctcccgcatcccaggagcctgtgttgtggctcttctgtggaactactggaagctccaagctgcctctgatccctactgatgcctccagcaccatagggtctgcaagattgtgtggccccagcagtagggatgaatgcaccacagcttggacccacagcacagccctttcctgcccaccacggtatacctggaagccttctgtgtcacacacaatctaggaatgggatgagttgccaccagaacccaggcaccatgcttacttctttgtagtagttaatgcaaaatgcagtgacttatctttcactgtggagcaa

SEQ ID NO: 234918 - DNA, 615 bp, Homo sapiens
accatccctgggccgccacacaagggggccaccttggaatagcatctttcaaacagatggccccccagattcaggattaacgtgcagtaaacagctggatgcaggcacgccagcaaggagatcccgtcctgctgctccccgctgggcacgctgcatcagcctgagggtgaggccgaaacctgggatgggcgtccgggcctccctgcagcccgcgtccacggtgacaactgttgggaacaggaccatttttatggcatcttcatctttctttgaagaccatttatccatttctccagcttttttctattcrttatattaatataaacctgcagagttttgaaaactgaggatgaagttgtattttccttccaccttaaatatctcttaaagaagccagaaatgaattaaaacaaaacaaacacaaacacatctattggtatttggggcaatggaaaatgtttctctgagtgtcctgatttatttgaaatgcttaattaaccataaaaatcttactatttacattgtgctttctaccataaaaacctgtttcacccaatctcactcacccaagagactagcagggcagtgatttttcaccatctctctccctgagcc

SEQ ID NO: 234919 - DNA, 575 bp, Homo sapiens
taactccttccctccagccagaaactaattcttactagataggtgggcatatgtcttattttctgagtatacacaactcttgcaacacttactaatgtttactaaatattcagctacaacctttacagtggagaaagctggcaaacactaccacagccagaaaaccaaaggccacatcgatggtggtaagtcwtgttgattacatgtatccttgccttgatatgatgtattgagaaggcactttacatgtgtggtcttcctccccataacccacagtcctaagagaaaaacatcagacaaacaccagttgagaaacattttacaaaatacctagaattttgggaccagtagtctccaaaactgtcaagggcatcaaaaacaagaaagtctgagaaactgtcacagcccagtcaagtctaaggagacatgacaactaaatgtaatgtgttgctccaaatgggattctggaacagaaaatggtcgttagggagaaagtacaaaaatctgaatgaagtctagattttagttaataataatgtagcaatattggttcattggttgtgataagtgtacca

SEQ ID NO: 234920 - DNA, 575 bp, Homo sapiens
taactccttccctccagccagaaactaattcttactagataggtgggcatatgtcttattttctgagtatacacaactcttgcaacacttactaatgtttactaaatattcagctacaacctttacagtggagaaagctggcaaacactaccacagccagaaaaccaaaggccacatcgatggtggtaagtcttgttgattacatgtatccttgccttgatatgatgtattgagaaggcactttacatgtgtggtcttcctccccataacccacagtcctaagagaaaaacatcagacwaacaccagttgagaaacattttacaaaatacctagaattttgggaccagtagtctccaaaactgtcaagggcatcaaaaacaagaaagtctgagaaactgtcacagcccagtcaagtctaaggagacatgacaactaaatgtaatgtgttgctccaaatgggattctggaacagaaaatggtcgttagggagaaagtacaaaaatctgaatgaagtctagattttagttaataataatgtagcaatattggttcattggttgtgataagtgtacca

SEQ ID NO: 234921 - DNA, 614 bp, Homo sapiens
aacaagtaggtccctgtagtaatgaccatttcctgtaaactctttgcagtcactccctaacgttgtagctctcatccaccattacacacaccaagatcaratgctctcatagtacaaagtattctttggtatcaccaaaagccaaataaatcaagtaatacaatgcaagaaaacagagctgtagacctgagaagactctacccatgactcttgaaactccacaaagaaagcagaacatctccacaagagatgagtggtacatttattctgagttgtttaaggggtctgagtcattagatgtcttctctagggttttttttttttcctcagtactgaagatggcaaaaggagaggagaaatagggtggttgaaagaaataaacgaaagaacaatttttaagaaagaaagtgaacagagaaatcaagtgtgtggttttgtctttctttttgaaacagtggggaattttagttagttcagaggccttgttcctcataattttgaattctcatttgtatttggcaaagctgggtagagtgggtcaaatctgatgggagaaaaaccaaaacaacatcaacatcaaaaaacaaacaacacaattactaagcactctaatg

SEQ ID NO: 234922 - DNA, 614 bp, Homo sapiens
aacaagtaggtccctgtagtaatgaccatttcctgtaaactctttgcagtcactccctaacgttgtagctctcatccaccattacacacaccaagatcagatgctctcatagtacaaagtattctttggtatcaccaaaagccaaataaatcaagtaatacaatgcaagaaaacagagctgtagacctgagaagactctacccatgactcttgaaactccacaaagaaagcagaacatctccacaagagatgagtggtacatttattctgagttgtttaaggggtctgagtcattagatgtcttctctagggttttttttttttcctcagtactgaagatggcaaaaggagaggagaaatagggtggttgaaagaaataaaygaaagaacaatttttaagaaagaaagtgaacagagaaatcaagtgtgtggttttgtctttctttttgaaacagtggggaattttagttagttcagaggccttgttcctcataattttgaattctcatttgtatttggcaaagctgggtagagtgggtcaaatctgatgggagaaaaaccaaaacaacatcaacatcaaaaaacaaacaacacaattactaagcactctaatg

SEQ ID NO: 234923 - DNA, 606 bp, Homo sapiens
caattcctgcagtaaacaacctgcagcctgctaagcattattattggaaagtgttgccacaaggcacgttaaacagtccaacaatttgccagaggtatgtaggacaatctattgaccctattaataaaaattttcacaatgttacattattcactatatggatgatgtactttgtgctgcccccactcaataaatgtttctccaatgttatgatcacttgcaaaatttgatttctcacaccagtttaattatagctcctgacaaaattcagattactactacctactcctaattggtgacatcagtaaatgacwctaccattgtgccacagaaagtaaacatatgtagggatcaattgaaaacattaaagactttcaaaaattactaggggacattgattggatatgacacatactaggcattcctacctatgccatgagtaatctgttttctatcctttgaggaaatcctagtctcactaaccctcagcaatcaacaaaggagtctgaggtcgagttacagctgattgaaaagcaagtccataaagcttaaataagtagaatagatccagagaagactctagatttgctaattttttcaactcca

SEQ ID NO: 234924 - DNA, 603 bp, Homo sapiens
cttacttggcaaacccatttagctgactttgggagtattctcaataaccattttcctaaaacaaagctgtttcaggttttgaaattaagcaataggattctccctaaaataactaaatttaaaccaattgaggttgctgagaatgtttttacaaagggtctagtaatggtaaagcttcttattctggctcaaaaagtgaagttttccagatgcctaaaaatgcagagctgtttgctgtaattgaggtgactgtttttgatatgcctattgatgtgatttctgtttcttcatacawggttcattccacacagttaattgaaaatgctcagttaggatttcatacagatgaacaactgatgactttatttaccaaaatacaaatagcatttagaagtagaatgcaccctttgtacatcactcatattagggttcatacacctcttccaggacttttgactgaagggaatcaaatggctgatcatctagtcactaatgcaatatctaacagtggacactttcacaatttaactcatgttaatgcctctggcttcaaatgcagatacagcattacctggaaagaagctaaagctattatccagtgac

SEQ ID NO: 234925 - DNA, 603 bp, Homo sapiens
cttacttggcaaacccatttagctgactttgggagtattctcaataaccattttcctaaaacaaagctgtttcaggttttgaaattaagcaataggattctccctaaaataactaaatttaaaccaattgaggttgctgagaatgtttttacaaagggtctagtaatggtaaagcttcttattctggctcaaaaagtgaagttttccagatgcctaaaaatgcagagctgtttgctgtaattgaggtgactgtttttgatatgcctattgatgtgatttctgtttcttcatacaaggttcattccacacagttaattgaaaatgctcagttaggatttcatacagatgaacaactgatgactttatttaccaaaatacaaatagcatttagaagtagaatgcaccctttgtacatcactcatattagggttcatacacctcttccaggacttttgactgaagggaatcaaatggctgatcatctagtcactaatgcaatatctaacagtggacactttcacaatttaactcatgttaatgcctctggcttcaaatgcagatacagcattacctggaaagaarctaaagctattatccagtgac

SEQ ID NO: 234926 - DNA, 519 bp, Homo sapiens
gaaactagaaagaagctttctgagaaactgctttttgatgtgtacattcacctctgagtttaccatttcttttgattcagcagtctggaatcattgtttttttttccattctgtgaatggacatttgggaggtcaacgaggccaatggagaaaaatgaatatcccaggataaaaactagaaggaagctatctgagactgctttttgatgtgtgcattcatttggaagatttaaacctttcttttcactcttcagtttgtaaaactgcttttatagaatctgcaaagggatatttgggagtgcattgagccctatggtaaaaaagaaaatatcttcacgtaaaaagtaaaaggaagttttcctagaaactttttgtgaagtgtgtattcatctcacagagttaaaayttccttttaattcagcagtttggaaacactgtttttgaccattctacaaatggacatttgtgaactcattctggacaatggtgaaaaagtgaatatcccaggataaaaactag

SEQ ID NO: 234927 - DNA, 576 bp, Homo sapiens
tgaattctagtcagatcggttctctgytcttgaaccctgtctcctgttaagatgtttatcaatgacaatgcatgcacagcgggacatggaacatcatcagtaattataatttcatctggccttgtaaccttgctctgcccttctgtccttgtgatctcttattgcccctaaagcatgtaatcttgtgacccactccctattcaatcttccccttttgaaatccctaataaaaacgtgccgtttttgctgctcagggggcatcatggaacctgctgacttgtgatgtcacctccagaggctcagctgtaaaatttctctcttttttactctttctctttatttctcagaccagtcaacacttagggaaaatagaaaagaacatacattgaaatactgggggctggtttccccagtaaagatccagaatcaccaaagctatcctaagccaaaagaacaaaactggaaaaatcacattttcccctggcttcaaattctactacagagctatagtaaccaaaacagcatggtactggcatacaaacagacacatagaccaataaaacagaatacagaacc

SEQ ID NO: 234928 - DNA, 567 bp, Homo sapiens
tcctgttaagatgtttatcaatgacaatgcatgcacagcgggacatggaacatcatcagtaattataatttcatctggccttgtaaccttgctctgcccttctgtccttgtgatctcttattgcccctaaagcatgtaatcttgtgacccactccctattcaatcttccccttttgaaatccctaataaaaacgtgccgtttttgctgctcagggggcatcatggaacctgctgacttgtgatgtcacctccagaggctcagctgtaaaatttcyctcttttttactctttctctttatttctcagaccagtcaacacttagggaaaatagaaaagaacatacattgaaatactgggggctggtttccccagtaaagatccagaatcaccaaagctatcctaagccaaaagaacaaaactggaaaaatcacattttcccctggcttcaaattctactacagagctatagtaaccaaaacagcatggtactggcatacaaacagacacatagaccaataaaacagaatacagaacccaaaaacaaatccacacacctatagtgaattc

SEQ ID NO: 234929 - DNA, 473 bp, Homo sapiens
ttgccagtggggacaataggattacatctaggaaggtctagtttaagtttaaaaggggtacaaatacatacaggagtcattgattcagattacaatggggaaattcaaattcttatatctacttctgttccctggaaagcagagccaggagagtgcatagcacagctccygataatgctgtatgtgggaatgggaaaaagtgaaattaaatgaaaagaaggatttggaagcacaaataaacaaggcaaagcagcttattgggtaaatcaaataactgataaacatcctacctgtgaaataactattcaggaaagaaatttaaagatttggtagatacaggagcagacatttcaatcatttctctacagcactggctgtccatgtggccaattcaaccctctcaatttaacatagttgaagttggtaaagccccttaactatatcaaaatagttatattttgcactgtgaaggg

SEQ ID NO: 234930 - DNA, 567 bp, Homo sapiens
tcctgttaagatgtttatcaatgacaatgcatgcacagcgggacatggaacatcatcagtaattataatttcatctggccttgtaaccttgctctgcccttctgtccttgtgatctcttattgcccctaaagcatgtaatcttgtgacccactccctattcaatcttccccttttgaaatccctaataaaaacgtgccgtttttgctgctcagggggcatcatggaacctgctgacttgtgatgtcacctccagaggctcagctgtaaaatttctctcttttttactctttctctttatttctcagaccagtcaacacttagggaaaatagaaaagaacatacattgaaatactgggggctggtttccccagtaaagayccagaatcaccaaagctatcctaagccaaaagaacaaaactggaaaaatcacattttcccctggcttcaaattctactacagagctatagtaaccaaaacagcatggtactggcatacaaacagacacatagaccaataaaacagaatacagaacccaaaaacaaatccacacacctatagtgaattc

SEQ ID NO: 234931 - DNA, 473 bp, Homo sapiens
ttgccagtggggacaataggattacatctaggaaggtctagtttaagtttaaaaggggtacaaatacatacaggagtcattgattcagattacaatggggaaattcaaattcttatatctacttctgttccctggaaagcagagccaggagagtgcatagcacagctcctgataatgctgtatgtgrgaatgggaaaaagtgaaattaaatgaaaagaaggatttggaagcacaaataaacaaggcaaagcagcttattgggtaaatcaaataactgataaacatcctacctgtgaaataactattcaggaaagaaatttaaagatttggtagatacaggagcagacatttcaatcatttctctacagcactggctgtccatgtggccaattcaaccctctcaatttaacatagttgaagttggtaaagccccttaactatatcaaaatagttatattttgcactgtgaaggg

SEQ ID NO: 234932 - DNA, 558 bp, Homo sapiens
aatcttttattaaaaaattatgaactcagtgaggaaatggcttgcagtatatatgaaacaataatgttcggactagtaactaaagctcattactcagagttatttattatagtattaagagccaactcctgtgagcagttggttatagcattgtgtaatatcaaacaagcatatatgcagtttggagggaaaattcccattgatgtttcattgctatgcacaagctggaataaggactgtggctttcaggtctattagagaaacaatgtagaaattatggggaacggaaastcacatgacccatgtctagacaactaaacttctagatatattccccaaaaagctaaaaacagatgctcagcaaaaaacttgtacacaaatgttcatagaagcattattcacagtgatcaagaagtggaaacaactatttatcaaaggatgaatggataaacaaaatatggtatatctacacaaatgatttttttggccatataaatgaatgaaaaactgatacatcctacaacagagatgaactttaaaaatatcaagctaagtgaa

SEQ ID NO: 234933 - DNA, 671 bp, Homo sapiens
gaaaaagggacgtttttacactgttaatgggagtgtaaattatttcaaaaattcaattattgtggaagatagtgtggtcatttctcaaagacctagaggcagaaataccatttgacccagcaatcccattacagggtatatacctgaaagaatataaattatcctattataaaagtacatgattgtgtatgttcatttcagcactattcacaatagcaaagccagggaatcaaccaaaatgcctattaattatagactgcatagagaaaacgtggcacatgtatactatgagatattatatagccatragaaggaatgagatcatatcctttgcagggacatggatggaggtggaagccattttcctcagcaaactaaaggcagaacagaaaaccaaacactgcatgttctcacttataagagggaactgaacaacaaaaacatgtggacacatgggagggaagaacatactgagccttgttgagtcagggagggagagcatcaggaagaatagctaatggatgttgggcttaatacctaggtgatgggttgatctgtgcagcaaaccaccatggcacacatttacttatgtaacaaacctgcacatcctgcacatgtatcccagaacttaaaataaaagtagaaaaaacaaaagaaatgaggtgttgatt

SEQ ID NO: 234934 - DNA, 671 bp, Homo sapiens
gaaaaagggacgtttttacactgttaatgggagtgtaaattatttcaaaaattcaattattgtggaagatagtgtggtcatttctcaaagacctagaggcagaaataccatttgacccagcaatcccattacagggtatatacctgaaagaatataaattatcctattataaaagtacatgattgtgtatgttcatttcagcactattcacaatagcaaagccagggaatcaaccaaaatgcctattaattatagactgcatagagaaaacgtggcacatgtatactatgagatattatatagccataagaaggaatgagatcatatcctttgcagggacatggatggargtggaagccattttcctcagcaaactaaaggcagaacagaaaaccaaacactgcatgttctcacttataagagggaactgaacaacaaaaacatgtggacacatgggagggaagaacatactgagccttgttgagtcagggagggagagcatcaggaagaatagctaatggatgttgggcttaatacctaggtgatgggttgatctgtgcagcaaaccaccatggcacacatttacttatgtaacaaacctgcacatcctgcacatgtatcccagaacttaaaataaaagtagaaaaaacaaaagaaatgaggtgttgatt

SEQ ID NO: 234935 - DNA, 617 bp, Homo sapiens
tattaattcttacttttattgtgttgtggtctaagagtgtgcttggtatgattttgtatttttttaaatttgttgagaattgttttacagctgagcgtgtggcctatttagaatacatgcaatgyacagatgagaagaatgtatatcctgttgttgttggataaagtattccctaaatgtctgttaggttcatttggtccagtgttgagtttagattcctaatatctttgttacttttctgccttgatgatccatttaatactgtcagtgggtggttgaagtctagccttgttattgtgtggttaacaagccacttcataggtctctaaatctggttgctccagggttgggtgcagagatgtttaggatagttaagtcttcttgttgaattgagccttttatcactatgtaatgcccttctttgtcttttttgatcattggtgacttaaagtctttttttttttctgaaataaaaacagcaatcccttctcttttttaatttcccatttgcttggtagcttttttctccatccgtttactttgaacctatagatgtctgttcatatgagatgggtatcttgaagacagtgctactgggtcttgcttctttatccaac

SEQ ID NO: 234936 - DNA, 611 bp, Homo sapiens
aaattatacagtttcaggtaatatcttcatagcagtgtgaaaacaagctaatataattactaataaaataaatgattcagactatgatcattaatagataataagtctactagtgaaagttgatggggaacttttcagtgaagagatcatgttgtcaccatggatcaactttgttatcactaagagtgaggttcttagacatcatgcgctttttatataatgatgcaacaggaaaaacacagaatgacccttgaagtattcttctctttctcttgcacacacacccatgtacacccaaaaaacctgaatctgatcaaatctttagatctaatttgcagtctattgaaaatrtaggggatagaggcacaagttaaattatatcgacaggaaacaatcagtcaaatccagaatgaagatactttgtaggaaaaactgaaccgtttctccaatggcattaagaaaaggtgagagtagatcacaagtaattttagaaagacaagtgtaggtgagcatatttaccagttggctgggacagtcatggtttactcttgttaccacaatgtgattgttatttattctcccttttagctcagaggcatttagggtagggc

SEQ ID NO: 234937 - DNA, 611 bp, Homo sapiens
aaattatacagtttcaggtaatatcttcatagcagtgtgaaaacaagctaatataattactaataaaataaatgattcagactatgatcattaatagataataagtctactagtgaaagttgatggggaacttttcagtgaagagatcatgttgtcaccatggatcaactttgttatcactaagagtgaggttcttagacatcatgcgctttttatataatgatgcaacaggaaaaacacagaatgacccttgaagtattcttctctttctcttgcacacacacccatgtacacccaaaaaacctgaatctgatcaaatctttagatctaatttgcagtctattgaaaatataggggatagaggcacaagttaaattatatcgacaggaaacaatcagtcaaatccagaatgaagatactttgtaggaaaaactgaaccgtttctccaatggcattaagaaaaggtgagagtagatcacaagtaattttagaaagacaagtgtaggtgagcatatttaccagttggctgggacagtcatggtttactcttgttaccacaatgtrattgttatttattctcccttttagctcagaggcatttagggtagggc

SEQ ID NO: 234938 - DNA, 316 bp, Homo sapiens
aaattctttgaagagaaaaaaaacccaccaaagctcatttaagaagaaatacctaatatgaataaccctgtatctatttataaatgttcatttttactaaaaaccttcctacagagaaaatgcaaggttcagatgccttccctagtggattctaccaaacatttagggaagaaataatatcaaatctatatacactattttacataytttaaaagagggaatacttcagactcattctatggagccagcattaccttggttccaaaaccaaacaccacataagacaattactgaccaatatcccttataaacatag

SEQ ID NO: 234939 - DNA, 459 bp, Homo sapiens
cacaatattcttaatcttttctgtaagtaagcctgacattacttcaaagaaaaatattataaaacagaatgtgaggaaaggaattgaaaatgatgcacctaagtcactygaggaattttcctgcaaatgtagccatagttgattggacagatagggtcaggaggtatgaaacttcactataatgccaggcacagagagatgctcaagctgagagacattagggcaggaagataaaactcaaagaaagccttatcctgatcactctgtggccagaagacgggtcagcaatgctattctttttcttttttgattctctcttttctctgattcaaacagctgggtttgtgtaagttaagtgtctccattatacacttaacattttatttatcaattcttatactcaggatcagaatttgcaatgtacagctatatgacttaaaatgccaaacatcacaaagt

SEQ ID NO: 234940 - DNA, 469 bp, Homo sapiens
ttttctgtaagtaagcctgacattacttcaaagaaaaatattataaaacagaatgtgaggaaaggaattgaaaatgatgcacctaagtcactcgaggaattttcctgcaaawgtagccatagttgattggacagatagggtcaggaggtatgaaacttcactataatgccaggcacagagagatgctcaagctgagagacattagggcaggaagataaaactcaaagaaagccttatcctgatcactctgtggccagaagacgggtcagcaatgctattctttttcttttttgattctctcttttctctgattcaaacagctgggtttgtgtaagttaagtgtctccattatacacttaacattttatttatcaattcttatactcaggatcagaatttgcaatgtacagctatatgacttaaaatgccaaacatcacaaagtgtaataggataacttttgttttttac

SEQ ID NO: 234941 - DNA, 613 bp, Homo sapiens
tatagtaacaattggaacaatggaagcagacatttatcaaaataagagtaaactcagagctagccctcctcattttggcaaaatatctttatttccaaaagatcttttactccaattcagtgttctatgctgccaaagatagttctttctttgtcttgcatttatatttctttccctaaaattcacaagaattttattcataatattttggattgctccaatgacacaaatggtgtctattacttgtctcacatttaatcactaattatatgcataaagtataatacagcagttttccagctgtgtacaacaacccatgatgcyaatctttaagaactaatatagtttttcctactttaatccatttaattaaaaaactccaaaattatttccaaataatgttaataagtatgtatgtgctttacattgtaattggatattgtttattggttgtatatttacattctttacatctcttttcctgatacatacatttatttttactgacgcaaagagtaaaacatgtacccacttaaataaatgttacttaacagtttattaccagctaaataacaattgaagaatttatttatgatgaagtgccaaagacagt

SEQ ID NO: 234942 - DNA, 613 bp, Homo sapiens
tatagtaacaattggaacaatggaagcagacatttatcaaaataagagtaaactcagagctagccctcctcattttggcaaaatatctttatttccaaaagatcttttactccaattcagtgttctatgctgccaaagatagttctttctttgtcttgcatttatatttctttccctaaaattcacaagaattttattcataatattttggattgctccaatgacacaaatggtgtctattacttgtctcacatttaatcactaattatatgcataaagtataatacagcagttttccagctgtgtacaacaacccatgatgccaatctttaagaactaatatagtttttcctactttaatccatttaattaaaaaactccaaaattatttccaaataatgttaataagtatgtatgtgctytacattgtaattggatattgtttattggttgtatatttacattctttacatctcttttcctgatacatacatttatttttactgacgcaaagagtaaaacatgtacccacttaaataaatgttacttaacagtttattaccagctaaataacaattgaagaatttatttatgatgaagtgccaaagacagt

SEQ ID NO: 234943 - DNA, 398 bp, Homo sapiens
agttattagtcttatcatgtgtagctaattgctacaaatgtcattttttctttcttcctggataatgtaagttgaatttggaaataaagcagtgatgtgttcacttcaggtaatggaccattattagtcttaggcaggaataataatcttgtttctcactcttgcttaatttcccaatatcccttgcagcaagggcagccaaaggatctaagttaggcaaataagatttacacagaaattttctgatggtgtttctgagaaggtacttaattacyttgtaaaagaagacagatgtgcctggcatagtcccttacctcttctatttgccttccttgaatgtgaatcagatgcagcagccatcttttgacaagtcatgaggataaaagccaacacactca

SEQ ID NO: 234944 - DNA, 562 bp, Homo sapiens
ttgtctacttactataggacatacaagagtcatttaatttaaacaattacacattattataaagaattatttttaaacttatagggcaatggttctcaactgattgcacctttgcatttgrcaatgcataaataaatttttggttgttacactggagggaattctacttgcatctagtatgtctagccagatatttcctcccaacaaagaattatcctgtccaaatgccaaaagtgccaaaatacttgcaaataatttggaatgcatctattgggaatgttaagggttgtccttataaagattaaattaattaaactatttcttatagtcatagttaatggccagattatacctgtgacaaagttagtgccaaatttgaggactcttaatatttttttagttgaaatgatatcatttaaaaatagttttaattagttggctacagatgagagcaaaatatgaaacaatcactacacacagtagaaatctgagataaaacaaatagaccatctgatgttcaaagggcttctaccctgctgactgttgaagaacttttgttatt

SEQ ID NO: 234945 - DNA, 620 bp, Homo sapiens
gtgagtccccctctcactccttcccctaaaacagatgtctggtgaatatggccccattaagggccaagtctccttttctctacaagacttaacacaaattaaggggaatcttggcaagttttcagactatcctgaccggtatatagaggctttgcagaatttaacctaagtatttgagctctcctaggaggatgttatgttagtttttaatcaaaccctgactaccatggaaaagcaggtcaccctgcaagaagcagagaattttkgggatgagctttgtatctcatatagtgccagggaagaggaggagccttatccaaatggaaaaatatcagtaccattggaggaccctaaatggggccccagtggtgaaatgggagaatggaaaaggaaacactttcaggcatgcacactagtgggcttacaaaggactagaactaagcctctcaattactacaagccatccctggtagacaagggattagatgagaatcccactgccttcctagaaaggctaagtgtggccttggtaaagcacacctctctatttcctgatccagtgaagggacaactgatcctgaaggataagtttattacttcggtagcttgtgatatcagga

SEQ ID NO: 234946 - DNA, 620 bp, Homo sapiens
gtgagtccccctctcactccttcccctaaaacagatgtctggtgaatatggccccattaagggccaagtctccttttctctacaagacttaacacaaattaaggggaatcttggcaagttttcagactatcctgaccggtatatagaggctttgcagaatttaacctaagtatttgagctctcctaggaggatgttatgttagtttttaatcaaaccctgactaccatggaaaagcaggtcaccctgcaagaagcagagaattttggggatgagctttgtatctcatatagtgccagggaagaggaggagccttatccaaatggaaaaatatcagtaccattggaggaccctaaatggggccccagtggtgaaatgggagaatggaaaaggaaacactttcaggcatgcacamtagtgggcttacaaaggactagaactaagcctctcaattactacaagccatccctggtagacaagggattagatgagaatcccactgccttcctagaaaggctaagtgtggccttggtaaagcacacctctctatttcctgatccagtgaagggacaactgatcctgaaggataagtttattacttcggtagcttgtgatatcagga

SEQ ID NO: 234947 - DNA, 491 bp, Homo sapiens
atactgattctaaatatgtttttctagtcctccatgcccttgccactatctggaaagaagaagttcctcacagccaatgggtctcccaataaattccatcaggaaattaacagactattatccttggccttccttccacaagaagtggaagcaatacattgtcaaggccatgaaaaggggatggacgaaagagttgagggaaataagttggcagaccaggcagctaaaccagcagcaagagggccytatatttctgatccacttgaggcccctctgatctgggagggctccatgaaagaaataaaacctcagtattcctctgcagagagagaatgggccacctctcagggatacacacttcagtcctcaggatggttgcaactggaggatggcaagcttcatctaccagctaccaaccaatggaaagttctcaaaattctccaccatgccttccagctaagtaaggataaaacctatcaagtggcccaaag

SEQ ID NO: 234948 - DNA, 508 bp, Homo sapiens
tgaattctttcttcatttggatgtttaatgagaacaatgaaagatccaaggatgtttctcagaccctgaacttggtagactgggaagtcttaactttttatatgccaacttactgcatggattcaaattggaagttcccattctctttggaaaggactcccatcaccactccaactaaccttcaggtcaaggattttatttacccttgtgtgtgtaacactttctcagtctgcttgtttcatacaattacacaatagtggaccctgtgtagtaattacataataattacataaataacasaatcttacagctgagagcgacctcagaaatgatctagaataatcattaccttttgcagatgaagaaattgaggcctggagagataaaactccttgcccaaggtcactcaactcatcagcagcagagttaaactagcactcagccttcccaccggcctgtgtcatatccttcccactataatatattgtccttaaaactcaaatcaatg

SEQ ID NO: 234949 - DNA, 397 bp, Homo sapiens
agtttcatggtccaggcccagggacaccctccccactcacaccggcacccctacccaaccccctcaccctccccccagcttcacactattctgcacaacgttgggacaatgttccccacatcctggccactctggctccatcctcagctcaaagggcccctgatatagattaggctgctgtttcagagggtgtaagccataagctttggcagcttccatgygatgttaagcttgtaggcatgcagaatgcaacagtgaaggaggcttggcagcctccatctagatttcagaggatgtatgaaaaaccctgggcacccaagcaaaagcttgttgcagggttaaagccctcacagagaacctctactagggcaatgcagtggggaaacgtgtggttgga

SEQ ID NO: 234950 - DNA, 572 bp, Homo sapiens
atgtatgaaaaaccctgggcacccaagcaaaagcttgttgcagggttaaagccctcayagagaacctctactagggcaatgcagtggggaaacgtgtggttggaagctccacacagtccccactggggcactgcctagttaagctgcgggaaggaggccaccatcctccagacaccaaaatggtagatctactagcagcttgcagtctgtgcctggaaaagttgctggcactcaacaacctatgagagttgttttgggggctgaactctgcaaagccatggtacagaggtgcccaagcccttggagcctacctcttgcaccagtatgccctggatgtggcacatgaagtcaaaggggattattttggagctttaagatttaatgactgccctgctgggtttcaaaattgcatggggccggtagcccctctcttttgaccaatttctcttttttggaatgagaatgtttacctaatgcctatgcccccattgtatctcggaagtaaataacttgttttaattttacaggctcatacatggaaggaactcatttccagatgagactttggattg

SEQ ID NO: 234951 - DNA, 523 bp, Homo sapiens
ggcaatcatcctttgtttttccttttagtttcaagggatgtggcagtttccttcatacggatctaagggctatcctgctctctcccagcttctcagaatcttcagcctcttcagtattcacttttccacctaggtattcaataygtccttctcttttgagtttttcccatcccaaagccaccagagagcctgacacagactgccttcccaatttatgaaacaaagatgtggaatccacgagcacaggaagcatttcaacatgctcaggtcttccccagctccacgttcccttccagctaacactttatttcccatccccttcttaccttgaaagaacttccaacttcactggttctatattcttacctcttcctgtcacctccttgctgtctgtcctctacctccaccatcacactgaaactgctcttgccaaactcatcaatgatgttgttgctgctccacccaaagaatctttccttccttctctttctagatctctttgtggcacaagactcctttgacc

SEQ ID NO: 234952 - DNA, 523 bp, Homo sapiens
gaggtcaggcagccaagaacaagcttcagatgatgctgcagaacttgtctggtagacactgatgtggctgtcacagggcacagacgccatgatttgcaccacaatgccaccacgccagtactggatgttagatgtcctccccagaaccactgccatggcaacctctggaggttagatgcagctgtcgttgctgtttccaaattgtagcccctgggtagaacctgcttctgtgctgcacgagctttcgtttgtttgttttgagacggggtcttgctctgaagcccaggctggagtgcagtgtggcacgatcatggctgaccacagcctcgaccacccaggctcaagcaatcctcctgcttcagcttcccgagtagctgggaccacaggtatatgccaccatgcctggctatttattattattgktatcattattattattcacagagacatgctcttgctatgtgtcccaggctggtcttgagctcctgggctcaaggaattctcccaccttgggctcccaaac

SEQ ID NO: 234953 - DNA, 580 bp, Homo sapiens
accaatccaaaatctgaaatacttcagggyccaaacattttggataagggacactcaacttgtgtatctgtctaattgtaatagatagagtagctatagatatatagatataggtattgatagatgtagagtgtgtgcatgattgacttctcagtgtgtctattgttgtgtgagtctctatgtgtatgaatgtgcacacacacctgtctaaagttatccatgcacttgtggatgggacttgagaatcatttaccaaatcctttccttttaccaaggaggacattatggcccagaactagagtgtgatctacatcagatcatagcattaaagctgagcaaatgggaatctgggcagccccactcctgaccctgagcaccaagcagggcccatcactggacagcggcctagtggttgggagggtaggctccacgctgagattgcccagccttgagtcttggcttttctgctccaagcaggtggctaagcctcgctactcctccttctcttcacatgaggactgaaaacaagaatgcccatctcatgcttactgtgaatataaaaaatgagataatgcatagt

SEQ ID NO: 234954 - DNA, 487 bp, Homo sapiens
ttaaacctactaataatcaatgagctgtatataaattaccaatgagataatacttttcatacacctatttttttccttatcatttttgagtaagattactcaagcttgtatggctggagtgaagtgctggtaagaaagtaatcttgtacaacttttctggagagcaatttggcaaggtgattcatgagcttgaaattcatgttcatgccgtttggcacactatttgaacatattaaaatctattttaaggaaatcatccaaaatgtaaataaagattgatgcaaaaagatgttcatcacagtgttattyataatagcaaaaaaagcaaccatgtaaatgaccaatgtcagactaaggttaaatatattacacataatgtacaattatattaatgtaactgtttaatatgatgtttatgaaggcctggaaaatgctgatataatgacattaagtgggaagcaaagtacaaaattataaatgcagtgtt

SEQ ID NO: 234955 - DNA, 487 bp, Homo sapiens
ttaaacctactaataatcaatgagctgtatataaattaccaatgagataatacttttcatacacctatttttttccttatcatttttgagtaagattactcaagcttgtatggctggagtgaagtgctggtaagaaagtaatcttgtacaacttttctggagagcaatttggcaaggtgattcatgagcttgaaattcatgttcatgccgtttggcacactatttgaacatattaaaatctattttaaggaaatcatccaaaatgtaaataaagattgatgcaaaaagatgttcatcacagtgttattcataatagcaaaaaaagcaaccatgtaaatgaccaatgtcagactaaggttaaatatattacacataatgtacaattatattaatgtaactgtttaatatgatgtttatgaaggcctggaaaatgctgatataatgacattaagtggraagcaaagtacaaaattataaatgcagtgtt

SEQ ID NO: 234956 - DNA, 521 bp, Homo sapiens
aaaactctcatttgccaaaaaatatcagttggatggtgcttcttggagtcattcaaggctaagaccctgagtagcttaaagcaagcatcctctttgacaaaatttaagtttcctgaaaagactgtgtataataacttcttcagatggccatcaatgccctttacagaacctgtgatcagtaaaccacttgtgatcttcatcaaggtctgtgcgatttctcctgatgatgtatggggtttgtctttgtggcactcttgtttgtggctcatgaataatagcttgtgtcatacacagcagtggaaactgggagattttgcacactctgccacttgctgttttattttrggcaagttccttaaggtttctgagatttagctttatatttataaatgaggactgtaagaaaattacctacaaggattttatacactgtaaagaactatggaaatgaaaggggctaccactgtcgtttaactgtgttggacaccaggtatcccatgaatgatgatgaagaaatgtta

SEQ ID NO: 234957 - DNA, 585 bp, Homo sapiens
aaattttgattgaagcatttgctattaatattttgatttaattgcattgtagccagaggaggtagcctatgctacttctacttttagaaatttattgatgttttcatttaggacaaatacagagtcaatatctgtcaatgttttatgggtgtacacacacacaaaacggcattcttttaggttaaagttctacatatagctattaagtcaatcatataattacattgttcagatccctaaattattatttatataaaatactgagaaaaaatatgtaaaacagtttctctactaatatatttatgttcaatatttcctrtatttaacaagctttgtgttatatctttttatatatatactttaagttcttttttcaaaaaaagtaccctcctatttaatgttttgtctgtactgaattttattttacatgactcttctaggtactttggagctttggcatccgtacattctaaattaagttgctcagcctcttgcatgggacttgcaaagaggtgaggaacaatggacacaaaattcccacacatgcctctctcccgcttccacgcttgtgatggaacggtggtt

SEQ ID NO: 234958 - DNA, 392 bp, Homo sapiens
ttgggtcacttattatttcattcaatatatatttactgagggcttactatgtgtcagtttagagacacaaaattaagcaagagagacccagtgcttgctcttgttgagttcttggtctagctgggaatacaagcattaaccaaagaattacaatctagagtgatgattgtttggaagcagaaatgcaggggcactggggtagcttatgatgggagggggaccaaggaagttaggaaggaactggcttcctgctggaagtgccatttaaattaaaccatggaggaaaattgagacgtgagtaaactaaggaggtgtgtgtgtatgtgtgtgtgtgtgtgtgtgcctgtgtgtgtgwgagagagagagagagcgtggtgaatgcaagaggaagc

SEQ ID NO: 234959 - DNA, 600 bp, Homo sapiens
catgctgttactcatttctttatgctgccataatctaatataaaattgaataacaataaatgcaccttatatttgtatagctatacacactaatttacatgatcttcataagaactatgaaatggctgtgattatccccatttttaaaatgatactataaaggcataaaatgctgtatttatggtatgcaaccctttggtgaacaaccctataaatatttaattacttatattgatgttcttcctacgtctaagaaaaatgttatttccattcccaagatrttagtagagacgaagatttttcaatttgtctccttgattttgttggattatagcattaaagttatttttacaaagccatctacggtaacccagtagaaagggtaagcctgttggcttaggaaaactgaatggcattcagtttcttcaaagaaatttgggacagatgtgggttttttttcttcttcttcttcaacaaatccagaagatgaaaaatgtattttatttcttgtgaaatgcatttttctgttcatctcagtatgtgggactgttgaagtttataagtttggcagtgttctaacatggccatcctgttctcctt

SEQ ID NO: 234960 - DNA, 441 bp, Homo sapiens
taagagattttcccaagtcattttctggaactcacgaagctcccttggcctgctgactccaccatcaatgaaaccatgagattcttccctagtgttccaatctcctttgatttttcaggcctatttcagctctcattttcatatcccagctttgcctttacactcgatattttaaagmgcttcagagttgaccataattgtgtcctagtgcatggagaagttattccattctctccaaattgttatcctggatgattggatttaacaacctctaggaggatttgtggaggttttagtttgatttccctgtgatcattgatggtatttttattttcatttgctaagaagctttctgcagtacagggaatagctaatcatgccattcctatctttggctcatcttaacttccttcttactaaacatccacctttaaatactat

SEQ ID NO: 234961 - DNA, 595 bp, Homo sapiens
aacataccctgggtaacagaggctcttctgcattaaatatgcccaagaaaatcatatttcatcaatgcaaatggggcagaaaatgcatcattttagtgaggccaaaccactgtgtcagatgaaatttaccaaaatgtacagtttttggtcatcwtacagccaataggattgagaaataggatccacgcaatgccttaaatcctgaaatgataggagaaatatggttgcgtcatgaaatttatcagatacatccctttgccaagtaaataaaaaataaaaaaaggactgcaacattcaacatcatgggaagagagggaagacaagatggcagggatttttttttttttttccaaactccacaacgtcaagggaaaacaaactggactgtcaaagcaaattctgacaatgcggagtgctgtccctggcagaggcggcagctccatcgctctgtttgtttgggcccagccgtggcttttattagactttgaagagcaccctaacggtgggtcatggggcggtcactactcatctctgctgttgttccacgtggcctctctcggccgctacgggaagaagggaatggtttctttaagga

SEQ ID NO: 234962 - DNA, 437 bp, Homo sapiens
gaattcaaatcttatcaaggccagttggaagtaygggttggctggagaggggctaagacttgtatgagggacatgcagggatcacaggcaggcagtgaggaggtaaataaaaccaacctgtaggaaaaactgagttcaaactactctgaagcttcaaggcaaaacctacaggatcagaggaagagggagataagcatgaaaggagaaaaggatttagggtacaaggactgtttgggtacctacatatgtggctgaggggttggggctttttggcagtgagaggcaatccctacttggagctacgatagatgatacagtttcagagcttaaatgaactgaaattcatgtaagatgatctcatcctgtctccccattctacaagatgagaaaataaacttcagaaaggggagggccctgggtaccacggcaaggttgta

SEQ ID NO: 234963 - DNA, 525 bp, Homo sapiens
gagatgaatctagtaaaacagattagggagattgtgtgaaaggccctatgtaatgctgtactataagaatggaaagccggccaggcgtggtggctcacgcttataatccagcactttggaaggcagaggagggcagattatgaggtcaagagattgagactatcctggccaacatggtgaaactcgtttctactaaaaacacaaaatttagctgggcatggtggcgcgctcctgtagtcccagctactcgggaggctgaggcaggaatcgcttgaacccgggaggcgagggttgcagtgagccgagatcgcgccactgcactcagcctggcagcagagcgacactccgtctcaaaaaaaaaaaaaaaaaaaaaaaaaaaaaaaaaaaaaaaataatggaaagccatcacaggttgtcaaacagaraaaaaacaattaagtgtatatttcagaaagataattatattttaatgtgtaggattggctggagagaaggggtagaaaggccagagaaatgttgaaataa

SEQ ID NO: 234964 - DNA, 604 bp, Homo sapiens
tttaatctttacttttgcttaaaaaattcattggtatgtgtctatttttttcatttattacaaaaatcatttaggagaaaacatatatatttgaatgtataaaaggatttttctcacagttgagatcaatctgttatattgacattattttctataaattcaattctcttagacacatataaagagcagactgtgcttttgggttggtaaaggatcataaattggttatctggacaccacttaatgttctcatatcctttgtaaattgctattaggttatataatatgtaraatgttctgcataacataataagtttattcaaaataacagtttttcagaaaatctttacagaaagtattactaatcactggcaatattgtgacctaaaatggtagatagcattccacattttgaaacctgcatgtttgcacctttaaatgtccatacaaagtgatctaacgctgatttttgaagttggaaaggacattaaaacagtaatatggggatagagcaaagaagagatactatactcacctctgtgattccctttagtcactttaaaataaaacagagccccctatttaggaaaatgcctattcacaa

SEQ ID NO: 234965 - DNA, 549 bp, Homo sapiens
caatacttcagcatttccaacaagaaagagaggtaccaatgagaacaaaataagaaactacgttctatgactgagaaattgtttctaaatatttttctactatttttaatttgtttccaatggaaagatagcaacagattaactgctcacatgcccatttgatttttttaaaaaattaaataaacttattttacttttatggttgcagataggaattattaaccatctgtctttgtattatttaaactttaaacaaataaacattattgtacaaccagaaagcagttattcatagacttgtacayttattccccagtaatttttctttgctgtttaaaaagagcctaaagctagcatcatttaaattatttttaaaattcattacctacaatactaagaaaaacagatgataatacagtatgtcattgtaaatgaaaaaggccttgaagagttttttttaacttactagaagcttcaattatctccttttgaggaaatagttaagaagaaaaaatgacaacctcaatcaactcacactgttaaaagaaa

SEQ ID NO: 234966 - DNA, 492 bp, Homo sapiens
ctcctaaggtaatatggcctacctggccttcatgctcattctttgtgtttaggacacaatcttctttgaattactcgactgtaacctattctccttccttcagctcatagaagcagggcttttgcataccattttcctatgacagtctttcctccctcctttatctatcacactatattcacaagattaacaaattcagatacttcagacaattcaacagtcatttcctctggaaaatcttccctgaccacagaggtcagatagttgtttacaaagcagttttaaaatgggtcagytttaatgaacactatgataattagactgaaaaagtaaaagaatcagcacttgttctaacagtttacaatgtaataatgtagagaaactggaatcctcatacactgttagcaggaatataaaattgtgcagctactttggaagctaatttggcagttcctcaaaaagttaccatatgacccagcaattccattgcta

SEQ ID NO: 234967 - DNA, 540 bp, Homo sapiens
tgagatgaatgcacacttcacaatgtggtttcttagatggcttccatgaagtttttatcctgggatattcactttttatccattggtctcaatgagctccraaatgtccattcgcagaatggacagaaacagtgtttccatattattgaatcaaaagacaggtttaactctgtgaggtgaatgtgcacatcacaaagaactttctcagaaagcttctctctagtttttattttgagatacatgtttttcaccaaaggccctcatgcactatgaaatatcctttggcgattctacataaacagcatttgccaaactgctggaacaaaagaaatgttgaattctgtgaggtgaatgcaaccatcacagagtactttctcagaaagcttctttctactttttatcttaaaaattttctttttcaccataggtctcaatgcattcccaaatatttcttcacagattctacagaaacagtgtttccaaactgctgaatgtaaagaaaggtttatctgtgcaagatgaatgcacacatccaaaagc

SEQ ID NO: 234968 - DNA, 442 bp, Homo sapiens
cagtttggaaacactgtttatgtagattctgcaaaggggtaattgggagagcattgagrccaatcgtgaaacagaaaatatcttcagataaaactagaaggaagctttctgagaaacggctttgtgatgtttgcattcatctcacagagttaaaactttcttttgattcagcagtttggaaatactgtttttctccattttgtgaatggacatcagggagatcattcagtccaatggtgaaaaagtgaatatcccaggataaaaactagaagtaagctatctgagaaactgctttgttatgcttgcattcatctcacagagttaaacctttttttcattcagcagtttggaaacactgttttggtagaatctgaaaagttatatttgggagcgcattgaggcctgtgttgaaaaagaaaatatattcagataaaaactaaaa

SEQ ID NO: 234969 - DNA, 442 bp, Homo sapiens
cagtttggaaacactgtttatgtagattctgcaaaggggtaattgggagagcattgagaccaatcrtgaaacagaaaatatcttcagataaaactagaaggaagctttctgagaaacggctttgtgatgtttgcattcatctcacagagttaaaactttcttttgattcagcagtttggaaatactgtttttctccattttgtgaatggacatcagggagatcattcagtccaatggtgaaaaagtgaatatcccaggataaaaactagaagtaagctatctgagaaactgctttgttatgcttgcattcatctcacagagttaaacctttttttcattcagcagtttggaaacactgttttggtagaatctgaaaagttatatttgggagcgcattgaggcctgtgttgaaaaagaaaatatattcagataaaaactaaaa

SEQ ID NO: 234970 - DNA, 442 bp, Homo sapiens
cagtttggaaacactgtttatgtagattctgcaaaggggtaattgggagagcattgagaccaatcgtgaaacagaaaatatcttcagataaaactagaaggaagctytctgagaaacggctttgtgatgtttgcattcatctcacagagttaaaactttcttttgattcagcagtttggaaatactgtttttctccattttgtgaatggacatcagggagatcattcagtccaatggtgaaaaagtgaatatcccaggataaaaactagaagtaagctatctgagaaactgctttgttatgcttgcattcatctcacagagttaaacctttttttcattcagcagtttggaaacactgttttggtagaatctgaaaagttatatttgggagcgcattgaggcctgtgttgaaaaagaaaatatattcagataaaaactaaaa

SEQ ID NO: 234971 - DNA, 442 bp, Homo sapiens
cagtttggaaacactgtttatgtagattctgcaaaggggtaattgggagagcattgagaccaatcgtgaaacagaaaatatcttcagataaaactagaaggaagctttctgagaaacggctttgtgatgtttgcattcatctcacagagttaaaactttsttttgattcagcagtttggaaatactgtttttctccattttgtgaatggacatcagggagatcattcagtccaatggtgaaaaagtgaatatcccaggataaaaactagaagtaagctatctgagaaactgctttgttatgcttgcattcatctcacagagttaaacctttttttcattcagcagtttggaaacactgttttggtagaatctgaaaagttatatttgggagcgcattgaggcctgtgttgaaaaagaaaatatattcagataaaaactaaaa

SEQ ID NO: 234972 - DNA, 592 bp, Homo sapiens
atgaaacagttttagtccattctatgaatggactttagggagctcattgacgccattggtgaaacagtgaatatcccagcagaaaracaaaaggaagctatcttagaaaccgctttgtgatgtgtgaattcatctcacagagttaaacctttcttttcattcagcagtttggaaactatattttgtacaatctgtgaatttgggagaccattgagacctctggtgaaaaagaaagtgtcttcagacaaaaaggagaaagaagatttctgagaaactgctttgaatgtgtgcattcatatcacagagtttaacatttcttttggtttagcagtttcaaaacactgtttttgtccattctgcgaatggacatttgggagctcattgaggccaatggcaaaaaagtgaatatcccaggataaaaactggaaggaagcactctgagaaactgctttgtgatgcatacattcatcttgcatagttaaacctttgttttcattcatcagtttggaaacactgtttttgtagaatctgcaaagtgatatttgggagcaaattgaaacctatcgtgaaaaagaaaataaattcagataaa

SEQ ID NO: 234973 - DNA, 615 bp, Homo sapiens
ttagaccaatggcaaaaaagtgaatattccaggataaaaactagaaggaagttatctgagaaactgctttgtgttatatgcattcatctcacagagttaaaactttcttttcattcagcagtttggaatcactgtttttttagaatctgtgaatggatattttggaacacattgaggctccaaatggtaaaaaagaatggtaaaaaaagaaaatatcttgagataaaaattagaaagaagctttctgagaaacatcacaatgatgtgtgcattcatctcacagagttaaaattttcttttgtatcttcagtttggaatcactgtttttctccattctgtaaatggacatttgggaactcattgaggccaatggtgaaaagcaagtatcttaggataaaaactagaaagaagctttctgaaaaaatgctttgtgatgtgtgcattcatcttgcagatttaaacttttcttttcattcagcagtgtggaaacacagtttttstacaatctccgaagtagtattttggagggctttaaggcctatagtgaaaaagataatatattctgataaaaaatagaaagaaacttcctgagaaattatttgtgatgggtgcatt

SEQ ID NO: 234974 - DNA, 577 bp, Homo sapiens
  misc_feature (1)...(577): n = A,T,C or G
tagtcattcatttcagtttatcttcatttccccctttgcaacatgaaacattagrgcaggacaaaattcaatttcaggtgatatgcaaccataatactagaacccctgagaagcccctaaatgtgcacttaagtaaatttacacttggtcagtaaccatactgttcattccctctaaaaagatgtattatccctttgaacactaaatcctttcatttgcagacattacggttttaaattagggagaaaaagaagctactgacagagacagaccagtcatcacttcccttttatcttcacgtcttctcccattcttgcncaagtcattctgacttggatatgagaaaagggcattttctgaaatcatagagaccttctattctttgtttaccaatgggctggtatacttattttagaaattcttaaactgcatttttaaaatgatgactacatttagttgtcatcaaaaaattaaaatatactttttgaaaaatgctgatgcaatgaagtaatgagattaattggatagtaagaaatgaaaacctaggaaaattgatggagaaaatttcatctcaagc

SEQ ID NO: 234975 - DNA, 621 bp, Homo sapiens
acagtttcctgtgcttgtatccatcttatcatttaccagttgtataactgtggcaagttatttaatctctgagtctcagtccttttatttgtaaaatcaagataacctaatatctattcataaggttttaaaggattaaacgagtcagtccatataaagtacttagaactgcgttcaatcactctatggtgtgatcttggacaattcctgtggctcagctacaaaacattaatacttccacataatggcaatctttccttctggcagtttttagttataggaatgttatktaaatgagcacacactgctataaacagaggtattgttttctacaatgaacactgagctcccagagtaacaagtctcttaacacagtttgtgtccagatcccttggctcccagatccagaggagtaggcagatgctttcagggccatatttcacagtatatgtcttttcctccaaggacaactactttcttttcttctgtgttgctttttgtcagttaaaaaaatacagaaacatcattatttggggtgtgcaaaaaaatagcatttggtaattatggagacacatgtcaatacatgttattcatttgtccattattaagaaaatgattatc

SEQ ID NO: 234976 - DNA, 621 bp, Homo sapiens
acagtttcctgtgcttgtatccatcttatcatttaccagttgtataactgtggcaagttatttaatctctgagtctcagtccttttatttgtaaaatcaagataacctaatatctattcataaggttttaaaggattaaacgagtcagtccatataaagtacttagaactgcgttcaatcactctatggtgtgatcttggacaattcctgtggctcagctacaaaacattaatacttccacataatggcaatctttccttctggcagtttttagttataggaatgttatgtaaatgagcacacactgytataaacagaggtattgttttctacaatgaacactgagctcccagagtaacaagtctcttaacacagtttgtgtccagatcccttggctcccagatccagaggagtaggcagatgctttcagggccatatttcacagtatatgtcttttcctccaaggacaactactttcttttcttctgtgttgctttttgtcagttaaaaaaatacagaaacatcattatttggggtgtgcaaaaaaatagcatttggtaattatggagacacatgtcaatacatgttattcatttgtccattattaagaaaatgattatc

SEQ ID NO: 234977 - DNA, 471 bp, Homo sapiens
ctgagtctaattgggtagaataaayagatgcatgagaaatgacaccggaggcaatggaccaaaatgtgcaaagagagctattataaatggaataaacagagcatggctgagctcatcctttttaaaggaaatgagttagagacatggcatttacttaattgatggtggagtcagtgagaatatatttagatggacactgaaaataacagcttaaatttaggaagacaaacacagagagaggatgcaatttctagtgaaaaataaggtaaacaagataaggagttgaaaagctttgttctaaacttgttaaagtgcctctgttcctctgaagtgcctgtttaccttatgtatcaatgatattcaacaaagataaaacttctgtggacagggtataaacactaggcatcttctgaaataacaagtctgttacatgtttgttagtaaatattcctagttctaaaaatattttaa

SEQ ID NO: 234978 - DNA, 384 bp, Homo sapiens
ttgttaagtcatccttttaatatccctaaaattgtagatgcctaaatccttaaaaatagcaaattaaattcatcaatatacaaaaaatgataaacgttttactaaatggggtttattctacaaatgcaagattagtttaccatatgcaaatcagccaatatagttaatcactttagcagattgaggaagaaaggtcatataataatacaaataggtgtttttgataactacccatttatattaaaaactccacaaacaagaaataaaacttcctcaagctatttgagcatccatgaaaaacttagagctaatgtaatacttaayagtgaaatattaaacgctttctttttaagatcaggaacaaaacaaggttgtatactttca

SEQ ID NO: 234979 - DNA, 581 bp, Homo sapiens
atgtcttccttgccccaagtatttggtaatagaggaagagaaattcatttgccaaaaagagatgtttgtggatgttggaaaataatctttttagtgatatttcacttggagttttatttcccttacagaggactataaataatctctcccacattccctatgagggttatagtcagtcccgttcaccaacagaggaaggaggcaaccttatgatatattttcaaattcccaaatgatcaactgctcaaaaacagtccccccacagtaacagaaaaacctagcactgaatgggactcttggatgtggttaagtgttatgtatccaagaggcatctgctggtaaaaaaaaatagcagccaaatagaaacaaatattagatgaggaagctcaatagtttagcctatttaatatgtgtttttrcccattttttttgcattcctggattagtcattctgctcaacaggcctcggggactgggatcttgaaaaataagttgcaataatgaaaaaagatggggactattaaaagtatggagcacttttatgatgcagaatttcttggtattgagtttgcactccagaa

SEQ ID NO: 234980 - DNA, 275 bp, Homo sapiens
tgaaagtttattttcagaaagtttcatatattaagttgggattggtggctatagagagaattggcttagagattgtgagataagakattggcgaagaaaaacaaaagcatggattaggaccagcagccaaatcttcttgaatcaaactcagtcttgagaatatgagaatctgtcaggtcagttaaatagttgagtctcattccaagagttaaacagttgagtcccattccaggaggtggcattgcagatgaaaacacaaagctaggcatctatat

SEQ ID NO: 234981 - DNA, 275 bp, Homo sapiens
tgaaagtttattttcagaaagtttcatatattaagttgggattggtggctatagagagaattggcttagagattgtgagataagagattggygaagaaaaacaaaagcatggattaggaccagcagccaaatcttcttgaatcaaactcagtcttgagaatatgagaatctgtcaggtcagttaaatagttgagtctcattccaagagttaaacagttgagtcccattccaggaggtggcattgcagatgaaaacacaaagctaggcatctatat

SEQ ID NO: 234982 - DNA, 571 bp, Homo sapiens
caaatacattcttactgaaagcagaacttcccaaggacctcatatttgcatactagtarcagggaaattgacatgacaaaagcaataaaatgtagttgagaacgtgatatttttaagacttgattttgagcaatttcggaccaaacctgaaaacactaaatacttattagtgttgataccagaaagtcttgaagaaactggtagaggagaaagatagctggggaaccagtgttagggaaatataattaaaaacaatatcttctcctaacttggaaatcttcttgacaaaggtggtgataggaagcactcttattattgaataagcattaagccagtatgttctgcacaggtaatccactaaaatgcaaaaacagaaggaaatctttccctttgaaatagccaaacagatataacgcattatatacatgtttttaaaatagataacaactcatcctcatgtaagaggacttgacagcatttgtcaaaaataatttataaaaactttaacacataattggagtaaccatctgtgttagctatgtggctttatccagaggaaaaacaaacttca

SEQ ID NO: 234983 - DNA, 571 bp, Homo sapiens
caaatacattcttactgaaagcagaacttcccaaggacctcatatttgcatactagtagcagggaaattgacatgacaaaagcaataaaatgtagttgagaacgtgatatttttaagacttgattttgagcaatttcggaccaaacctgaaaacactaaatacttattagtgttgataccagaaagtcttgaagaaactggtagaggagaaagatagctggggaaccagtgttagggaaatataattaaaaacaatatcttctcctaacttggaaatcttcttgacaaaggtggtgataggaagcactcttattattgaataagcattaagccagtatgttctgcacaggtaatccactaaaatgcaaaaacagaaggaaatctttccctttgaaatagccaaacagatataacgcattatatacatgtttttaaaatagataacaactcatcytcatgtaagaggacttgacagcatttgtcaaaaataatttataaaaactttaacacataattggagtaaccatctgtgttagctatgtggctttatccagaggaaaaacaaacttca

SEQ ID NO: 234984 - DNA, 571 bp, Homo sapiens
caaatacattcttactgaaagcagaacttcccaaggacctcatatttgcatactagtagcagggaaattgacatgacaaaagcaataaaatgtagttgagaacgtgatatttttaagacttgattttgagcaatttcggaccaaacctgaaaacactaaatacttattagtgttgataccagaaagtcttgaagaaactggtagaggagaaagatagctggggaaccagtgttagggaaatataattaaaaacaatatcttctcctaacttggaaatcttcttgacaaaggtggtgataggaagcactcttattattgaataagcattaagccagtatgttctgcacaggtaatccactaaaatgcaaaaacagaaggaaatctttccctttgaaatagccaaacagatataacgcattatatacatgtttttaaaatagataacaactcatcctcatgtaagaggacttgayagcatttgtcaaaaataatttataaaaactttaacacataattggagtaaccatctgtgttagctatgtggctttatccagaggaaaaacaaacttca

SEQ ID NO: 234985 - DNA, 610 bp, Homo sapiens
gcattcctccctaagtttcaggcagctcaggagagagacagagtgagagacagaaacagagaaggagagagagagagagagtctccatttatttgaaagaaagtaagggaagagaagacaagtctctaattggtaatccagagaattcttctagatcttattaaaggctgccatggtgagacttctttgagtctgcaagagacacrtcggtactgggtttggggtgcctacctaatacagataagaatgcagtgcccaaaaacttagatcacagcacccaagtacctgtgaatacctgaaaagctttcctaagaaggaggggtacaaacaagctcagattgcaaagactaaaataggtacctaactcttcaatacccagacactgaagaacatgtactagcatcaacaccatccaggaaaacatgttctcagcaaatgaacttaataaagcatgagagacaatccaagacagacagagataagtgacctttcagaaagagaattcaaaatagctatgttaagaaaacttaatgaaattcgagataccatagagaaggaattccgaattctatcagagaaatgtagcaaagagattgaaaacactaaaaag

SEQ ID NO: 234986 - DNA, 536 bp, Homo sapiens
ggttgcaagtattaacagcagaattgaccaagctgaggaaagcatctcagagctccaaacctgttttctgaaataacacagtgaagatcaaataaagaaaaaaaataataaagttgaatgaacaaaacttctgaataatataggattatttaaagagacccaatttatgactcattggcattcctgaaagacaggaagagaaagmaaacaacttggaaaacatatttcaggttattattcatgaaaatttccccaaccttactaaataggccaacattcaaattcaggaagtgcaaaaaaaacccctgtgaaacaagaagaccacctccaggacacatagtcatcagattctccaaggtgaaaatgaaataaaaaatgttaaaagcagctagagagaaggggcaggtcacctacaaagggaaccccatcaggctaacagtgggccttacagcagaaatcctataagccagaaggggttaggagcctacatccagcattcttaaagagaagaatttctgaccaagaattttgtatcc

SEQ ID NO: 234987 - DNA, 536 bp, Homo sapiens
ggttgcaagtattaacagcagaattgaccaagctgaggaaagcatctcagagctccaaacctgttttctgaaataacacagtgaagatcaaataaagaaaaaaaataataaagttgaatgaacaaaacttctgaataatataggattatttaaagagacccaatttatgactcattggcattcctgaaagacaggaagagaaagaaaacaacttggaaaacatatttcaggwtattattcatgaaaatttccccaaccttactaaataggccaacattcaaattcaggaagtgcaaaaaaaacccctgtgaaacaagaagaccacctccaggacacatagtcatcagattctccaaggtgaaaatgaaataaaaaatgttaaaagcagctagagagaaggggcaggtcacctacaaagggaaccccatcaggctaacagtgggccttacagcagaaatcctataagccagaaggggttaggagcctacatccagcattcttaaagagaagaatttctgaccaagaattttgtatcc

SEQ ID NO: 234988 - DNA, 610 bp, Homo sapiens
atgaggttacactatggaataaattatagaaagtttaataaatagcaaattttaagttaagtctgcatgcacacttaaaagaatgtaagggtgaatgtattggcaattttctcaaacctatcctccaagaagaggcaaaaatacaaatacagctggtcctcaacgttgtttgattcaacattgctttctcattataatattgagagttgtcggagccactgtctgtgtggagtttgcacattctctctatatctgtgtagattttctctgggtactctggtttcctcccacatcccaaagatgtgaacgttaggttcattggcctatctaaattgccctaatctgagtgagtgtgggtgtggrtgtatgtcctgcaatggaatcgcatcctgtccagaggtggtctcaaccttgcaccctgagttgcctgaatagggtccagtcacccttgactctgaactggaataatctggttggaaaatggatgaatgaatgaatacaaattattgtaaaacagaaatttgtaaagtatataataatcatacaaatgcatgataataaacgatgtggtacaaaagcagtcagtgacactaccctatttgtgagtgct

SEQ ID NO: 234989 - DNA, 610 bp, Homo sapiens
atgaggttacactatggaataaattatagaaagtttaataaatagcaaattttaagttaagtctgcatgcacacttaaaagaatgtaagggtgaatgtattggcaattttctcaaacctatcctccaagaagaggcaaaaatacaaatacagctggtcctcaacgttgtttgattcaacattgctttctcattataatattgagagttgtcggagccactgtctgtgtggagtttgcacattctctctatatctgtgtagattttctctgggtactctggtttcctcccacatcccaaagatgtgaacgttaggttcattggcctatctaaattgccctaatctgagtgagtgtgggtgtggatgtatgtcctgcaatggaatcgcatcctgtccagaggtggtctcaaccttgcaccctgagttgcctgaatagggtccagtcacccttgactctgaactggaataatctggttggaaaatgratgaatgaatgaatacaaattattgtaaaacagaaatttgtaaagtatataataatcatacaaatgcatgataataaacgatgtggtacaaaagcagtcagtgacactaccctatttgtgagtgct

SEQ ID NO: 234990 - DNA, 616 bp, Homo sapiens
  misc_feature (1)...(616): n = A,T,C or G
atgtattttttttcttctttgaaactagtataataatatctgtctacttaaaatgtttactgggccaacttattctgcctgacaggcctccaaattcrgtctgatataagaattcagttaatgaaatttaaagcagcctcattttcatcctttttttaaacacaactatgtattagaaatctggtgaaggcttctgtcaaattgaactattgaactcagggcagtaaaagtccctccccaggcaagagatttaaatcattttcaaagttaatttcctgctcccagatggagaacaaatctaatcgggtttacttcattctttggatgaacaggaaaatgtcacttgcatactcaaaaaatgaaaagaaaatcttagggaaggcagcctccaatccacctcacagcagaaaaagaaagtaatcctgaaatggaatgtatggggtcattttgaaactgaaagcaaatctanatttaatctagacaaatctctaagcttacttctaacctagttctgttcagagatgatgtctgtttacccctgaaatacacgtttttaaaactgttcgctgtaaatgggaaaaacagtttctagtcctaaaaaggaatctgagtaaac

SEQ ID NO: 234991 - DNA, 616 bp, Homo sapiens
  misc_feature (1)...(616): n = A,T,C or G
atgtattttttttcttctttgaaactagtataataatatctgtctacttaaaatgtttactgggccaacttattctgcctgacaggcctccaaattcagtctgatataagaattcagttaatgaaatttaaagcagcctcattttcatcctttttttaaacacaactatgtattagaaatctggygaaggcttctgtcaaattgaactattgaactcagggcagtaaaagtccctccccaggcaagagatttaaatcattttcaaagttaatttcctgctcccagatggagaacaaatctaatcgggtttacttcattctttggatgaacaggaaaatgtcacttgcatactcaaaaaatgaaaagaaaatcttagggaaggcagcctccaatccacctcacagcagaaaaagaaagtaatcctgaaatggaatgtatggggtcattttgaaactgaaagcaaatctanatttaatctagacaaatctctaagcttacttctaacctagttctgttcagagatgatgtctgtttacccctgaaatacacgtttttaaaactgttcgctgtaaatgggaaaaacagtttctagtcctaaaaaggaatctgagtaaac

SEQ ID NO: 234992 - DNA, 616 bp, Homo sapiens
  misc_feature (1)...(616): n = A,T,C or G
atgtattttttttcttctttgaaactagtataataatatctgtctacttaaaatgtttactgggccaacttattctgcctgacaggcctccaaattcagtctgatataagaattcagttaatgaaatttaaagcagcctcattttcatcctttttttaaacacaactatgtattagaaatctggtgaaggcttctgtcaaattgaactattgaactcagggcagtaaaagtccctccccaggcaagagatttaaatcattttcaaagttaatttcctgctcccagatggagaacaaatctaatcgggtttacttcattctttggatgaacaggaaaatgtcacttgcatactcaaaaartgaaaagaaaatcttagggaaggcagcctccaatccacctcacagcagaaaaagaaagtaatcctgaaatggaatgtatggggtcattttgaaactgaaagcaaatctanatttaatctagacaaatctctaagcttacttctaacctagttctgttcagagatgatgtctgtttacccctgaaatacacgtttttaaaactgttcgctgtaaatgggaaaaacagtttctagtcctaaaaaggaatctgagtaaac

SEQ ID NO: 234993 - DNA, 656 bp, Homo sapiens
ataatatatgttaactttaatgatcggctgtaggagagctatgagagagcctggagattccttatgatgggggaaaagggggcagtgacagagactgagagagatatgaggtggagtggaaggaaaggagtagctcattcgctgtgaggaaggcaacacctcctggtgaggggaataggctgtctcagtttgtgcagctggaaaaattcaatgtgtttgagaggaaagcagaagcccagtgggccctgaggggcagacttacaaaagtacacagagaaaaggcaaagcctgaaaatactatgggttcaagtcagttcccagttgtcactaagtgctgtgttgaattgttcaaattttataaggaaaaggaagaagaagctattacaggtttgaagtaaagaatgagtgctgttcctaakaaaactacccccgtaagacaagataaacctcacatttagtcaattttatcattactaactgccccttcacctgagacagcttttctaaaattcaaactcttaaaacaattatttgatactgtattgcttcaactaaagttcttttctctgcaagattgcacatcaaaaattacagagttaaattctgaaattttacttatcagtaacatttcatatatatttgagtataaaaattgt

SEQ ID NO: 234994 - DNA, 485 bp, Homo sapiens
ccaggccacccatacttgggaccaaccggctatgttttttgaggttctcactaacccctcaggtttgaaaattcactagaacaacttacagagttcaagaaattatattaatacttcagaaaattcagaattacggtkttgttagaagagatgaaaatcaagaccaaccaaataaagaaatgcatagggcaagatctgagaggcttccaaacatgaatcatccatgtccccagaatgcatcaaccacttggcacatcaatgtgtatcaccaaccagaaaactgaactgagcttcattgtattgagtttttattggggcttcattatataggcatgactgattgattcattggccataaagttgaactcaaaattcagcctccttcttcttctaagccagaagtcaggccaagatcacatggctcaaagccccaaccctgtaatcacatgataggactttctggcatggccagccccaatctgtac

SEQ ID NO: 234995 - DNA, 552 bp, Homo sapiens
caaattaccgagtctcgagtatgcctttattagcagcgtgagaacggactaatacgattcttccgatgaatatattcttctcattgataaatgcttgatgtaaatgcttaatttttcctctaggtgccttcaagatttttctcattgtctgtggttttcagcaatttggataccttacatatcgtttttatgaatcttccacagagatcagtggacacatgtggcacaaagaacatgtgaattaagaatgcactcctgaataatatattttacrtatatgttattgagcatattcttaaatataaataatttcttgtgaatatattttgattaataaaaatatattaataaatgttaactcatgcatattcttcttactcaaaaatatgttcttatattaactacttcctcttttttgcttttagacggcaaaggtaaggtggggggctagaacagagacacagaattgttacttaaaatgtcaaaatgaaatattgtctattaaaacagaagaattaaaataaacaagagaagttaggtattggacatttg

SEQ ID NO: 234996 - DNA, 323 bp, Homo sapiens
tcaggtatgtctttatcagcagcatgaaaacagactaatacaaggtcctttggaatcrtctgagttcctaatttatttggatattaacttcttatcagatatatagcatgtaaatattttctcccattctttaggttgtcttttcattgtattgattgtctcctttgctgtgctgaatcttttgatttagtcccatttgtctagttttgcttttgttgtctatacttttggtgtcaaatctgaaaatttattaccaataccagtgtcaaggagcttttctcctatatttatgtctaagagttttacaatattgctcctaggtt

SEQ ID NO: 234997 - DNA, 658 bp, Homo sapiens
gaggaattctgaccaaaaacactgtgctgaaccacgtccaggctcctgagccacataaactatgagaaaacaaatatttgtttcaagccattaagttttaatttgttacacagcaatagataactaacacctttgttacagagcaatagataactaacacatggaaggattcatcaagagaagcgtttttcataagtgaaatgttattttcatctcacatttcaattattagaaaataaaagaaaataaatttggataggctctcataaattcaatgataagaacttggaaaatgcaaccacatgataaccaggaagtaaaaggaaaacataagaggcatcttcccagacgagagtaaatatctggttccctgagaagtgtagtttgagaatggagaaatcagatgttactggaaagaggctaggacygtattatttcttgcttcctgtcaagtcttttcaactcaagagaaagtaaattttcttgacaaaccattcaaaattaaaggataggtgggagtacatgtgtccctgaaggaacaagtgaccttcattgaaagcagcagcttggttgaataaatactgtacagaagtggaataaagagtagctgacaacaatgctgaaatagttacacatgaagttttaatgagctatttca

SEQ ID NO: 234998 - DNA, 571 bp, Homo sapiens
attagctaataatactaataatctagtatagaaagcatgtgccaactgatctagactcttgtgacagttgtatatctactcagctgcttgaccttaggtgtatcaaaatctcgatttcctagactacaaatgagtaagagggatggaggccccttacagttttaagattctggaattctaagtgggtgtaactrgagcaaattttattttctaaaatttgcataataaattttaaaataggagaaaaactaatatttaaagtacatatttctggaagtcttttttaggtgacttatactaccaggaatggatttaccactaaatattggttttgcctaattcagcattgctatgtaatttgatggaagtataactccatagacaaagagatttggtcctaacatagcttgtattttatatgtatatacactatttctatttaaatttctgtgtagtcatgttttacccttttaaaatgaagattagttttattatgtattttcttttgtctataaacattcagtgaattcacactgaaaactgattatgaacagatagtctgctaggcact

SEQ ID NO: 234999 - DNA, 571 bp, Homo sapiens
attagctaataatactaataatctagtatagaaagcatgtgccaactgatctagactcttgtgacagttgtatatctactcagctgcttgaccttaggtgtatcaaaatctcgatttcctagactacaaatgagtaagagggatggaggccccttacagttttaagattctggaattctaagtgggtgtaactggagcaaattttattttctaaaatttgcataataaattttaaaataggagaaaaactaatatttaaagtacatatttctggaartcttttttaggtgacttatactaccaggaatggatttaccactaaatattggttttgcctaattcagcattgctatgtaatttgatggaagtataactccatagacaaagagatttggtcctaacatagcttgtattttatatgtatatacactatttctatttaaatttctgtgtagtcatgttttacccttttaaaatgaagattagttttattatgtattttcttttgtctataaacattcagtgaattcacactgaaaactgattatgaacagatagtctgctaggcact

SEQ ID NO: 235000 - DNA, 489 bp, Homo sapiens
taaaataggagaaaaactaatatttaaagtacatatttctggaagtcttttttaggtgacttatactaccaggaatggatttaccactaaatattggttttgcctaattcagcattgctatgtaatttgatggaagtataactccatagacaaagagatttggtcctaacatagcttgtattttatatgtatatacactatttctatttaaatttctgtgtagtcatgttttacccttttaaaatgaagattagttttattatgtattttcttttgtctataaacattcagtgaattcacactgaaaactgattatgaacagatagtctgctaggcactaaggaaacacataygaaaaactaagtcctcctctgccctcaatatgctcacaagactacagttactgaagcctgacctcaaaacctagctaacaaagtccttgaatcaggtgatagttcagaataccattcatgctctctcccaagagta

SEQ ID NO: 235001 - DNA, 489 bp, Homo sapiens
taaaataggagaaaaactaatatttaaagtacatatttctggaagtcttttttaggtgacttatactaccaggaatggatttaccactaaatattggttttgcctaattcagcattgctatgtaatttgatggaagtataactccatagacaaagagatttggtcctaacatagcttgtattttatatgtatatacactatttctatttaaatttctgtgtagtcatgttttacccttttaaaatgaagattagttttattatgtattttcttttgtctataaacattcagtgaattcacactgaaaactgattatgaacagatagtctgctaggcactaaggaaacacatatgaaaaactaagtcctcctctgccctcaatatgctcacaagactacagttactgaagcctgacctcaaaacctagctarcaaagtccttgaatcaggtgatagttcagaataccattcatgctctctcccaagagta

SEQ ID NO: 235002 - DNA, 532 bp, Homo sapiens
gctatgaatttccttttatcttgccttacctgtgtcccatagattctggtatgttgtatctttgttcacattattttcaaagaacttcttgatttctgccttaatttcattatttacccaaaagtcattcaggaacatgttgtttaatttccatgtaattgtatggttttgagtgattttcttagtctcaacttttatttttactgcactgttgtccaagagtgtgtttggtaagaattcggttcttttacatttgctaagcgttgttttatgtccaattatgtggctgattttagagtatgtgccatgtggtgatgagaagaatgtatattctgttgtttttgagtagagagttctgtagaagtcaatcagatacatttgatctaatrttgagttcaggtcctgaatatgttttttaattttctgccttggtcctcggtctaataactgttagtggagtgttgaaatctcccactgttattgtgtgagactccgtgtctctttgtaagtctctaagaacttgctttatgaa

SEQ ID NO: 235003 - DNA, 488 bp, Homo sapiens
tgtattcctttctctgggctaacatggttattattttctttccatttgttttcagaaaacaaattttatttcattacaatgaactgagcatgtttatttattttaataagttgtccctgtataattttattgtgctaccttttttattatccatgtcttcagaaaatattatttatttaagaaagataytcataatactgatgtatcattatattaatcttttttgtaatccaatcattttcttttatatttcttaaataaactacactagaattatgtcacaagtaaagttttgtagatcaccatcttcttactgttactttgtaactggggaattctgaaataacaatattattgtagcttatattagttttctgttaatcaaagatacatttaattaattagaattttttcctttttgtactcagcttctaccactcttctattttgcattagagagttcttaaagaaagctgttgattggatat

SEQ ID NO: 235004 - DNA, 488 bp, Homo sapiens
tgtattcctttctctgggctaacatggttattattttctttccatttgttttcagaaaacaaattttatttcattacaatgaactgagcatgtttatttattttaataagttgtccctgtataattttattgtgctaccttttttattatccatgtcttcagaaaatattatttatttaagaaagatactcataatactgatgtatcattatattaatcttwtttgtaatccaatcattttcttttatatttcttaaataaactacactagaattatgtcacaagtaaagttttgtagatcaccatcttcttactgttactttgtaactggggaattctgaaataacaatattattgtagcttatattagttttctgttaatcaaagatacatttaattaattagaattttttcctttttgtactcagcttctaccactcttctattttgcattagagagttcttaaagaaagctgttgattggatat

SEQ ID NO: 235005 - DNA, 488 bp, Homo sapiens
tgtattcctttctctgggctaacatggttattattttctttccatttgttttcagaaaacaaattttatttcattacaatgaactgagcatgtttatttattttaataagttgtccctgtataattttattgtgctaccttttttattatccatgtcttcagaaaatattatttatttaagaaagatactcataatactgatgtatcattatattaatcttttttgtaatccaatcattttcttttatatttcttaaataaactacactagaattatgtcacaagtaaagttttgtagatcaccatcttcttactgttactttgtaactggggaattctgaaataacaatattattgtagcttatattakttttctgttaatcaaagatacatttaattaattagaattttttcctttttgtactcagcttctaccactcttctattttgcattagagagttcttaaagaaagctgttgattggatat

SEQ ID NO: 235006 - DNA, 294 bp, Homo sapiens
tgcccattctttcccaatggacctgaagcagaagatctcatgcactgggttcccttataattyggctatttctacattttgagctgtttgtctttcttatataactctgtagtcatgtaagtagtcttatgtatggagtctcccttctgatggagttacctaccccactgatttttttttaggctttctctttactaataaatgtatttacaaatacaaaccaccttctaaagaatgctttagttgcaccaaacatatacaagctttgatatgtagtgtttttattgccattct

SEQ ID NO: 235007 - DNA, 294 bp, Homo sapiens
tgcccattctttcccaatggacctgaagcagaagatctcatgcactgggttcccttataattcggctatttctacattttgagctgtttgtctttcttatataactctgtagtcatgtaagtagtcttatgtatggagtctcccttctgatggagttacctaccccactgatwtttttttaggctttctctttactaataaatgtatttacaaatacaaaccaccttctaaagaatgctttagttgcaccaaacatatacaagctttgatatgtagtgtttttattgccattct

SEQ ID NO: 235008 - DNA, 294 bp, Homo sapiens
tgcccattctttcccaatggacctgaagcagaagatctcatgcactgggttcccttataattcggctatttctacattttgagctgtttgtctttcttatataactctgtagtcatgtaagtagtcttatgtatggagtctcccttctgatggagttacctaccccactgatttttttttaggctttctctttactaataaatrtatttacaaatacaaaccaccttctaaagaatgctttagttgcaccaaacatatacaagctttgatatgtagtgtttttattgccattct

SEQ ID NO: 235009 - DNA, 533 bp, Homo sapiens
ttatttaattgtggcaaaatacaacataaaatgacaattttaaccatttttaaatacaattcagtagtgttaagtgtattcgcattcagaacacaaccagtctccacaastttttcatcttgtgaaacagaaactacatccattaaataacttgtcccctccccacagtgagagaggtattttaaactgtctctctggaatatctgttcacttatcatgattttgtcaacttttacatcatatggattgaggctttttatatgcataaaggtgaactttattattacttcttactttataataatgtattattttaagcattttaagtacttacaaagctgattatgtatatttagtctctaaatacctgcaaggaataagtatagtgctttatttctaaggagaaatttctgctttcacctagagaatagcaaagttccctatcctttctctctttaaaaaaatcagtctactgtttgaatgtgccctattttctatgtgctggctgggtgcaggcatctctattcccattc

SEQ ID NO: 235010 - DNA, 533 bp, Homo sapiens
ttatttaattgtggcaaaatacaacataaaatgacaattttaaccatttttaaatacaattcagtagtgttaagtgtattcgcattcagaacacaaccagtctccacaactttttcatcttgtgaaacagaaactacatccattaaataacttgtcccctccccacagtgagwgaggtattttaaactgtctctctggaatatctgttcacttatcatgattttgtcaacttttacatcatatggattgaggctttttatatgcataaaggtgaactttattattacttcttactttataataatgtattattttaagcattttaagtacttacaaagctgattatgtatatttagtctctaaatacctgcaaggaataagtatagtgctttatttctaaggagaaatttctgctttcacctagagaatagcaaagttccctatcctttctctctttaaaaaaatcagtctactgtttgaatgtgccctattttctatgtgctggctgggtgcaggcatctctattcccattc

SEQ ID NO: 235011 - DNA, 533 bp, Homo sapiens
ttatttaattgtggcaaaatacaacataaaatgacaattttaaccatttttaaatacaattcagtagtgttaagtgtattcgcattcagaacacaaccagtctccacaactttttcatcttgtgaaacagaaactacatccattaaataacttgtcccctccccacagtgagagaggtattttaaactgtctctctggaatatctgttcacttatcatgattttgtcaacttttacatcatatggattgaggctttttatatgcataaaggtgaactttattattacttcttactttataataatgtattattttaagcattttaagtacttacaaagctgattatgtatatttagtctctaaatacctgyaaggaataagtatagtgctttatttctaaggagaaatttctgctttcacctagagaatagcaaagttccctatcctttctctctttaaaaaaatcagtctactgtttgaatgtgccctattttctatgtgctggctgggtgcaggcatctctattcccattc

SEQ ID NO: 235012 - DNA, 377 bp, Homo sapiens
  misc_feature (1)...(377): n = A,T,C or G
ccagtctaacctcttaacctctcccctcaaactgggctaaaccttcacaacatatcatatggaaaaagaaattcaatagaaakttatatggaaaaaatacaactctgtgttaatattaaaaaatccatagtaacatgtacaatgaggaagcttcctcaagcccaactatacaggtcagatcggttgaaaaaataaaactaacacatttttacatgtcaaaatatgcaatatttngaaaatccaaggctagtatttttaaataggcaaagatttattaatactccttgacacacaaacaggaagtgagaaaatgggcaagtgacacaaatcgataattaactgtgaggacataggtggtggagtctctcctaatcctc

SEQ ID NO: 235013 - DNA, 377 bp, Homo sapiens
  misc_feature (1)...(377): n = A,T,C or G
ccagtctaacctcttaacctctcccctcaaactgggctaaaccttcacaacatatcatatggaaaaagaaattcaatagaaatttatatggaaaaaatacaacyctgtgttaatattaaaaaatccatagtaacatgtacaatgaggaagcttcctcaagcccaactatacaggtcagatcggttgaaaaaataaaactaacacatttttacatgtcaaaatatgcaatatttngaaaatccaaggctagtatttttaaataggcaaagatttattaatactccttgacacacaaacaggaagtgagaaaatgggcaagtgacacaaatcgataattaactgtgaggacataggtggtggagtctctcctaatcctc

SEQ ID NO: 235014 - DNA, 377 bp, Homo sapiens
  misc_feature (1)...(377): n = A,T,C or G
ccagtctaacctcttaacctctcccctcaaactgggctaaaccttcacaacatatcatatggaaaaagaaattcaatagaaatttatatggaaaaaatacaactctgtgttaatattaraaaatccatagtaacatgtacaatgaggaagcttcctcaagcccaactatacaggtcagatcggttgaaaaaataaaactaacacatttttacatgtcaaaatatgcaatatttngaaaatccaaggctagtatttttaaataggcaaagatttattaatactccttgacacacaaacaggaagtgagaaaatgggcaagtgacacaaatcgataattaactgtgaggacataggtggtggagtctctcctaatcctc

SEQ ID NO: 235015 - DNA, 637 bp, Homo sapiens
aatatattcagcctaatccaactctgtgttccttcyaccattaactcaacctttaatattcattcccatgcctgtactccagatttctgtttatatatgttacagaattaaagcagttctttttaagtgtagtgcgcctcctcatgggtcacactctgtacctgacctctaggggcccagcgggactttagtctagttataggtctagaagcaaacaaggatgtcaggggtgccactactggtgatggggaagctgttccatctggaaaaaagcttcatccatgtccctggcttcatcagagtcctctcacacttccccattccaagttacagggtcccattcttttccaatcaatgccctcactttaacagtagacacctgacgaggctatgcatgcactttcattggaggtcagccactcacatgataagaccttgtgtctgtttttccacaatttcagctctttcactctaggagataagactctcactcagggcaatcttagcagatttgagactcagtatctgcttctgaagccaggagacaagatccctgagttggttgttttctttcatcactttgttcactgaacttaggagcaattaaccagcttcattatgttccttggttctccac

SEQ ID NO: 235016 - DNA, 603 bp, Homo sapiens
cttcaccttacaccatgattgtaagttttccgaggcctcccaggccatgctagaactctaagtcaattaaacctccttgtttataaattacccagtctcaggtagtatctttatagcagtatgaaacagactaatacaacatactaagttcaattgcagtttgctacctatggagacagctttggaccaaatttaatgtaatttaacactctgcatctagaatataagactccatgtgttggaatttcttttcattcatgagtttcttttcatagctacctcagtgacttatagataggagatacttagtaaatgattatgaaatgaaagctaggtgtgataataaacatggagataacagacaggaataaagcattgtttcttggtaaaaggactgcttaatgtagcagaatgatgtggttggatttgtccccaccaaaatgtcacctggaattgtagctcccataatttccatgtgttgcaggagggacccagtggaagataatagaatcatgggggtgggtctttcctgtgctgttctcatgrtagtgaataagtctcataagatctgatggttttataaaggggagtccccctgcacat

SEQ ID NO: 235017 - DNA, 577 bp, Homo sapiens
acttaactatatactttcaaataaagaaggtaattggattgtttgttactcgaaggataaattcatgaagggatggatactccattctccatgatgtgcttatttcacattgcattcctctatcaacacatctcatgtaccccataaatatatacctactatgtacccataaatgtttttaaaaaktataaaaagcaatattctaaaaaaattaaattatgaatatctacaaatgttctttctagcaaggttaaaacaactattaaagattgttgctatttaaatatatcataggaaaaatcaaattaaaattaaaaaataataaaaactcacatacttcaaagagcttaaaaaagtctttttaatgaatttgttatgtgtttccacattaagtattaatatgtcatgctaatatatcacatatataacttttcaaacttaacaatggtgcttatttgaggcattgtgaataattgaagttataaaaatatatcacaaatacttttgaagaaatctgtaggtctactccaagccgatcacattgttgtctctgtctggaaaatctcataacttcagt

SEQ ID NO: 235018 - DNA, 566 bp, Homo sapiens
tgcaacacattgttcaaactgagccatgtcaaccttaatcgtttcacactaaatagctcgtctgctgctgtcattcccaggtattaatattgattcaagccctctacattgtctccttctagcctttcttctttccacatttgataggattatttgcactatttcactccgtcatatagctaccattttagcactcaacagttttctgtgaccctcatgtgataaacctaccyctgggaatctaacttcagatttctggattgtagactttggctgctccaatgctttaacttagatcttttcctaatttttctagattatccataagggaaagatatacagaggtccagtgtaagcatatggtgagcatccattctttaaatagccaagggtaattcagaagcagattttcctgaaaatgaaaggaagaataatatataccttttgattgatatctcacttttatttttaaaaagttcctgaagaagaaaacaagtatctggtcaccactacaaattcatactatatacaaataggagtggcatctggggtttacagaaatttgt

SEQ ID NO: 235019 - DNA, 580 bp, Homo sapiens
ttgtgacattggagatggaaatatgcaaggttctggggcctgatattcttgatataagggagctatggacatcaaagaagataaatggtcataaattacagtgagcaaaagatttacaggaattttgtcaattactcccttgtcttggaagaaattctggaaaggccacacattttgtgactgtaaacggtccttttgtatagcagggctaagatgccatgccatgccaagcaactcaagagttcccattctctctttttttgtttgcttgtttgtttgtttttaaaagaagaaaaagaaaataacaaaaaaatacaatttaaaaagttttatgtatataactggatcaattatataatgrgtataagaaaataactgggaaacagtgtggtacaatggttaaaagtccaggattttagagtaaggtcatctggcttcaaataccaccttagtcttgatccacctgtatcgctaggacttgatcttctcatgtcagaaaaggagttaaaatgggttaaaaagaagttgagatgtgataatgcaggtacagtgcttagcatggtacctcccttatattaat

SEQ ID NO: 235020 - DNA, 598 bp, Homo sapiens
tgttggccaggctagtctcgaactagccctggtggttcagactagttcgaactagtctcgaactagcaggtggatcagaagatccacctaccttgccctcccaaagtgctgggattacaggcatgagccactgtacctgacctaatgtttcttagtgtaaattatctattcgtttttaagactattttattaagttaattatatactttaagtttacctctaaagtcaatttggcttattatcatattcaaaggcattcaccaattgagtcaatattcaaaatttcaaaaagcatcaattgtgaaatacatgtaaatgtattcataaattgtacacaggtaaatgtgagataatagtacatgtttctactccaaacatayagaggattttgaatttgaagcacagcttaataacactcctaatggaaatatataaacctctaaatatcctgcaccttcaatattttctgataatggtaatacgaggtaacaaatattcctttttaggctaaaactttcctatgcaggaatcatgtgcgatgtatctacaatgttatttataagcatgaaataccacactgctcttacccagaggcatt

SEQ ID NO: 235021 - DNA, 574 bp, Homo sapiens
tatcagtcatctttactgtttagttcaaaaatgatgatagaaaagacaactactaaagtaggaagaatctaattctaagttgtctctagcatcagaatggttatttgtggggttggaaaagactgtaggtgatacccataccatgtaaacatacacgatagagaaaaggggaattcaatagtaatcagttcattatccatccacattcaaaagttgtmaggccacactctttacaagacctaactcctcagtagcaacaagagtgtttgaattgatctttacactgatcatattggaagtctaaattttccatccttcctttaagccataacacatggggggaaaaaactacaaagatgtggcttaaccagtttcaataacatttacctatgggatattagcatacaaaatcaccagtaaagagcagctggatgtcagccagctaccagtttggaagcaatgccgacagccattcgcttttgtgagtctagacatgtggaattgatggatgatggcagtacacttgcacagctgggcatacaggaagctaaaacaaggctgatcaaagaacaga

SEQ ID NO: 235022 - DNA, 594 bp, Homo sapiens
taatacatgtaaaatgctcagtccagggaagactgcttccttcttcttctttagtaaattattggtgtcactgcaattgtcaatgtcatcttgatttgtcctatatggagtgtttgatattttatcagcttcactggtggaggaatataaagctacgtgtatttgttgtactatgtgcacmaggaagaaacagaggaaataattatggaataatgacttaagaaaggcactcaaagtatttaaacataagatatgaaaaatgctgattagagccaaacattgttaagtgtagcttagaaccagttgtggtaggagactttagcaaaatattcctcatgcaaactttttctcaacatatcccaagtaaagggaccaggaaagagtcagccttgcaagacagcaaattgttagataataattattctctagtcaaataccacaggaaaaagctctggttccaatgccaatgctaccagcaaggctaaatggagagcctagactctaaccctagacatattgtaacaaggcatcttaatgctcatgttggggtattatcagagaaggccaaaagagacaacggcatggttcaaggct

SEQ ID NO: 235023 - DNA, 603 bp, Homo sapiens
gatgaataggcaaagcacagattattttcaggacagtgaaactattctgtatgatactgttaattgtggatatgtgtcattayacatttgttcaaatccatagaatgtacagcaccaacagtgaaccttaatgtaaactatgggcttcggataaaaatgatgtgtcattatagtgtcatcagttgtaacaaatgtaccaatctggtaaaggatgttgttaatagggaaggctatgctgccatggggacagggagtatatgggatatcactctactttcaattttgctcttaacctaaaactctctaaaaataaaagtagtctttcccccaaaaaaatcactctgctataaaatctcaaaaataacgtacaattacgagtaatttttaaatgccctgctctcaagctacaaaaggccaattagtagtatccttctagaaaaatcagtctcatatttgttgacagctatacactaaaagctagaaagggcaggccagtggaagatactttgagaacattcttctaaattccttctgagaagtgcctcttcaacctccttttatatatggctgttttcttactgcatgaggaaaataaaatgagat

SEQ ID NO: 235024 - DNA, 515 bp, Homo sapiens
ctatgggtgggagcaagagaccagaagatctgcgagatagaagctgtaattaccttcaagaagaataagagcctaaataagaaaaatggtgaaaactgaaggaaaatgaattattcaattataaatattgtctacatgataaaataacataactaaagtaggtgtaatttataatgcatatatccaggccactttgtatttcttcaattgtttatatttttattcatattttaaataccttactatgtgctaggcactgtgctcagtcacaggatagtgaaaacaacggatggaagaaattgctgctttcatggagctcacagtctaattgggagcttatattctatataagtaaaagttagcaaygctagcagttattggcagtgctaaacaaatctccagagttcattggctttcaaataaaagtttatatcttctttacacaaagtctaatgttgatgctcctattcagtatatggtttcccacaaggtcattcaggaacccaggcgaattc

SEQ ID NO: 235025 - DNA, 581 bp, Homo sapiens
ttttgtcgtgttttgtgtttaaacttttgtgaaaaaataatttagttgatttgaattgactttctttcaaagaaaacaagctctccaacgttcaaaattaaccccattaacagaaactcaagaagaccaaattacatatgagattttagtctttctttattttccaacttggaaattttatatagatggtagaaaaaattgataaagtgtcagaaataagcactaaacaaacaatattatcataaataaacatcatcttcaattagtatcaataagacataaaatgctgccacaactgaggccatcaactttggtgaagaatgtattatagaatattttactgtggttcaaagaggtatttgaaataccatactgccatttttggaaactaataaaatatatcttgaaaagaaaggtagttaattatagatttttaacttcatatttcaaattccactcagcccacaccaatctgaaagtcactaatttgatttaactctaygtagtaaaactccatttgtctttgagttgtcattcagtcctctatgacaaattctgaaaatactttcctcaagcatgca

SEQ ID NO: 235026 - DNA, 546 bp, Homo sapiens
aatagagcaaagtttcaaaacagcaagttagatatatcccttattgttcataaccaaaatctttacattttggaaaagaaaaagatgaaaaagaaagtagataaaattcaatactaaaaaattctactgctaaggttttctataaaaacaattagctgaccagagatggtaccgttgtstagagattagcactggaaagaaaataagcaagactaaagcatttatggtttatgcatctgtctatttaaaggacttccaaccccttagcccaatgctgctgtcaggaaagaaatggaaaatccagttacaactgtctagcaggtctatcattattcaggatgaaagcactgcttagtcattcactaactcagaattctctttttagcaacttaatacagtatcatgcaaccactgcccaagacaatttacaacaagactctttgccaaaaatacatcaattgtaaggaaaacaggaaacagcaaagagaagggcaatcttaaccagttttctgagtcatcttttcctgtgcactcgtcacgaaactc

SEQ ID NO: 235027 - DNA, 412 bp, Homo sapiens
taatacagtatcatgcaaccactgcccaagacaatttacaacaagactctttgccaaaaatacatcaattgtaaggaaaacaggaaacagcaaagagaagggcaatcttaaccagttttctgagtcatcttttcctgtgcactcgtcacgaaactccatttatttaggtgagctggaagtattatatttaggaaatagggttagagcctgatagtgccgttaagyggtctaagccaccagtttttctaagggctaattctaggccaaattataaagtagcaaattctgctttgatgctgtctcctctctcctttttgtcttccaatttcttcctttcaaataaccagggacctcttgtcttatctgacttctcggaacctactgttttccacactaaaacctgtgcagttag

SEQ ID NO: 235028 - DNA, 643 bp, Homo sapiens
ttcagcaaaatataaaaatataatacatcaggattcaggaatgtaaggaagtctggttcaacatttgtaaatcaatcatcataacttctcatagaaccagagaaaagatgatatattttaaatatgtggaaaagtattttataaagttcaacaactattcatgaaaaaaaattcaaaaaacccaaacatcaaagataatttctacaggtttatatgaaaaacacctactgtcaacatcacacttaatgagacactgaacacttttcctctraaatcaggaacaaggcagtatgtcatcttgccactcctattcaatatggacattcaagaaaaaaataaataattggtatatgtaggaaggcaggcctctgaatgactctggccaacccagatcttccctcttcctcttgcagttcttagaaaaaccacagaacgggctgagaatgaaatatcctgaggtaagaatgaggtgttcacaggaacagaaaaccaaacactgcattttctcactcataagagggagttgaacaatgagaacacatggacacagggaggggagcatcacacactggggcctgttggggggttggggggatgggaagggagagcattaggacaaattcctaacgcatgaggggcttaa

SEQ ID NO: 235029 - DNA, 489 bp, Homo sapiens
tttctgcttttaatgacaagacatgagctaaacaatgaatttactagtttcacggaagggcaccagcaagaaaatgaagaaaagtatcagtgtaataatgaattttccaaaactgtatgtgtgtataagaatggattcagaaacattgtaattgaaaattttgaaaattatgagttaaagataagagattaggcagaagagggaagtaaatttaaatttgttttttcattataaaaacmcaaaatataaaaataggtttttcaaatcagtcattatgtcatctgattataatcacagcttgctattctctgctctttgatatattatttttaaaactgtgattttaatggatttgtctcaattgaatgattacgccataactgataccctacttccaagacatttgattatttccaaagttttgttattaaaaatgtatttgttcttttagatttcctgtatgtgagaataaatcttcagtaagaattc

SEQ ID NO: 235030 - DNA, 562 bp, Homo sapiens
aaagtatacatcaatgaggcaagatgaacacaaaattgcttatctttcattaatgggaaaaaccccccacaaatattcatttcccaaagcaactttaaaataaaaaatgtaacacttaaacatagatgtgtgaatgccctccttttgcattgaaatttgatggggtttaacaagttctatatcatgcatctaaaaatgtttgtctcataaaactctaaatttaagtagtaaatactcattctaacagcttgtgcacatttttatgtcacatttttcacattttatgtaatctattaaatcatcccayttgtcataaaaagaaaaatgtatatttttttctatttctagtaactaggataatttctaatgaggacagaaattaaaaaccttataatcttcacaaataaaaataatgcattttttcatattcagatatgttgtatttgagaaatttcttttaaaatatgtgcataacaaggactattagaatgaacactacatataatgtgtgagagcatgagtatctagctctgatttgatactttctctttacattcaaact

SEQ ID NO: 235031 - DNA, 610 bp, Homo sapiens
tatgctttgtcttctagtttccattgttgatatagaaaagtcaaccagcctttgtaaaaatctttatttgtttctctcgagatgctttcaagatatttctctctacttttttttttgtagtttgactgtgatacttctagttgtattttttctaatacagcttctagttgtattttttctaatacagcttctagttgtattttttctaatacagcttctagttgtattttttctaatacagcttctagttgtattttttctaatacagcttctagttgtattttttctaatacagcttctagttgtattttttctaatacagcttctagttgtattttttctaatacagcttctagttgtattttttctaatacagcttctagttgtattccttcttagaaatcttaggcatttttagtgtatcaattgatatyttttaaaaatctgtaacatccacagacttaattcttgaaatgctgctaatattttactgctccattttctctctttcttcatttaaatcaactatgtatgtttaattgatttaattgacttaattaatttagatgatttgattaatttaacttatatggcaggttgattgtatatg

SEQ ID NO: 235032 - DNA, 630 bp, Homo sapiens
ctgttctcagttgctccttggcagccctaaaattgaagggtcttaccctaaccccacgctcactccagccaaaccaactctagttccccatgccctcggcccctttctgctgctggtcaaccagtgctgtcccagacatgaygtatcttgactagaactctaaaccccaaaggtcaaaattccctaagagtagaattaaaagtcagggtgtaggaatagctctcaatgtcacagaatataatttacagaaggggaaactgagaaggagaagagcaggtgaaaggcaaggtgagagatgatgggactccaggaccagagaggagaacattctgccctgccttttcctctgtcacaggttccatccccaattcagccagtcaacctcaacacctagacccctttccgctcaggatgaagggaagagaagaagaaaaaacaaaaggaagtgagaagtctaggctcagaggcctctggggccactggtgagactcagatggacctttaatgtcattaaatccgaactcttattttgcagatgcaaacgtcaaagctcagagaggggcatgaactgttcgaggcgctgaggtatcatcttaagagaggagtcaacaggattaggtcagttggtga

SEQ ID NO: 235033 - DNA, 489 bp, Homo sapiens
aagaacggactgagccagctttttcttttcctggaacatstgcctccccatccatcctgccattgggtcattcatccttgggtattagagcatctactatgtaccaggcactatactctttcaagactctattccgatgtcacctcccccaggagggctttgttgatacacacccctgcctcagctggcctcaaagctcctcctccatgttccaaagaaccctatgtttactactacttattttcccatgttttatttctgtgcctccatcctcatttgactgtggggcccttggtctctttcactagcaaatggtagaatctcagttggtgtttggcaggcccacagaactggacttgttcatgggcttgcattctggggtgggagaaggcattgaacacatggcggcaagtgtgcggagtgttagaagaaggaactgccgtgaggtcctcagaatgaaaggccggcctcatctggaaccgaggaatt

SEQ ID NO: 235034 - DNA, 469 bp, Homo sapiens
tggctctgggatgaagaacggactgagccagctttttcttttcctggaacatctgcctccccatccatcctgccattgggtcattcatccttgggtattagagcatctactatgtaccaggcactatactctttcaagactctattccgatgtcacctcccccaggagggctttgttgatacacacccctgcctcagctggcctcaaagctcctcctccatgttccaaagaaccctatgtttactactacttattttcccatgttttatttctgtgcctccatcctcatttgactgtggggcccttggtctctttcactakcaaatggtagaatctcagttggtgtttggcaggcccacagaactggacttgttcatgggcttgcattctggggtgggagaaggcattgaacacatggcggcaagtgtgcggagtgttagaagaaggaactgccgtgaggtcctcagaa

SEQ ID NO: 235035 - DNA, 490 bp, Homo sapiens
attcactgtggctctgggatgaagaacggactgagccagctttttcttttcctggaacatctgcctccccatccatcctgccattgggtcattcatccttgggtattagagcatctactatgtaccaggcactatactctttcaagactctattccgatgtcacctcccccaggagggctttgttgatacacacccctgcctcagctggcctcaaagctcctcctccatgttccaaagaaccctatgtttactactacttattttcccatgttttatttctgtgcctccatcctcatttgactgtggggcccttggtctctttcactagcaaatggtagaatctcagttggtgtttggcaggcccacasaactggacttgttcatgggcttgcattctggggtgggagaaggcattgaacacatggcggcaagtgtgcggagtgttagaagaaggaactgccgtgaggtcctcagaatgaaaggccggcc

SEQ ID NO: 235036 - DNA, 549 bp, Homo sapiens
tggcggcaagtgtgcggagtgttagaagaaggaactgccgtgaggtcctcagaatgaaaggccggcctcatctggaaccgaggaattcctccttggtgatgtgagttttacgctgatattgaaggatttgtaggtgttaggtagcttcctgagttggcttctccccagcttgttcttacttcttcccagggctacagtttggaaagtggagatggaggttggaaagcaactgtggagagcaatgttgggttctgagcttccttgacaccttyctgcctgaaggggcagccagggctacctgactccctttggttgacttttttttccctcccaaatatgtcccttatgctacccagcaaggcaagcaggtgggctttttgaaattcttccttggtctgagcaatcatcacctgagaaggcaattatgcaaatcactccgtgatcttcccagaacagcaagtctgctctggagagaaaatccaaacagtaaacacctctttggctgcccctgtgaggacgatgcaggcaccttgtttgaggagcacccat

SEQ ID NO: 235037 - DNA, 555 bp, Homo sapiens
tgccctgcataccagctgcttcagctccagccatggttaaaaggagccaaggtacagctcaggccattgcttcagagggtacaagccccaagccttgacagcttccatgtggtgttggtcctgtgggtgcacagaagacaagaattgagatttgggaacctcctcctagatgtatggaaatgcctagatgtccaggcagaggtgtgctgcagggacagagccctcatggagaacctctgctcaggcagtgcagaagggaagtgtgaggttagaccccccacacaragtttccaatggggcactgcctagtggagctgtgagaagaggaccacgatcctccagaccccagacccctccagaatggtcgatccacttacagcttgcatcgtgcacctggaaaagccacagacactcaatgccagccattaaagcagccaggaggatagctgtacctgcaaagccacagtggtggagctgcccaaggctgtgggagctcacttcttgcaacagcataacctggatgtgagacatggagtcaaagtagatcattttgga

SEQ ID NO: 235038 - DNA, 555 bp, Homo sapiens
tgccctgcataccagctgcttcagctccagccatggttaaaaggagccaaggtacagctcaggccattgcttcagagggtacaagccccaagccttgacagcttccatgtggtgttggtcctgtgggtgcacagaagacaagaattgagatttgggaacctcctcctagatgtatggaaatgcctagatgtccaggcagaggtgtgctgcagggacagagccctcatggagaacctctgctcaggcagtgcagaagggaagtgtgaggttagaccccccacacaaagtttccaatggggcactgcctagtggagctgtgagaagaggaccacsatcctccagaccccagacccctccagaatggtcgatccacttacagcttgcatcgtgcacctggaaaagccacagacactcaatgccagccattaaagcagccaggaggatagctgtacctgcaaagccacagtggtggagctgcccaaggctgtgggagctcacttcttgcaacagcataacctggatgtgagacatggagtcaaagtagatcattttgga

SEQ ID NO: 235039 - DNA, 576 bp, Homo sapiens
taattactctggtccatgggacatgcctaagctgggacatcactggctttactgatgctcatggctgtttgatttcttgggcagggtctcctttcaatcagctgaaagatgctcttttgggttttaggttctatctaggatgtaatcagctcttaacaagggttgggtatagagagctcaggtaaatccttgggagagggggctggctaagtagaagcagggagtcaggatctcaacccaataggccaggcatcagggcagtgggaatggaagagaaaccaagaacccttgaagcggaggtcctgttttatgcccttgtcccataaagacaggtgaggtgaggactactgctcagtatgcactgggatcctgggggtcaggcgataagacaactccagcatccttcccctgatgggagtgggatgtcttaagctctggttttcttcaacacagacatccygaaagattggaccctgcagctaagaagcattggagaaggcaaatgctggcagtctcaccttgcaattgccatcaatggtgctccatttccatgcacctcccatttgactatctctg

SEQ ID NO: 235040 - DNA, 617 bp, Homo sapiens
atgactcacatgacatcactgcagctcttccccttccagcttaacccaaacttcctgcatctttctccctgagcaaagagccctagagtgttcaggagcgcaagtggcacctgaacagcccaggactggtcctctgacctcaagggagccagcttatagctaagtcaatcagatgatctgtcttgaatatctgtgcttagagaaatagagcagttggaagaagaaaggccacatagcttgcagcagtagcctggccattctgggccacgtggctgagaagccctgatggagagaagactttatcaggtggctcctaaaagggatggaatgagtagctcagccrcagttcacatagaactctggtatgattcctgcttttgaatccatatgatgcttttagccctagaatgggttgcttgtgggtgtcttactaggtttatgtttcttgcaatggagaaatccctgaactaaaacactggggagcactggacagaaaagctaaggttgggaatgacatggccaaacaactgtcagcagactctggaagcattaagcagaacttgtctcccacctcagtggaaatggactcagcatcaactttggagcctgcaacaact

SEQ ID NO: 235041 - DNA, 617 bp, Homo sapiens
atgactcacatgacatcactgcagctcttccccttccagcttaacccaaacttcctgcatctttctccctgagcaaagagccctagagtgttcaggagcgcaagtggcacctgaacagcccaggactggtcctctgacctcaagggagccagcttatagctaagtcaatcagatgatctgtcttgaatatctgtgcttagagaaatagagcagttggaagaagaaaggccacatagcttgcagcagtagcctggccattctgggccacgtggctgagaagccctgatggagagaagactttatcaggtggctcctaaaagggatggaatgagtagctcagccgcagttcacatagaactctggtatgattcctgcttttgaatccatatgatgcttttagccctagaatgggttgcttgtgggtgtcttactaggtttatgttycttgcaatggagaaatccctgaactaaaacactggggagcactggacagaaaagctaaggttgggaatgacatggccaaacaactgtcagcagactctggaagcattaagcagaacttgtctcccacctcagtggaaatggactcagcatcaactttggagcctgcaacaact

SEQ ID NO: 235042 - DNA, 441 bp, Homo sapiens
ccccttaagacccccagtaatcgctcacccagcagttcacctgtcagtttgtcrctagctacatgctgataaggaggagacgagggcaaaggagaaattccttagagatacagaggcacattaagtatggatctgaccactatacaaccttcctgggtggcggtaatgagcaatgcagccataaggcagcactggtaaccaatacctggcccacgcatgggcaccagaaaatagtaaaggagggttccacaagcctggggtgggaactaggcaaggggaaaggtggggactgaaggcagaagcaggaaaactagaccaagaaaaaggcagagacttaagacagagacaagaacttcaagaaaaaatctgacatcataaaaacccaacgcagaactcctgggctgttgccggcccattctccttcatcagcccactctgcct

SEQ ID NO: 235043 - DNA, 441 bp, Homo sapiens
ccccttaagacccccagtaatcgctcacccagcagttcacctgtcagtttgtcactagctacatgctgataaggaggagacgagggcaaaggagaaattccttagagatacagaggcacattaagtatggatctgaccactatacaaccttcctgggtggcggtaatgagcaatgcagccataaggcagcactggtaaccaatacctggcccacgcatgggcaccagmaaatagtaaaggagggttccacaagcctggggtgggaactaggcaaggggaaaggtggggactgaaggcagaagcaggaaaactagaccaagaaaaaggcagagacttaagacagagacaagaacttcaagaaaaaatctgacatcataaaaacccaacgcagaactcctgggctgttgccggcccattctccttcatcagcccactctgcct

SEQ ID NO: 235044 - DNA, 536 bp, Homo sapiens
tgtaggtgtggtgtgggcgagtgtgttctcaggaaggcttttgcaaggctgtgagtgtgggttaaatatgtgtgcccttcctgagacactagccatctcaggcctcagttcccatctttaaatttmtcagtttcccatagtggggtctacagaggccctgccacctcacataggctccgtatctgcccagctcctgaatcttcctaggaaactggccaaggaaagggcacttgtggagtctacccactgggtagttcacacgctctggttggtttaacttggggcatggcccccacaggctgttgctgaatatcatgttgtcccctgagttccaatcctccagcactgctcatgaaaaccctgggctgtgcctcattagcccaaacccattgtgtccacactcacccatatttcttagccctctttttgttttggttcctgaaaaggtcttgacttaactcacccctctttggaggatctgaattcctcttaccaaactgacaccccttggataatcttgactattggtggctagg

SEQ ID NO: 235045 - DNA, 544 bp, Homo sapiens
gcaattctttatcccctactctctttactgcaataacctaaacatttggagttacaagttttgttagagtttcttgtctttgaatgatcatctttgaactaataattaagtgtatgtgattattcatagttcatttatttgaaatttttttatttgtgtttaatgctgtgggagagatgttagtgtttcagttatttcctctccaaatcctctaggcaaaattcatcactccctccttggtgcaccctttatgcctcttgcataattcttctcacattgcrctttgcttggtttttctatgtgtccatccctccaagaaactgtgagcctttcagggaaagaactacatcttcttcatctcagggtccccatttccactgtgtctggctcgtaaatgtttgtacaactaaattgagttgtgctccttgtgggaaaacagaagaagccaactaacttaacatttatcttcagtgcctgttggtctttgacaggacattttcctccaaaaggtaattgatctcaactgtgcttatgtttcagccat

SEQ ID NO: 235046 - DNA, 311 bp, Homo sapiens
ttttgggaggccaaagtgggcagataggttgagcccagaaatctgaaagcagcctgggcaacctggcaaaactctgtttytacaaaaaatataaaaattagccaggcatggtggcatgcacctgtggtctcagctacacaggaggctgaggtgggaggatcacttgagcccgggaggtcaaggctgcaaggagccatgatcacacgacggtactccagcctgggtgacagagtgagaacttgtctcaaaaaaaagaaaaaaaagaaagaaagcacatcaaactcatgtgagtacagtggcgttgtaacagg

SEQ ID NO: 235047 - DNA, 611 bp, Homo sapiens
ggagtatctgtcaataagtcaattcttctactcctctctctgtctctccctctctggttagctgatcacagatgccttatattacagttattgctagaactctctatcctcccattggaaattcttttctttttaaaattaaattaaattaacttttttagagatggggggggtctcactttgttgcccaggctggtctcaaactcctgggctcaagtgatccttctgccttggcctcccaaagtgctgggattacaggcgtaagccaccatgccctgccttttgttagtttgtttgagacaaggtctcactctgttacttaggctgaagtgcaatggtgtgatcatggctcactgcagcctcaacctcccagactcaagcgatcctcctggctcagcctctctagtagctgggactataggtggatgctaccatgctagctgttttttaaattttttgtagagacaggggcttgctgtgttgcccaggcttgtcttgaactcctgggctcaagtgcttctcgtgyctcagcctcccaaagtgctgggatcacaggtgtgaaccctggaaattcttaggggcatggtttgtctcatattcctgttttcatt

SEQ ID NO: 235048 - DNA, 528 bp, Homo sapiens
ttgctatataaaagggaaagacaaggatttttcagaatcaggttcctatgaggtgttaatgatctcctgaatattgtatttagctctttacataccactgtgatgcaaaagtgtgattgaataatgatccatttaaatggataattatgggggcatctttgtatttctaagaagactcacgcaaatacaacgtgtataaataacttgtgttttagggcagtggcaggaggaggagtatgaatctcactctgtaaagaaactccttttcctaagtcttttagtaggacaaaaaggcatctcttaatgttgttgatttcaaatctctgttattggggttatctaatatgaatgtaaaattatataatctacacactgtatagaatatacacagctaatttaggtaaatttaaccatatatacctttccaaatgtgtgtatatacatacatatacatatgtgtatatgtctctayccctttctcttgctcaatcaaatgtaaataagacaggtgatttcacctgccactcc

SEQ ID NO: 235049 - DNA, 528 bp, Homo sapiens
ttgctatataaaagggaaagacaaggatttttcagaatcaggttcctatgaggtgttaatgatctcctgaatattgtatttagctctttacataccactgtgatgcaaaagtgtgattgaataatgatccatttaaatggataattatgggggcatctttgtatttctaagaagactcacgcaaatacaacgtgtataaataacttgtgttttagggcagtggcaggaggaggagtatgaatctcactctgtaaagaaactccttttcctaagtcttttagtaggacaaaaaggcatctcttaatgttgttgatttcaaatctctgttattggggttatctaatatgaatgtaaaattatataatctacacactgtatagaatatacacagctaatttaggtaaatttaaccatatatacctttccaaatgtgtgtatatacatacatatacatatgtgtatatgtctctacccctttytcttgctcaatcaaatgtaaataagacaggtgatttcacctgccactcc

SEQ ID NO: 235050 - DNA, 424 bp, Homo sapiens
ggagtttgcctacttcatgatttttctgggacaaattttgtcccctaggatacacgatcacttagaaattgcacctttgcctgcctcaaggcccagtgcatataccagcgggatctctccaggatctctatgatcatggcctgtacaacccctcagacttgcattttaactgggattgtactggtgaaacagactgctcgggcctggacatctayagacagccctaggaccaccatcatcattattccagaatagaggaaaagtctgtatctttccttgaagattatataatccaggaatttgaatacatcagtcactttaggttttttaaaaatataaacttttcccttccttactccttgccagcttttctttaattccctttaatttcactttgtttgaactggacataaacactgaattc

SEQ ID NO: 235051 - DNA, 424 bp, Homo sapiens
ggagtttgcctacttcatgatttttctgggacaaattttgtcccctaggatacacgatcacttagaaattgcacctttgcctgcctcaaggcccagtgcatataccagcgggatctctccaggatctctatgatcatggcctgtacaacccctcagacttgcattttaactgggattgtactggtgaaacagactgctcgggcctggacatctatagacagccctaggaccaccatcatcattattccagaatagaggaaaagtctgtatctttccttgaagattatataatccaggaatttgaatacatcagtcactttaggttttttaaaaatayaaacttttcccttccttactccttgccagcttttctttaattccctttaatttcactttgtttgaactggacataaacactgaattc

SEQ ID NO: 235052 - DNA, 550 bp, Homo sapiens
ggaaaaaaaaatcataagctggttcaactatgaatactggactctaggggctggaaaccgaagagctggctgaggatccttgcttaagtaacccaaacaacgttcctggaatcatcacgcacccctaagaaaacctttattttagcttcatacaccatcttgtcccaaatcccactaatttatgagcaaacagaaacagtgctattcaatagaatgccttaggtaggattgaaagctcaataaagtcttgaatacaattccactgagtgataygagatttcaatggctaccatctcctgggattgcagctcctacaatgctaaggctgttttgcaatcacgttcttccacctccatgcatgtgaagctcatactcagagttccctccagttttcctactggtcttcaggatgggaagctctcacagatcttcacttacatgcagtgggaagccacagagacagcagtatagtaaaaagaggaatctgaaaaaatggagcactgggacagagcagagagaagtggacacacaagttgaacaagctcaaggg

SEQ ID NO: 235053 - DNA, 550 bp, Homo sapiens
ggaaaaaaaaatcataagctggttcaactatgaatactggactctaggggctggaaaccgaagagctggctgaggatccttgcttaagtaacccaaacaacgttcctggaatcatcacgcacccctaagaaaacctttattttagcttcatacaccatcttgtcccaaatcccactaatttatgagcaaacagaaacagtgctattcaatagaatgccttaggtaggattgaaagctcaataaagtcttgaatacaattccactgagtgatacgagatttcaatggctaccatctcctgggattgcagctcctacaatgctaaggctgttttgcaatcacgttcttccacctccatgcatgtgaagctcatactcagagttccctccagttttcctactggtcttcaggatgggaagctctcacwgatcttcacttacatgcagtgggaagccacagagacagcagtatagtaaaaagaggaatctgaaaaaatggagcactgggacagagcagagagaagtggacacacaagttgaacaagctcaaggg

SEQ ID NO: 235054 - DNA, 638 bp, Homo sapiens
aataggaaagaccacgaataattaggaacctgtaaggacaaacccatgtctgtctgtcactatcctcaaccttcgtgaygaccagcaggatacgccagcacccttcctcatggagctgccacacaaagctggtccagctgctatttcatgagctgtaacagggcctggccctatactgaccttcagggcataaaaatggttactatttcacctccaccttccaatctccccaaaaattttttctcatggcttaccttaacccacaaccattcaatgaagggatgtctaggtaacaaaattcctactcagctaagctgacactgttcaaagctatctctgagattttatttggaatggcttaaatgtatgatgaatttagaccacttgatagctttaaaatattggcttatttcatctataatattagtttatgttttcttttattcagatctttatgatccttgaaatgtttcatacatttttccagaacattcttacacatattttgaaacttaagaactgtataatttttttaagatgggtctcactatgttgcccagcctggtctcagactcctggggccaagtgttcctcccccattcgcctgccaagtagctgaggttacaggcatacaccac

SEQ ID NO: 235055 - DNA, 593 bp, Homo sapiens
  misc_feature (1)...(593): n = A,T,C or G
actattaatgttgggaaattataattttaggcataaatataatcaatgccttttgagcagctactttgttcctctagaagaactgaaaattttattaaaaaagcaagacagtcatgactaaaaagataattacatgttttagttatttaattagagctgttgaaaaaatggggacaagcagcataagtttagctcatcaacactaaaactattcaagtagaagcaaaatagccaccagaaaggcagcgtatggatggtttcccacatttgggttggaaattctactaaaaaatctgctctgagactctgtgtagaacagactcaaaatcttcttagaataaaaggaaagaatgaacatttgtagcctagaaggacctgaaggaatcgggcaagactaaagaagccaggaggtagagtctggcatttccaagcctggagtcccaggcaaaaacaaaggtgtagccgcaagaataattgaggcaggccaggcscggtggctcacacctgtaataaccaagcgcaatggaaggccaaggcaggnttggatcacctgaggtcgggagttcgagaccagcctgaccagtagagagtat

SEQ ID NO: 235056 - DNA, 644 bp, Homo sapiens
  misc_feature (1)...(644): n = A,T,C or G
tataacccaagtttttcctgttactcagttgtgctagtttataggatggggttcattcccttgtttcaataaatattgggggsaaggcagttagttaattcgtagtacagcatanccaactctnccacaaagtttttatttcccacttaaaaagggccaccaacatagtaccttgccttgtaggaagcacactatcagccctgaatgcatattcttcttcaggactacaccctcctgcaaatacaggaaggccaatatggcttctattaaggtcaaaactggtcttccctcagcttactctagcaaaaaagttggtcccacaaacatagcagatgagaccctagatttcttgctcaccctatttcttcctgctctcttgtaccaccctcccatatttaaaatttcagaaaaatgtgctgttgtataaggaaatgcagaggggtggagaatgaaaaacaaacaatctatatgttaacatctggagcagactaaattaaaacatagaactcattactgcagcaattacttactaagtctgggaactgaaacctaaatctgggctgaaatttttcaagcatgccttcatgtaaaaataacttgggggaaaaatctgcatggactattgtgaatcaaattgaatttca

SEQ ID NO: 235057 - DNA, 513 bp, Homo sapiens
gtagacatacctttccctgttccttccactaaataacaaacaaaacaaacataaagaggcctcagaaatatgaagagaggaggcagactggctagggtagagccttggaaccctttagctcacaatatgatggtgagctacctgggcatttttcctttctttctttctttctttctttcttcttcttcttgttttttttgtttgtttgtttgtttgtttgtttgtttttgttgttgttgttgttttacagacagagtctggctctgtcacccaggctggagtacagtggtaagatcacagttcactgcagcctcaacctcctgggctcaggcaattgtcctgcctcagctccctgagtagctaggattacaggcatgtgccaccatgcctggctaatatttttattttggggaagtgccggggtstcactatgttgcacaggctggtctcaaacccctgagttcaaggaatccttctgtctcaacctaccagggttctgggattataagtgtg

SEQ ID NO: 235058 - DNA, 601 bp, Homo sapiens
tgatcttttaataaatgactggatcagttaataaattagaataagcagatgttggaattatcactcccacctattkcctccactgtggttattctgactaaagacaaagcaaaaatggtggggaaggaacttttctctgttatagcatagcttgtgacacagaactagatgggaaaaactagagtcccatataaagttaggttctacctgcatctgactttctcttccatcaggcaagccaatataccccttagagggctggtcctttaaggcaggctgacctcactagagaaggcagaatctttgtggtcagctgtgacttgcagctgaggtatatgctagggaagaaagagggcctaggttagtagacaacctccccactcaaaaaccaacttgcgcattctcgctgtgtttgctttacttcaaaggctgtttttattgtcacccaggcatagaaactagccttcagggtttactgcatgtcctgacatgaagcttctcactgtctaatttgcattctaaataggtgcacaattgattcacaaaacctctgtgctgcttaacaggacaaatgaatcatttactttccaaattgcaggga

SEQ ID NO: 235059 - DNA, 561 bp, Homo sapiens
ctgaatagtttgagtaaaattggtattcattcttcttacatgtttgttagaattcaggagtgaaacagtcaggtcctcatcttttctttgatctctaacttcgctatcagtatattgaagttttctattttttcatggttcagtcttgrtaagttgtgtgtgtctacaaatttattaatttcttctagaatttccaatttgttgatgcaaagttgtttataatagtctctaattgttctttgtatttctgtggcctcagttatgtctccttttatatttctgatgttatctacttgggccctctctcttttttccttaatctagtcaaaggttagtcaattttgtttatcttttccaaaaaactgacttttcatttcactgttcttttgtactatttttagtttcaatttcatttatgtcagctgtgatctctactatatctttccttgtaataatcttaggtttggtttcttcttgcttttctactttcttcaggtgtatcattacctagtttatttgaaatcttcttttttgttataattgtttattactataaatgtc

SEQ ID NO: 235060 - DNA, 561 bp, Homo sapiens
ctgaatagtttgagtaaaattggtattcattcttcttacatgtttgttagaattcaggagtgaaacagtcaggtcctcatcttttctttgatctctaacttcgctatcagtatattgaagttttctattttttcatggttcagtcttggtaagttgtgtgtgtctacaaatttattaatttcttctagaatttccaatttgttgatgcaaagttgtttataatagtctctaattgttctytgtatttctgtggcctcagttatgtctccttttatatttctgatgttatctacttgggccctctctcttttttccttaatctagtcaaaggttagtcaattttgtttatcttttccaaaaaactgacttttcatttcactgttcttttgtactatttttagtttcaatttcatttatgtcagctgtgatctctactatatctttccttgtaataatcttaggtttggtttcttcttgcttttctactttcttcaggtgtatcattacctagtttatttgaaatcttcttttttgttataattgtttattactataaatgtc

SEQ ID NO: 235061 - DNA, 422 bp, Homo sapiens
gctctgtgctcagtgtggcattagtacatgaatgaatcccagtctttcccacccgttttgatgtggatatgttctcagtcatttagtttgtaggagtctttcaactacactctggctttctcttggagataactgatccatgtgtagatgtcaggaggcttctgttctgccatgttgctcatgccatcttcagaaatataccatttttatagtaggaaagtcgaatactgtaaaggtctcaattctcctcaactttatttataaatccaacataattagaataaaatcttagcagatttttaaagtcaaaattgacaattgatttttaaatctgtaaggttctaaaatagtttaaayaatcaaattgaaagaagaagttcagagaatgtacattactactaatatcaagatacttataaacc

SEQ ID NO: 235062 - DNA, 540 bp, Homo sapiens
cctctgcttccaaaacatatcatacataaatttataaataaaattatagacatctttaaaaaacaatattctaagaaaaaagcagatattaacaaagtttacatttaaataagaagagcatagtgattttatttattcatttacatttttatgtttatcattttacatttatagtaactaaaattgatatgtgcatggatttaataaaaccaatgctattatatatttatgtagattaaaaaagaatataattcatccctctaaatttattgttatattcattatcattccaatctttcaaaaatattatttgataaaactagactaattaaaaagtctatctgaaagtaaataatgttttaattttgccatgaaacaaaaattaaacatatatagagattttccatattatatatcaaaacttactacatgattataaaaatataaaaagggcaattgatcagtggaacagaagcagaatacagaaatagacccatataaraggattcagtacaagacagaggaggatttttccgtaga

SEQ ID NO: 235063 - DNA, 366 bp, Homo sapiens
aaatagtgcaagcatggagatttattgcaaagggcaaagtacacactcaagagaggggaaagcaggcgaactcgagaggagagagtggtgtactcaagagcgagtcgtgcaagggggtttgggggctactattgtggcaggacaggtctcactaaggccagcctccgtaacaactgttccagcactgactgastggttaagttaaatattaaaagctgatagagccagtgcccttctacaaaggctggaatgtaacagaagcccaccaagagttttgcctaggcctttcctgagccctgaagcatgatgagataacaaagaaattctcaatgggacctgtttaggattaaacaagttttactggga

SEQ ID NO: 235064 - DNA, 596 bp, Homo sapiens
ttatgttgcataatatgtttacttaaagctttctcaaatctctttgacaagtacacccttcaggttttactaagttaaattaagtgataggtattcaaccaaattttagatcattttcaaataagataaaatactaaattwataacaaaaggtttatctattttggcttcttattataaagaaacaaaatatattttggtctgttaattagtatgttctgtttcacattttttaaaatttgtgggaaaagtatttttagaaattacaaagtatggattcataaaatactgatatgtaaaagacaaatgaaattgcttactttctaggttttccctggatattaatgatactaagagttaaaagtctaattaatatacataattaaaactactaaaactcagagaaataattttgtatgtaaagtgtacagaaaagcaagatatgtttttggtgaagaaggttgtaagaaaaaaataagagtattgcttttgttaaagaaaaagtaacttttaatagtttagaggttaaagtttgttttagaatgaaaaaatatatacataaaactgaatgagtaaaaagttacaaaaggataatga

SEQ ID NO: 235065 - DNA, 574 bp, Homo sapiens
ttaaagtataataaaatagaaataaaaaataaataaaaagagctctaacaaatacaggtttctaataactttgagtttgtaccattggaccctatttcctagactctaataagaaaaaagctggactcataaaactgccaacatcaaccagaacaataattaattacatagtattgaactgatgaagtattataatttatgactctaaaacattgctaattgttgttatgttttgttttccagattttatttttttctcttaagctatgtatagtttacagcaattggtaaaaattactttcataaatagaattgaaacatttacttttttctttttgactgatccctcaaagtttttaaactattgatgagtatatgcatattatggcaatatagttactcatataagtttaataaaaatctgttcttctactaagaggacaattggaaacacttgttatattaccaaagttttacctggaatatcctatcatcatatatgaccasacaattttaagaaagtgaggttgactttataaagtcactagaagctttttggacaatttgcatgaca

SEQ ID NO: 235066 - DNA, 571 bp, Homo sapiens
tcagagaataagaggagactttcctttctctcctggaagtaacactgaagagcccgtttgtaaagttcacataatttgtattgttaycttttaaatggtttactgattattctaagaaaatcttttaatgtatctccatgacattttataatatagcacaaaaaagaaaaatgctaattgtatgtatgttataaagttttaccatcatttctaagttaaaaagtattaaattgagattgaaaccgcctacgcaaaattatgacagtgaagcagctccattatctggggtaaatacctggggatcatcatcttgtgctaagaaaatttaggacacggacacacacgaggagtttaggaatggaggtttaacaggcagaagaaagagaaaggagaacagctctctctctctctcggaggggcttcgggaagggaaagaccagctggcataggatgcgctagattttataggcaggcttgaggaggtggtgtctgacttacctagggccctcagattgatttgatcaggtgtgacttttacacagtgtgcaaggaagactggccaccccacccc

SEQ ID NO: 235067 - DNA, 571 bp, Homo sapiens
tcagagaataagaggagactttcctttctctcctggaagtaacactgaagagcccgtttgtaaagttcacataatttgtattgttaccttttaaatggtttactgattattctaagaaaatcttttaatgtatctccatgacattttataatatagcacaaaaaagaaaaatgctaattgtatgtatgttataaagttttaccatcatttctaagttaaaaagtattaaattgagattgaaaccgcctacgcaaaattatgacagtgaagcagctccattatctggggtaaatacctggggatcatcatcttgtgctaagaaaatttaggacacggacacacacgaggagtttaggaatggaggtttaacaggcagaagaaagagaaaggagaacagctctctctctctctcggrggggcttcgggaagggaaagaccagctggcataggatgcgctagattttataggcaggcttgaggaggtggtgtctgacttacctagggccctcagattgatttgatcaggtgtgacttttacacagtgtgcaaggaagactggccaccccacccc

SEQ ID NO: 235068 - DNA, 553 bp, Homo sapiens
ggagaaaacaagttaagaagggttgcaatgtaatctaccaattatatgggacactttggaaggaaccacagcaactagaaaagaaatgataggccgggcacggtggctcacacctgtaatcccagcactttgggaggccgaggcgggagaatcacgaggtcaggagatcaagaccatcctggctaacacagtgaaaccccatctctactaaaaatacaaaaaattaaccaggcgtggtggcgggcgcctgtartcccagctactcgggaggctgaggcaggagaatggcgtgaacccaggaggcggaggttgcagtgagctgagatcatgccactgcactccagcctgggtgacagagcgagactcggtctccaaaaaaagaaaaaaaaacaaagaaagataaataagctaagttaaaataaaagacataattagcagaatctagtagaataaataaaaaatatgcaaatataacattactggtattatcattagatcaaagtgatatagaaaatatatgtatggccaggaactgtggctcacacctgtaatc

SEQ ID NO: 235069 - DNA, 572 bp, Homo sapiens
ttgtctgctgtagctttatattcatccagcattgtgtggaaattgtgagctgcttggatcattgcagttgggagtcattctattcctgggttagaaaactgagctaaagatgaggttaaaattctaaacctccaacttggtagtcttctgtgagattcaaatttctccatcttcagatttggggtgttcattttgaacctttatttgtcgtggagggttgttggggtaaaattaaatgaaacattttgtataatgttctttcaacatagaagaaccccagtatagtgtcagtttccttttcttttcctttgtctcaggagaatgaactctaggtcccaaatagtcaagttggaattcatcctctttaatttagtttagccccactttatgcttcctcatccacttgatctatttaattctttatatcctattcccaatattcattcctgtccacacccacaaacacactccaacacacaccaacacacacatctggctaagatatwtgacttagaaaagaagtttgtcttgttttctaggctaaagcctaccttagaaagcatttgaagagt

SEQ ID NO: 235070 - DNA, 517 bp, Homo sapiens
agctacaatggagcaaggaattatgcaaagaatttaaaagaaaatataattataatgaattacaatagagtcaagcaaaaagagagtggagtgaaatgtttgaaccattgaaagaaaataaacaaactctgccaatctagaattctatatccaacaaaagtatccctaaactgtgaaggaaaaataaaaattgtctcaagaaacaaaaactgagaaatttattgccagtagagcttccttgcaagaaatgttgaaagactactcaaattgttctgaaaaatagaggaagagggtatacattcaaactcattctacgagaccagtattaccctgatattaaaattaaagacatgtcaaaaaaagaaaactacaggccaatatcacgatgaatattgatgcaaaaatcttcaacaaaatactaggaaacagagttcaacaatacattagaaatatatcatccatcatgaccaagtragatttatccctgggatataaggatagttcaatagatgcaaat

SEQ ID NO: 235071 - DNA, 438 bp, Homo sapiens
aagatgctcaacatcattgattatcaaagaaatgcaaattaaatctgtaatgagatatcatctcaccctagttaaaatggcttatatccataacaaatgctagcaagagtgtggaccataacaaatgctagcaagagtgtggagaaaagggaacccttatacactattggtgggaatgtaaattagtrcaaccactatggagaacagttcagagatttcccataaaactaaaaatagagatagtatatgatccagcaagcccactgttgggtatatatcccaaagaaaggcaataagtgtatcaaagagagagcctcactcctatgtttgttgcagcattgtttacaatagctaagatttggaagcaacctaagatttcatcaacagattaattgataaagaaaatgtggtacatatacacaatggagttattattca

SEQ ID NO: 235072 - DNA, 438 bp, Homo sapiens
aagatgctcaacatcattgattatcaaagaaatgcaaattaaatctgtaatgagatatcatctcaccctagttaaaatggcttatatccataacaaatgctagcaagagtgtggaccataacaaatgctagcaagagtgtggagaaaagggaacccttatacactattggtgggaatgtaaattagtgcaaccactatggagaacagttcagagatttcccataaaactaaaaatagagatagtatatgatccagcaagcccactgttgggtatatatcccaaagaaaggcaataagwgtatcaaagagagagcctcactcctatgtttgttgcagcattgtttacaatagctaagatttggaagcaacctaagatttcatcaacagattaattgataaagaaaatgtggtacatatacacaatggagttattattca

SEQ ID NO: 235073 - DNA, 493 bp, Homo sapiens
aaactttttaaagaaaacatacataaaaatctgtgtgatactgagtttggttatgagttcttagctaccttaccaaaaggtcaattcataaaagaagaaatragttgaacattattaaaattaaatatttctgtgaaatatattgttaagagaattaacagactgggagaaaaacatctgcaaatcatatacttgataaagaactatcatccaaaatatatatagaacatttaagacccaataacaacaacaacaaaaaatcaaaaatgggcaaaaatctgtacatacatttcactaaatgagatatacagacagtaaataagcatatgaaaagtgttcagcattatttgtcatcagggaaatgcaaatttaaaaccactacaaacctattagcatgtctaaaatccaaaaatatgacaaaagcaagtgtaggtgagaatgtggagcaacagaacactcatgcattgcatatggaagtgcaaaatggtacagc

SEQ ID NO: 235074 - DNA, 493 bp, Homo sapiens
aaactttttaaagaaaacatacataaaaatctgtgtgatactgagtttggttatgagttcttagctaccttaccaaaaggtcaattcataaaagaagaaatgagttgaacattattaaaattaaatatttctgtgaaatatattgttaagagaattaacagactgggagaaaaacatctgcaaatcatmtacttgataaagaactatcatccaaaatatatatagaacatttaagacccaataacaacaacaacaaaaaatcaaaaatgggcaaaaatctgtacatacatttcactaaatgagatatacagacagtaaataagcatatgaaaagtgttcagcattatttgtcatcagggaaatgcaaatttaaaaccactacaaacctattagcatgtctaaaatccaaaaatatgacaaaagcaagtgtaggtgagaatgtggagcaacagaacactcatgcattgcatatggaagtgcaaaatggtacagc

SEQ ID NO: 235075 - DNA, 493 bp, Homo sapiens
aaactttttaaagaaaacatacataaaaatctgtgtgatactgagtttggttatgagttcttagctaccttaccaaaaggtcaattcataaaagaagaaatgagttgaacattattaaaattaaatatttctgtgaaatatattgttaagagaattaacagactgggagaaaaacatctgcaaatcatatacttgataaagaactatcatccaaaatatatatagaacatttaagacccaataacaacaacaacaaaaaatcaaaaatgggcaaaaatctgtacatacatttcactaaatgagatatacagacagtaaataagcatatgaaaagtgttcagcattatttgtcatcagggaaatgcaaatttaaaaccactacaaacctattagcatgtctaaaatccaaaaatatgacaaaagcaagtgtaggtgagaatgtggagcaacagaacactcaygcattgcatatggaagtgcaaaatggtacagc

SEQ ID NO: 235076 - DNA, 493 bp, Homo sapiens
aaactttttaaagaaaacatacataaaaatctgtgtgatactgagtttggttatgagttcttagctaccttaccaaaaggtcaattcataaaagaagaaatgagttgaacattattaaaattaaatatttctgtgaaatatattgttaagagaattaacagactgggagaaaaacatctgcaaatcatatacttgataaagaactatcatccaaaatatatatagaacatttaagacccaataacaacaacaacaaaaaatcaaaaatgggcaaaaatctgtacatacatttcactaaatgagatatacagacagtaaataagcatatgaaaagtgttcagcattatttgtcatcagggaaatgcaaatttaaaaccactacaaacctattagcatgtctaaaatccaaaaatatgacaaaagcaagtgtaggtgagaatgtggagcaacagaacactcatgcattgcayatggaagtgcaaaatggtacagc

SEQ ID NO: 235077 - DNA, 563 bp, Homo sapiens
actttgtatgcctcatattagtggaattattcagtatatttctttgtggattggcttatgttacttagaataatcttctcaaggtttgcctatgttttagcatatgacagaatttcctttattttaaaggctgaacaatattccattgtatgcatagaccacattttgttaatctagtcattcatcaataaacatttgggttgcttccatctcttggctataatgaatagtgctgctgtaaaaaagaatgtgcagatatctctaagagaccacgttttccattcttttgtatatatacttagaagtaagagtgctggatcacatgcttatttatttttaattttttaaggaaattccataccatttttcataygagttgaatcattttacaattccatcagtggtgtacagggtcccaatttcttcatatccttaccaacacttgttttctgtgtgtgtgtgtgtgcgtgtgtgtgtgtgtgtgttgattttgttttgttttattggttttactagttttttgcttttaagtttttttattgttgttagtagtagctattata

SEQ ID NO: 235078 - DNA, 563 bp, Homo sapiens
actttgtatgcctcatattagtggaattattcagtatatttctttgtggattggcttatgttacttagaataatcttctcaaggtttgcctatgttttagcatatgacagaatttcctttattttaaaggctgaacaatattccattgtatgcatagaccacattttgttaatctagtcattcatcaataaacatttgggttgcttccatctcttggctataatgaatagtgctgctgtaaaaaagaatgtgcagatatctctaagagaccacgttttccattcttttgtatatatacttagaagtaagagtgctggatcacatgcttatttatttttaattttttaaggaaattccataccatttttcatatgagttgaatcattttacaattccatcagtggtgtacagggtcccaatttcttcatatccttaccaacacttgttttctgtgtgtgtgtgtgtgcgtgtgtgtgtgtgtgtgttgatkttgttttgttttattggttttactagttttttgcttttaagtttttttattgttgttagtagtagctattata

SEQ ID NO: 235079 - DNA, 475 bp, Homo sapiens
gttttttgcttttaagtttttttattgttgttagtagtagctattataatggttgtgagatgactttctcattttggttttgacttgcttttcttggataattagtgatgttgaacatcttttcatatgtttcttggccactaatatatcatcttggagaaatgtctattcaagtcatttgcccatttttaagttgtgttatttgatgttttgttgttgagttgtgagagtctttaaatattctggatgttactctcctatcaaatacatgatttgtaaatttttctttcattctayaggttgtctcttcagtcttttgagtcctttgagcacaaaccatttttatttaagttttatgtaatcccatttgtctattttcacttttcttgactgtgcttttggtattatattcaagaatttatgccaaatttaatgttgtgaagtttttctgctatgttgtctgccaggaattctc

SEQ ID NO: 235080 - DNA, 558 bp, Homo sapiens
ttcaacatataaatttgggggcagtgaacacaattcagtccataacattaccttttttgcatttcaragtcaattgccactttttacacatatattgaagggaaaattattaatttttccctcttccaacattgcaaattttctcttttctctttggttttatggagtttttaatgaagttctactacatcgtgtctaggtgtggatttcttcttatttcgctgaatttgaatttgttggacttttgtttgatttggggattgctgtcatttgtgagctgtgttaagttttcagctgtaattattttcaatatctattctctcctattcttctggaacttcagtgaaacatttaccagtcatttacagtccccgccacctgcctcgagtgtcgcttgtatttctgacctttatccttcatactctattttttcattcctcctatattaatttcagagagttacttttgaactttaggcctataaaatatcttttaaaattctaagccttaattagatgaacctggagataattcattgtttaaccctggaactgacaa

SEQ ID NO: 235081 - DNA, 558 bp, Homo sapiens
ttcaacatataaatttgggggcagtgaacacaattcagtccataacattaccttttttgcatttcaaagtcaattgccactttttacacatatattgaagggaaaattattaatttttccctcttccaacattgcaaattttctcttttctctttggttttatggagtttttaatgaagttctactacatcgtgtctaggtgtggatttcttcttatttcgctgaatttgaatttgttggacttttgtttgatttggggattgctgtcatttgtgagctgtgttaagttttcagctgtaattattttcaatatctattctctcctattcttctggaacttcagtgaaacatttaccagtcatttacagtccccgccacctgcctcgagtgtcgcttgtatttctgacctttatycttcatactctattttttcattcctcctatattaatttcagagagttacttttgaactttaggcctataaaatatcttttaaaattctaagccttaattagatgaacctggagataattcattgtttaaccctggaactgacaa

SEQ ID NO: 235082 - DNA, 586 bp, Homo sapiens
ggatggtaggactactggatgaaaggatccttgtcccgatgaatgacacatggagcaaagctcccaactcccctctacttctcatggcactgcgaaatgaatacaacatacattattatttcaggccactgagagttggttgccattgttattacagcagataaaatactattggaactgacgtttcttacagaatatacagataactttccaaatgatttaattttatttattcccactaagaccattttaatttctgacattttcaccaaaatttgatacttccawatctttggtaaaactttgtttttctatttcatttgctactaaggagattgaggttttttgtttgtttgatttgccaataaagtttctttgtatgtgtttctgtgtgtgtatgtaatttgcctataattttatctactcattttctcttggatttgtcttcttaaaatttttaaaaaaaaattttcatacattctgaatacctacctcttgcttgctgcatttattctaagtttttctattaatccagtgactcaccttttgattttttgtgggaagaataaataatatataatattat

SEQ ID NO: 235083 - DNA, 586 bp, Homo sapiens
ggatggtaggactactggatgaaaggatccttgtcccgatgaatgacacatggagcaaagctcccaactcccctctacttctcatggcactgcgaaatgaatacaacatacattattatttcaggccactgagagttggttgccattgttattacagcagataaaatactattggaactgacgtttcttacagaatatacagataactttccaaatgatttaattttatttattcccactaagaccattttaatttctgacattttcaccaaaatttgatacttccaaatctttggtaaaactttgtttttctatttcatttgctactaaggagattgaggttttttgtttgtttgatttgccaataaagtttctttgtatgtgtttctgtgtgtgtatgtaatttgcctataattttatctactcattttctcttggatttgtcttcttaaaatttttaaaaaaaaattttcrtacattctgaatacctacctcttgcttgctgcatttattctaagtttttctattaatccagtgactcaccttttgattttttgtgggaagaataaataatatataatattat

SEQ ID NO: 235084 - DNA, 506 bp, Homo sapiens
ttaccagttggacaaccttgtgcaagtgactttacccttacaagattttatttttctgtaaaatggagataaatatcttttttttacaaaattgttctaaatatttaatgagattattaaataacacagttccaagaatatattaaagattaatgactactaaccaacatggaatcaatgttttcctcagctttacacattttaaacaggcttcttctacctttaggctcctgatccccctttrcttacagcatttactgtagaaaacttgccaattgtatactctttttctgttcctttgaaatggctgtaaatagcctctttccagtttacaacccagaaaacgtctgtctcaaagggctgggaaccatctctttgaaatgtaaacatgaagaaaataacacttctatcctccatcctctataggagagtagtagcttaatttctgtgggtatgctgatttgctaacacagatggcctaatcacaaggaaaagcatttgcaaac

SEQ ID NO: 235085 - DNA, 554 bp, Homo sapiens
tagtctcgaataaagcctttcttacctgtttaactttgtctagtacatttgttactttgaaagtcaccatgattatttatatctaggagctagaatcacctctctaattcatgttctttacttgtcaccattagcctcaggctttcaaaactagaagtataktattttttattttctatcacaaaaccctttaataagtattcagcactttcaagacaaaattcaaactctttaacagggtaaacaagattcttcaacatacacacagcaatttttgaaacagaagactggtttttaaatataatgttgcattttattatgtaagttatatgtaggtaccagaatatattattgggtttccatgcctgagtgcatgaacttgtgatgaaaatgatgagtaatattagcttctggagaatggatgatatgaggtagaaaaagagacagggctaaaacagagccaggaaagaaacaaaacctgttaggttactgatctagtaaagaaaagatttgttgcatctagagcaatctgatcactgcagccctatagctaa

SEQ ID NO: 235086 - DNA, 554 bp, Homo sapiens
tagtctcgaataaagcctttcttacctgtttaactttgtctagtacatttgttactttgaaagtcaccatgattatttatatctaggagctagaatcacctctctaattcatgttctttacttgtcaccattagcctcaggctttcaaaactagaagtatagtattttttattttctatcacaaaaccctttaataagtattcagcactttcaagacaaaattcaaactctttaacagggtaaacaagattcttcaacatacacacagcaattttkgaaacagaagactggtttttaaatataatgttgcattttattatgtaagttatatgtaggtaccagaatatattattgggtttccatgcctgagtgcatgaacttgtgatgaaaatgatgagtaatattagcttctggagaatggatgatatgaggtagaaaaagagacagggctaaaacagagccaggaaagaaacaaaacctgttaggttactgatctagtaaagaaaagatttgttgcatctagagcaatctgatcactgcagccctatagctaa

SEQ ID NO: 235087 - DNA, 466 bp, Homo sapiens
tactttgaaagtcaccatgattatttatatctaggagctagaatcacctctctaattcatgttctttacttgtcaccattagcctcaggctttcaaaactagaagtatagtattttttattttctatcacaaaaccctttaataagtattcagcactttcaagacaaaattcaaactctttaacagggtaaacaagattcttcaacatacacacagcaatttttgaaacagaagactggtttttaaatataatgttgcattttattatgtaagttatatgtaggtaccagaatatattattgggtttccatgcctgagtgcatgaacttgtgatgaaaatgatgagtaatattagcttctggagaatggatgatatgaggtagaaaaagagacagggctaaaacagagccaggaaagaaacaaaacctgttagkttactgatctagtaaagaaaagatttgttgca

SEQ ID NO: 235088 - DNA, 453 bp, Homo sapiens
catgggatctaatggtttataggatcagcatgatctccgtaatttcaaatgagataaattctttgagaaatcactcataaattttaaaaattctctcaagtttagacatcactttgggagaaaaagtacaaggttatctgtcccaatgtttggggtacttaagcaaactgaatgctgattcaaaactaaatttagaagtaaagaaaaaaatagttaaaacctcagagattaaaccaggaacaattctcacatttctgagattttttttttcctaggcatgatagacaacataaagataagaaaatattttaacatatatagggaaaatatacaaaaataaaaaatattttgcacattatatgcatgaatattttgaaaatatatrtaagtctggccagttgtggtggctcatgcctctaatcccagtactttgggagaccaaggcaggaggat

SEQ ID NO: 235089 - DNA, 544 bp, Homo sapiens
atctctacaaaaaaatcaaaaaattagccaggcatggtggcacacacctgtagtcccagctacttgggaggctaaagcaggaaccattctcacatttctgagaggattggttattattataaccraggtggaaggatcacttgagccagtgcaatcagggcttcaatgagctgtgatctcccagaggaagaccctgtttaaaaaaaaaaaaatgcatgtaagtcttatggctgttatcagagatgtgtctctgttaaacagctctgtgaggttaagtgtgtctttggctaagattctctgcttgaccaaactttagtcagtctcctgaatgttttcctaggcccatctgtgcactttcttataaaatccagctttagcaagaatcctgctaagtcagtttatcaagaataacccccttcctttgatgtgtgatcaccctcgatatgtgatcagcttcctcaacttccactatctcccagatgatatttagttaccctagcctgtcttcagaaaaaatcctgataagtcagtttagtcagaattc

SEQ ID NO: 235090 - DNA, 544 bp, Homo sapiens
atctctacaaaaaaatcaaaaaattagccaggcatggtggcacacacctgtagtcccagctacttgggaggctaaagcaggaaccattctcacatttctgagaggattggttattattataaccgaggtggaaggatcacttgagccagkgcaatcagggcttcaatgagctgtgatctcccagaggaagaccctgtttaaaaaaaaaaaaatgcatgtaagtcttatggctgttatcagagatgtgtctctgttaaacagctctgtgaggttaagtgtgtctttggctaagattctctgcttgaccaaactttagtcagtctcctgaatgttttcctaggcccatctgtgcactttcttataaaatccagctttagcaagaatcctgctaagtcagtttatcaagaataacccccttcctttgatgtgtgatcaccctcgatatgtgatcagcttcctcaacttccactatctcccagatgatatttagttaccctagcctgtcttcagaaaaaatcctgataagtcagtttagtcagaattc

SEQ ID NO: 235091 - DNA, 629 bp, Homo sapiens
aagccatatgatccaatcactcatagaagttaacaaactggtggccatcagtcatatagccctgatccgcctctgggaatgtaagaccacgaagcattttgatcaaagcaaaagcagccaaatgctccctgctgattcattacatgaacacttgtccaagtgggatgactaaggcaaaggatctggaaatggcttaattagaaacagacaaagggattcytgctgatatttttgcctggacaaccagagtttctgtttggaccattgcattcaataattgaggtttaaagctttctatatgaagcattgattttacctgctgaaccaagaaagctggttttcatcttgcagatatgtgatgggattacaaaccatatcttctgtgcaatgaacacagtgaagggaactgcattaactgtcctaatttcacaaagaataaaagtatccagagaaggcatgcagtaaaggatgaacacatgttctactgtgtatgtgattcccctctcaggacatgagggcagtcccagttagtttcttttgcttgttgtttagcgctgtgttccaacaccacatctgtcacaacctgagcgatcttgggcatattccacagaaagccccattttcacatt

SEQ ID NO: 235092 - DNA, 585 bp, Homo sapiens
agttagtttcttttgcttgttgtttagcgctgtgttccaacaccacatctgtcacaacctgagcgatcttgggcatattccacagaaagccccattttcacattctgcaattacctctgagggttgcggtgaggattaaataaaataatgcatgcaagacacttacttagaaggatgcctggtattttaataggtcatcagtaattttggctaacttgaaaatcatcattatcatcactaggaatcataaaaatgtgaagaaagagaaatctatagtctacgcttggggcaaactaattgatatggtttggctgtatccctattcaaatctcatcttgaattcccacgtgttgtgggagggacctggtgggaagtaattgaaycacaggggcagatctttcctgtgctattctcgtggtagtgaataaatctcatgagatctgaggtttcataaggcaaagtttccctgcatatgcctcttctctggtctgctgccatgtgagacatgcctttcaccttctgccatgattgtgaggcctccccagccatgtggaactgtcagtccattaaacctctttcttttgt

SEQ ID NO: 235093 - DNA, 614 bp, Homo sapiens
ttcataattattttttattagcagatatagctagtctaaaattttataggttgtcgtttgacacagacatctcccttacaaagggaaattaatttaaattctaaaacacatggaggtgaagcataatttacttttgaaacagctataaaatgactgtatcatgtgggttccaagtgctactgtctgcctcgctctgggcattgagctgtaagtcattcaaggtgtatctctgatcacaggggaagggaaagggagaaagtgaggaggaaaatacatcctcagtgattttaatctcaggatgtgaacatttcttgtccaatatatgcatagattcctggggatttcctcacacaaakaattttatgtccaatgaggcttggtgacctatcaggcacagttgtaagggagtagaagaagggggatttatgttttgtcctgcacaactgatccctttcccaagcctaaaattgagctgaatcagtaggttaaagacaacacatattctctgtaaagtcagatgccccactggcttggtttatttcccaaaggagaaaacgggtaatttaaataatgtggcttaacttgtcatatatctgcccttatatcatcagtga

SEQ ID NO: 235094 - DNA, 614 bp, Homo sapiens
ttcataattattttttattagcagatatagctagtctaaaattttataggttgtcgtttgacacagacatctcccttacaaagggaaattaatttaaattctaaaacacatggaggtgaagcataatttacttttgaaacagctataaaatgactgtatcatgtgggttccaagtgctactgtctgcctcgctctgggcattgagctgtaagtcattcaaggtgtatctctgatcacaggggaagggaaagggagaaagtgaggaggaaaatacatcctcagtgattttaatctcaggatgtgaacatttcttgtccaatatatgcatagattcctggggatttcctcacacaaataattttatgtccaatgaggcttggtgacctatcaggcacagttgtaagggagtagaagaagggggatttatgttttgtcctgcacaactgatccctttcccaagcctaaaatygagctgaatcagtaggttaaagacaacacatattctctgtaaagtcagatgccccactggcttggtttatttcccaaaggagaaaacgggtaatttaaataatgtggcttaacttgtcatatatctgcccttatatcatcagtga

SEQ ID NO: 235095 - DNA, 578 bp, Homo sapiens
aagcttacaatgactgcaggaggccacagagaaagccaagtgggagactgaataaatcacccagataatttgggcagaaatacgtcctgctggagcctgaatatctggctaaagtacttattttgacaaatgattttggtaattattcaagccttggtttcgttttrgaaattttctgttcttgagataaggaaaggacatgcacgtcagtttctcttatgaatggggccatggtatacatacaagaaatggatttgtcagtgagcctctagacttcgcatgcccaggattagttataattaagataatgtattcattcatccaaccaatatttatctagtatctactacatggaagacactgttatgtaccagataaaaacaggaattaacaagactaatttgcaggacaaatacaaataaagaaggaatgatgaaggagggagtgagagagcaagaagagagagaaaggagaagagagagagagaatgattcaaacttcaggacagacagtacatacacaaagaaagagaggcaaggtgagggaggaatggtatatcaggtaagaattaagttcac

SEQ ID NO: 235096 - DNA, 598 bp, Homo sapiens
gatgaataaaccaaaaacatttatttaatacccattaacaataaaggcttgtgagaggtgtactgagcaatatgtgtctcagtctttgccttcaaaaggcttatactttagttgggacaataatcctcacaattatctctctactgagatggctagccttacaagggagtatcatgggggaattatcttgaagacagtaagcaatcccattggcaactcagcattcagattaaaaatgaagagttcagaatcagacagatctgggttcagtttcacctccttcactgactacctgtgtgatcttgagtaatttactcaacttctttagcccaccatttccaaacctacaaaataggatgaataaagatatctgtacatgaggctttagcacagaacctggccaatagtacrtgcgtaacagatgatagtcattactttttctaacttcaatcagcactagaaaaataagccgggtgtttttgtttttaaaataattttggctactgttttgtcattgggtttgggttttctcccctcatcatgaatctgatggtatgttcacagagaggatgtgtctgttctcctagttgaattcatg

SEQ ID NO: 235097 - DNA, 598 bp, Homo sapiens
gatgaataaaccaaaaacatttatttaatacccattaacaataaaggcttgtgagaggtgtactgagcaatatgtgtctcagtctttgccttcaaaaggcttatactttagttgggacaataatcctcacaattatctctctactgagatggctagccttacaagggagtatcatgggggaattatcttgaagacagtaagcaatcccattggcaactcagcattcagattaaaaatgaagagttcagaatcagacagatctgggttcagtttcacctccttcactgactacctgtgtgatcttgagtaatttactcaacttctttagcccaccatttccaaacctacaaaataggatgaataaagatatctgtacatgaggctttagcacagaacctggccaatagtacatgcgtaacagatgatagtcattactttttctaacttcaatcagcactagaaaaataagccgggtgtttttgtttttaaaataattttgsctactgttttgtcattgggtttgggttttctcccctcatcatgaatctgatggtatgttcacagagaggatgtgtctgttctcctagttgaattcatg

SEQ ID NO: 235098 - DNA, 587 bp, Homo sapiens
gacattctgggttaaatattagaaatgttgtaatttggattcccctgcaaagagaataatataaaaattgatttcttgtgcatccagctagaatgaaatgggttcactcagtcagtcaggagtctgggatgaaactgtcattctcattattttgarctctacattttatagatagaatctagtaaaacttttttagggatgtgtgaagatggacacaataatagcagttaataaatctttatattgttatctcattaattgccataaaatatggtctgaactgagattgactgagattaaatgactgttccaaagtcccctagagagttaatggcaagcctcagataaaatttctctcttaatttctagatcacaatgccagggtagccataggtagaaattccaatcattatgtatttctatcagtacagactttggaattgagaaaggaggtattgactgcctgggatcaaatacagctttactaatctctagctgtatgaatttgatcaagtctcacaagcaatctgatcttctatttcttgaactagaaaataggagtgataatactaattactttgtaaggt

SEQ ID NO: 235099 - DNA, 587 bp, Homo sapiens
gacattctgggttaaatattagaaatgttgtaatttggattcccctgcaaagagaataatataaaaattgatttcttgtgcatccagctagaatgaaatgggttcactcagtcagtcaggagtctgggatgaaactgtcattctcattattttgagctctacattttatagatagaatctagtaaaacttttttagggatgtgtgaagatggacacaataatagcagttaataaatctttatattgttatctcattaattgccataaaatatggtctgaactgagattgactgagattaaatgactgttccaaagtcccctagagagttaatggcaagcctcagataaaatttctctcttaatttctagatcacaatgccagggtagccataggtagaaattccaatcattatgtatttctatcagtacagactttggaattgagaaaggaggtattgactgcctgggatcaaatacagctttactaatctytagctgtatgaatttgatcaagtctcacaagcaatctgatcttctatttcttgaactagaaaataggagtgataatactaattactttgtaaggt

SEQ ID NO: 235100 - DNA, 586 bp, Homo sapiens
gttttctccactgtgtgttagttattgccattaccagtggccatcagaatatgataaatggggccggacgcggtggctcacgcctgtaatcccagcactttgggaggccgaggtgggcagatcacgagatcagaagatggagaccatcctggctaacacgatgaaaccccgtctctactaaaaatacaaaaaaattagccgggcgcgatggcgggcacctgtagtcccagctactcgggaggctgaggcaagagaatggcatgaacccgggaagcggagcttgcagtgagccgagatagcaccactgcactccagcctgggcgacagagcgagacwccgtctcaaaaaaaaaaagaatatgataaatgtaaaaacatgttctgttcaaataatcaaaatgatttgaatgtatagataaaagctcttttttaagataactgtgatggatatttaattctgcttggcaaacaataaacttactttctaataatagattcgttttctaaataaggaacggaatatggattagtaaagcagagcctcaagagtttggctatatcagcaacaatgtgatttaggtgatgta

SEQ ID NO: 235101 - DNA, 587 bp, Homo sapiens
taaaaaaacaataaaaatatgaaasagtgctcaacttcttttgcggtcaaagaaatgaaaatcaacatcacaatgcaatactactacacacctacttgaatggataaaatgaaaaagacaagcattggtacatatatggagcaactagctgactttccatcagcagtgtgtgaaatttctaaatcacccatataagtgctaatacttgtctttggaaaactggttggtggacagtagctactaatgctgaaccacttcaaggtagatacctaacaaaaacatgtaaatatgtccacagaaaattattggtatgtggaacaacatgaatttcacaaacataatgacagacagatgtcagatacagagaggaactactatatgattctgtttacataaactttccaaacacaaaactaatctctgatgttagaagtcagtatcgctggtggaggttagtactggctggggcctaagaggaattttcgggtgctagtgatgttctattttttatctaggtgctagttgcatggatgtgctcactttaagaaaattcagtaaagtatatactcttatgacttgtgtccttt

SEQ ID NO: 235102 - DNA, 610 bp, Homo sapiens
tcacctgtgactctgggtaaagattagttttaaagggtgaggttgtttcccttctgtatsttgaaccaaaaattcaactgtcaaacttagaatatgtgaaagacatgagataaatttagaagtggagatcattcgttcattaaagcagcttactaggtgaggacataaaaggaaagaaactgggtataagcctgttacttttaaatgactatcacatggatttggccacaaagatactcttggctggattaattaattaaactccttattttttcatttcaaattttgagcagtacttacttcaactaaaggaattgccttgtgatacggttaggctttgggtccccacccaaatctcatcttgaactgtaatctccataatccccacatgtcaaaggagagaccaggtggaggtaattgaatcatagggacagtttcccccatagtgttctcatgatagtgagttggtactcatgatatctgatggttttataaggaggtcttccctgtttgctcagcgcttttccttcctgctgccttgtaaagaaggtgcctttcttccccttcaccttctgccatgattgtaagtttccgagacctccgcagctat

SEQ ID NO: 235103 - DNA, 481 bp, Homo sapiens
gcttttgattttacaggctcatgggcaaaagagacttgccttgcctcagttgagactttggattttggggttaatgttggaatgaattaagactttgggggactgttgggaaggcatgattagatttgaaatgtgaaagggacatgagatttgggagaggtctggggcagaataatatggttaggctttgtgtccccacctaaatctcatcttgaattgtaatccccataatccccatgtgtcaagccagagactagatagaggtaattaaatcatggaggcagttttgcctgtggtgttcctatgatagtgarttagctctcatgagatctgatggttttataagtggctattccccctttgctcagcacttttcctttctgctgccttgtgaagaaggtcttgcttccccttaggcttccatcattattgtaagtttccttaggtctccccagccatgctgaactgtgagtgaattaaa

SEQ ID NO: 235104 - DNA, 581 bp, Homo sapiens
aaatattctgtgattattactagcaccactgctattataactattattaccagcaccctgaaccttgcataccccagcctttatcaactraagaacaattgctgaattctttactccagcacaatcattttttaaatctaatcttttgaaaaattggtccctccagaaatggtttgactgaattatgcttgagaatgagcataatcatacaaaaaagttattatgcaaaggggtcctgtgaaatgtgtcactgttccttttgctgtttgctcttgaggagatcggccatcacgtcccgcaagagaaattcctggctattctggcttccagaatgctttagatcaagggaatcattttaaaataatgatccctgtcaagagagaaactgataaatcttacctcttagacctccgaagaaccacaactaaattggtagcctgaccaacacatttaagtgtcactagatttccttttactctcttatctttcttcttttgccccatctttaatttataccactttacatgtggtatatgcccttattaattattgcagtattttatggacaaaaaaatgagtat

SEQ ID NO: 235105 - DNA, 631 bp, Homo sapiens
gcttgtacatccttatggtaatcaaatgctataaatcgccctgagtcaccttagggttcattacagttgggttcattacactcaccctacagtaatcaaatgctgtaagctttctcagctgccctagagttcactctgattcgattaacctaggtaacatcatcaatctttgaaccagccactgtgatcaagcagatggaatatactcattctccaagcatggatcatatgactaccctttaaaatgaaatggrtatgaggttagctgatcagcacaacccaaaccacatggacagaaaattcggaatggattattccccaaaggaaaaccaggttgccagatagaaaaatgggcattggacaaaaatagtcaatgtccattactaatatcacagaacatccaaggacccttgcagagcatctgtccccattcttactcttgccaactcgtcttgatccactatgccttcttctggggacttgaatacactgagcttcatcccacctaaagttctctttcgttgcatcaggcaactctgtatttcctaacatgcccttcactttcatgcctctaagctcttactcttgctcttcccttcacttgtccatcttaggtgtggttctctccatc

SEQ ID NO: 235106 - DNA, 631 bp, Homo sapiens
gcttgtacatccttatggtaatcaaatgctataaatcgccctgagtcaccttagggttcattacagttgggttcattacactcaccctacagtaatcaaatgctgtaagctttctcagctgccctagagttcactctgattcgattaacctaggtaacatcatcaatctttgaaccagccactgtgatcaagcagatggaatatactcattctccaagcatggatcatatgactaccctttaaaatgaaatgggtatgaggttagctgatcagcacaacccaaaccacatggacagaaaattcggaatggattattccccaaaggaaaaccaggttgccagatagaaaaatgggcattggacaaaaatagtcaatgtccattactaatatcacagaacatccaaggacccttgcagagcatctgtccccattcttactcttgccaactcgtcttgatccactatgccttcttctggggacttgaatacactgagcttcatcccacctaaagttctctttcrttgcatcaggcaactctgtatttcctaacatgcccttcactttcatgcctctaagctcttactcttgctcttcccttcacttgtccatcttaggtgtggttctctccatc

SEQ ID NO: 235107 - DNA, 562 bp, Homo sapiens
tggatgagcgtggaggatattayactaagtgaaataagccagacacagaaatacaaatactgcatgatctcatatgtggaatatgacctcacatgtagaatatgctgtcacatgtggaatctaaaaacaaattcactgttgggccctgtgactcatgcctgtaatcccagcactttgggtggctgaggtgggagaatcacttgagaccagcctgggtaacatagtgagatcctatctctacaaaacaaatttaaaagatagccaggcatgatggcacccacctgtagtcccaactactgaggaggctgaggtgggaggatagcttgagtccaggaggtcgaggctgctgtgagtcatgatcatgtcactacattccagcctgggtgacaaagtgagactctgtctcaaaaaaaataaataaataaagtaaatacattgaaaatatttagagacagagaacaaaacagtgattactgaggcaggggtagagagtgaagacgaaatggggacatgtgggtcagaggatagaaagtggtagatatgtaggatgaacgagtctaga

SEQ ID NO: 235108 - DNA, 355 bp, Homo sapiens
atggatgagcgtggaggatattacactaagtgaaataagccagacacagaaatacaaatactgcatgatctcatatgtggaatatgacctcacatgtagaatatgctgtcacatgtggaatctaaaaacaaattcactgttgggccctgtgactcatgcctgtaatcccagcactttgggtggctgaggtgggagaatcacttgagaccagcctgggtaacatagtgagatcctatctctacaaarcaaatttaaaagatagccaggcatgatggcacccacctgtagtcccaactactgaggaggctgaggtgggaggatagcttgagtccaggaggtcgaggctgctgtgagt

SEQ ID NO: 235109 - DNA, 566 bp, Homo sapiens
aacatggatgagcgtggaggatattacactaagtgaaataagccagacacagaaatacaaatactgcatgatctcatatgtggaatatgacctcacatgtagaatatgctgtcacatgtggaatctaaaaacaaattcactgttgggccctgtgactcatgcctgtaatcccagcactttgggtggctgaggtgggagaatcacttgagaccagcctgggtaacatagtgagatcctatctctacaaaacaaatttaaaagatagccaggcatgatggcacccacctgtagtcccaactactgaggaggctgaggtgggaggatagcttgagtccaggaggtcgaggctgctgtgagtcatgatcatgtcactacattccagcctgggtgacaaagtgaractctgtctcaaaaaaaataaataaataaagtaaatacattgaaaatatttagagacagagaacaaaacagtgattactgaggcaggggtagagagtgaagacgaaatggggacatgtgggtcagaggatagaaagtggtagatatgtaggatgaacgagtctaga

SEQ ID NO: 235110 - DNA, 505 bp, Homo sapiens
ttgcttgagcattttagctgggcacattgttaccctgaacaaaactggggctctataagaaggaaaatgaggagagaacttacattgggaacataaatagcagtgtctgccatggtgggttgactatgtcatttaacagataataaactgaggctcaaagaggttaaatggtttgctcaatttatcatacaaccagcaaatagcagagccagggttaaaacccagatgtgagtgaatccaaagtttttactcktaactcccattcattactgtcatgtggcgcttcaaatgaatgatataaataacttgatggtaaatgcagggtgggagtagatcaatacgattttggtaggtagaaaatagggagtaaaatcatgcagagagaaagatttttcctactgttggaggcctttgggggacaggaaaaagtccaaattgattatcagagagttattgttagggaagaatgggaagaaagctcagaaagaagtgctgggacaccagg

SEQ ID NO: 235111 - DNA, 505 bp, Homo sapiens
ttgcttgagcattttagctgggcacattgttaccctgaacaaaactggggctctataagaaggaaaatgaggagagaacttacattgggaacataaatagcagtgtctgccatggtgggttgactatgtcatttaacagataataaactgaggctcaaagaggttaaatggtttgctcaatttatcatacaaccagcaaatagcagagccagggttaaaacccagatgtgagtgaatccaaagtttttactcgtaactcccattcattactgtcaygtggcgcttcaaatgaatgatataaataacttgatggtaaatgcagggtgggagtagatcaatacgattttggtaggtagaaaatagggagtaaaatcatgcagagagaaagatttttcctactgttggaggcctttgggggacaggaaaaagtccaaattgattatcagagagttattgttagggaagaatgggaagaaagctcagaaagaagtgctgggacaccagg

SEQ ID NO: 235112 - DNA, 477 bp, Homo sapiens
ttactttaaagctcatgataagaattgccaggttatttcccagaagtaatgagaacttccaycagcagagtatgagggttttatttctccatagtcaacaacaaagaacccaaattcttaattagaaccatgataaagaataagtaatctattttcttgtcttccctcaggcattatgaacattcattgttcttaagcaggcctttccctggtttgttagcatgctcaattatttcaagatcatcttctaagtgttcactaaaatggatgacatacatttcagagaagaattttttgtttgtggaacgaatgcatgaatgaggacaaggagaggcctggatcacaactttgtactggaatatcaggagttgtgtaaagcaaggaagcggagactctgcagaacaaagccccttcaagacaaggaagtgatttgtgacaattgaccatttttcacatactcttcattggggtctttta

SEQ ID NO: 235113 - DNA, 340 bp, Homo sapiens
tttatattgcatagtagctttaaattactttaaaagccatttttatttgcgcataatacaatcaagataagtggtaactgtgagcaactgttagtcaaatgtgaaaagttactgtaaaggtgacatgcactcctcttttcagctccccrtatgaagctgtggggcttcgttaggattaatccattgttgcatttgcccatttgtattttcttcactactctcaatgtgaatcaagtaaagacatcagtattaatctgcctgcttaacactgatgtgtgtcaacatgttcaaggtatgataaaatctggtagaaatcagagtggaggtaataagaaaagtg

SEQ ID NO: 235114 - DNA, 589 bp, Homo sapiens
gaaaagtggcctttaattcaaccagttcaactcctcactttccagatcaaaaaacaaaagccagtaaggtgaaagcacttgcctaaaatgcttactagaaggtattagggccagaactggaatccaggtttctggagtcccagatgaaaagactttctatggtgttattcaaaatatcaaagtctgttctaaagcctgtagtgggctctgcacccactagttgccccattcaatgggggtggggggaactaatttctttgamctctcagctaagagaaaacacagcagcttggccgtggccccgcttatacaggacaggaggttctgagatccagcttgccagtcaagaatgagtttatttatcctggttgttccaggaattcatgtgacaatttaacaagtaagtactcaataaatgttaaaataatttaatgaggcttttttctctcaactcttatctgaacatttttgtttaatttttagtgaaaaaaataagaaccaattcctttactatatggtcttgaggatgaatagaatgcagatcagaaagaaagggcctctaggccacatcacagccaacgtttaagtg

SEQ ID NO: 235115 - DNA, 620 bp, Homo sapiens
tgaccccttaactcttagctgggagaacccccagtcaattggctccgcagatctctctgcttatctgtgagagtacttagctccttgcaaatatctacatttcctgttccttattcactgttatatccataaagccttacacagtgcctggcccatgtttcctgagttgaaccttgccttctcagtgctgttaaacaagcacatcacctctaaagtcaaaatcccaagagtccttcargcctatttctgagtgggagagaggattatcagaatattagcctttggctggaggtggtggttcatgcctataatgccagcagaggcaggaggatcatttgagcccagccaaggcaacattagtgagaccccgtctcttaaaaaaaaaaaaaaaaaaaaaaaaaaaaagctcactcacatttcattccaaaagaaaaggagaaagccatccagattttaatctcataaagatatcagtggaacagaattagaagttatcaaatttgttatgagaaaataaaaatgtctgaatctccaaacactgatacatttagagttagtgaagcaaggctggtaaaagtgggtaagcaagtagaagaggcaggggaatgtgggaccattgt

SEQ ID NO: 235116 - DNA, 620 bp, Homo sapiens
tgaccccttaactcttagctgggagaacccccagtcaattggctccgcagatctctctgcttatctgtgagagtacttagctccttgcaaatatctacatttcctgttccttattcactgttatatccataaagccttacacagtgcctggcccatgtttcctgagttgaaccttgccttctcagtgctgttaaacaagcacatcacctctaaagtcaaaatcccaagagtccttcaggcctatttctgagtgggagagaggattatcagaatattagcctttggctggaggtggtggttcatgcctataatgccagcagaggcaggaggatcatttgagcccagccaaggcaacattagtgagacccygtctcttaaaaaaaaaaaaaaaaaaaaaaaaaaaaagctcactcacatttcattccaaaagaaaaggagaaagccatccagattttaatctcataaagatatcagtggaacagaattagaagttatcaaatttgttatgagaaaataaaaatgtctgaatctccaaacactgatacatttagagttagtgaagcaaggctggtaaaagtgggtaagcaagtagaagaggcaggggaatgtgggaccattgt

SEQ ID NO: 235117 - DNA, 594 bp, Homo sapiens
accccttaactcttagctgggagaacccccagtcaattggctccgcagatctctctgcttatctgtgagagtacttagctccttgcaaatatctacatttcctgttccttattcactgttatatccataaagccttacacagtgcctggcccatgtttcctgagttgaaccttgccttctcagtgctgttaaacaagcacatcacctctaaagtcaaaatcccaagagtccttcaggcctatttctgagtgggagagaggattatcagaatattagcctttggctggaggtggtggttcatgcctataatgccagcagaggcaggaggatcatttgagcccagccaaggcaacattagtgagaccccgtctcttaaaaaaaaaaaaaaaaaaaaaaaaaaaaagctcactcacatttcattccaaaaraaaaggagaaagccatccagattttaatctcataaagatatcagtggaacagaattagaagttatcaaatttgttatgagaaaataaaaatgtctgaatctccaaacactgatacatttagagttagtgaagcaaggctggtaaaagtgggtaagcaagtagaaga

SEQ ID NO: 235118 - DNA, 594 bp, Homo sapiens
accccttaactcttagctgggagaacccccagtcaattggctccgcagatctctctgcttatctgtgagagtacttagctccttgcaaatatctacatttcctgttccttattcactgttatatccataaagccttacacagtgcctggcccatgtttcctgagttgaaccttgccttctcagtgctgttaaacaagcacatcacctctaaagtcaaaatcccaagagtccttcaggcctatttctgagtgggagagaggattatcagaatattagcctttggctggaggtggtggttcatgcctataatgccagcagaggcaggaggatcatttgagcccagccaaggcaacattagtgagaccccgtctcttaaaaaaaaaaaaaaaaaaaaaaaaaaaaagctcactcacatttcattccaaaagaaaaggaraaagccatccagattttaatctcataaagatatcagtggaacagaattagaagttatcaaatttgttatgagaaaataaaaatgtctgaatctccaaacactgatacatttagagttagtgaagcaaggctggtaaaagtgggtaagcaagtagaaga

SEQ ID NO: 235119 - DNA, 620 bp, Homo sapiens
tgaccccttaactcttagctgggagaacccccagtcaattggctccgcagatctctctgcttatctgtgagagtacttagctccttgcaaatatctacatttcctgttccttattcactgttatatccataaagccttacacagtgcctggcccatgtttcctgagttgaaccttgccttctcagtgctgttaaacaagcacatcacctctaaagtcaaaatcccaagagtccttcaggcctatttctgagtgggagagaggattatcagaatattagcctttggctggaggtggtggttcatgcctataatgccagcagaggcaggaggatcatttgagcccagccaaggcaacattagtgagaccccgtctcttaaaaaaaaaaaaaaaaaaaaaaaaaaaaagctcactcacatttcattccaaaagaaaaggagaaagccatccarattttaatctcataaagatatcagtggaacagaattagaagttatcaaatttgttatgagaaaataaaaatgtctgaatctccaaacactgatacatttagagttagtgaagcaaggctggtaaaagtgggtaagcaagtagaagaggcaggggaatgtgggaccattgt

SEQ ID NO: 235120 - DNA, 620 bp, Homo sapiens
tgaccccttaactcttagctgggagaacccccagtcaattggctccgcagatctctctgcttatctgtgagagtacttagctccttgcaaatatctacatttcctgttccttattcactgttatatccataaagccttacacagtgcctggcccatgtttcctgagttgaaccttgccttctcagtgctgttaaacaagcacatcacctctaaagtcaaaatcccaagagtccttcaggcctatttctgagtgggagagaggattatcagaatattagcctttggctggaggtggtggttcatgcctataatgccagcagaggcaggaggatcatttgagcccagccaaggcaacattagtgagaccccgtctcttaaaaaaaaaaaaaaaaaaaaaaaaaaaaagctcactcacatttcattccaaaagaaaaggagaaagccatccagattttaatctcataaagatatcagtggaacagaattagaagttatcaaatttgttatgaraaaataaaaatgtctgaatctccaaacactgatacatttagagttagtgaagcaaggctggtaaaagtgggtaagcaagtagaagaggcaggggaatgtgggaccattgt

SEQ ID NO: 235121 - DNA, 597 bp, Homo sapiens
cttagctgggagaacccccagtcaattggctccgcagatctctctgcttatctgtgagagtacttagctccttgcaaatatctacatttcctgttccttattcactgttatatccataaagccttacacagtgcctggcccatgtttcctgagttgaaccttgccttctcagtgctgttaaacaagcacatcacctctaaagtcaaaatcccaagagtccttcaggcctatttctgagtgggagagaggattatcagaatattagcctttggctggaggtggtggttcatgcctataatgccagcagaggcaggaggatcatttgagcccagccaaggcaacattagtgagaccccgtctcttaaaaaaaaaaaaaaaaaaaaaaaaaaaaagctcactcacatttcattccaaaagaaaaggagaaagccatccagattttaatctcataaagatatcagtggaacagaattagaagttatcaaatttgttatgagaaaataaaaatgtctgaatctccaaacamtgatacatttagagttagtgaagcaaggctggtaaaagtgggtaagcaagtagaagaggcaggggaatgtg

SEQ ID NO: 235122 - DNA, 460 bp, Homo sapiens
ctaattgatgatcaaaatgtcacattttaagccaacagaagagccttcatattggatcttgtgtccttctgacacagtcccattagtctttgataggttccttgctttctgacccaagattgccagaaccacttcaatatgtaaaatgaaaatttaaattttagttttgatcacatttttgtaatatacatattatatatttatatgagaaatgctgtttttgacatatgcataaacccgtatgtatataggaaaaaagtacattcctaaawgtaaatgttaagtaagtaaataatataattatataggttgtgagattggggcatcattttttctttttgcttgtcaatgtttcctaatcctcaaataaaaatgaattacctaaaacagcttttttaaatggcctctgctaaaacattatttatctcagctttttatttacaatattgcttttagggaa

SEQ ID NO: 235123 - DNA, 471 bp, Homo sapiens
taacaaaactaagactcagattaagatgcttcttcatggttactgtaggattttaggcacctcactctttccaaattgctctaattgacaattcaaacaaaattctaccctcttgtgcctcatccattcatacatcctttctgtccacaacagtgtactttatacatgtatatacacccacctacatacatatagagaagcatatataatgaatatgtacgtattcaacacagaaaagtcacaaaactttttttttttttccttagagacagggtcttgctatgtagctcaggctgaactgaaactcctgggctcaagtkgtcctcccacctcagcctccccaagtaacagggctaccatacctggttctgagaaaagttgtaacttcttatactcttgataccatgtataggaattttactatattcattttttccctgataggttcctgtcacccaaaatgcaatgtat

SEQ ID NO: 235124 - DNA, 471 bp, Homo sapiens
taacaaaactaagactcagattaagatgcttcttcatggttactgtaggattttaggcacctcactctttccaaattgctctaattgacaattcaaacaaaattctaccctcttgtgcctcatccattcatacatcctttctgtccacaacagtgtactttatacatgtatatacacccacctacatacatatagagaagcatatataatgaatatgtacgtattcaacacagaaaagtcacaaaactttttttttttttccttagagacagggtcttgctatgtagctcaggctgaactgaaactcctgggctcaagttgtcctcccacctcagcctccccaagtaacagggctaccatrcctggttctgagaaaagttgtaacttcttatactcttgataccatgtataggaattttactatattcattttttccctgataggttcctgtcacccaaaatgcaatgtat

SEQ ID NO: 235125 - DNA, 572 bp, Homo sapiens
ttcgttttttttgcttaggattgttttggctctttgggattttttktgtgtgtgtggttctgcacacattttaggttttatttttctatgtctgtgaagaatgtcattggtattttgatagggattgcattgaatctgcagattgctttgattggtatggtctttttaacaatatttttaattcttctgatacgtgattataggatgtcttccatttgtttataccctcttcaatttctttcacccatgttttgtagttttccttgtagacgtctttcacctccttggttaaatttattcctaagaattttatttcatttgtagctactgtaaataggattaatttcttggtttctttttcagatttttcactcttggcatatagaaatgttactaatttttgtatgttgattttgtatctggcaactttactgaatttgtttattagttcaaaatttgcatggtagaatctttaggtttttctatatataagatcacatcatctgcaaatagggacaatttgacttcctcttttccaaactggatgccctttatttctttctcttgcctaa

SEQ ID NO: 235126 - DNA, 451 bp, Homo sapiens
agatctggttgttataaagagcatagaacttcctctctctctgtctctctctctctctctctctctctctctctctctctstctctgtctctgtctctgtctctgtctctcatgctggccatgtaagacatgcctgcttcctcttcaccttccactatgattgtaagtttcctgaggcctccccagaagtagaagcctatgtagcccacataactcagagctgattaaacctcttttctctgtaaattacccagtctcaggtagttctttatagtaatgtgagaacagactaatacacatgactaaaacattttaaaatatttcatctccaaaatgtttccaaaaaggccttgctaattaaggaactgacctttggatcatggggaacctcattcattcaaagttaactgagatgctcccttgcacgtggagttggtttatcaatatagat

SEQ ID NO: 235127 - DNA, 442 bp, Homo sapiens
actatgaaagactgaaagcttttcctccaaggtcaagaagacaacaatgtacactttttccacttctagtcaacagagcattggaagtactagtaggaaaaaacaggctaaaaagggaaataaaaggcatttaaatttgaaaggaagaagtgtaattatctctgtttgcagatatgtaatcttatatgtagaaaacactaaagattccacaagagaaaactgttagaattagtaaccaaattcaggaaggtagtaggatataaaatgaacataaaaatcaattgcatttctatacacytacaataaacaatcctaaaagaaaattaaggaaacaattccatttacaatagcatcaaaaacaacataaaacttagtaattaacttaaccagggcgatgaaagacttgtaaaatgaaaaatacaaaactgctgaaagtggcaga

SEQ ID NO: 235128 - DNA, 612 bp, Homo sapiens
gatttgcccagactcagagaatatacacttaagatatttcaaattctttgtatataaattttatctttccaaaaataatactatgaacaaatatcaaaatcgaatgaatgatatgtttgttgaaggttttaggattgagctatattaayacctgctgctttctttgaaatgcattttaaaaataagagagactgatgggtgattagaagaatggatagataaacagatacataataaagcaaatatagcagaatattaatttgtaggatctaaatggtgaatgtgtgggcatttgcagtaaaattctttcaacttttctatttgaaaatgttcatagaaaattgtcagacaaaataataataaaccctgttgcatattacagtctggatttttctgcctttctgtctttaagaaatgcataaagtctgcaatggtgaaaaataatacgttattgtttgttttcattctttcacagaatatgcttattatgctaaatagacatgcagcttgcatcaccaagatgaagaaaaaagataaaatttatgaaaggatgagaacaaaatacccatacaatatgtctgttgtaggcaggaggaagtataaggatttaca

SEQ ID NO: 235129 - DNA, 469 bp, Homo sapiens
agctaccatttctttttgaggataataccttgaaacactccttgtcagctaccagctagacagtccccagattacactttcagctacctacttttattgtgatttttggtcgtttgtagttattattttctgaataactctgttcactactatttctggcacttatttttaaccagatattagaactttcttaactaaagatcctayaaccagaagtcagaacacagactgctatatatcatggactcaattcagatgaataatttgacatttcccaaaaaaatttcaattacggtcattttcttaccacccagtttacttaatacctgaattattattcctttttatttttattttatgttcttttatgttcaaataattgatcttcatatatagatgctgataggaaatttatagttaataaatatacagttgtatgatacactatttttttagaattttttccata

SEQ ID NO: 235130 - DNA, 469 bp, Homo sapiens
agctaccatttctttttgaggataataccttgaaacactccttgtcagctaccagctagacagtccccagattacactttcagctacctacttttattgtgatttttggtcgtttgtagttattattttctgaataactctgttcactactatttctggcacttatttttaaccagatattagaactttcttaactaaagatcctacaaccagaagtcagaacacagactgctatatatcatggactcaattcagatgaataatttgacatttcccaaaaaaatttcaattacggtcattttcttaccacccagtttacttaatacctgaattattattcctttttatttttattttatgttyttttatgttcaaataattgatcttcatatatagatgctgataggaaatttatagttaataaatatacagttgtatgatacactatttttttagaattttttccata

SEQ ID NO: 235131 - DNA, 622 bp, Homo sapiens
aggtaacaataggccagttgcattaaatgagtttatacgtattcattacatttctgtttgctttttatactcttctattgttgtctaacattctgtttatgttacacattattacattattgcatgttttccaaacttgaaacagatctttctcgtttctcttagaatctcacaagatgttcttgtagtttactaatgccagtttaaaatatcattaaccacggtaactcaacattatctgcatataggaagatttctttctgttatctttctccaaataaaattattgtaacttgttaaatatgaatggttttgaaatatctaaaacatccagagaaagtctatttgctaattatccagagcaaatagtatgtttaattaaatactagtagcctgcaagaaagtcacataatgaatagtaaaatacaaaatcacttgtactgatgacaattgtggtgtcactaytcatatgtgattgtcagattagtatctcagcccttcttaaaatgaagcaattttcaaaaaaggaagagggtttttgatgcatgcttttattagattaaacatatattgaatttccaatgattcaatctcttgttttaatgtgcttcaaatgtcaaat

SEQ ID NO: 235132 - DNA, 432 bp, Homo sapiens
gaattcagctctccaaggaatttttgtgaatgcataactcacgcagtgaaattaacagtcaatgatatatttaataactaagtgcaaagtgatttcaatagtctgtgtttactcttcccatttttgccttctgtaaaagtaatacatttatgcatatttgaaaataaaactgaagcaatgcaaatccaatttcagaacattaaattttgtcctaacagtaccttataaagatacattgtcattaccaggttgttcacacttcccaccatatgtastatgtcaaaagtgttttcatgtattaacttattagtcctccaactgtatctgtaatccttaatatttaaagtcctgacattacttaaaaagatttttattttaatttggggagcatggaaatagaagttctggcatatattacagaagtcccatcct

SEQ ID NO: 235133 - DNA, 479 bp, Homo sapiens
gctgcacacaataccatgacagtggataaggcattccatgtgtccacgatggtagtctcggcagaagcatcacatgcaggataggcaracccatatctggagtgtctattccagtgagaacaaaccactgtcctttccatgatggaggaagtccaatataatcaacctgccaccaaatagctggctgatcactctgaggaatggtgcaatatttagggctcagtattggtctctgctgctggcaaactgggcattcagcagtgaccatagccaggtaggacttagtgagtggaagtccatgttgctgagtccatgcataacgtctgtccctgcctccatgcccactttgttcatggggccactgggtgatgacagggatggctggagaaagaggctgtgtggtgttcacagaacaagtcatcttatccacttgattattaaaattctcctctgctgaggtcaccttttggtgagcactc

SEQ ID NO: 235134 - DNA, 543 bp, Homo sapiens
accagtgtgtgagtaattgtggaatctcctttgattcagattgacaaatgcgtgtgtagatttcacctcatggtacgactaagtttttcttattttaagaaacagtgctgggaaagctggattcacatccaaaaaaatgaagtttgacctcctacccccacacatgtacaaaaattaattccaaataaaataagtcaaatagctaaatagaaataartaactctcacaaaacataatgtggaagtttgcacctctgaacgtgtctgtgcctcattcatgcacgcgagaaccatggcttcgacaacttgggaaactctcctctaactctgctggggcacattttgtggtgggactctccactctgacctgctttactctgaattttcggcaacatccgtagcctaactcttcatgaagcttagaagacaaaagagatctgtagtattgaaggaaaaataagatacatgaatctttgccaatagataattttaacattgaaaagagcatactacagtttaggatcctatttttaattaatcaacg

SEQ ID NO: 235135 - DNA, 618 bp, Homo sapiens
gttttcttcccgctttctcattcttaaagttccaatttgaacgttaaaatccttcaatacttcattaagytttgactctcttcaaaaagaagttgggcttaaaaagccttactgtgtaagaggcccatgctaaatgctttacacattctttaagcaagaaactcagcatcatatcccaagcattgcactcttcacttcccaatcctgcaccccccacccccatcattaggccaaagtcccctcccttatgacggagtcagcaatattgggaacaagagcttgccaaagagagtttaaatttctctacttatatgagacagttttcattgtcttatccacattcatttcttaatattatccccaactttagcctaatctctgacaggattatcaaataaatttaatgaagtacatagtggcaagctgaggggaagagagggataaagaatacatgtccaaggacaatgaactgccctcagagtgacaccaaaagtcaactcagaaagcctacatagaggaggttcacattttgaaaaactcacttcactgacttgataattttgctatgatttatctctgaatttcctatgtttctctgacacattgacatgacctaaa

SEQ ID NO: 235136 - DNA, 566 bp, Homo sapiens
atgccaaataaaggaaaagcacatgctcataaatgccattctttttaagtttcaaatcttctttctgattctccttttacatctcttgttctggggctggttttgagacaagaattcatggaggaaaaaaaaaactgagaaatgaaaatccaaaggtttctaaacttaaataagtagtattttctaatccagaaaataaaagacttgaatcacatctcctatgtgcatctctgtgagtttcaaccttctttctctatttttgcacctacatctctacctcttttacattgtcagggctataagaaaagcagttacattgtcacatttttggtcygacagctagaaaatgttcttattatgtgtattacaaaatttttccttaaagtacaccaagttgaatttgagctttgcatatttaaagagcagaaggaggcttcagcaacaacattgtggatttcttggttactatcccaacagagcagtggactagcctgggaaacgatggtgtgtgtgcatggatgagtttggatgaagtgaaactaagtggtgttttctgcccaaaaaga

SEQ ID NO: 235137 - DNA, 593 bp, Homo sapiens
gataggctagactcctaatatattcttagtgaccttagctatagactaagtgcaaaaggaattcaaccctaattgagtaaggatttctttagagccatcaattatcccagctatttaatctgtctcttcatagagaatttgtcttatcatgtgtaactagagaaatttggactacaatccaaatttctacaatcctttctataaagtagtccagaaaggttcctgtctataaattgggattccagaaatacagttctgacacggattcaacaatgtcttagcccaaacacgagcacacattttatactgtctccttcccatttgttcatatttctttgatgattcttctgaggctattgctgcaaaagccaaygtgtggtatggtaagatgtaaggaaaattacgaacaggtgaagtttgcatattcttcttttcttttgcttcccatgtctgccctcattttgaactgttttgatatctatgtcataagagatcgctaggacctgacaccctttacaccatcatgtaataaattttccttcttgaaacagtcttagcccagatcacctagaagacagcctcaggtaaagctt

SEQ ID NO: 235138 - DNA, 593 bp, Homo sapiens
gataggctagactcctaatatattcttagtgaccttagctatagactaagtgcaaaaggaattcaaccctaattgagtaaggatttctttagagccatcaattatcccagctatttaatctgtctcttcatagagaatttgtcttatcatgtgtaactagagaaatttggactacaatccaaatttctacaatcctttctataaagtagtccagaaaggttcctgtctataaattgggattccagaaatacagttctgacacggattcaacaatgtcttagcccaaacacgagcacacattttatactgtctccttcccatttgttcatatttctttgatgattcttctgaggctattgctgcaaaagccaatrtgtggtatggtaagatgtaaggaaaattacgaacaggtgaagtttgcatattcttcttttcttttgcttcccatgtctgccctcattttgaactgttttgatatctatgtcataagagatcgctaggacctgacaccctttacaccatcatgtaataaattttccttcttgaaacagtcttagcccagatcacctagaagacagcctcaggtaaagctt

SEQ ID NO: 235139 - DNA, 238 bp, Homo sapiens
attccaggatctcaaccccaagagtcagaatcctttttattgaaagtcagctgttttgcttctttctcaattttctacatttaacaaatggctttytttatccaaggtgaaactgagttaagctagagatcattttggatctggtctctcttttggttatcgaagaggcagaaatgtctcattaatctgccttgccacatgcagagtaaaaccgttacttaatagcaacaatacacag

SEQ ID NO: 235140 - DNA, 541 bp, Homo sapiens
tctgggcagtcccgctgacggggaatacctgtsgtagtacccattgcctgcgagtccctgatggcggccattacacttccatccgggtattgccgaaaagctgatcgcagcgctaccgggagcgcacgctgcggcggagggatctgcgctttacctgagacaagcggaagagaacggaggccggcagggtccgcgctcggtctgacgagactaggccatggagctgggttcgccgctgacctctccatctagcgcgcggccccggcgcccaccagtccagtgacccactactacctctttgctcaccagcagctgctgatcttactgccggtgaaatggcagacaaacgtctactctgtgctcttcagagtagacaccaggagcaggaactgtatgcacttcccaagcccttgctgactgggaatggtctccaccctgagattttaaccagttccggtttagcaaatggcgcctccccacctctggcttctggcacgcaggttttagcaaccattgtagcccacgtcaacgaaagaagctg

SEQ ID NO: 235141 - DNA, 569 bp, Homo sapiens
ttaaagtctgacacaataattcaaacagttgctagataaacaggaaagggagttaagaggactgggcctatacaattattgacacagaaagattaatttaaaaaataataataaaaatcactaataaaactcatggggtacagataaataaaatttcttcccctccaaaaaacaaaaccaaaccaaaaagaattaagaagaaaagtttttaggagaggattctgggaagatggcaacataggaagcagcaggaatctatcaacaagtggtactggcaggatatgtctgatgtaactattttggaactctgacatctrtagaaggcttgcaaggtaaattgcagtttctgtcaatttcagctcttagcttcgcaatagctaccatcccccaccctgtagcctccagccaggcagctgtgcacttcttcctggagtcccttgcttgcagtttgctgggcttgggtggcaataaggagcaagtactcatcctccaaatactggggatctgtgttctgactgctgattgctacttctgatcctaggagtgtccgcacagaggtggacagccat

SEQ ID NO: 235142 - DNA, 591 bp, Homo sapiens
gcagcaatagtaatcaattattttattctaccctcccaaaagattattaatccagtgttctttagctttttaaaatataaattgggaaagtgttattaataagcttttttaaaaggcatattcttctataacaagaatggcatataaaccaatcaataaaagtatttgacaagacattaagttaccacaggcactggctgttgtttcaagttgggatctctatcccaatatcttacattcatagcattattgaggtagttaaaatactgaaaattggactccaggttgctgggttctgaatgtgaatgtgaaagatatattctcttttgagcctactttcccccaaataattcaagttttcttgaggtaagaactaccaaaatccaattagcagccttctttaaaaaggaaaagtgatgatactttcagaaaacaattttcatgcttaaaaactgccatgagtgmgtgttcttacctgagtggtttttcattttatctaccagactaataaatccacatcatgccctatgtactctaaatataaaagttattttctttttaaggaaaggatatttctctaagcattgatac

SEQ ID NO: 235143 - DNA, 518 bp, Homo sapiens
aatttaacaagttttgccaatagcaaatacttaaagttgaaagcactaaagtggtmtgtatgacatagttatccagcttattgcctgaaaaaagaagagggaaccagtgttcctagtatgaagtgaaattcttcagaaggagaatgacctaggaatttagttcagtgtctctggatgaatcattacagctttcaagcaccctgccatttgtgaagcaacagcaatactggcagaatacttcaaaggaatactgtagaaattaatgagtttatttatattatgcttaaagttcctttgaagaaattaatacatcataattcaaggagcaagaatgtttcatattatctccttgaaatcttcaacattgggaaaaaaaattgcatatgaccaatttcactgctcaaaaaccaaggtagcgaggttggccaatccatttaaggtcagataagttaaatcaaaccaaaaatggaagccaaaaggaaaatttatgtttgaattcccaaatttgcacttctaga

SEQ ID NO: 235144 - DNA, 518 bp, Homo sapiens
aatttaacaagttttgccaatagcaaatacttaaagttgaaagcactaaagtggtctgtatgacatagttatccagcttattgcctgaaaaaagaagagggaaccagtgttcctagtatgaagtgaaattcttcagaaggagaatgacctaggaatttagttcagtgtctctggatgaatcattacagctttcaagcaccctgccatttgtgaagcaacagcaatactggcagaatacttcaaaggaatactgtagaaattaatgagtttatttatattatgcttaaagttcctttgaagaaattaatacatcataattcaaggagcaagaatgtttcatattatctccttgaaatcttcaacattgggaaaaaaaattgcatatgaccaatttcactgctcaaaaaccaaggtagygaggttggccaatccatttaaggtcagataagttaaatcaaaccaaaaatggaagccaaaaggaaaatttatgtttgaattcccaaatttgcacttctaga

SEQ ID NO: 235145 - DNA, 633 bp, Homo sapiens
ttctgggatcatgtacctaattttgatcctgggaaaaaagattattctgtgtaatattcaatagtagccctacttatctatgtgaaaactgtatggggcagcgttaaacttacatggctgggcacccagtgtctcaatgttctttgcagacttcatgaatagtgtattttgttcygtcataagaatgaggtaagatggtgcagccaagatagtatgtccatgttcaagataggaagagctaagaaacatctgtcactgttatcagaaaagaaaatcttcccagaagcctccagcagatttcctcttatgattcatccaccagaactgggtcacataaccatccacatctgcaagaaggccaatgagggtcttgcaaaatgaaacaagatggttatgactgacacatatgaatcatgactcatagactgaggctggcaattgttatcccaagcgaaactgaggtttcaataacaagaaagaaagaataaatacatactgggtaggcaatatgtatgctgtgtctaccatggcttctcatgatgatatctgcagggagcctcgggatgactctggcacagacagggcaatgtgagtaataaagtggagaatggaaaaagcattccactagatggg

SEQ ID NO: 235146 - DNA, 572 bp, Homo sapiens
gactgtggtatttgtgggggtcctgagataaatctaatgataccaagggaccactgtaatttgcatgtagaagatattgaagcttgcctggagtcctcttgcccagaacaaataacagggaattgatctactactagaggtttttcttagttttttagttgcagagtggtttccttttggacatctctttgcaaaacctgtaatttatacatcataaaacatataactggttccaagttaatgccatgcaacatggtcctagtaataattcttcaacacatttgaagtttcttggtttataagtaaatgcatttttaaaaatttttaatttttgtgggcacatagtacatatatagatatacatatatatatatatatatacatatatatatatatatatayatatatatatatatatatatatatggtacatgaaaagatattttgatatgggcatgcaatgatgcaatgcatagtagtcacataatggaaaatgggctattcatccccccaagcatttatcctttgtgttataaacaattcaattatacacttttagttatttttaaatg

SEQ ID NO: 235147 - DNA, 533 bp, Homo sapiens
acacaatcacctggaggagctttagtgataaaagattgcyccggccccatgccctagggaatctgatagactatctatatttaaagttccccaggtgattctagtgtgtagccagggtgactctagaggagataactcaagattttttttccccatatacttacatttctatcatcaaacaaacaatctacactttttaagggacaaaacgggtcaaactgcttataacattggccagttgatggattccaaagcaaatattcattagtttcttgagttactacataagccacatgcccctgtatgagaaaaaagaaagtaatttttggtggatttaaataatttctatatatggaaattatactgtgatgattctaatttttaaagccttttttagtggagtgtggtggcttatacctgtaatcccggctctttgggaggctgaggtgggaggatcacttgagcccaggagtttgagaccagcctgggcaacataaggaaaccctgtatctatcacaaaaaatttttttttt

SEQ ID NO: 235148 - DNA, 533 bp, Homo sapiens
acacaatcacctggaggagctttagtgataaaagattgccccggccccatgccctagggaatctgatagactatctatatttaaagttccccaggtgattctagtgtgtagccagggtgactctagaggagataactcaagattttttttccccatatacttacatttctatcatcaaacaaacaatctacactttttaagggacaaaacgggtcaaactgcttataacattggccagttgatggattccaaagcaaatattcattagtttcttgagttactacataagccacatgcccctgtatgagaaaaaagaaagtaatttttggtggatttaaataatttctatatatggaaattatactgtgatgattctaatttttaaagccttttttagtggagtgtrgtggcttatacctgtaatcccggctctttgggaggctgaggtgggaggatcacttgagcccaggagtttgagaccagcctgggcaacataaggaaaccctgtatctatcacaaaaaatttttttttt

SEQ ID NO: 235149 - DNA, 627 bp, Homo sapiens
acctggaagcaactcggatatccactgcaggtcaacagaatagcaaattgtggtacattcaaacaatagaatactatccggcaataccaagaacaaactgttgacatatacaacaacatggatgaattttaaaatagttacgctgagtgaaagaaggcatatgagtaaaaatacatactatatgatttcatttctataactttaaaaaatgccaactaacctgtagtgatagagaacagatcagcgattgcctggagggaaggcatatggggagactcaggaaggaaggattacagaagaacatgagaaaactttgaagtratggatgtgttcactatcttgagtatatagtgatattctcattggtatatacatgtgtcaaaagtttattgcgtgtcaattatgcttcaacaaagctgccaagaacaaaacaaaaacaggctcctactgtaattatttgatctctgattcctttaatagactctaagtaatgtgatgagagtgaacaggacatccttattcagtgatgtatccccagtaaatggtccaaagtggatattcagtaaatatttgtcaaatgaataagaagtggttaaaataaattaccgttgagctatataatatttt

SEQ ID NO: 235150 - DNA, 597 bp, Homo sapiens
taattaaatatccacagctcttagaggtcctttttactcttgataactaaataaaatggattgatttctcattctgtgtactgtggtatagtccacactctaggagaatctgtggatttaaagtgagggtggggctcattgttctcatcatttttctttaggtatttctgtacttaatgatttttcagtacattcccattattcctgatcctgtgcctgttttcctcttcttgacccatggctacttaaaacttggccattattcctactcttcaaccaccaaagcactacttctttcttacaagcccagtacatgtagtgaacttacattgaaaagttaaagacaccatagggtgactagaccagagcatagaatagtaaacaacatgaaagtcaayatcaggtaacactgtaaacatttcttggccagaactaccatagaattatggtttaagagttgtacttttcacgaacctccagtcattaggtaatagatatattctctgaagtcatatcccttcttcacatttgataagccatgtcccttcttcagagaaatgaatcaaaatgatgttactttattatacatgagaattc

SEQ ID NO: 235151 - DNA, 432 bp, Homo sapiens
attgtgatcagggatcctaggtccctccctctatgcattttgcctttaatgttctccattttttccatggacgacagggacattgggggagaaaaagatattttttataattttcatcaaaaaatggcatycggagtcaaaggtactgaatcagaattgaaagaacgaaattgtttcccagtgtcctttctactgtttgcaaaggacagtttcacaaaccctgggacttggtgagcattttttctgcaaatacacactgccctctgttggtaaaatgatgcacttccacgctgctaaaagcgcagcaaagatcacctaaagatcagctgcagctcttaaataaaattactggaaaatggtaaattttctgtcttaaactttcaggggcccattttatcctagtcagcacaaaagaaaagaaattaataacaa

SEQ ID NO: 235152 - DNA, 596 bp, Homo sapiens
cttttggcatccctagtgtatattaatcagcaacttcagaacacccataaacatggtaatatttaggcaagctacaaaacagcgaaacaaacttccttttaggctagaaactttgttagttggttgctttacaattttccatgaaatatgttttaaaaatcatgtacaatatgtattccttacttcagtacatactagtacagaaaaattgactttcctgaggactagtgaataagcatagtgcaacaagcatagattatgcttttgtcttataacatgactcttgaaagcatgcctaacaaactccttgttaatattgtttactcttagaaataatgtattctacttcttccttcttaatagttctagacatgtatataactttttccctagtcactatgtcacttaacgttcccaagtgccaaattttgagtaagayagctgcatacttcaacttctaactaggaaacaaggagggagacatattcaatatgtcaagtggaaataccgttgtcctcattttttaataattgctatccctctgatttagatgcctgtgttctcattccaggcagtgagatgtgttgctctagtgc

SEQ ID NO: 235153 - DNA, 585 bp, Homo sapiens
cccacaatctttgggtctgtggctctggcccttctcataccacctgttctgcatacaggtgcatgaatgtagagagctgtgcttctccaaggttggtctccagaccagcagcatgagagcagcagcatcagcatcactcaggacattgttagaaatgcaaattttaggccaccatcttatagcttccagatcacaaactgaggggtggaagcatgggtagggataggaggctggaacctggaaatgtgttttaataaactgtgcagtaattctgacacatgctaaaggttgagacccactgacttagtagratgagcaagggttttacagccagcaaatgtgggtttaaatctcaactctcctacttgccaacatgtgacatgtaaattactagaccgtcttgggtttccaacctctcaccactaaaaggaagaccgagtgtggtgtagcaggtgaagccactctccttccttcccatttcctttacaggactgtgtgagaaataaatgacatgacgattttggactctgctgtgtttagctgtgtgtctcctttggcaagtctccttgcctctctgcctcattt

SEQ ID NO: 235154 - DNA, 536 bp, Homo sapiens
ccatttttgcaaacattttttcataacatacaaaaataaacatctactttaagtcatttctaataccattatcaagagctaattattgttaatatgttggtctatgcacaaataggggcagatatgcacgtacagaggcatagttttgtctgtacacatacagaggcagattgcttttaagaatataattttcatttagaatcaaacttatgttctattagtgtattttcccaggtattaaattttccttgaaaacatgtttaccctatgatgcaaaggaaatcaacataaattactatgttccaggcattgtgctaagcactttcactcagttatcttaactaaaaaacaagtttcttgttaatttgcagggttaatttgcatcaaaacmaggaattcatttgttgctacaaagaaaaagcaatgaaaggactttgtgaaaaggttcagagaaaatgataatggttaagacatatcagcaatacccatttttctcttgaaacctgacttgtgaactataacagaaaatacagaag

SEQ ID NO: 235155 - DNA, 420 bp, Homo sapiens
tgtgttgagtcatatcaatgggtcacatttgtcagttcattgggttggcagtgcctggccactagagacggtgccagagtcagcccccagtttaagagaactagacaaccacttgggctggcctcaggatctgtcaccagagggaagctacagaaccattgccaacaagggcaatcccagacaagcccccaaatttgtaactgcccaacaggttcaccttgcccacygcctagacagaaccaatgtatcaagagaagggaattgaaatagagaaagagtaattcatgcagagccagctgtgcagaagaccagagttttattattactcaaataagtctctaagagcattcagggatcagagtttttaagaaaaatttggtgggcgggtgggggggggcctttgatggggagtgctgattg

SEQ ID NO: 235156 - DNA, 420 bp, Homo sapiens
tgtgttgagtcatatcaatgggtcacatttgtcagttcattgggttggcagtgcctggccactagagacggtgccagagtcagcccccagtttaagagaactagacaaccacttgggctggcctcaggatctgtcaccagagggaagctacagaaccattgccaacaagggcaatcccagacaagcccccaaatttgtaactgcccaacaggttcaccttgcccactgcctagacagaaccaatgtatcaagagaagggaattgaaatagagaaagagtaattcatgcagagccagctgtgcagaagaccagagttttattattactcaaataagtctctaagagcattcagggatcagagtttttaagaaaaatttggtgggcgkgtgggggggggcctttgatggggagtgctgattg

SEQ ID NO: 235157 - DNA, 593 bp, Homo sapiens
gtaggatgttaagagaccttagagaccatctattcttagagacccccaataaattcacaagagctagataattagatcctgtctgtaatgtgttggctttcactacctctcacttccataaatagatatagccatctttgacgattctgatgtattagttagggtaatagtggccgcygtaacaaagacatctaaagtgtatatggctcatatatactcatataagttatttctcattcaagttcagacttggttttcccaattggttgctggctttcctccacgtgatgatttaggggcataagttatttgtgtcttcaacacatgacttccaaggacatcaagcttgcctacatcaaactattaggaaagaaatgaggaagtggtgaagccatgtctgttttttcatgccattgaagtgacacacatctcttctgttcacacttttttgggtgagaactaatcacgtggcaccatctaaatgtagggggtgctgggaaatataatagctatttggcttggcagctatttcccagtggccacctctattctaattctattaaaggagaagcatgagttttgatggtcagtta

SEQ ID NO: 235158 - DNA, 490 bp, Homo sapiens
acctatccgtacctggaattattctatacatctattttttatgtgtttatggtttgtctccttccaacagaatgcaagctccttgaaggtaagggttctgtcaatgtttcctgtactgtatacctggtgcctaaattgctatgataaacattcaatacatttactctctgaccaaagtgtgaatgatgttgaagactagaatgaatctgactgcaggacatcatctagtaggcttttggggaaaaaattcttatcaagkttttgtgtgtctaagttgccttttcctttcaaaagtggagtgcaaccaagcattccagttaattgtccttgttagttgagttttcgtaagtcgaattttacttgatccttacggtcaagtttttaggcttctgcatgaaggaggactgtaaataattaacctacacaggcttgccaggtgaactcaagtaaagtctaattgaagagatgggcctcattcctttaactggaa

SEQ ID NO: 235159 - DNA, 669 bp, Homo sapiens
taaaaatgtctgcagggcaattagaaaagaattttattttatttattcctatctcttagtggaaggactagagggctggccctaggctgtcttatgttattacaatttggtccctgtagtattagtatagagtgagcacgggaagaaatgagttcatattatgtttgtaaatgttgcatgtgatcttgtttcatcctctgaagttcataaggcatgctatcagagatccccaatgtgtgtgtgtgtgtgtgtgtgtgtgtgtatgtgagttactgttttttgttttgttttgttttgtttttgtttttgagacagagtctcactctattgccaggctgtagtgttgtggcaagatctcagctcactgcaacctctgaatccctggttcaagcgattctcctgcctcagcctcccgagtagctggaattacaggcatgcaccaccacactcagctaatttttgtatttttagtagagacagggttttaccgtgttgaccaggctggtctcaatctcctgagctygtgatctgcctgcctcggcctcccaaagtgctgggactacaggtgtgagccactacacctggccaggagttagtttttaaaattgcctttatgacttgacatcactgaagaatgaaggggaagtgacatgactgtggcagtcaagt

SEQ ID NO: 235160 - DNA, 549 bp, Homo sapiens
ggtcacatgttaacaacaataccccatgtcatgatggcatactatgatggtgcatgcataatacttgtcaggcctatacacgtttcaaagcaggattttctttttaaaaaatgaggtcaggtctctctatgttgcccagactggacttgaactcctgggctctagctatcttccagcttcagcctcctgaatagctgggactacaagtgcactcctagcaggatttttccttttaattacaggaaaaaatatatattttttttaccatctcctgcttccacaggtaataatttaacttattgagttctcttcctgtgaagtttgctgggcacacctgtagaagcaaatggttttcagccttggctccacattaaaatcacctaggatcttaaaaaaaaactcatgcccaggcccaccaattaaatcagaacttgggaggtaggacrcagacatttaaattttttaaagctcaccaggtgattacaaagtgcaaccaaggttgaaaaccactgctacaaggtaatgtcatgagagaaacatagtcaaaaa

SEQ ID NO: 235161 - DNA, 501 bp, Homo sapiens
gaacttattaagggaaagccttcattagtgaaaatagctagggctttaagtctcattaagagttgtctatttctaaagacccaacctatctgaatatgatatatgaactggagaatagtcaaggcatagtccaacagattccagacgcatgatttgaacgtttggtgaccagaagtagaattggactaccactcagagaaatctatttttaaggatgtggtccagtattgaatgttagtgacagtttccccgcatcccrtctgggatcccttctttaattcatagcatcctgtgcaagacttagacataacatttttataatctatgtgtttctaactttcctactggattaggagcatctcgagatgagagacatttttttacctctgttctcagcaactaatgttgtgcctgggatagagcagatccttaataaatgttgattgaacaagtctcaaagacttagaatctgtgacagatatgtcagtagactgtgctggg

SEQ ID NO: 235162 - DNA, 577 bp, Homo sapiens
gattagctgagctggtgggtgccatttatgggcagaccaagggctctggcttagtggacaggcttgttcttagcccacacacacctgagaatcaaggtgggccacgcagatgcctctaaaagcawggatcaggagggggctgggcttctgccatcagtttctttgatttttttaaaagttattctctcagtgagtcacagtacttctatatttctcacagaacttgaggtatttcacctcattttctttcttacaggagaaaatgatgttcagggaatgaaagaccagatagaatgtatcttgaaggtatcttaagttttcagatgtgtattttgtgcctctcccttttttcagtgatttcaagtataaccctaattaattggcaaatgacattaaaaaataagactcttgtcacttcccagccagagcccagactaaaattgtgtgctgacagggacacaggtgactgtttgggtgagaaggccttggcataggcaggggccttccatgtcttggccacttagtaccgcaccactgttagggaatctgggtgtggttagagccctctgtggtgctt

SEQ ID NO: 235163 - DNA, 580 bp, Homo sapiens
aactatagcaaacaacaatccattgttatttcaaaatagctagtaaagaataatttgaatattcccagcataaagaaatcataaatgttcaaggtgatggatatctcaattatcctgatttgactattgcacatcatatgaatgtatcaaaatatcatgtaccccaaaagtatgtatatctattatgtagcaatttaaaatgtatatttttaaaaatgaaaaagctcaattctagtcagaaaggagtggtatctttaattcctttaggtttaaaaacattagttaaaaaatgttattgggaagctagatattaatgtgatctcaaactaacgtttcacgtattacttattaattgcaaaggagaaaatgttcctttacataaagagatcttctggacatcgyccataaataaaattgatatcatgggcttctggacacaatgcattgagaaggacacagcatcatctatgtagtattcctgccaaaaaaatgtttagtctgaatttattaatcaggaaacaagtggttaaatccaaattgaaagatattctgcaaaatagttggcctagactcttcaaaa

SEQ ID NO: 235164 - DNA, 596 bp, Homo sapiens
aatacggttgactaatagttaatagcaatatattgtatatttgaaagctgctgagagagtagattttaagygttctcaccacaaaaagtaagtgtgtgagacaaagcctatgttaaacagcttgacttagccattccacaatgtatacaaacaccaaaacatcatgctgtaatcataaagtttacttgtcaattaaaaaaataaatttaaaaagggttccaattccttatatctgttgaatcctgcagtaggtctatgaagtatgctgggctctagaatgtagttgtttaagcacccaagtgatgaagccagactgagtttgaatcccatctctgactagctatgaaacccggggccacccacataacctccctgcgccttagttttctttgcccataagtggggtgatgatagtacttacctcagagagctgctatgattaaataaactactgatgtaagtgattggaacaatgtctagcatgcagcaagtgatatgtaaacattagcaattatcattatcctattttataggtgaggtaaactgaggctcagagaggtgaagtgacttactccaggtcacaccaccagttgatg

SEQ ID NO: 235165 - DNA, 382 bp, Homo sapiens
ccaatttgaaccattcttcagttctgagacaatcctcacctgaggagctgctgastggcccccaactgaaaaatgaatgggaagctgggaggcatcccccacctggcaccttgatctttgatggccttggaggccccattgcccctggggagagtgaggagaggaaagtttccaccacctcctttcctgaagatgcctcccaagagttctcaattgttttgagctcctcaattctcaaggagccagaaaaatccagtttcttaggaaaaggagacaccttgaactttcaaggctccattctagggacagaagaacaggattaatcccatgaagctgaatgggaacttgcagtgtagtgttaaaagggagaaggagctctgaa

SEQ ID NO: 235166 - DNA, 382 bp, Homo sapiens
ccaatttgaaccattcttcagttctgagacaatcctcacctgaggagctgctgagtggcccccaactgaaaaatgaatgggaagctgggaggcatcccccacctggcaccttgatctttgrtggccttggaggccccattgcccctggggagagtgaggagaggaaagtttccaccacctcctttcctgaagatgcctcccaagagttctcaattgttttgagctcctcaattctcaaggagccagaaaaatccagtttcttaggaaaaggagacaccttgaactttcaaggctccattctagggacagaagaacaggattaatcccatgaagctgaatgggaacttgcagtgtagtgttaaaagggagaaggagctctgaa

SEQ ID NO: 235167 - DNA, 465 bp, Homo sapiens
aggtttattgaacttttgtgttttaacatttaaaatacaatagaaatgtttatattttctcacattttactgcacaatacaaaactgatttaaatgcattaagaaacaacattttgtttttaaataaacactaacaaaatgtttggcaagagataacacaatttatttaaatatattccgactcaagatgaaggcaagcggtttacctagaaaggtttacatattttagctatagtttttcattgaaccatttttttgaaatgtcattcttttcattcatgcttcttttatcctcttkctttagaagttcacagtgttatataagtgaaaaacaagacagatagaaaccaccctaaacatatggctttatgtacataaaaaattcaataatgttgccataacccctaatacagtgtgatccttatttatttattatccagaataaacttctgtacctattaaatt

SEQ ID NO: 235168 - DNA, 450 bp, Homo sapiens
gacacctgtcagactgaccaaggccgaagatggctccctaccagagagattcaactgagggcttgcrataggtcttgtgacattgctattgatcttgagacattcatctgaagcatgattgtcactggcttcaaactttcctcatcataagagagggactgggtctacttcaaatgtttcgcactaatgaagttaacattccctttcatggtgaggtaagttgattgcattaacagccccagtttttcattctcccctgaggccacccatttggtagtaccctcccacactgattcttggtttagtcatgtaacttgctttaacctccaacagaagcttgaaaaacacttgttcatttctgcttgccctccttaagctctgccctcatcatgagaccatgcccaggctagtctgctggaaggaagtcagaggcacacggaagagagccac

SEQ ID NO: 235169 - DNA, 370 bp, Homo sapiens
aggccgaagatggctccctaccagagagattcaactgagggcttgcgataggtcttgtgacattgctattgatcttgagacattcatctgaagcatgattgtcactggcttcaaactttccycatcataagagagggactgggtctacttcaaatgtttcgcactaatgaagttaacattccctttcatggtgaggtaagttgattgcattaacagccccagtttttcattctcccctgaggccacccatttggtagtaccctcccacactgattcttggtttagtcatgtaacttgctttaacctccaacagaagcttgaaaaacacttgttcatttctgcttgccctccttaagctctgccctcatca

SEQ ID NO: 235170 - DNA, 575 bp, Homo sapiens
aagcttccagaggaaggatcagggagcaatattttctgttctgcaatatttgctgttctgcagcctccactggtgatacccaggcaaacaggatctggagtggacctccagcaaactccaacagacctgcagctgagggacctgactgttagaaggaaaactaacaaacagaaaggaataacatcaacatcaacaaaaagggcatccacaccaaagccccatctctaggtcaccaacatcaaagatcaaaggtagataaaaccacaaagatggggagaaaccagagtagaaaagctgaaaattctaaaaaccagagcgcctcttctcctccaaaggatcacagctcctcgccagtargggaacaaagctggacatagaatgactttgacaagttaacagaagtaggcttcagaaggtcggtaataacaaacttccctgagctaaagtaggatgttcaaacccatcgcaaggaagctaaaaaccttgaaaaaagattagacgaatggctaactagaataaccagtgtatagaagaccttaaatgacctgatggagctgaaaaccatggcatgaaaa

SEQ ID NO: 235171 - DNA, 412 bp, Homo sapiens
gcaggctttggggactgctgcagtctgagcgacaacttggagagtcgagtagtttctgcaggttggaccgaagaaccggtggctttgattcaaaggatgctctttcgaacagtgttgcatcttctgtcagtagatgttagtactgcagagatgatgccagaaaatcttaggaaaaatttaactgaattgcttagagcagctttaaaaattagaatatgcctagaaaagcagcctgacccttttgcaccaagacaaaaagaaaacactgcaggaggttcaggaagattttgtgttttcaaagtatcgtcatagagcccttcttttacctgagcttttggaaagagttcttcagattctgatctgttgtcttcaragtgcagcttcaaatcccttctacttcagtcaagccatg

SEQ ID NO: 235172 - DNA, 599 bp, Homo sapiens
attcttgttttaagaggaaaatgttccacacagaggtatcacaatttttgactatttaacatccagcaaaatgcttcttcaatttatgagcaataaaggataaaaattcatgaataaagataaagtaattacatgcaaattactatcctcatgtaagaaagcatgcaaataatcacagatgacatcctcaggtcattgtagcaccactgaataaagatcaagcctattgtaaaataagcctggaagaactgaagtcactagctggacatgcatcagacaatagattataaggtgcctaactgccagagaaacaaggaagtagagaaaagggaatgaaaggcagacagaatatagtgtctgtatgacaacaaactccaggctaaaatwacttgctatgagacatgaaacccatatttatcacaaaaatagtatctgcctctttttagccatttaatcattcccaccttggggcaggacaagatgtcttaagtcccacaacgtaagactaaaagctgcgctcatgaaaaatgaggcttcataagctaaagcagctttcccagacagttagtgaacaagaacttaaaagtcatagaagttaa

SEQ ID NO: 235173 - DNA, 432 bp, Homo sapiens
tgatgcatatatcttatgccattctatgaatygccttttcactcttaacggtgtcttgatggatgtaagttcttcactttgattctgttcaaattagcaatcttttcctttatagttactgctttagtgccctgtttaacaaatgtttctcaatcacaaggtcatgaaaatattgtcccatattatcttgtagaagctttattattttacctttcatatttctatccccaatccaactggaattgatctgtgcctatggtgtgaggtagggatcaagtttgctatttgtttcaatatggctgtccaaatgatccagcactatcactgtgctgcaggtttgcctgcagcacataaatcaagtgtctataaggctctattttcacctacagatcaatatgcctttttgccaactctacaatgtcttaactgttg

SEQ ID NO: 235174 - DNA, 611 bp, Homo sapiens
acctagaatattaacaaaagtatatttcactagaagtacttgatgagtactgtatccaagatgagaatacgaactcattacatattcacatgttatttcttcatatttgattaaagactaagggctggactatctattgaactccttatctattctggaatgaaatgacataaataaacttgatgagttaatatctagagtggtccataagaaaccattatagagaaatgcttatattcctacagttttgatttaaagacaaccagctgcatctacagttccctttttaattttcatttttttaatttttttgagatggggtcttgctctgttgcccaggctggagtgcagtggtgcagtcttggctcaccgcaacccccacctcctgggctcaagtgatcctcccaccttagccccccarccccctaagtagctggggccacaggcacatggcaccactcctggctaattgtttggatttttggtagagacagggtttcaccatgttgcccaggctggtctcaaactcctgagctcaagtgatccacctgtctcagtcttccaaagtgctaggattacaggcgtgagccacagtgcaccacctagaattc

SEQ ID NO: 235175 - DNA, 581 bp, Homo sapiens
gaagcagggcctggaatccacacttcaacaagctcacactaaaatgggagaccgtgccacgctggcctttctggggctcctcagccacgtttttgcacctgctgttctctctgtctccattatttcccctagatctkcactgctgtgtccctgatttcactcagatcactgcccaatgtcctcttcagagaggtctttcctaactgcctcctctaacaggtaaacaagtaattttttaatgtaggtatgtcccatgcaatgtttggaaaatcccgatactaaaacattatttgtaattgatctgaaattgaaatgtaactggacatctggtattattatttgctaaatccagcaaccctaagcaacaaggactctgcaacccagcccccagactataggccatttgtgagcttgagtctccaggggcggcagacagggctgcagctgctacgcctgcccagcccttcccctctgctcccctcccagaaagatgcataaatgcccggggtggcctaggcaattaaggcgaattgtcttctgggcagtcctgcatacctgcagaggactgtaactacagaggt

SEQ ID NO: 235176 - DNA, 602 bp, Homo sapiens
tcctgatgactttattttccatggttctgggttttatggggccaaagggaatggagtgcataagctatgagtgaaatgaagcaatccaattgcctttctgactatatgtttttaatcctgtctctcaagwagcagccagtttaacctttgagcatgcctgtgcccaatctgagtgttacactaagaatcacttgacttggcccaaagctatttaccgcattaaaatcacagtgaattctgtagaaatgatcagccaggaatgggcttagaatcatggaaactgcttcaagcataacagccactcattcaatcaaccagtgtttattgagcacctactgggtgacattttctacatcaggcagcaaggaacccactatgaatatatcctggatcttggccttaaagagtctacaatcaagtcagaagacacatacatacccacatggcccagagctatgtgagtaagacttaaaacgggggaataaagcaacatgaaggtaagggcggtcccagtgacctgtaagtgggagttgctctggtcaggggaggatatccccagaggatggtgcttgatagagtgctgataatgagcagaaagcgat

SEQ ID NO: 235177 - DNA, 431 bp, Homo sapiens
gaattctgtagaaatgatcagccaggaatgggcttagaatcatggaaactgcttcaagcataacagccactcattcaatcaaccagtgtttattgagcacctactgggtgacattttctacatcaggcagcaaggaacccactatgaatatatcctggatcttggccttaaagagtctacaatcaagtcagaagacacatacatacccacatggcccagagctatgtgagtaagacttaaaaygggggaataaagcaacatgaaggtaagggcggtcccagtgacctgtaagtgggagttgctctggtcaggggaggatatccccagaggatggtgcttgatagagtgctgataatgagcagaaagcgatgcggtgccctcaccatcctgattcagccactccaatgactccagaaccaggagtcccttct

SEQ ID NO: 235178 - DNA, 377 bp, Homo sapiens
tgggcttagaatcatggaaactgcttcaagcataacagccactcattcaatcaaccagtgtttattgagcacctactgggtgacattttctacatcaggcagcaaggaacccactatgaatatatcctggatcttggccttaaagagtctacaatcaagtcagaagacacatacatacccacatggcccagagctatgtgagtaagacttaaaacgggggaataaagcaacatgaaggtaagggcggtcccagtgacctgtaagtgggagttgctctggtcaggggaggatatccccagaggatggtgcttgatagagtgctgataatgagcagaaagcgatgyggtgccctcaccatcctgattcagccactccaa

SEQ ID NO: 235179 - DNA, 432 bp, Homo sapiens
taggagagtgaaataaaaatgacttaggaataccaaagaaagcaatagagaaatacaatcaaataaatataatgaaaaagtacattttcaagccaagaaatataaggggctattgttactcagaataacaacctactacaaagagtttttacgaagctcaaatacggtaacaggaggcatttctttgcaaaccataatgtgccgcacaaatgccattattactttcaacaatatrtttatgtgacctttataattcatttgtcttttgtacaaagttaggaggctccataagttatctgcatgtctccaagggccattaaaatgggacaggccatctcaaagaagctttttattttgcagttgacaataacgagaggcctttctaaactatgtaccagaggaatcagaatgtgcattctcagagctccttgg

SEQ ID NO: 235180 - DNA, 431 bp, Homo sapiens
taggagagtgaaataaaaatgacttaggaataccaaagaaagcaatagagaaatacaatcaaataaatataatgaaaaagtacattttcaagccaagaaatataaggggctattgttactcagaataacaacctactacaaagagtttttacgaagctcaaatacggtaacaggaggcatttctttgcaaaccataatgtgccgcacaaatgccattattactttcaacaatatgtttatgtgacctttataattcatttgtcttttgtacaaagttaggaggctccataagttatctgcatgtctccaagggccattaaaatgggacaggccatctcaaagaagctttttattttgcagttgacaataacgagaggcctttytaaactatgtaccagaggaatcagaatgtgcattctcagagctccttg

SEQ ID NO: 235181 - DNA, 505 bp, Homo sapiens
ggtggtcaagaaatgcctgtgaaaatcagattaacatcgtgttactatgaccttacctccctcagaaatttgccttttgtgctaaaagaaccgtggtgctccttgatttcttcacaaactgttttgggttcaattttcttctatagggcactttggagatacaaggaagaatgaattcctgttgcatttgttctgtgatccttgtaatacaaaaattacagcagaattaatccagaactatagatacraattcaggaaagcatcagcaaatttagcccttagaatagggtttgcaaatagtatgtgttcaacaaatatatgttgattgggtgattaaaagagttcaccaatagtttggtgaatggtcaggaagtcttggaaaagagacatttcatattgcactaagtgtcctactctggagaaaaataaccaagcatagagttatgacagcagagctggagtcaataggacactacaaatctaagaactacaaatcaaaatggta

SEQ ID NO: 235182 - DNA, 493 bp, Homo sapiens
aaatgcctgtgaaaatcagattaacatcgtgttactatgaccttacctccctcagaaatttgccttttgtgctaaaagaaccgtggtgctccttgatttcttcacaaactgttttgggttcaattttcttctatagggcactttggagatacaaggaagaatgaattcctgttgcatttgttctgtgatccttgtaatacaaaaattacagcagaattaatccagaactatagatacaaattcaggaaagcatcagcaaatttagcccttagaatagggtttgcaaatagtatgtgttcaacaaatatatgttgattgggtgattaraagagttcaccaatagtttggtgaatggtcaggaagtcttggaaaagagacatttcatattgcactaagtgtcctactctggagaaaaataaccaagcatagagttatgacagcagagctggagtcaataggacactacaaatctaagaactacaaatcaaaatgg

SEQ ID NO: 235183 - DNA, 442 bp, Homo sapiens
ttctgagacttggcaggactacagtcaatcatagctaattgatttaattctttttctagagcagatattgttggttgcttagcagtggctatcctccctttcatccttggaacagaaccctggctttacttggagaatccaccctcctccacactgctgtgtggctggtcattccatgtcctttccaggcactggtttaggcaagagcctgtggtgcaattttgcccagtgacatgagaaggaatgtttgctggggcataggggcacctgggaaagcattttccttataagaagagattgccaggaggaagagggaggcagcttcagcctcttttcctggatgtaagtgtttgtatgtgrggcaggaggctagtatcttgcttccatgaaatgagctaccttcaatacaagccaaactgttgagtagaggggggcagagctg

SEQ ID NO: 235184 - DNA, 558 bp, Homo sapiens
aatggaaatgattaaagggctataaagcaggatagaagaaactgcaacgatttctcttgtggaaataagggcaggcagggaacccacgaatttccatgcatgaaggggtgcagaggtcaagaacggccttccactcttctgtagcctctgcacctgaaatttttttgagtgctgacttgatgctcaaaggaatgctcactggaacattaggatttcagattttcaggtttgggatgctcagtctatggtgactgttagtacttacacagtgcttaggatgtaggaataagtccattaatattagctatgattattgagtaggtagagagtaccaacttactcatttcaggagatgcttttcaaatccctttgtcttggactcccagctttggtggtggtgttcgctcactgtactgccycacccaaactttccttccatgttaacttctacttcctcccacctgaagagggagaaggggtagttgttgtggtcatgtggcctcgactctgccctgttcacaaggtggaaggtgtatacttcctgaccctgagttgggc

SEQ ID NO: 235185 - DNA, 555 bp, Homo sapiens
cacacacaattgttccacagatccatttggcctcactgattcagtccaacactgaatcacaggttactaattcacgattagcgatatacatttcratattaaccagtgagtcataggatcaagaatagaaaatggactgatatggtttcaaatcattccatgatgtcactggggttgaaagacagtcctttcttggctgttaaggcggctgcttgccagagaggagccattctgcctgctcttgtcaaaacaggcctatgtgccttctgtagcagccacctgcctgcttcttcccagagcagaggtagggtgaatgagatcatacatagagaacgctggaagatctggaaacaaaggccctctatatctagaagctattctgtcactattccccgtccaaaaaacccagccttttctgccactgtttctgagtgctgagaaagcataatagcatctgtgccaaacctgccaattcctctcattcccaccagctttacctggaatcgtgctcaggccaggctctgagcttccatatgggtgtctctctttctcttg

SEQ ID NO: 235186 - DNA, 555 bp, Homo sapiens
cacacacaattgttccacagatccatttggcctcactgattcagtccaacactgaatcacaggttactaattcacgattagcgatatacatttcaatattaaccagtgagtcataggatcaagaatagaaaatggactgatatggtttcaaatcattccatgatgtcactggggttgaaagacagtcctttcttggctgttaaggcggctgcttgccagagaggagccattcygcctgctcttgtcaaaacaggcctatgtgccttctgtagcagccacctgcctgcttcttcccagagcagaggtagggtgaatgagatcatacatagagaacgctggaagatctggaaacaaaggccctctatatctagaagctattctgtcactattccccgtccaaaaaacccagccttttctgccactgtttctgagtgctgagaaagcataatagcatctgtgccaaacctgccaattcctctcattcccaccagctttacctggaatcgtgctcaggccaggctctgagcttccatatgggtgtctctctttctcttg

SEQ ID NO: 235187 - DNA, 486 bp, Homo sapiens
ctatgccatctactgtggggtgagttgggggtacagaggagagactgtatgactcgtgttcttgtgttgcttcaagtccagcagcagatcaagtctgtctatgcagcagacacaaggcaccaaatgatcaacatgattagaggtgctatctcaccayagggatacctacgtaggtagcttgtttcatttgctgctagatctaatggttaaactgagcccaactctccctttctgtgagttttagtcatttttccagattcctttctctggagccgcacacacaccctagcctttcagaatgagggctttttggatatgtgaagatgactatctttcttccattaccttctcttccaaggctaatagtagtttcctaattctcacctgtttcacccatgtcattgggtccagacctgtccctgttttaattgctcccttctgaatatattcctgcttctcaatgttcttattgagtgggaaatctag

SEQ ID NO: 235188 - DNA, 478 bp, Homo sapiens
ttcctgtccctatgccatctactgtggggtgagttgggggtacagaggagagactgtatgactcgtgttcttgtgttgcttcaagtccagcagcagatcaagtctgtctatgcagcagacacaaggcaccaaatgatcaacatgattagaggtgctatctcaccacagggatacctacgtaggtagcttgtttcatttgctgctagatctaatggttaaactgagcccaactctccctttctgtgagttttagtcatttttccagattcctttctctggagccgcacacacacmctagcctttcagaatgagggctttttggatatgtgaagatgactatctttcttccattaccttctcttccaaggctaatagtagtttcctaattctcacctgtttcacccatgtcattgggtccagacctgtccctgttttaattgctcccttctgaatatattcctgcttctcaatgttctta

SEQ ID NO: 235189 - DNA, 375 bp, Homo sapiens
cacactcatttggcttcaagaagtagtggctaggttggccatcccckatcattgtcatatgtaatgtttttaccaacaatactctttgatgctagggcgcatctgtgtaatcccttgcaaagttgaaaaactgagttcatcaactagggcaagtaatttcagctcacatgtcctgggaaaataactggacttggatctagttcctgccctgaccatgtggccttgaaaaccactcacctgctctgagtctgctctctagcattccatgtctccatagtgttgttcaaaaattaaaggagccattggcgtagaagcactctatgaactgtaaggactacaaaaataaaaattatttctatgtcataaaagaagttc

SEQ ID NO: 235190 - DNA, 597 bp, Homo sapiens
gaggttgcagtgagccaagatcatgccattgcactccagcctgggcgacagaactggattccatctcggaaaaaaaaaaaaacctgaaaagaaactcagtgtggctggaggagggagagcagggggctggagtggggaggccagaaagctaacaaggctgggccttggccattgcaaggactggctcttgttcaccccaaagacagctgagcctgagagggtgagaggtgctgagtgcagttgagttgaaggccacctgcatgccttgaccctcatccaagtatttctgagcctcccctcaccccaggacccagcccaggcaacaggtggaagatgctyttcttctgggacctcagaggcgagtgggtgggtggggaggaggaggtcgagtggggacagctgccccaagggagaggctgaggatggaacagggagggcactgaagtgggctgggtgaaggacagggggctggagggtgagaagagggtggggtacttaccgcctgtgcccggatgcttgaaccatgttttgtctttcagatttgtagatgctgaggagccaaagagaggtcactagggctggaggacacagaacttg

SEQ ID NO: 235191 - DNA, 546 bp, Homo sapiens
cactccagcctgggcgacagaactggattccatctcggaaaaaaaaaaaaacctgaaaagaaactcagtgtggctggaggagggagagcagggggctggagtggggaggccagaaagctaacaaggctgggccttggccattgcaaggactggctcttgttcaccccaaagacagctgagcctgagagggtgagaggtgctgagtgcagttgagttgaaggccacctgcatgccttgaccctcatccaagtatttctgagcctcccctcaccccaggacccagcccaggcaacaggtggaagatgctcttcttctgggacctcagaggcgagtgggtgggtggggaggaggaggtcgagtggggacagctgccccaagggagaggctgaggatggarcagggagggcactgaagtgggctgggtgaaggacagggggctggagggtgagaagagggtggggtacttaccgcctgtgcccggatgcttgaaccatgttttgtctttcagatttgtagatgctgaggagccaaagagaggtcactagg

SEQ ID NO: 235192 - DNA, 546 bp, Homo sapiens
cactccagcctgggcgacagaactggattccatctcggaaaaaaaaaaaaacctgaaaagaaactcagtgtggctggaggagggagagcagggggctggagtggggaggccagaaagctaacaaggctgggccttggccattgcaaggactggctcttgttcaccccaaagacagctgagcctgagagggtgagaggtgctgagtgcagttgagttgaaggccacctgcatgccttgaccctcatccaagtatttctgagcctcccctcaccccaggacccagcccaggcaacaggtggaagatgctcttcttctgggacctcagaggcgagtgggtgggtggggaggaggaggtcgagtggggacagctgccccaagggagaggctgaggatggaacagggagggcactgaagtgggctgggtgraggacagggggctggagggtgagaagagggtggggtacttaccgcctgtgcccggatgcttgaaccatgttttgtctttcagatttgtagatgctgaggagccaaagagaggtcactagg

SEQ ID NO: 235193 - DNA, 597 bp, Homo sapiens
gaggttgcagtgagccaagatcatgccattgcactccagcctgggcgacagaactggattccatctcggaaaaaaaaaaaaaccwgaaaagaaactcagtgtggctggaggagggagagcagggggctggagtggggaggccagaaagctaacaaggctgggccttggccattgcaaggactggctcttgttcaccccaaagacagctgagcctgagagggtgagaggtgctgagtgcagttgagttgaaggccacctgcatgccttgaccctcatccaagtatttctgagcctcccctcaccccaggacccagcccaggcaacaggtggaagatgctcttcttctgggacctcagaggcgagtgggtgggtggggaggaggaggtcgagtggggacagctgccccaagggagaggctgaggatggaacagggagggcactgaagtgggctgggtgaaggacagggggctggagggtgagaagagggtggggtacttaccgcctgtgcccggatgcttgaaccatgttttgtctttcagatttgtagatgctgaggagccaaagagaggtcactagggctggaggacacagaacttg

SEQ ID NO: 235194 - DNA, 597 bp, Homo sapiens
gaggttgcagtgagccaagatcatgccattgcactccagcctgggcgacagaactggattccatctcggaaaaaaaaaaaaacctgaaaagaaactcagtgtggctggaggagggagagcagggggctggagtggggaggccagaaagctaacaaggcwgggccttggccattgcaaggactggctcttgttcaccccaaagacagctgagcctgagagggtgagaggtgctgagtgcagttgagttgaaggccacctgcatgccttgaccctcatccaagtatttctgagcctcccctcaccccaggacccagcccaggcaacaggtggaagatgctcttcttctgggacctcagaggcgagtgggtgggtggggaggaggaggtcgagtggggacagctgccccaagggagaggctgaggatggaacagggagggcactgaagtgggctgggtgaaggacagggggctggagggtgagaagagggtggggtacttaccgcctgtgcccggatgcttgaaccatgttttgtctttcagatttgtagatgctgaggagccaaagagaggtcactagggctggaggacacagaacttg

SEQ ID NO: 235195 - DNA, 597 bp, Homo sapiens
gaggttgcagtgagccaagatcatgccattgcactccagcctgggcgacagaactggattccatctcggaaaaaaaaaaaaacctgaaaagaaactcagtgtggctggaggagggagagcagggggctggagtggggaggccagaaagctaacaaggctgggccttggccattgcaaggactggctcttkttcaccccaaagacagctgagcctgagagggtgagaggtgctgagtgcagttgagttgaaggccacctgcatgccttgaccctcatccaagtatttctgagcctcccctcaccccaggacccagcccaggcaacaggtggaagatgctcttcttctgggacctcagaggcgagtgggtgggtggggaggaggaggtcgagtggggacagctgccccaagggagaggctgaggatggaacagggagggcactgaagtgggctgggtgaaggacagggggctggagggtgagaagagggtggggtacttaccgcctgtgcccggatgcttgaaccatgttttgtctttcagatttgtagatgctgaggagccaaagagaggtcactagggctggaggacacagaacttg

SEQ ID NO: 235196 - DNA, 529 bp, Homo sapiens
ttctttggtgtttacagaagcagatcatgtttatgaagcatgtccagaagaaggaaatgatatatggaaaatctctacrtggggtatagagtcaagtgatccctaggttacagttgagagctataaataggccagtgacttcatgtgtaccatgggactggtattttccatctttcgtcccacagtttggataaacttagatggattttttaatagttctttgaaaatggaacattagctatccacagagatttaacttgggacaaaaaaaaggaataaaagtcatcatttctgatgacaggattagacagaccttttttcttgaaagtaattgaatattctgtgtgttttttgcagtttctgttgaattgagaatagtgaccatcatttgaggtggaaatagcagaaatgattaatttagaaagaagaaggattgtagggtgggtggaagtggcattttctgcattgtattcttagaaacttagactgttagagttggaagtgctctgataaaaccgttctttaacat

SEQ ID NO: 235197 - DNA, 529 bp, Homo sapiens
ttctttggtgtttacagaagcagatcatgtttatgaagcatgtccagaagaaggaaatgatatatggaaaatctctacgtggggtatagagtcaagtgatccctaggttacagttgagagctataaataggccagtgacttcatgtgtaccatgggactggtattttcyatctttcgtcccacagtttggataaacttagatggattttttaatagttctttgaaaatggaacattagctatccacagagatttaacttgggacaaaaaaaaggaataaaagtcatcatttctgatgacaggattagacagaccttttttcttgaaagtaattgaatattctgtgtgttttttgcagtttctgttgaattgagaatagtgaccatcatttgaggtggaaatagcagaaatgattaatttagaaagaagaaggattgtagggtgggtggaagtggcattttctgcattgtattcttagaaacttagactgttagagttggaagtgctctgataaaaccgttctttaacat

SEQ ID NO: 235198 - DNA, 423 bp, Homo sapiens
tattgacttggttgtctggagagattgttgtgcagttcatgctcaaaagaagtggactggtaccagtctgcggcctgtaaggaaccaggccacacagcacgaggtgagcagcaggccagtgagtcttactgcctgagccccgcctcctgttggatcagtggcagyattagattctcatagaagcgcaaaccctactgtgaactgtgcatgtgagggatctaggttgctcactccacatgagaagctaatgcctaatgatctgaagtagaagatcccccttccactgcccaccccatcccatgggaaaatggtcttccatgcaactggtctggtgccaaaaatgttggggaccgctgctgtagtgggtttggggtagaactgagctcatgtgtagatgcatttgaagaatctgtggaacatata

SEQ ID NO: 235199 - DNA, 507 bp, Homo sapiens
atgagccaggcattattttaggcattgtgsgaagcataagccgaaaaagagacgtggttcttgctctcatgggagtttctagtctagtgggggaaagagacattaaacagacaaagatacacatgcataaagacaaatgaagtcagtgacagaaagaacagcgtgaaataattgaggtcagaagggcggagacccactcaagaatgatggagtctcagaggtctctctgaggaatgatctgtaggctgagacctgaaaagtgagaatgggccagtcaacaagtcgtgtcaacaaagactggctgtgtcctttgtacaaactggggacataaaggtgacctgaacagagtcttgcccttaaggaattgacattttggattactatgtgtggtgaggaaagacaaagcacattaggaaattaggggagttgatttccagggatagagaagcagtaaggttcggggacctgaaagcaaatcatatgagttcattagtcgggtaacaggga

SEQ ID NO: 235200 - DNA, 402 bp, Homo sapiens
gaattctacagcataatggtgatactcctgttcagtatcataatcacagtttattgcacattgatgctagtctatgaatagcccccaaagggttattaaagtggatcaaaacaatttattatttcattcrtgttatgtataaatgacataataaaagaatatttgacaatgtagtaaccaatgaaatagtcttcatattatgtcactgcatttttttttaatgtcactgcttatagaagaattggagactttaattgggagcagatgttcaggtctgaatccagttttttctagacacctctttccggatcaccccctaatttctcaatttgcaacctctaatttctgcatcctttgttgttttcatattttcacaacataaactcctacccataaggaagt

SEQ ID NO: 235201 - DNA, 402 bp, Homo sapiens
gaattctacagcataatggtgatactcctgttcagtatcataatcacagtttattgcacattgatgctagtctatgaatagcccccaaagggttattaaagtggatcaaaacaatttattatttcattcgtgttatgtataaatgacataataaaagaatatttgacaatgtagtaaccaatgaaatagtcttcatattatgtcactgcatttttttttaatgtcactgcttatagaagaattggagactttaattgggagcagatgttcaggtctgratccagttttttctagacacctctttccggatcaccccctaatttctcaatttgcaacctctaatttctgcatcctttgttgttttcatattttcacaacataaactcctacccataaggaagt

SEQ ID NO: 235202 - DNA, 402 bp, Homo sapiens
gaattctacagcataatggtgatactcctgttcagtatcataatcacagtttattgcacattgatgctagtctatgaatagcccccaaagggttattaaagtggatcaaaacaatttattatttcattcgtgttatgtataaatgacataataaaagaatatttgacaatgtagtaaccaatgaaatagtcttcatattatgtcactgcatttttttttaatgtcactgcttatagaagaattggagactttaattgggagcagatgttcaggtctgaatccagtttyttctagacacctctttccggatcaccccctaatttctcaatttgcaacctctaatttctgcatcctttgttgttttcatattttcacaacataaactcctacccataaggaagt

SEQ ID NO: 235203 - DNA, 402 bp, Homo sapiens
gaattctacagcataatggtgatactcctgttcagtatcataatcacagtttattgcacattgatgctagtctatgaatagcccccaaagggttattaaagtggatcaaaacaatttattatttcattcgtgttatgtataaatgacataataaaagaatatttgacaatgtagtaaccaatgaaatagtcttcatattatgtcactgcatttttttttaatgtcactgcttatagaagaattggagactttaattgggagcagatgttcaggtctgaatccagttttttctagacacctctttccggatcaccccctaatttctcaatttgcarcctctaatttctgcatcctttgttgttttcatattttcacaacataaactcctacccataaggaagt

SEQ ID NO: 235204 - DNA, 505 bp, Homo sapiens
ggaaattccctactttataccttagaaggggtgtcagactgtcttcctcaccttcacgtgagtttgggtctggcagagaagtgtctcccctcccctataacaacatgggtcatccgtccaggcccatggaaagtgcagaaaaccacagcctgtgccatcatgctttctgcccacctccactacccaacttagccaagtggctggacggttctcccatgattattatccttcagaagttattagcactgcatttttcttttctctaaaaaaatttttatctcttttcaccatgttagaaaaaatcttcccttagttttttttttttttttttttttaaagcattgcagcctgggggaattcctccccactttsgacaatcactccagctaagtttgcatggaatggtgtctgccctaattggcaagcttcattcctgctcacctcttattcagaccacataaaataatttcagcaaacgtgctgctcatatcatagttttgcatcc

SEQ ID NO: 235205 - DNA, 505 bp, Homo sapiens
ggaaattccctactttataccttagaaggggtgtcagactgtcttcctcaccttcacgtgagtttgggtctggcagagaagtgtctcccctcccctataacaacatgggtcatccgtccaggcccatggaaagtgcagaaaaccacagcctgtgccatcatgctttctgcccacctccactacccaacttagccaagtggctggacggttctcccatgattattatccttcagaagttattagcactgcatttttcttttctctaaaaaaatttttatctcttttcaccatgttagaaaaaatcttcccttagttttttttttttttttttttttaaagcattgcagcctgggggaattcctccccactttggacaatcactccagctaastttgcatggaatggtgtctgccctaattggcaagcttcattcctgctcacctcttattcagaccacataaaataatttcagcaaacgtgctgctcatatcatagttttgcatcc

SEQ ID NO: 235206 - DNA, 479 bp, Homo sapiens
tttagtttgagaattcctcaaagaggcttgtaagcttgaggaacccaagtgagactccctctgataaggcaggtgacacagtttgggagcagatagccatcacccatgcccttacaaaacayttctgctttattaccaatacatcatttgtgaacccaccacccctgcaacatcttatctgaatctttcttagtctggagcaaacacagaatgaggggaaaatgtggtcacattctttcattcttagtaaagaaaggatttagtcaccttttcccaagtgtcaagaaatgaagtcatcaagcaaatgataccacatgtttagagaagcaaaaaccttccttattcttcagtctcttgaaagaaggatattccattttaaaaatcaaaaccattatagcattaccagtgaacctgagtggtgtcacatctctctccagttgtggctgaggcacatgctgaaaaagttggaacctggctgc

SEQ ID NO: 235207 - DNA, 616 bp, Homo sapiens
tcctctgtactcttcttttggattgccagcatctgggaagggtgctgagttgtcctcgtgaggccaagacccctactttcagtgtggaaggcttaaaaaaagaaattctatccccatatgtggaaagctggccattgcagttagagtttgggttgggaaaaatcaccatcgattaagaaatctgaaggaacaaaaagagaaatgtatatgcatatattttaaaacaaattaaaaggcttctgtaatgagaaactctgggaacagattttagtcacgtacttttaagatttgcatcaattaggaacaaaatagttccgttactcatatcatcccagtcctttaattaaaagaattgataaatctgccaacaacttaacatgtgtgagctttaagagttagcaacattctgcaacatgacagacaccagttagtccagttcatcactcaggtgcacatttccagaatgtctgcctgaccttactgttgctagtatattctgtacctgtgcatttactattcaaaactcaggttacaatgcaaatacaggtgcctttccrtctagctctggcaggactttacttccctacttgtaaaaaaaggaaacaggaatgattca

SEQ ID NO: 235208 - DNA, 518 bp, Homo sapiens
tacttacattcattgactcttttgttggaaaaaaaaatgtttgagtgccacgcactgtggaagttgatggatcttcagggataaaacaacagataattattccatactcaacattaaacaagcccgaattacacattgtaataaggcctggagggaaaaatcagagagctgtgggaagatcccacaggaagtacctactttcgactggggggtatttcagcagtccaggtaagagagggtaatacttgaatgagtaggggcagctggggagctcgagggagaagtggatagatttgagatcttcttaaaggtagattccaattaccatctttctacagaaaattcctaaattgttgcatttaatctgacttcattcctaagctgcagcccaatatatttccttcagaacatctctaaacttcttttttaaattaaaaaaatatttttttgaaacagrgtctcactccatcacccaggctggaggcagtggtgcaaacatgactcactgcagccttgac

SEQ ID NO: 235209 - DNA, 415 bp, Homo sapiens
tcctattgaaaacttgcagtcatcttgcatttttttcatcttccytagccaagcaatcaaaaacctattttgtggctatggtattgcagtgatctcctagattctctttctttctcaatctccactattcagtcccccggccatcttccctgctgtagttggaatgaaagttctcaaacaaaactgctattgatttttaattgtccttaaaagatgttttattgatataacaaactcaattctaagtatgcatctgtgattttcccactacgattatttgtacatgacttaaaagttataacaaagagcaagtttggagaaaatataaacatttaagtacaaatgaaataccttctaataaaaatttagctatttatttaatcattgccaacactataaactaaattttctataa

SEQ ID NO: 235210 - DNA, 424 bp, Homo sapiens
ttatttcaattatattattactcacaacttccttcctattgaaaacttgcagtcatcttgcatttttttcatcttccttagccaagcaatcaaaarcctattttgtggctatggtattgcagtgatctcctagattctctttctttctcaatctccactattcagtcccccggccatcttccctgctgtagttggaatgaaagttctcaaacaaaactgctattgatttttaattgtccttaaaagatgttttattgatataacaaactcaattctaagtatgcatctgtgattttcccactacgattatttgtacatgacttaaaagttataacaaagagcaagtttggagaaaatataaacatttaagtacaaatgaaataccttctaataaaaatttagctatttatttaatcattgccaa

SEQ ID NO: 235211 - DNA, 576 bp, Homo sapiens
aatgtggctgtagcttagggcataaaagagcatgatgtgacaagggaagaagaaggacaaggaggcagggactcctccataaacaacctctgggttgctcgtctaaatgcaataagaatttttatcagggcttaacatagaggtttttaaaaattgttttgttataaggcaaaagaaaattatagaggacaaacaacaaattaataatgctaatagaagagaaaccaagactcaaccatcctgtttttaaaagggtaatgtgtttactcttggaaaacctctaatattatataataatgcacattattggtttgacagttataaaaactctagtatggaattcaatttggttttgccttggttttcccatttctaaaatgaagctaagtatctcatttggttattatgaagattcaatgagagtttgcatgtaattgtttttatattctcgtgtatgtaaaaaacaaaatgactggtttgaattcartttgtctgttgaactacctatctacttctatatatagcttttaggttttgggtcaattgtgttactgtgtttactctctaattaagcct

SEQ ID NO: 235212 - DNA, 576 bp, Homo sapiens
aatgtggctgtagcttagggcataaaagagcatgatgtgacaagggaagaagaaggacaaggaggcagggactcctccataaacaacctctgggttgctcgtctaaatgcaataagaatttttatcagggcttaacatagaggtttttaaaaattgttttgttataaggcaaaagaaaattatagaggacaaacaacaaattaataatgctaatagaagagaaaccaagactcaaccatcctgtttttaaaagggtaatgtgtttactcttggaaaacctctaatattatataataatgcacattattggtttgacagttataaaaactctagtatggaattcaatttggttttgccttggttttcccatttctaaaatgaagctaagtatctcatttggttattatgaagattcaatgagagtttgcatgtaattgtttttatattctcgtgtatgtaaaaaacaaaatgactggtttgaattcaatttgtctgttgaactacctatctacttctatatatagcttttaggttttgggtcaattgtgttaytgtgtttactctctaattaagcct

SEQ ID NO: 235213 - DNA, 501 bp, Homo sapiens
gaattcttgaagtgaaaagaagagtatctgaaatggaaactcattggatgggcttgtcaagagattggaaaccacagaagaaagagtaaacttgcatactgagcaacagaaattatacaacttaaagaagagaaaggaaaaagtagcggaaaaaaatgaacaaagtgtcagtgacctcattgctaataccaaatagcctaacatatgcacaattagagttcagacgaacaggaaaaagaaaatgtggcagaaattttttttttaaatcaaagcygaacttctcccaattttggtggaaaatattaatttacagattcaggaagctaggtaaaccctaagatggagaaatacaaagaaaattttatctgggcacattatactcaaactgctgagaacaaaaataacgtaaaaatctttaaagcattcagacaaaaataacacttcatatatagggaaaaggatgacttatttgacatcagaaacaatggaggacagaataca

SEQ ID NO: 235214 - DNA, 398 bp, Homo sapiens
aacgtaaaaatctttaaagcattcagacaaaaataacacttcatatatagggaaaaggatgacttatttgacatcagaaacaatggaggacagaatacaacagaacaatattcttaaaatgataaagaaaaaaaaaatgtaaagccagaattctatatccagcaaaaatattcttcaaaaatgaaaattaaataaagacttttttttatcaatgaaagccagtagatctgtgtcgcaagaaatactaaaggagaccaggcacggtgrctcatgcctgtaatcccaacactttgggaggctgagacaggtggatcacctgaggtcaggagttcaagaccagcctgataaacatggtgaaaccctgtctctactaaaaaatccaaatatcagccgggctg

SEQ ID NO: 235215 - DNA, 592 bp, Homo sapiens
aagaggaaggcataaagaggaggcatagggagttttaatagagaggaggttggagaaatgcagtgttagcaggacttgacctacaattgctggatttgaagatagaggaagaggaacaagagccaatgattgcaggtatcccatagaagccagcaaaggcaagaatatgaattttcccttagcatctccaaagaaagatagcatttcgcatacttttgatttaggccagtgagacccatattgatttctaacctgtggaactataagagaataaatttggattgctttaagctaytgtttgtgatgatttgtttagagcagcaatcaaatacagtactgaagaacagagattcaaaatatacaaagaaaaaaaataacaacaaaaggagaaaaaaatagaaaaatccactatcataggtggaaatttagaaacacttctttcagtaattaacaggactagattaaaataaatacagtaaggatatagcagattttaataacactgtcaaacagactgacaattcacatttacagaatgcagttgaaccacatttttttcaagtgtacatagaacattaaccaagttggacca

SEQ ID NO: 235216 - DNA, 627 bp, Homo sapiens
  misc_feature (1)...(627): n = A,T,C or G
gaaggcttcaaggtgaganaggtttttaggtgtcataacagttcccactacacagtgttattgtgaagagaaatgagatgatgcatgtaaagcatctagcatcatatgtgcaatcccaagtgtttaatacgttttttataattattaattatcattgttatgaaagtcacatttctaaatgtttagtatgttgtagaatctttaaaatgatccatagaacacattcatgtagtggtgcctctttgaatttgctattttcttctctgtcgcccagggtggagtgcactggtgtgatctcagctcactgcagcctccacttcccaggttcaagtggttctcctgcctcagcctcccaagtagctgagattacaggcccacaccaccacacctggctatttttktgtgtgtgtgtttttagtaaagacagggtttcaccatgttggccaggctggtctcgaactcctgacctcaggtgatctgcccacctcagcctcccaaagtgctgggattacagacctgaatcattgcgcctggctattttcttctctatatatttttgacttttatacacaatcttgagatgaaaacatttattatttctgaattattttcttccttggcaagagc

SEQ ID NO: 235217 - DNA, 627 bp, Homo sapiens
  misc_feature (1)...(627): n = A,T,C or G
gaaggcttcaaggtgaganaggtttttaggtgtcataacagttcccactacacagtgttattgtgaagagaaatgagatgatgcatgtaaagcatctagcatcatatgtgcaatcccaagtgtttaatacgttttttataattattaattatcattgttatgaaagtcacatttctaaatgtttagtatgttgtagaatctttaaaatgatccatagaacacattcatgtagtggtgcctctttgaatttgctattttcttctctgtcgcccagggtggagtgcactggtgtgatctcagctcactgcagcctccacttcccaggttcaagtggttctcctgcctcagcctcccaagtagctgagattacaggcccacaccaccacacctggctatttttttgtgtgtgtgtttttagtaaagacagggtttcaccatgttggccaggctggtctcgaactcctgacctcaggtgatctgcccacctcagcctcccaaagtgctgggattacagacctgartcattgcgcctggctattttcttctctatatatttttgacttttatacacaatcttgagatgaaaacatttattatttctgaattattttcttccttggcaagagc

SEQ ID NO: 235218 - DNA, 462 bp, Homo sapiens
gttattcatttgggagcttgcattctaggattacagatgctggcaacctcataggtgactggaacccaggatcttttggaaccatctttatatttaccaccctcagaacgctgatttcaggagcaaattataccttatagcatctgggaaaatcatgcagatattcaaagtcatccccaatttctgataatatattccacttcctcatcttaggtgatctttgcaagcaacacttttcaaacttgatctcaataygagttatcattagtagttatctttttttttctggaaaaattaagcaagagacactcaccttttaaaggtttacaaaacaaaattgaatgcacctgtgtgatttcaagagctgtttacatttttcctcttaagaagcttagaaatgattgaggtcttgatgacaaattgagagtgagcccagctactgtcattagagaaagggctgag

SEQ ID NO: 235219 - DNA, 567 bp, Homo sapiens
ttagtatagttttcccgtgctttaatgtgaatcacatgaaaaatgtcgtcaaacattatgagcacttcaatatttgcatttcctgttctgtgtaggtaattttgttaatttgaggttagcctcacaagctttgaggggagcaggaagggatatggccaggtgggttatttttccacactgtgctcctccaagctaatgcaattttttctccctggggtgcctttcattccctttgtcatcttacagattcttacctttcctgtaaagttgcacttcaatgccaaactttcatcttctttactaagcctttcttaatgaatctacatctcaacataggaactatcgaattggaatttccttctttcccttccctttatcaccctttgaaactggggcctgttctttagcactaaatttaaagacccacaaggggcgggggtgaagaattacaaagtgtattagcaaactgaatgcaacactattattcacctagagttattatttgaggattgattgttcttagttgataagtgaacrctgaatgacatagagaagtattagacaagg

SEQ ID NO: 235220 - DNA, 599 bp, Homo sapiens
atattcaaacctaaactcatcatcaccccctcaaaccctctcagaaaccctctgtttctgttgatgatgccatcactcctgtgtcagactgtcttagagactcatccttccatttttacatccaagacaaagagtgattattccttagaaacgtttcttttatttgttctgctcttatcccaactccactaatgggggcattacagcttcatccagcctatttaatgcaatagctcatggagtcaataaaatacactttctagcatataacatttaatcaagaaaccagaattctaaacacttttaggaattaagtgagagtcatgcctgagcagcccttcaactaacacttaggagagtttaaagacataaattctttttctgagccagaaaaaaamcaaagttctctttattggtaaagcatgttattttataactaggtctgaataatgcaaacatctgataatctttaaagaaatcacaccaacaaaatctgagcgcaatctgggctttctcaaatacagctcacatttccctaatttttacagtctctatataaagacttatattcccattattacatttagagtgcccttcaa

SEQ ID NO: 235221 - DNA, 458 bp, Homo sapiens
tgtgcagttcacagtagggttcatgctcctgtgagaatctaatgccactgctgatctgatagaaggcagagctcagrtagtcagcactcaacttgcttgcctgctactcacctcctgccatgtggacctgttcctagcaggccatggaccagtacccctctgtggcccaggtgttgtggatccctgctctaacaggcctccaaagcaatattgccttccaatagggagaaagtccaacgaggagccaaaactttatatccacctatcctttaacattccctaaaccagtagattaaaacaagatccaggcctgcacccaaaagaaagctgaggcagtacataattattataatagacatgaaatcgttatcaaggaaaactctggactcccctcagtcaccaaatctatccaagtggcttttaattctatgttcataaatagtttagatgatgatctt

SEQ ID NO: 235222 - DNA, 458 bp, Homo sapiens
tgtgcagttcacagtagggttcatgctcctgtgagaatctaatgccactgctgatctgatagaaggcagagctcagatagtcagcactcaacttgcttgcctgctactcacctcctgccatgtggacctgttcctagcaggccatggaccagtacccctctgtggcccaggtgttgtggatccctgctctaacaggcctccaaagcaatattgccttccaatagggagaaagtccaacgaggagccaaaactttatatccacctatcctttaacattccctaaaccagtagattaaaacaagatccaggcctgcacccaaaagaaagctgaggcagtayataattattataatagacatgaaatcgttatcaaggaaaactctggactcccctcagtcaccaaatctatccaagtggcttttaattctatgttcataaatagtttagatgatgatctt

SEQ ID NO: 235223 - DNA, 562 bp, Homo sapiens
caataatttattaaattcaattcaacttccctctgccttggctataatcaaaatttctgggcactctaaattagaaaggctaagaaaaacgacttggctaatcatgcagcaaaagcaactacctggagttccactaagactaaaaaccttatagctgatatggattgttttccaaaaaaggatttaaatgatgttgtgaaaggtgctcagtcttgggcatcatataaaaaatcatattgagytgataacaattgcattttttgcccaacaacaaatttacggtatggtcccaataataaactgctattaccagaatctatatgtcttttaaaaaccttactcaaaatgacatatcagatgactaactgggcaactgataaattttataaagcagtattattagtggggaaacatttcaagggctgccaaatagttacaactgtcttgtactgtttgtccaaaattcaacccaggaaagacaattcagatagttccaggtcattttaacctacctaatggacactctgaggtttggcaaatggatttcattcagccacctcca

SEQ ID NO: 235224 - DNA, 591 bp, Homo sapiens
ctatatatttctatcggacaatgaaaagttaaaagatgttgtggtaggcggaatgatggctgccctctcccaaccaaaatgtttacatcctaatccctagaacctacgaatgttactttatggggcaaaagagattttgaagatgtgatcaaatggagaatttttagatggggagattattctaaattatccaagtgagcctgatataattacaagtcttgtaaaagagatacaggtggggtcaaagttagataggaggcaatgtgacaaaagcagcagagggacagagagaaagagatttgaatatgttatgcttctggctttgaagatggaagaaaggagccagaagccaaagaatgtaggcagcctcctgaatctgaaaaggtcaaggaaacagattctctcttggaacrtctggaaggaacacagctgtggagaatgaattttagacttctgatctcccaaagtgtaggatgataaatttgcattgtttaaagccactaacttgtgatttgttacagcagcagtcaaaatgaatatagatggattactataaagataaataatgcaccaggcacagtggctcacatc

SEQ ID NO: 235225 - DNA, 605 bp, Homo sapiens
gatctttctgcttagtttttgacaggcgagtccaatccacagctggtaaagaggttggataatgaccgctgataggtttgatcccttgggatagaatacttaaagtggtttggggacctctgtttctcccccatcaataaagtggttggaaggcagccacagtctgggctagaaatccagctggcacaatacttggaagacaatcctcagtgaggtctgggttcaatatctaactgctaaagaggttggctgtccgccttgtggtgttcagtcaatctccaattgatataatgctttgataacatatgagcagcatgggttaaatccagaaactgtaaaggacttagataaaagtcctaagacctaaagtttggtctccaaatgtcacgaagcttggaatatatttgggaatgagtttaatcctcaaatggtaagagttttggatgtcaggaatgaggtctgggttcaatctcttgtcattaaaatgcttggaagacgcttggggtctggtttcaatcgtcaaatrgtaaagagttcaaatgacaacaatggtttctaggttcaagtgaaagctgacaaacagcttgaaataaactgcaagatct

SEQ ID NO: 235226 - DNA, 398 bp, Homo sapiens
gaacagtatcaacttattctaattgtgagcatgtgagaatatggacagattatcaagtcacatgaacaacaaaatctagagactggacatacttgaacagaactcaacgctttgatgtcaggcctctgagaacagcttccccatarttccccaagggggaaaaacatgcaatggaaaggggcctatttggggttgggttaatactagggatgacatcttaagtattgagctatgaagaagctttaatgagttgtgatagaactcaagaagcaaaattggaagtcaaaattactgagaagttaaaatttaagggtttacttttgtggaaagattttttaaaaagtaagtctttaatgctattgcttaactcttcttcataaactctgttctttttaaac

SEQ ID NO: 235227 - DNA, 590 bp, Homo sapiens
ttagactatatagcagaaaatattaacctaacatagatcttgtcccagcagtaaatgacatttatatcatcataattatataaatactcttcattgcttttcagtatctggatactttctacagaaaactgtaaataatttggctgggattgcagaacaaaatgtaataacaccaatgataaagtaaaaataaacgtgttagtgaaaatggcaaaagtcttgaaagggtataggggacatagataaaaggacatcagtattaatattctcatcttacagagctgtaagagcatcaagaaatattgccaaaagaccaaaaagatatctgcactcccatgtttatcacagcactatttacagtagccatgatatggaatcagcctaagtgtccatcaacagatgaatggataaagaatatgtagcacacatacacaatggaatactactcagccayaaaaagaataaaatcctgtcatttgtgacaatgtggatgaacatggaggacagtacgtgaagtgaaataagccaggcacagaaagacaaatactgcatgattttactcatatgtggaatctaaaataagttgatct

SEQ ID NO: 235228 - DNA, 590 bp, Homo sapiens
ttagactatatagcagaaaatattaacctaacatagatcttgtcccagcagtaaatgacatttatatcatcataattatataaatactcttcattgcttttcagtatctggatactttctacagaaaactgtaaataatttggctgggattgcagaacaaaatgtaataacaccaatgataaagtaaaaataaacgtgttagtgaaaatggcaaaagtcttgaaagggtataggggacatagataaaaggacatcagtattaatattctcatcttacagagctgtaagagcatcaagaaatattgccaaaagaccaaaaagatatctgcactcccatgtttatcacagcactatttacagtagccatgatatggaatcagcctaagtgtccatcaacagatgaatggataaagaatatgtagcacacatacacaatggaatactactcagccataaaaagaataaaatcctgtcatttgtgacaatgtggatgaacatggaggacagtacgtgaagtgaaataagccaggcacagaaagacaaatactgcatgattttactyatatgtggaatctaaaataagttgatct

SEQ ID NO: 235229 - DNA, 501 bp, Homo sapiens
cagagctgtaagagcatcaagaaatattgccaaaagaccaaaaagatatctgcactcccatgtttatcacagcactatttacagtagccatgatatggaatcagcctaagtgtccatcaacagatgaatggataaagaatatgtagcacacatacacaatggaatactactcagccataaaaagaataaaatcctgtcatttgtgacaatgtggatgaacatggaggacagtacgtgaagtgaaataagccaggcacagaaagacaaatactgcatgattttactcatatgtggaatctaaaataagttgatctcaaagaagcagagggtagaatggtggataccagatgctgaggactttagttgggargtgggggtgaggaggtgttgattaaagaatacataattacagttacataggaggaataatttccaagagatctattgtggaacaaggcaactataggtaatgatgatacattgtattctgtaaaaatgtaa

SEQ ID NO: 235230 - DNA, 460 bp, Homo sapiens
cttctgcttgaaatccaaaccctttcagatgcactcatgacgtttagggtctgcgcctgcctaaatttgcagctaataagcagtgatacccccttgccctttaattacatctaactacatcaaagtacagtaaatttttaatgtaaattttggaagataccctactcttttatacctttacatctttttattttgtttcattttgttaagaataccagcctctcctyttgtttttctcctttctctagatcttctctgacatgttgaggcagggtttcttagggcctcctctgtccttgcatggcactgtatttttctgctatagcacttatcaaattgatgataacatttgtttatatatctgccagccatgataaaccacagagtagggtcaggaccccatttgttttattcattctatatcttcagaatctaggaacatagtaagtgtgttataaat

SEQ ID NO: 235231 - DNA, 587 bp, Homo sapiens
ttcttagggcctcctctgtccttgcatggcactgtatttttctgctatagcacttatcaaattgatgataacatttgtttatatatctgccagccatgataaaccacagagtagggtcaggaccccatttgttttattcattctatatcttcagaatctaggaacatagtaagtgtgttataaatgcttgttgaatgagtagtatctgtcttattcaacaactgattttaaggtcatctaacgtaaaaacagtatgcataattgtaattatgaagcattgaaaagcattgtataaataatgatttgaatggcttatgttgattttataaatcatgactaacttcagttttatgaaactataccaatgtctaagtttttaaaaaattttattgatacataaaaatcgtacgtatttgttgtacatatttatgacaatttttaaattatttctttgtgttgggaacattccaaatctcttctcrctatttggaatatacaataagccactgttaactattgtcacactactgtgctattgaacactagaacttattccttctatctaactgtgtttttgtacccattaa

SEQ ID NO: 235232 - DNA, 576 bp, Homo sapiens
tttgacaggattgactccaattttgaaagagtttctactgtgggtataatgccatcaaacagcattgaatgctacagagaagtcttccatgaaaggaagaatcacttaatgtggcaaacatccctgttgttttattttaagaaattgccacagccatcccagccttctagtaatcaccaccttgatcagtcagcaccatccatatcaaggcaagaccctctatcagcaaaaagattatgactcactgaaggctcagatgatcgttatcatttttagcaataaagtattttgaattaaggtatatacattgttcttttagacataatgctgttgcatacttaatagactatggtawagtgtaaacataactcttatatgtactgagaaaccaaataatttgtgtgactctctttattgtaatattcactttattgcagtggtctggaactgaacctgcaatacctctgtggtatgcctgtagagagccaaagatcacaagacacaaaaaagaaatcagtagcatgaaagaaaaaaaccaagataaattaattaaacaattgacccaagaagaattat

SEQ ID NO: 235233 - DNA, 576 bp, Homo sapiens
tttgacaggattgactccaattttgaaagagtttctactgtgggtataatgccatcaaacagcattgaatgctacagagaagtcttccatgaaaggaagaatcacttaatgtggcaaacatccctgttgttttattttaagaaattgccacagccatcccagccttctagtaatcaccaccttgatcagtcagcaccatccatatcaaggcaagaccctctatcagcaaaaagattatgactcactgaaggctcagatgatcgttatcatttttagcaataaagtattttgaattaaggtatatacattgttcttttagacataatgctgttgcatacttaatagactatggtatagtgtaaacataactcttatatgtactgagaaaccaaataatttgtgtgactctctttattgtaatattcactttattgcagtggtctggaactgaacctgcaatacctctgtggtatgcctgtagagagccaaagatcacaagacacaaaaaagaaatcagtagcatgaaagawaaaaaccaagataaattaattaaacaattgacccaagaagaattat

SEQ ID NO: 235234 - DNA, 490 bp, Homo sapiens
tttctatttttattgtactgcagttcaagagtatgcctggtattattttgatttttttaaatttattgagacttgctctatgactcagcatgtagtcaatcttagaatatgttccatgagcagatgagaaaaatgtatatgctgtggttgttgggtggaatgttctgyagatgtctattaggtccaattggtcaagaattgcatgtaagtctagactttccttgttagttagtttcctgcctcaatgatctaacactgtcagtggagtgttaaagtcccctgctattactgtgtggctgtctaagtcttttcataggtcaagaagaacttgttttataaatctgggtgggtgctccaatttggctgcatatatattaggatagttagggcttcttgttgaattgaatcctttatcattatgcaatactcctttttgtcctttctgattgttgacttaaagtctgttttatctgatacaagaatagctact

SEQ ID NO: 235235 - DNA, 561 bp, Homo sapiens
attatgcaatactcctttttgtcctttctgattgttgacttaaagtctgttttatctgatacaagaatagctactcctgttcttttttgctttctgtttgcatgttagatctttattcatccctttactttgagcctgtggatgttattacatgtgagattggtttcttgaagacagcagacagttgggtctagtcattttatccagcttgtcactctatgccttttaagtggggcatttagaccattcacattcagggttagtatttatatgtgagattttgatcctgtcatcatgttattagctttttgttttgtaawtttgatcgtgtaattgctttatattgtctgtgggctatgtgcttgagtgacttttgtggtagcaggtatcaaccttttgttcccatgtttagcactcccttaaggacttcttataaggctggtctggtaataaccaattcccttactgtttggttgtctgagaaggattgtatcctcctttgcttatgaagctgagtttggtgggatatgaaattgttggttggaatttcttttctttgag

SEQ ID NO: 235236 - DNA, 560 bp, Homo sapiens
gtaggcatgcttcattctgttttattcttttctttcttttgtatcctctgactgtatgttttcaaatagcatgtcttcaagtttactaattctttcttgatcaattttgctattaagagactgatacagttttcagcatatcaattgcctttttcaactatagaatttctgcttctttttcattatttcgagctctttgttaaatttatctgataaaattctgaattctttctctgtgttaccttgaatttctttcgagtttgcttaaaacagctgttttgaatactctgtctggaaggtcatatatctgtttctccaggattgatctctggtgcctcatttagttcatttggtgaagtaagattttcctggatggtgttgatgctcgtagatgttcttcaatgtctgggcattaaakaattgggtatttattatagtcttcacagtctgggcttatttgcgcctgtccttcttgagaatgctttccaggtattcaaagggacttgggctccaagcctaacactgtggtttttgcagactcttggagctaccaccttggt

SEQ ID NO: 235237 - DNA, 553 bp, Homo sapiens
acatgctggcttcttgtcatcattgggccctaactcaaaagtgacactttaacacctcatctcacagcagcagttttttattattcagacaaaagtagttctccatacattatcaattacattaacctgttttcttatcttcatgtgacttatcactatcttaatrtatgttgtttaagtattgcctgttacttccctcgtcccacactcttctgttcctacctatctggaatgtaggtccatatagccagaccttgtctgttctgatgacttccataatccctttgtctagaacaatagcaggtgctcagtaatattcgttgaatggatggatacatttatatgtacaaagaactagagatgaatagcagcagcaaagaaatcagttgttggaagtgatgttatggataaccaaaaaatttatttaattcaatagccagttgattttatgatagcaaagtgcctatgaccccaaaaaagttaacacctaaagtgctgtctgttgtaacagtagcagtaactggttatagctacctaaagccaagaacctgaa

SEQ ID NO: 235238 - DNA, 553 bp, Homo sapiens
acatgctggcttcttgtcatcattgggccctaactcaaaagtgacactttaacacctcatctcacagcagcagttttttattattcagacaaaagtagttctccatacattatcaattacattaacctgttttcttatcttcatgtgacttatcactatcttaatatatgttgtttaagtattgcctgttacttccctcrtcccacactcttctgttcctacctatctggaatgtaggtccatatagccagaccttgtctgttctgatgacttccataatccctttgtctagaacaatagcaggtgctcagtaatattcgttgaatggatggatacatttatatgtacaaagaactagagatgaatagcagcagcaaagaaatcagttgttggaagtgatgttatggataaccaaaaaatttatttaattcaatagccagttgattttatgatagcaaagtgcctatgaccccaaaaaagttaacacctaaagtgctgtctgttgtaacagtagcagtaactggttatagctacctaaagccaagaacctgaa

SEQ ID NO: 235239 - DNA, 577 bp, Homo sapiens
gccattgtcactttatacatgttgaaaaataacgttgataataagtggaaaacttgaactagaaatcaagtaacagaaaaaggaattcaataaaatgagtatggaattatacatcagaaaactttgactcatggctctgtttctctctagctgtggwatgtcaggcaaatcttatgttctctatagacctttattcaaacattcactcagtagacaatataagaaaaaggtatgaaattattttgaaaagaaataagtgctataatatagagggactaaaggagttgttcagttaagtagaagtgtctctgcaacacaactgcgtttgttttatagagatatttttatgtgaggcaattgccgtttaagaggtattttggtcaaatatttgaaacttacatataaggtaaacaaacccttatttggaaaatagttccttataaggaaaaagtccacctatttttccttctttttcttttatagcagatgtgctaaacatatagtctgtactcactgcttctactttctcagcgcattcccattcctcaacattaggcagtctggctaccacttccat

SEQ ID NO: 235240 - DNA, 583 bp, Homo sapiens
ggtgccttgatttctctgaggaccaacatgactcccttccatctagaagggccaggcagctgtccctcggtgcttattaggtatgcatctctccacagcctcttctctggctctggagcttcagatgtgtgtgaaataaaagcagtgagctgagaacatcttgtcatgttgatctgcagctgtctcaggtaccctttacagggacattctgcagaaagcaagccaagactgcattcaggggtattttagttcacagtggccttaaagacatgcagctcaggagtttcccatgtatccatcatgtatcatcacaattccagcccagggcattcagaagaatggacggggttcagagtggatacgaagagcacaggaagattaggttcttctacttgctctgccactagctggctatgtttcctggacctgctcctcatttgtaaaatgatctgtaagtcatttcaagtcttgtgaacttggtttagagtcacatacatgccctgattatcaccacagaggaaaaatrtactggctgctgggccaagggggacaggcagggactgtcaccgaagattctgccaca

SEQ ID NO: 235241 - DNA, 415 bp, Homo sapiens
aatcctgcacatctgtgatggggctggtctgagtttctctaaactcaattaaatttagcaagcatttgagtgcttgctacagtgtttctcagcctttggagtgtagcctttggcccagccttaaaagactgtgattcagaataaccaggttttttttgttttgtttttgagacagagtctcactctgttgcccaggctggaggtgcagtggcgtgatcaccgctcactgaaacctctgcctcctgagtagctgggattacaggtgcccaccaccatgccaggctaatttttgtatttttagtagatatggagtttcaccatgttggccaggtgcgaatttctgacctcaagtgatccacccaccttggcctcccyaaacagttgggattacaggcataagccaccgcgcccggcc

SEQ ID NO: 235242 - DNA, 563 bp, Homo sapiens
ttgacttcctatgttctttgatgcaagtcatttgtagtccaggaatacttggatttggtttgaaacccccagaacaaacttctctcccagagagtagttaccattccttgctcctgccccaggcacactagctttgcaagttctcttagaatgaatactctattcctgctctatttcaaatccataargcatgaaaaacttcactgtggcttaaagatggagccagctcaacaagggagaagaaagaggaagaaaagcaaaacagccctagtatgaggccaaactccacactgccccacccattctctctatatatcaaccctcgtgtgagaaggaggcagggaggaggctctggctttttcctgataacacgtactatgatgagaaaaagatcccttcattgtgggtccacttagtgctcattcaaacatgccacaaagtggaagtcattaaagaatctgcataagccttggggcaacctttcccagtcctcctgcacacagcctcacacatgtgggcacgcggtaacgtcagccttggcttctcttggctgtccaaattaa

SEQ ID NO: 235243 - DNA, 569 bp, Homo sapiens
tcccccacttaagtcacaatattgtcagaggcagttgtcaccgaacccccgcagcatggcaaatctcatgcttctcgtagttgagtgctcctgctccccaggggagctcccagggttttcrtccttaccccagagaatccggaaccatctcaatcagcgagtgggctgaactggagcccagcgctcaatggcactcgtgttgtttgctgcatggggacacatacccagaaagagccaggactaaaggactaatgtgttggccacatgggtgtgtgaggcaaggaaagaaaaactaggaaatagaagcaaatctggggccagagagaggagcatgcacggccatctcagcctggaactgccaggcaggtatctttccagatcacctacggttttgattttcactgagtgagatggcttggattagggaccctcggtaatgcatctccactgggcactgggctaagaggaatcgtaaagcagggcatgctgggtggacaacttagaacacgtaaagagggtgaggggcagtagcttatgcctgtaatcacaacactttgggagatagagat

SEQ ID NO: 235244 - DNA, 390 bp, Homo sapiens
cttgcctttctctggggaggacacagtttcatttcctctccagccacagtctgacccagactctcctcgctgggggaaatgaaccagtagaaattgaggaagcagcacaggagtaaaggcttctgaaaaggaatggaatccagttatcctgggagttcctgggtgaaaacagccttgcaggaagcacacactggaccataagctccgaggatgaagcttgtgtgtgttctggggagccagtgcccagcgctgtgcctggcacacagctggcatgggttctgagcatgcagagtacagaacctaccctcatcagccagcgtgactctggcaggtgcctccctgccyccagcctcattctctaacccagggagtatgtatatatcctgtcta

SEQ ID NO: 235245 - DNA, 592 bp, Homo sapiens
  misc_feature (1)...(592): n = A,T,C or G
aagcttcaggctattaggaaggggagtttggccgggtatggtgggtcacgcctgtaatctcagctctttgggaagccgaggtgggcaaactgcttgacctcagaatttttatacnnnnnnnnnnnnnnnnnnnnnnnnnnnnnnnnnnnnnnnnnnnnnnnnnnnnnnnnnnnnnnnnnnnnnnnnnnnnnnnnnnnnnnnnnnnnnnnnnnnnctaaggtgggagtgtcgcccatgcctggaaggcaaaggttgcagtgagcgaaagatcatagncattgcacttaagcctgggatggagaccccatctcagaaataaatcataccgacaaacaaagaagatggtgagtttaggggaagggaagagaccacttttgaaaagcacagagtgggcaaggctctcctgaactagaaatgaaaaaagcmccgtgagtcccaggagcaagcagtcagatgcattcccacaccctgagggggacggggtggggtaaacaggaggaagggacattgggcagaggctgctggccttggcaaagaagtccatgtcccatggcacagaactggagaggcactgaggaaacttgcagggatc

SEQ ID NO: 235246 - DNA, 551 bp, Homo sapiens
aattatcaatacccatagaactatattccaaggtgaataaattttactgtatataatttgatcaaaactcaacraggctatgaggaattccaacattgaattaaaactataatgaatgaattactggtgaaaagcagaaccaactctcgaggtagaaaagaaagaatgcaatgttggaaaacaatattttgactgaatactaaagacaaaaagctaaagactaaaataattgaagcaaaaaagctaaagacaaaaagaatgaagctaaatacaaaaagaaatatgtgcaaacactatttgctaatcagtaaaattagttttgaaactactctagcataaacttgggttgagcaggtgagtaacggtggaagtcaccaagcttagagtcaattcacagagaggaaggtgatccctagatgaatcctgtggttttggattgaaataggagaaatcagtacaaactcatagttaaaaattatatattacatataataatacaccttacatattatatgtaaataatgtattttacctataagcctcagcaaata

SEQ ID NO: 235247 - DNA, 537 bp, Homo sapiens
agacaagccataaactaggagaagatattttaaatcaaatttttgtttaagagatgcagtctgtgttctccaggctggacttgaactcctggcctcaagccatcctcttaccacagcctcctgaatagctgggactacaagtatgtgccactgtgcccagctgcaaatcacatttttgacaaagacttgtatccataataaacttttaaaagcctccaaatttaacaatgaggaaacaaccaaataacaaaatgggtaaaagatgtgaataggcacttcacctagaagatatgaaaatagcaaataaaggaaatgcagattaggcagatgaaaattaaaaccaaaataacaattayaacaaatgtaccactctggtatgtgatgttgctaacgagggaggttgtatgtatatggtggtaggaggtatttgtgaaatctctgtactttctgcccaattttgttgtgatcctaaacatcatctataaataaaattaaagtgagataccactgtacacttaaagcggaaataccagttgt

SEQ ID NO: 235248 - DNA, 542 bp, Homo sapiens
tcctgctgtcagatgcaagacaaacctgggcacttatgaaaaataaataatgatgggaagcaggatcgtttatttttaaagcactggctcactgactgctgatttggtaataatgacctattatccttgtcagagtratagactgtttctggagcttcatttctggtgtgtgagcaactggcatagtagagatgattatactgtttgataaatgtgcataatcattgaagacactggttgacaatactatcattaaattgtcaccagcttggtaaagagacaaacatctctgccatggcaacctatcagagatgttaataactgcaaaaacctccaagcacaatattaatgtagaaaactgaagacatacacacatacacacatccacctcaaaattcagacactggaagcaaagtgctgccagggatgatttggaggggaatgaaatctggccctataggtcaggaatcttgggctctagtctcatttctctgagcctcagtttccttaatttaaaaaatcatttctgtcccctaagttat

SEQ ID NO: 235249 - DNA, 622 bp, Homo sapiens
acttctttgttcccatatagtttcaggcttttttaaaaatggagtgctagtggaagtttgtaagtgtgggaagaaaccagtcctttcgtgagttaattcctctctcccaggttttaaaacccaaagacactgtctcaaaagatatttacaactataaacaatgtcttttaatcacttggcttctgttttgtgctcaaaagtaaacaagagtgaaccacttggaggatgaggagaaagttcacaaagcctttagaaggtgggtaagtgtcttcaccaagagtcacaagctgtggatatgacgttgggcagctgatcaaaatttcacatgggtctaaggagttgaataatattaacatctactgtgctaaggagcacttgaattacagtaaggaacatatgcattatcccattgtcccacacttayaccagttttcatttgaggaaattaaaacttaagaaatggcactatttgcaccgttacctatggtggactcactgtacatctgactcactctatacttgagttgtttaccactattgtatgtcctttcccttctccacatcagaaccataacaacttggaaagttttctatgtgacgtagtcatggcaggttcattttc

SEQ ID NO: 235250 - DNA, 510 bp, Homo sapiens
cctgtctgtacaaaaaatcagaaaataaaaacaagctgggtgtggtggcacatgcctgtagtcccagctacttgggagactgagktgggagaatccctggaacccaggagttcaaggctgcagtgagctatgatcgcacctttacactccaggctgggagagagagagaccccgtcagttaagaaaaaaaaaagatagttacttaatttttgtgttgatagtcaatcttatgaggcaagtactattattatccctagtttatagatgaggtaaatgaagctttgagaggtttagtaaacttgtccagagtgtcatacccaggtagtgggaaagccatggtccaaagccaggtcttgtggattctgtaagtgacctcactgtttgctgaagtgacctcttaatcactttattctttctccattctccctccccagtatgtacataggtatatataatttgtggtcacattgattacagtttggtatgtatgccctcccaaatgaaagtgtg

SEQ ID NO: 235251 - DNA, 492 bp, Homo sapiens
gaaaaaaaaaagatagttacttaatttttgtgttgatagtcaatcttatgaggcaagtactattattatccctagtttatagatgaggtaaatgaagctttgagaggtttagtaaacttgtccagagtgtcatacccaggtagtgggaaagccatggtccaaagccaggtcttgtggattctgtaagtgacctcactgtttgctgaagtgacctcttaatcactttattctttctccattctccctccccagtatgtacataggtatatataatttgtggtcacattgattacagtttggtatgtatgccctcccaaatgaaagtgtgaggttcaagatagtaaaaatggcatcttcgtaacctctgcaaaagaatawtttttttaaaattgactcaaatacagatatgcaaacacctgtcagaaaatttacttaggttgttaatgaatgagggaaccaagaaagttgttgtaacagatttgtagaaccatg

SEQ ID NO: 235252 - DNA, 494 bp, Homo sapiens
ttttttttttaaactagtttcaacagctctgaggcttaataaaaacttgcacaaaaatgtaaatcaactagagaagcttatattcttgatttgtggtaaagaagaaaaaaataaaaaaatctgcaaaaatgcattttcttatttgcatatattttgtcccttctacagggacagaaattgaataaaaccaatcttcaaagaaaaatagaataaaaatatgyagacccaaataatgcaggagccaataaattcaacagagtttcctctttgcagagttagtgtttccacacagacaaagcttctaagtgtaccttttacattaaataacaaaaaaagaaaaaaaaagaagaccaagatggtggtctgcaaaattgcagcagttttgtccatactgatattgaaataatagtctaaccatgctaggatagctacttaaacatctagtttccagtaagctatgaaagtctaaaagggaaaaagacatgggaaggaaa

SEQ ID NO: 235253 - DNA, 587 bp, Homo sapiens
aagcttctgacctacaaattttagtctctgaaacttaatagacttatcttccccctttgaatcaggattcagctaagagagcaaggtatgatagagtcaggtaattcaatctaggaattaatattaaattggagcattactttcaaaagtgttagaagaggaatgtggatttagcaaccraaagatgctgcaccctgccatggggctggagtgatgaaaggaagaggtgctgctcagctggaggccaggagcaccctgacatccggtccaatggtgggctgtccagctggatccattgaggaaagggcccttcagggatcgctggaccctagatggcagaggtcaatctgccctttgatgcagaggggagcagggcaatgaggaatggggctgaatgcaaagagcaaaggatcagggtagccattgagttttaaaacatcaatactgaaggggcagtgatgcaaatgaaccaaaggttagaccagaaactgggctgattctattattttctcccagtttgaatgcttttgcaaattcaactgaaacagtgctttgtggccccaaatacctactgcatttttggataa

SEQ ID NO: 235254 - DNA, 371 bp, Homo sapiens
ccctcaatagctctttccatagctgcctaagaaatatttattgattgaatgactgttcccagggaattcagcccattcactaactcgtgatttcaaactcgtgtcttccaagtggtcactagtatttttactgtgtatatcacctgttaggagcctggggaggcaggcagaaagcccacaacaaacaagccacataacaaagttcattcrcctaaatctcagaagccaatggccttcactgggactctttccaccaatcacaggtcagaggaacaagtccttagtccaggtcagcctgttctaacagcccagcatcagagagaagagccccaggttacaaggagcctgtccatccctgaacctctgaagat

SEQ ID NO: 235255 - DNA, 574 bp, Homo sapiens
cggtgctcactccagttcctgctcctgcccatcgacatgctccccctcctgtatagggttggatgccaatggcagctgaatagacgagccacacccctgtctcacatcctctgcaaggggggtaagggaactctcccattttaccagtgagttcttgagtgagttacaagctgcattttaagtgcccataatgttgtcaatgatgataatctaataattaatttccatttattgagtaattactctctgtgggagactgttattacaaaatgttgccataagggtggtatataaaatttccacttctataaaattgataggtgataaaagatgaacctagccatcatatttacatctttcaaaccacaaagtccttttcactaattaacactgcctctgcgaagtygtcctgcctaactgcattctcagccttctcatttgtaaaataaagaccttatctagatcatctcccatgtcctttctagccctgacaatctttgattctctgtgaccttaggttagttgtatagagtaacgtgatgataaatgttatgggtcaatttggctaacctaa

SEQ ID NO: 235256 - DNA, 511 bp, Homo sapiens
aaaagcaattttgcctcagatcttaactgagattccaatatgccaaccctacagatgttagacttgccagcagcaattcctttaaatgtagatatatatacatactatttgttctgtttctccagagaaccctgactaatgtaagtatgaagtaaaatcatttatagattttgaatatggtgttttgcaatcattaggcctatattagagcactaaacacaatcaaaagtaggtatattgaagcaacctcattaagawggtggaacaggaagccccagagcctcctttttcccataaaaacacttattcaacaatacttgacaaattttctctatgtaaaatccagaaatgagctaagaggctcttgaaactcaggtgagtgttaaaccagcccatattgaaggaagaactaaaaatggtggcatcatctcactatagttccttcccctttgcacggtgaaactcctatctcctggcttcttcctgggtagagaaaggaaagactgaacca

SEQ ID NO: 235257 - DNA, 577 bp, Homo sapiens
ccacaaaaatctattaaataaattaattcagtaagattacaagattcaaaatcaacgtatataaatcagctgtgttactatacactaacaatgtccaactcgaraaggaaattaagaaaacaataccatttataaaagcatcaaagagaataaaatatttagaaacaagcttaatgaaggagaggaaaaacctatatactgaaaactataaaacattgctgaaagaacttaaaaagatacaaataaattggaagacatcccgtgttcatgggttaaaagacaatattgttaaaatgtccatactacccaaaggtatctacagattcagtgcaatctgtatcaaaatcccactggcattttttacggaagtagaaacaataatcctaagatttatatgaaaccacaaagaatcctgaagagccaaaacaatcttgaggaaaaaagaaacatagctaaaggcctcacactaccttgatttcaaagcattttgtgagttacagaaatttaaatgatatagtactagcacagagacagacatatagaccaatggaacagaatagagcacagaaataaatcc

SEQ ID NO: 235258 - DNA, 565 bp, Homo sapiens
ttgctccctacttgagacacaagaatgtcagggtggagagagagaatgaaactgggaccttgattatttttctgagccacagagttaactaaccctgaagtctgatccgtgtccatgcttcttgtaatgtgaaatagtaatttttcatattgtgtgtgccagtttaaatcggtttctttttcttgcagctgaaggcatcctaactgatatagaatgggtcttggtagctttaataggctacgataaaycagtttgcaaaattccatgtagataggagtagaaacttatgatactcgttataacactggcacttcccttgtacacactattagatgttagcctagcagcatcttagagcttgaagcagcagggatagaaaaatgactacctgttaaaactcattttcctaagacaatgacataaaggattctagacactattcttgaaaaccttatattcaggtgctcatagtccacatgtcctaatttgcaactatgtatggagaagagctgtacagatgcaaggacacatgggtgaagactactccacagaaaataagagcagc

SEQ ID NO: 235259 - DNA, 649 bp, Homo sapiens
tgttaatgttgggagaaatgcaggttacgtgataagtgataatagattacatttcactacaaaacttttaacagtcaactttgttttcccctaatagtacatgctactgcaggattttaaaaaactaataccaactatttaaatgaaaggcttttttctgcataatttgttttgaaatttgtgctgaatttgaacttttcattagatttgagatgtagtcatcttgatagatatgtcatatttttaagagaatgagtgtttccctccatttatggaactattttttcctgaaaccataatagtaagatcaagtttaattttaactttttaaagaatcctgtagtgtttagtgaggtttaccttcctttagatgtgtactgagcacatactttgatttaaaacyttgatgtggaaggctttggtatgctttggtttaaattatttaaatatatctttgtgtctttctcaagaagaagaagtgtaaattgctgttttgctgcatcagagggttgagatgtgggagaattgtcaaaataataacagcatttgttttgttaaagacgactgagggaagctttgctgtgttgggactattttattcttgtgagaacaacacaattcaggcggagaaaatagatctattctaagt

SEQ ID NO: 235260 - DNA, 488 bp, Homo sapiens
ggaaatcttaaaaacagagtctttctatacaaccttgattttccccagaacttctcatgaagactgctgccacagcttttagacagtagaataataaatctaccttttgggtacatagatatcctagtaaagattcagataaatggttttgaaaaatagtttctttttcctttctttttttctaacttttattttaagttcaggggtacaagtgcagggtttgttacataggtaaacttgtgtcatggaggtttgttgtacagattatttcatcacccatctcttaagcctagtacccattagttatttttcctgatcctctccctcctgccaccctccacccttccaagaggccccagtgcctgtcgttccccactatgtgtttgtgcattctcttccacccagcaatcccattactggaygtatacccaaagaaatataaatcattctgttataaaaacacatgaacaggtagtttattgcagcac

SEQ ID NO: 235261 - DNA, 488 bp, Homo sapiens
ggaaatcttaaaaacagagtctttctatacaaccttgattttccccagaacttctcatgaagactgctgccacagcttttagacagtagaataataaatctaccttttgggtacatagatatcctagtaaagattcagataaatggttttgaaaaatagtttctttttcctttctttttttctaacttttattttaagttcaggggtacaagtgcagggtttgttacataggtaaacttgtgtcatggaggtttgttgtacagattatttcatcacccatctcttaagcctagtacccattagttatttttcctgatcctctccctcctgccaccctccacccttccaagaggccccagtgcctgtcgttccccactatgtgtttgtgcattctcttccacccagcaatcccattactggatgtatacccaaagaaatataaatcattctgttataaaracacatgaacaggtagtttattgcagcac

SEQ ID NO: 235262 - DNA, 600 bp, Homo sapiens
gcagtgacttctatccagaagacctaaggagctaggacaagactctgctttgcatcacaggggtaattagaatgttgtcgattgagggcaacaaccatctctgagtattctccaagaytgcttaggggttattaagcatcttaaatccttattttgcacttagagcatctgtagtgcagaaattctagactcagtgtgagtagaaacatagaagcttttgtggtccacttcatgcttggccaactctagatggtaatagaaagggggatatagtggttttcctctcagtagttcaattaaatgcttattctcccccttaaaggtactatttattgagcatctactatgggtcaggcaccaaatgcttgagatacgtcagtaaacaaaacaagagcatacatggtaaaggagtatgttagaaggtaatacataaccaccaattaaataaaatagggaggatcaggaacattgcggaggggaatggttgtggttttaaattgggtgatattttagcaaacttgaaggaaatgaatgagtgagccaagcagagagctggtggaagtacactcccttcagtaaaagcctgcgtggcatgttcag

SEQ ID NO: 235263 - DNA, 600 bp, Homo sapiens
gcagtgacttctatccagaagacctaaggagctaggacaagactctgctttgcatcacaggggtaattagaatgttgtcgattgagggcaacaaccatctctgagtattctccaagattgcttaggggttattaagcatcttaaatccttattttgcacttagagcatctgtagtgcagaaattctagactcagtgtgagtagaaacatagaagcttttgtggtccacttcatgcttggccaactctagatggtaatagaaagggggatatagtggttttcctctcagtagttcaattaaatgcttattctccyccttaaaggtactatttattgagcatctactatgggtcaggcaccaaatgcttgagatacgtcagtaaacaaaacaagagcatacatggtaaaggagtatgttagaaggtaatacataaccaccaattaaataaaatagggaggatcaggaacattgcggaggggaatggttgtggttttaaattgggtgatattttagcaaacttgaaggaaatgaatgagtgagccaagcagagagctggtggaagtacactcccttcagtaaaagcctgcgtggcatgttcag

SEQ ID NO: 235264 - DNA, 463 bp, Homo sapiens
tagaaaatctttcacaaaaaagaaaggtgactgtgaaagaaatgatatgttgattgtcttatcattttactaagtatatgtgtatgaaaacatatgttgtacaccttaaatatatgtcctccccccatataaaatttctgttcccttcttcagagtcatttaagtggatatttaaaaaatagagttattaagcttttgaaacacttcaaatacgtcagcctatgcatattaaaattttaatgcagcaaatttactaatatttrcaaaaccagtttagatagagataatatatagatatatagtcagattctgaccatgtcctaagtgttcttagtatctattgatgaatagatttcattaatttaatgagatgatagtatactaaaacttgtctaagtaaatggttggcgtccttgaaacttcctgttgaatacaacatgagtaaaatgttcgtgtaaagtaa

SEQ ID NO: 235265 - DNA, 470 bp, Homo sapiens
gatacagcattggcatggatccaatagaaagaagggtggggccctttgctatgccaggctatatctcttcaattcactggacttcacctggcttcctcctttctgcaccatggcctgaaaattttccccagggggtaaactggagcaatcatagggctcaccagatttgttttccatttcccagggagcactgtctcatgctgcctgatgttcartatcttgagaaacattattatctgtattttatttagctctttttagtttttttcaggtggaaagataagttagttccctgttactccatcttaggtaaaagcagaagttacaccatgtctgttacctgtttgaggtgggtgacgttatatgtcagttatggacttttattgatatacttagagaataacttaaagatgaagggacatcagaaataagcatttctggagcctttattttatgccatattttttatg

SEQ ID NO: 235266 - DNA, 524 bp, Homo sapiens
ttcgcttcaatgacagcacatgcgtctgcagctacatgcatttgtgaacctgtaaattcttaactgtaggtgagaactacttccagacatactgtgttctgggtrggctacctctttttttctcatgtggatctactgtgaaatatgaatagtgatggatctgagcatagagttgaatgtctgtaggtgttttcatgtagaaagctgaaacaatttgctactgtttctgacatagaagccacgcagtttcttctctagtttcctacatctcaggttttcctctcactgcatgaggtattggaggagcaatgtgcaagaaatcagaagacctggtctctgatactttttctgccatttattagctatttcccactaaaaaagaaatcacttggcttattgcaacttcattctctctttgatgcaaagaagagagataatagtacccaactctctggttgctataaaaaccaaataagtcatgtggaagtaatttgaaaactataaaggacttttaatgatgctaa

SEQ ID NO: 235267 - DNA, 430 bp, Homo sapiens
tgcatctcttgttccagattgaaagactcagggaggtgaatgattggctgaacataggtcctaggactatgacttggatgctagcggatggatagaggatcacttctctttatcttccagagcaggagactacagytatagatactaccaatgccatgcagagtcggacatgcccccaaatagagaaagaggttgcatgctagacagtgaaaccaaagcaacaaaaaaaagcctcaaactcatacccaccacttcctgcataatctcaccccgcttcactccttagctcacctggcaccaccaacaaccccccaaccactcaccccccaccagcccccagccatgctgcagacttgcaagtcttatttcacttaattttttgtgccaagctcttttctacctcaatgccacccaactgagatacctggaa

SEQ ID NO: 235268 - DNA, 639 bp, Homo sapiens
gatgaaatggggatgccagtgccatgaagaattctaaactcttattttgattttgcatctcttgttccagattgaaagactcagggaggtgaatgattggctgaacataggtcctaggactatgacttggatgctagcggatggatagaggatcacttctctttatcttccagagcaggagactacagttatagatactaccaatgccatgcasagtcggacatgcccccaaatagagaaagaggttgcatgctagacagtgaaaccaaagcaacaaaaaaaagcctcaaactcatacccaccacttcctgcataatctcaccccgcttcactccttagctcacctggcaccaccaacaaccccccaaccactcaccccccaccagcccccagccatgctgcagacttgcaagtcttatttcacttaattttttgtgccaagctcttttctacctcaatgccacccaactgagatacctggaattctctaccattctctatgtttttcctttgactaacctttcttcaccttaaagtatcacctgcatggaaacttctgtggaaaatacttgtctgactaccaccattcttgtccaaatctagattagccccactcccacccattgtagactgtcatac

SEQ ID NO: 235269 - DNA, 430 bp, Homo sapiens
agaattctaaactcttattttgattttgcatctcttgttccagattgaaagactcagggaggtgaatgattggctgaacataggtcctaggactatgacttggatgctagcggatggatagaggatcacttctctttatcttccagagcaggagactacagttatagatactaccaatgccatgcagagtcggacatgcccccaaatagagaaagaggttgcatgctagacagtgaaaccaaagcaacaaaaaaaagcctmaaactcatacccaccacttcctgcataatctcaccccgcttcactccttagctcacctggcaccaccaacaaccccccaaccactcaccccccaccagcccccagccatgctgcagacttgcaagtcttatttcacttaattttttgtgccaagctcttttctacctca

SEQ ID NO: 235270 - DNA, 458 bp, Homo sapiens
catgtgatggtgtgctggcacacggagtttgcccatttttctttggcatatcaacaccccactttcagtggtgtacagctgtgtagacaggtttaaggaaatggccaaggaggtagggagaaactcaaaagagaaaaattgaagcatagcccaatagaagctgccttctcgctaacctattttgccttcacggtgmccttttgccaaaaaaaaaaaaaaaaaaaaaaaaaaaagggaagagacatgaggttggagaaaatggtgtggaaatggaatcaggacaggaattatgagaagccaaagaatagattctagacattttgcagggaaatggtagaaaattgaaagttgaatccattgaaggggaggagattggggaatgaaggaagatacattataaaggaagctggggaactatatgccgcgggattttctcacagaaagaaatcctgttttgc

SEQ ID NO: 235271 - DNA, 444 bp, Homo sapiens
acacaaggcacaggacaagtgtggtaaatactcccattaaaaatgaggaggaataggagacactagcagtaactggtccatagcaattctgaaatcccactgggtaaatgtcaccagatcccccaactgtgggagtgggaaaaagggagtgttggttccctaattaaaccttgcttctgatccttggaagtggttctttggtctatttttctacaaatttcttcttccaccttgtggtttcctagttgtgccccctgagatggttttcttttctcatcactcttcttggctacatttaaataaatagcccatgttagcagataaatgtctgtcttaacttacttatgcctattgaaagtgggaagcccaaagcyctttgtacattttgaacaatttcagccccttttagtccaagctggccacatgtttttcctgtacaatttc

SEQ ID NO: 235272 - DNA, 571 bp, Homo sapiens
gcaaacatttgttaggcatatttttatcttcctatcttatatctctatctctgtattgaaatatctatatatcttgctgcaggtgagaattatctttgaaataacagcattattgagaaatatttcatatactataaaattcactgtttaaattgtacaattcagtggttgtcyaaccatcaccactatctaacttcataaaatttttgtttttccaaaaacgaattctgtacccattggtagtcactccacactactcccttccttgggcctctgacaaatatttatctaatttctgtttctattgattagcctattctgaccatttcatataaatgaagatttacaatctatgggcttttgtgactagcttctgtcagttagcataatgtgcagggccaacagttttacaagtccttttgccgttacataaagcaggttgccatttttttagctttaaaaacaatttcctcaccatttctccagcctttgctgataatgtgcttatggcctctccatcctccaccctctgactggttctaaaatcaatgctgcacattttcaatcttgg

SEQ ID NO: 235273 - DNA, 538 bp, Homo sapiens
actccacactactcccttccttgggcctctgacaaatatttatctaatttctgtttctattgattagcctattctgaccatttcatataaatgaagatttacaatctatgggcttttgtgactagcttctgtcagttagcataatgtgcagggccaacagttttacaagtccttttgccrttacataaagcaggttgccatttttttagctttaaaaacaatttcctcaccatttctccagcctttgctgataatgtgcttatggcctctccatcctccaccctctgactggttctaaaatcaatgctgcacattttcaatcttggttatgtcagcattccatttctggtaccaatttcaggatcaggatcattctttattaccaaaatcatgttgtttattaaaaaacaaacttcagtggcatgcaataataatcatttagttttttttcatgagcctacaggtcagttgggtggtccttctgggtgtgattggctcaactatgtatctgatgttaacttcacatcagattgaattc

SEQ ID NO: 235274 - DNA, 442 bp, Homo sapiens
ccactctgtccttataaatgatcctcaactgtttcagagccgaggagcctattttctaaaatgtaaattactttataaactaccataaaattccaatttaattcacatgcatcagaataaaagggctgaggccggcaaggtggctcatgcctgtaatcccagcactttgggagggggaggtgggcagatcacttgaggaaaggagtttgagaccagcctggccaacatggagaaacctcatctctactaaaaatacaaaatttggtcaggcatgctggtgcacacctgtaatcccagctactcaggaagctgaggcaggagaattgcttgaacccagaaggccgagkgtgcagtgagccgagatcgtgcctcttgcctgggcaaaagagtgaggctctgtctcaaaaaaagaaaaaaaaaaagcaagaaaaggtagtggtct

SEQ ID NO: 235275 - DNA, 540 bp, Homo sapiens
gagaacatgtgttaacctccaactttaaaaaaattataatcccagaacacttttgtgttcttgctgttaattataaaaatgacagaagagtgttacaactcttgtgttgtttattatttttctatagtccacccaatgtctttgggggtgtgtgtagtatttaatacttattcctgtttttatttcgctcttggttctcctttgtctcatataagcccattccttatattctagctttcttatttctgtaagtaaaaaagaaaaaaaaaaatctcaggaagaggtaggaataataatctatttaacatactgaaaacattcttccaaggatcttrgggtatgttttcacaataaaaatggtaaaatttatccccagcaaagggacaatttacttagaatcatcaaatcagagttagtctttaaccttatattttaatcactgtgaagatttagttaaaagtgagtgttagccccaggaacagacacaggctttctggtcttcatttaaccaagaagaagttgaaattacataggtttttt

SEQ ID NO: 235276 - DNA, 471 bp, Homo sapiens
ctggatctttctccaaaactggaacccacccaaatccaatccatgatatatatgaaagaggccagatatttagatggacattaattctttctttttgttgatgtgtttgtgctgacagaagagtcagagaccaaaggcagaatactgaaagattgtgtttgggtatttttagcctgattaaaataaggaatgatttaaaactatttcaaatagctcttcccacagaattctgcaaatcttccagcctgctttctggaccagagaagcttggctaaaggagctggacatcrggcaacccctcccatttggattgagcctccaacattcagaggttgcaccccatcagtctaaacaacatttttttttgcgtgatagaaacacagaccacagattggaattgtctgtttgtacttagatgggaagtcctagcagttctcatcaacccttgaagacgttaaaaatcacgccaca

SEQ ID NO: 235277 - DNA, 567 bp, Homo sapiens
ttataggtgagataatggaggcccaggtggtaatttagccaaagtcactctgttaacatcataacctccctaaactgagagagcccttggggatcacctgacccaatcatttgccagcattggcttctctcacctgccatcagccacatggggtccaaactcctccacagctggaggctcacggaccaccaaatcttcccatctttctgatccttagaaaatatatccttaggccgagcgcagtggctcatgcctgtaatcctggcacttggggaggctgaggcaggtggataactgggggtcaggagtttgagaccagcctggccarcgtggtgaaattccatctctactaaagacacacaaattagccaggcatggtggcatgtgcctgtaaccccagctacttgggaggctgaagcaggagaatcacttgaacccaggaggcagaagttgcagtgagctgagattcagccactgcactgcagcctgggtgacagagcaaaaccctgtttcaaacaaacaaaccaaaaagtaaaacaaaacaaaacaaaaaacaacaaaaaactc

SEQ ID NO: 235278 - DNA, 560 bp, Homo sapiens
tataccatgtatgaattctgtttgccaccagggcttaccttcacctgcacagtcatctttctaccaccccaacatgcccaatttctttagtcttttttgcatggatcttatttccaaggcattgaatcatcttcactgtcctttctgaattatgctcgaactctccataattcattttagttaaactccaagcaaaacacagctccctaataagggcctgtctgacatcgagtttaagagagggattagtgtgtgcattttgcatgccatatacctatactttaatccctaacccatcgctatgaaatagcttgccctctatttcaaatggagaagctgaggcatgaagattaatggtgtatactgacatcacacaaatccagcaacaatttagcattctttgctctgatccaattttcattaaacaccaataytctgtctctactttttttcttgaagaaacaagagcaacatgttccttggaagattagaaggagaaagatgttggctttttgttttgtaagtacataaatggtgtttgaattttttatataggtaag

SEQ ID NO: 235279 - DNA, 438 bp, Homo sapiens
gtttattttatacagcaattactgatggactataagcatggacattatttgaaagacattattttctccmaaataagtctttgtagatgataatgttcaacaatgattttcatacactccaacccaatccatgtgactcgaaagtgctcaaagaaatccaatgacagatcaactagttgatgccaatcgatactctgacaaggatctcatcttttttgttttttatcctgtaataagcttctcagcctcagatgcatggcctatgactagcattatcccttcaaaatttagaaaccacgaaatcatctggttgtaaacttactgcctgggattgtcataggaaccttgttcaaatctctttgatttcctcgtgtctaatttgtttagctgtaaagcagggataccttctccaggggatagtatgggccttaatcacat

SEQ ID NO: 235280 - DNA, 411 bp, Homo sapiens
gtttattttatacagcaattactgatggactataagcatggacattatttgaaagacattattttctccaaaataagtctttgtagatgataatgttcaacaatgattttcatacactccaacccaatccatgtgactcgaaagtgctcaaagaaatccaatgacagatcaactagttgatgccaatygatactctgacaaggatctcatcttttttgttttttatcctgtaataagcttctcagcctcagatgcatggcctatgactagcattatcccttcaaaatttagaaaccacgaaatcatctggttgtaaacttactgcctgggattgtcataggaaccttgttcaaatctctttgatttcctcgtgtctaatttgtttagctgtaaagcagggataccttctcc

SEQ ID NO: 235281 - DNA, 571 bp, Homo sapiens
ttcctcagaaacacatggccaagatcctcagtagataatcagcattctgtctagaggcaattaaagatgatatagttggggctgtatttttatttatactgtgtaatgaggctccaaattaaaaaagttatatcctaatctccattaatgtaaggagttgcagtcttgtgagtgcagtggtccatattagatggcaaatttgtcatttttacactttcgttcagtgccaagattccgcatttcctgaggacaagtgctgatgcaaatagcaggagctctacccacctctcttttcgtcctactgtggaagtgggtttcatttgagcaataagacatgacagacagcgcatttgcgggcaattatgtcacaccttgggtggtatcagaaagcataaggtcaaaggatgggggctttaacttcctaagaaatgcaataatgaccctgaaatgcacagcttgggtaccttattacaattgtaggatggaatacattaaaatgaagaaaacaaggaacaaagatgaaagtgggacttggtcgatgggggtakgaaatcaatgtcaggcaatcata

SEQ ID NO: 235282 - DNA, 520 bp, Homo sapiens
ggattgttcttctaggctaccatgtgggtgtatttctacatcatgcactgttttcaaagaacccaaaagtagacgatgtcttgactaccgttcagctgctttctcccctgctatcattttctgtgggaactatgagacaggaattaagcctcacagacacttcttttacaacctcatggttttcctcaccctcatcctcccctgacccagagaagcaaaatcctacttctttttccaagcctaattctctcagagaggcttctccttgagcctctgagtttrcctccctcctcatagttcatctcgtacaaactatgactatcaattttaacccttctgtgccatttgccactgagacaccttatgtcacagccatctccctggtgaggctctaacctctaccaaggacagaaccttgtcacctttctatcttccaaggtgccaggaccacatttcccatcttgagatgtaatgtttctttgaatagtgatattgcttgatggaaggatacaagagctgt

SEQ ID NO: 235283 - DNA, 643 bp, Homo sapiens
acagtatgacttctttcaaaattggagtcagtcctctcaaaccctgctttatcaattaagcttctgtcatattttaaatcctttgttgtcattttgacagtgttcatagcatcttcaccaggagtagattccatctcaagaaaccacgttcttttcccgtccataagaaacaacttctcattagttaaagttttcttatgagattgcaggaattgagtcacatcttcagactccccttctaattctagttctcttactgtttccaccacatckgcagttatttcctccattgaagtctggaatccctcaaagtcatctgtgagggctggaatcatctttcaaactcctattcatgttgatactttgatctcccatgaatcacaaatgttcttaatggcatctagaatgatgaatcctttccagaaggttttcaatttactttgcccagatccatcagaggaatcactgtctatggtagctatagccttatgaaatatatttcttaaataagacttaaaagtcaaagttactccttgatcagtgggctgcagaatggatgttgtgttagcaggcatgaaaacaacattaatcttgtacatctccatcacagctcttgggtgatcaggtgcgttgtcaatgagca

SEQ ID NO: 235284 - DNA, 659 bp, Homo sapiens
tagcattttacccacagtatgacttctttcaaaattggagtcagtcctctcaaaccctgctttatcaattaagcttctgtcatattttaaatcctttgttgtcattttgacagtgttcatagcatcttcaccaggagtagattccatctcaagaaaccacgttcttttcccgtccataagaaacaacttctcattagttaaagttttcttatgagattgcaggaattgagtcacatcttcagactccccttctaattctagttctcttactgtttccaccacatcggcagttatttcctccattgaagtctggaatccctcaaagtcatctgtgagggctggaatcatctttcaaactcctattcatgttgatactttgatctcccatgaatcacaaatgttcttaatggcatctagaatgatgaatcctttccagaaggttttcaatttastttgcccagatccatcagaggaatcactgtctatggtagctatagccttatgaaatatatttcttaaataagacttaaaagtcaaagttactccttgatcagtgggctgcagaatggatgttgtgttagcaggcatgaaaacaacattaatcttgtacatctccatcacagctcttgggtgatcaggtgcgttgtcaatgagcaata

SEQ ID NO: 235285 - DNA, 477 bp, Homo sapiens
atgtagtctggcaagtattatatcaaagataaataccagttttagaataaagcattaatatactcttacatttcaacttaagaggcaaatattaacagtaggatttgtaaactatttattggaataaaaatcaatgaatttttaaaaattacaaaatgatttatgtatgttagatattttactgagtgaaaaaattcatgcttttttaaatgacttattgtttggagtagtgatacagtagatttaatttyccccctcattaattaaaatcatgttttagccaagaaagtgaacaaaattcttattggcaattcagttgtttcccgttttggagactgacacgctccagttctaagttaaataattgtcatggtaaagtaatttccttgaaaagaacagacattgattcagcccctgttactcacaaatcctatttgagtcaaattggaaaactattaagtttttgggaaaaaaatc

SEQ ID NO: 235286 - DNA, 477 bp, Homo sapiens
atgtagtctggcaagtattatatcaaagataaataccagttttagaataaagcattaatatactcttacatttcaacttaagaggcaaatattaacagtaggatttgtaaactatttattggaataaaaatcaatgaatttttaaaaattacaaaatgatttatgtatgttagatattttactgagtgaaaaaattcatgcttttttaaatgacttattgtttggagtagtgatacagtagatttaatttcccccctcattaattaaaatcatgttttagccaagaaagtgaacaaaattcttattggcaattcagttgtttcccgttttggagactgacackctccagttctaagttaaataattgtcatggtaaagtaatttccttgaaaagaacagacattgattcagcccctgttactcacaaatcctatttgagtcaaattggaaaactattaagtttttgggaaaaaaatc

SEQ ID NO: 235287 - DNA, 477 bp, Homo sapiens
atgtagtctggcaagtattatatcaaagataaataccagttttagaataaagcattaatatactcttacatttcaacttaagaggcaaatattaacagtaggatttgtaaactatttattggaataaaaatcaatgaatttttaaaaattacaaaatgatttatgtatgttagatattttactgagtgaaaaaattcatgcttttttaaatgacttattgtttggagtagtgatacagtagatttaatttcccccctcattaattaaaatcatgttttagccaagaaagtgaacaaaattcttattggcaattcagttgtttcccgttttggagactgacacgctccagttctaagttaaataattgtcatggtaaagtaatttccytgaaaagaacagacattgattcagcccctgttactcacaaatcctatttgagtcaaattggaaaactattaagtttttgggaaaaaaatc

SEQ ID NO: 235288 - DNA, 544 bp, Homo sapiens
tttaatttattatttaggaaaaatttttcctaagacccaggttttatacagtmctaaataaatagtgtgaggaataattagtaatgccatagagtatataattttacttctagttctacacagattacaagtaaattttttttgggcaagtgattttggaattatctatgttttgttttccttttcctttagagtgataattcactatttatgattgaatgattatcatattaaagaggtgagaaaataaaaataagtctgatgtgcacaaagccatactgctcaaattgtttgataatatctgttaattaaattattatggcatcggtagaagaatgatgttttgtttatatgtggttagaattggtcttttttaaaggaaataacaagagagatggaaatggaatgggtataaatagtaaaaggttctatcactataattcccttttgctataaatagttaaagcttctatcactataatttccataagaagatatatgtgtttacctgttaattttatcagggcaaattaaaacatggata

SEQ ID NO: 235289 - DNA, 497 bp, Homo sapiens
agaaaaatgtatataattcataaagttaggttcaaggatttaattcatttgtaaagttggcttcaaatakagagtattactataatctagttgcctctaaacctcagtagccagctttttattgtgacagggaacctctattgaggtttgaggtaatgagggtaaaagtgtaatttcccagagaagaagcttgtgatgttgatgacgttagggatgtaaacaggattatgagggggaaaaaaaaaaaaacagacaacaaagcttgcctccagagagatgaaaactaccacttgggctctaagtcagtgtcaaaatattttttggagttagcctgactctggagaggtcagtaaaataaacagttgcactgagaggccagattagcaagtatgggtttctaaatgataaactgcttttaggctagaatcagggctgaatcagccttcccaccacttatttgtttctagggtgtttgaaaggcctagtactgagttcac

SEQ ID NO: 235290 - DNA, 497 bp, Homo sapiens
agaaaaatgtatataattcataaagttaggttcaaggatttaattcatttgtaaagttggcttcaaatagagagtattactataatctagttgcctctaaacctcagtagccagctttttattgtgacagggaacctctattgaggtttgaggtaatgagggtaaaagtgtaatttcccagagaagaagcttgtgatgttgatgacgttagggatgtaaacaggattatgagggggaaaaaaaaaaaaacagacaacaaarcttgcctccagagagatgaaaactaccacttgggctctaagtcagtgtcaaaatattttttggagttagcctgactctggagaggtcagtaaaataaacagttgcactgagaggccagattagcaagtatgggtttctaaatgataaactgcttttaggctagaatcagggctgaatcagccttcccaccacttatttgtttctagggtgtttgaaaggcctagtactgagttcac

SEQ ID NO: 235291 - DNA, 497 bp, Homo sapiens
agaaaaatgtatataattcataaagttaggttcaaggatttaattcatttgtaaagttggcttcaaatagagagtattactataatctagttgcctctaaacctcagtagccagctttttattgtgacagggaacctctattgaggtttgaggtaatgagggtaaaagtgtaatttcccagagaagaagcttgtgatgttgatgacgttagggatgtaaacaggattatgagggggaaaaaaaaaaaaacagacaacaaagcttgcctccagagagatgraaactaccacttgggctctaagtcagtgtcaaaatattttttggagttagcctgactctggagaggtcagtaaaataaacagttgcactgagaggccagattagcaagtatgggtttctaaatgataaactgcttttaggctagaatcagggctgaatcagccttcccaccacttatttgtttctagggtgtttgaaaggcctagtactgagttcac

SEQ ID NO: 235292 - DNA, 672 bp, Homo sapiens
gagaaaaactagtcttttagcaacactattttgtatggttaaatatgtcagtaaatttctttaccattccaacaggtttaatacaaacttaaatatatataaccattctagtattgctyagagttccttaactttctcctgcttcctaatatgaaaataatgctggcacctaaagaaagttgcaaggataaattttcctttatcaatgttttcccttgaacttattaaaaaagaaatagtatccataaatataaatttgctatatagtcagttaccaattgagagaaaaagaaagtcagaatgttaaaaatgcattgttctgatatgaaaagcacaagaagatcaacatggcataacaaattacaaccataataactgtagcatacatttcaacactgatggggacaggacgggagggggaaaggactgaaaaccttgcagatgctttgccttgaaaacagtgaggggtaaattagtaacagcaagtttaggaaagagaaagaacttgtaggaactattggagggaatgagtctctttggggggtcctagtagggagaatgtcaaattaaatccttcccagctggttgctcaggaaaagattctcctgtttagcagttaagcacacacaaaaaagtcatgcaacggccttccctatagtggtgagatcacat

SEQ ID NO: 235293 - DNA, 672 bp, Homo sapiens
gagaaaaactagtcttttagcaacactattttgtatggttaaatatgtcagtaaatttctttaccattccaacaggtttaatacaaacttaaatatatataaccattctagtattgctcagagttccttaactttctcctgcttcctaatatgaaaataatgctggcacctaaagaaagttgmaaggataaattttcctttatcaatgttttcccttgaacttattaaaaaagaaatagtatccataaatataaatttgctatatagtcagttaccaattgagagaaaaagaaagtcagaatgttaaaaatgcattgttctgatatgaaaagcacaagaagatcaacatggcataacaaattacaaccataataactgtagcatacatttcaacactgatggggacaggacgggagggggaaaggactgaaaaccttgcagatgctttgccttgaaaacagtgaggggtaaattagtaacagcaagtttaggaaagagaaagaacttgtaggaactattggagggaatgagtctctttggggggtcctagtagggagaatgtcaaattaaatccttcccagctggttgctcaggaaaagattctcctgtttagcagttaagcacacacaaaaaagtcatgcaacggccttccctatagtggtgagatcacat

SEQ ID NO: 235294 - DNA, 672 bp, Homo sapiens
gagaaaaactagtcttttagcaacactattttgtatggttaaatatgtcagtaaatttctttaccattccaacaggtttaatacaaacttaaatatatataaccattctagtattgctcagagttccttaactttctcctgcttcctaatatgaaaataatgctggcacctaaagaaagttgcaaggataaattttcctttatcaatgttttcccttgaacttattaaaaaagaaatagtatccataaatataaatttkctatatagtcagttaccaattgagagaaaaagaaagtcagaatgttaaaaatgcattgttctgatatgaaaagcacaagaagatcaacatggcataacaaattacaaccataataactgtagcatacatttcaacactgatggggacaggacgggagggggaaaggactgaaaaccttgcagatgctttgccttgaaaacagtgaggggtaaattagtaacagcaagtttaggaaagagaaagaacttgtaggaactattggagggaatgagtctctttggggggtcctagtagggagaatgtcaaattaaatccttcccagctggttgctcaggaaaagattctcctgtttagcagttaagcacacacaaaaaagtcatgcaacggccttccctatagtggtgagatcacat

SEQ ID NO: 235295 - DNA, 672 bp, Homo sapiens
gagaaaaactagtcttttagcaacactattttgtatggttaaatatgtcagtaaatttctttaccattccaacaggtttaatacaaacttaaatatatataaccattctagtattgctcagagttccttaactttctcctgcttcctaatatgaaaataatgctggcacctaaagaaagttgcaaggataaattttcctttatcaatgttttcccttgaacttattaaaaaagaaatagtatccataaatataaatttgctatatagtcagttaccaattgagagaaaaagaaagtcagaatgttaaaaatrcattgttctgatatgaaaagcacaagaagatcaacatggcataacaaattacaaccataataactgtagcatacatttcaacactgatggggacaggacgggagggggaaaggactgaaaaccttgcagatgctttgccttgaaaacagtgaggggtaaattagtaacagcaagtttaggaaagagaaagaacttgtaggaactattggagggaatgagtctctttggggggtcctagtagggagaatgtcaaattaaatccttcccagctggttgctcaggaaaagattctcctgtttagcagttaagcacacacaaaaaagtcatgcaacggccttccctatagtggtgagatcacat

SEQ ID NO: 235296 - DNA, 472 bp, Homo sapiens
ggtctgttaaattatcaagtagtgatgttgaggtgtaattggaaaagtcaacctggaatttatggcagaagttgaggctgcagatataaacttgtaattttaaaaatgtatatttaaagccatgggagtgaatgagatcatttgagattgaatgcagattgagaagagatttagaattgaactccagggcactgcatagcaggaggaaaacctagtaaaagtggtatctgtaaamtagaggaacgaactgtcacaatttgcctggtactgaggattttctcagtacatgagactttaagagactgggacaccctgagacaattggttgccttccatgggaagaaagtatgtcaagagggagagagtgaacaactgtgtccaataaaccaggactgagcaaaaaccattgaatttggcatcatgaagtcttaggtgactttgacaaggcttgtctgttgtgaacagcccaagt

SEQ ID NO: 235297 - DNA, 513 bp, Homo sapiens
ctttgatgggtttacacactaaaatgcccaagggtaatgttctttaaatcaacaaagtactaaattttgtcatgctgtcagcccacccacacgtagctataacttagcttacttttacttagatgagacccctatataagaagagtttaaaacaaatatggtgcattcctcctcttgctttctaaggatgctctactctgtaactgaataactttcaataaactctcttctcactgcactctgcaatttgccttgaattccttcctgcatgagatccaagaaccctctcctggggtctgaatcaggcccctttttttccagcaatacatttatgaaagagaatatccttattcttagaagatacacactaaattatttagggyaaaagggacagaatggtatgatgtctacaacttcctcttagggggtcatcaataatgctgctgctgctgctgctattagtaatttctattagaatcagactacaaataataataataataaaataaaaca

SEQ ID NO: 235298 - DNA, 605 bp, Homo sapiens
cccacattagggatgaaatttcaacatgatatttggagggaactaatatccaaactatgtcatagwggtatgtgtgtaacctcattcatttatgcattcattcaacaaaatatgtagtgagcacctgctatgtgccaggcactgtgctaggctgtagatatgactcataaataagatgaatattgccacagtccttaggagcctagtgtagttggggggtaaataagcaaacagataatttctatacctggtaattactactttgatagggcaaagaggattctgtttgtgctgtaaaagcacatgaaaagtacaaagtcaatccttgggaggtcatggaatctttcctaggaaatgatatataaggtggataaaaaggtaaccagatacagatgagaagagaaggtgggccagaaattttgaaatactgaaccaactggatgtcattcactgacatagggtaaatagtatagatgactggattggaaaaggaaaaaggaactaaaagtaattaaatgagctgcagacatgaaaatgaacacttgggaagtcctggcaggaagtcagcaataagacaacataatgaagtggaaagtggttgggag

SEQ ID NO: 235299 - DNA, 605 bp, Homo sapiens
cccacattagggatgaaatttcaacatgatatttggagggaactaatatccaaactatgtcatagtggtatgtgtgtaacctcattcatttatgcattcattcaacaaaatatgtagtgagcacctgctatgtgccaggcactgtgctaggctgtagatatgactcataaataagatgaatattgccacagtccttaggagcctagtgtagttggggrgtaaataagcaaacagataatttctatacctggtaattactactttgatagggcaaagaggattctgtttgtgctgtaaaagcacatgaaaagtacaaagtcaatccttgggaggtcatggaatctttcctaggaaatgatatataaggtggataaaaaggtaaccagatacagatgagaagagaaggtgggccagaaattttgaaatactgaaccaactggatgtcattcactgacatagggtaaatagtatagatgactggattggaaaaggaaaaaggaactaaaagtaattaaatgagctgcagacatgaaaatgaacacttgggaagtcctggcaggaagtcagcaataagacaacataatgaagtggaaagtggttgggag

SEQ ID NO: 235300 - DNA, 605 bp, Homo sapiens
cccacattagggatgaaatttcaacatgatatttggagggaactaatatccaaactatgtcatagtggtatgtgtgtaacctcattcatttatgcattcattcaacaaaatatgtagtgagcacctgctatgtgccaggcactgtgctaggctgtagatatgactcataaataagatgaatattgccacagtccttaggagcctagtgtagttggggggtaaataagcaaacagataatttctatacctggtaattactactttgatagggcaaagaggattctgtttgtgctgtaaaagcacatgaaaagtacaaagtcaatccttgggaggtcatggaatctttcctaggaaatgatatataaggtggataaaaaggtaaccagatacagatgagaagagaaggtgggccagaaattttgaaatactgaaccaactggatgtcattcactgacatagggtaaatagtatagatgactggattggaaaakgaaaaaggaactaaaagtaattaaatgagctgcagacatgaaaatgaacacttgggaagtcctggcaggaagtcagcaataagacaacataatgaagtggaaagtggttgggag

SEQ ID NO: 235301 - DNA, 605 bp, Homo sapiens
cccacattagggatgaaatttcaacatgatatttggagggaactaatatccaaactatgtcatagtggtatgtgtgtaacctcattcatttatgcattcattcaacaaaatatgtagtgagcacctgctatgtgccaggcactgtgctaggctgtagatatgactcataaataagatgaatattgccacagtccttaggagcctagtgtagttggggggtaaataagcaaacagataatttctatacctggtaattactactttgatagggcaaagaggattctgtttgtgctgtaaaagcacatgaaaagtacaaagtcaatccttgggaggtcatggaatctttcctaggaaatgatatataaggtggataaaaaggtaaccagatacagatgagaagagaaggtgggccagaaattttgaaatactgaaccaactggatgtcattcactgacatagggtaaatagtatagatgactggattggaaaaggaaaaaggaactaaaagtaattaaatgagctgcagacatgaaaatgaacacttgggaagtcctggcaggaagtcakcaataagacaacataatgaagtggaaagtggttgggag

SEQ ID NO: 235302 - DNA, 357 bp, Homo sapiens
acaagaacaacaaggttgtggaattcagaagccatagagacaagaggtaacacacctgagaaagatgatccctaagtttgtcttggagaaaactcagaagtacctgactacatcgtagacctcccaaacagcttccaaatgtcagataccactgaamatggggataaaggtagggtcaaaaataggaggattgggttataagtctgtataagaagttgttagatccctacatcctctcttcaaacctgtatagccagataatggtccctctcccagcctggcagaggctggataaggtaaatagagaaagttacctcctggagaacatttggcacatttggggatggagttcagtaa

SEQ ID NO: 235303 - DNA, 530 bp, Homo sapiens
gaattctcaacttcactgtgtcagaggatatgaagtaaacaaatattcatctctacatttgccagtccctgtggacttagaccagatagtataaataatagtcacaaaaggagtatgaatgggataagaagccacttctagtctgagacaattaagagtagtagtgccttctctgcactctcaccccctcattctgacagctgaagtgaaggactcccaacttctggaactgcccaatgaaagtagccttgtgtgagtgttagctggcctgctttggtctgggatgcaagtagaaataaactcctctcatattaagccactaagactttagggatatgttgctgtagcatagcctaatrtagcctgattactgaacgagccaccccatcaactgaatctatgtatatactaaaaacattttaagatatgcaaggtctcaaagagttcactcgatgcacgctttttctcaggaagctactagaggatgtgctctacaaaaaataaaggtataaattatgaaagaggaaaac

SEQ ID NO: 235304 - DNA, 521 bp, Homo sapiens
taaacaaatattcatctctacatttgccagtccctgtggacttagaccagatagtataaataatagtcacaaaaggagtatgaatgggataagaagccacttctagtctgagacaattaagagtagtagtgccttctctgcactctcaccccctcattctgacagctgaagtgaaggactcccaacttctggaactgcccaatgaaagtagccttgtgtgagtgttagctggcctgctttggtctgggatgcaagtagaaataaactcctctcatattaagccactaagactttagggatatgttgctgtagcatagcctaatatagcctgattactgaacgagccaccccatcaactgaatctatgtatatactaaaaacattttaagatatgcaaggtctcaaagagttcactcgatgcacrctttttctcaggaagctactagaggatgtgctctacaaaaaataaaggtataaattatgaaagaggaaaacataggatttaggaatcaagggaattc

SEQ ID NO: 235305 - DNA, 521 bp, Homo sapiens
taaacaaatattcatctctacatttgccagtccctgtggacttagaccagatagtataaataatagtcacaaaaggagtatgaatgggataagaagccacttctagtctgagacaattaagagtagtagtgccttctctgcactctcaccccctcattctgacagctgaagtgaaggactcccaacttctggaactgcccaatgaaagtagccttgtgtgagtgttagctggcctgctttggtctgggatgcaagtagaaataaactcctctcatattaagccactaagactttagggatatgttgctgtagcatagcctaatatagcctgattactgaacgagccaccccatcaactgaatctatgtatatactaaaaacattttaagatatgcaaggtctcaaagagttcactcgatgcacgctttttctcaggaagctactagaggatgtgctcyacaaaaaataaaggtataaattatgaaagaggaaaacataggatttaggaatcaagggaattc

SEQ ID NO: 235306 - DNA, 315 bp, Homo sapiens
ctgattttaacaacattgtgttattatataaaacataccttggagggtgtgggtaagacacaatgtccttgaaattatatttcactgggttaatgaaattggctccggaagaaamtaattttaaacagcaaaccaaagagtgaaggccttcaaaactaacaaaccaaaggaaaacaaaacaaaatgacaacaagaaaaaaacaaagaaacaaaacccctggaccttaccatttttctaaggcatgttgacatgataaaatcaaaattgctttgtgcatataaggatcaaaggttatgcttttgactttataaatt

SEQ ID NO: 235307 - DNA, 315 bp, Homo sapiens
ctgattttaacaacattgtgttattatataaaacataccttggagggtgtgggtaagacacaatgtccttgaaattatatttcactgggttaatgaaattggctccggaagaaactaattttaaacagcaaaccaaaragtgaaggccttcaaaactaacaaaccaaaggaaaacaaaacaaaatgacaacaagaaaaaaacaaagaaacaaaacccctggaccttaccatttttctaaggcatgttgacatgataaaatcaaaattgctttgtgcatataaggatcaaaggttatgcttttgactttataaatt

SEQ ID NO: 235308 - DNA, 618 bp, Homo sapiens
ctgtggtaattggcacagtggtacctaaccctttgagggtccaggattgttttaatggtgagtgatttacaaactgagtttaaaagagcaaggaggatccaatttygcaaaatttcattaactctgcttaagaaaacagtatattatattagcttagatcaggagttgggaatctatagcctgctaccatttattgtgtagcctgcaaatggtttttacatttttaatacattggaaaaaaaattaaagaagattattatttcgtgatgtgaaaattatacatgttgaaaggaaaactttagagtttaattgagtaaagaatgatctgtgaattaggcagcccccagaaccagagtagggttggttacagctgagcatttgccttatttgaacctggtttgaagagttggctgcctgtggttggctgaagttcagctgctgtgattggctgagactcactacttgttacaagagtaggttacatatcaagttttacatatcaagttgaaatatagttttttatgtactgggaaacctttagggtaaacttaaaatatgtaaggaggcagctttaggccacaatgaatttaacaattcctccttttggtcaacctgtca

SEQ ID NO: 235309 - DNA, 618 bp, Homo sapiens
ctgtggtaattggcacagtggtacctaaccctttgagggtccaggattgttttaatggtgagtgatttacaaactgagtttaaaagagcaaggaggatccaattttgcaaaatttcattaactctgcttaagaaaacagtatattatattagcttagatcaggagttgggaatctatagcctgctaccatttattgtgtagcctgcaaatggtttttacatttttaatacattggaaaaaaaattaaagaagattattatttcgtgatgtgaaaattatacatgttgaaaggaaaactttagagtttaattgagtaaagaatgatctgtgaattaggcagcccccagaaccagagtagggttggttacagctgagcatttgccttatttgaacctggtttgaagagttggctgcctgtggttggctgaagttcagctgctgtgattggctgagactcactacttgttacaagagtaggttacatatcaagttttacatatcaagttgaaatatagttttttatgtactgggaaacctttagggtaaacttaaawtatgtaaggaggcagctttaggccacaatgaatttaacaattcctccttttggtcaacctgtca

SEQ ID NO: 235310 - DNA, 622 bp, Homo sapiens
tttattgccaaataattttccattgtacggatagatcatattttgtttatccatttgtcacattttagttgtctatcagttgatagatatttgtggtgcatttaatttttggccaatgtgtaaaacttattttgctgtcactgaggctacatactgttacaacaatgctatttggtcaacttgactgagctggcctcataggttacaggctgctcattgttagagatgagactttagaccagactggacaacatagtgagaccctgtctctaccaaaargaaaaagaaaaattagccagatgtaatggcatatgactggagtcccagctacttgggaggctgagatgggaggatcacctgagcccaggagtttaggactgcagtgagctgtgatcgtgccaatgcaatccatgctgggcgacagagtgagaccctgtctcaaaaaacagaaagagggattttagtataacattcagccagtgccatattgggaacccacaagaatgtactttaaaaaatatgtcaaagaaggtggtgagggctgtaatagctgctattcaggcagtaatgcagtgctgaagggacatcaagcaaatagtgtgatgcctgtgggtgcaatgtt

SEQ ID NO: 235311 - DNA, 560 bp, Homo sapiens
  misc_feature (1)...(560): n = A,T,C or G
agctgcatagnnnnnnnnnnnnnnnnnnnnnnnnnnnnnnnnnnnnnnnnnnnnnnnnnnnnnnnnnnnnnnnnnnnnnnnnnnnnnnnnnnnnnnnnnnnnnnnnnnnnttactcaatagcactctccaagcagcgtgtttctcatttttaatgaaatgaataatactttctttgaattccagcgtcccctcttctcccctaccataagtccacaatcatgaacatctatgatctaatggttttacaatgccttggcactcaaaatagctgccctgggaggtaaaaaacaacctcttggtttctccaccaggattgtaaaggtgaatagcaaaaaccttttctttgaggtccctgagtagttagctagcaggaatgaagagagggctgaattccatatttacctacgatggggttgtgctttcatacgcactcaacatatattttaggattaaaaaaataggagccctcggatgcgaaattatttgcatatttgtcccatctctgttttggcattaaaaattggtgagraaagaatggttactaagaataaatattata

SEQ ID NO: 235312 - DNA, 585 bp, Homo sapiens
aatccttctccctcagcctccccaatagctgggactatagatgagcactaccacatccaggtaattaaaattttttttttttagaaacaagatctcactatttgtccaggctggccttgaactcctgggctcaggtgatcttccctccccagcctcccaaagtgctgggattacaggtgtgaaccactgtacccagtctgtcttaattcagtgtttaattacgttattgtttcaattcttccttaaaaaggatggtctcaaatataagatcttactatatatttagaacttagaatattttctgatacctattaagtatcagtaaatattttttgaatgaacaaataaaaagacgatgttaaaaagagtagcaaactttggagacctagcaagccagaatatggagtttgaatatttttctaagagcaataaatgaaatgaacaaatataataatttatagtatatctcccactagtgtcttttattgcatttcagagttctgtgtctcaaattttgtaggtaagtcatatttcagkaagtgaaatttcgttgataattcatggtcagtcgtgtgaacataattt

SEQ ID NO: 235313 - DNA, 571 bp, Homo sapiens
ttggcaacattacaaaacacaggcatcttggagtctggttattttctattttgtaaacctttaatactgagctaaaatctataataaatctcaaacataatcaataaggatatattacattctgttaaaaaatttagtgtaaatctttcaatctttacaaattttgaccttatggtggtgtagacagatgaattgtaaattaggtgtttttaaaacacatatatttttaattaatgcatgatataatacaacaataaatacaaccaagaataaaatgctaatttatattttatatttaggtataatcaagtcaggttaaaacagacacttgatgtttcccacattgattcagcgtttatatctcagatgcaaaagratccaatgagtaataatttacatatatatacattttaaacagtaaaaatagatggaatcatatataggcttgcatagaagatagtagaacactagaaagcagttcaattgtgaaatataaaatcttaggaaattgatatgctatttaagaagtaaattatagctccgtatttgagagtctctgttagtatactcc

SEQ ID NO: 235314 - DNA, 575 bp, Homo sapiens
aaagaagtcagcaaaattagtaaaataaatgaagaatgaaagtagtaagggactctgaggagtagatttaagaaacaggataggaaacaaaagtagggcttatatttttgagattatcaatgaacccttcaaatattttattwtaaaaacatctatcatcctaatggcccctcccctatttaaagttttaaaacttttgatgtttaatttttacctgagcaaatagccaaagacctctaaatatgctgggtgcagaatttttattgtctgctgctgtgagtttggacaatataggaaataaaaatgaaagttacacatgatataggttcagggtttttcaatcccatcggcctataaaacgactaatattaaatgatacaactttaatataagaaaacagccacatcttaattgccagtaagaaatgaaattcagccacaatagaacaaagcatcgcgatagattaaacagcctcagttaccctcaactcctttgatctaccccattaaatcagtattcatcatgttaacagtgaccacacagacaaaaagcatcaaaattggtgtggtcaactg

SEQ ID NO: 235315 - DNA, 518 bp, Homo sapiens
ccgattcttgagcccagccccaaacctattatggtagctttttattgctgtgaaacaaattaccaccaacttagtagtgtagagcaacatctgtttattatctcacagttctgaaggtcagaagtccaggtgagcttgcctgggttctctgcttaggatttcacaaaattagaatgagacaaaatttcgagtctcgcaaggctggattcttttctgaaggctctggtaggaaaatccaatttcaagctcattcatgttatcagcaaaaatcagttctttgccrtctgtcagcgggggttacattctgctcctggaggccacccacatttttttccatatggcccctccacctttaaaccagcaaaggcacatgaagtccttctcatccttggaatctctctgacttcctctgtcatatgccagagaaaactctgtgcttttaaaggagttttatgattgcattaggcccacccagataatttaagacattctaaggtgcactgacttgagactttaat

SEQ ID NO: 235316 - DNA, 618 bp, Homo sapiens
tctggaattcagccactagagtggatggatgcctgggtaaaggaaagaatcaatgttcaaagtattcaagtgggcttttagggctggtagtgggggatttggagtttcacgggtagagagtgtaatgcctcccaaatgggtcatagccaactccaagagtagctaccacaagcttatgacaaagtacgatattgcctaaggacaacgcttctctaggaaatgtttcctcaaggctggatttgtaggaggaaacatttttgagaaattaatttgtattgactaccaatttcattggaaatgggagtgtcaaatgaagcagaatgaaaaccaaaytaaactcaatgaaggcccatatattaagctttggccacactctccaaattattacagatctgggaaaatcctgctaatcagaggcagcaaaacatcatgcacattgctgatgcatgcatatgggaatggcatgacttttttataggtgctgcatgaaggttgatatgtcattgcaaaatggctcttgcaatgttctccatcaaccctgtatatgtttgctaagatacaaaagcaatatgaatttgttcaacaaggtcaagtagtcttttttttttttgtaatagt

SEQ ID NO: 235317 - DNA, 589 bp, Homo sapiens
actacaccaggccctgttttgaaatctttaaaaaaccttgtagctgggaagagaccacctctccataagctagtcaattcttaaaaattgcaaaaggcccagccagaagcatgactttgatgtgcaccctaaccaaaccaataatgtctctactatctgacctgctcaccccaagaggcaatattccttaattatcrcaggaccaggtgccaggcaactagagactacccctatagcttaaatcctgctaaaattattcaagctaaccaatcctaagctgttttccctgccctgccctgactttctctagtaaactcctgataagtccatggcctaagcacttccccactctttcgtctcttctgcctcctgagcaccttggtgtctttcctacctgcccgtcaccacatttcatgccacctgtctctaggtgagtatcataaatgttgtttacttaagcctttcctgtgtctcctcttgtgatcatgcctgactaatcatcacattaaaaaatacaaatactttcttttatagaggccagaaaatgacagaaagtcaaggacagttgactagctttaggcatttcacc

SEQ ID NO: 235318 - DNA, 562 bp, Homo sapiens
attacaagaggccggaattattctatacaggtgtggaggatcaagaatttaaacatttaagaggggaaccaggtgaatgtcaaamcacctacatgtagaacaaggaagaaggagtaaacatttctgatagaatttgagtggaagagatatccagtgtattaggccattcttgcattactataaagaaatacctgaaactgggtcacttataagaaaacagccttagttgcctcacagttctgaaggctgtacagcaaacatagcaccggcatctgcttctccagaggcctgatgaaatttttactcatggcagaaggtgaagcaggagcagtcacatttcatggccagagccggcgcaagagagagaaatggaggaggtgccacacacttttaagtgaccagatccctcaaacctcactcactgtcaagaggacagcaccaagtcatgagggatacacccccattatccaatcactcctaccaggccctacgtctagtactgagtattacaattcaacatgagatttacgtggggaaattatacaaactgtaacacctagga

SEQ ID NO: 235319 - DNA, 587 bp, Homo sapiens
aagtgggcctcaaattccaaaaggaggatgatcaaaatataatgcaatctagaacaggttttcttatatatagttagaatgtggtgattttttaaaactctcagtagaagtattttattgttctaaatgttctccgcatcagttgagccagttttagtaactgatttcacatttgaaatactttcacactttttcttatgaatgaatatagcaagatatcttaaaatatcaatcttctccaaaagcccttatataagagaatttccccacttattcagaggtatatgtatggctctaagataaaataggtttcttatgaaaggaatgcaaagaataagaaaccatgtccagttttgcatctccaaattaggcccttgaagcttacataaaatttaatagctttgaaacatcacagattgtgatttgcataaactggtattgttaagtaaagtcacgagaaagttttcttttcctcaaaggtrggtagtaatggataccatcacttttttacattagaaggattaaattagaaatcatatttataagtttatttatactttatatattatagctttttatgagtgcta

SEQ ID NO: 235320 - DNA, 435 bp, Homo sapiens
ctttgaaacatcacagattgtgatttgcataaactggtattgttaagtaaagtcacgagaaagttttcttttcctcaaaggtgggtagtaatggataccatcacttttttacattagaaggattaaattagaaatcatatttataagtttatttatactttatatattatagctttttatgagtgctawatcttgtctcaacaattacattaccaatatattcatcactatggccccagacaagcaacctcttcgtcacttggggagtcattagaaatttaaacacaataaccccaatacaaactggtgcaagagaaatttgagaaacactgttctacatcagtaaattgaattaactggtaaccactgaagaaaaggaacctgtttagagaagaaacatacatgtggttctatgataaagactcttacaaacgt

SEQ ID NO: 235321 - DNA, 479 bp, Homo sapiens
tgcattggtcaaattcaagtttaaataattctcccaaaaagattgaatttatcaatatcatttagtgtttttcagatggatagactcccttaggatcctaggtagaagtgcagtcatgcaccgcataatgatgcttctgtcrgctatgaactaaacatatgatggtcgtccaataagattataatgaagctgaaaaattcctattgctgaattatactgtagccatcataaaaccatacagcaatgcattactcgagtttgtagtaatgctggtgtaaacaaacctatgtgactatacagccagtcacatgaaagtatagcacatacaattatatatactacataatatttgatcatgaagataaacaactgctactagtttgtatttattatccgttacttttttatcattatggcgtgcactccctattaaaaatagagaagtctacctattaaaagaaaagttactgtagaacagc

SEQ ID NO: 235322 - DNA, 539 bp, Homo sapiens
tgattgttgtttaatatccaatatatttgtaaattattttctatttgttgcacttatttcttgtttcattttttctccacaatttttcttttttttatttcaattgagcattttaaatgacaaaattttctcttttcttagtctatcaattatatacctagaaaaatagaatttgtcttagagtttgcaatgtacatttacaacgaatcctagcccactttccaaaaaaaaaaaaaaaaaaaaatacgagtttacaggtactgtgagcactttatrataagaaaataatcctaattttttcaccccaaccctgtatcattgctgtcattcacttctcatatatgcacatatacatgcacacacacatacacacacatctgtgattgaatacatttttgcttttattattttgaacaaactgttatccattaggtaaatcaggataaaaataatgataattattaaccctaatagtcaattaacaataagaaaaataatctttctttatatagatcaaaatttctgactctatatcattt

SEQ ID NO: 235323 - DNA, 637 bp, Homo sapiens
taaattagagactcaaattaaatactggattaaaagatacctaatatttttgagacctaaaactgtatatttattacttaagtcattccacttctgtatactttagtttttcagcaactaatttaagaatagcacattctgtttatagaaaagacaaagaaaaatgacgtactctgtgtgagagagacagtcaatgtagatccaggatttcaccttgaatcactctcagagtacaatagaactgaggctgcaatagcagtaaaagatcgtctgggtsgggggtggtggggaggtctggtgtgcaaatctttagagactgttttaaatgagaactttgggcaattaaacacagtttcagacaaggtcaaatttttctttgttaattgcaaaattaaaagacgtcaagcagaatttcccttagaggttgcaataatgaataaggttaaagctctagttgtttatcattttggtttaactctcattatagaatatggaaaagaggaaaactgacaagaaagaaagattctcctctactctttctatctccctaatgtgaataaggagaaaaagacaatttacccatttgcccttgcaaaatagaagcagttaaagacatcttaacttagcagttaccaga

SEQ ID NO: 235324 - DNA, 545 bp, Homo sapiens
gggagctgaacaatgagaacacgtggatccagaaaggggaacaacacacaccagggcctcaggggttgtggggcaaggggagggaacttagaggatgtatcagtaggtrcagcaaaccaccatggcacacgtatacctgtgtaacaaacctgcacgttctgcacatgtatccttttttttttagaagaagaaataaaaataaaaaataaatgaagagaaatttatttttgttttttacgctttcaagtgagattttgcctaatattacttaaacagagttattgatttttggtgagacacttgaaagcattatttaacatgatcttttgattaaatcttttccaacaattataaaatttatatttatgtagaattcatcatattaccatgccaaagagaaattacagttttccaatattgagctatcttatattcctggaattttgaaccatgactgaaaattcagtgattctctcagtgtatttatttctctttaaatgtttatagacataatgaattttgacttccagtgattatttgccaaa

SEQ ID NO: 235325 - DNA, 531 bp, Homo sapiens
gctgctacctgtcaagaactgcaaataaactgagcttttaccctacatgcawgctaacacagaggatgcaaggcttgtgcctcagaggcaaataactcgattatacacagtagagcaaacagaatgagcttcaatgtttacacaagttccctgctctccaagtcctacaggggcaatgcagagtggtctaagtgggctcaacacatgcaatgggcttgtttcacagtagaggaacatcaagcttggaagaacacatatttctgatactgagtagtttgcatacctttgcttgccctgagtggagacattttctttattaaattaggcaataaacaaactggtcctatacttcaaaatgaggcagtatctcattcagcaaaacgtatttgcttgtacaattatccttgaaaagttatcacagaacaaagcaaccaatccctctgctctcaatacatgcagtaatgtgggagactgatgggaaattttctttcaaaactattaaaaagctataatagaataatccaattcaag

SEQ ID NO: 235326 - DNA, 531 bp, Homo sapiens
gctgctacctgtcaagaactgcaaataaactgagcttttaccctacatgcaagctaacacagaggatgcaaggcttgtgcctcagaggcaaataactcgattatacacagtagagcaaacagaatgagcttcaatgtttacacaagttccctgctctccaagtcctacaggggcaatgcagagtggtctaagtgggctcaacacatgcaatgggcttgtttcacagtagaggaacatcaagcttrgaagaacacatatttctgatactgagtagtttgcatacctttgcttgccctgagtggagacattttctttattaaattaggcaataaacaaactggtcctatacttcaaaatgaggcagtatctcattcagcaaaacgtatttgcttgtacaattatccttgaaaagttatcacagaacaaagcaaccaatccctctgctctcaatacatgcagtaatgtgggagactgatgggaaattttctttcaaaactattaaaaagctataatagaataatccaattcaag

SEQ ID NO: 235327 - DNA, 521 bp, Homo sapiens
tctgtttttctatcaactcaccttatttaatcaatttaaaaaatttatgaggctctaactttaaagtatatcttgaatccttttagtttctcaatatcttctttgttaatgccctaaatcaagccaacatgatcttacacctagactattgcaataattttctaaatgatctcactatttccatgctgccccttcgtatctactttccacataacagcaagacttttgaagtatgaaatacaacaaatcctctatctgcttataggattcctggtaaaaattaatcaaaatacagaatacttactttgacctactgggccccacaattgtctgtttagcacttcctgttattcactttgtttataatgctttgttctctttaaagttcctcaaaaatgcaaacatatttctgcytctgtttgcctcttactctaacacccgcaaaagccagatcctgcttatagtttagatgttacctacttatagagcccttgcctaatgactcaatctaaaatagaatc

SEQ ID NO: 235328 - DNA, 468 bp, Homo sapiens
cagatgtataataaatatattttgaacaaatgagtagatggatgaaatgagtcaaggcaaattatttaattttcttgaataatcagtctgtgctaagcactgggctgaacaatttatcaaaggttatctcattttatttaatatttgcaagagttttttttattgtttccacrtgaaatatacaagagaaaagatatgtgattttcccaagttcacatagtaaacttaaaatcatcttatagcaaccacacaatgactctaagtgttataaagatggtgccacctttttaaaaagcttgtatttgctaggacatctgttctgaaaagggaatacattatagtggaacaaaatccattttatgttttttcttttcagtttaggataactctaatgtctcttctatattgcagtcttctaaaagtgtgaagaaaattattaattatgtcttaaattatatcctccccaag

SEQ ID NO: 235329 - DNA, 468 bp, Homo sapiens
cagatgtataataaatatattttgaacaaatgagtagatggatgaaatgagtcaaggcaaattatttaattttcttgaataatcagtctgtgctaagcactgggctgaacaatttatcaaaggttatctcattttatttaatatttgcaagagttttttttattgtttccacatgaaatatacaagagaaaagatatgtgattttcccaagttcacatagtaaacttaaaatcatcttatagcaaccacacaatgactctaagtgttataaagwtggtgccacctttttaaaaagcttgtatttgctaggacatctgttctgaaaagggaatacattatagtggaacaaaatccattttatgttttttcttttcagtttaggataactctaatgtctcttctatattgcagtcttctaaaagtgtgaagaaaattattaattatgtcttaaattatatcctccccaag

SEQ ID NO: 235330 - DNA, 593 bp, Homo sapiens
cattttatttaatatttgcaagagttttttttattgtttccacatgaaatatacaagagaaaagatatgtgattttcccaagttcacatagtaaacttaaaatcatcttatagcaaccacacaatgactctaagtgttataaagatggtgccacctttttaaaaagcttgtatttgctaggacatctgttctgaaaagggaatacattatagtggaacaaaatccattttatgttttttcttttcagtttaggataactctaatgtctcttctatattgcagtcttctaaaagtgtgaagaaaattattaattatgtcttaaattatatcctccccaagctaaatatttacttatgtgatcactattctagattaaaaagagaaacctaggggaactgaaaagaaaaacactcagccagtccattcctttcaattaacttaatacccktatttcttctaatcccacaaagataattcattcttaaaaattgtattcacataaaagatttgtttatttaacttgaagatgttcattccccccgtgtactactctgtcactctttctcatcttcaaagttgtgttgtcactattt

SEQ ID NO: 235331 - DNA, 593 bp, Homo sapiens
cattttatttaatatttgcaagagttttttttattgtttccacatgaaatatacaagagaaaagatatgtgattttcccaagttcacatagtaaacttaaaatcatcttatagcaaccacacaatgactctaagtgttataaagatggtgccacctttttaaaaagcttgtatttgctaggacatctgttctgaaaagggaatacattatagtggaacaaaatccattttatgttttttcttttcagtttaggataactctaatgtctcttctatattgcagtcttctaaaagtgtgaagaaaattattaattatgtcttaaattatatcctccccaagctaaatatttacttatgtgatcactattctagattaaaaagagaaacctaggggaactgaaaagaaaaacactcagccagtccattcctttcaattaacttaatacccgtatttcttctaatcccacaaagataattcattcttaaaaattgtattcacataaaagatttgtttatttaacttgaagatgttcattccccccgtgtactactcwgtcactctttctcatcttcaaagttgtgttgtcactattt

SEQ ID NO: 235332 - DNA, 578 bp, Homo sapiens
catattaaatgtttttatttaagatacctcttgttttactagattgttacttgtttacagattgttaccctctttatattatacaatacttaacttttcattcacactgtagatttagcactggaatatatataatttcatattcattatttataaattttatttatttgttaccttaacttcaaatcatagaatttaagatttagaaatatgcatgccaaaatttcctcagagataaatgtcacttttaatgcttccacaatgagaaatcattagaaatgactagagcatggtggtaacacaacagagaaataatacgtactcacctacgtcacctagaattaccactgataatcttttataatcttttrccatgttatgaaatatttgtttttatacagatgtctactctcaaaataatgaaattggatcacaagcagaaaatgtttcagtccacagttctcccatatcctacattaaagcgactcaaagtagattagcaatacctagccatgtatttgcataatagcttttccttttcctttttgttaccccaactgattacatgagagcaccac

SEQ ID NO: 235333 - DNA, 400 bp, Homo sapiens
gtgtccatggacattgatgtttttgactatacagcctagaggtgatttgccttattttcagggcttcaaacatgttcagccaagacttgtattgtgatgcagaaaaatatagcaactgaacctaagtctatttctgcactacttactcatcattcaaaaagcatttatttgaagtctggtataccatagattaagacagacactcacacattgatgaaactactggtacactatgttctcactaccagtgtaatctttggatagatttgagggtagaagatactgtgtactttcccgtgtgtggaactgggtagaactcctttatgcatgaacagagcaagyaaatactattctttactttttatcatttagataaaaattgatagatcatcttgtactc

SEQ ID NO: 235334 - DNA, 614 bp, Homo sapiens
aacttaaggtgttgtacgcaaacatatgttgttgttattattattattattattattattttggagacggagtctcactctgtcatccaggctggaatgcaatggtgtaatctcggctcactgcaacctccacctcctggattcaagtgattctcctgcctcaacctcccaagtagctgggacatagcacatgtcatatcacccaccaccacacctggctaatttttgtatttttagtagagatggggttttgccatgttggtcaggctggtcttgaactcatgacctcaggtagtccacctgcctcagcctcccaaagttctgggattacaggcatgagccaccgtgcccagccatattcttatttttgatggcagcaacggcccatctagaacagctgctgcaaggaygccagctgcagcaggggaggtggggccagggctgcatgctctgcaaagccagtgggagcttgaaataggcaagatccccatcccctaccaagttagcaaggcaggagttcagatttttgggtgccaccacagctgcccagttgtggctccatatcccagcacccctgcacttttggaggcccaggaggacccctgcccctgcag

SEQ ID NO: 235335 - DNA, 404 bp, Homo sapiens
atttcatataccataaatctggcaattattaatcttcaaaggcacttcaggtaaaatctttaaaaaatgtattattcaaattttatgacataactttattaaaactttaccaaaatttgctgttctccaaagaattcatagaaactttgaaagaattaatggaagaatgaatgcaaaaatatagagttctacatgtatttgtcgttgtgggcaatgctttcttgctgttctatarctgttctagttggtgtctaccctggctgtagattcagagaagaaaaaaatttgaggagaagtaaaacggagcatctctctgagagtcttctacaagtttttattcctccgcttttttgtgttttgttttgtttttgttttatcgtatctcctatcagatgaattgaata

SEQ ID NO: 235336 - DNA, 350 bp, Homo sapiens
cacttgagtgtactctatgctatttctcagcctaggaccaggttttgatyagactttaataaagttatatttagcatgaactcaagagattttaagttaatgcaatgtttcaatcaataagaaaaaataatagggttctaagtaatatgtagcccacatttcccactctgggaaatttacaataatactcattcagaagtccaccttatacaagtctaaatcagtttacggaatcagcaagagtctagtgagagtccccagggtaaacattttgtacagaatctcaggggagtgcaggtggcccacagggtgacccaacatggagcggctgtggtccagattgcatgttt

SEQ ID NO: 235337 - DNA, 457 bp, Homo sapiens
accatttttttttatttttatttttttcgacagagtctcactgtttcccaggctggagtgcagtggtgtgatctcggctcactgcaaactctgccacctgggttcaagcaattctcctgcctcagcctcccaagtagctgggattacaggcacgcaccaccatgcccagctaatttttatattttcagtaaagayggggttttgtcatgctggccaggctggtctcaaacccctgacctcagatgatccgcttgcctcggccacccaaagtgctgggattacaggcattagctattgcgcctggtccttatatgggttactgatacacccatgatctttatactgtattacttaaatgttatttggaatactagacatttcatttctttctaaaaatacttcaattgtagatataactaaaaaataagctataccatccaacaaagttttctaatat

SEQ ID NO: 235338 - DNA, 595 bp, Homo sapiens
aaagtaagtcatctgctgaccaatgagggtggaaaagctacctattctcaatgagggctgagtacttatccttcccagatgagctgagggaaagagcaattaagtgcttatcaattggcaactatttggaggacagtgttagggaaagttgaacaggatcccagaatgaaccatggaaagaaaatcacagaaatacaaacagtgaaggaaggggaggaaggggattaaaaagaaaaaagctcaaatcaagcacacactgatagaaatgagtcaaatcaagcacacactgatagaaatgagtctgtaagaagatggaaatgacacaaccaattttcctaaatcccatccttccaaactcagcgaagcttacctatgtgccatctttgtttattagcacaaaatcgcgtcattcaatactgagatgaacagaacatttaggcaacagactgtctrcttgtgacctggaaagtgattcagtgaaatgactgggaaactatggcattgtattttaaagagtttattctgtccttttgatttcaaactggttttctaatgaggatccacagactcagattttttaacggaaaaaaacaag

SEQ ID NO: 235339 - DNA, 634 bp, Homo sapiens
acctcacaaggttgctgggaggaattactactaatcaacctgattgtgaaacatttagtcaatatagagtactttataaatatttactaatatacaatgagctcactgcatctaagagccaggagatttgcataaccacagaaaactctgtctggaccccacaatagcagtcaacattgtgcctgaaatggttttttaaatcttatatattatcagcattctgggatgatttcggttttttatcctaagtgaggagaatgaactagatcagggaagctttagaagtcacttacaagtcaaagaaaacaatgatctagtccattaaagtggcataattatatgcagaaaayaaattattatgacattcataataaagtgtgtgtacaactgagcttatcactcaagaaaccaagtgaactaaggacaatatatgacagacactgttttggttactttggatacaatactcaataaaacaagcaaggatcctactcttcaagagcctgcattttagcataagagacaatcaatccaaccaatctgactgttgacattttcttgtttacatatgtactcagatgaaaacaaaactgtgttgcagtaaaaagtgacagtactttacatttgatgacct

SEQ ID NO: 235340 - DNA, 525 bp, Homo sapiens
ccactgtgcaatgatctcttgtatttatatgtataccttgtattttctgcactcgtcacgtataccaactcagcacctatttcctgtcactgcggagatacactttgttatttgaaggtggtcattatgaatttttgctcaggggcatcattagttgtggaacagtatttaatataatggaccctggagccaggcgacctggccttaaattccagctaagctacataataattgtgtgcccttagacaacattttatttgttggtttatttgttgtaaacccctgcatgacacagtttcctcctctccaaactaaaatataatgattgtgtcaacatcctaaagtagttatgggaaataaagagtcaaaaccagcaaagaacagtgtctgagacctagcaagcrttcaacaaatgttagtctcattgttactcttcttaactgttccaaattatatggccatgccttatgctgtcttttgtcaactcaaccagaaggtattaaatgcctattttgttccagatct

SEQ ID NO: 235341 - DNA, 577 bp, Homo sapiens
  misc_feature (1)...(577): n = A,T,C or G
attaggatctgttggtggaagcgggggactcaggcatcagtttatattaaaagctgctcagggactgggtgtggtggctcccgcctgtgatcccanaactttgggaggctgagggggggggatcacaagggcaggagatcaagaccatcctggctaacatggagaaaccccgtctctactaaaaaatacaaaaaatagccgggtgttgtggcgggcatctgtagtcccagctactcaggaggctgagacaggagaatagcgtgaacccaagaggtggagcttacagtgagctgagatcctgccactgcactccagcctgagcgacagattgagmctccgtctcaaaaaaaaaaaacaaacaaacaaacaaacaaaaaaaggctgctcagaagtaaaggcttcttctgccactttaggttaactgtggccagacggtaaggctgcacctactgagcatggagaaaagtaagaatgaaatccaattattgtgcttagtttggccaaatcccataagtcagaataactgaacatgaaacaaaacaaaacgaagcaaaacacaatagtgcccaccccgaca

SEQ ID NO: 235342 - DNA, 547 bp, Homo sapiens
attcccttccccactctgattttctagttccctgttagccagaatatgctttcctcttttcccatgagtatagatctccccacctgcttctcctggcagaatacttaatcaaaataaaattaaacacaattayaaactaggcctacagaatattcccaaagcaagctgatttttatcaatcactttaaagtatttttgatacccatttatgctccacgtgatcagactgcataagacatcctgtatcaggtaatattgggtgcgagtggcagagtaacgcacatatttcccaacagatggaaacttaatattataaaaataaagcgactcgtatctttggctttttttctggatgttgaaaataggcagaccaaaatcccaccttctctatgcagccctcacctaaaactctccatctgagaatttgacattttggaaataatgggaaatagaaatttcccggtgagctttataggtatgtctgtactacagaaacattccagtggctgctctcttaaatttctgttcaattctactcagaacaaac

SEQ ID NO: 235343 - DNA, 547 bp, Homo sapiens
attcccttccccactctgattttctagttccctgttagccagaatatgctttcctcttttcccatgagtatagatctccccacctgcttctcctggcagaatacttaatcaaaataaaattaaacacaattacaaactaggcctacagaatattcccaaagcaagctgatttttatcaatcactttaaagtatttttgatacccatttatgctccacgtgatcagactgcataagacatcctgtatcaggtaatattgggtgcgagtggcagagtaacgcacatatttcccaacagatggaaacttaatrttataaaaataaagcgactcgtatctttggctttttttctggatgttgaaaataggcagaccaaaatcccaccttctctatgcagccctcacctaaaactctccatctgagaatttgacattttggaaataatgggaaatagaaatttcccggtgagctttataggtatgtctgtactacagaaacattccagtggctgctctcttaaatttctgttcaattctactcagaacaaac

SEQ ID NO: 235344 - DNA, 591 bp, Homo sapiens
tgcggcctccccatatcactatcagcaaacagcctggctgtgttgtgctcctgctctagggatctgtggaactttgagcttgagagtgatgatttagggtatctagtggaagaaatttctaagcagcaaagtgctcaagatgtggcctggctacttctaacagcctatgtccatatttgtgggcaaataagtgacatgaaactggaacttatatttaaaagggaagcagaacataaaatattggaaagtttgcagcttggccatgtgatagaaaagaaaaacccattttctggggaggaattcaagccagctgcagcaatttkcatagctaaaaggaagacaagtgctgatagccaagacaatgggaaaaggccttcaagacatttcagagacattcacggcagcccttctcatcacaggcccagaagcctaggagggaagaatggttttgtgggccatgcccagggcccctccaccctgtgcagccctaggacactgtcttctgcatcccagctgttccagctccagccttggatcaaaggggcccaggtacagctcgggctactgcttcagagggtgcaaaccataagc

SEQ ID NO: 235345 - DNA, 582 bp, Homo sapiens
gcatatctaacaaatcctcaggtgagcagagtagctcctctgaagacagcagttgagagcactgtactaggctcatctaacttgctaggtcacctaggcattgtctctgaaccccatgctgtgctctgctatacttccacagccaaggacacagactgggtggggctttgatttactatcctctcaggctgggtgctgggtgctgtccctgtcttcctggccagctgcycaggtctgtctggccctggcttggtctggtgtccgggccctcccttctcccttatgggaacatgcatactttctgtggcgagactgcacatcaacagtgctgagatctgagggactggagggaggggaagcaggacctcagagctgaagcgggctggaggacaatggcttcatctgttctctccctctaagagcaggtgcatggggcgtggggcatgctgactcagagattcgaatggcctctgcagcaactcaggggctcctctcctctccctgctgggttcagacagcctttcccttggagacagacaggttggaaatccaagcagaaagaaaaataacttaatgtatcaa

SEQ ID NO: 235346 - DNA, 582 bp, Homo sapiens
gcatatctaacaaatcctcaggtgagcagagtagctcctctgaagacagcagttgagagcactgtactaggctcatctaacttgctaggtcacctaggcattgtctctgaaccccatgctgtgctctgctatacttccacagccaaggacacagactgggtggggctttgatttactatcctctcaggctgggtgctgggtgctgtccctgtcttcctggccagctgctcaggtctgtctggccctggcttggtctggtgtccgggccctcccttctcccttatgggaacatgcatactttctgtggcgagactgcacatcaacagtgctgagatctgagggactggagggaggggaagcaggacctcagagctgaagcgggctggaggacaatggcttcatctgttctctccctctaagagcaggtgcatggggcrtggggcatgctgactcagagattcgaatggcctctgcagcaactcaggggctcctctcctctccctgctgggttcagacagcctttcccttggagacagacaggttggaaatccaagcagaaagaaaaataacttaatgtatcaa

SEQ ID NO: 235347 - DNA, 403 bp, Homo sapiens
gaaggcattaaaaccattgggaaggagtgggctcaagtcatttactttaaatattaaagtaaaggtttactgctgaatgcatgctcaaatgaattgaaattctgatcactttggggacytctgagactggcctgcacacgtttcggggcgcgctcttccacaatgcacgggaaagaagaggaatgtcaaaaatgcttggcaatcccatggttgtaatagagggtgtaagaggttggaggtttttgagagtgctgagagctgacaaggtttccttagagaggctggggagaacagcagaggaaacaaaatctttacttgccagagcaagagggaaccttcggaacacctgttgctcggacagcaaatagacttctacctcagtgccaactctgatcaactgcta

SEQ ID NO: 235348 - DNA, 403 bp, Homo sapiens
gaaggcattaaaaccattgggaaggagtgggctcaagtcatttactttaaatattaaagtaaaggtttactgctgaatgcatgctcaaatgaattgaaattctgatcactttggggacctctgagactggcctgcacacgtttcggggygcgctcttccacaatgcacgggaaagaagaggaatgtcaaaaatgcttggcaatcccatggttgtaatagagggtgtaagaggttggaggtttttgagagtgctgagagctgacaaggtttccttagagaggctggggagaacagcagaggaaacaaaatctttacttgccagagcaagagggaaccttcggaacacctgttgctcggacagcaaatagacttctacctcagtgccaactctgatcaactgcta

SEQ ID NO: 235349 - DNA, 587 bp, Homo sapiens
  misc_feature (1)...(587): n = A,T,C or G
ctgagtttgagactagccttggcaacacaggaagactccatctcttaaaaaaaaaaaaaaattagtcgagcatggtggcatatacctgtagttccagctactcagaaggctgaggcagtaagatcgctcaagcccagnagtttgtggctgcagaaagccatatacgcaccactgcactccagtctgggtgacagagtgagaccttgtctcaaaaaaaaataaaaataaaaaagacaattgactgtttgaagcaaaaaataacattatattgtgatgtttatagcatatgtaggaataaaacatgacagtaatmgctcataggccaggagaataaaaaaatagaaatacactgttatatggttcttgtatgtgaagcagtataatattgcttgaaggtagaatgtgataataagttaaagattaacattgtaaaccctatggaaacctctataaaaacattttttaaaagaggtataactcataagctaatagtggagctaaaacataatcatgtagcttccacttccataaagatgagctagggaccttaagaccagagaaatgacatgagatgacaaagttcactg

SEQ ID NO: 235350 - DNA, 600 bp, Homo sapiens
agaaaatctagacatttttgcctccctgaattctgagctctttctcttcaatttagcaagactgtggatctctgtttgggtttctctccctgctctgcagcctggaaactcttcacaagtaactggggcaatggtagggctcactttatttccctttcctgagttcttcactacctattgttcaatatccaaaaagagttgtttcatatattttgcctggttttctagttgtttatggcctggaagaaagtttgcatagaagtgtcatttgtgagtagaagcacaattctccactagcttttaaattcaataacttctaaaatatccctatgtttgatttagatttctttcttcatggkcttaaaagaacacctttttttccctcaattttgatacctttttgtttttttctcgataatataaagcatacttattcatatcacatggatattttcatagtaatattatataacacatcactcgaaaactcactggcctaaaacaaaaatcgcatatttttatgaatctgttgactggctggaactaggctgggctttgctgggggcctctgcctaaaactggggcagctgatgtggctcc

SEQ ID NO: 235351 - DNA, 578 bp, Homo sapiens
catatggctcctggtttgagtctgttttatgattgtgcttagggaaggtttggaaagtaggaaaggtggcgaggctgtgattctccagaattagttgcaggtaggtagataaataggcagacatgaggtttgaagcaccttccacttgagttttacctgcttcattgctgcagcctgagaaggccagcagagcttcccagggttttgggtaagaccttggatgcctgctgtactggtgtccttgggtgctcagtggtggcttccccagctattctttcccaggtcttctaacagctgtagaagcttctaattcccttcattaaagcccttcctacttggactatgtggaattggcttcaagtgtttgatgactggactctgactgatacatagggtattattcttctttccagtttttagacgagtgagctgaggtttagagaggtgaattgaccactcacaaaaaatggcagagtgggatttacacccagacggtaatcwcaagccttcaccatctctgaaaaagcacctggagatccaggtgcatgaacactgctcacagcatcatacatataatg

SEQ ID NO: 235352 - DNA, 592 bp, Homo sapiens
tagttttggttttgctgctccttccagacggtttgatgcatctcaattcagccaaggccctgcgcctggcagttgtgctgactggatcccacagttggcgtcttgtcccacaggacctctccagaacccgtcttctgcaccctactgtggcattactttttcagggagytcattgagctccacacagtctgctccactgcaacctgctggaggccgtatgaccaggccttctgctggcaccttccctgagctggattctccccagcttcatttctctcttcctacagaccctgatcccatcagaggttttgggtcttatcatccctctgcttcctctccttttcattttcaaccttccgcagcctctttgactgccaacctgaggctgccaatagcctctgccttacctgagcctctttacagtcagtcctggactaccccagtagatctctgtcttctggaagaatcagtaagcggtctcgaaggaagtcaatatcctgactatggttttcaaagttgttctgaaacagaaagtcatgagctatgagaagtacttctagacagttgctttttacaaataaaatgtgataca

SEQ ID NO: 235353 - DNA, 547 bp, Homo sapiens
ctctgtcttctggaagaatcagtaagcggtctcgaaggaagtcaatatcctgactatggttttcaaagttgttctgaaacagaaagtcatgagctatgagaagtacttctagacagytgctttttacaaataaaatgtgatacaacagacaacagtatcccgtgctttctggaggtaatagaggaggatgaaatagtgtgcacacagcactggcaggatgctgtgccttggactgaactcttcagtctacagacagaggtatgtgtcttatttctccttaaatctgtggttagctggcttcatagtttagaacggggctcctcaaagcagctggtcaaggaactgtctatcgtcagtctgtagtgaaggaaggggcttgtgcactggggtgtaaatcatactgcttccttcactgaggaactcttgctacagaacaaaacagacagctgaacaaaacagtgtgcttgatgctggctggtgtttccctaccaacattagaccagaacctcatgctggggaatgttactattcctcacgtgaaaatgaa

SEQ ID NO: 235354 - DNA, 547 bp, Homo sapiens
ctctgtcttctggaagaatcagtaagcggtctcgaaggaagtcaatatcctgactatggttttcaaagttgttctgaaacagaaagtcatgagctatgagaagtacttctagacagttgctttttacaaataaaatgtgatacaacagacaacagtatcccgtgcyttctggaggtaatagaggaggatgaaatagtgtgcacacagcactggcaggatgctgtgccttggactgaactcttcagtctacagacagaggtatgtgtcttatttctccttaaatctgtggttagctggcttcatagtttagaacggggctcctcaaagcagctggtcaaggaactgtctatcgtcagtctgtagtgaaggaaggggcttgtgcactggggtgtaaatcatactgcttccttcactgaggaactcttgctacagaacaaaacagacagctgaacaaaacagtgtgcttgatgctggctggtgtttccctaccaacattagaccagaacctcatgctggggaatgttactattcctcacgtgaaaatgaa

SEQ ID NO: 235355 - DNA, 547 bp, Homo sapiens
ctctgtcttctggaagaatcagtaagcggtctcgaaggaagtcaatatcctgactatggttttcaaagttgttctgaaacagaaagtcatgagctatgagaagtacttctagacagttgctttttacaaataaaatgtgatacaacagacaacagtatcccgtgctttctggaggtaatagaggaggatgaratagtgtgcacacagcactggcaggatgctgtgccttggactgaactcttcagtctacagacagaggtatgtgtcttatttctccttaaatctgtggttagctggcttcatagtttagaacggggctcctcaaagcagctggtcaaggaactgtctatcgtcagtctgtagtgaaggaaggggcttgtgcactggggtgtaaatcatactgcttccttcactgaggaactcttgctacagaacaaaacagacagctgaacaaaacagtgtgcttgatgctggctggtgtttccctaccaacattagaccagaacctcatgctggggaatgttactattcctcacgtgaaaatgaa

SEQ ID NO: 235356 - DNA, 492 bp, Homo sapiens
gaagaatcagtaagcggtctcgaaggaagtcaatatcctgactatggttttcaaagttgttctgaaacagaaagtcatgagctatgagaagtacttctagacagttgctttttacaaataaaatgtgatacaacagacaacagtatcccgtgctttctggaggtaatagaggaggatgaaatagtgtgcacacagcactggcaggatgctgtgccttggactgaactcttcagtctacagacagaggtatgtgtcttatttctccttaaatctgtggttagctggcttcatagtttagaacggggctcctcaaagcagctggtcaaggaactgtctatcgtcagtctgtagtgaaggaaggggcttgtgcactggggtgtaaatcatactgcttccttcactgaggaactcttgctacagaacaaaacagacagctgaacaaaacagwgtgcttgatgctggctggtgtttccctaccaacattagaccaga

SEQ ID NO: 235357 - DNA, 550 bp, Homo sapiens
cggtctcgaaggaagtcaatatcctgactatggttttcaaagttgttctgaaacagaaagtcatgagctatgagaagtacttctagacagttgctttttacaaataaaatgtgatacaacagacaacagtatcccgtgctttctggaggtaatagaggaggatgaaatagtgtgcacacagcactggcaggatgctgtgccttggactgaactcttcagtctacagacagaggtatgtgtcttatttctccttaaatctgtggttagctggcttcatagtttagaacggggctcctcaaagcagctggtcaaggaactgtctatcgtcagtctgtagtgaaggaaggggcttgtgcactggggtgtaaatcatactgcttccttcactgaggaactcttgctacagaacaaaacagacagctgaacaaaacagtgtgcttgatgctggctggtgtttccctaccaacattagaccagaacctcatgctggggaatgttactattcctcacrtgaaaatgaacatctctgaacagatgatggggtgagatc

SEQ ID NO: 235358 - DNA, 576 bp, Homo sapiens
ctggaagttaaggattaaaatcctataaagtagggaaccacagagcagggagctctgaaatctgcatccaaatacccctcagattcttggctgtctcctaacctctacrtatacagggtgcaacctcaaggaatccagaaaaaagccacagctgggaagctacagagctaagcagagatttcagctgctgcctagtactggccagagtttacagttcaagtggcaccaaattagagagactttatgaatatctttccattgaagccataaaagggtcataaggatcatatctcatgatcaaggactatgccccaggacaaaaggataaaccaaaatagacccatcctaataaagcctaaaacaaagcctacacaggacccaccagaacaaaactgaacactctttagagtaagatagcatagctgagagtctctacaaggtgtcatttttaatgttcagtatggaatgaaaatttaataacatatgaagaagcaggatatgacttgtgatcaaagggaaaatgggctacaaatgctgacccacagatgacccagatgttagaattagcagacacag

SEQ ID NO: 235359 - DNA, 576 bp, Homo sapiens
ctggaagttaaggattaaaatcctataaagtagggaaccacagagcagggagctctgaaatctgcatccaaatacccctcagattcttggctgtctcctaacctctacgtatacagggtgcaacctcaaggaatccagaaaaaagccacagctgggaagctacagagctaagcagagatttcagctgctgcctagtactggccagagtttacagttcaagtggcaccaaattagagagactttatgaatatctttccattgaagccataaaagggtcataaggatcatatctcatgatcaaggactatrccccaggacaaaaggataaaccaaaatagacccatcctaataaagcctaaaacaaagcctacacaggacccaccagaacaaaactgaacactctttagagtaagatagcatagctgagagtctctacaaggtgtcatttttaatgttcagtatggaatgaaaatttaataacatatgaagaagcaggatatgacttgtgatcaaagggaaaatgggctacaaatgctgacccacagatgacccagatgttagaattagcagacacag

SEQ ID NO: 235360 - DNA, 576 bp, Homo sapiens
ctggaagttaaggattaaaatcctataaagtagggaaccacagagcagggagctctgaaatctgcatccaaatacccctcagattcttggctgtctcctaacctctacgtatacagggtgcaacctcaaggaatccagaaaaaagccacagctgggaagctacagagctaagcagagatttcagctgctgcctagtactggccagagtttacagttcaagtggcaccaaattagagagactttatgaatatctttccattgaagccataaaagggtcataaggatcatatctcatgatcaaggactatgccccaggacaaaaggataaaccaaaatagacccatcctaataaagcctaaaacaaagcctacacaggacccaccagaacaaaactgaacactctttagagtaagatagcatagctgagagtctctacaaggtgtcatttttaatgttcagtatggaatgaaaatttaataacatatgaagaagcaggayatgacttgtgatcaaagggaaaatgggctacaaatgctgacccacagatgacccagatgttagaattagcagacacag

SEQ ID NO: 235361 - DNA, 629 bp, Homo sapiens
tgtgaggctagagctcagggaagaggtcagagttggaaaagactgggagaattctcaatgtcagtagtatttaaagcctggcactggatgaggtcacccaaagaaagaaggtggtctgagcagagcaggtgctaggaccagcctgccacacagcagggtttagtgttcagactgcacaagaaccagcaaagacgctgagaaggagtggcctgagaaacaagaggaaaactggagaaaattgaatcacagatgcaaggggatgggatttcatggatgtaccttttccatgggcttttcctgtgtttcactgtattactccctattatccatgttatttttctgtaagcgtgtgcttttctttcttcctctacgtagagtctcaagctgatttttttctctgacttgtttttatatctctgtayccaactttgtcttttatcctcttcttcatttctcttttatcgtcccttctccttctgaatttgttttttaaatgacgctgatacacattaggcatttcatcagtttattatttattatattattcttggagttgtatgttgctattattaatattgcttaaaaattagtctaacattttgtaaataatacccaaaaaataagccaca

SEQ ID NO: 235362 - DNA, 629 bp, Homo sapiens
tgtgaggctagagctcagggaagaggtcagagttggaaaagactgggagaattctcaatgtcagtagtatttaaagcctggcactggatgaggtcacccaaagaaagaaggtggtctgagcagagcaggtgctaggaccagcctgccacacagcagggtttagtgttcagactgcacaagaaccagcaaagacgctgagaaggagtggcctgagaaacaagaggaaaactggagaaaattgaatcacagatgcaaggggatgggatttcatggatgtaccttttccatgggcttttcctgtgtttcactgtattactccctattatccatgttatttttctgtaagcgtgtgcttttctttcttcctctacgtagagtctcaagctgatttttttctctgacttgtttttatatctctgtatccaactttgtcttttatcctcttcttcatttctcttttatcgtcccttctccttctgaatttgttttttaaatgacgctgatacacattaggyatttcatcagtttattatttattatattattcttggagttgtatgttgctattattaatattgcttaaaaattagtctaacattttgtaaataatacccaaaaaataagccaca

SEQ ID NO: 235363 - DNA, 629 bp, Homo sapiens
aaaagtttacttttggctgggcaaggttgctcaagcctgtaatctcagcactttcggaggctgaggcaggtggatcacttgaggtcaggagttcaagaccagcctggccaatatggtgaaaccccgtctctactaaaaatacaaaaattagcaagatgtggtggtgcacgcctgtaatcccagttactcgggaggctgaggcaagagaattgctctaacccagaaggcagaggttgaagtgagcgaagattgtgtcattacactctagcctgggtgrcagagcgagaatccgtctaaaaaaaaaaaaaagagtttaccttttcctgtttatgtgcatacaggtatttgggtaccacatttgtaattcacagttagtttgaaagatagaaattgaaacagtatggttgggagcctggtatgtaagccgtttgctggtgggcatgtgtgtattgggcccttgtatgtacgatctctgtgatcccatcattactgttcatttcttccaggagaggaatgacacacttctcactttaattgccagattatctccgattctgaatcagtggaatataatttaatatgattttactatgattaattcagggtcattctctcccaggtgctgctgg

SEQ ID NO: 235364 - DNA, 629 bp, Homo sapiens
aaaagtttacttttggctgggcaaggttgctcaagcctgtaatctcagcactttcggaggctgaggcaggtggatcacttgaggtcaggagttcaagaccagcctggccaatatggtgaaaccccgtctctactaaaaatacaaaaattagcaagatgtggtggtgcacgcctgtaatcccagttactcgggaggctgaggcaagagaattgctctaacccagaaggcagaggttgaagtgagcgaagattgtgtcattacactctagcctgggtgacagagcgagaatccgtctaaaaaaaaaaaaaagagtttaccttttcctgtttatgtgcatacaggtatttgggtaccacrtttgtaattcacagttagtttgaaagatagaaattgaaacagtatggttgggagcctggtatgtaagccgtttgctggtgggcatgtgtgtattgggcccttgtatgtacgatctctgtgatcccatcattactgttcatttcttccaggagaggaatgacacacttctcactttaattgccagattatctccgattctgaatcagtggaatataatttaatatgattttactatgattaattcagggtcattctctcccaggtgctgctgg

SEQ ID NO: 235365 - DNA, 629 bp, Homo sapiens
aaaagtttacttttggctgggcaaggttgctcaagcctgtaatctcagcactttcggaggctgaggcaggtggatcacttgaggtcaggagttcaagaccagcctggccaatatggtgaaaccccgtctctactaaaaatacaaaaattagcaagatgtggtggtgcacgcctgtaatcccagttactcgggaggctgaggcaagagaattgctctaacccagaaggcagaggttgaagtgagcgaagattgtgtcattacactctagcctgggtgacagagcgagaatccgtctaaaaaaaaaaaaaagagtttaccttttcctgtttatgtgcatacaggtatttgggtaccacatttgtaattcacagttagtttgaaagatagaaattgaaacagtatggttgggagcctggtatgtaagccgtttgctggtgggcatgtgtgtattgggcccttgtatgtacgatctctgtgatcccatcattactgttcatttcttccaggagaggaatgacacacttctcmctttaattgccagattatctccgattctgaatcagtggaatataatttaatatgattttactatgattaattcagggtcattctctcccaggtgctgctgg

SEQ ID NO: 235366 - DNA, 558 bp, Homo sapiens
gaattctgggtatgtgcatggaattaaattaatgcctatggaatgcactggagctttttaaaattgcagatgatgcacatgaaataaaaacagaaaagtgaaagacagaataaggaagttagagaagagcatcaaagaaagaataggaattaagatgaagaacaaaataaggtcaagtgaagaaattagtgacaaataaggagaaaagagtttaaaagagcttaaaaaaacataagaacattggaagaagagggtgttacatagaaaagtcataagaaaacattgactttcttaagtcartggactgggaagaatatcacaaattgaaaatataaaattaaaacgtttcattcttaaaatcgctacacatatgctattacattattgcttcccaggttacacacactgtaatctcatcatcccagccttgggatgctgttctatgtgaatcaacatcagacactagttcaggtcaggtgtaaatgatgtaatttcactgaactacagctgttgatgaactaatcattgagtctttacattgcacaaaatagaaaaaga

SEQ ID NO: 235367 - DNA, 617 bp, Homo sapiens
ataatataaattttacatcccagcactttggaaagcctaggtgggtggatctcctgaggtcaggagttcaagaccagcctggccaacatggtgaaactcggtctctactaaaaataaaaaaaaattagctaggcatggtggtgcacacctataatcccagctacttaggaggctaaggcaggagaattgcgtgaactcaggaagcataggttacagtgagccaagatcatgccactgcactccagcctgggtgacagagcgagactccatcttaaaaaaaaaagaaaaaaaaaaagactctccactgctgagattaatccagaggagacagaccattcttttaactaggtaaaaatccaaagagtgttcaaaatacagtgtataggttggtgcaaaagtaaatgcgggttttttttccattaaaaactgcaattacttttgcatcaacctaatagtagatctygtttttttttcccctgatgcacttggctgataacatttgcatgcatgatacataaaaccatgaatacatccatattatagattaaagtagggatcacagattccctgtgtatggcttcaactctacctcatagtatcctattctagtcaagaaa

SEQ ID NO: 235368 - DNA, 420 bp, Homo sapiens
tcgaaaattcatagaagtggaacatgctatacttatatcactccagtatagcctcattcaagttatttttttttcttcaatgatatcataagcagcttgaggccaaggctcatgtttttcttctatgttggtaattaaaatactagcaataatggtattatgtggtacttactatgtgccaagtaataaacaaatattatgtatggactgttatatatttctgagcctcaccatatccctgaaaaatggataacagttaatcttcatgattcacagattttatatttctgaatygacctatgtgttaaaatttatttgtaatattgaaactaaaatgcacagcaccatcatagccaactgtggacatgcacaaagtggtaaaaattttgagttggccaatgtgcacttttctagctgagg

SEQ ID NO: 235369 - DNA, 540 bp, Homo sapiens
ccagtctgtcacgtctgggtcagcatcaaatctggcccaagtcagtagtaaattaacgtcattgccatctgacagctgcttagaaggcttatgtagaatsagttgttgtcagtccagctcttagcaaacaggtgcccagatgacaacaccagctctaacaattggcactgattagcatccttcctggcattgtaggtgaaaagcactcgggacaactaccttgtaatatttttacacactggtgagactattcgttgtctttatacagggtataaagaatgtttgaataacatacgtttctgtccagaacgtatttagttgaaagacaatttcccagttcttgatcttctatccacaacacatgcatactgtgaagagttctcttttttttgccttatgtctaccctttcactacctatttcctagaatgacatgtccaggtttatctgctagattgttttcccttttttctttctggattatgaagttgagaataaatgggtttgctcatcttacctcttccttgtttcaaactgtcct

SEQ ID NO: 235370 - DNA, 587 bp, Homo sapiens
caatgtgctgagcatttgtgcaatcagatggtgaccaaaaaagtgtgatatgtgaggagttttgttgcattaacttgagagaaagtagggagaaaaaaggaaagcaaatattctcctactttctgtctctttctctttgtctcagtttctttgtctctcttggtctctctgtctgtagctccagctatctgttctaataaactacccataagagtagaggaaagtaggagaaataaagtccttaaatgggattcaagttctttaacatctgtaaaaaatgttaggtaaagatgactaaataatcactccaacatttgtatttgtttgtttaatgaagatttgaatcatagaaacagagttttaaggaacaataacctaaaaggggatayttatacctaactcttcatatttccctatggaagagcttccattagagtagtatctttagcctttctccatcttcatcactcactcatctccagggaaggaggagtgatatacctgtccaataaatttaggagaaagcattggtatgcttggatcaactccctttgctttagatttgtctacctacaggggcatacatt

SEQ ID NO: 235371 - DNA, 232 bp, Homo sapiens
tgtaccactgcactccagcctgtgcaacagagcgagactgtgtgcacaaaacaaaacaaaacaaaacaaagcaaaacaraaaaaaacaaaaacaaaaaaacaacataacaaatgttgacaaggatgtgggaaaattggaaccctgatgcaatgttggtgggaatgtgaaatggtgcagctgctttggaatacggtaggcagtttctgaaaaaacaaaaaataatccaatgat

SEQ ID NO: 235372 - DNA, 565 bp, Homo sapiens
cattcttttagtcaaagggaggaggcaaggtgaaacaaaaaattacttgagtacaattatgatgagcacttcaaatagtaagtacaggktgctattttaacctaaaaactgaagaatcaaggaaggcttcctggagaaagtgacatataattaaaactggcagtgtgcggtacaataaatgctccaggcagaggaaacaatttgtgcaaaggccttgaagcaaggaagagcttggggcatcgagttcagcagggctggaaggagaagagtaagaccaagtatagagtaatggtctggtgagagaggccatgattagagcctatagggccacatgggcagccattgaagggttctaaaaaagtgaaatgattcaattttaaattttaagatagtttgccttctgtgggtagaatagatggccaatgccgtggaggagaccagtgcagtgcttcaaccctgaaacattgatggctttaggtaggatgattagactaaagatgagaaaaattggtggatacaaggtaaattgaagaggtagacaaaactatgtgagaatttaggaaga

SEQ ID NO: 235373 - DNA, 652 bp, Homo sapiens
gccttctgtgggtagaatagatggccaatgccgtggaggagaccagtgcagtgcttcaaccctgaaacattgatggctttaggtaggatgattagactaaagatgagaaaaattggtggatacaaggtaaattgaagaggtagacaaaactatgtgagaatttaggaagacaaaggggtcaaggatgatgcttgctttctgagttgaggagctgggtagtaagtggtactgttctcctccatctgcccccttaatccaattttcatgccacatcaaaagagtaatctctaagataaagtttaatcccacaattttctgcttaaaaccctcccmtgcttctccagtactgacaggataacacagaaagaactaagatagctgtgcttagtgtgatccaaaggccctgctcataagggctgtagcctaccattcccatcacggctcatatttactctcctatgcagcagccacacagttaattttcctgaatatttttgatctgtggttggttcaatccacagatgtgaaacccatggatattcttattttgaggggtaaaattcctatttatccttaaaatgctgcttaaatgatgtattctccaataactctttcctaatatctcagttattgaatatatgaatattatagc

SEQ ID NO: 235374 - DNA, 593 bp, Homo sapiens
taatgagcagactgttggataattaatatttggacttagaatgtaagacagaatgagggccaattcacatgtttcacaactttctactataaaatagtctctatttatgtccatgctcaaaaacattggaaatatcagacaaaacattataatgttttacatatatagtatcaaattggataacataaaaagtattaatagtaagagatcattattcatattacttaatttgatactagtgtatacaatttggaaaactcctgaatactatggcgcataaccctcagttctagtcaccaaactacagtgtcagtcagtccctgagctagcatttgaggaaatcaacaacaaatcagatgtcttttgggtagtcagtataaataatgtttagaatttttactcacagaacataacttttaatatggataattgttgctatataaacaatcagaaggcagaacaatcacactatcctcaggcaagatggacaatgatataggatgatattgactttatttgcagcattcgactgctttgarttatgcttaatatacctcttacagtttaatcacatttaagggaagaaggtaaac

SEQ ID NO: 235375 - DNA, 595 bp, Homo sapiens
gtttactgattattaaataatgaatgtgttttctttcccttctaccttggtggagagattttttaggttggctaaagattttgtttttaattatatttctccargtgtagtcaaatgctatagagcaggttataaaaggttggcaaactttttctgtttgcatatagtaaacattttaggctttgcaggacatgaagtctctattgtaaatgcaactctttccttgtcgcaccaaaacgaccgtatatagattataggtaaatgaatgggtgtggctatattccaaaatatgattaacaaaataagcctcaagctggatttggctcactggctgcagtttgctcactcttgctctagagacatatgaattttcaatgtaatgacgaaatatcaaacataatacatgactaaaatgacttgtcttgactaaaccggacttgttaactccagccatatgggtagggtgtaaagtggtgctctatagaatgtagtttttttttttaactttagtagactacatttttagtaggatgctttatctaaacatagttttatccttcataactggaactgatgggtaacaaattctgaaatg

SEQ ID NO: 235376 - DNA, 593 bp, Homo sapiens
aacagtaaactgaccccatattcttattaaattgttgatttgaagtaacgttctaattaacttttcatgagtttatgtctttcaccaaatagactgtaaatttcttagaaattgagactcaagttttattcatcttccaaccccgtccccaccctattccaaacctgtacctacctctgcacacagraagttatccaaaaagactttggagatttgattttttgataataattgtaagcaacatgtgtgaaaaagattttgtgtgcaagttactggctgggcactgaggacatacatattaataaacacagatccttcccttaagaagttacagttagtgatgaaaacaggaacgtaaagagacggttacagttaataagcaaaaaagtacatagaaggcagaaccaatcagactaggggacccagggaggtcactcacaagaaatgatacctgaattggtttgtgaagacattggacgattaaatgttaggtgggtgactgggggagggaagggggagaacgttttcaaaaaagaacaaggagtttgtgtaatggtacagaaggtggtgttagagcacttaccttgttgaga

SEQ ID NO: 235377 - DNA, 366 bp, Homo sapiens
aggtgaagagtgcaaagggtcagagcttgggtcctgctyttgaaacggttgctgactcctatttaattaaaatcagggatgccaagaaaaaaaaaatctggtgctctgcttatccagggatatgcatttcattttcaaatgatatatcaattttacttttttcaggtacttccgaccatgcaattcagatatgccttactttctatcaaatctttaaagtcattttaccacaaacttctgaaagaactatacattttccactgtcagagatgtagttccacaattgtatggccaaaacaataaagatcatattttaagatgagcattttaaaagataaggaaaattcaatttgaatactgtaaata

SEQ ID NO: 235378 - DNA, 574 bp, Homo sapiens
tcctctggaaaggtttttttttttttttttttttttcctttttgggggcactagaaacaaggattcctttaatcagttccaagacttgagattatctgctcatccagtgatttgaacttggtccagcatgctgacttagacacaaccccttggctgcctggggactctttgacatgacctgcagctctgggatgtgtcacaactgtggctcagtccatgaatagctactttttgatgacaaatgcttctagagaaagaggtgccatataaagagctaaagtctcttgattcttttcaatacttttgacctagcaattctttacattttgttatttattaaaaggaagttgattctacaaagtatacatatttcaaaacaacttgttgtacataataaatatataccatttttctttgtcaattaaacaatttgtttaatgtctaaaaraaggaagatacccttagctggagtggtggaatgacttatctagtcttctgttactgttagctgaagtaaacttttattatctgtatctccaagttctcttggaggcactatgttgtccaggtaatg

SEQ ID NO: 235379 - DNA, 556 bp, Homo sapiens
atcacaagtttttgttcagctatcaccaaaactcttaaaaacagttagaatactaggaacgggtgggcagtttccaatgagtcattaaactgtgttgaaatttctgttgtgataaggagagaaataccaaacartcataaattttgttagaaaaacttcaagtcaaagatcgtgctgggtatcttcaatttgcctctctagatccaacttttcccttctggcttctcagtgatgtgccagtggagccctcttcagaagattaaagggaggcaggagagtgaggttagtatacacagcatcttctgtctccaagtttgttcagttctagtaccctttcttcctctgcccttccaggcctagagggaagtaataaccctgctgtaccttctcctaagtttcagcactatcctgtatggtttatacccatgttgttgcctacctacatacttttattaacatcttttcaaatagctgaatatgagtgagctatctgggaccttgaataatagaagcatacatgttaaaaaatgcaaactatgaaataataaaaatttaa

SEQ ID NO: 235380 - DNA, 479 bp, Homo sapiens
gctttaagtagtattaattattgcttaataagagtgaagttagaatggctgaaggggyaaatgagtaatgaatccatatttttatgtgttatagctacttctgatatttatagctctttagctttgttttaaagacatcatcgtgttttttggttgaaattatatttttattcaaaatccagtctactcattctatgttattctgtatactataagatttccttctgttatttttagggcttagaaaaaaattgtaaacacagcaaattattttccccttggactgttttttttttttttaacataaagttgattttggtttatttctcttctaaaccaccatagtagtttcccaatggaattatgttgagattttcagaaagttaacatataaaggaagtgaattctctttttcctactctacttaatgcaaagtttcacttaataagagaatttcactgagatataaagggctaaaa

SEQ ID NO: 235381 - DNA, 627 bp, Homo sapiens
aacatccagtgttgaaattttataaccttgaagacttttcccatgagccatctttattgatatatatgcatatgttatgtgtaatgtgtgtatgtatatgtatgtgtatatattctgagcttatatgttctctctctctmtatatataaatatatatggctctgtacgctgccatatatgacatagtctctttatgtcagtaaacagagttccattctgccttgagaagcaatgtgacatagtggataacaatctagggtttgaattcagatggccctaggctgtacatcccattgcttactaattatatgacctgggatgggttactaatcttttctaaacttcaattatatagttatttatagttagttatacatttatatagtatatggaattatgtagttatagaacatatttataatagccatatggtttatttagctatatagtatttcattttatgaatatacctatttacaatgtctttaaattaggtctactttatcctaccattcaatttttgaatcctgaagctgaattttttatttttgtgcttgttaaattttattttattgatttcaaccaaaatacttcaggatttgggataatttaaagatacttttcaat

SEQ ID NO: 235382 - DNA, 605 bp, Homo sapiens
gatttgtctgcgtgcctaccaatgggtttttataccttcagataattattgttgcacagtagtatcattttctgttaggctgaagattctatttagcatttcctgaaagataggtctgataatgatgaattctttcctttttgtttgacaaggaaagtctttatctctccttcatgcttaaatgattgctttgctgggtacaaaattcccattcccttctgggctatatggtttttgttgagaaatttgttgccatatgaactggaccttctttataagttaattgcctctttttgcagctgtttttagtatcctcacttttycttcacttttgagattttgattattatatgacttggggtgttcttatttgtattgaattgtcttggtgttctctgtccttcttgtacctatacattcatgtttctttaaatatgtaaagttctctgttgttatttctgtgaataggctttttattcctatctctttctgtactctttctttaaggccaatgactcttagatttgcccttctgaggctgttttcttgatcttgtgtcttgaagtacacttgtaagtataattcattcttttgcattcttcatt

SEQ ID NO: 235383 - DNA, 635 bp, Homo sapiens
gtaggtgcctagaggataaagagccaaggtgaaagtggctgaaaagcccagcagttttcagaagacttactataccaaggtgcctagagatgggggtcaggaaaaaacaatgaggggcgtaggaaacaatgacctctgcaggtaaatctggatcactgcatggatacccaccatgtgggtagcttttccagatagactgaggcttaccgggactgaacaccagccttgatctctaattggattaaagtaatttactccaccctgagcctcatgtaacttaaagtggatcttctcaggagaaagctaacatcacagtagcagatgatttcggttccctaccaatccccacggatcttaactgttttactttaaatcaatcctttttcaagatgagaaaacctgcataggatcccactggtttagtgttagtgtggcaggccagcaagggtgggccttaccctaagcagaccttacttagtgamaaacactgcagttcccctgcccctactatgcaatatctccaaggtgcatgttgtaatttatttcctgcttcatcagtgggattacactatactttcccatactggtgattaatgtgataattcaattttcaatggcttcttttcctttccttc

SEQ ID NO: 235384 - DNA, 530 bp, Homo sapiens
tgactcagtccttatcttcttctttacttcatagtacattgccctgtacacagtgcgaactccaataaatatttgatgaagaaaagatctgctagcaggaaaacgagcctgcaaggagtccaatctrtggaatagtaattagggagcaattccttatacacccaggcaaaaccctaaggaaaaggcttcaaagcaatttcaagtgaattctcccagataatcaacagtgacctaattaagattgtaaacaatgatgtaaagttggcccaatgaatgtccactttatctaccaaaaatgttatgtgtgaccaataagagcatatgaaaaaacacatgaaatgaaaaaaattagtttggcacaagcttttttctctttctatatatttattttctttttctccctttaaattaaattaaagaatttaatttttctccatattaatattagtatacactcacatatatcccaatgttcttcactcacgttcagaaaacatgctctgctcaagacatatgtttccatttccact

SEQ ID NO: 235385 - DNA, 619 bp, Homo sapiens
cttttgggtttcttccaggcatgtgtgcagtttcccagtaactaggtatttgtggggagtatatacagtcattctatgagtctttaattttaggatctcctggtcaaattgcttgcttgtctgcacttactcaaactaagaccacaaccttgggctagaaaatcgatttttacccatttgtttcctatcaagttcactactaatagaagacaaaactgtgttttcccattctttgatsatagctgtttgagcaccaccacattcttatatcaactatggggaaataggagtgggctttgttaagaatgtcacagatcagtgatttactttcatgatgatctatgcagttttacatgaataaatgcttctttaattgctctctgcctttggtgtatttatagacccctggaatgatagtatgggtcaattggacttaatatttttatagagatttcttcaatatcctcacataaccattgttggaaattccttaaatgtggtccttggatccttggatttgcagtaaatgtgcttccctgctcctcagtgcccctcatctcacaccataatgtacaagaaccatgaacacaattgaaaattaccaagagttttctttttg

SEQ ID NO: 235386 - DNA, 611 bp, Homo sapiens
ttctcattctcatatccttgtttgatacgttgtttactaccacttttacacatatttcttcagaagaatggtacatactgtaaagctatacatttactatatacatttcactgtaaaacttcacattattattacatataataaaccaattattttaattatatattaccttgataatatttagcttgcagctttacattactggacaaagaacccaaactttagtatagtacaaactactctacaaaatcaaatggtctacacccactacccttggaatacaataattatggatatttttactatcaaaacaatggtttaacaaaatcacatctctgaaatcgagtatttaaacagrggcattttatatattcattcgtaaagagtgataattccaagtacataaaattatccataaattggttaattttacttaaagttaaattgcaaaattatactagaccaaaaattagagtttggtgacccatagtcagattcctgtatgtgaaataattacttttatgactgattaaattttataaatttctttattagtagagaagaggtcacatttctttatattttctacgtatccaaagacatttattgtt

SEQ ID NO: 235387 - DNA, 610 bp, Homo sapiens
tctactctaataccttgttttatttaatttcctctttagaggccttatctttacatacagtyacaattcaaagtgcctgtatttcgggaatttacagctttgacgtgaattttggaggaacacaattcagcctgtaacaattacttcatcctatccaggtgtactaaactatcatttatagataatggcagcagatgtgtacccatattcatataaaactatgatgttatttgaattctggttcctcctgcaaatactgtgaaatcaaaattagtttgggagaaattacttaactaatcatgcaatttatataaatcatgaagaaacttttaatatatctctctagaactaaaatcatccagatgttatttctcctttctgcctaagaaattacttttgtaatttgcaattctttgtgctattcaaacactgtatcaataaattataactgtggtcatataaagtgttgacttttgtgcttcatactaaactgcattgtagaagagaatgtctttgtttaaaaaatgatattttatcctaaacaccacacaatcagaattgtataaaattaaaatcaatgctttaatagttgatttctgtatattatata

SEQ ID NO: 235388 - DNA, 588 bp, Homo sapiens
aactgtgatacaataaatatgtattattttgascctcttagtttgtggtaatttgttatacacttttagataactaatttatttttttcagtttttaataggtaattgacagattggagcaaaaactacaatgatttatagagttcataatacatgtagaagtaaatcatatgacagtaatcaatccagagttaaaagggtagaaatggaagtataacggtgtaagagtttaacattacttgcacttacataatattattttaaggtagattatgataaagatgcatgttttaaaccatagagcaataagtacaaagaacactgacaaaattaaaccaaactttgttacatattaatctgatgatagagtataaaaatgctaaaaaattatttagtccaaaaaatgcattaaagattgaaaaaataacaaagaacagataggtgatatagaaagcaaaaagcataaatgcatattagaattcaaatttatcaataatcaaatgaatttaaattaaatgtactaataactaaaagacagtcaaattagatgcttttcaccaaaatcctactttaagtttaaagaaaaaa

SEQ ID NO: 235389 - DNA, 588 bp, Homo sapiens
aactgtgatacaataaatatgtattattttgagcctcttagtttgtggtaatttgttatacacttttagataactaatttatttttttcagtttttaataggtaattgacagattggagcaaaaactacaatgatttatagagttcataatacatgtagaagtaaatcatatgacagtaatcaatccagagttaaaagggtagaaatggaagtataacggtgtwagagtttaacattacttgcacttacataatattattttaaggtagattatgataaagatgcatgttttaaaccatagagcaataagtacaaagaacactgacaaaattaaaccaaactttgttacatattaatctgatgatagagtataaaaatgctaaaaaattatttagtccaaaaaatgcattaaagattgaaaaaataacaaagaacagataggtgatatagaaagcaaaaagcataaatgcatattagaattcaaatttatcaataatcaaatgaatttaaattaaatgtactaataactaaaagacagtcaaattagatgcttttcaccaaaatcctactttaagtttaaagaaaaaa

SEQ ID NO: 235390 - DNA, 588 bp, Homo sapiens
aactgtgatacaataaatatgtattattttgagcctcttagtttgtggtaatttgttatacacttttagataactaatttatttttttcagtttttaataggtaattgacagattggagcaaaaactacaatgatttatagagttcataatacatgtagaagtaaatcatatgacagtaatcaatccagagttaaaagggtagaaatggaagtataacggtgtaagagtttaacattacttgcacttacatartattattttaaggtagattatgataaagatgcatgttttaaaccatagagcaataagtacaaagaacactgacaaaattaaaccaaactttgttacatattaatctgatgatagagtataaaaatgctaaaaaattatttagtccaaaaaatgcattaaagattgaaaaaataacaaagaacagataggtgatatagaaagcaaaaagcataaatgcatattagaattcaaatttatcaataatcaaatgaatttaaattaaatgtactaataactaaaagacagtcaaattagatgcttttcaccaaaatcctactttaagtttaaagaaaaaa

SEQ ID NO: 235391 - DNA, 589 bp, Homo sapiens
tggactaaaaatactgaacaaaacattaccactaaagaaaaatatgatcaaatatgattttctaataacatctatgtgttgttaacatttaaacatcaattgatataattttgaatattactataatttgaaataaaagtaaaatatataattatccactcaatccatgcaaggaaaaaaatacattttccaacactcagtaccatttataatttaaactctcagaaagccaggaagagaagaaaactttctcgatcttaaattctataataaaaataaatagctaacattatacttaatagttatagactaaatgttttcctcctcagaagggaaacaaaaaagatatctatctgttctcatcatttttggttaacattgtgctcacggtcctagctagtgcaataggcaagggaaagaaataaagaataataaarataatgaatgggtcgaataaaattttgtcaatttgtgatggcttgtttgtgtgttaaaaaagtcgctaaaatgttcaatgaaaccaaaaagaaatcttttacaagcttgagagcagttaagtgaggctactggagacaggaacaatgtgata

SEQ ID NO: 235392 - DNA, 494 bp, Homo sapiens
ttaaagtacagtggtaagtacaatttaaaatttaaaatttttggtatatatatacacacacacatatatatatctcacaacttttgtgagatgtatttatacacaacacacacacatacgatagattactactcagccacaaaaaagaatgaaatcatggcttttgcagcaacatggatggaactggagaccatcatcttaagtgaaataactccgaaacaaatagtaaaataccacacgttcttgcttagaagtgggagctaaataacgtgtacacgtggacatagamtatagaataataggcattagaaacttggaagggtgggagggggatgacagacaaaaaattacttaatgggtacagtgtccactatttgggcgatggttacattaaaagtccagacttcacccttatgcattatatccatgaaataaaactatacttttaccccttgtattaatgcaaataaaaaataaaataattaatggtgaat

SEQ ID NO: 235393 - DNA, 494 bp, Homo sapiens
ttaaagtacagtggtaagtacaatttaaaatttaaaatttttggtatatatatacacacacacatatatatatctcacaacttttgtgagatgtatttatacacaacacacacacatacgatagattactactcagccacaaaaaagaatgaaatcatggcttttgcagcaacatggatggaactggagaccatcatcttaagtgaaataactccgaaacaaatagtaaaataccacacgttcttgcttagaagtgggagctaaataacgtgtacacgtggacatagaatatrgaataataggcattagaaacttggaagggtgggagggggatgacagacaaaaaattacttaatgggtacagtgtccactatttgggcgatggttacattaaaagtccagacttcacccttatgcattatatccatgaaataaaactatacttttaccccttgtattaatgcaaataaaaaataaaataattaatggtgaat

SEQ ID NO: 235394 - DNA, 348 bp, Homo sapiens
gaattctttaacagctagggatgcccttctctgtaataactaggactgccttaggagcttatgactactggaggtatttaagctggcgatggcaaaccattggtcaaggtttcttaatttgatataaggctgcartgcatgtctttaataatgccttcaactttcaaaattacatacgttgtcaaacaaataatggttgaccagatgtctgccaaacactgtgctagtgcaaggctgaatataaaatgaaccctgccagaagatctagcaatcaaattaggggaaatggcatgtataagactaagtataatacacataagtgtaagtgctataataacagtgtaaaca

SEQ ID NO: 235395 - DNA, 605 bp, Homo sapiens
taaagtcttctttagagaatatcaagttttcttttctgggaattagtggttagctcataaagttttaaattgccattgtattaagaatgttcactactgggtatgtatgtaaaggaaatgaaaacaatatgtcaaaaagatacctgcactcctgtgtttattgtagccctattcacaaatagccaagatatagaaccaacctgtgtccatcagtggatgaatggaaagagaaaatgtacatctacacagtggagtatttttcagtcataagaaagaatgaaatcctgtcattcgtggcaacatgaatgaaccttggaggacattatgttaagtgaaatcagccaggtttaggaaagcaaatacaatatgacctcattcatatgtggaatctaagaagttgttctcattgacttagaaaatagaattgtgattgctagaggctagggagggtcaggggaggargaggatggtgaaaaattggtcaatgggtactaagctatggttagataggaggaataagttctggtggtctattgcatagttggatgactagttaacaatgatatgttgtatgtttgaaaatagctatcggaaaggttttagaa

SEQ ID NO: 235396 - DNA, 575 bp, Homo sapiens
ggattacaggcatgagctaccgcctcaatgctgttgtttatatctgcccacatcttcaagttgtcagggtgttttttcattgcaatgacaccctccaaatgaagtygacactccacctacttggtgctgcccacaaatagtaagtagagtctctgactgtcattagtaaaaatgaagtccgatttattaaggaaaaagctgacagaacagcctggttgaaaaaaaaaaaaaacaatcaaatgggaatgagaagacctgcatttcccaatggctagttggctggccactttcttgccttgacgtttttctaacatataatatgggaatcatgatttctccctagaggtcttgggaatattcttactcaagtatttggggagcattttttatggtgtatagcactgtgctagaatctgagaaagagaaagatataaatgaaaagaattgctgtcctttaggaataaaaaatgtagttgaggaagcaaaatatacatacataataaatcagtttagcaacagtaatgattgtttacctctttagagcattttatagttttcaaagttattatatgtgg

SEQ ID NO: 235397 - DNA, 590 bp, Homo sapiens
tattagtctcctatttaaaatccttctgtggcttccacttcaaccatcaggctcttctaagttcattttgatagctatgggaagcctactttgacttcattctcatttcttctctaggttcccttctggtagcttcccaccctgagcctacattcaccatgtctgttgtatasactttttgaaaggcaaatgaatctcaggaccccaaaatcactaagccaaagggaaatgtcaagctgggaacttgctcaggcaaagctgcctcccattttattcctaaataagataactacaaagattaaaaaagctacatacctccctcacaatttgcccactaggaaattccttttgggactcaagatctttatcttaaaggagttcagttggatttcaccttggcaatgtaaattgatagcttatcttcacagctgcgggacaaaggacagaactcaaagtcatccctctgctcatctgaggcaaatgcatatctgattgcttcttctcacctattgtttatacaaaaatgtacattcactgagccagactaagacaaaagtgactcttcctctaccccctctctcacatgtaaa

SEQ ID NO: 235398 - DNA, 450 bp, Homo sapiens
tttctggttctaaaaaatgttatttattgatctatctattttaatttacacctatgcagttatttatttactctggtgaatagagaacacrttcttgacacggggaaggaatacactcctttaagcttctcctagcaccactgtgaaaacttctagactttttttcctcccaaatcctatgaacatgttagcgagttcctctctgccttctactcagaactcaaaatacagtttctctaatctgaaggtaggaccaaaccccatatataaaattaccagagtaatatttgtaaagacagtttcaaaagaagaaaaggcttaattgtaacttgtaaatgatggttcatgaaggaatgtagataatttataagactggtttgatttcgttggtagaaatattttcaacagcgtgtggctgaaaagttagaaaatttctatcagtcatgcttt

SEQ ID NO: 235399 - DNA, 674 bp, Homo sapiens
acattccatatctgaggatcaaagacagaatactccaagtcagacataaccagaatatgggttaaatcattggttttcaatatttcttccaccaagggccaatggcttcttttagtatgtatgtgtatgtgtgtatgtgtgggtttgaaccccttgtttgacaggcttttaacattctaaacaagctgcattctttaaaaaatatattatatatatgagtgttaatcagaacttctgagcaacattttataaaattggcatttcattcttcttgtttattcatcacctgcaacctgcattttgctggacacagcattcaaaatccaaagagacagcatccttgctttcatgaatattaaaatatgggtttgtgtgkgtgggggtaggggacaaataaataactaataaaattccagatccattagaaagcaacttgacattttagtttgtacaatgttgccacagatacatgcagcattccttatggaacttaaaaaaatcaaaatctttccgacactcagaggtataggtgccccaaggtgggattcactgtgggattcagtgatgttattgtattaagtatccaaaaagcatgtttgaagagaatgaatgatacagggaattgcagaatgcggtgggagccccatgtgtagctagccaggcacaggcaaggg

SEQ ID NO: 235400 - DNA, 674 bp, Homo sapiens
acattccatatctgaggatcaaagacagaatactccaagtcagacataaccagaatatgggttaaatcattggttttcaatatttcttccaccaagggccaatggcttcttttagtatgtatgtgtatgtgtgtatgtgtgggtttgaaccccttgtttgacaggcttttaacattctaaacaagctgcattctttaaaaaatatattatatatatgagtgttaatcagaacttctgagcaacattttataaaattggcatttcattcttcttgtttattcatcacctgcaacctgcattttgctggacacagcattcaaaatccaaagagacagcatccttgctttcatgaatattaaaatatgggtttgtgtgggtgggggtaggggacaaataaataactaataaaattccagatccattagaaagcaacttgacattttagtttgtacaatgttgccacagatacatgcagcattccttatggaacttaaaaaaatcaaaatctttcygacactcagaggtataggtgccccaaggtgggattcactgtgggattcagtgatgttattgtattaagtatccaaaaagcatgtttgaagagaatgaatgatacagggaattgcagaatgcggtgggagccccatgtgtagctagccaggcacaggcaaggg

SEQ ID NO: 235401 - DNA, 473 bp, Homo sapiens
tttttgttaatttatttctatttgaataatataacatgttttcccctcatgtattttagtgatttaacttaaaggattaaatttttgactagaaatttccaggtaacatctgtagtctttattaagttttgatttatatgatttaaattataaaaacaccatcatcatataaaattaaaatataacaggtcagaaatgagaagtgaaattctctttctcccatcatccctagtttcctttattagaaactctattgagattttcacatgtatttgcatatattattctagacattttcctgtatccacaacattatatatgtatataatgtattataacttacataacttttatataatgtctacatattttggttttackcaaatgatatcatagtataacattattctgcagcgttttcaccaaaattatcatgcaaaaatgttcacatcagtcatttttagatcttcctt

SEQ ID NO: 235402 - DNA, 634 bp, Homo sapiens
attctgcagcgttttcaccaaaattatcatgcaaaaatgttcacatcagtcatttttagatcttccttattgttttttacaataaggaaaaagttttttttaactacacattattcctttgtgtggattattatgaactatttcactaacccttagtgagttagtcaatgacaccgagtgtctgcaatgtgcttggacttatgttggatgtcayggagacagtggcgaacaaagaccaagattttgtcctcaaagtgctcacatttttgtgtccttaaggatgtttttcactattatggcagcttttctattcagaataaattttattccatttacatttattgatttcataaatgtgtgtggtcctattctgatgtcttagaagattgtatttcatgatttattgtttccttcttatctatttatagctaaattgaatgtactctttttttttgtattttttgaggcatgaaaaacatcagctcacctaaccagcttcttttagtagttttctcaatatccttagataatacatttgaataactattttttgattaactgtatacaatttctgtctgctttgaaacttagaaattactatgtttgtattttcttttacccccaaattttagta

SEQ ID NO: 235403 - DNA, 618 bp, Homo sapiens
tctgtctacttttttaacaagttcttgctccgtgtgtctccttttgcttgttctcaagtaagggagtaacagggataaactcccactccttggtaaatctttctatcatttttggaaatctcatccattgtagtaaatgctcttaaatcttcatcttcaggccgtgacttccatctagcctccattcacgtttccgggtttatgtctgcaatgagcattccgtggctctacatagatgcmccaccatacctagaacccatgtatctcaaactcaattctttctttcccaggacattacttcctgcacttccttagtctatcaatggcactgttattctcttgaccatctagacttgaaattttggggtttggactcctcctgctcccttgctttatatgtaatcagacatcaagtctcaatcattcttttcttttaatgcttttttcagctttcgttctactgcctgtcttgttcatttatttttcacatcacgaaagatggtgtggacattttttctctcttcactttttctttctgcatgtaatatgttttgtgtatttcacctgaagccgtcctaaaacatggctttcattctgttaattcctggtgcaaaatac

SEQ ID NO: 235404 - DNA, 550 bp, Homo sapiens
ttctctatattttctaagttttctacgatgaacttgaactccttttataatcagcaagtatgaatacaattttaagaaagcaaaaaagagaggcataaaaagaattcctttggttggagattttagtgaccatctttacccactcagaggttcccaaacaagccccagtgctctcctcccttctctggtctctcccattgggccccctggggtgcctgtactcacctatgatgcaggatctgaccagttttcttagctcctcccgggttcccgcattccccatactctccccctgctcccactaatccaaatgtggctgtccttggccttattgtttttaaaaaaggtgtccaggtccctcatctctgytagggtacataagggttacttgggtatgtcccctgtgcctgctacactagcttaataatgggtaaaaagccatggagtccctgtacagagtgtggtttatactctctgtgcctcagggtcccttttctataaaatggtgataacaagaccacctacttcatagaggtcacattaagattaa

SEQ ID NO: 235405 - DNA, 590 bp, Homo sapiens
gggtggaggggacaggatactcacagccaggacggccactccagcagcaggaagctccctcctccatctgccaggcagtgcctttgccatggccccttgaaccaaaatgtctcccccttcccctgctgctctggatccaggcacgctgtcacacccacaaggcctggagcttcggaaggatggaagaggtttttccrgggaaacagagagaaggccttgctgggtctgggagggggacttaccccctctaaggaaattctttatcagcaacttccctgaaggtatgagggacacccccacccctggaggccttgcacaggggagcacctgcagacatggcctgcacagtcgcagtctctgaccctcagcaccagctggtcactggggccctgcagctccccggggcatccaaggttccagtgccactgggaggtgcagaatgtaaggccaagaatcacaaagggtgagctcagcacctggcggggtgggaggagggtgggcaaggaagaagctgaacatgttccagacaaggttttagggttgattatcagggagcccctgctgttcactgttggcccccccgaaggtcc

SEQ ID NO: 235406 - DNA, 590 bp, Homo sapiens
gggtggaggggacaggatactcacagccaggacggccactccagcagcaggaagctccctcctccatctgccaggcagtgcctttgccatggccccttgaaccaaaatgtctcccccttcccctgctgctctggatccaggcacgctgtcacacccacaaggcctggagcttcggaaggatggaagaggtttttccggggaaacagagagaaggccttgctgggtctgggagggggacttaccccctctaaggaaattctttatcagcaacttccctgaaggtatgagggacacccccacccctggaggccttgcacaggggagcacctgcagacatggcctgcacagtcgcagtctctgaccctcagcaccagctggtsactggggccctgcagctccccggggcatccaaggttccagtgccactgggaggtgcagaatgtaaggccaagaatcacaaagggtgagctcagcacctggcggggtgggaggagggtgggcaaggaagaagctgaacatgttccagacaaggttttagggttgattatcagggagcccctgctgttcactgttggcccccccgaaggtcc

SEQ ID NO: 235407 - DNA, 205 bp, Homo sapiens
ttctgccgagtgacactgtcatatgtggtgatagggtgcgagtccacrtacccaaccgaaataaattcagggaccccatggatgggatccgaaacgcccaggcgaaaatatctcagagagtgcgtccctggaaaggaggcaaagaaggaagacatgtagggtcccagatgatccagatccttcaactgcattcatttagccccac

SEQ ID NO: 235408 - DNA, 205 bp, Homo sapiens
ttctgccgagtgacactgtcatatgtggtgatagggtgcgagtccacgtacccaacygaaataaattcagggaccccatggatgggatccgaaacgcccaggcgaaaatatctcagagagtgcgtccctggaaaggaggcaaagaaggaagacatgtagggtcccagatgatccagatccttcaactgcattcatttagccccac

SEQ ID NO: 235409 - DNA, 481 bp, Homo sapiens
tctattttttcacatctggaaagttttgtggctacactggaggtacacaactgtctaaagaaggaggacccaaaaggaggaacaagttgtgaatattakttctcacacttccttaatattgatttgtatatccaatgcttcttctgtgccagccactcttctaggccctaagcttgtaccagaccaaacagataaaaatgtctgccctcatggagtctacaccctagtcgggggaaggggagaagacagactagaaaataaaatatatatttttttaaagtacagtgaagaaaaataaaactgcaaagaggaatgggcaacactatttaaaaaaggaaggcgtattaaggaaggtttcccacaaagctgaattctgagcaagtgcctgcaaggagttggggagacaggcaggtgtctggggacagcagtctggacaagaagggccatgcaaaggcccctggaaagaacatgcctggcacat

SEQ ID NO: 235410 - DNA, 583 bp, Homo sapiens
atgagtgccgtagaggctgctgagtggagaattaaggcctgcatttataaacagggtgaccagaagacataccttaaggacaccttgaaattcagccttgatgcctgggataggactgtgacttgctaggacatgcagtcagacagatgaaccaagggggacaccaattagagatgagaggaccctgagaccagtctgcaacttggagcaactgcaagaagatgctccttccagagtacagaggggaaaactgctgctcccaaaaaagattcttccccctctgtccctcagccccatgaaatgggacaaactgatccagtaccacctcagatttaggcctgttaaaagcctgggaggatattaacgaccttccccataaaacartggctttctcttcttatattttatcagcttccattgctctgcatttaaaaggaggcacacaaaattgcaatgccatcctccaaggtgtgtggcaacagccaaggtgagtggaacaaacgtgaacaatgtttcttctgctctcacaccaccaacaacatcaatacagaagacttttggccgggctcagtggctcaagctt

SEQ ID NO: 235411 - DNA, 510 bp, Homo sapiens
gaattcctttattaattccttcaacaaatatctgttgaactcctattttatgcttatcaactttgtagacacatggtgaccatgaataaacaagagagagaaaaaaaatcgctgacatcatgagagttgtattttagggaaatacagataatatatataatagatagaaatcaataatacatttgaaaataataagcaatacaggcacraaagcaaagaacaagtaaataacattaaggttaaaagttttgggaggagaagagtttgtctcacgaaatatggacaattctttcaaaagaatttattgtaatggggagaaaagtaatggagtgggacctttaaaaaggaactgcagttaagagaatgccttttctctggtaaaatatgagtaagaatataattttttgtgcatatggaaaagataaagtggttaataaaaaaattaagatgcaagggagtgagaaggaaaaactgttgaagcaatgtctttgaatcagtaagagaggatga

SEQ ID NO: 235412 - DNA, 565 bp, Homo sapiens
actgtatgattccagtcacataaagcatgtaaagtcataaaaattatagaagcacaaatagaaagatgattactgaggtctggatagagggggaagaattattgtgtcgtgagtacaaagtttcagtgttgcaaaatgaaaaatattatacagctcttctgcrcaaaatgtgaatgtacttactactgaactgtaaactgaaaggaaagtatcttgggtcccttcaagctgtgaactgctcaggacaaatctgtctcccattctattcaaagtcatctctctccttacaggaatagatgcatattctgattgcctcttctggaaagacttatcagaaactcaaaagaacacaaccatctgtctctcacctacatgtgacctggaagaccccagttggcggcagtggggtgggccttgctttgatctctttccccctttctagatggaactaatgtacttttacatagattgattgatgtctcatgtctccctaaaatgtataaaaccaagctgtgccccgaccaccttgggcacatgtcgtcaagacatcgtgaggctgtgtcac

SEQ ID NO: 235413 - DNA, 565 bp, Homo sapiens
actgtatgattccagtcacataaagcatgtaaagtcataaaaattatagaagcacaaatagaaagatgattactgaggtctggatagagggggaagaattattgtgtcgtgagtacaaagtttcagtgttgcaaaatgaaaaatattatacagctcttctgcgcaaaatgtgaatgtacttactactgaactgtaaactgaaaggaaagtatcttgggtcccttcaagctgtgaactgctcaggacaaatctgtctcccattctattcaaagtcatctctctccttacaggaatagatgcatattctgattgcctcttctggaaagacttatcagaaactcaaaagaacacaaccatctgtctctcacctacatgtgacctggaagaccccagttggcrgcagtggggtgggccttgctttgatctctttccccctttctagatggaactaatgtacttttacatagattgattgatgtctcatgtctccctaaaatgtataaaaccaagctgtgccccgaccaccttgggcacatgtcgtcaagacatcgtgaggctgtgtcac

SEQ ID NO: 235414 - DNA, 349 bp, Homo sapiens
tgtttaatttgaggcatgcaatccgatagtaatttttcatatcaaatatatttaaatattcctaaattgttctatatattagataamatttaaatcaaaataacataatttattccaaagctatagtaattaagacagcatgacatgacaaagaaatcaatgatacaggaaatgaagccactattgcatgcattcagatcataaacttgacatatgccagaactagcactttcaatttctagtaagcatattgctgtttaataaatattgttagtactattggctatgcatgaatgacaatagtttatgtcactaccttacactagatctaataaaaatcaattacaaa

SEQ ID NO: 235415 - DNA, 558 bp, Homo sapiens
agttttacaacaattgagtctaaatttctatattgaccactttttaaccttcaaaagtaatttaattttatggcttaaattcttcatctgccagatarcaggaatacctgttctacccaattattgtttttctaaaggaaaaataatataaaggataaggacttttattttaaaaaatgcaaggttagacactatgtattcaagtggtagattaccgttgtatttgctcaagactaatccaaaggaaaattgttgccagaacaatctgtatattggttatttgtatgtttaatagaaaccaagtaagtatgtttgacctattctgagaatacattcctgtaatatgtttcctatccttaaatacaaacacttgaaaaatagcagaggctacttttttcaactttatttttaataacttccacggtattgttgaatcaggatcccaaataaactctgtcacagtaggtttctgatgtgatatatggctggatagtaacatactacaggatataaaatctcttatggaaagggaattcattatatattaagtacttacta

SEQ ID NO: 235416 - DNA, 523 bp, Homo sapiens
gctgaggcaaaaaacttttatcctagaatagtaaatccagtgaaaatatccttcaaacatgaaggagaaataaagattttcccagacaaaagctgaggggtttgatcaacaccagacctgtcctataagaaaaacttaagggaatacttcratcagaaagaaaaggacattaatgagtaataagtaatcacctgaaggttcaaaactcactggtagtagtaagtacacagaaaaacacagaatattataacactgtaactgtggtgtgtgaactgctttatcctaagtagaaagactaaacaatgaatcactcaaaactaactaaacaacttttcaagacatagacagtccaataaatataataaatacatcaaaaaattaaaaactgaggggatgaagttagtgtccagaatttttattagttttagcttgcttgtttgtttatgcaaagtattaagttgttatcagcttaaaataatagattataatatagtatttgcaagcctcatggtatcctcgcact

SEQ ID NO: 235417 - DNA, 556 bp, Homo sapiens
tatccccaaaaaatagaggaggagggaatactttcaaacttattctatggctctgaaccaaagccagacaaagatgcatccaaaaaagaaaagcacaggccaatatccctggtaaatattgatgcaaaagttgtcaacaaaatactagcaaactggattcaacagtacattagaaagatcatttatcatgactaaatgaaatttgtcccttggaggcaagcatgtttcaacatatgcaaatcaatccatgtgatacatgatatcaatgaatgaaggattaaaaactatatgatcatttcaattgatgctaaaaatacttgataaaattcaacattccttcatgataaaaactctcaaaaaactaagtatagaaggatcatacctcagcataaaaaaaccataaatgagagacccacagttaatatcatactgartggggataaactaaaagcctttcccctaagatctggaacacaataaggtgcctactttcaccactgttattcaatatagtactagaagtcctagctagagcaatcagacaagacaaagaaat

SEQ ID NO: 235418 - DNA, 604 bp, Homo sapiens
aaactttttttcaagtttttaaattcatattgacagcttattaacatgaaagtattaacaattcattttattatcaactgtrtgtgccagtatttgcctcctaaatttcttcagcaaatgtggatattactgtctttttaaaatttgtgtcacttgataatttaaaatatgatattttattgctctttttattttaacttctttacttactaatgaatgtgtggtcttccatatgtttattggctgtctttgtttattttatgaatgaccatttacgtctgattcatcttttaagtggagtattcaccttttttattgattggttgagcaaaagttaatctttgatctattcaggtttccaatgactggttccattttgataatttgtatttgcctagagaattgtccattttactgaagtttcttaatgaatgtgtagcggcatcttgtgattctaatttgcattctgctaatgactaattcattcagactttaaaatggattagcaacattttaaaattctgttctgaatctgacattaattcttgtgattaaattagatcttgtacacataattattagaaaagcttcaagtgtttacata

SEQ ID NO: 235419 - DNA, 443 bp, Homo sapiens
  misc_feature (1)...(443): n = A,T,C or G
ngcctgcagcgcggcggggcgatgtgtgattaccatggcgaggagtctctgtccgggggcctggctaaggaaaccctattacctccaggtaggccggcggccgcccagccaccagctgcgggagcacccggccgtgtgccctgccgcgccgsgcaggactcgcccgctccccttttctcgtcctgggtctgtgcccgcccgaaccccgctgccccctgccgtccggcacctggcggcgcgccctccccagccccctcagcggctctgccgacgccccccaccgcggccctcgcggctcccgcgccgcggccagccgggctccagggcccgagtcgtcccgcccgggtacgccctcgcatcctgagagccccgagacgtgacctgggtacgaccccgcgctccgggcattgcccgcagccctgcgccgctccaggcggagctcg

SEQ ID NO: 235420 - DNA, 560 bp, Homo sapiens
tcagaaactctaataatttaggctcttgggctacacaaaagtattctaatcccttatacattagagaagtaaattatgcctctatcaaaaaaaagtgttatttttctgtgcaaacgtgtgagtacaaaggtgtaagcaaaccaagtgttcagagatttaaggacactcagggagtcacagtcaagtataaagaatacctgtcagccagccaccagcaactcactcctgtaatcccagtactttgaaaggccaaggtagaaggatcacttgagctggggagttccagaccagtatgcagtytgagccacatagtgagaccctgtctctacaaaaaatttaaaaattagctgggcccctgcctgtagtcccagctattcaggaggctgaggtggtaggcttacttgagccacagtgagactgcctcaaaaaaaaaaaaaaaaaaaaaaaaaacctgctgtagttgtggttcctcggaaatatagagtgaactctgatcagagtaaactgtaccctttattgttgtatgtatttctgtgatcatccttagggtggttcataag

SEQ ID NO: 235421 - DNA, 421 bp, Homo sapiens
ggtgtcttctttctttgagccttagctttgactgtttcttccttttttgcctgatagtcggtggtctcctggttgcttgagtcacttggtctcatttccctctggccttggatgacctcactgctgtcctgtttcaactcataaacttctggactaacaaaaataatgtacttcctgaaagcccaaatttgcaacatttattcaataaacatttattactatatattttgctctagtgacatgctaggatatgcttgagactgtggggtttattggctagaattatgtttcaatgcaagtgacagtggcttgaacaagatagtttatcgcgcrtagaagtccaaagggagacaggccagaactggtgtggtgatcttgttccatggagttgatctgctgggcttgaattctcttctaagat

SEQ ID NO: 235422 - DNA, 527 bp, Homo sapiens
gaaccataatgtatgcagattaagtaaagtcatttaggaggtaggagagttccaggaagggaggcagacaatggcagtaaaatctaactgtattaaaaatgtatgaaacaacctcactgaaggaagtagggggaacacatactgacctaaagttactttggaaatgagtggaatatgtaagactaaaggcaaaagaaatcgcacactaaaagcacgtaagaacacttctttaaaaatgcaataaaaacaaaaataaataaacaggacttaaactacaaagcttctgtatagcaaaataaataatyaacagagtaaacagacaacctttagaatgagagaaaatgtttgcaaactatacatctgacaaaggactaatatccaaaatctataaggaacccaaactaatcagcaaaaataaaacaaataatcccattaaaaactgggcaaatgatatgaatagacatttctcaaaaaaagatatacaaatggccaaaaaacatgaaaaatactcaacatcactaatatca

SEQ ID NO: 235423 - DNA, 534 bp, Homo sapiens
taaaagttacctttatcatctttgatttctagtgtctgtacagtgtataacatttrttatatgaattactgaataagagtctgagtgagcatgttcatctttcttgccaccatactccagggtttagacgagcatatcatgaaaagtgatctgagaataaaagacactattcttagcataaaaaaacttcaagtgacacttttcggtaaaagctcaatttcatttgggccttccttggttccattattattattattattattatttgagatggggccttgctctgtcacccaggctgaaagtgcagtggcgtgatcatggctcactgtggctttcacctttagcctccagagtagctggaaccataggtgcgtgccaccacatccagctaatttacttatttatttatatatattttttggtacagatgaggtctcactatgttgcccaggttggtctcaaattcctgggctcaagccaacctttcacttttgcctcccaaagtgctgggattacgggtgtgagccaccatgc

SEQ ID NO: 235424 - DNA, 534 bp, Homo sapiens
taaaagttacctttatcatctttgatttctagtgtctgtacagtgtataacatttattatatgaattactgaataagagtctgagtgagcatgttcatctttcttgccaccatactccagggtttagacgagcatatcatgaaaagtgatctgagaataaaagacactattcttagcataaaaaaacttcaagtgacacttttcggtaaaagctcaatttcatttgggccttccttggttccattattattattattattattatttgagatggggccttgctctgtcacccaggctgaaagtgcagtggcgtgatcatggctcactgtggctttcacctttagcctccagagtagctggaaccataggtgcgtgccaccacatccagctaatttacttatttatttatatatatwttttggtacagatgaggtctcactatgttgcccaggttggtctcaaattcctgggctcaagccaacctttcacttttgcctcccaaagtgctgggattacgggtgtgagccaccatgc

SEQ ID NO: 235425 - DNA, 382 bp, Homo sapiens
cttcccagttaccacctccaacctgctggcctgaatttcagagtctctccttctgaagtacttgattctgtgtcagcttgactctatccagctgctgcctaatccaacactgacaactgctttcacraactataacctgataactggaactattttgaacgcctgttggccctatcagcatcaccaagttccagtccatcccagcggatgtgttcaatgctggttctcttctcctctctggtattagcaggccatacttggcccactctgagatgtcagatatgtgattctgtattgtataatcctacagcatcaataaatagttagattatattcattacagagtttcataaaacagagacatgggtgtcatagttcaaaa

SEQ ID NO: 235426 - DNA, 545 bp, Homo sapiens
agttttatagttttgaattttacatttctggccactctcagtagtatttgttaaataagttaatgagggctaatggcaatagaaatgaaatagaagagcttgggtgagaagaaaattaccggcttgatagatttagaaggcatcagcataaaaataatagtcaaagcctgctgggaactcatctgggaaactaagttgctttcagacatagttgagacaggcagctgaccggaagggcaagatttagggcaaaccartaggtcagaagagaacacaaggacctgattcattgatcagagattgaggagaggcaatccagtaccctggagagctcctagagcatctacattttcgaaacgtgggagctctcaaatgcccctagctgacagcatttaagttgtctcaaagtctcacaagaccagaaacctatgtaactgcactgcattagtttcaactaagtcttcttaaatattaaaacagtataaaattacaacttataaaaaattgagaaataggagcacaaagaataaaataaaatcctacca

SEQ ID NO: 235427 - DNA, 604 bp, Homo sapiens
tgctctctaggactgggagttgtccagtaggccagctcacttcttcatcagacaatgtgcagaagtgttcaaagactcatacatctttataatgagtgttctaatagattggagctagcattacattacttttgcacattgtcttgtcccaaacatgtctgaagaccatttcagaacgaagggaaagggatatagactcactgtttaatgggagtaacttcaaagtcacattgcaaaatacatgtccctagaaaagggttacgaccaattttatatcaatccacaactattttccttgtgtttacattggcctaccactactttgctcattttgtttttttaattcaaactttmttacttccagtattcttccttaggggagcacagtagtccttcccttactgcagggggatatgttccaagatccttggccaaggtctaaaaccgtggatagtatcaaaccctatatatactatgtttctttcctatgtctacatatttgtgattaaatttaatttataaattaggcaaagtaagagaataacaaaaatgactaataattaattagaacaattaagtaaaataagggttacttgaacacaag

SEQ ID NO: 235428 - DNA, 586 bp, Homo sapiens
attttagaactacaaacagatatttttagagtaagtcttcttgggaaaatcccactctccaaagggcttacaatgtcagtgctggtcacttttcttcagtattgtaacatgaatcacttttgagagaatgagattcacagccactatcagaagccagggacctggtataagtgagtatgctacccatgctacttccaaatctggaagaggcattttctaattcaaacagtaaactcaaattttccayctttagatagcagcatcatctccatctaacaccaagccgctggccctgcctgactgctgggtgttagatttaggcaagtctcctctaactctgcccggaatcaaggtcaccttgctccctgaggggctaccgcatggtgcaggctgcgtgtaggcttggagtcacacgtgactggcaggctgccatcttggaaaccctccccactcagtgctgccaatctccatgttagtgctgccaaggtgctgaaactgatggtttctgttgaagaaagacagtcaccctgttttacgtcaaccctgaccacagctgcagtgatgacattcctggtttaatagtggt

SEQ ID NO: 235429 - DNA, 609 bp, Homo sapiens
gccctaggaagagcaattaggcaagaaaaataaatgaaaggcataaaaaccagaaaggatgagataacattttctctgtttatagaatacatgaggctatatgtaaaaaagattgygatttggcctggcaaggtggctcacgcctctaatcccagcattttgggaggccaaggcggggggatcacaaggtcaggagatcgagaccatcatggctaacatggtgaaaccccgtctctactaaaaatacaaaaaaaaaaaaaaattagccaggcatgggtggcgggcacctgtagtcccagctacccgggaggctgaggcaggagaatggcatgaacccgggaggcagagcttgcagtgagctgagaccatgccactgcactccagcctgggtgacagagcaagactctgtcttaataataataataataataataggattgccatttaagcaaaagatgatattctgaaacttctactcattataccagaaagcactgaattttgatttattcattaaatctttcttttatttgtataggaggtatttatctccaactatctgtgctggactctgtggcaggcaaggaagatgcagaggctcatggatga

SEQ ID NO: 235430 - DNA, 490 bp, Homo sapiens
ttcagtatgatgttaactatgggtttgtcatatatggcctttattgcattgaggtatgctccttctgtatctaattttttgggagtttttaatcatgaagggatgttgaattttgtcaaatggtttttctgcatctattgaaatgatcctatcatttttgtctttgattctgttaatgtggtttatcacatttattgatttgtgtattttsaaccattcttgcatccctgagatggatcccacttgatcatagtgaacttttaaatgtgtggttggattcagtttgctagtatcttgttgagaattttcgtacctgtttatcgaggatattggtctgtagtttcattttcttgccgtgtccttgtctagttttgaaattggtaatgttggccttgtataatgagtttgcaagtattcctgcttcttcaattttctagaatagtttgaggaaaattggtattaatttttctttaaatatttgttagaattc

SEQ ID NO: 235431 - DNA, 639 bp, Homo sapiens
tattttttgacagtgttacttggtaatgttgttgtccttgttttactttttattttgaaataayttcaaacttataaaatggttacaagagcagtacaaagaattcccatatatattatttaccctgattctccaaatgttaatattttgtcacatttgctttattgttttctttctctacctacccacctgtctgtctgtccatctatctacctatctatatttttttctgagctatttgatagtatgttgcagataggatgccctttttcccccaggtgctctttttccccaagatatttccatatgtattttctaaaaatagggatatcctatgtaactacaatataattaatcatgaaattaacattgatacaatagttatctgtgaaccttatccaaactttgccaatttgtgaagtttttaacaagtttcatgtgattcttatgcagccatcttagctgatgcctttttatctcttttaaacttaactctctaatttttgtacccagtaatacagacttatttttttgacacagggttttactctgtcaccctggcacgatcagggctcactgcaacctccacctactgggcttaagtgattcttccacgtcagccccccgaatagctgggtc

SEQ ID NO: 235432 - DNA, 260 bp, Homo sapiens
cttaacatttcttattatatgtctatgcatcttgctacttatccatctgtccattgatctatcttaatttattcatccattaatgacaggtttgtttayatttattgagtacttgctgtgtgctgggtactgaggatataaaggtgagcatggcaaacctggtccttgacttcgagggggaggaataattaatgtttgcacaaataggtaattacaaaccatgataaaggccacaaaggttgatgtgagattgtttgaca

SEQ ID NO: 235433 - DNA, 605 bp, Homo sapiens
gtagattcttgatatcatggtagttatgttctataaagttgctgataacattgaaatagtgcaaacagtgaattaactcttagagaaaatatatataaatcaaatttcatatttatcctaaaaactcatcctggtggattctattctttttattttacaaaagagataaggagattgagaartgccaagtgacatgcctgtgttgccacactaacaggtgccagagttgggattcaaaccccatccacctggccccagggctggagcttctcgctctacccagctctgccctgactgccttgtgttttctggtcatctctgtatgggagcagaaacatgaaggcagcacattgccttgttctacctcagctgcaaaccagcgctttggtcaactcaaatttttcactgctccgtgcatgtccacaaattaacacaaaatctctgggtatattgatttgggggttacaaataaaatttaacaagtaggtgaattcatggttactgaatttgtgagcaagaattgattttacgtatgagaacataaaagcacacattcacacatattcactcacacaagcacatgcagtttctgcatgggtggaaga

SEQ ID NO: 235434 - DNA, 605 bp, Homo sapiens
gtagattcttgatatcatggtagttatgttctataaagttgctgataacattgaaatagtgcaaacagtgaattaactcttagagaaaatatatataaatcaaatttcatatttatcctaaaaactcatcctggtggattctattctttttattttacaaaagagataaggagattgagaagtgccaagtgacatgcctgtgttgccacactaacaggtgccagagttgggattcaaaccccatccacctggccccagggctggagcttctcgctctacccagctctgccctgactgccttgtgttttctggtcatctctgtatgggagcagaaacatgaaggcagcacattgccttgttctacctcagctgcaaaccagcgctttggtcaactcaaatttttcactgctccgtgcatgtccacaaattaacacaaaatctctgggtatattgatttgggggttacaaataaaatttaacaagtaggtgaattcatggttactgaatttgtgagcaagaattgattttacrtatgagaacataaaagcacacattcacacatattcactcacacaagcacatgcagtttctgcatgggtggaaga

SEQ ID NO: 235435 - DNA, 526 bp, Homo sapiens
ttggtccattgcaaattcatgctatctcacctcgtttgggttcttaatgctacttgtcaattcttttcttattcattgcttgttaaattcttattgcattcctcatagcagctgttttagattttctatgctttcaacttccactctcatggtctctcactcactctaagcagatgactctcctccttctggacttgcyggccgttgcaagctcttgcagtttttctcccctcatactcagacatatctgctgccactcattccccataacctcatattcctcttgatctttacttctttgttttctttcattgcagggggataatgtgtcacttacacttgtgctctttccaccaccattttttttttttttctgccctgagctgggggttttgctatgtttcccaggctagacttgaactcttgggctcaagctatcctccaagctcagccttttgagtagctgggattacaggtgcgattcactgtgccctgcatctaccactatttttaaacttcttccata

SEQ ID NO: 235436 - DNA, 572 bp, Homo sapiens
ggctatgccattttagaagtatactgtctaaaactagtagttttagtagaagaacatattgtcaaggggaataggtgcactccctcttcctttacatgggattcaagggctcctgttctgacattagatgattcaggtgttgtgccccatgctagttgctttaatctgtgatcagaatttttctgtgtgcttgtgttcctgtttcgatattcttctaacctagaattctaagttaaaagacataaagtgaaaggaatgaaaaggtacaaataaagggcttggaaggtttcagaggagggaaagatgaacttgggtgaagatggaagttagagaaggatttataaaagaattaaggtcaagaccaagaaagacgtgagyggatagtgtactctgaagacacaagccagtgtttgatttaattttaggtatttagtgaactgaaaggataatcagcataataccttccaggaagatatttcaggccaactttaagcacacataaattcacacacctcataaaactgctttaggcattagctattagccaacagaacattttctttgtcatccac

SEQ ID NO: 235437 - DNA, 580 bp, Homo sapiens
gagctcaactgaaggagttgagctctaaaacaccatacaaaagatcaacaaattcaggagttgattatttgaaaaaaattaataagatagatggacttctagctagaatattgaagaaaacagagaaaatccaaataaacgcaattagaaatgacaaaaggggacattacaactgaccccacagaaatacaaatactcatcagagactactatgaacacctctatgcacacaaactagaacatctagaggaaattaataaattcctggacacatacatcctcccaagattgaaccaggaaaaagtgaattcttgaacagaccaataacaagctctgaaattgaatcagtaataaatagcctagaaacyaaaaagaagcctaggacaagacaaattaacagctgaattttaccagctgtacaaagagagctggtagtattcctacagatacaattataaaaaaattgaggagaagggactcctcccaaactcattctatgagttctgcatcattctaataccaaacctggctgagacaccacaacaacaaaaacaatagcaacaaaaacttcaggccaata

SEQ ID NO: 235438 - DNA, 630 bp, Homo sapiens
gtctagtttaactattacttcacaaagagactaccaaaccctttatgttactctattgyaattcactcacaacttataattatatattgtggggttattttgtttaatatttactgaaattatgagaatatggctcatgctattattatatagccaatttcaggatattatctacgttagggaaatttcaatgtatgaaaaatatttgctgataggtttttaataatacagataatttaattgatcttgtaaaataacaccctatttctggtgctttaagaaaatacctggatatgacctatatcgcccaatacatgtctaaaagagagagtgttagaaaccaagacaattgttcaggtcctttaactactgccccttgtttcctcgctagtgtaatttacaaatgatataccagtacaaataaaggatgtggcaagtttaggaactttggaattttgtttacatactttcttacttttgttttttgaaaaattcctttccattttccactgaccaagtgattcataatgttatcccagaaaaaatacactgtactcttgcttcctgatgcttaaactgaaaattagagatagtattttggcatctgagtaaacataatatagttattta

SEQ ID NO: 235439 - DNA, 562 bp, Homo sapiens
gtaaatgaatgggtgtggctgtgttccaataaaactttatttacaaaaatgaggttggggtacaggggagcatagtttgcagtatagatcactgagaaaaaaggattctctgaggcattttgttggtgtgactctaatgctgatgcagaaagagctctaaatctgagtaacaagtattggtaaattattcaacagatacactccttacaagatgaaaaataacattgttaaccagtgttcatttatagatctacaaacatcaggaatggaagtttatttgtcaggcacatatttctctgttatattccctgtaatatatactctggaagaagaaaaaaaagggatgaatagcctatatttcacataaaatgttactctttaatcttatcttgcagtgtcaaatttaaacaatatatatrgatgtgtgttatgattcctggagtcaaggtgaattgtattcctgttccttcatagcaactagctattatcagggctgatgtttcttggggctggcctcactaatggaactcagatgatttactcagataagaaattctttgga

SEQ ID NO: 235440 - DNA, 518 bp, Homo sapiens
ttgaattctaggtatatttgaaagggagagttaataggttttgtaaatatatatatgaaaaaacaaaaggagccaaagacgacttcttgatgtttgggctgattaactggaaggaagaagttaccataaactgagatggggtaacagtctgttttgagcaagacaaaatgaggagttcagttttgctcacgttgaatttcagatgcttatgagatgtagatgcctcaatgagggattgggggtatgcctaacaggcagtggctggaatttggctggcttctccaccttatctacctccaacaggtcctttcacggtccccttagcccttcagcctacactaaattattcccctttcctcgcttgggggattgaaatatcacagatcctttcattgcrgattccacctctgattcaagatgtccccctgctttgcttgggtagctactcagcaatactgtgaaagctaaagtaaaaggggcaagcagaaaatttttaaagggaccgaagtatcctggaa

SEQ ID NO: 235441 - DNA, 481 bp, Homo sapiens
ttgccattgggcaagtttcttaaattgggctctttaggaagcagacttaggaaaattaaggtgcggggcatttattagggagttkgcttggcatcacccctgagaaaggagagaaggagatactatagggcagaggacaaaggctttagctgaacccatggtgagcttgggccttcagtggcccctcagagttatcatgaatttgggctggagggccgggcctttatacctccatcatgaccagtcattgcaggctggcttccacaaaaggaggtgccatcttggcaaggcaattctcttcagctgaggccatccccaaggaaggttaaaaactgaggcacatcttctggcagtcctcctgcagctagtggaataagtccttccttcctcaaggagaccctgtgaattatggcatccaccacagcaggccctacagataagacattctgccttatattgagttgacaccttcctcactgtg

SEQ ID NO: 235442 - DNA, 623 bp, Homo sapiens
aacccgggaggtagagtttacagtgagccgagattgcaccaccgcactccagcctgggcaacaagagtgaaactacgtctcaaaaaaataaataaataaaaaataaagttttcccctatcaactctttggttactctgaatttcagtttgtgtaggaaagcaaaaaatttggtttaaaaactttttaaaagcaatttcagaataatgagttagtgccctagcaatcctcaatgtgaccagtgagaggtttaataaaagcattgaaatttaygtattttgaaatttttgatatatttcaaactacttcagtcaaaaaaatctttctgattctccttgatgctccaagtgtcccttcttttgccagtaggagctctttcaaattggactctgtatcattgcttacaaacacacacacacacacacacacacatacacacacacacacacacagtcagaggattcagaacacacatgtcttctgcttctctctaagaccccatctagttatcctcaactgctagtggatctgttcatattccaatggccaaaatgagtcacatagccacatgcaaaatcaccatgaggaagtatactgtgcccacactgaagccatgggaaggaga

SEQ ID NO: 235443 - DNA, 562 bp, Homo sapiens
  misc_feature (1)...(562): n = A,T,C or G
ccagtctctgcagagaaagggtccctgagcctggaataatgacactgtggacaggcatcttccatctatcaagaaagaggaaagaagcactgtttcaatccaggtctgtctttctttctttctttttttttttttttggccttcttatttgcattcagtgaggaggtgacacattgtagaacataacctccctttttcattccatgaatctaatcgttatttctgtgtttgtgaaagataaaggattagcaagaacgctttgcattaagtcgmcatttgtaaatgctttataattatttatgaaattatcctgcattttatagcatgggagataataacttaaattgatgtattaaacatgcatgatcattattttaacaatattaaattcacctctgtagaataatcatttgataaatatgaagaaagcattcagaagtggcaccttaatttaagatattacaggattcgtgacacccaaatccacgaccctttttgttgaagacagatggagtttcttatctggctgcagtgttcctgnnnnnnnnnnnnnnnnnnnnnn

SEQ ID NO: 235444 - DNA, 587 bp, Homo sapiens
actatcaacagggtaaacaggcaacctacagaatgtgagaaaatatttgcaaactatatatctaattcatatttattataagtgcatgtttacctgtatctcccaatcattgtaccctaacacctaacccagattgtgacacayagtaagtgccttgataaatacttgttgaacaaatcaatgtttcatagctttagttctttttgtaaaatagaatgtaaagttgggggtgggagtttcatgaaaatcacatacctctcagaaaagaaaacaaatggtgattaaaaatgagtaaaacaattacaaaattatattgtagccttgcctatatcagacaatagcaaaataataaggttccagtttgtactttagagttcccaaataaaaatttacaaatcccataagggttgtaatgaaatttgtatttctaaaaccatggaatttaaacattctttgaatatttcctccaccctggtttcggttcattgataataatctttaaaaaattgttcttatccactgaactgcacctgaacatcactggtcgattgcataccatgagctgtccgaaataggacaagcacaaa

SEQ ID NO: 235445 - DNA, 391 bp, Homo sapiens
agagatggcctggttacctctgggcagtggtaaaaatcccgactctccacaggtctccactgacattaccgttgtagtgaarggaagggaaagttgaccttgttaccacctgaggaggatgaaaatctagactccttactcaaccttctgacactaccccaggtgggaagttggggcacctggcatggatagaagtctgggctctgcacctgccttgtgctggctgttagtggaggcaccacatagtattttcaataggtttggctgaaataaagaggttattatctaaaagttttctgtctttctgggcttcctgtcttctgattcttgagctagggagaagaagcttttctttgtgcttcttttttgtttgtgcctgttggtgtttcac

SEQ ID NO: 235446 - DNA, 391 bp, Homo sapiens
agagatggcctggttacctctgggcagtggtaaaaatcccgactctccacaggtctccactgacattaccgttgtagtgaaaggaagggaaagttgaccttgttaccacctgaggaggatgaraatctagactccttactcaaccttctgacactaccccaggtgggaagttggggcacctggcatggatagaagtctgggctctgcacctgccttgtgctggctgttagtggaggcaccacatagtattttcaataggtttggctgaaataaagaggttattatctaaaagttttctgtctttctgggcttcctgtcttctgattcttgagctagggagaagaagcttttctttgtgcttcttttttgtttgtgcctgttggtgtttcac

SEQ ID NO: 235447 - DNA, 574 bp, Homo sapiens
attgttgtagactcttgttctcttcccttactttctaccaaacaaacaaagtctcactgtctgttttaagccatctaaagcttgtgggtgaagtgacacaagcaaccctgtggccaccacccctatgactgcactgggtcagacttgaagacagcaaagtgctaggtcttgcccaagaccttttataaccactccctaactactgcctatgttagctcaagtccctggggctctacaatcagcaggtagcaaagccagctaggcctgtgtccttcccttcagggcggtgagttcccccaggtcccagtgggtccagaagtgctatctggragtcagggactagagtcaaaaaccttagaagtctacctggtattctattgtattgcagctgagctggcactcaaaccgcaagttgtagtccttcccacttttccctcaactttccaaaagcagagatacctcaccccatagccactgccaccacagtccacaaggggtactgccagtctgtcgctgacattccctaaagttccaatgtctcttaagttagcttatcgtgaatgttgcctggcca

SEQ ID NO: 235448 - DNA, 547 bp, Homo sapiens
ttgtggaatttccctcaaaggaaacagaccgtatagaatcatagaggttttttttttttttttttaagaattcttgttcatggttcactgtttccttgatatcacattaatagctaatggcttaaaatgtgaaaaatgcatttaaatacaaatacccaagtatttagtagaggagttatgttgctttgtacattattctttaatgtggtaaaatagcaaatagcaataccattaatttcagtcatgtgagctaaaatgaaccatgatatactatttatttttcttatcactgaatatatcaggcaggagtctacttagtttgaaaatctcatttagaatatcttctactttataatccctgagcatagaaattgatagtatttagtaaaagagaacacagtgtaatacaattagaaaataaatatttttatgtttatcttcctrtaaatgagagcagagggctagagtgcattttatctaatcactgtattattcaaaattgatgatgttttcaaagtcctgaagattttatcaaacatttagctga

SEQ ID NO: 235449 - DNA, 594 bp, Homo sapiens
aaatctcacaagtctactagccatgggaccaatcaggctgaagggacacctgttacattagatatatgtgcatatatgtttctgtatatatttatattacacttatatattatacatatttttaaataggcacatgcaaatgtcyaaagaataccaacttgtcaacattattctgaggattgggattagcatgtaactaggggaaatgttaccttttctcttattcattatttttcttatggcaaaaattactttcataattaataaaaatattaataatttataaaaggaatcaaaccaaagagactaaaaaggaactctgggggattttctttaatatcatcatagtcatttatcacttatgtgttttgtggattcatactgtttataattgtcagggcttctctgaagtataaactattcattttccacttattcattttctctaagagctcaatatcatttcgaaaactagatcaaccctactcatagttcctaaatttgtctgcacttcagctggtagtacctttgttttaggagttttacctcagatcctctttgttaactgacaagggcttgtacgcatatgtgagt

SEQ ID NO: 235450 - DNA, 622 bp, Homo sapiens
tgctctgtcacccaggctggagtgcagtggtgcaatctcggctcactgctagctccacctcccgggttcacgccattctcctgcctcagcctccccagtagctgggactacaggggcccaccaccatgcccggctaatttttttgtatttttagtacagacggggtttcaccgtgttagtcaggatggtctcgatctccaagcagcaggaatttttaaattaccatttttctggggtgatgtgagaatatggcagagtaggaggctcctgcctcttccttttatcacagacacaccaagtaaacgtggtaactactgtcctagataaaaaatagtrgatcagtttctccaagagaaagctagaaaccaactgaaatcctcctacacaacaaacaacctagaaaacacctacatcaaaacgggtaggaaaattggagatgcactcagacactaaccccaccctgagcacagcgcctcatcaccaggaagcaaacccagctcctatctttttcctgaagagtaaggggctactcttatacacatatagttcccaacttttccagactctactggagagcttggctcttaaaacacccaggtgaggaacagcaggaacacagcat

SEQ ID NO: 235451 - DNA, 548 bp, Homo sapiens
agagcagatatcaagatctatgccagcatttgacctttcagcttgcacctttgactttttcttgtcaattaatactcttgctggttacagatcattttataacttgagatgcaactctagacttgttttagttccaagatgttgaggtattattattattattattattattattattaccattatcagtttgtttttattattagctttactagaagtgggactttgaggtcctctatttgaatttgctttgaaaaagtggctctagaggtatttttattcttmggatttctttggcatttttctatttgctatttgttgccgtgttaatagaaaagtgtaatatctgaaattgattggcagtgtttgaaattattatctgtaacaaatttctgaaactcagtaacttcaggaaaactactaagaatgacgctttacattcctttgtggaacaactgaaataagatatatattgccaaagaagatcctatatacaacccaaaaatgaattcacagattttgtaaactcttattaggagtaacactgg

SEQ ID NO: 235452 - DNA, 653 bp, Homo sapiens
ggagagggatgtcactaaaactagagcttcttagactttaatgttcccatgagtcacttggagcttctgtcaggattgcagattctgattcaggaggcttgccacagggcctgagattctgcatttttgactagcttccaggtgatatctacacagacaatgcctaagcgatttccctagaggggagggtggggatcagcaatgcattttagatctctgccaaagacaccttgcaaaggctcaagttatgtctttagccatgttcataagaagtctaactagctagtgtaggtacatttatttcttaaccttctccctcttttttttttcttcctaagtgaaaatctgataccagtagtttacagagaaaatagttctactaaaacaatgtctcttgggctttagtgctcattatttctttgccctgggaaagtttccacttgcaattgtcctaaaaacactcttaaacctggccgccatcaytgagttaaattctactgtctgggagaggaggaaggtatgaaaacctcaattggggccattctggcaaatttaatagctcttcaactcactgaccgttcggggatgagcccaatccattctcactcctgggcagagactgcgttttaaggtgctcttgatcagcccttatt

SEQ ID NO: 235453 - DNA, 419 bp, Homo sapiens
aaaatgtgagtatgctgttgatgagttattcttctactatctatttgtattcaaaaagaagtaagagaattttaaagtattttgtaatcactttaatgcaaagctaaagtcaagtttcttcaaataaagggccatcactgtctcacaatggcattggaaattagcccaagtgtggaaaagaagaacaaaggaaactttatagatgttgttaaagtttaattttaataaggttaaaaacatcactcctatgcaaaaatatagtgagaacacagcaaagatttatttagtttattaatgaaggaatsacagtaatggtaaagctggctcaaaagagggtaggagaaactggtagtgactgctatactggtgtatattgttggtgtacatgtgaatagacatatacacacatatttgaattc

SEQ ID NO: 235454 - DNA, 631 bp, Homo sapiens
tagtcttttctctactcctcaactgttaccatcgtaaaacatgtaagatgtactgggttatacattcattcagaatatctctcaaaggcagaaggactagaattttttctgtgaggatgaacatatcagagtgccttgataccagtgtataaaaatctaccacaggtttatcttagagatacaagatttaaatgccaaaatatttctgtgtttaaatcacctgtagttaaatctcaaaattctttttctgaaaagaatcaaggaaagcaacttccttttgtaagctttttgtttaaaattggactcctaacctttaggggagatggtggcccttaatttatcctgtcctgcaggatytggagacctcctcagcactggcaaggtctgtcccctatccctttcattatatattctcttagctgtctgaaaatcctctatgtacaatgtatgttatttcaggtatggacaattgtcatactttggataaaataataaattaatcccagcagactgtcttctcttttataatgacatttataaattgctgcctcgttgcaacatttagaaacccacaatggtgcaagcctagttctcaagtcactccaaaggtgtttggccttctgaaacctcc

SEQ ID NO: 235455 - DNA, 631 bp, Homo sapiens
tagtcttttctctactcctcaactgttaccatcgtaaaacatgtaagatgtactgggttatacattcattcagaatatctctcaaaggcagaaggactagaattttttctgtgaggatgaacatatcagagtgccttgataccagtgtataaaaatctaccacaggtttatcttagagatacaagatttaaatgccaaaatatttctgtgtttaaatcacctgtagttaaatctcaaaattctttttctgaaaagaatcaaggaaagcaacttccttttgtaagctttttgtttaaaattggactcctaacctttaggggagatggtggcccttaatttatcctgtcctgcaggatttggagacctcctcagcactggcaaggtctgtcccctatccctttcattatatattctcttagctgtctgaaaatcctctatgtacaatgtatgttatttcaggtatggacaattgtcatactttggataaaataataaattaatcccagcagactgtcttctcttttataatgrcatttataaattgctgcctcgttgcaacatttagaaacccacaatggtgcaagcctagttctcaagtcactccaaaggtgtttggccttctgaaacctcc

SEQ ID NO: 235456 - DNA, 611 bp, Homo sapiens
tcttggaaagaatttctggacctgctctgctctgggtcagagagcatcctactgtcctgaagggagagtctcagacctggtagcattcagcacaagctgactaaagagcccttgggccttgagtgaacattggcagtagccaggcagtacttgctatgggcctggatctatgccagccacagagagagactcctctgcttgtggaaaagagaggaaagagtgggaaggacttcatcttgtggcttggatgccagttcagcctcagtagaatagagcaacaggtagatttctaagggtttcaactctgggccctgctcctgtatggcatctctgaacctactggggccaggggcaactcatcaccctgaagggaagaaaacggcatggctagttttgccacctgctaattatagaaccctagggccttgagtgaacgtaagtggtagccaggcaggccttgggtgagactcagtgctgtgctggcttcaggtctgacccagcacagtcccagtggtggtggccagagggtgcttttgtcacccctcccccagctccaggcagctcagcgcagaragagacagaaagagagatagcagggtggagagagagag

SEQ ID NO: 235457 - DNA, 489 bp, Homo sapiens
actctctcttttttttttcattcagtcatttacttattcattcatacatgtatgctctcacttawttttaggattttccttttgcatgtatacaagttaatcaaattaatcctcaggaataaatttttcactcaggatggtattttataacgtgcaataaattcagacaatgtttgtattactataaataaaaacctcgttaaaaacaagtaagaagaattttattacattttagttaatttatttaacaaatatttttaatagtgattaaaaaaggtaaatggcaagatccattatagatttttaagccatgttgtaatcaaccttaaatatattttttgtttgttcatttgtttgtttgtttggagacagagtctcgctttgttgcccaggctggagtgcagtggcgtgatctcgtctcactgcaacctccgcctcctgggttcaagcaattctcctgcctcagcctcccgagtagctgggactaca

SEQ ID NO: 235458 - DNA, 489 bp, Homo sapiens
actctctcttttttttttcattcagtcatttacttattcattcatacatgtatgctctcacttaattttaggattttccttttgcatgtatacaagttaatcaaattaatcctcaggaataaatttttcactcaggatggtattttataacgtgcaataaattcagacaatgtttgtattactataaataaaaacctcgttaaaaacaagtaagaagaattttattacattttagttaatttatttaacaaatatttttaatagtgattaaaaaaggtaaatggcaagatccattatagatttttaagccatgttgtaatcaaccttaaatatattttttgtttgttcatttgtttgtttgtttggagacagagtctcgctttgttgcccaggctggagtgcagtggcgtgatctcgtctcactgcaacctccgccwcctgggttcaagcaattctcctgcctcagcctcccgagtagctgggactaca

SEQ ID NO: 235459 - DNA, 584 bp, Homo sapiens
cccagtttttcaaaggcaaatggatgatcctgattgattagaagacaaatacagtaaaatacaaaaaatatatatggagatattcaagagattattacacttgcattatcaagatagccctatctaaccttatttccagattatatggacaaatatgctcttactagggtaacaaaaacttatcttctctttagctcatgtcaaaagcagactgagaaggaactctttatccaagttaagtgaaggttggtgtcaccacacctctagtctttatctaaagtgttaagtcatcaggaagttgaatcacacttagtttaacctttaytgagttattgaaatggtgcccttggcttttatcaatagaaaagccacataaaaacttcttccaattctccttcaattattttgcccattatattatagagtttgctatgcaaaaaaaaaaaaaaaaaatgaagaatctgatagtaggaaaacatctgtagctttcaagaactcagcctacttttatcctactttctccttatcctgttagactgtataatttttcctatttccatttttgtcctgtcatttacatcttt

SEQ ID NO: 235460 - DNA, 573 bp, Homo sapiens
aaaatatctaagtggttttattcatttacaaatgatttgtttagcatctattttgaataaggtgcagtggtcatatccaaaaaatataaatgaagagttacaatcctatactcaagcaccacatagtatatagagagcaaataactgatgcttaagaattatttataggataaatacgaacaattacaacacagaatgctacatagtcatctgtacataagccatctgcttgtggtaggtacacaggcctttgggagcacacatagaacaagagcatctcaccaggaaayggggaggaagaatttcaggacctgagacttgatgagtcagaggaagcttttcatgcagacacagaatgggttcgagcatcgtgattagcataaacaatgatacacgcttgaacaaacgtaaaggtttgggaaataacatttaacgtgtgattattgtgagaaaggagaagaaaggagagagtaggcagataaaaaaaaaaaagaccagattatgaaggaccttgtattactttttaaggagattttttagatagtgtagtattttttatttttagtctagtag

SEQ ID NO: 235461 - DNA, 545 bp, Homo sapiens
agatgtctcctcccaccatgtcgatggccacattcaccccgccctcgcccaccagcttccttactgcatccttcaggctgccctgactgtagttcacgctggactgcgcacccctctgcatcgccagcttgcacttctcgtcacttccagcagcagctatattacctgcatcaagaacacaagatatctgattatccagaacatgtcccaagaaaggggcaccccacctaacccatctccagccmaagggtgctactcaaggaaatcattgtgaccttgctgccctggcactggccttgagcccacacatcaggcccaacacacagaccatcccactggcccctccatgccctactagtcatgaggtccacatttctaggaatcgtggaaccctaacaaggatagctagaaggtggttcaagagacattcagaaagtcttctcaaattcaaatgaaaaccaccatttattgagcatctactatgaatcaagcagtaaggatacaagatggatcctttagagccaagaaagcaagatacagcagaa

SEQ ID NO: 235462 - DNA, 545 bp, Homo sapiens
agatgtctcctcccaccatgtcgatggccacattcaccccgccctcgcccaccagcttccttactgcatccttcaggctgccctgactgtagttcacgctggactgcgcacccctctgcatcgccagcttgcacttctcgtcacttccagcagcagctatattacctgcatcaagaacacaagatatctgattatccagaacatgtcccaagaaaggggcaccccacctaacccatctccagcccaagggtgctactcaaggaaatcattgtgaccttgctgccctggcactggccttgagcccacacatcaggcccaacacacagaccatcccactggcccctccatgccctactagtcatgaggtccacatttctaggaatcstggaaccctaacaaggatagctagaaggtggttcaagagacattcagaaagtcttctcaaattcaaatgaaaaccaccatttattgagcatctactatgaatcaagcagtaaggatacaagatggatcctttagagccaagaaagcaagatacagcagaa

SEQ ID NO: 235463 - DNA, 625 bp, Homo sapiens
tgctttcctgcacaaaatggaagagaagagagaatatttgctttagcttcgatttgttttgaccattgagcccagcagacaattacttttccactttatgtggaaagtggwcactttccagcccagaagggccagccctagctcttggacttcagccccattcctgctgcagccctcttggacatgttttagctcctcaaaggtgccatattctctccactttggacttttgcactgtgtcttccttctcatgggcatattcttctcccctcactctcctctcccccttcacctggataactccattcggcatttcagtgtcggcttaagcatcacatctgaaaagaagcctctctctcccagaccaggttgaatgccttgctatctgccccttagcacactgttgttcctttttcataactcttatcacacttgtaattatgtgtttactgtctcctgcccctctagaccatgacctttataaaggcagggctatatctgccttgtggcccattgtattcttagcatcaagagcaggactaggcacagaacagatgttcagtaggtccttgttgaatgagtgagtgagttacaagccatatctccatggaagaacaactttctg

SEQ ID NO: 235464 - DNA, 595 bp, Homo sapiens
tgcagcctgggcaacagagcgagactccatctcaaaaaaaaaaaaagaagaagtagaagaagaagaagaagaagaaggaggaggaggaggaggaggaggaggaggaggacgaggaggaggagaaacaaacaaaaagatataggtctagagatgtatatattttacattccctttcaatgtctagaastggtctttgcccccaacatatacttagtaagtatttgttgactgaatactcttatgtaaaatctatcaggggcaataaaaaattacaaatgattcaacaaaatagaattcaaagaagagaagccttaaagcattggttttttttcctaattccaaaagcaaatcctcctcttggaattcagaaagtgacaagagttgttgacacaggaatatgggggaagagggagttacattaatcagggatcaaaacaaaaatctttattttcccaagagtcccttggcctctgccagatgctttttaggaggaagagatttcacttttcagggatgatccccatagaaatgggggtgaaattcagttgaaaaggtaaataaaaataaaagagttaaaagaacaccatcaaaaggc

SEQ ID NO: 235465 - DNA, 607 bp, Homo sapiens
cctttggcctagttcccctggacccccatttccatcctactcccttagaagagtgcccaaaccagcttctcagggtgtctccatctctaaaaaaaatgtgagtgcttcctggcagtgctgagagaagggggccttagaattgcaaatacagcattaacttaaagcctttggtataaaatttgacctaattaagacactagcggggcaaagcattccaatagcaattacacaggttgtaaaggggtgaagtaccttttaaaaccaagaaatgcttttgccagaaataagcgcccctgagggtcaaatgaggaattgtaaatgcaggacatcacttgccttgacctcaagtagggcgcttcccttctctcagctgccacaaatgtcactggcctggggacgaagcactagattccctcttccctagaactccattatctctttcatggacagtttctcagaagctgtgatgatcctttcattttaccygccctactaagccactcatcccttcacagattttgtttgagcacttaccatacgccaagacctgtatcagcttctaaagacgcagaaaaggatcaaactaacaagagaatgagctcacatg

SEQ ID NO: 235466 - DNA, 544 bp, Homo sapiens
gagaattctttaaaaattgggtaggttaactggctctctctaaggtaggtaagggccaggaaaacatctcacagtaaaataacaagcagtttgcaaaggtcagttgagtttgagktaaactgctgttgaccctgattatctggaaacaggaatatacaaaaagaaagaaagtatgggaacaagattcctctacctagtgcgattgtaaagaaaacattttcatatgctgttaatccttgttcagaataactttaaatctcattaagaaaccatttctaaaggacccgaatgaatgatgcctggtataagtatggccaattaacgaaatgaaaacaggccgttgttgaggccacatttagggacaacctcagttaagtacctaacattctgttgcttgcagatcatgcttcatgcaatttccagcttaagacagcaaacagaagagggaaaaagtcacttccattccactctttgggggaaaaagtgagagagaaactcatgtgattggagagacccaaattacacacctattattcttttcaag

SEQ ID NO: 235467 - DNA, 579 bp, Homo sapiens
caatgtactttcttcctctgtaaaaatcagccagagacaagcatttgctataaaattatctgggtttaattattatcaayatcagaactatagaatattaacgtactaaacctgtatttacaattacatgtacaaaaaaaaatgttctttgtgaggagcaattttcagcaaatctgacaaacagcaagagtcattcctattttgggtttgaaaagagaaatggaaatttccaagacgcccccctcctccctctcactccagtgaccctctgaacatcaatttgcaaaggcctgaggtagaaagggaggtattaacaatatcaggcactcattcttcccctcttatgaaagggatgaatttttaggaaccgttttccatcatttattatactgatgtgccatccatctgcatcattaggttcagtagttaccatgacaatatgatgcctacagcaatctaacttgatagccacatgccagaatgtgaaaaaataggaccagctaagaaagtgagagaaatataattaatctgaaccacattcaaaaaaatgtgcacaaaactaggaccaagagggaaact

SEQ ID NO: 235468 - DNA, 579 bp, Homo sapiens
caatgtactttcttcctctgtaaaaatcagccagagacaagcatttgctataaaattatctgggtttaattattatcaacatcagaactatagaayattaacgtactaaacctgtatttacaattacatgtacaaaaaaaaatgttctttgtgaggagcaattttcagcaaatctgacaaacagcaagagtcattcctattttgggtttgaaaagagaaatggaaatttccaagacgcccccctcctccctctcactccagtgaccctctgaacatcaatttgcaaaggcctgaggtagaaagggaggtattaacaatatcaggcactcattcttcccctcttatgaaagggatgaatttttaggaaccgttttccatcatttattatactgatgtgccatccatctgcatcattaggttcagtagttaccatgacaatatgatgcctacagcaatctaacttgatagccacatgccagaatgtgaaaaaataggaccagctaagaaagtgagagaaatataattaatctgaaccacattcaaaaaaatgtgcacaaaactaggaccaagagggaaact

SEQ ID NO: 235469 - DNA, 499 bp, Homo sapiens
tgaattctcataacctggcctaaaatatcacaaagaagactggtcagttgaggacaagggtagtaaagagagaaaccaatgaagaacttgacaaactaaacaggttcagaggacagagttgtgaccccagcctagaatctgcttgaaagccacrgttaattctagatcctgtaaacagaatcaaagcaggagtcaggcctttgttgcacaacaggagtagaatttttatagtacaattttttttacttaaaactctttttctaaaaacctcttttttatttaaaactcttttattttgtagtaaaactctcactccccaaacacatacatattatcttagaaaactccatcctgatattatctgagaaaaccacttcctgagatgactgtgttaagtctccaatacaccaccgtaatttccatgcttatcccagatggagttgagatttaaaagtcaaactggactatgttaagtctgattacttttattgcctctgtc

SEQ ID NO: 235470 - DNA, 465 bp, Homo sapiens
aaatctattaaatcaagcacacacgaaagaaatccttgaatctacagtcatatccaaaaaagagggaaagagtgctcatttacagaacaactaataaatgtggaggacgcagtagcaggagaaaatcaccatctgtaactaacaatgtaattcttgattcaggcgaggatcattaatatatgataaagccattgggcaaaagattattgaaaacacaatatttacacaatcttaacatatcatcccacggactacttattgattccacagtgaaaaaaaaatatacatttacaacaaagagatctaatacacaccrcctaaaccaagttaccaataatggaacaagctgacattatgtgcctcctcatgtaatacaatgggaacaacataactttgactctaataaaaaaaatctgaaaaatccatattgcaaaatattaggacaattggactgacctcataaaa

SEQ ID NO: 235471 - DNA, 303 bp, Homo sapiens
ttacattacaataattttttaaaaattcttaatcaaagtgggaatgatgagataatggccacacatgtatttccagcaacatctgatgcattgtggctctttttagtcagcaagcatctcatatttctgactccaagaatgaatcagggagtgacggtttagtgcagagcagcctcttgactccaactaagctacccsctggaaacagtcctgggatatggaactctcatggcctcagccagtgttggccaccaagactccagccccttgcttcaggtgagctgggtggcagacaagatgcag

SEQ ID NO: 235472 - DNA, 349 bp, Homo sapiens
aatttctgtattaatttacttagaatgattcctggcacaagtaagagctccatgttgtcaattagtgttatttagtgaaagggaaggtggttgaccaagmcaacttttgccaccagtgtgtttgggaaatcttagaggcctggaaattatcacaatagatctgaaaattcaaatgaaaaccaaaagataactggtctaaagattataagcaaattattaaaatagggagatgcaagcctttttaacattgaaacaaggttctcatacttgaaaaaaaatacaattactgataaaacaaaaactaagtatttgaaattaagttgatctagattttaatgtcagttctgtc

SEQ ID NO: 235473 - DNA, 610 bp, Homo sapiens
acttactgcaaacatgggcaagtaatgtaaactctcgatgtcccagtttctctatttgcctagcaaaaaaagaaagaaaatctaacttacayggtctatttaaggttaaatggcactatatgctatggggatacctgagcatgtagtaaatcttaatgaatgatttatattgctttgacagtctagccaggaactgtttggattagcacagatttttagcacttgaattttcctattctaatttatttatgagtccgtttcacctgacaaaaattaatgaccatcacaaacatatattttggaagatcaaatgagataaatacacaatatttgaattagtaattgtgaatgctgtatgataatttataacatttttcactgaagtttgtttgtttatgttgtggtatacaaaggaaaatcaaagtatcaacctacatttttggcaaaatatgttaaatgaaacacaatggtctcattcctatctcaatattcctggtgtatgtagcttagccctcataataaactgaagactgacttaatgaatcattcatgattagtttgaactaatcatcggaatgatcagatgttggcaggggttcctgtaatgaaa

SEQ ID NO: 235474 - DNA, 612 bp, Homo sapiens
tcgatgtcccagtttctctatttgcctagcaaaaaaagaaagaaaatctaacttacatggtctatttaaggttaaatggcactatatgctatggggatacctgagcatgtagtaaatcttaatgaatgatttatattgctttgacagtctagccaggaactgtttggattagcacagatttttagcacttgaattttcctattctaatttatttatgagtccgtttcacctgacaaaaattaatgaccatcacaaacatatattttggaagatcaaatgagataaatacacaatatttgaattagtaattgtgaatgctgtatgataatttataacatttttcactgaagtttgtttgtttatgttgtggtatacaaaggaaaatcaaagtatyaacctacatttttggcaaaatatgttaaatgaaacacaatggtctcattcctatctcaatattcctggtgtatgtagcttagccctcataataaactgaagactgacttaatgaatcattcatgattagtttgaactaatcatcggaatgatcagatgttggcaggggttcctgtaatgaaaggaaatgatctaccatctgtaagtgcctcagaattc

SEQ ID NO: 235475 - DNA, 446 bp, Homo sapiens
gttcacatattgttcatgcctgcttttgtgctacactggcagagttgagtagtcacaatagatactgtatagtccacaaagtctaamatatttatgatttggcactttacagcacaattttaaagactcctacactagatgttgttttctcttgatatctctgcttctctttatctgcctttctgccccttcttgctatgaatcaggcaagcccctttgtaataaccatgttctagaagaaaacagactttttggtttatccaattaccattaatcctgtttgttcagagtatttttgaccaggctgtgttatccaacctatagatcaaatgtttagttcagtccagtaagtgactagctttgggcaaaaaataaacctaatatttttacccttcacatacttttgtgagcaggtagaacaggatgctgggcccagcaggtactgt

SEQ ID NO: 235476 - DNA, 555 bp, Homo sapiens
atcccaaatgttttggacacaaaccgcagcacgtctgcgatgggagtattattgaccaggatcagctggaaaacgcttccctgctttcaacaaagaaacggttcaccatgtcctaatacatgtttataaattgcattgtttctactgcaaactcctttgcattacccgtccgacttcaaaagagagcattaagcagttggacacggaataagctaaattccccggagagccgcattgcccgctgcccatgcacattatattttctcctagtccctccccccgcgcagtaggactctaccttgaggagctattcctccggtagttcaccttgttatsttccaagcagtggggatacgccagacaccataaggtagctgaaagagctgtctctcgtcccgtttttgacatatttatttgcatttctgttaggtttgttacatattgcacatttatttcaaacaagactcaaaatattgttcataccttggaaggatctaatccggcaaacaaagacagcagcaggaggttgagaaggttggacgtcgcctgcattct

SEQ ID NO: 235477 - DNA, 613 bp, Homo sapiens
cataaaagggattctcattgcccaggtcctcttggtgcacaaccaaaagactggcagctggtgtttatgttttccattcaaggctatgtggttagcagctttatagataaaggcagacctgatcataaacccgactgcatttgcacacaacggtagagttagcttatcctttcctgccttaaatcccagtgttcccttcccttccttattaataaatgtcctttgtggcattttttcccccagagcagggcatttctgtctgtgttaaaaactggctcaggaagatatccttttctctcaataattttcttaagggtgtctggaaagttgtctgttgcttcttggtcaacaggagctgcttctcttcttatcctgaatttttttttcaagccaaacctctttccaaccttatcaaaccatcttttgctggcattatattgtttagctttagatccttcacctttcttttgcttcaaactgttatataataacttcgctttttctggaatcacattagagtctataggtatgcctttcttacaggaaaycttatatgtacacaaaagttatttggcaaaatatgtgcatgctgacgtagctgcaatgatggctt

SEQ ID NO: 235478 - DNA, 566 bp, Homo sapiens
tattgcctggaagagagcaaaagttggttttggagggaagaaaaaatttatactgtataatattttgtggcccttctgaagcttcacattatacaacaaaatcttatttcttagtgcttaattacagttgttaagaggaatttaaacttaatttattcttctcctgggcagagcaaaaatgaagttgaaaaccactggtttatagtcagccctaaggggtcctgcaggcttttcagggatggagatggaagaagagcaaagtgaattttaaaaagactaaactgtattaagaaaaagctagccaaggaggcatccatggttcctgagttctacttcatataaacttgatgaaaagaattaagatatgtttgtattattttttgaaccctggataattccataattatttaacagattttgtttcyggatatgaattgtacctggatggatttttagacattgtgggcattaattaaataagcaaatcaaatcactacttatttaagcgtctgttctgtacagagcattatgttgtggatgatacaaagacctcaacatttttttta

SEQ ID NO: 235479 - DNA, 584 bp, Homo sapiens
ttctaccagtatctcccatttaccaaatataaccaaaaggcaatgatcagcccctttccctgcaaacacattgcaggaggtgaagggtgaagaatggatctggaggtgcaaattgaaaatatatgactcttcagtacataaaatatatgcctcttcagaatatattcagaaaatatataacctcttyatttggttatagtagaatgggtactataaataaatgtgttgtgttatttgaactaatgacaaagtagagtaaattgaacctatgaacaatatcttagcttttccctggaatgagatatttatggttcttggtttgatacccagtgactctaaactctacataaagacataggacatctgggcttgtacgtttctgccagatggtgtgggatgttcaaagatctggatagctaattttacacaataactgcttctaataggagttttatattgaaacctctgacattcttttaccagcagttgtactgccaagtctggctacaataaatgtgcatgacttaatagctaattctccagaaatatcacatttttttccttccttcgaaatctttgtccta

SEQ ID NO: 235480 - DNA, 638 bp, Homo sapiens
ttaggtactcaataaagatttaaagaatgatggtgtcaaagtacatagactttttcctctatttaaataatcrattttcttcctgtgttattcagactttaataatatgtaaccaactccaacacattaggtgagattttctatttctatgtccagcaattcttaacattgtccatgagcacaaatcttttctagatttgccttcttactgattttttttccctctttgggctttttttcccccgtccataccatcactaagatgtgtccgtgtctatgtcaggagaaggatgtcaatcagaatggtggtgaggataagtgagtcggcactatgagaaggtactggaactagggtaaaggaagaggtatttctaagtggagacttgattaaaaaggggagcatcttataccaaccagcaagtcagtgggggaggtctggagtgattaactgacacaggagtttcccctaggtcccctcatgcccttcaggctacaggttgccattttgtaatgacagattttttttttttttgagatggaatcttgctgtgttgcccaggctggagtgcagtggcttgatctcagctcactgcaacctccaccttctgggctcaagcaattctcttgcctcagcctcc

SEQ ID NO: 235481 - DNA, 517 bp, Homo sapiens
atttttgatggtttccaaagatggaaaaattgcagaataaagttcagaaaacatggtgagcttaaatgaataagttatatttaattgggtatatggtattgttttcaatattaaagatattttgaggcccaattagacaagactttactgacctgaagatgtctaaaattatattatagttcaagaacaagagatgatagaaatttggtcagatcatttcttaatttctctttgttcacttattattaatcacgttgttaggagtatggggactattcctatgagaactaaaggaatctttttttgtttgtagtttatgtcccagtaggtggataatacaatttagttttgctttaaggattttaggatgcatatgtgtttgtttttatgtattttatatatagtgtatatacacatacttatgtattatatataactataatatataagtataaacttgacttcaagataattttttaaagtaaacttttarttcaaaatttatttctttttaaat

SEQ ID NO: 235482 - DNA, 574 bp, Homo sapiens
agcttgcagtgggggaagtgaaaaatgcatgatagggggaaggaagagaggaaatagagttggaaaggtagcaggaaaaagaggtagcagaaacatgtagctctccaaagagaagattaaacattgctaccactatgtctttayggagtttcaggaagaaactgatgataccaaaccagtttgttatttagaggaatatcattcagaaaagatgcaataaatattagggagtgggcgaggagtgagaatgccagctgagagagtagttaggcggccatttcagcgtcagcataagaaataacagaaagactggggaagaataagacatgggctaggcacattacacaggattttgtgaataattagatgcaaagacaagagagagaaacaagacaaaagcagcctctagatttcacaaaatacaatacaagttaaatgtctcttatttgaaatgcttggggacagaagtgttttggattttgaaatatttgcattatacttactgattgagcatttctaatccaaaaatccaaaatccaaaatgctccagtgatcatttcctttgagtgtcatg

SEQ ID NO: 235483 - DNA, 517 bp, Homo sapiens
tctcccaggtaaacaattgctgtttgggtacagtggtgcggatattgtcagaaaayatttatattaacacttaaagtgacacagtaacacacctacatagtctcatggatagaaagtaaatatctggctaaatcacacacatgcatttagttttagaaatgaaattaagtttattatctgtatgctgatgcttttacttctatggaaacgtaacaacatcctgtggacattagataatgaatagtaaaacattaaaacaaaggttttcagtttttaaaatatatcctttttttgcggcgggtagagaaatcttcaaaacataagaaatagttggctgtattcttttaaaggaacagggttttttggcagctgacttacagccagtcttttctgccaaaatatcaatgttttcttgaggataaaaatagtcttattgcagccagcaaaatgtcatttgaaactacaagtgaccactgtcacagaaaggtattattattaatgcttgcaacacaacaag

SEQ ID NO: 235484 - DNA, 517 bp, Homo sapiens
tctcccaggtaaacaattgctgtttgggtacagtggtgcggatattgtcagaaaacatttatattarcacttaaagtgacacagtaacacacctacatagtctcatggatagaaagtaaatatctggctaaatcacacacatgcatttagttttagaaatgaaattaagtttattatctgtatgctgatgcttttacttctatggaaacgtaacaacatcctgtggacattagataatgaatagtaaaacattaaaacaaaggttttcagtttttaaaatatatcctttttttgcggcgggtagagaaatcttcaaaacataagaaatagttggctgtattcttttaaaggaacagggttttttggcagctgacttacagccagtcttttctgccaaaatatcaatgttttcttgaggataaaaatagtcttattgcagccagcaaaatgtcatttgaaactacaagtgaccactgtcacagaaaggtattattattaatgcttgcaacacaacaag

SEQ ID NO: 235485 - DNA, 517 bp, Homo sapiens
tctcccaggtaaacaattgctgtttgggtacagtggtgcggatattgtcagaaaacatttatattaacacttaaagtgacacagtaacacacctacrtagtctcatggatagaaagtaaatatctggctaaatcacacacatgcatttagttttagaaatgaaattaagtttattatctgtatgctgatgcttttacttctatggaaacgtaacaacatcctgtggacattagataatgaatagtaaaacattaaaacaaaggttttcagtttttaaaatatatcctttttttgcggcgggtagagaaatcttcaaaacataagaaatagttggctgtattcttttaaaggaacagggttttttggcagctgacttacagccagtcttttctgccaaaatatcaatgttttcttgaggataaaaatagtcttattgcagccagcaaaatgtcatttgaaactacaagtgaccactgtcacagaaaggtattattattaatgcttgcaacacaacaag

SEQ ID NO: 235486 - DNA, 574 bp, Homo sapiens
agcttgcagtgggggaagtgaaaaatgcatgatagggggaaggaagagaggaaatagagttggaaaggtagcaggaaaaagaggtagcagaaacatgtagctctccaaagagaagattaaacattgctaccactatgtctttatggagtttcaggaagaaactgatgataccaaaccagtttgttatttagaggaatatcattcagaaaagatgcaataaatattagggagtgggcgaggagtgagaatgccagctgagagagtagttaggcggccatttcagcgtcagcataagaaataacagaaagactggggaagaataagacatgggctaggcacattacacaggattttgtgaataattagatgcaaagacaagagagagaaacaagacaaaagcagcctctagatttcacaaaatacaatacaagttaaatgtctcttatttgaaatgcttggggacagaagtgttttggattttgaaatatttgsattatacttactgattgagcatttctaatccaaaaatccaaaatccaaaatgctccagtgatcatttcctttgagtgtcatg

SEQ ID NO: 235487 - DNA, 574 bp, Homo sapiens
agcttgcagtgggggaagtgaaaaatgcatgatagggggaaggaagagaggaaatagagttggaaaggtagcaggaaaaagaggtagcagaaacatgtagctctccaaagagaagattaaacattgctaccactatgtctttatggagtttcaggaagaaactgatgataccaaaccagtttgttatttagaggaatatcattcagaaaagatgcaataaatattagggagtgggcgaggagtgagaatgccagctgagagagtagttaggcggccatttcagcgtcagcataagaaataacagaaagactggggaagaataagacatgggctaggcacattacacaggattttgtgaataattagatgcaaagacaagagagagaaacaagacaaaagcagcctctagatttcacaaaatacaatacaagttaaatgtctcttatttgaaatgcttggggacagaagtgttttggattttgaaatatttgcattatacttactgattgagcatttctaatccaaaaatccaaaatccaaaatgctccartgatcatttcctttgagtgtcatg

SEQ ID NO: 235488 - DNA, 539 bp, Homo sapiens
gctaattgcagttttcaggacattattcttttcttctccctacacataagtcatcctcccyctcagctgctgaccatgcttcctatttcaccgagaaaatgaaagcaactacaaggaagcttccatgcactcacacactctcttagctgaacttccaacagcatttgtatcatatactttgtcttcccacctgttctaaaggaagtctctgcattcccattttaaaacaaatctctcatgtatcattccaatcagcatcatagtagagtgttatttcttccattttagacattaacaaaaacaaacatgtctgatgccatattctcctctaggtatactttatttctcatttcttttacagcaaaactcctcagaattctccagtttcatgggcttaaataccgtctgcacactagtgattctcaaaatgatatatgcagttcagacatctcccctgaacttcaaataacagctgcctactctacaattccacttggatgtctcataaacatttcaaacttacttacatgttcaaaatc

SEQ ID NO: 235489 - DNA, 539 bp, Homo sapiens
gctaattgcagttttcaggacattattcttttcttctccctacacataagtcatcctccctctcagctgctgaccatgcttcctatttcaccgagaaaatgaaagcaactacaaggaagcttccatgcactcacacactctcttagctgaacttccaacagcatttgtatcatatactttgtcttcccacctgttctaaaggaagtctctgcattcccattttaaaacaaatctctcatgtatcattccaatcagcatcatagtagagtgttatttcttccattttagacattaacaaaaacaaacatgtctgatgccatattctcctctaggtatactttatttctcatttcttttacagcaaaactcctcagaattctccagtttcatgggcttaaataccgtctgcacactagtgattctyaaaatgatatatgcagttcagacatctcccctgaacttcaaataacagctgcctactctacaattccacttggatgtctcataaacatttcaaacttacttacatgttcaaaatc

SEQ ID NO: 235490 - DNA, 479 bp, Homo sapiens
gttgctctgtcagctcattgtaacctccgcctcccatgttgaagcaattctcatgtatcagcctcccaagtagctgagattacaggcatgagccatcacacttggttaacttttgtattttttagtagatacagggtttcaccatgtgggccgtgctggtctcgaactggactcaagcgatccacctgccttggatccgcctgccttcccctcccaaagtgctgggattataggcataagccagtgtgcctggccagtagctgcttttgatattggatatttccaatcatgaataagtccttgctatactcatactccattcattgtctgagttctgctttctgctgcaccagccaagatttacttmtttctgctacataacagcccttcaaatatcaagctacttcaacttgtatgttttagagaagaatacagcccagatttttgaccatttctcttatgatatgctttcagagctt

SEQ ID NO: 235491 - DNA, 459 bp, Homo sapiens
ttgcttcagagggtgcaagccccaagccttggtggtttacatgtggtattgggcctgtgtgtgcacagaagtcaagaactgaggtttgggaacccctacctggatttcagaggatgtatggaaacacctggatatccaggcagaagtttgctgcaggggcggtaccctcatggggaaacactgctgggacactgtggaaggaaaatgtggggtcagagccccacacagagttcccactggagcactacctgttggacctgtaagaagatggtcaccatcctccagaccccagaatggtagatccaccaacagcttttactgtgcacctgggaaaactgcaggcactcatgccagcccatgaaaacagsctgaagtggggctgtaccctgcaaagccacaagagcagagctacccaaggctctgggagcccacctcttacattagtgtcccctggatgtg

SEQ ID NO: 235492 - DNA, 681 bp, Homo sapiens
tttggtagtttttagatttcaaaaggcttgttctatcatttttgcttctgtagaaactctattgaagattgtctagcactctatatcttaatgggtacaatgcaaaaaataagttagttttaggaaaaaaaggtattaaattttaaaatctttaaaaacaaatcaacctaattttaattacatgattgtaggacatttaaaagcggacatcagctgaaaatttatgtttcagtgaatacttaaaattttgagaatatacaacttacattttcacaaactaagtgaattgctaaaataagatgaagtctatcaaaatgtcaccataaaatatagctaccttaatatgaataaacatgaagaagaactgaatggcttcatagaatgtgataataaaaacatgagcatgagaagagtgccgtgtccctttacattgcttccaagcttcccttttgttgctcttccttctgcatatgtatattcatttataagaacataagcaggaaagaagagcctcaagaaaatcccaaaaatgatttaacttgtattcttgctgttttatatatcacatttattttgtatggkggaaattgtcttcaatatatgaaattcaggctcataaaatgatgggctaataaaatgcaagcttttatattaaaaatagataaacatatacattataat

SEQ ID NO: 235493 - DNA, 578 bp, Homo sapiens
taggggaatcaaaagttatacatggatttttgactgcacagggcgtcagcacccctaagcctctcattgttcaagggtccagtgtacatgtatagatattagtgacaaaggaagaagtgtgtaaacactcaattaatatcttataataagtgatataaaaccttcagttgaatttttgagtattcaagcttgagcttaatttggaatatgggcaagagggagtacatacaaaaacaaaggtrtttgtcttttaaaaaaattttgagtttttccttttgagttcatgcaaaaatgagaaggttgcaccctctccccacaaccacccaagatttgaaatgtgtaagaaaacagaggcaagggaggagaaaacatacatggtatggaaaaaaaaaataatagaaaagtggaaagacttaagttaactaatacttaattttaagttgttcattttgtagaagtgcagcacaacttttgctcagacattatgcaatgatacataaaagtcttgggaagggaggaggccggctggtaggtaggtggagggtgataattttgtatgtacataaaataaagtggtg

SEQ ID NO: 235494 - DNA, 591 bp, Homo sapiens
tgttgtgaatcattgcttagtcatttttatgatgcaggataggcaggcaggggctgcagagagtgcaaagcatatcagagacaagaaggtcacttagaggtatattctcayggtttgggcaagagatgatgaggtcctgaaataataaactgtcagtgaggttcaaaaggatgaattccataaaggtctgcacaacaattggcagtccttagtgactgaataaatgtgacgcagtggaaattacctgggagaacgtttagtttgggggtttggatgatgagcgtcaatcatcagaataagatacacaggtagaagcataactttatgaagaagatagaatttattgtcagctgatatgcattacctgtagtacagagggtcactggatgataatgtgccccacacttagagttcagaaaagaattaatttccctaggctgcaacaacttaatggactagtgagaataatgtgtcctacatgtatgaaaaaaatggtcaacgtaaaaatgcagttttaaaactaccacaattttcatttattcaattcatggtaaactataaacttaattacttatacagtccttcaaaata

SEQ ID NO: 235495 - DNA, 559 bp, Homo sapiens
tggttgtcacaatgaggcataacaaaaccacagcctggaatagaagtgggttaagtggtgaccccctaaaagatatgtacatgtcctagaccctggaaccttatttggaaaaaggatctgtggagatgtaattaagtgaaagatcttgaaatgaaatgatcctggattatccagatgggccctaaatccagtgayaaatgttcatataagagatatatagaaggaggcagccacacagagaagaggaggagccagtgtgacccaaagcagagattagagtgattctgccacaagccgaggaatgcctggagccaccagaaagctggaagagccaaaaaataaagtttcccctacagggtttagaggccatactgtcccctggattgcagacttttggttccagaactataaaagaataaatttctgttattttaacccactaagcttgtgataatttgttacagtagtcacaggaagtgaacatacaggtatatcccaccttcatatttttgtgtccccccttcactttgcttaccttctttctttagctgttgctatg

SEQ ID NO: 235496 - DNA, 559 bp, Homo sapiens
tggttgtcacaatgaggcataacaaaaccacagcctggaatagaagtgggttaagtggtgaccccctaaaagatatgtacatgtcctagaccctggaaccttatttggaaaaaggatctgtggagatgtaattaagtgaaagatcttgaaatgaaatgatcctggattatccagatgggccctaaatccagtgataaatgttcatataagagatatatagaaggaggcagccacacagagaagaggaggagccagtgtgacccaaagcagagattagagtgattctrccacaagccgaggaatgcctggagccaccagaaagctggaagagccaaaaaataaagtttcccctacagggtttagaggccatactgtcccctggattgcagacttttggttccagaactataaaagaataaatttctgttattttaacccactaagcttgtgataatttgttacagtagtcacaggaagtgaacatacaggtatatcccaccttcatatttttgtgtccccccttcactttgcttaccttctttctttagctgttgctatg

SEQ ID NO: 235497 - DNA, 573 bp, Homo sapiens
cctacttccactttagaactgacatcatttttattgacattgatgttaacatttgaggtatttaagtaaagaagataatgtcagaatgatcatttagtaactattgccatccagaggctgrgttcaaaccttaatcctaaaagccctacagaaaaaaaaaaaaaatcaacactcactattcaactgtcaaaaagactgatatccctgaggccattaagtggcaatagtaagcaataacccccatcatcattaagactggaaatcatctaaaaatttatcaacagaaatacaatgatttaaatgcttcagaagaagaaatagattaggtaaattaatatgaaataaaagggactagggaagatcaatatgttactaaatctagaccttgctcagagaacccattgtaaaactccaaatatattacctgtatattgagctaattaatgctacacttgaggcacaaaactacaaattagacatgtaaaactaaatatttacaaggagactttcataaagaattttaattatttttgttaatattttctaagcatatccttcccttttcaggtatgg

SEQ ID NO: 235498 - DNA, 573 bp, Homo sapiens
cctacttccactttagaactgacatcatttttattgacattgatgttaacatttgaggtatttaagtaaagaagataatgtcagaatgatcatttagtaactattgccatccagaggctgagttcaaaccttaatcctaaaagccctacagaaaaaaaaaaaaaatcaacactcactattcaactgtcaaaaagactgatatccctgaggccattaagtggcaatagtaagcaataacccccatcatcattaagactggaaatcatctaaaaatttatcaacagaaatacaatgatttaaatgcttcagaagaagaaatagattaggtaaattaatatgaaataaaagggactagggaagatcaatatgttaytaaatctagaccttgctcagagaacccattgtaaaactccaaatatattacctgtatattgagctaattaatgctacacttgaggcacaaaactacaaattagacatgtaaaactaaatatttacaaggagactttcataaagaattttaattatttttgttaatattttctaagcatatccttcccttttcaggtatgg

SEQ ID NO: 235499 - DNA, 549 bp, Homo sapiens
ccctcagtttcttacagctgcctctctcaaggtatttgtaacaagtccccccgaggcctgggaaaattggagtgtctctatcaagtattcacccaaatcatcttcccatgctgagaatcaacatgtttgcyaggataaatcccagatggtttgtgtgtctctatctagggcaaatttcccacccacctggagtccttgttgagagactgggactgaagagaggcagtggctctttctttctcttttttgttccatagtcttaatttcagtatcttttataaattctcatgctaatgtgtaatgtaggtctcacttggtaaaatccctgcaatgcttaaaaaaaaatccataaaaaacattcattagaaaataagctatttcacaactagcacaaacaccatccagtgctacagacaggtgaagagaaagattgtaactcatatactaaacttcataagttttattccccagaaactaacgtcgcttgcgtttctacttgttgtttgcttaagcacttctttggtaactaaacttggatggcaaaatgtt

SEQ ID NO: 235500 - DNA, 498 bp, Homo sapiens
gctcttaaaaagataccagtaaaactaacttacgtaaaacactttgtaatctacaaacctcatttattcatcatctcatttattattcataataaagccttttcaagaaaatgtttttatcccaattttgtaaatgaggaagcaaggttcagagatatgaaaacacaccctaggacgaagggattttgaacttaagtatttggattctaattacaactgtctagctataagtataaaagcccagagtgcatcttaatcattttggggtaatggaatatttgagaatcaaaagaaagtggtaaaccctcgccccagaatagctacatagatatrcacatatacaaaattcaaatattctttcagaaacacttctgaaacatattcagggatatgctacatgtctaaagaccacagaatgaaaaatctaggctgaaagtggaatattggggtgctgtaacaatcaggtttaataactgaagagtttatgtgaaaaagcaa

SEQ ID NO: 235501 - DNA, 595 bp, Homo sapiens
cataattttttctttggttactaacggtgactcctgagagtcactatttacaattctatttatttcattttaccttagagttgaatgatttatgaatgtctgagctcagatgcatacaggactaacaaaactcagctttctcgtctcctgtctgctaacaggataatggggcatcgtgatggtcttttagatgtgtgaacttggctagggtatagcctctagttagtctttcaagcataaatctaggtattgctgtgaaagttattttataaattgtattaatgttcataaaaattgacatttagtaaggcagactgtcttaaataatccggatgagcctgaatcaattggctgatgaaccttaaaattagagatgagggtttcttgaaaaagaagaaatgccacctgtggacagcggcttcagcctgggctatgagcttcagcatgccctttttgatagcttgtcctacagmtttcaaatttgtctagccagccccacaattttgtaagacagttatttgcaataaatatcttacatacctcctatcacttctgcttttttggttgtccatttactggcacaaacgtatatgca

SEQ ID NO: 235502 - DNA, 439 bp, Homo sapiens
gaactttgcttttttctttgagggaaaaatgtagcgtgggaggatgttgagaatagagtttcaaaaaagggatagaaattgtagataatctatcttaataaaaagaaaagccaagtaatatgatggttattgttaataatgagatgcttagtcaattcaaaattatgtttataattcccacatctttcttccaactagaaaaamataagtattctcaatgtaattttcaagcattgtcagtgacaaaataggaaattcagattaaacctcttgttgagaatttttttagataggcaaatgagtgttttttctgctcaaagacatccaaaagctaaaaaggcagtaaggataacagggccaggattcaggaaaaggtggttctgtgcttgtcctagtggcacttgccaattgcagaagaaaatactgagagcctaacaga

SEQ ID NO: 235503 - DNA, 397 bp, Homo sapiens
gaattctgtgagccccccaaagggcggccagatctagcaaataaaaatccagaatgtccagtcaaatttgagtttcagataatgggttcttttttagtataagtatattcaagtattacttgggctaaacttttactgaaaatatgattggttgttgatctgaagtctgaatttaactgggcatcccatatctaatctggcaaccctatgtctcacttcttccttgcagctgtccagctagagacgacgtttcccagcctctyctctcactaggtgtgctcatgtcagtttttgttgatgtgactagggcagaaccaaaatatgcacaatttttggtgttactgcttaaaaggcaatccctcatgtggactttctatctcttcccctcctgacactg

SEQ ID NO: 235504 - DNA, 540 bp, Homo sapiens
aaaccttctcgtttacttggcatcatagagccacatagaagggaggcacctgggatgtcattaaatgaaacctccctcagtgcaggaaatgcccctgcagcattctgatggagggggagaagggggggagtcttccaagctttgcttgaatatgtggagtgatggggagctcactacctgtcagacagcatgtggaaggggcagctgaggccatgaactcagcctcttttgctatcaaatgctccagttctctctgtgrtcttcctttaatttgcttgctcaggctcaacttgcacatctgtggtgacaaatagttcatgacctcctaaactggcccatccagtctgattgtctcctcttggctccagagatttaaaggtgggcaaagcaggccctgcctcccagtagcttcatctagtgggagaggcagacaggtaatcagatagatgtcatctctgtgtgaccagcagagcagaaacatgcttgaaggcagaagtcatgaggaggaagtagtcatgacctccctgcaaggtctcagtg

SEQ ID NO: 235505 - DNA, 540 bp, Homo sapiens
aaaccttctcgtttacttggcatcatagagccacatagaagggaggcacctgggatgtcattaaatgaaacctccctcagtgcaggaaatgcccctgcagcattctgatggagggggagaagggggggagtcttccaagctttgcttgaatatgtggagtgatggggagctcactacctgtcagacagcatgtggaaggggcagctgaggccatgaactcagcctcttttgctatcaaatgctccagttctctctgtgatcttcctttaatttgcttgctcaggctcaacttgcacatctgtggtgacaaakagttcatgacctcctaaactggcccatccagtctgattgtctcctcttggctccagagatttaaaggtgggcaaagcaggccctgcctcccagtagcttcatctagtgggagaggcagacaggtaatcagatagatgtcatctctgtgtgaccagcagagcagaaacatgcttgaaggcagaagtcatgaggaggaagtagtcatgacctccctgcaaggtctcagtg

SEQ ID NO: 235506 - DNA, 593 bp, Homo sapiens
ctggcatgcagtaggcactcaacaaatgtgggctgaatgattggcagccctgctcagtatgggggtaaaagtatgctgaattcagaactaggagacccatgttcagttgcccactgggtcgctgctgagcacttggctctgagtgggtacttaacctatttgaggctcctcctgcctctttagaccaggatgaattatgcccaattcatggtttgccatgagcattaaatgcargaacttgtgaagcgcctgtgagcctccaacattgcccccagggagagattatggtgattacggtcggtgggaagctgagtattatttcagtgccatgggacggtgcatacagcagcgtatgtgagtcagaggggcaggctgtgtggccggggtgcggtggggtgccagccacaccattccccactcttgatgattgattctgatcaacctgcatatttcatgcgctgcctccctgcctcaaataaataaatcagggcctcctctgagcagcaggacctgattggggcatctgcagggctcaggacttcaaaaggccaaagcagggatgctggagccccccagcagattctgctaatgtg

SEQ ID NO: 235507 - DNA, 606 bp, Homo sapiens
gtggggcccacctggagatgtgcacgtctcctgggtattagagggtgtccagtctaaatggtgagggttggggggtctgggagtgatacagtacaggtgaaggtgggcgtcctggaggcccctaagacctaacaggtggtggccagcctgttccagccttcagggatccaagttgtaggctcctgtcagggccggctgttcccattagccaccaacccagggctaggcgtcagggcacaccttggtcctggggaataggtgagagccagacagggcctcagtcctgagcagggaccaaggtctaagtgtgggmtcagtggccagtctggcccatgctgactaactgaccttctgaggtgacactggacagtagtagccacatggcctgaccatgtggggagagggctgggcagcaggaagaaggaagggaggaggggaagtgaaggccagagggctggaccatcaccttttggtggtatctcagcatctcagcagtcctgggggccctctgtggctctccctctgtctggctctctctaggcccatctaaggcatggtttgaatattgcactcctgtgtgcctagtgacctgggtctggtaagtgg

SEQ ID NO: 235508 - DNA, 585 bp, Homo sapiens
ttgtgatcttgaaggtcctctggttagtaactattataatatgtagagtctattgttatattcaaaactkcaaacagcattgattggcacaacttctccctctcccagctcaggcctgcagcaggccggccacctgccttgggaaaaggagtataggctggccgcttctgtctttggccagcctgcatttctttcccccatcatcccatccacccaggtgtccaacccctccagagttggaattaggagtggtggaagaggcaggaaataccttacttgctcagagctggcattgggcttactgggcctggcaaggattgcagtggcccctttagactcctggggcgcttttctgagtccctcattactaggactttctctcctgccgtgctcttgatgcaggtgaaatgctcccccaattggctatttgtggcttcttcctctgctcctgagcacccttcagttctccaccctggggtcacctcacccctccagctagtcctggacagggtcacacaaactctccctcacccatggcccacatctggggcgcagaaagcattccttcatcctttgcacctacaa

SEQ ID NO: 235509 - DNA, 585 bp, Homo sapiens
ttgtgatcttgaaggtcctctggttagtaactattataatatgtagagtctattgttatattcaaaacttcaaacagcattgattggcacaacttctccctctcccagctcaggcctgcagcaggccggccacctgccttgggaaaaggagtataggctggccgcttctgtctttggccagcctgcatttctttcccccatcatcccatccacccaggtgtccaacccctccagagttggaattaggagtggtggaagaggcaggaaataccttacttgctcagagctggcattgggcttactgggcctggcaaggattgcagtggcccctttagactcctggggcgcttttctgagtccctcattactaggactttctctcctgccgtsctcttgatgcaggtgaaatgctcccccaattggctatttgtggcttcttcctctgctcctgagcacccttcagttctccaccctggggtcacctcacccctccagctagtcctggacagggtcacacaaactctccctcacccatggcccacatctggggcgcagaaagcattccttcatcctttgcacctacaa

SEQ ID NO: 235510 - DNA, 585 bp, Homo sapiens
ttgtgatcttgaaggtcctctggttagtaactattataatatgtagagtctattgttatattcaaaacttcaaacagcattgattggcacaacttctccctctcccagctcaggcctgcagcaggccggccacctgccttgggaaaaggagtataggctggccgcttctgtctttggccagcctgcatttctttcccccatcatcccatccacccaggtgtccaacccctccagagttggaattaggagtggtggaagaggcaggaaataccttacttgctcagagctggcattgggcttactgggcctggcaaggattgcagtggcccctttagactcctggggcgcttttctgagtccctcattactaggactttctctcctgccgtgctcttgatgcaggtgaaatgctcccccaattggctatttgtggcttcttcctctgctcctgagcacccttcagttctccaccctggggtcacctcacccctccagctagtcctggacagggycacacaaactctccctcacccatggcccacatctggggcgcagaaagcattccttcatcctttgcacctacaa

SEQ ID NO: 235511 - DNA, 631 bp, Homo sapiens
tttaccctccagggcttccaaccagaacaggctgaggctcaccttcatcttaaaccacatctgagcatggcctcttcctttttcttctctcccttacaggtttcttctgagaacacgtcgttaacaaattactgacatgtgattccctgtcctaggctttgtttctggaggaccccatctaagacacccatgtgtatttatgggaaatttaagcattttcaagagaaaatttttactataaccttatagttaccatatgtgtaactttagaaccaatggtcctccttacctacccccacacccgattggagggttctggactcttctccctcgtccctggtgcattttgcatgcacccctgccagttgcagtagcctgtaggagagccatattcgtctcctccagcgaattactatctcccagatttgcagggaccgcagcccttcctttctctgatcccctcgtacttcacctggccctttatgcctggtagaagctcaataatccctgataacctctagtgaatgttgttggattaaaktcacaaatgattgagaaattcaatcacacttttctactctgttgccttccaggcatctataaactaaaaagactttttcaacccgataaa

SEQ ID NO: 235512 - DNA, 539 bp, Homo sapiens
gtaaatagagatgggacatctttgcagaaggtttgtcagagagcatgctctggatacacctgtagggaagtgaaggggacagaacaagagcaagaagctgatggcagtgtggctgcaactgaggctccagctgattctggtagctctggagctgtgatggagcagaggctgggcccaggtgtcctcttatcagctagtcactggccctaggagcaggtgtatccttagccaaggcagttcctcatggtggagggtaattcgcagtaaggaagtaggctgggaccttcagtagccaatattctcaggagctggggaatgatggtgctttggccctaaagaggccaaaatactgggcaagccccccagttacccctatagataacaacggggcctaccttaaagggctgtgaggattaaaraggtttatacatgttgagtgcctgggacacagtatgtgctgaattagtgcaaggatgacaaggaagaatgtatttggataccaacttcacagtcttctagaccctcaaacacctataatt

SEQ ID NO: 235513 - DNA, 631 bp, Homo sapiens
ggaggatgaggaggattggaaatgctaccagtggatggcgagaagagagttttaaacaggctggccagagaaggccacattgggaaggtaacatttgagaaaagcattgaaggaggtgagggaatgagttgtgcaagcgagtaggtaagagtgagccaagcagataagcagccagccaaagtccaggtgagagtatctggagttctggagttgggggcttccacttcccacttccaaccaagatggaggagtaatagggaccagatttaccctcctgctgtaaacaagttaaagaaaaaaaaaaaacagtccaaatactatgtgaaatgacagttttcagacatgggctacaagcagcagaggacagtgacccctgagaggaggagcacaaaggaagtgaatcttacaatcgcccagatgaccatctggagggtttccagcacaggaagggggaacccaaacagagcctggcagtcttgctgagttgcagagacagagatgagaattcagagacaaaggaggcagaagtttgcargcagagcactggagaagagagagctgcatggagagggagaactatgcaggtctgctcacaccctcagctgagtacttactggcacatgtacagagg

SEQ ID NO: 235514 - DNA, 620 bp, Homo sapiens
agatctttgatgaaagtggctacactaaacaacacattttcaatggagatgaaacaggcttatgttggaagaagatgccatctaggtctttcatagccacagaagagaagtcaatgcctggcttcaaagtttcagaggaaaggctgactctcttgttaagagctaatgcaggtagtaactttaagttgaagccagtgcccatttcccatttcaaaaatcctagggccctgaagaattgtgckaaatctactctgcctgtgctctataaatggaacaacaaagcctggatgacagcacatctgttacagcatggtttcctgaataattttaaatctacttttgagacttactgttcagaaataaattaattaattaaaatactcttttcaaaatattattgctcattgacaatgtacctggtgtattagtctgttcccacactgctatgaagaaatacccgagactgggtaatttataaaagaaagaggtttaattgactcacagttctgcattgctgggaaggcctcaggaaactttcaatcatagcagaaggcaaaagagaagcaggcaccttcttcacagggtggcaagatggagtgagtgcaagaaggggaaatgcc

SEQ ID NO: 235515 - DNA, 620 bp, Homo sapiens
agatctttgatgaaagtggctacactaaacaacacattttcaatggagatgaaacaggcttatgttggaagaagatgccatctaggtctttcatagccacagaagagaagtcaatgcctggcttcaaagtttcagaggaaaggctgactctcttgttaagagctaatgcaggtagtaactttaagttgaagccagtgcccatttcccatttcaaaaatcctagggccctgaagaattgtgcgaaatctactctgcctgtgctctataaatggaacaacaaagcctggatgacagcacatctgttacagcatggtttcctgaataattttaaatctacttttgagacttactgttcagaaataaattaattaattaaaatactcttttcaaaatattattgctcattgacaatgtacctggtgtattagtctgttcccacactgctatgaagaaataccygagactgggtaatttataaaagaaagaggtttaattgactcacagttctgcattgctgggaaggcctcaggaaactttcaatcatagcagaaggcaaaagagaagcaggcaccttcttcacagggtggcaagatggagtgagtgcaagaaggggaaatgcc

SEQ ID NO: 235516 - DNA, 469 bp, Homo sapiens
tttttatggctgaatagtactccactatgtatatgtaccaagttttctttattcattcatctgttgatggacacttagttggctatttcaaatcttggctattgggaacagtgctataacaaacataggagtgcaggtagatcttcaatatactgatttccttttctggggtatatacccacatgtaaggttgctgaatcatatggtagctcaatttttagtttagtttttttttttttttgaggaatctccaaactgttctcaatagtggttgtactaatttacattcccacaaacaacgtacaagaattcctttttctctacatcctcgccaacatttgtcattacctgcctttggaaataagccrttttaactgggatgagatggtagctcattgcagttttgacttgcatttctctgatgatcagtgatgctgagcaccttttcatgtgcctgtttgccatttgt

SEQ ID NO: 235517 - DNA, 552 bp, Homo sapiens
caacacaaataaatgaaaaaacagtacatgctcacggattggaagaatcaatgtcattaaaatggtcatactgcccaaagcaatttactgattcaatgctattcctattaaagtaccaatgccattaatcatagcattgtaagtagttattctaaaattcataaggaaataatggtttctagtggctgctcacttactgtgcgaccttaggcaagtcatttagctctatgcatttcagactctccttttataaaagggaagcagtgtgttcttgtctctgagtcactggaatgcagtggagaaatttatatatkgctattttgagttatgaggaagatagattcttcctagatccaaacgctaataagtcttttgccttggggatttatcttaattgacatttcttcagctttactaacaccagggagaccagctatgtctagacttctttagggccattttatgttgctgttacagaataaattattaagggaaatttgctgtgtaaatttatcacctttcatccacaacattaaaaaatgacaccagctt

SEQ ID NO: 235518 - DNA, 581 bp, Homo sapiens
gacagtctctttaacaaatggttttgggcaaactatacatccacacacacaagaaaaaaaatgaaaccctgaacttatttcgcaggcagaaataaaaatagaatgaattaaagatttaaatgtaacatctgaaactgcaaaactctttgaagaaaacataggaggaaagtttaatgacattgggataagtaactattttttggatatgaaatgaaaagcgtaagtaacaaaagcaaaaatagacaagtgagactacttcaaactaaaaagcttctrcacagcaatggaaaaacttatcagagtgaaaaggcaatctataggagaaaatatttgcaaaccatatatttgataaggggccaatacccaaaccataaaaggaactcctatgtcttaatgccaaaaatcattaaaaaatgatttaaaatgtccaaaggacttggatagacacttcttcaaagaaggcatacaaattagaaggcatacaaatgggaagacaagttgtccatttgtatgccatgtaaagatatttaacatcaataatcagagaaatacaaaccaaaacaaaagtgactgttaggatg

SEQ ID NO: 235519 - DNA, 437 bp, Homo sapiens
agagtggtctttgttgttccctaatcaggaagcaagcccaggccwcggcagacattttaactaccagaactgttttgggtcagatttttgctcttaatttagtcaggagaatttttaaggctagccatgaaactgttagtgtgtttttaaaactttgatctttccattaattgtttacaataggcgatctctaaaatccttaatagcacacacacagagaggggttaggaaaacagtattgttatgtaaataagacctctcaggtagtcaaattttgattttgatttttatcttagccagtccgggttttagaggtgaaacttgactttctgcagttgtgggggtttcagtagacattagagtaggcaagggattggtccagtctaacagaaaatgagctaaaataaaaaccaatcacacaattaacatattattga

SEQ ID NO: 235520 - DNA, 434 bp, Homo sapiens
gtggtctttgttgttccctaatcaggaagcaagcccaggccacggcagacattttaactaccagaactgttttgggtcagatttttgctcttaatttagtcaggagaatttttaaggctagccatgaaactgttagtgtgtttttaaaactttgatctttccattaattgtttacaataggcgatctctaaaatccttaatagcacacacacagagaggggttaggaaaacagtattgttatgtaaataagacctctcaggtagtcaaattttgattttgatttttatcttagccagtccgggttttagaggtgaaacttgactttctgcagttgtgggggtttcagtagacattagagtaggcragggattggtccagtctaacagaaaatgagctaaaataaaaaccaatcacacaattaacatattattga

SEQ ID NO: 235521 - DNA, 578 bp, Homo sapiens
ctgacatagcatttataaaaggtatgcacaacttataaggcagagtttgattttgtgcagagggagaactttctaacaattactataactgtccagagtcagcataagtaggatatcaaatttaaatgggaattgatagtaatattcagacataggcatatatacatattactactggctaaattttttttattttcacggtagaccaaatatttcaactcatgtaatattgtttatcatgtatcagtggaaatctaagcttttctcataatttctgtaaactacttattatccaarctctgcagaaaaaggcaacataacagagtgagttcagactatttgtaattaccacctttatcacttgctgggtgttctcattaatttttattcatatgtaaatgagtataatcatgatctctattctcggagaatcccctttttcctggttttctatttccgtatgcagcaagttctactggaaaccactattggtttctcacccaatagattctgtgttgcttttcccaagtcctctctttaggaccaaggcattcatttctttaactgcaaggctactg

SEQ ID NO: 235522 - DNA, 578 bp, Homo sapiens
ctgacatagcatttataaaaggtatgcacaacttataaggcagagtttgattttgtgcagagggagaactttctaacaattactataactgtccagagtcagcataagtaggatatcaaatttaaatgggaattgatagtaatattcagacataggcatatatacatattactactggctaaattttttttattttcacggtagaccaaatatttcaactcatgtaatattgtttatcatgtatcagtggaaatctaagcttttctcataatttctgtaaactacttattatccaagctctgcagaaaaaggcaacataacagagtgagttcagactatttgtaattaccacctttatcacttgctgggtrttctcattaatttttattcatatgtaaatgagtataatcatgatctctattctcggagaatcccctttttcctggttttctatttccgtatgcagcaagttctactggaaaccactattggtttctcacccaatagattctgtgttgcttttcccaagtcctctctttaggaccaaggcattcatttctttaactgcaaggctactg

SEQ ID NO: 235523 - DNA, 516 bp, Homo sapiens
ggcattcatttctctgtgtstgattgccagcagccatagatcaggtgggatttgcggatgagggcctctgatgactcagccttggggcaggccacagggagtaccttgcctgggggctctcctggactgctgaggaaggcttgggcaagtctctgccctgctccttcctgacatgccctcagagaacaggatttttattggacatttggtgacaggtgcacgatgtgagcagaagggacctcggtttaatgtctcatgagacaagcagcacgtattatacagctagtgactcactactaatttactgccctagaagactggtgttttctgaaagaacaggaggcaagagcagaaactgctttttgtcccagacttctttcactacagatgtttgcagctggcacattctgcttttcttcctctgtgggtgcacaagactaacccaaataatcatatttcggtcttaattacctttctattacttaattaaatgacctgatatggatgccagaaaag

SEQ ID NO: 235524 - DNA, 516 bp, Homo sapiens
ggcattcatttctctgtgtctgattgccagcagccatagatcaggtgggatttgcggatgagggcctctgatgactcagccttggggcaggccacagggagtaccttgcctgggggctctcctggactgctgaggaaggcttgggcaagtctytgccctgctccttcctgacatgccctcagagaacaggatttttattggacatttggtgacaggtgcacgatgtgagcagaagggacctcggtttaatgtctcatgagacaagcagcacgtattatacagctagtgactcactactaatttactgccctagaagactggtgttttctgaaagaacaggaggcaagagcagaaactgctttttgtcccagacttctttcactacagatgtttgcagctggcacattctgcttttcttcctctgtgggtgcacaagactaacccaaataatcatatttcggtcttaattacctttctattacttaattaaatgacctgatatggatgccagaaaag

SEQ ID NO: 235525 - DNA, 516 bp, Homo sapiens
ggcattcatttctctgtgtctgattgccagcagccatagatcaggtgggatttgcggatgagggcctctgatgactcagccttggggcaggccacagggagtaccttgcctgggggctctcctggactgctgaggaaggcttgggcaagtctctgccctgctccttcctgacatgccctcagagaacaggatttttattggacatttggtgacaggtgcacgatgtgagcagaagggacctcggtttaatgtctcatgagacaagcagcacgtattatacagctagtgactcactactaatttactgccctagaagactggtgttttctgaaagaacaggaggcaagagcagaaactgctttttgtcccagacttctttcactrcagatgtttgcagctggcacattctgcttttcttcctctgtgggtgcacaagactaacccaaataatcatatttcggtcttaattacctttctattacttaattaaatgacctgatatggatgccagaaaag

SEQ ID NO: 235526 - DNA, 397 bp, Homo sapiens
aatgtattctttattttagttatttatgctttagtgtcatagctaagaaaccattgcctaatacaagctcagaaaatgtgcttctaaattttattttccatgttttatagtttagctcttacaacagatctgtgatccattttgagttwatttttatgtatcgtataaggaaggagtccaaattcattcctttgcctgtggcaatccagttgtaccaggatggttattctttccttttttgtattattttgatatcctgtcaaaaatcagttgaccataaatgtgaggggtttatttcgaactctcagttctactccattgatttaactatgcttatgtatcactctgtcttgattatggcagatatatagtaagttttcaaactgggaagtgtgag

SEQ ID NO: 235527 - DNA, 598 bp, Homo sapiens
gtacttggttacgggggatcgcttgagcccaggagttcaaggctgcaatgagctatgattgcaccactgtactccagactgggcaacagagtgagaccctttctcaaaaatgagaccctttctcaaaaaaaaaaaaaaaagtaaaatttccatttattccttcttctagtttctgtttctttgctggcactttttatcttttgtatcaggagtgtttgtaattgctcattaaagtctttctgttatggctgactttaaattttagataattctaacatctctatcatctcagtgttggcttctattgggtttttttttttaacttagttttgagatcttcctagttcttggtgtgatggatgattcttgatggaaacytgtatatttttgatcttttgttgtagctgacttttgttgacattgctttggcagggaaagtggacatgctgcctcattattccctaggaaggtaaagtccccactcagcctctttggatgttcagggtcaggggaggctgcttgttaatgctgagccagggtaggagtgcctgctttccatgctgtgttcaccccatggggtggcctcattgccagtggg

SEQ ID NO: 235528 - DNA, 229 bp, Homo sapiens
gctcccttgttgttgcatgggatggcaatgtccacatagcgcagaggagaatctgttacacagagcaatggtaggtaggttaacataagaygcctccgtgagaggctggtgggtcagccctggggtcagtaaccacaagaagccgtggctcccggaaggctgcctggatctggttagtgaaggttccaggagtgaagcggccagcaattggagtggctccagtggccgc

SEQ ID NO: 235529 - DNA, 584 bp, Homo sapiens
acagttcaattcttcacacaaatgttcacagacaagccaaatcgagattaatttggggagaaaaagcaatggagaagtccctttggaaagcatctctgaaccagaaggaggattcttaaacaacaacttcctaagaaaaaaaagaaaaaaaaaaaaacagccaagaccacttcctgtattttgtagcycttgtctgccattacatacaccaaggtcaaatcctctcacagtacaaggtaatctctagtacccccaaagccaaataggtcaggtaatgcaatacaggaaagcagagctttagacctaagaagaatctgctcatgactcttgaaactccacaaagaaaacagaacaccccaaaaggggtgagtggtactttgttctgagttctttaagggatttgagtcactagaagccttctctatatttttcttggtactgaagacagcaaaggagatatagggtggaagaaaagtaaacaaagtaacaatttttttaagacaagaaggaaacacagaaaccaagcacatggttttatctccctctttttgcagctgagaggaattttagctaattcagagagg

SEQ ID NO: 235530 - DNA, 584 bp, Homo sapiens
acagttcaattcttcacacaaatgttcacagacaagccaaatcgagattaatttggggagaaaaagcaatggagaagtccctttggaaagcatctctgaaccagaaggaggattcttaaacaacaacttcctaagaaaaaaaagaaaaaaaaaaaaacagccaagaccacttcctgtattttgtagcccttgtctgccattacatacaccaaggtcaaatcctctcacagtacaaggtaatctctagtacccccaaagccaaataggtcaggtaatgcaatacaggaaagcagagctttagacctaagaagaatctgctcatgactcttgaaactccacaaagaaaacagaacaccccmaaaggggtgagtggtactttgttctgagttctttaagggatttgagtcactagaagccttctctatatttttcttggtactgaagacagcaaaggagatatagggtggaagaaaagtaaacaaagtaacaatttttttaagacaagaaggaaacacagaaaccaagcacatggttttatctccctctttttgcagctgagaggaattttagctaattcagagagg

SEQ ID NO: 235531 - DNA, 532 bp, Homo sapiens
ggtgagtggtactttgttctgagttctttaagggatttgagtcactagaagccttctctatatttttcttggtactgaagacagcaaaggagatatagggtggaagraaagtaaacaaagtaacaatttttttaagacaagaaggaaacacagaaaccaagcacatggttttatctccctctttttgcagctgagaggaattttagctaattcagagaggccttgttacccataatttggaattctcatttggattttgtcaagtcaggtagagttagtcaaatctgactgcagaaagaccagaagaaacaacaaaaaatcccctacaatatgatcactgagcactttaatggttaggagaaattaaaatcagctggttgttaatcttaactttagccaagacataaataaaccccaattcagttacttacctagggatgggtctcaggctgaagactgctctctaccacactagaagcgggagaaaacttaaacctgccttccccattggaagtgagctcaaactccagaa

SEQ ID NO: 235532 - DNA, 532 bp, Homo sapiens
ggtgagtggtactttgttctgagttctttaagggatttgagtcactagaagccttctctatatttttcttggtactgaagacagcaaaggagatatagggtggaagaaaagtaaacaaagtaacaatttttttaagacaagaaggaaacacagaaaccaagcacatggttttatctccctctttttgcagctgagaggaattttagctaattcagagaggccttgttacccataatttggaattctcatttggattttgtcaagtcaggtagagttagtcaaatctgactgsagaaagaccagaagaaacaacaaaaaatcccctacaatatgatcactgagcactttaatggttaggagaaattaaaatcagctggttgttaatcttaactttagccaagacataaataaaccccaattcagttacttacctagggatgggtctcaggctgaagactgctctctaccacactagaagcgggagaaaacttaaacctgccttccccattggaagtgagctcaaactccagaa

SEQ ID NO: 235533 - DNA, 532 bp, Homo sapiens
ggtgagtggtactttgttctgagttctttaagggatttgagtcactagaagccttctctatatttttcttggtactgaagacagcaaaggagatatagggtggaagaaaagtaaacaaagtaacaatttttttaagacaagaaggaaacacagaaaccaagcacatggttttatctccctctttttgcagctgagaggaattttagctaattcagagaggccttgttacccataatttggaattctcatttggattttgtcaagtcaggtagagttagtcaaatctgactgcagaaagaccagaagaaacaacaaaaaatcccctacaatatgatcactgagcactttaatggttaggagaaattaaaatcagctggttgttaatcttaactttagccaagacataaataaaccccaattcagttacttacctagggatgggtctcaggctgaagactgctctctaccacactagaagcgggagaaaacttaaacctgccttycccattggaagtgagctcaaactccagaa

SEQ ID NO: 235534 - DNA, 532 bp, Homo sapiens
ggtgagtggtactttgttctgagttctttaagggatttgagtcactagaagccttctctatatttttcttggtactgaagacagcaaaggagatatagggtggaagaaaagtaaacaaagtaacaatttttttaagacaagaaggaaacacagaaaccaagcacatggttttatctccctctttttgcagctgagaggaattttagctaattcagagaggccttgttacccataatttggaattctcatttggattttgtcaagtcaggtagagttagtcaaatctgactgcagaaagaccagaagaaacaacaaaaaatcccctacaatatgatcactgagcactttaatggttaggagaaattaaaatcagctggttgttaatcttaactttagccaagacataaataaaccccaattcagttacttacctagggatgggtctcaggctgaagactgctctctaccacactagaagcgggagaaaacttaaacctgccttccccattgsaagtgagctcaaactccagaa

SEQ ID NO: 235535 - DNA, 618 bp, Homo sapiens
atttctaaaatctaacaaatattggtaaaaacagtgtgagtttgtggcatttgaaccactacccactcagtccccacccccaactcagtgtgatggaagctgtactcttggtaggtgtggccaagaagatagactccctctaccccagttaccagtccaggattttgtttttttccagaggtggttggcctccatcattctcacacctagtccaccaaagcatgtatgtaaactccattctagtcaagtgtggatgaaaggactggggctttacccagccacctgctacccagccaccaccgtaaggtagaagttctattcaaattgtgtcaggtgaagaatactggacaactactacccctgccttagcccacacatggggcggaggwtccatattgggagaggcaagctgaaaagaccaagggctactaaccccactcagtgtcctgctcacgaagcagggatgtcactctgagagaagcagcctgttgtccccacccccagctctggagcagtggaacaaagtttcttcctagggcgagagggaggatttaagaatagaggacttcatagctgattttatttgaaacagaatgggggagaagttcactatgaaaa

SEQ ID NO: 235536 - DNA, 628 bp, Homo sapiens
aaaatatatttgtaaagtgtgttcataacacgctcccagaaagcattttagtagaagtcattttggttttggataaatttgatctctttaagttcagtaaatgatcaaggacagatacaatataattttagtagtttacattgtcatcttttcttatttatttttgaaacggagtctcactctgtcacccaggctggagtgctgtggagccatctgggctcactgcaacccctactttctgggttcaagtgattctcctgcctcagccacccaagtagctgagatcacaggcacgtgccaccacgcccagctaatttttatatttttatatttttagtagagatggggttttgccatgtaggccaggctggtctgarttcttggcctcaagtgatctgcctgccttgtcctcccaaagagctggtattacaggcatgagtcaccacgccccctgttgtcttttcttaaattaattaatcctataaattgcaaccctaattatttgccagtgaaaccactgcaaagatatgggtactttgccagtgagaccactgcagagatagggtaataaaactgacagctccgtacagaaagtttccgtgtgttgtatgatttcattcaggcatac

SEQ ID NO: 235537 - DNA, 583 bp, Homo sapiens
gcctctaaatggtggattttgcctgaactgttctgggaccatctcttctcttccttcaatttttcaaggtgatcctattcattatcatgtctttaaatactatttacaggctgatggttcccaaatttatatttctacctaaaatatctctgaactctctactctaatctgataattgcctgtttgacatctccacttggtatttcgaactgcacttgttaaaaagtaacgtaattttcaataactttctcctcacctcctgaatttccccccttcycttctctattcccatctcagtccatggcatcggccattcccagttgatcatctcagaagcatgagtgccatcacaatctctctgccacctcacgtctacttcatcagcaagccctgcctgccacatcctgaggacagctgtgctcatcctggcttccccatctgcactgcccctgctccactccaacactgacggtgcagcctcttcagggtctcctccacccactctgcctctcttaatccaatctccacatggcacccaacaagaggaccattgctgccctgtttaaagtcactcgtggcttcc

SEQ ID NO: 235538 - DNA, 589 bp, Homo sapiens
ttaagaaacctcttaagcgtttggtttttaggtagtactttgtactgatataaaatctaagttaaaactgagcacttaccttagatattaagaaaagcacactggcgaatgaactacagctggcccgagctctaccacagacagaatgtttcaaacttttctatgacttacagaatgagagcaaaggatgaagcttcagcaactgtccctggagaaagggctctcacgagtttcgccctgtctcatgtttcatcccctcacattagcaacagacgtgtctaattttactcagtgacataaacagttcataccacacttaaaattttttgggcaccaattccaggacacagctcttcgcatgccaaaaacaaaccaaaacaaacaarcaaacaagaaaccaaactcttcttcttacaaaaccaactttccaacatttaaaccctaaagcatgatagtttaatgtaattataactttcttaaaaaaactttacctcaaacaaacagcagaaaacttctaagactggtttccattagaaactaatgttgataaaattttacgaaaaatctcttcaaattaacatgcaagtta

SEQ ID NO: 235539 - DNA, 536 bp, Homo sapiens
tttgcagcaggattaaaacttactaaattatatacttcatatttgcattttagtactaaaccttgaatataagaagcagtgccttagtatacatgcacacagagatgggaacaatcagatactggggcctgcttgaggaaggagggagggagaaaggtggggttcggaaaactgtctatcgggtactgggcttactacctgggcgatgaaattatttgtacatcaaatcctggtgatatgcaatttatctgtgtaacaaacctgcacatgtacccctcgaacctgaaataaaaaatgaagaaaaaaaggagcaatgcaataacaatgcatatgcttcattctcattttattttcttctcaggagacttttctcttcattctgcttatttatactctaccataatttcttttgaaatttgatacttctatcataccarcagctgcaggccttaaattacaagctgatacagcttcaaataatcttacatttgtaagacattttaaaacctttcatgaattctctgcacattagtact

SEQ ID NO: 235540 - DNA, 641 bp, Homo sapiens
caacatttgaaaataacggagtattttaatgatttgggttgtcaattgactagtgaaacatattaggccatgtccaaggcccaaatgaagttataaatatatggatagtagtctcattttaatagttctcaygacgttataagctaactgcagtcatggattactgtgactaaatccctcaaaactgctcagcctttcctccaatacaacacgcattgtctccccacaattcctccaatacaacacccactgctcttttgtccatctttccttcctcggttgacgatgccatcccccagaatgtcacagaagacagacttagggctctccctcactcaccagtctaccagtcactaacttcagtggattccctctgcagaacctcctgctctgcttgccttccctccttgctcctgcctgacttggagattcaccttctctggcatcacctattgctatagccaagtacctacttcctctgcttccgggaactgccagcccccatcctacacacctagggactgccagaggaatgatgagaacaggtaattctgtccatatcactccttggcctaaagcccttcatcaagcctccaggtgcaggaccaagttcttgacctgacacacatgccttcagtgat

SEQ ID NO: 235541 - DNA, 641 bp, Homo sapiens
caacatttgaaaataacggagtattttaatgatttgggttgtcaattgactagtgaaacatattaggccatgtccaaggcccaaatgaagttataaatatatggatagtagtctcattttaatagttctcatgackttataagctaactgcagtcatggattactgtgactaaatccctcaaaactgctcagcctttcctccaatacaacacgcattgtctccccacaattcctccaatacaacacccactgctcttttgtccatctttccttcctcggttgacgatgccatcccccagaatgtcacagaagacagacttagggctctccctcactcaccagtctaccagtcactaacttcagtggattccctctgcagaacctcctgctctgcttgccttccctccttgctcctgcctgacttggagattcaccttctctggcatcacctattgctatagccaagtacctacttcctctgcttccgggaactgccagcccccatcctacacacctagggactgccagaggaatgatgagaacaggtaattctgtccatatcactccttggcctaaagcccttcatcaagcctccaggtgcaggaccaagttcttgacctgacacacatgccttcagtgat

SEQ ID NO: 235542 - DNA, 641 bp, Homo sapiens
caacatttgaaaataacggagtattttaatgatttgggttgtcaattgactagtgaaacatattaggccatgtccaaggcccaaatgaagttataaatatatggatagtagtctcattttaatagttctcatgacgttataagctaactgcagtcatggattactgtgactaaatccctcaaaactgctcagcctttcctccaatacaacacgcattgtctccccacaattcctccaatacaacacccactgctcttttgtccatctttccttcctcggttgacgatgccatcccccagaatgtcacagaagacagacttagggctctcyctcactcaccagtctaccagtcactaacttcagtggattccctctgcagaacctcctgctctgcttgccttccctccttgctcctgcctgacttggagattcaccttctctggcatcacctattgctatagccaagtacctacttcctctgcttccgggaactgccagcccccatcctacacacctagggactgccagaggaatgatgagaacaggtaattctgtccatatcactccttggcctaaagcccttcatcaagcctccaggtgcaggaccaagttcttgacctgacacacatgccttcagtgat

SEQ ID NO: 235543 - DNA, 588 bp, Homo sapiens
gaagaaattatgtgaaatatgtctctgacattctatcttagttgtctcctgacttttatttttaatctactatatggaatcgattccattttttttccttgaaatgtacttgccttcattttccattataaacagtttctgtcatggttggatcatgactttctcgtgtgactaayctccacttcccttgttttttaactatcttccttttcgtttcttgtattgtttacctctatcacatcctcaagcttcggccaaacttgtagtaatcatgaccattgtacacaatctcctttttctgcggtattggtgtgatgcaggctctccctcttcctgtccccatctgcaggttgaggctcccacagctgtggccttgagtaggtgtcagtgttctcttgagctgggctaattgttctctggaccttcactcatgttctttcatttactcccttgctttgatggagtgcaacctcaataattattcagaaaggagggttgggaagcagattgtctgacacttttggtgtctgaaaatttatctattctgctctcaaattggttaataattcatttcatttagcatagaat

SEQ ID NO: 235544 - DNA, 544 bp, Homo sapiens
tttcctggaaattgtgaaaatttatcttacatcaagttttaattctaagagtagaattggatttgtgagatactagtaatttgggctctttctaaccccagctgggcagataaaaccaggctcagcyttatctgaattcagatttattctcttggtcaacattttgctctagtcttctctcttttaaatttttaatattctttggtgtccttatgcgttcatcttgtgatgttttactggctttctcgtctaatgttatctgggcatttttgaatatatcatttgtagttagttttactgttttctacagtgaaacattaaagtatgatgaggtgttgcaatgacagtacatgtaaaataataaagatgccattgctacactgttgaggatctgagcagagaaagccatgccaaactttgttaatttgaaaaattatggttttccctatattctgactaacaactgaatgcatgatagaaaagcaattacactgagtttgggtaaataattatatggtagttgttacaagttcaaaactatgca

SEQ ID NO: 235545 - DNA, 493 bp, Homo sapiens
  misc_feature (1)...(493): n = A,T,C or G
gtattaaatatgcattattatatacatatagtgtctatatataccttatttgtatgtgtatatgtttgtgtactgtgtgtgtgtatattaactataatactaaaaattatatatattctagttgtgttaatgaaagagttaatattatatgtttgttatagtaygaagggaaaactaacttcacagttgagaaaacagagatcactgcaacctccatcttccaggcttaagtggtcctcccacctaaggctctcaggcagctgggagtacaagtatttttcaccatggccagcaaattttttggattttcagtagagacagagtctcactatgatgcccagggtggtctataactccctagctcaagggatttgaagttagcatctatttaatgctcattgatttaatgctcatcaatgtaatgctaaatcaatgtctgaaaaaaatgcatacacatttaatatgtactcttttaaaaaatannnnnnnnnnn

SEQ ID NO: 235546 - DNA, 536 bp, Homo sapiens
tgtacctttctagtggaagtgtttttcttataggcaacagatcatttattgggttttattgttttatcctttcagccactctatgtctttcrattggtaatttcagttcatttacattccatgttattattcatgagtaaggacttactcctgctattttggtatttgttttctggttttattgttgtttgctgctccttttatgcttccttcctgtcttttattgacggtgattttctcttgtggaaagatgtatttttctgcttttgtgtatgcatgttttgttatatgattttttgatttgaggttaccatgaggcttgcaaattctgtattataacccaattatttaagctgaagctgataacatcttaacactgttggcataaacacacaaactcgcaaaaggaaaactcaaaactctacaccttaactttgtcccctagcttttaaacttttggttgtttctatttatattttattgtactgtctatgtcttgaaaagttgttgtagttactatttttgattagttcatt

SEQ ID NO: 235547 - DNA, 536 bp, Homo sapiens
tgtacctttctagtggaagtgtttttcttataggcaacagatcatttattgggttttattgttttatcctttcagccactctatgtctttcaattggtratttcagttcatttacattccatgttattattcatgagtaaggacttactcctgctattttggtatttgttttctggttttattgttgtttgctgctccttttatgcttccttcctgtcttttattgacggtgattttctcttgtggaaagatgtatttttctgcttttgtgtatgcatgttttgttatatgattttttgatttgaggttaccatgaggcttgcaaattctgtattataacccaattatttaagctgaagctgataacatcttaacactgttggcataaacacacaaactcgcaaaaggaaaactcaaaactctacaccttaactttgtcccctagcttttaaacttttggttgtttctatttatattttattgtactgtctatgtcttgaaaagttgttgtagttactatttttgattagttcatt

SEQ ID NO: 235548 - DNA, 611 bp, Homo sapiens
atggaatatctatcatatggatgtttattttatagtaaaataattttaattataaaaataataacaaatattcaactaaaggaatagacatcacagctattttcaaatatgttatagcaggaggttctatatattttattatatcctagattgaaactactttaaaaggtaaagtataaatagaagctttttaagggtagtgttctcacagcaccaattttgtaagcattttatatccattgtactgactgagttgcactgttttagtattcagagctgtaagttttattctatttatcttcctgagaaaattctctgtgctaaatggcttttacatatakccctaagttagaaacagcagttataaatactatcagtcacaaggagtacaaagagccttcctttctacaagaatgccatcttgggatcacttactattaggaacaaagaatctttatataacatttggaagtacctagccacagaatgatcttaattcaactcattcctatctatctacctatctattgatcaacttatttatctatctacctttttatatatgtacatcattttttctggagtatttaatagcataccctatatattgt

SEQ ID NO: 235549 - DNA, 465 bp, Homo sapiens
ctgttcaaatttaatgtttgtcttaacaaagcaaatagaaaataaaaattataaaaatatgattaaaataatttgtaagagctaagaaaatatgtttatatagagacaatatcttccttttaattaaataaattgtctttcaaaaattatttttatttcacaattgacaaatatatatttttaaagtaragtaagatattttttattagtgctatggtttggatgtgatttattcccaccaaaactatgttgaaatttgatctaccatgtagtggtgttgagtgggacttagtgagaagtgtttgagtcatgggggcagatcctttatgaataaattaatacccacatatagaggtgagtgagtgctcttcttgcaagaatgaattagttcccatgagagtaggttattaagagtctggcttcctcagtttctctctcttatttcctctcttggcacgtaatctc

SEQ ID NO: 235550 - DNA, 465 bp, Homo sapiens
ctgttcaaatttaatgtttgtcttaacaaagcaaatagaaaataaaaattataaaaatatgattaaaataatttgtaagagctaagaaaatatgtttatatagagacaatatcttccttttaattaaataaattgtctttcaaaaattatttttatttcacaattgacaaatatatatttttaaagtagagtaagatattttttattagtgctatggtttggatgtgatttattcccaccaaaactatgtkgaaatttgatctaccatgtagtggtgttgagtgggacttagtgagaagtgtttgagtcatgggggcagatcctttatgaataaattaatacccacatatagaggtgagtgagtgctcttcttgcaagaatgaattagttcccatgagagtaggttattaagagtctggcttcctcagtttctctctcttatttcctctcttggcacgtaatctc

SEQ ID NO: 235551 - DNA, 603 bp, Homo sapiens
tttcaaatgtaaaatcttaatgtttctcataaaacaccaagtacagatgctgacaggtatgaaattcaaaagttatttgggatttgatgctcagaaggtaattgcatgctgtgtatgttgaactctaaattgggttgggctcatctgtatagattcacagacaagaattaaagtcttgaaggtaaactcattgtcctctatcaataaccagaaatatgccttctttgaatctgatattccctgacattctcctgcattaatgtgttgaagtcagataaatctttaggttayttattttgaactgttggattctagagtactgcttcagatttcattttttttaaccatagttctttttttatcagaaggttattttcttagaaaaatatatgcaagcattgtcctttgaaatttttctcgggtgttgaatgttaagtacatatttttaaactaataaagctgttactaataaaagtatagcagaagatgttattccaattaaaaggaataaaattgatttggagaaaagtcaaagtttaaggaaggtttgattttgttggaattagaaacaaacaaagtacttcatatctgtaaatgtgttat

SEQ ID NO: 235552 - DNA, 658 bp, Homo sapiens
ggattgttaaatatagcagcagtagggggaacaattactccttctttatctgggctttatataataaaattcaattcttgaaagccctgttttaatttactttgggcatattaacttttttaatttagggaattatccctggatcccattttgtcatgccaatttataagatccaaagacttaatttattttcactttattactcattggatcacagtgtttatatccactatgggatatttaagggcaataggtgatatgaccatggagaactcaggcaagggagtagttcaggtaaggcatagctatttttcctctattttatatgctgcaactccsctaagattaataggcattacgttgtttaagtttatggagtccctaggtataactgtaattctagccccagtgtattgattaagtccatgaaggtttgcaagttgatgcacttcaacagattttgacattaaatctacaacctacattataagggagaaaaagcctgcaaccaacagtgatcttttatctttttgttgtataaaattttttaagatttattttattgctgattgacacataaaaattatacatatttatggggtctaatatgatgtttcaatacatgtattcattgtgtaataattaaattagagtaatt

SEQ ID NO: 235553 - DNA, 658 bp, Homo sapiens
ggattgttaaatatagcagcagtagggggaacaattactccttctttatctgggctttatataataaaattcaattcttgaaagccctgttttaatttactttgggcatattaacttttttaatttagggaattatccctggatcccattttgtcatgccaatttataagatccaaagacttaatttattttcactttattactcattggatcacagtgtttatatccactatgggatatttaagggcaataggtgatatgaccatggagaactcaggcaagggagtagttcaggtaaggcatagctatttttcctctattttatatgctgcaactccgctaagattaataggcattacgttgtttaagtttatggagtccctaggtataactgtaattctagccccagtgtattgattaagtccatgaaggtttgcaagttgatgyacttcaacagattttgacattaaatctacaacctacattataagggagaaaaagcctgcaaccaacagtgatcttttatctttttgttgtataaaattttttaagatttattttattgctgattgacacataaaaattatacatatttatggggtctaatatgatgtttcaatacatgtattcattgtgtaataattaaattagagtaatt

SEQ ID NO: 235554 - DNA, 403 bp, Homo sapiens
aatattttacctgttgcttttgaaattactgtagaaaaagtaaggaataagaaatctacattcaaattttacatacttcaagaaaatttcagaagcttgttaccttcaaatattctactgccaagtatttcaaagtgggttctggataactttaagtgatgatgtttctaatctgatggtgttatagatattttcagcttgctttattctcctcatttctctctctctcttttctttacaatgaagggcaagcaaccttccttaaggcatcactgcattaaataaattcatctgtttagtgtgaatattaatacaaagacaaattagctttgccccagtagtggcctgaaaacacctacctaatrcctgttgttaggctaaatgtttcacagacaaccgaact

SEQ ID NO: 235555 - DNA, 503 bp, Homo sapiens
ggaagggaagaagatgggagagaagacatatggagataatagacacaggatgaaattacaggtagtaggaagagagacaggtaagttcccttgaccccttcatgggacttgtgagaggggtgtggctcatttacttggctgcagtgctcataccccttgcaggatgggaagcatgcaggtcagtgggtgccgtggcctggtgagcacttttgggttccagcctcatggcagtgtctaggggtgtgttacaattaatgctttgtttagctttgctgtctgtggatgcctaagtgttaaacagctcagtgaagagtcaatgtgacaggctttttgggttcccacacccagtgtgtcccaaattcttgtctggcatccaggaagaatcagstcacgtgaacaatctgaaaagtgatgaatgcagaggattttattaagcagcagaagtggctctcagaagaggggagctggaagggggatggtgtgggaagaaggtaacctttccc

SEQ ID NO: 235556 - DNA, 607 bp, Homo sapiens
ttaattacgaattaccttcatttttagagacaacctcaggcttaatgcttatttctttttgttycatccaaatagagaatgtcagatattgtgtcattggaaatggggttgagataaagtggaatttttggtaagtagggtagggaaggaggagcttgaggagggaggcactatgacatatattaatatatattaagtagttaccgtgggccaagcactgtatggtataccattaaaattatttctcagaatgctgattgacttcaagcattttatgtcttccctcactgatgcggtatcataaaccttgataattatgccctgattatcacaatatttggattgtcctaaagcaatagtatggaaaattgagactcaatctggaataaacagaagtatgggtttggtagcccccagagatccctatctcctgatatttacactaatgttgtgtctcctcacccaatgtaccagtgacaaatgttggccagagtaaccatagaatatctcaaaactgatgccaagtcctgagattggggtataaaaggcaaagatgacttccttcttggtctctctctttctttctctctggaaatattaatactgt

SEQ ID NO: 235557 - DNA, 589 bp, Homo sapiens
agaattgagacctggtgacttatttagttcatttggtgaggtcatattttcttggggtaatcttgatgcttacggatgttcttctatgtctgagcattaaagagttaggcatttgctctagtcttcacactctgtgcttgtttttccccattcttcttggaaaggctttctaggtatttgaaaagacttgggtgaggtgatcaaaatttgtgatcactgcagctctgtctggactggggggaaccccaagcccagtaacactctggttcttacagacttgtagagataatgtcttggtggtcttggataagatctggacgaattctctagattaccaggtagaggctcttgttctcttcccttaccttctcctaaataaatagtgtttctctgtgctgagcaacctggactgggggtggggtgacacaaacacccctrtggccaccatcactgggaatacactgggtcagacctgaaaccagaactgcactgggttttgcctaaggcctgctataaacactacctggctactgcctatgttcgctcaaggttctggggctctacaatcggcaaatgataaaggcaacca

SEQ ID NO: 235558 - DNA, 582 bp, Homo sapiens
gattatccatgcttttttaacatagaaatttctgaattaaatagtgaatccggtagtagatgagttatctaaatctcaaattatcctaaatagatattatgcaatcaaaggttaacttgcttacataaataatcaagtagtgaaagtaaaatgaatttagctatgtatccgaatttccaaaaaaaaataaagattcccaaagttaaagcaaaaaaaaccctaaaaataaagagagttactatgtattgattttaaaaagtcaaattataattaagattgatcattagaaatatgtgtacatttaataatagagyctcagaaaatgataaaaataatgtaaaaaggtaaaaccacaattacagtgagaaatttcacatatttctgtcagtaaatgatagattaaaaaaataaaacaagtaaatttgaagataagccacaaaatcattaaactttttatgtgggccttatttaaaagactgcatcaaaagcttcagaatgcaaatatttttcaaattcatacagaaaatatattgaaaaatgaataaagaactagagaataatacttattttacctaataaagt

SEQ ID NO: 235559 - DNA, 595 bp, Homo sapiens
ttatggttgtgtcagaaacagcaatacaaacagttacaggggataaaggaggactaaactacataccttccttcccccaagttcatagtaggatatayatgaataaaacaaacaaaaaggcagggctgggggaagccctgctgatttatttacaactttagtgaaaaatgctttttaaaagtatatgcactttaaaaatatgatgatttaacagaattataattagcacaaactttgagcatgagttacagtcctgggaatagagacatctcagggagatcttatctgtattcactgaatgtcaaaaaacattgaagaggccaggtataatggctcatgcctgtaatcacagcactttgaaaggcctagcggccaggatgccttgagctcaggagtttgaaaccagcctaggcaacatagcaagaccttgtctctatgaaaaattaaaaaataaaaaattagttgggcatgatggcatgtgcctgtggtctcagatactcaggaagctgatgtgagaggatcatttgaaccagggaggttgaggatgcagtgagcagtgattacgacactgcaatccagccttaagatatagcaa

SEQ ID NO: 235560 - DNA, 595 bp, Homo sapiens
ttatggttgtgtcagaaacagcaatacaaacagttacaggggataaaggaggactaaactacataccttccttcccccaagttcatagtaggatatatatgaataaaacaaacaaaaaggcagggctgggggaagccctgctgatttatttacaactttagtgaaaaatgctttttaaaagtatatgcactttaaaaatatgatgatttaacagaattataattagcacaaactttgagcatgagttacagtcctgggaatagagacatctcagggagatcttatctgtattcactgaatgtcaaaaaacatkgaagaggccaggtataatggctcatgcctgtaatcacagcactttgaaaggcctagcggccaggatgccttgagctcaggagtttgaaaccagcctaggcaacatagcaagaccttgtctctatgaaaaattaaaaaataaaaaattagttgggcatgatggcatgtgcctgtggtctcagatactcaggaagctgatgtgagaggatcatttgaaccagggaggttgaggatgcagtgagcagtgattacgacactgcaatccagccttaagatatagcaa

SEQ ID NO: 235561 - DNA, 396 bp, Homo sapiens
gaattctatctggatactgattctggttgcaatcttggctgttctgctattcttcattatgttgccaagtgttgaactacagcaaagagagcaacgtaagttggcttgaaggatgagagatgctaatgggagtggggaagctaaagctgcatgacccataattctcaagtctgtctgtctcaggaagttctgaacttttccatgtatgttaaacatatgctctccacccattccttgatcctacatactgttctcttttgctgctggagctgttgacaatgctgttatctgaaagtgtgacctttttgtatctcaaccaagttgaaacccattgtccttatrgtgacagattttcaaacaacctgggaaagctttttaacatttaacacctaacag

SEQ ID NO: 235562 - DNA, 497 bp, Homo sapiens
ggggaaactctgtgggaggggggcaggtagggaagagggagtggggctatgtgggaactttatataccttctgcacaatttttctgtgaacctaaaacttctatagaaaataaagtctataaaaatgttaaaagtcaatgaggagaaaaaggagagcgaaataaatggaaacttgggggaaattttgtaattcacaaaataaaatcaaaagtcaaaaccaaataattctgcacatccaaaatataactaacaagtccaytgaattataaactggtcagaaacacatgcaacagttataacagatcaaaaagagatttgtgcaagtttaatgcaaaggaaatgtggagtaaggcattaagtaggcagtttagagaaaatgaatacaattttttgagaggaaagaaggccaccctaactcaataaacaagtaaaatattatcactgtgagtttctatttttcatctgtaaatttggaaaatacaaaaaaccctgaaacc

SEQ ID NO: 235563 - DNA, 535 bp, Homo sapiens
gggtaaaatggaagaggggaaattgagttcaaggagtgtttttcatgcatccactaattgcaaagcacaatgcagagcccatgctggtagcggagtgcccccakgttttgtcctctaaaccacacggagccccggtcctgttctctatgagcttacaatgtcagtgatgagggtggctgacaaggctcattttattccccaatgctcttcgtgtttcttctttcttgtaaaccccaggatctctgcctgctgccctcctcggctctggaattctgtccccatcaatgatcttcctgggctcctttctgggaggagttctggcctcccaactctccattccttgtagacaacctgaccttgcaagtccttctccacttcagagtttacggctagttcccttgaagacccacctgaagtagcagttgtggatacagacacaggacgaaggttcgggagcctccagagttctctcaaacattgtctctactcagatgctcctgatgcctcctctgagatgctcagtgtcatctcagga

SEQ ID NO: 235564 - DNA, 555 bp, Homo sapiens
catagaaataatagaagttgtctgattacacttttaaatattgatttgatttgatttgaagtcttgggtacatgtgcaggatgtgcaggtttgtacataggtaaacatgtgccatggtggtttgctgcacctatcaacccatcacctaggtattaagcctcagatgcattagctatttatcctgatgctctccctccctcactccccaacaggccccagtgtgtgttgttcccttccctgggtccatgtgttctcattgttcagctccacttataaatgagaacatgtggtgtttcatttgatttacactttttttgagacagagtctttatatgttgcccaggctggtctggaacttttgggttcaagcaatccttatacctcaggctcctgagtcgctggaactacaggcatgtgccatagcacccagctacactttttctgtactggggtgcactgagtaacrtaagggactgcactgtgatgcagtaagtaagagggaactgtactgtgatacagtaggtaagataggggatggcactatgatgcaggagg

SEQ ID NO: 235565 - DNA, 449 bp, Homo sapiens
tatctattgccacagcatttccacataccaacaccaaaaatctggtggtgtacaacaattaccatatatttaattcacaagtttgaggattcagctgatcttgatcggccttggctgatcttgcctggctcactcatacatctgcagttagctgtggattgactaagagtctctgctartcttagctgggcttgctgacatgtctggggtcagctattcattgactgatttgctaactgaggtgataaggcaatgggatgctactccatttgtttcactctctagcaggctagcctagacatagtctcatggccataacagaggagaaatagttgaagcagagacatgcaagcatttcttccaactgtctgcaagtatcacatacacatagattaatatttgttttgtagtcaccctgtgaaggtggaatagaccctctgaccccaatt

SEQ ID NO: 235566 - DNA, 556 bp, Homo sapiens
aatcagggatttcctcttggtttggatccattgctggtgagctaatgtgattttggggcggtggtaaagagcactgttttgtcatattactagagttggttttctggttccttcttatttggtaggctctgttagagggaaggtctagggctgaaggctgttgttcagattcctttgtcccttagggcattccctygatgtaatctcccccttttcctatggatgtggcttcctgtgagctgagctgcagtgattattgtctttcttctgggtctagccacccagcaagtctaccaggctccgggctggtactggggcttgtctgcacagagtcctgtgatgtgaactgtctatgggtctctcagctgtggataccagcacctattccagtgggggtggcagggagtgaaatggactctgtgagggttcttagctttggtggtttaatgttctatttttgtgctggttggcctcttgctgggaggtggcattttccagagagcatcagctgtggtaatatggagaggaactggcaatgggcagagccctagaattc

SEQ ID NO: 235567 - DNA, 593 bp, Homo sapiens
tagctgtctgtttctagtcttctggtctcatcgtgaatacaacctagtcactgagacctactctgaccacccaatataaagcagcccctcagctccactgttctctcacacrtgctattcttcctttttattagcaatcattacagttcttaattttgtatttattttattatttcattattatctcttcactactacagcatacgcacctttctcctttaatactagaggcttgctttgctcaccacttttcagtaagtatttgttgaactaattaattaatgatgtcacctaatgcgtaagacaccaatacaccaatattgcccagcacttttttggctgccctcattgttctccctgaggtaaaaagggtcttttctttttttaaccaatgttgcaactcttttatcaagatccgccaaaaggggcccaatatgtttgatattttacagtactttctatgttgacttattttttaatcaaacatactcagtttcttatctccccttctctcaaatttggggcaaaggcctacaggctggagggaaaacaatgaagtaatgcatatattgtgtccagaggatcccacccca

SEQ ID NO: 235568 - DNA, 583 bp, Homo sapiens
gactgtgatactaactataatattttcagatattataatcactatgctacacattggatatccaaaacttattaatcctataaccttttgttggtactgtttggctaatatcttcacataccccacccacctcactcccaacagctcctggcaaccatctttctatactctgcttctataagtttgacttttatagactccacatataacagagatcatgcagtacttgtctttctgtgactggcttatttcacttagcataatgtcctccaggttatctatgttgtcacacatggcttgatttccttcttttgtatggctgaataatattctgttttgtatacatgccacattttaaaatccatttatttgttgacagacacttaggttgttatcatatcttggttattgtcaatatggctgtaataaagacatactgcatctttttaacctttgatttgactaacatttccccatttctcccgctttgctgcctctggggaccaccattttactctctgcttctacgtttttgacttttttagattccacatrtaagtgagatgggacagtgttttccttt

SEQ ID NO: 235569 - DNA, 583 bp, Homo sapiens
accatagtataataataagtgggaagaatttttcataggagccgaccaagatcactgtaaatacgattgtgaatagccactraccttccttattcttctctaaattaggtgaaatcttctgaaagtggggcaaaaggtgattgtaatttaaaagacatgctgctgtccaggggatatcaattctttgtggcaggggtccaagactcatttggagtgggtattgcataaggtctgaaggagacaaagtttctttgcagagccccaggaagcaggaggagttgtaaggtattgtaaagctggcttcatgtacctggagcctgtgccagatttatttcttagctgttaacatttacacaagtgacctgcatggcttgatcctagagatccggtcattgtgccttctgtaaatttcgaaggggaagggaagttaaagtaggcagttagacatttaaaatattttctagggaacttggaggaattttgaagttataggaatttgctgaggaggtgggaccagattttgagaaaagcaggtttaagccagaggcccagcaatccaaaacagctactacggagtcaggga

SEQ ID NO: 235570 - DNA, 603 bp, Homo sapiens
tgttccagtcactctgaaaatcccttctagccagaaattagaggagctagagttcctttttagagtttcttttgtctgggcctgagaattaaattgacataagacagatcaacaggagaaaagcacacaaatttatttaacacacattttctgtggcattggggccttcagaaaggaatgaaracccaaggaaacaattagagtcggttagatactgaattagacaaagagtagtaagctgtgaagaagcaactaacttacgtggggaggctaaaaaataagagttattctaataaagtctagaattctaatagtattttctaagttgcaacttctcatcattgaagataagaatgttgccttttattccagtctggggagcgtgtttttcacatgggactttcatctcctgctttaggaaacagaaaataggccagaatgttctttttgcacctgctgttcttcaagtgcctttaattcatgatagttgatatgccaaaggtggtataattttagctccttcattagggactatatgtttacagaaaactgtccgtacattagataattttacattttacatttaagtaattttacatttag

SEQ ID NO: 235571 - DNA, 527 bp, Homo sapiens
gtaactgaatatcaaaatttgggaatactctaaagtaacctcccaactttagaactccctatagagacagtaaaggtgtctattgaatctgctttggagctcagcttctgccaaataatttttcccttcattccacagatgttattctcatgacattacataataaatcatctaatatataaaaaccaaatctgcagacatttccaggcgtgagctgaataagcagactctggaacgagattttgtagctggatgacatgctactgacaataaagaccctatgtctggctagtagctggagcacaaggcagctttgtattcttttctgtctttataattartaagctaggatgacagaaagaaatatattagcaggaattatatgtcagacatttgagaaggaaggggagcatgttacctagaaatacaatagaacttcgaagctactgtatattttgattaaactctgaaaaagttcactaaaagttaaaactaattaattgaaaagtaaaggctaaatgtgagag

SEQ ID NO: 235572 - DNA, 618 bp, Homo sapiens
aattaattgcatactgtactgaaagtcaaaaacagaatggttttatgggtacttgaagtacgatttctactttacatgtgacttttgcaccttaacttttgaaaaatctttaagtcaaaccattgtacctcagagatcatctggggcgaaaaagagagcatgagattgactgatcaattgattgatttgaaatggagataattatgttaatattaataattatattgatatgcaaattatcatgagtgcataatgatatagccagtgagttttactaaagatgtatttctaatcatcaaaaattataattatatttatgcctagaaatgggcatgcctcatctatcaggtcattacattgrggtgttgaatcagtctagtttgtagtaaagccgggcatagggttttctgctaattgagcacaccaaaggcttcattacctagtagtcaactgctccagtttcatacatttaggaggcgtggtacaccagagggtttcctcagtgctctcacatttcagctgactccgtctgtctgctactaagggcctctttcagtcctcctttcactcctccattggtagactgcacttgtttagtaatgcatatgagcaagggtc

SEQ ID NO: 235573 - DNA, 519 bp, Homo sapiens
gttgctatgactggactcgtttctactcctctagcaatatttcccattrctcctaataagtagtgttgccagactttttctcaaaaatgtctcatgctttctttctgcttctgctcctctgtacttgctggggtcttcacccttttctcttcctctttacattctacccattctttaaaggccttgtgaaggcctttaagtgacctcctcttttctattacctatgtgtctcatggccactccctcagctgtttcacagagctttatttatactcacttcctttaaagtatttattatagtctttctcttggtatagctgtctctcaactgtaaacttcttaagaacagggatattgtcttcttgggtttatatattctccatagcaactagcactgtctttaacattgttattgctcgataaatttatattgattaaaatgaatactcagaagtgcatgtgaacatttaaaatagaaatacaaatgaagtgagctacaaaagtttttttgtacaaggg

SEQ ID NO: 235574 - DNA, 541 bp, Homo sapiens
acctctaaagtagctgagactacaggcgttgcaccaccatgcctggctaattttttttttttttttttttgtagagatgagatctcactatgttacccaggctgacctcaaactcttgcgctcaagcaatcctctcacctcagcctcagctcaaaaagtacctaaaaatcttaagaatccccttgcagattaactgtctgtaaatgcataacacatggatagattacattgatttttctctttggtcactgagtaggtataacagaggttaagtgtaatgcaaaatcctatacaaatatagcaaatgcatatttgtgtctcggttacaaacattcattttctttctttttgagacggagtctcactgttacccaggctggagtgcagtggtgtgatctcgactcactgcaacctcccccttctgagttcaagcgattctcctgcctcagccaccttcatagctgagaytacaggcgtgagccaccgtgcccggcctcattttcttatttatttaattttattctgcttatatattgaacat

SEQ ID NO: 235575 - DNA, 432 bp, Homo sapiens
gaaagctagcaatcccacaatgatttcctttatttcttgccatccgaatatatccttcttcaccaaagttgtggccccagctttagaaaaagaaataatacaaaattacaaatgcgtacaatcaaaccatgttatcaactttttatctcattgtttttctcctataagtgattacatatgaaaggccgtaaaacaaaattagaatgaaataagrtaataatttctccagggatttcaggtaactcaaaataatggtttggaaagctttagtgctatattgatgaatagacttaatacctaaggaaaactatagtaagatccatcccagtcctttaatcctcctactttgcaaatatgccttctctaaagaaagagtattagtatcctttataagcctttatctctaaattttttgataacagtatcatgtgt

SEQ ID NO: 235576 - DNA, 511 bp, Homo sapiens
agtggtaacttttttcattaacccattattctgggtatcattccacatcagtaaatatacttcttcatcccttgtaatgactgcatagtattgcattttacatgcattataattttatctatccaagccccttactgatgtgcatttaggttgcttacagtattttgytattattaaaaaatgttggctgggtgtggtggctcaagcctgtaatcccagcactttgggaggccatggtgggtggatcacctgaggtcaggagtttgagaccagcctggccaacatggtgaaacccagtctccactaaaaatacaaaaaaattagccgggcatggtggcccgtgcctgtaatcccagctactcaggagggtgaggcaggagaatcctatgaatccaggaggcagaggctgcagggaggtgagttcgtgccactgcactccagcctgggcggcagagtaagactccatctcaagaaaaaaaaaaaaaagtaaagacgtattcatttgtgtgtg

SEQ ID NO: 235577 - DNA, 451 bp, Homo sapiens
acttctttttgatgtgtgtgttcagctcacagagtttaacctttcttttgatggagcagtttggaaacactctgtttgtaatgtctgcaagtggatatttggacctctttgaggccttcgttggaaacgggatttcttcctgtaatgttcgacagaagaattctcaktaacttatttgtggtgtgtgtattcaactcacagagttgaaccttcctttagacagagcagatttgaaacaccctatttgtgcagtttccagttggagatttcaatcgctttgagaccaaatgtagaaaaggaaacatcttcgtataaaaactagacagaatcattctcagaaactactttgtgatgtgtgcgttcaactcaaggagtttaagctttcttttcatagagtagtttggaaacactctgcctgtaaagtgtgcaagcagatatttggacctctttg

SEQ ID NO: 235578 - DNA, 451 bp, Homo sapiens
acttctttttgatgtgtgtgttcagctcacagagtttaacctttcttttgatggagcagtttggaaacactctgtttgtaatgtctgcaagtggatatttggacctctttgaggccttcgttggaaacgggatttcttcctgtaatgttcgacagaagaattctcagtaacttmtttgtggtgtgtgtattcaactcacagagttgaaccttcctttagacagagcagatttgaaacaccctatttgtgcagtttccagttggagatttcaatcgctttgagaccaaatgtagaaaaggaaacatcttcgtataaaaactagacagaatcattctcagaaactactttgtgatgtgtgcgttcaactcaaggagtttaagctttcttttcatagagtagtttggaaacactctgcctgtaaagtgtgcaagcagatatttggacctctttg

SEQ ID NO: 235579 - DNA, 432 bp, Homo sapiens
ctcagtaacttatttgtggtgtgtgtattcaactcacagagttgaaccttcctttagacagagcagatttgaaacwccctatttgtgcagtttccagttggagatttcaatcgctttgagaccaaatgtagaaaaggaaacatcttcgtataaaaactagacagaatcattctcagaaactactttgtgatgtgtgcgttcaactcaaggagtttaagctttcttttcatagagtagtttggaaacactctgcctgtaaagtgtgcaagcagatatttggacctctttggggccttcgttggaaacgggatttcttcatagaatgctagaaagaagaatactgagtaagttctttgtgttgcctctattcaactcacagaggtgaactgtcctttagacagagcacatgtgaaaccctctttttgtgatatt

SEQ ID NO: 235580 - DNA, 660 bp, Homo sapiens
aagaattctcagtaacttatttgtggtgtgtgtattcaactcacagagttgaaccttcctttagacagagcagatttgaaacaccctatttgtgcagtttccagttggagatttcaatcgckttgagaccaaatgtagaaaaggaaacatcttcgtataaaaactagacagaatcattctcagaaactactttgtgatgtgtgcgttcaactcaaggagtttaagctttcttttcatagagtagtttggaaacactctgcctgtaaagtgtgcaagcagatatttggacctctttggggccttcgttggaaacgggatttcttcatagaatgctagaaagaagaatactgagtaagttctttgtgttgcctctattcaactcacagaggtgaactgtcctttagacagagcacatgtgaaaccctctttttgtgatatttgcaggtggagatttcaagcgcttttaggccaaatgtagaaaaggaaatatcttcgtataaaactagacagaatcattctcagaaactactttgtgatgtgtgcgtcaattcacagagtataacctttcttttgatggaggagtttggagacactgtctttgtgtagtctgcaagtggatatttggacctctttgaggccttcgttggaaacgggatttcc

SEQ ID NO: 235581 - DNA, 437 bp, Homo sapiens
gaattctcagtaacttatttgtggtgtgtgtattcaactcacagagttgaaccttcctttagacagagcagatttgaaacaccctatttgtgcagtttccagttggagatttcaatcgctttgagaccaaatgtagaaaaggaaacatcttcgtataaaamctagacagaatcattctcagaaactactttgtgatgtgtgcgttcaactcaaggagtttaagctttcttttcatagagtagtttggaaacactctgcctgtaaagtgtgcaagcagatatttggacctctttggggccttcgttggaaacgggatttcttcatagaatgctagaaagaagaatactgagtaagttctttgtgttgcctctattcaactcacagaggtgaactgtcctttagacagagcacatgtgaaaccctctttttgtgatatt

SEQ ID NO: 235582 - DNA, 437 bp, Homo sapiens
gaattctcagtaacttatttgtggtgtgtgtattcaactcacagagttgaaccttcctttagacagagcagatttgaaacaccctatttgtgcagtttccagttggagatttcaatcgctttgagaccaaatgtagaaaaggaaacatcttcgtataaaaaytagacagaatcattctcagaaactactttgtgatgtgtgcgttcaactcaaggagtttaagctttcttttcatagagtagtttggaaacactctgcctgtaaagtgtgcaagcagatatttggacctctttggggccttcgttggaaacgggatttcttcatagaatgctagaaagaagaatactgagtaagttctttgtgttgcctctattcaactcacagaggtgaactgtcctttagacagagcacatgtgaaaccctctttttgtgatatt

SEQ ID NO: 235583 - DNA, 540 bp, Homo sapiens
ctatttgtgcagtttccagttggagatttcaatcgctttgagaccaaatgtagaaaaggaaacatcttcgtataaaaacwagacagaatcattctcagaaactactttgtgatgtgtgcgttcaactcaaggagtttaagctttcttttcatagagtagtttggaaacactctgcctgtaaagtgtgcaagcagatatttggacctctttggggccttcgttggaaacgggatttcttcatagaatgctagaaagaagaatactgagtaagttctttgtgttgcctctattcaactcacagaggtgaactgtcctttagacagagcacatgtgaaaccctctttttgtgatatttgcaggtggagatttcaagcgcttttaggccaaatgtagaaaaggaaatatcttcgtataaaactagacagaatcattctcagaaactactttgtgatgtgtgcgtcaattcacagagtataacctttcttttgatggaggagtttggagacactgtctttgtgtagtctgcaagtggatatttgg

SEQ ID NO: 235584 - DNA, 555 bp, Homo sapiens
aaactactttgtgatgtgtgcrttcaactcaaggagtttaagctttcttttcatagagtagtttggaaacactctgcctgtaaagtgtgcaagcagatatttggacctctttggggccttcgttggaaacgggatttcttcatagaatgctagaaagaagaatactgagtaagttctttgtgttgcctctattcaactcacagaggtgaactgtcctttagacagagcacatgtgaaaccctctttttgtgatatttgcaggtggagatttcaagcgcttttaggccaaatgtagaaaaggaaatatcttcgtataaaactagacagaatcattctcagaaactactttgtgatgtgtgcgtcaattcacagagtataacctttcttttgatggaggagtttggagacactgtctttgtgtagtctgcaagtggatatttggacctctttgaggccttcgttggaaacgggatttcctcatataatgttacacagaagaattctcagtaacttatttgtggtgtgtttattcaactcacagagttgaaccttcct

SEQ ID NO: 235585 - DNA, 623 bp, Homo sapiens
ccttcgttggaaacgggatttcttcctgtaatgttcgacagaagaattctcagtaacttatttgtggtgtgtgtattcaactcacagagttgaaccttcctttagacagagcagatttgaaacaccctatttgtgcagtttccagttggagatttcaatcgctttgagaccaaatgtagaaaaggaaacatcttcgtataaaaactagacagaatcattctcagaaactactttgtgatgtgtgcgttcaactcaaggagtttaagctttcttttcatagagtagtttggraacactctgcctgtaaagtgtgcaagcagatatttggacctctttggggccttcgttggaaacgggatttcttcatagaatgctagaaagaagaatactgagtaagttctttgtgttgcctctattcaactcacagaggtgaactgtcctttagacagagcacatgtgaaaccctctttttgtgatatttgcaggtggagatttcaagcgcttttaggccaaatgtagaaaaggaaatatcttcgtataaaactagacagaatcattctcagaaactactttgtgatgtgtgcgtcaattcacagagtataacctttcttttgatggaggag

SEQ ID NO: 235586 - DNA, 549 bp, Homo sapiens
gaaaaggaaacatcttcgtataaaaactagacagaatcattctcagaaactactttgtgatgtgtgcgttcaactcaaggagtttaagctttcttttcatagagtagtttggaaacactctgcctgtaaagtgtgcaagcagatatttggacctctttggggccttcgttggaaacgggatttcttcatagaatgctagaaagaagaatactgagtaagttctttgtgttgcctctattcaactcacagaggtgaactgtcctttagacagagcacatgtgaaaccctctttttgtgatatttgcaggtggagatttcaagcgcttttaggccaaatgtagaaaaggaaatatcttcgtataaaactagacmgaatcattctcagaaactactttgtgatgtgtgcgtcaattcacagagtataacctttcttttgatggaggagtttggagacactgtctttgtgtagtctgcaagtggatatttggacctctttgaggccttcgttggaaacgggatttcctcatataatgttacacagaagaattc

SEQ ID NO: 235587 - DNA, 609 bp, Homo sapiens
ggagtttaagctttcttttcatagagtagtttggaaacactctgcctgtaaagtgtgcaagcagatatttggacctctttggggccttcgttggaaacgggatttcttcatagaatgctagaaagaagaatactgagtaagttctttgtgttgcctctattcaactcacagaggtgaactgtcctttagacagagcacatgtgaaaccctctttttgtgatatttgcaggtggagatttcaagcgcttttaggccaaatgtagaaaaggaaatatcttcgtataaaactagacagaatcattctcagaaactactttgtgatgtgtgcgtcaattcacagagtataacctttcttttgatggaggagtttggagacactgtctttgtgtagtctgcaagtggatatttggacctctttgaggccttcgttggaaacgggatttcctcatataatgttacacagaagaattctcagtaacttatttgtggtgtgtttattcaactcacagarttgaaccttccttcagaaagagcaaatttgaaacactctttttgtggagtttccatgtggagatttcaatcgctttgagaccaagggtagaaaaggaa

SEQ ID NO: 235588 - DNA, 546 bp, Homo sapiens
tgagtaagttctttgtgttgcctctattcaactcacagaggtgaactgtcctttagacagagcacatgtgaaaccctctttttgtgatatttgcaggtggagatttcaagcgcttttaggccaaatgtagaaaaggaaatatcttcgtataaaactagacagaatcattctcagaaactactttgtgatgtgtgcgtcaattcacagagtataacctttcttttgatggaggagtttggagacactgtctttgtgtagtctgcaagtggatatttggacctctttgaggccttcgttggaaacgggatttcctcatataatgttacacagaagaattctcagtaacttatttgtggtgtgtttattcaactcacagagttgaaccttccttcagaaagagcaaatttgaaacactmtttttgtggagtttccatgtggagatttcaatcgctttgagaccaagggtagaaaaggaaacatcttcgtataaaaactagacagaatcattcacagaaactactttgtgatgtgtgtgttcaactcaag

SEQ ID NO: 235589 - DNA, 560 bp, Homo sapiens
attacttcttcgtttagctgatcaaaataaagtggaatctgattgaatccagtcaataaggacctcttggcaaaatataattctaaaatgtcattggctaattgaaaaaacataactgtattatttatcatagaaactgtagtactgtgcacagataaatctaggatagtatttcagagttcttaatatcacacatgttagaaatcattagttaggtgtatatctagaaaacataaatctacagaatgtggattatggggttggatcaatattagcctgaatatttaagaatttaaatgctaaatgttgagtgactcatttgctcttccttccagtggtctctaatttgagtacatgtcctcaaacattgttttcaaaaaagatttaaaatgtgtagaatgaagtagaaaatcacatttcttaaacgattttaattaagcatgttatatttattatacaattccctttttttggaggcagataaaagtttactatgcattccataagacaagactaaatgagaaagaccaagaaaaawacagtagaagcatacagagata

SEQ ID NO: 235590 - DNA, 560 bp, Homo sapiens
agcataacattgaatcaggatgaatttatccaaatgggtttacttacatagaaattctggactgtagattcattatgttatcttgataactagaaatgaagaataagtttggtttaacttaagcacagattcatacatggcctatattaaatgggtttgaagtagcacagctccatgtaatatatgggaaggaatcacaaagcttatggagataggactacccatgtgcctgcaaactgcttaacatccaaaaaagcattttacgtgrattgaccaaaaaaatatttcttcaaaaggcattaggaaatgcattgaggatatggcacggtgtggggataatatctttgagaagttttgcaatgtctccccactactagcagaatataattgtgagagatgccactgttcaaatgggtttcccgatttcagtgacataaatttctgaagcgacaaaaggcaagctgcatatctttggcactggagacaacgtaggcaagcttactggaatgaaaagagggttgatttagtaagcagaatgttttaacctgcaaatgtttttg

SEQ ID NO: 235591 - DNA, 551 bp, Homo sapiens
caaggctgagtaaatttgggaaggtgtgtaaatctatgccaaatattttacatcttttcataaaagaattgtgcatatttctatcaggtatcttgctaatactacaaaactgggtctctattattgaacatcagttatcttaattgttctccagatagtcacagaatcttcttcatagttatatgcagtcacaatggcctaagaagtcttcaagagttttgtgaatcaagacacattcttagttcatgcagttggtttggagtctaracatgacatccttaactttttcatgaactctggtagaattgcctgactctcattcagcccttctgtaaacatggttgtttgcctggtatgttggtccttttgtcataactttagggtctgcatttttagttgctttgcactcattaggcttagtttgatggaatttctctttgacagctgtaattttgtgcagactactaagcactatttaatcccccaggttcacatatactctacctgtttactagcatatataaatcttttcaataatcaggttcaaatac

SEQ ID NO: 235592 - DNA, 385 bp, Homo sapiens
cagattagtccttgggaaagatgctaaactgggatatttttatttccaccctttattttttggacttgcattttgttgataatggaaatatgtaccacyacataatgcatcggtaaatggtagctcacccttgaaggttttcatcatcaagttgttaccacacctgtgctttaaaaagtctccatgcgtttctaacatgaaactaccaaaactttactgatgcggtgttgtgtgattattctgtggacaatggactcctaccctaaatttagtttagacatctgaccatattgatgatgccatatatacacataatctgagatacaaaaaagtttaatatttacattatgtgactttccaaggaaagcagggtggcttttaggca

SEQ ID NO: 235593 - DNA, 360 bp, Homo sapiens
attcatcagcaggtgataacatgagatggaaataatgccaaggctgtcactctactagatkatgctcttgtagataattttagaaaaatgcaggtaacagagttcattcaagagatcttcaagtattaaacctctccatatttaccctgacaatgctcttttaaagaactgtctccctaagtattgaacacctaatcctcaggggtgggcacactgagaggctgtctgagatcactattaagtatgcattcttaacccattttctagtaagatcaattttagctatattttcatataaattattctgtccgaaagctggtctggccttgctgccttcatgacaaaaagtgcaaaacagca

SEQ ID NO: 235594 - DNA, 605 bp, Homo sapiens
cactgtacatcaatagcacagagcctgttatatagaaacagattaaatatatttgaaaacttccattatcaatagagccatgccttattctgtctggaatggatgcttaatctgcatctgcttacatttcctgcatgaaatacttctaatatcaccacctgtgaccttaagtgtattcaccatcatgttctaccacataacacttcttctgaccarggaaataattttaaattaatgaagagtgggatttggcttattcttatggattttgcagttgaaccatatgccctatcattctgaaatagctaccctgatagaatattaaaatggtcttttaaatggtaaattacactgcagactaagtggcaccttgtagtgttgggatctccaggaggcaaaatatgttctgaattagtgactagtataaagtgttgtttctcccacattgtgccaagataacaatatttggattgtgctgaaatgtactgtgtctctctgttgcagctagatgtgtttggattattggcttccttgcaaagtttaactttcaacttgatgaaacattagacagattttatccatattatcagcctctgaactccctg

SEQ ID NO: 235595 - DNA, 605 bp, Homo sapiens
cactgtacatcaatagcacagagcctgttatatagaaacagattaaatatatttgaaaacttccattatcaatagagccatgccttattctgtctggaatggatgcttaatctgcatctgcttacatttcctgcatgaaatacttctaatatcaccacctgtgaccttaagtgtattcaccatcatgttctaccacataacacttcttctgaccaagraaataattttaaattaatgaagagtgggatttggcttattcttatggattttgcagttgaaccatatgccctatcattctgaaatagctaccctgatagaatattaaaatggtcttttaaatggtaaattacactgcagactaagtggcaccttgtagtgttgggatctccaggaggcaaaatatgttctgaattagtgactagtataaagtgttgtttctcccacattgtgccaagataacaatatttggattgtgctgaaatgtactgtgtctctctgttgcagctagatgtgtttggattattggcttccttgcaaagtttaactttcaacttgatgaaacattagacagattttatccatattatcagcctctgaactccctg

SEQ ID NO: 235596 - DNA, 593 bp, Homo sapiens
gaagttgctctgggtgagtgattgagtagtgagtgaatgtgaaggcctagaacattactgtacactaccatagaccttataaacacacttaggctaaactaaacttacttaaacatttttctttcttctataataaattgacctccgcttaccataactatttgatttcataaacttttttattctttcaaacttttcaactctcagaataacatttagcttacaacacaaacacatygtatagctataaaaacctatttttgatattcttattctataagcatttttctatttttaaaattttatttttcttctcttttaacattgttgttaaaaaccaagacacaaccacacacaatagtctgggcctacacagtgccaggatcatcaatattttcacctccacattttgtcccatgggaaggtctttatgagcaataacatgcatggagttggcatctcctatactaacaatgccttcttctagaatacttgctgaaggaactgcctggtactgttttgcagttgtcaaaagtaaaactttagccaaattaaatttagaagagtttaattgagcaaagaatgattcatga

SEQ ID NO: 235597 - DNA, 597 bp, Homo sapiens
gcatattcatgcctctcacttttattgaggtatggttgaaatattgttgaggtattctaagaaaactgtccaattgatatcgtgacttcaaattctcatctcaatgtctattttcaggaaacttaacatgagacaccagtcttagccacgtccatacaacacaacccggtataaagactctgaggatagtgtcatgaaacttgcgcatagtatgtgggttgtaaacatataaaaacatacttgtcatttcagcatgatcagttagaagaggcaccmagactgctctacccatgtatttctccattattcaataacttcttatattatttacccatccagctgcatttgttgataaactgtaatatgataatagcatgctacaatataagctagaacaagattcaaggttaaagaattgctcagcttaaagtctctagttgtttcccttattatcataaatctatttcagaaaagaattgaagttctcatgcatattctatttttactactgtttagtgattctattgctacttcaaggtatccttaaatttgtgaataaacaggttaaaaatgtctgcaaatttacattgcacaatc

SEQ ID NO: 235598 - DNA, 597 bp, Homo sapiens
gcatattcatgcctctcacttttattgaggtatggttgaaatattgttgaggtattctaagaaaactgtccaattgatatcgtgacttcaaattctcatctcaatgtctattttcaggaaacttaacatgagacaccagtcttagccacgtccatacaacacaacccggtataaagactctgaggatagtgtcatgaaacttgcgcatagtatgtgggttgtaaacatataaaaacatacttgtcatttcagcatgatcagttagaagaggcaccaagactgctctmcccatgtatttctccattattcaataacttcttatattatttacccatccagctgcatttgttgataaactgtaatatgataatagcatgctacaatataagctagaacaagattcaaggttaaagaattgctcagcttaaagtctctagttgtttcccttattatcataaatctatttcagaaaagaattgaagttctcatgcatattctatttttactactgtttagtgattctattgctacttcaaggtatccttaaatttgtgaataaacaggttaaaaatgtctgcaaatttacattgcacaatc

SEQ ID NO: 235599 - DNA, 544 bp, Homo sapiens
ttaaacaacctaacaacgcaccccaaggatagaaaggcaagaaaaaagcaaacctaaacttagtagaagaaaagaaataataaagatcagagcaggaataaaggaaattgagaaaaaagtacagaagatcaataaaacattagttttttgaagtgataaagtcagcaaacctttagctagactaagaaaaataagagacgacccaattcaaatgaataaagttagaaacaaaaaggwgacataatcactgatatcacagaaatatgaagatcattaaagactattataaacagctatatgccaacaaattggatatctaaaagaaatggataaatttctagatatatacaacttaccaagtttgaaccatgaagaaatagaaaatctcagcaaaccagtagtgagtaacaagattgaagccataataaaaagtctcccatgaaagagaagcctaggacttgttgatttcactgctgaattctaccaaatatttaacaactaataccaattctattcaaagtcttcagataaattgaagaagact

SEQ ID NO: 235600 - DNA, 550 bp, Homo sapiens
tttctaaacctttcatgtagaggaatcacttggggatcttagaaaaaggtacattctgatccagtaggtcagggtggggcttgccattctgcatttgtaacaarctttcaggtgacattgcttctcctcatccacagaccatacacttccagtacaaatgatcagcacaggcatcccctaagagatgttaatatgcaaaattgaaactcagttgtacaaacgtggtgcctatagttaataatactgtattgtatgcttgaaatttgctaagagagtactgtagatcttaagtgttctcatcgatatctcctaaaaaggtaattatgtgaggtgatagacatgttaacttggtcatggcaatcatttcacagtatatacttaaattatcaaattgcacacttcaaatacataaaattttgttttcaattgtacctcagtaaagctgaaaaaaacctcaattgtgcaaacacatattgattgcctactatgtatcacaccctataaacactgccagtgtccagaattgaattagaccttgctcaatgaggtt

SEQ ID NO: 235601 - DNA, 551 bp, Homo sapiens
agtaggatgtgggcggggccaaataagggaataaaagctggccacccagctagcaggggcaacccgctagggtacccttccatgctgtggaagcgttgttctttcactcttygcaataaatcaatctgctgctcactctttgggtccgcactacctttatgagctgtaacacttgctgcgaaggtctgtggcttcactcctgaagtcagagaaaccacgaacccaccaggaggaatgaagaactccagacgcaccacctttaagagctgtaacactcactgtgaaggtctgcagcttcactcctgaagtcagcaagaccacaaacccaccagaaggaagaaactccagacatatctgaacatcagaaggaacaaactctggacacaccatctttaagaactgcaacactcaccatgagggtctgcggcttctttcttgaaggcagcgagaccaagaacccactggaaggaaccaattcctgacacaatacctgttgaattgactgaccagaacaatgtctgctactcacggcttcctggacatctatctca

SEQ ID NO: 235602 - DNA, 620 bp, Homo sapiens
ggattttaattgtttcaatcatttagtgcttggcagtctgagcacatagtaacagcttaataaatagctcatgtgggaaaaagtgaagggagttacagggagatttctactttatagctagacttatcaggtataaatacctaaaggtaggttgaagcattctctcttcactcaagaaacaaaacaatataaaattgtatttagtatggttattgctacatggaaagatctagagaaagcattcgctctttaaaatgattcactgcaaacatattagaaaaatgggagacattttrttcttcaatggaatgaaagtttttaattttttttaataaaatcagtgggtggatgtagacacctgtatcactttgagcaatttcaaatcaggcaacttagaaagcttaggaagttgggaagagacaggcttgaaacatacctatttcacctgggacgatatcctacagctttgcagcacaactaatcaagggtgttgagagcagagaaaagcaaatagtaggttcttgtgttgcacagcaaactgcttcttgataactagagagaaaccttagaaaagctcttctgttactattgtggctgacaccctacaggcagcctttctg

SEQ ID NO: 235603 - DNA, 542 bp, Homo sapiens
ttgcttgtggggttgtctgaaaaaaaattaatggaagaagtactattggaatttggtctcgaaagtgactaaaatttggcagttaaagagaggaaaagaagtatcccaggcagatgggagatactaagagtaagtctcctggggctcaatgagtaaagtgaaacaaaatgtttttgaaagaacaaaagagaaaaaaagctaagaaagtaactttgggcctgcttatggggtgccaaggagtatgaaccatagtataacataagaggaagatatyggggttttgtaaacagaggagtgattgatacaaattagattttcagaaggctgatcataagggaacatagaaaatgtgcttgtggaaggaagggattgatgaaaatagattagttagaacctgtccagagagtcttggcattaagaggtaagagatcagccttgtggaaacagagaagacagaaataaagcagccaaaatgaaaactaagttatggtaaacaacaatggctaaaacatggtttataatgagagtagagtaaaatgaat

SEQ ID NO: 235604 - DNA, 395 bp, Homo sapiens
catgatagtatatagaatgaaagaaaaaaaaaaatatatatatatcatatatatgatcatcctcaaaataagacataagagtaatcaaagcaagaatacaaatatgacctcagaatgtgrgtagaattgttcacattattcttttttatgtggaccaagatatattataggaaataagccttgttttcagatccattgctgcttatgttggattgcccttctttcctcttccttatccatgttgtttattgaatgctgttgttggcgttccatgataaacaagagagacttttaaaatttttatccagaagcttattctccccaggtgccaatacttattctgtagccaaaattgatttctaggtgattccttctttgcttcttttcctccacca

SEQ ID NO: 235605 - DNA, 514 bp, Homo sapiens
cactctgtgtagcgaaaacataagccatggtttctggattagtctcctgaagtgacacgctaccccagggaagakaggaagtagctcacagctagtgaaggtcagaggcaggggagacattttttgtgtgtggctgtttccacccatgagacatagtatggctgagcaggacaaaaaaaaaaaaaaaaaaaggtcacagaagtcaaacacacctgtgtcaaaattcagtgtctaccatttattaaccagttaagcaattcagcttttaggaacctgcttccatagctgtcaaatgagaataatgagatctacattgaccgatcattgaaggttttaaatgagataatgatgagatgatcttgatgatgacaaaagcaaacatttgtgtaaaatttactatcagacactgttctaagtgctttacacatgtcgagttatttgagaaacataatgctcataaagtgcctgtataataatgggcacattgagagtgcctaataaatggtagttgtct

SEQ ID NO: 235606 - DNA, 522 bp, Homo sapiens
agtgtaatgcacttttttcatatctggattagatgattagatacagttatcagggtcaagaaaaaggcaccaatttaggtgcaagaaaaggtagaagtaacttcaggcattaaatttaattatagtttttctttgttcttggcatgcaaacatcatccaaatacgaatggaggattaactgtgcttaaatcactgtagaattgtagggctgaatagcacacgtgagagacggcaaataggtgaaaatatgttactcacgtcactcctgtctcctagggaagtggtggtcattgctgataaggtctcaactttctttcctgctgaacttcagactacttaacacagaaactaggaataattgagagctggcatataaatgacaactcacctcccatttctttgtttccaataggaagtttatagtmtaaaacttttgtaagaaagagaaagggttaagaatatacagaaatactgattagatgtacttgtaacatagctactcagttgtgttgtgtggtgcta

SEQ ID NO: 235607 - DNA, 516 bp, Homo sapiens
ggccacgaactgtggagtggtaaatatagggggcaaatataatgggttattttagcaaggtccatttgtgcaagtccatctccgtgccatcttgttttcagtgatgttatcttcttggtatgcgaagagagtgggaaaacaccttcataaagggaaattatgttccatttttaggcagattgggaaagggtagaaatctcatcgrcttttcctcaactgcctttaactcaaaataattctaatgccagggtagcctactttggtataatatgctctgaatgtctttaacttcaataatttttaatgttccatattttaaaaaaaattatattcaaatatgttccatttgataacttcaactgtcttctgagatgtatttcataagaagttctttttttgtttcagtaatactaccttcatgatcagacatattttggcggtgaaatttgcatttagcatcgatacttgttttgtctacatcgagtgggaaattattaatatatttgtagttattag

SEQ ID NO: 235608 - DNA, 616 bp, Homo sapiens
gaattgattgggaataaatttacttcataaagactaaaatcaagtggtcatacagtactgttttgtcaagtttggaaaagctttctcattaaaaagaagagagctctgttgtactttagcttcactgttgcacgagygtcctgaaaagattttgttaccagcagcgtgacccaatgtcagcaactagagaaaaggcaggagtaattgagacttggagctaaacacatctcacctttctcacaaaagctgatggtataaataaaaatggtcccaggagtcttccctcactacattgcccccaaagaattaattatagtgtctggcttaaggatgtctttgggaagggaaagtgcattctttcagacctgtgtggtctcaaaagcatgttagtgcttacagtggcagatggagagatttgaaccactccattttagaaaaattgtgcactggcctaaaagacatttaaacaaataatttagcatcttttctaagataaagagtaaattgttgatccaaaggcttgatgttaagtcacctgaagttcagaggcttgtatatagtttacaattcaaaatattatgaaattgaactctgagaatctaagtttataaatatc

SEQ ID NO: 235609 - DNA, 616 bp, Homo sapiens
gaattgattgggaataaatttacttcataaagactaaaatcaagtggtcatacagtactgttttgtcaagtttggaaaagctttctcattaaaaagaagagagctctgttgtactttagcttcactgttgcacgagcgtcctgaaaagattttgttaccagcagcgtgacccaatgtcagcaactagagaaaaggcaggagtaattgagacttggagctaaacacatctcacctttctcacaaaagctgatggtataaataaaaatggtcccaggagtcttccctcactacattgcccccaaagaattaattatagtgtctggcttaaggatgtctttgggaagggaaagtgcattctttcagacctgtgtggtctcaaaagcatgttagtgcttacagtggcagatggagagatttgaaccactccattttagaaaaattgtgcactggcctaaaagacatttaaacaaataatttagcatcttttctaagataaagagtaaattgttgatccaaaggcttgatgttaagtcacctgaagttcagaggcttgtatatagtttacrattcaaaatattatgaaattgaactctgagaatctaagtttataaatatc

SEQ ID NO: 235610 - DNA, 599 bp, Homo sapiens
gccttacccttattgaaggggaaaaaaatttaaaaagaaagtttcaaaaagaaagtggcttttgggttgagccttaaacgatgtattggacaattggctggcaaatactactggatgaaggtagtgggttaatttctaagtttagcacataatgcaaaagtcatcaataaacaaatttaccattgagaaaayccttaaatttacctataaagtatagtatacattttgtttatataaacctgcatggtactagggatatataaatgtctcatgtatagagtaatgtagggtaaataatctcagacgcaattatactcaggtatctaatcattcaaatgttttgctgctagaaaaatcttaaagttatggcttgttctgtcatttttctgtagacctttcttttaactctttttctatagaccgtttcttttaactcttcattcagcattgtttctctatgaataattctgcaaataaaagccaactcaaacaatttcatggccagctgaacaacctttttcatttctttattaattgtcagaaaaaaacattaaaactattcacactttttttcagtggtttggccaacagacatttac

SEQ ID NO: 235611 - DNA, 580 bp, Homo sapiens
gtctctttctcagaggacctatctatctctatgggaaccatggtgaagaaggaataagtagaagactaaccagaaatacaaatagcctgtattgatttgtcatcaaatggaaaagcaagaacttcctgtggatggcaaaataaggagtatcaatatctatcaagaatggtaaagtaagattacctgagaaaagttatccaaacatatggtttagcagttgttgcctccaatattccccaaactgttaattttgacccatttcccaattattacctactgtatggttctgtctttctgggatttcctgattccctttttcctgaaacatctgcatcttctttctataattccttttccaaaatgccggctttctacaaattgacacgttgattttccttgttttttcttcataggttggccagactagaagttattttgttcagtaataacttttgtttttgccaacctttcacttattcgctaacttgagctaggagagyaggcaaaagatctgaaaagaaagtggttaaaccaggattaacaggcttaatcaataataagttttgagtctggaaaggct

SEQ ID NO: 235612 - DNA, 614 bp, Homo sapiens
gttcaataaatggtcctagtaaaactggatatctacatgcagaagwaaaaatagaaaaagcatctcaaaatgaactaaggacttcagtgtaagaccagaaactataaaactactcggataaaacacaggggaaaggctccatgacatcagttttggcagtgattcttttgtataggacccaaaaatatcaggcaacaaaatcagaaatagaaaaatacaattttatgaaactaaagaggtatttcacagagaaggaaacaatccacagagtgaagagacaacttatgaattaggagaatatacttgctaaacatacatctgctgaagagttaatatcctaaatatagaagaaactcagacaactcaatagcaagaaaacaacctgatttttaaaatgggcaaaggaactaagtagacatttccttaaaaaagacataactatgatcaacaggaacagtcatgagtcacttaatgatagagatacgttctgctgaatgcctacttaggcaatttctttattgtaaaagcatcatagcatgtacttaacacaaacctagatgctatagcctactacacaactaggatatgtactattgcctattacttctaggcct

SEQ ID NO: 235613 - DNA, 614 bp, Homo sapiens
gttcaataaatggtcctagtaaaactggatatctacatgcagaagtaaaaatagaaaaagcatctcaaaatgaactaaggacttcagtgtaagaccagaaactataaaactactcggataaaacacaggggaaaggctccatgacatcagttttggcagtgattcttttgtataggacccaaaaatatcaggcaacaaaatcagaaatagaaaaatacaattttatgaaactaaagaggtatttcacagagaaggaaacaatccacagagtgaagagacaacttatgaattaggagaatatacttgctaaacatacatctgctraagagttaatatcctaaatatagaagaaactcagacaactcaatagcaagaaaacaacctgatttttaaaatgggcaaaggaactaagtagacatttccttaaaaaagacataactatgatcaacaggaacagtcatgagtcacttaatgatagagatacgttctgctgaatgcctacttaggcaatttctttattgtaaaagcatcatagcatgtacttaacacaaacctagatgctatagcctactacacaactaggatatgtactattgcctattacttctaggcct

SEQ ID NO: 235614 - DNA, 614 bp, Homo sapiens
gttcaataaatggtcctagtaaaactggatatctacatgcagaagtaaaaatagaaaaagcatctcaaaatgaactaaggacttcagtgtaagaccagaaactataaaactactcggataaaacacaggggaaaggctccatgacatcagttttggcagtgattcttttgtataggacccaaaaatatcaggcaacaaaatcagaaatagaaaaatacaattttatgaaactaaagaggtatttcacagagaaggaaacaatccacagagtgaagagacaacttatgaattaggagaatatacttgctaaacatacatctgctgaagagttaatatcctaaatatagaagaaactcagacaactcaatagcaagaaaacaacctgatttttaaaatgggcaaaggaactaagtagacatttccttaaaaaagacataactatgatcaacaggaacagtcatgagtcacttaatgatagagatacgttctgctgaatgcctasttaggcaatttctttattgtaaaagcatcatagcatgtacttaacacaaacctagatgctatagcctactacacaactaggatatgtactattgcctattacttctaggcct

SEQ ID NO: 235615 - DNA, 608 bp, Homo sapiens
ttgtgatcatcttgcttcttttctgatattttatgacrtttatcaggatagcttaatttataatccatgatggttttcagaatagcttaaaaaatcagagaacaactttacttctttatgaatattatttagaatataacactgaaagctagtcgctgtactcttgggaacgttagatggcagaagatgtaatcctattgtatcttaaaggggaacacattggttttgagaccagacaggttttgagttcaaatagacccctgattttagcgaagtagtctgggaaaaacaacctcgataccctacatattctatattcttatctgaaaaataatgataatgtttacttagcattttttgagaactgatgatttatgtgaagtgcttaatgtatcatttaaatattatgattttaaatattatgttaggtatttctcctaatgctattcctcctccatcccctcatcccatgacaggccctggtgtgtgatgttccctgccctgtgtccaagtgttctcattgttcaattcccacctatgagtgagaacatgtggtgtttggtattctgtccttgtgatagtttgctcagaatgacagtttccagcct

SEQ ID NO: 235616 - DNA, 303 bp, Homo sapiens
tggggaggtgactaggtaatgagggtggaggyctcaagaatggaattaatgcccttatagaagagaccctagtgagataactggtctcttccaccctgtgaagacacagctagaagaatccatttatgaagcagagacctttgtccagatatcaaatctgctacttccttaatcctggacttcccagtctccagaattgcgaaaaatcaatttatttctctttttatttattcttaggaatttaaggggtaaagtgagtgcaattttgtttcaggcatatatcgcatagtggtgaagtcttga

SEQ ID NO: 235617 - DNA, 542 bp, Homo sapiens
aaaaatgtggaactatatgcagtaatatgtctaaatttcacagtgtgttaaagcaatggcaataaatacaaatgaatatatattgcatgatttaatctatataacaaaataggcaaaactgataaatggtgtcatgacattttgataacctgagcttgaaattgagaatttaatgactggaaagagacaggagggtctttggggtggtctttggggtgttagtaactctgtctttctttatgtattctggtaagaatagcattttcaatttgtgaagaaaattaatatggctgtacacttacaataactgcatttttctgtatgggttttttacatcaacaaaatgttttaaaaaactaagcaaayattatgcgtgaacatatttttgtcacttcaactagattagttgtttactgaaacaaaactacatcattttctatttcctgtctgtcctcaagccatcagtataacccttacattcagtcttcaatgaatgcttgttttgtacatgacaatttcatatcaatagagactttggaaaa

SEQ ID NO: 235618 - DNA, 541 bp, Homo sapiens
tattaattccaattcatagtactttttagatattttaagggcaaatgaaacttcaattatacaaacaaattgctgactttcattctcccttccatactgcctttcctcctcttcgctccagaagagaaaacttgattctcttccaatagctcatatctcagtgaatttggataattgtgtaagccagaaacttaggagccttattggattccaaatctaatttgtcaccaagttstaaaaacttcctttgtctgtcttcaatactccctcccccatgaattgtcatctcttacctctccactgcagtctctctggctacctttcagtttctcctgccaaagtgtgtttgtccatgccgttccatctgggtgtaaaactcctttaaattagctagacaataaacttgtttccatagttttggttttagtttaattgtatcttcctaaagtaatctccaattacagtttctaataaaaccatgtacggccagaaatacatattgtgggtgtatcttgatattaaattgtgtgaatatttgata

SEQ ID NO: 235619 - DNA, 584 bp, Homo sapiens
cgtcttccttggggaaaagatagtggagtaatcttccagtattcctygcctttgggtgccttgctaaaagaactggtttctgtcttgcctcaccctggggtgctgacagacctggcatagtccaaatgcctgggacatctaagaacaaaataaaaatagatgagaggtttctgcagccagtacggttctgcaagttgagaggaggtgcagaacctgaggcttctctcacaaagggaagtgagtggaatggagcatgacacaaatatatcagccttttaatgtgctgcccaagggcccaggttctgtcttgcctcatccaaagtgctgatgagactggcatagtttagttgaggcaactaaaaacaaataaaagggtgagtagcttgctctttgagagaccctgagtctctagccatgctaatcagcaaaggattttgcctattaaagccagtctgtaaagattgggagacatggatgttttttcaaatgcacagactacaattcaagactaaaggaaaatgaagaatcagaggaatacaacacaatcaaaggaaaaaattagatctccagtagttgactctaaa

SEQ ID NO: 235620 - DNA, 560 bp, Homo sapiens
gagccccaaagaggttgtcacagacctggctcagggacccccaaggtctgggcttgcagaagagctgcagctcctctctcctcctcatggcctgcatcatagcaagtgagcagggtgtgagtgtttcatccctgtttgtgtacatctccttcagtcctgccattctgtgtgtcctgagttcttgtcttgtgtccaggaagaacgaggtacacagagaagttgggggtgaacaaggtggagaggagcttcactgagcaacagaacagctctcaggagacttgaagtggctagctccttcctgcagctggtagtccccaagtctgtgtgtctgactgagtctagggattttatgagctcagaagggattggcccatggatggccatgggcagrcctggaaaaagcaccataaattctcactccagcccccaattccactctgaactggcagcctggcctctaggcttcaggtggtccctggcttgaaggtgaggtttcactggacccactcccttctgcccaggaacctgtctgcctcctgccaacaacatgctgtccacag

SEQ ID NO: 235621 - DNA, 553 bp, Homo sapiens
tactgcagattatgacaaggaagtgatcaggtatgtgtgagagaaagtaatagaaaatatgtatttatataggtaagtcagaggtgtactttctaaagaagtaaggtttctgttgaaatgtaaagagtaaggtggaaatcagttgtatgaaaaagctgtagggaaaataatacagacatggktacagattgtgttcaataccaaggtgcctagactatattgaagcataacatgaggtgccagatatgcatataaaaatttgaaaaactgaaatcccacactttggaaggccgaggcaagtggatcacgaggtcaggagtttgagaccagtctggccaacgtggtgaaaccccatctctactaaaaatacaaaaattagctgggcgtggtggcacatgcctgtaatcctagctactcgggaggctgaggcaggagaatcgcttgaacccagaggcggaggttgcagtgagccgagatagtgccattgcactccagcctgggcaacaagagcgaaactctgtcaaaaaaaaaaaaaaaaaaaattgaaagacac

SEQ ID NO: 235622 - DNA, 567 bp, Homo sapiens
atgttatatttgggatgcctataagaattaaagaaaatattccaaatagccagcagggtacrcaagatcaaaagataaatataaaccagaaatttgaaaaagagaataactattattgtattcgtgtttaaaattatagaatttaataagcctactcagaaataaattgcagacaagaagtccaggccctgaagaaattaatattagaatgtcttttggaaaagtaagaagataaaaattgaagaacttcattttgaaaatcctagaagtgttctggaccaaaagaaaaaaaaaaggcctggaaatctattgtaggtggaattcctggggagaagaagtatgaataatccaaggtaaatactatcaattcatttcatcattatcattacacaccaaggagatgagagaaaaagaaggaaaaggaaggggctcaaaagtatgtgaatgagcttctcatggcacatagactgacacctaataggctgtcaagtgcagcacactaccatgagaaaagctaaaacaattttggagtggtgaactaaggaggtaaatataatgaattaataa

SEQ ID NO: 235623 - DNA, 613 bp, Homo sapiens
tgctagtgtacaggaaatatttacatcctttcatttaccatgtggcctgacatattttatgtacacaatcattgkttattttaactgtatgaatgtttatactcacatacaccaaggtccctgcaagaatgggaaacaaactgatgaagtctaatctgaaaattaaataaaaaataaagtttttttagaatgagacctgcatgagcgtaggactcatctgtgttgcaactaagaatggatcattgaatgtcccggcactaggccattataaaccaggtacaaatggacttcatgtttagactgaatgattaggtttaaacaagagtagacagataatattgatgtatgctttctgttttttctcatcatttacatcatagtgagtataaaaagtgtggagtgaggagttaagcaatcctgtggaagtgagtacatggtttggaaaaagcaggtgtcctcagatggtctaatatcattagcttccatttattttccagtaaaaccccttccaatttttcaactccctaaaatgcaagtgtatttgcctcttgtacctattacactatttttactattaaagttgactttagcattttatacttttttataacta

SEQ ID NO: 235624 - DNA, 293 bp, Homo sapiens
tgataattcttagaatactaaattaaatgattctagatgaatgtgctarattttagagcagataggatgaattagaattggttcccaccttaaaggagcttacatatttccatagaaatgacttagacattgggaaaaaaaaatccatcaggttattttgcgttattggtccattaataaaatctgtgaaaatttcaattaatgtacccacagagctctgaaaatgttgattcagcttccctgagatgttctgtgtagcaaaactcaattaactcttataggtgtccatagtg

SEQ ID NO: 235625 - DNA, 547 bp, Homo sapiens
tgactgcaagagaacaaagtagaaatgcccagcagttagtggattgcaggaatcaaaagaaatgccaggttgctaataaaatttgcagatttttaaagtgttatatttcagtgttttgaaatgcgatcaccaggtgttgtactggattaaacaatggctaaatgctgattgaatgggaatgagatggcggttatttctcctacttgggtatataaaattaaacatggcttatgtacytctatcagcttgatgcagtatacctgaagccctgaacgacaaatactattgttctgaaaaatctggttaggctatagcttcacaaggaatggcacagtccctctttttcttaaactcttaaatcttacctactcatttaatatgttttattatttcccttgaacatattaaatattaatacatagggtttcgttgagggatgtgctacatagattataagatataccaataagattatgatcagaattaggatagaaaattagcttatatgtatttctgattcatcctgtaccagattgcttgaagttat

SEQ ID NO: 235626 - DNA, 527 bp, Homo sapiens
ctggtactcatagctgatggtgggtgtacagattgatatgactctgagacaagagtctatacattaaacaaatgtgcaaattttgagagycattaaagaatagacaaaaaaaatctaccatgttattagatatagttttggtggaggaaaactcaaactatcctaatattaggtttcaggccagatgtcagtttcatttttgtaatgttttccctgagccccaatagaacaaatattcaatatgtggctgtacaaatattaaaagtaacaagaagtcaacttattgattttaaggatgatactcctcaccgccataggctgcacaacagcctctaaaactgtggaagtcataggctagtttacaattgagctgaaatctcagtttacaggtcgagtgttacacagtgtcagacgctatcagatttcaatagagctgattagaaaaggaaacaagctcaaatctcagtaaacatttagtatgtttataaagtgaagcactgaatagatgattgattgacagatggatt

SEQ ID NO: 235627 - DNA, 407 bp, Homo sapiens
tggttctgtgttttgttctgatgattgttagctctcttggttcattggtgttggaaataaatcacatctaacctcttttgtactaaaattaactgtctccttggactgattatcttgcccttggtctctgaggatttgcacccacaggatctccaacgtgcctggcagcccaggcrgtttgctgtagttacatgtccagagggtgaggctgactttcccaggccccagtcaagagggactggctactcctaaaaacaacagaaatgctttagaaaagttcagaaaccaaggtagaaaatagaatcgctttcacatgtatgcgtagcaaagactggtggaacagaaaactagagcatcttcatttgaatatgtcaattctgtttactaaatgggtttaatttatttca

SEQ ID NO: 235628 - DNA, 407 bp, Homo sapiens
tggttctgtgttttgttctgatgattgttagctctcttggttcattggtgttggaaataaatcacatctaacctcttttgtactaaaattaactgtctccttggactgattatcttgcccttggtctctgaggatttgcacccacaggatctccaacgtgcctggcagcccaggcagtttgctgtagttacatgtccagagggtgaggctgactttcccaggccccagtcaagagggactggctactcctaaaaacaacagaaatgctttagraaagttcagaaaccaaggtagaaaatagaatcgctttcacatgtatgcgtagcaaagactggtggaacagaaaactagagcatcttcatttgaatatgtcaattctgtttactaaatgggtttaatttatttca

SEQ ID NO: 235629 - DNA, 598 bp, Homo sapiens
ggattacagacatgagccactgcacctggctctgtctccccttcctatgtgtgttggctctagaacaagagaagccttgttgagattcatggctgccccttgcgccccatcacctctctgactttgggcaagttgcctggtctctctcagcctttattttctttttgtgaaatggggataataatagtactttcctcataggcaaaatgttgtgagaactaaatgagaaaatacatgtaaagctcttggcacttaggtctttttatgattatgatgataatcacacataataaattatttcccacatcacatgctgtttagcctattcactgttctatttttcctgaagtcagttcagtgtgtagcatccagaattgaataaaacacaccagttgtgacctgatagtgcaaagtaaactatcatctccttcattctaggttttatgtttctattaatgcagtctaaaggtaggatatgagttgtttttgtttatgtatytttttttttttttttgcagggatggggaatgactgtcttcaattaaactgctcagtaaaatctctcctcttgtgtgttgtgctttagtatttagttttg

SEQ ID NO: 235630 - DNA, 616 bp, Homo sapiens
taattccttgttcttattccattcctgttgaatttgaatctccagggatggggactgggaaactgtttacacaacatgatatttttatcatcagggcagttttaaatagatttttaaaatttttrttgcaaatagagatgcaaatagagatgtggccttactatgttgcccaggctcatcttgaactcctgggctcaagcgatccaactgcctcagcctcccaaagggttgagattacaggcgtgagtcactgattctcagccttatgtgtcttatatatcagaattatctgcagagttgttaaaaatacaggaggctgggtagtggacatcatgtccttagattctaattccatctatgcatctacatttttaacgagctccacaggcaatgccaaagcaagtttgggaatcagtgatgtactttgatttcttacacgtgagtgatctctcccaaaacattctgcttaaacaagtaactcaaaagccaagctatttcctcgttggggggatgcctaattttagatattacctctgtttgttgggccaaagtatgacttcctgtaacctctaccctcaagtctcagcttatcttccagagcaacaaaataattatt

SEQ ID NO: 235631 - DNA, 616 bp, Homo sapiens
taattccttgttcttattccattcctgttgaatttgaatctccagggatggggactgggaaactgtttacacaacatgatatttttatcatcagggcagttttaaatagatttttaaaatttttgttgcaaatagagatgcaaatagagatgtggccttactatgttgcccaggctcatcttgaactcctgggctcaagcgatccaactgcctcagcctcccaaagggttgagattacaggcgtgagtcactgattctcagccttatgtgtcttatatatcagaattatctgcagagttgttaaaaatacaggaggctgggtagtggacatcatgtccttagattctaattccatctatgcatctacatttttaacgagctccacaggcaatgccaaagcaagtttgggaatcagtgatgtactttgatttcttacacgtgagtgatctctcccaaaacattctgcttaaacaagtaactcaaaagccaagctatttcctcgttggggggatgcctaattttagatattacctcygtttgttgggccaaagtatgacttcctgtaacctctaccctcaagtctcagcttatcttccagagcaacaaaataattatt

SEQ ID NO: 235632 - DNA, 544 bp, Homo sapiens
atttacagtgatacttaggtcaagacgttaatttgatagtcttggtgtcatgcctggcatgaagtagctgctcaataaataatcactgttagtatggcactatgataactgcagaccacacaggcctcgagcagtgagcagcagcccaatatttactattgctctggtagtctatacagccatagagtccacgaattctaaagaggagctctggaaagtgtgaaagcctctggactccaatgaagctatttgctgggctccccaggcaamaagaaggcataataattgtcaatatcatcattctcaccattagaaggtgccacctcccagactctacaactcgtatatccagctgggagagcttctatttctctgcaggcaatcaattaatagaaacctcctttctgtaatgaacatgaaagcatttgacagttttaaaggattttaccaattaaacaaaagtcattccttttcctccttcctgaacccaatacccgctcccaacatacacaccttctactcctggtacatggaagaagaaagg

SEQ ID NO: 235633 - DNA, 392 bp, Homo sapiens
tgccttgctagtttttaaatttttctgtagagacgggktctccctatgtcgctcagtctggtcttgaactcctaggctcaaacaatcctcatgcctccagcttcccaaagtgctgggattacaggtgtgagccacctcacccagcctcaaatatcctcgtttcctagcaaaagccgaggtagtaagagatattagttttgagcttaggttctggagttaagtacctgattttgaattctggctttgccagttaaaaactgtgtgatccgtgctagttacttaattctcctaagcctcaagttcctcaactgtgaaatatgaataaagaccatactcacctcacagtgcctaccacacagtatgtctatgattattatcaggtgaagtcaaac

SEQ ID NO: 235634 - DNA, 538 bp, Homo sapiens
gagttgcaatggtgtttgcggtggtggtgaatgtttgttgtttgtggtggtggttaatgtttaatattcacctcagccaccaaaacaggtctgaatttcaacacggtactcagagatccttcactccccacagagcaacagcttttggagtcaggggaagtctgggttccaatcccagctctgtgatttygagctctgaaactttccaaacctgtttccttctctgcctttcagggttgcaggggttaaatggatagcattaatcaccttcctttcacaggctgttagcactcaatcaaacctgcttctcccactcaaagatgtttaagacccaggcaagtcacacccgacagaacctcaacagacagggaataataccaaggggtacctccacaccatgtcccctactgccctgaaggagaatgcctctaagcttagcaaaaacaagcttgaatttttgctcacatgaacttttctacaaaagcaataaatcaaagaaaagagtttaggaacagattagagcagactcagatgggtt

SEQ ID NO: 235635 - DNA, 356 bp, Homo sapiens
tcatctcccagcaggccccacttccaacgctagggattacggttccacatgagatttgggcggggacacagatccaaaccatatgggtgctgaattctacattggagataaatttccctgagaatttgaagacatgatccatggttgctgttgaaaagtcaaatgacartctgataccctgtcctgtgcatatggcttgattgttccctctggaagttttcaggatcttccagaggtctacagtttcataatgatgtgcattttctgtgggcacttggtgggccttttattctggaaatcaatctcttttaatttggaaatcaattttggtgaaatttctgtgggtgctagtttcc

SEQ ID NO: 235636 - DNA, 516 bp, Homo sapiens
gaattcctgggtgtccaggctcctcygcacgatgtggctgggctggttctcgttgggttgcagtcttctcccctctgctgagcttttgccccttgtctttcatcctcccaagtgtcgccgccacctctcagctgctgccacctctcatttgtttcttgtcacttaggtcactttccattccttcctgttttagtgaggcttggggaagagatggggaatccatctcaattttccacgtctaatgagaaggttctccttggtagttttctggtggttcatattgtgctcaggattcatgtatcctacttacagatacttgattgcattatcacttgttcctggaaatgtaaaagtacctccgtgttgtagtgttaggatagatgcaggttttccttcaggtcctcacggttcctggctcatcatgcccatagcccttgttacagtcttttatcataatgttgggtgctttaggcctcaggggcagggctcaggaaacagaacctcgaagaccttctt

SEQ ID NO: 235637 - DNA, 516 bp, Homo sapiens
gaattcctgggtgtccaggctcctctgcacgatgtggctgggctggttctcgttgggttgcagtcttctcccctctgctgagcttttgccccttgtctttcatcctcccaagtgtcgccgccacctctcagctgctgccacctctcatttgtttcttgtcacttaggtcactttccattccttcctgttttagtgaggcttggggaagagatggggaatccatctcaattttccacgtctaatgagaaggttctccttggtagttttctggtggttcatattgtgctcaggattcatgtatcctacttacagatacttgattgcattatcacttgttcctggaaatgtaaaagtacctccrtgttgtagtgttaggatagatgcaggttttccttcaggtcctcacggttcctggctcatcatgcccatagcccttgttacagtcttttatcataatgttgggtgctttaggcctcaggggcagggctcaggaaacagaacctcgaagaccttctt

SEQ ID NO: 235638 - DNA, 516 bp, Homo sapiens
gaattcctgggtgtccaggctcctctgcacgatgtggctgggctggttctcgttgggttgcagtcttctcccctctgctgagcttttgccccttgtctttcatcctcccaagtgtcgccgccacctctcagctgctgccacctctcatttgtttcttgtcacttaggtcactttccattccttcctgttttagtgaggcttggggaagagatggggaatccatctcaattttccacgtctaatgagaaggttctccttggtagttttctggtggttcatattgtgctcaggattcatgtatcctacttacagatacttgattgcattatcacttgttcctggaaatgtaaaagtacctccgtgttgtagtgttaggatagatgcaggttttccttcaggtcctcacggttcctggctcatsatgcccatagcccttgttacagtcttttatcataatgttgggtgctttaggcctcaggggcagggctcaggaaacagaacctcgaagaccttctt

SEQ ID NO: 235639 - DNA, 469 bp, Homo sapiens
gaagaaaagctgcggcagagtctcttcggaggcagcacccaaggcatccgttgtactcggggcccagcctttcctcccctgagtcctccaccaagtccacagcaagcaacgattcaccagaaaaaaacagaagacacaggaacagaagagctgctgatcactggctttggtgcttaagtgatgaggcattttcagtcacactcrcactgatctggctcctgggaggagacgccacggcatcctcccagggtgaggctctgatgaggctgcacatggacagggtcccctctcaggtgggaaaggcagcatcctgccattggaggcgtgggtctggagagtttctacccaattcctccctcaatcatacctggaggtgacagctacccccaccactgctcctccaaaggcctcgagataaaaatccctgaaaagggggcaggggtgcttccaggtcaagctgtgcggcttc

SEQ ID NO: 235640 - DNA, 469 bp, Homo sapiens
gaagaaaagctgcggcagagtctcttcggaggcagcacccaaggcatccgttgtactcggggcccagcctttcctcccctgagtcctccaccaagtccacagcaagcaacgattcaccagaaaaaaacagaagacacaggaacagaagagctgctgatcactggctttggtgcttaagtgatgaggcattttcagtcacactcacactgatctggctcctgggaggagacgccacggcatcctcccagggtgaggctctgatgaggctgcacatggacagggtcccctctcaggtgggaaaggcagcatcctgccattggaggcrtgggtctggagagtttctacccaattcctccctcaatcatacctggaggtgacagctacccccaccactgctcctccaaaggcctcgagataaaaatccctgaaaagggggcaggggtgcttccaggtcaagctgtgcggcttc

SEQ ID NO: 235641 - DNA, 449 bp, Homo sapiens
atgagtgaaaatacgcaatatttgtctttctgtgcttggcttatttccttaacatgatggcctccagttccatccatgttgctgaaaatgacargatttcattctttttatggctaaataatattccactgtgtatacaaaccacactttttttttttgagaccgagtcttgctctggcacccaggctggcatgcagtggcacgacctcggctcactgcaacctctgcctcctgggttcaagtgattctccttctccagcctcccaggtagatgagatttcaggtgcccgccaccatgcctggctaatttttgtatttttagtagagacggggtttcaccacgttggccaggctggtctcaaactcctgagctcaagaatgtatcaagagctcaaacaattcaatagcaaaataataataataataattctatttaaaaatgggcaaaa

SEQ ID NO: 235642 - DNA, 476 bp, Homo sapiens
ctgaatttacatctgctcattacttgaaaagatttaatttggttacaaataacctttttggcatatcacatcaaagaaccagtctgacaaaaatttcactttttaactagttgttttggtgttaaataaatgcagcataagagaatgcaaataaatattatggaaactctcagactcaaatatttatgtcacttttgtcaaatcacttgctttctttgggcctcagtttcactatctatgtgaaactgaaggatatgtgatgtgaacaaggtgatcttgaaggaccttgagccattatggtctgtatttctttctataactacacaattttataaaatatttcttttcatccgtatcttctacatcttcaagtccttgagggtaaggtgggcaatgtgcccttacttattggggcrttcaaaagcaaaatgtatgtttcctttatttacttgcactcaaaggctcatgcaacctgc

SEQ ID NO: 235643 - DNA, 607 bp, Homo sapiens
agaataacaaatcagtaagcaagggagctggaagtcactgcatgtgaaaatttatttaaagaattgaacatgtttctgttaaaggtaagagaccaaggggagtatgatagttgccttcagattttctaagggtcaccatatatatatataaaggtaaattattttattacacatttgtatataattttttggttttggggtattaaatacatagttttatttaaaacttttcttactggagataatctgtttaaaaaggagtgaattttccatcccaagaggtggaaattagatgaccacctttctggaatattgttggtgataatctggcattgatatggtgccttatgcagaaactccactttctgatagcttcagttctatcttctggtaagtctcaaagttcaatactacagaaccaatcaaggagttcctgatacctcttaagtgcaccagctyataataaatctgacagtactttacacatgggtcagaaaaatgatgtgctttacaggctcccaagcctgatcctactggcttgaaacccttctatttccagaaaaataagtctaaaagagatcaggtaacttgtacaaagtcacaaggg

SEQ ID NO: 235644 - DNA, 497 bp, Homo sapiens
caaatagacaccaagaggatcaggagtcagagaatagagaagatgtgggctcaaattatacagaacttgctggagaaagrgatgcaaggacaacagcagcaggtgatagaataacagacgtgtaggagtttaggcataagaagctccaaatattctgtccttggctttagtcagggacattgtcagtgtcaactatcaggtacaaatgggagatttcagggatggaatgacaggaagaaactgagaagttgggggtggagagtagaagaaagaggaggaaagaaatgcaaaagggaagaaaacagatatttctggtattcccattttgttttctgcaagggctgcagaatgacaggaggaagagaaggaagaaggaggaaagaaggcttgcatggcttgtgtgtatgaagaccctttcagggaatgttttgactcaagaatctgctgaacatttacttgtaaggaacaatgcagcaagagaatatgtaatggaggac

SEQ ID NO: 235645 - DNA, 288 bp, Homo sapiens
aaattcactacttaaaacagaaagagcttttatcaactgtctggttttcatttacctctttctcataaaacttgatctatgagtgtattgggggaaaagattttttttaagtttggactgcaattaaatggggaaatctttgcaaatatatttgcctcctacttgaaatggaaaatgtgtcttctcacaaagttcaaatgagcartacaagcgattatgactttcctctggtctggaagtgacatgctgattttgctcaagccaggaagtgtttatgttttgaattag

SEQ ID NO: 235646 - DNA, 629 bp, Homo sapiens
aaaacttgatctatgagtgtattgggggaaaagattttttttaagtttggactgcaattaaatggggaaatctttgcaaatatatttgcctcctacttgaaatggaaaatgtgtcttctcacaaagttcaaatgagcaatacaagcgattatgactttcctctggtctggaagtgacatgctgattttgctcaagccaggaagtgtttatgttttgaattagccaataaagcaaagaatgctaaaaataaatgttgagctacaacacattaaaacaattacacaagtgctattcctagtaaacaaacagacttcaagatattatttcctttctacattttttttcccagaaagcactaacacataaaaagtaaacagggcaattttgtgggttgaaatgacacgtccacrtaaattgctcagtgctattaccgttcctttgcacttaccacattcatttgtcacatatggatgttggcattgccattgggcttctgggaacttaagtgaactgtttctttttttgaattttcattatgaaaaaagtttaactatataccaagtaaaggaaatagcacaacaaaccaacatatatccatctcccagactcgatgaccatcagcattttcc

SEQ ID NO: 235647 - DNA, 441 bp, Homo sapiens
ttggtgagctattagaaagttagattagcttcacaattgagtattattttgagcaaaaggaaacttatgtattatttcaccctacttttttattttatagttgtagaactgtactgttcaaattgatagtcaccagccacatgtatctactgaacacttgaaatgtggctcctctgaattgagacatgccgtaggggtaaaactcacaccagatttcaaagacttagaatccccaaaatgtatatttktatatggattacactttgtaatgaaaatattttaaatatgttggattaaagaaaatatagtattaaaattaatttcccctagttttaagtgtcgaccactagaaaattttaaattacatatgggtttcatactggaggcttgctttacatttctgttggagagtgttgttctagaatagggtcagcaaactaa

SEQ ID NO: 235648 - DNA, 605 bp, Homo sapiens
ccttgtatgtggctgtaatccaaattacaaatctgtgtttaaccagatgacaactaaggtcaagatctgaatcttctaacagcttgatccagacctttagtgagaccctgccagcctttgagacttccctcagcatctgagttgacacagagaagtattaaatatcctggactgtgtctgagagtctgctcctaaataaggctcatttcttttaaaaccatggattaatttcattaagcatgcaagagttctttagaaactttcttgtgtgggctgtagctcattttcattactgtgtttttctccccccgaccactscatcacttaggacaattcattagaaaatccaacagaatttatttgaagtaaccaattaatcctttgagatgcaacaattaatatgcaaattgtatcacattaagaatctcaggaggaatgaattaaattgaaaaatacaacccttcagaaattaaaaaagatattgtttttccatctacagattttcagacttcatttgatttttcttctatggttcattttattatctccttgcctagaagtaccaaaacaaatgaccatgcctgtcttaaatgcattacatcagg

SEQ ID NO: 235649 - DNA, 605 bp, Homo sapiens
ccttgtatgtggctgtaatccaaattacaaatctgtgtttaaccagatgacaactaaggtcaagatctgaatcttctaacagcttgatccagacctttagtgagaccctgccagcctttgagacttccctcagcatctgagttgacacagagaagtattaaatatcctggactgtgtctgagagtctgctcctaaataaggctcatttcttttaaaaccatggattaatttcattaagcatgcaagagttctttagaaactttcttgtgtgggctgtagctcattttcattactgtgtttttctccccccgaccactgcatcacttaggacaattcattagaaaatccaacagaatttatttgaagtaaccaattaatcctttgagatgcaacaattaatatgcaaattgtatcacattaagaatctcaggaggaatgaattaaattgaaaaatacaacccttcagaaattaaaaaagatattgtttttccatctacagattttcaracttcatttgatttttcttctatggttcattttattatctccttgcctagaagtaccaaaacaaatgaccatgcctgtcttaaatgcattacatcagg

SEQ ID NO: 235650 - DNA, 589 bp, Homo sapiens
tgtggtatacttagcattatgttttgcacattttttgtgctttatgttattttcctgtttaaagtggcccctcaagtgtggtgctacagtgctttcctagtattcctaagtgacagaaggttgtattgtaccttatgaagagaatacttggattagataagcttccttcaggcaagggttatatatgtaatatatctatctatctgtctttctatctatctagctatgtatatatatatatatatcccttgtacaggagcacaggagccaatggaaagagttcctaatgaccaaacttggaacaatttgtaactctctctmtatatatatacatatacatacacacacatatatatagtattgttgtgtgtgtgtatatatatacacacacatacatatatatatatatagtattgatggctgggagttcaatattaataaaccaacactatattttaaatgaggtgagttaaaacagaaatacacataaaacaggttacatacttgattggttaatgaaaacgttataaccagaggctaacagaaaactaaccctatacttttgtcttggacaattgttcttcatttg

SEQ ID NO: 235651 - DNA, 248 bp, Homo sapiens
aacaaacacacatatactcctgagcccaaaataaaagtaaaaagaagagaaggtaggttaaagaagatcactggacttagacgagaagaacataataaaacasttaatattctgtgacctctctggttgtttgtcagtggcctcttaaaattttttgaaggcatctgtataaaagacctctttattgctactctaggtacaaaaagtagggtaataatgtgcaacacacatgcatgtgaatgcagaca

SEQ ID NO: 235652 - DNA, 492 bp, Homo sapiens
gagttaggtcacaatgccacctggtctgcaaaaaaacaagctctattggggaaatttataaacagaggaacagtgtttgccacattcttttctcccttggagaagcacgtaagggtgaaaacacaatgggaaattgtaaagaacactgttctccaggaaggaaacctgtcctctcttcctctaattttttataggactagggtgagagtgcccttgagaatgtttaaaaaggggtggagcagtagtcagattagggaccagctcttcagggggaggtttattcgcaagacctgaaacactgtttgtgcaaatgacttgtttatacagtgatgataacacctggaggcctggggaaytgatagctttactgtccattccactagggtaaaggggagtcacagctcccagctagctcattgccaagacaccagaaaatatatctgctgtgattttatgtttgagcacaaaatatttgtctctgcaattgcccag

SEQ ID NO: 235653 - DNA, 557 bp, Homo sapiens
tcacaagtttcataaaaggttatgaaaggcaaagtgtgaccaagtgtattagtctattttcatattgctataaataattgccaaaaatgtaagtracagactggataaagaaaatatggtacatatataccacagaatatactatatggccataaaatgggatgagatcatgtcctttgcagggacatggatgaagctggaggccattatcctcagcaaactaataggaacagaaaaccaaataccacatgttctcacttataagtgggagctgaacaatgagaacacatgggcacagggaagggaacaacacacactgggttgtcaggggtgctgggggagggagagcatcaggataaatagctaatgcgtgtggggcttaatacctaggtgatgggttgataggtgcagcaaaccaccatggcacgtgtttgcctatataacaaacctgcatgttctgcacatgtatcctggaacttgaaataaaattaaatcaaaattaaaaaaaaaaagaattgcctgagactggtgagactgagtaatttataaagggagca

SEQ ID NO: 235654 - DNA, 450 bp, Homo sapiens
tttttgtttgttcggttttcctcagtatttattctgctgagagctttgcattgcatctcagagatattctctctttagcaaggtcctttctattctaagcctgttagcctagtggtaatggtggkggtggtaggtgttttacattgttcaaataaaggctcagtcttaggaagacaccatatctctgctgacctttccccagggatagagttattctcctcttcttttacctctcttgcgatggattttcatcagtgccctaatgacaacagtgtttgctgtctttttccctacagatgaaggcttttgtttggtaggagagatggggatgagtatctcagcagtgttctccactcctgtccctactgggagctcctggtgccctccctctgttctgcactatgagacagacattctcagaattttctcagtctttctgtgaccaccagg

SEQ ID NO: 235655 - DNA, 450 bp, Homo sapiens
tttttgtttgttcggttttcctcagtatttattctgctgagagctttgcattgcatctcagagatattctctctttagcaaggtcctttctattctaagcctgttagcctagtggtaatggtggtggtggtaggtgttttacattgttcaaataarggctcagtcttaggaagacaccatatctctgctgacctttccccagggatagagttattctcctcttcttttacctctcttgcgatggattttcatcagtgccctaatgacaacagtgtttgctgtctttttccctacagatgaaggcttttgtttggtaggagagatggggatgagtatctcagcagtgttctccactcctgtccctactgggagctcctggtgccctccctctgttctgcactatgagacagacattctcagaattttctcagtctttctgtgaccaccagg

SEQ ID NO: 235656 - DNA, 615 bp, Homo sapiens
actgtaaatatcaaatggcatggaaatgactttatcaacttttaggaaataatcagaatttactcccacaaggttttcttgaaattaagtttactttgagattgaatatataygcacatttttcggttacaaagaataaactaacaaacaccaaatatcatccaagtttgtaatgacatgtcaccatgtatcatgggttgagttacaaaacaatgaaatttaaatgctcaaaatcatattagatttatattcctttgcgttttaatccagacattgaacattctatagagataaccttacagataagtatataatttgatactagtaaatagttctaaagtgtatctttctttgcctccaaaagggccatttaaaagtagtcattcagaaccaaaaaatctaaattgaaattaggtgatggatgcattcaggaagccacagatcttaataactttattgtaatactaagacatattgtgcaaaggagatggatgtattggaacttcaaattggttgcacaaatgtattgatgcgaaatgctggcaaaggcctcatctggtaaggcttcacatgtgtaaaaagataaaaatgtgatttgaaaagggatgaagtgaa

SEQ ID NO: 235657 - DNA, 615 bp, Homo sapiens
actgtaaatatcaaatggcatggaaatgactttatcaacttttaggaaataatcagaatttactcccacaaggttttcttgaaattaagtttactttgagattgaatatatatrcacatttttcggttacaaagaataaactaacaaacaccaaatatcatccaagtttgtaatgacatgtcaccatgtatcatgggttgagttacaaaacaatgaaatttaaatgctcaaaatcatattagatttatattcctttgcgttttaatccagacattgaacattctatagagataaccttacagataagtatataatttgatactagtaaatagttctaaagtgtatctttctttgcctccaaaagggccatttaaaagtagtcattcagaaccaaaaaatctaaattgaaattaggtgatggatgcattcaggaagccacagatcttaataactttattgtaatactaagacatattgtgcaaaggagatggatgtattggaacttcaaattggttgcacaaatgtattgatgcgaaatgctggcaaaggcctcatctggtaaggcttcacatgtgtaaaaagataaaaatgtgatttgaaaagggatgaagtgaa

SEQ ID NO: 235658 - DNA, 615 bp, Homo sapiens
actgtaaatatcaaatggcatggaaatgactttatcaacttttaggaaataatcagaatttactcccacaaggttttcttgaaattaagtttactttgagattgaatatatatgcacatttttcggttacaaagaataaactaacaaacaccaaatatcatccaagtttgtaatgacatgtcaccatgtatcatgggttgagttacaaaacaatgaaatttaaatgytcaaaatcatattagatttatattcctttgcgttttaatccagacattgaacattctatagagataaccttacagataagtatataatttgatactagtaaatagttctaaagtgtatctttctttgcctccaaaagggccatttaaaagtagtcattcagaaccaaaaaatctaaattgaaattaggtgatggatgcattcaggaagccacagatcttaataactttattgtaatactaagacatattgtgcaaaggagatggatgtattggaacttcaaattggttgcacaaatgtattgatgcgaaatgctggcaaaggcctcatctggtaaggcttcacatgtgtaaaaagataaaaatgtgatttgaaaagggatgaagtgaa

SEQ ID NO: 235659 - DNA, 611 bp, Homo sapiens
gttcaccacagtagtattcacaacagcaaagacatggaatcagcctaggtgtccatcaacagtgaattgtctaaagaaaatgtggtacatatacaccatrgaatgctatgaagccataaaaaagaatgaaatcatgtcctttgcagaaatatatgtgcagctggaggccattatcctaagtgaataaactttcctctattgattatggcattatggaaagctccttttaaaataaaattatttagaaacttcagtcaattctggaagcactattctctctcaaatttttctaaagttttaaaggtaaaaatctccttagtttttgatgtctgacttgacttaggatttaggggctgacctgagccagatatttaattttcattttcaaaattaaagtcagcatcttaaatcccaggagaagtcatgtggtacagatgaacactcccttaggtatataccatgaccaaaatgaaataaagaaaatatggtacatatacaccatggaataccacatagccataaaaaagaatgcagtcatgcccttgcaggaacatgagtgtagctgggggccttatcctatgtcagaaaacaaaggaacaaaaagtcatata

SEQ ID NO: 235660 - DNA, 611 bp, Homo sapiens
gttcaccacagtagtattcacaacagcaaagacatggaatcagcctaggtgtccatcaacagtgaattgtctaaagaaaatgtggtacatatacaccatggaatgctatgaagccataaaaaagaatgaaatcatgtcctttgcagaaatatatgtgcagctggaggccattatcctaagtgaataaactttcctctattgattatggcattatggaaagctccttttaaaataaaattatttagaaacttcagtcaattctggaagcactattctctctcaaatttttctaaagttttaaaggtaaaaatctccttagtttttgatgtctgacttgacttaggatttaggggctgacctgagccagatatttaattttcattttcaaaattaaartcagcatcttaaatcccaggagaagtcatgtggtacagatgaacactcccttaggtatataccatgaccaaaatgaaataaagaaaatatggtacatatacaccatggaataccacatagccataaaaaagaatgcagtcatgcccttgcaggaacatgagtgtagctgggggccttatcctatgtcagaaaacaaaggaacaaaaagtcatata

SEQ ID NO: 235661 - DNA, 622 bp, Homo sapiens
gggcagtggaactgaccagcatgttggtcagtggggcggtggaactgacatgcacagaagaarctattccagtttagtgtcctaaactgtagaaataaaagaagttattttattgtttatgataagcatacattatttctggagcaagtaatatgcttatttacatctagaataaatacttattttctactacttaatgtgctccttaaacacatatttattgatcattcattatgtttttgacacttcatatgcatggtttcctttaatgaacacaatgagcctttttgcaattctcattttataaatgacaaaggtaaggactagagagattaagtcataaactctgatctccaagaggtcagtaaggaaaagaaataggtagcattaagtaccatacttctcaaagagtgttagtactatagattaatgtccatggtgtcatatgaaaggcacaacaactctgcaatagattttaaacatgtttctgaaagaagcagaagtttgcatttgaaagaagtgtttgggtaaacactacaagtaaatcaaataaaatacctgctctgattgaagtccagaggttctcaatcctggtcacatatcacatgtatctgagaagttg

SEQ ID NO: 235662 - DNA, 574 bp, Homo sapiens
tttaacctgtgtctttatacttaacgtagctttactttagacaacacaatagttaactcttattttttgtatccagttaacaatatctgtattttaattggtgtgtttagaccattcacatacaaaattattattgatatagttagattgatacctaccataacggttttattcattacattctttgtctgcattctctggttttatttcaacattttacattatttcattttgtttcaattactcattttcatgaaaatgtttcactggttgctttgtttcactggttgcaatatacagtaacaagtaatataagtccactttccagtaagtctttttgtttcactggttgcaatatacggtaaaaagtaatataagcccaccctccartaagtctttttacttctttacatttagtgcaggtaccttataacaaattgttgccagttcctcttttctaacctttataacattgctgtcattcatattcacttatccaaatgctgcaaatcatctaatgcattgctagtattatcacttaaaagcagttctcttttagatcagttaagaaaaa

SEQ ID NO: 235663 - DNA, 570 bp, Homo sapiens
tcttttgctaagacagtattccttgtttagaacacaaatttctttttctcctttctttctttcttttttttttttttttttttgacggagttttgctcttgtcaccaaggctggagtacagtggtgtgatcttggctcattgcaacctccacctcccagattcgagcgattctcttgcctcagcctcctgagtagttgggactacaggtgtgcgccactaagtccagctaatttttgtatttttagtagagatggggtttcaccatgttggccaggctggtcttgaacttctgacctcagatgatacacccgcctcagcctcccaaagtgctgggattacaggcgtgagcctctgcacccagctgaacacasatttcttgattctttttttttttttcgggacccatacatactcaaaaattatgacacagtatctctgcaaccctttgatttgtgtgtcttgaagatttgtgccaaaacaaattccttaaaaatcaacatttatttttatttgtcttactagagctacaacacacaatctcctgggctgcaatatagcatccagtttat

SEQ ID NO: 235664 - DNA, 582 bp, Homo sapiens
ctgcacccagctgaacacacatttcttgattctttttttttttttcgggacccatacatactcaaaaattatgacacagtatctctgcaaccctttgatttgtgtgtcttgaagatttgtgccaaaacaaattccttaaaaatcaacatttatttttatttgtcttactagagctacaacacacaatctcctgggctgcaatatagcatccagtttatgtcacaataatcccatgtgaaaatggtgtgccctagacctcatgtcttcagtccaaagtggtgaatagactaatctgaaaagcttaccctggctaatgaggcatgtaatgtgtgtatttattagagataactagacctattaatacttctagatctgattttcagtctgaggcttgtggaggttagggatcagatacatgggcacagcttatcttctcagcactgctcaaatgatcctgcatggttcctacttgctatggttgtgcatacacaaaacattgcatgttcataggattgcagtttgagaatggcattttattagaaatgtgtgattttygaacagaacattaatttttcatttaag

SEQ ID NO: 235665 - DNA, 522 bp, Homo sapiens
gttgtgacaagttgagtatcaaaagaataataattgcagtgaaataaaataacctttcaaaattgaaaaatagtgttcaaaaacaataaagccagaaaaatctcacagaataagatttgataaagcatttccttactgggaatttggtagctaaagtataataagtaaatatctttttttttttccattgggaactatgatttggagtaagaactccagtaattggggaaaagctctacattatagaagagtacagtttattttgtaaaataaatgacagagttgagatacaactgttttaagcttgtattcttcaagtagtataagctccaaacatgtaagtaaaatttacagaattrtaatgaaaataattccaaatctgaaatcaaaacattgtaaaacttctttctgaataataaatacattgaacaatgataaaattgaaaattgttacaagagatttgaacagctaacacacttaatgtaatgaaaatacataaaaacctgcaccatgaaattcct

SEQ ID NO: 235666 - DNA, 620 bp, Homo sapiens
atctctggcccaggtcactctccaaccaatccggctgcttgttccctctcacactgcaaagtcaatatgcataaaatttaacccatattttccttctccttctcctcctcctgttttttatttctcagtatgtaatagtaccacttttgggctagttaggcccctgggatgcatccttgactctgctgcctgcttcactgtcctacacctttaattcatcacctgtatttattttctaacacctacattttctcaaaaccttgacataatctgtatccctgtcatcacttccttaatcctggtcttcatcacctctttcatagattgttgcaatagccttctcatttgactatggcctcaaatgttttactctaaatatagagaaggtatggataaaccttctattcacttccactagatctctttctatagtaaaaatcccttcatgttactaaattatttaaaaatctataataagtcaaaaytccttatcttgatacccaggctcttcaagtccagcaccaacttctactccttcctgcctagtgaagcatgcttcagaattggcaaactgctgtgattgttggtgattgttcatctccatactatgctgtttcagg

SEQ ID NO: 235667 - DNA, 346 bp, Homo sapiens
ggcccaaagcagatctgaggcagcagaagaaaaaaagaatcagtgcatttgaagatagagcaatgaaattatccaatctgaaaaacagagaaaaaagacagaagaaaaatgaacagccttgcagactcatggggacaaaatcaagtatagcaacacacacacacacacacacacacacacacacacacacacacacayatatatataatgggagtcccagaaggaaaggagagagagaaagtggaagaaaaacatgaaacaaaacaaaacaatggcccaaaagcctcaaatctgaggaaaaacataaatttatcaatccaagaaactaaaaataccccaagtctga

SEQ ID NO: 235668 - DNA, 371 bp, Homo sapiens
aaaagaatcactagatgggcccaaagcagatctgaggcagcagaagaaaaaaagaatcagtgcatttgaagatagagcaatgaaattatccaatctgaaaaacagagaaaaaagacagaagaaaaatgaacagccttgcagactcatggggacaaaatcaagtatagcaacacacacacacacacacacacacacacacacacacacacacacacatatatataatgggagtcccagaaggaaaggagagagagaaagtggaagaaaaacaygaaacaaaacaaaacaatggcccaaaagcctcaaatctgaggaaaaacataaatttatcaatccaagaaactaaaaataccccaagtctgataaataaa

SEQ ID NO: 235669 - DNA, 488 bp, Homo sapiens
tatatacttaaaaaagaaaaagaagaaacacctttgtgtgtgatgaccagagcagagactgggtcagcagaggtctttatggaataagagacttcagggggcagaaatctcacctcattagttaacatgatttgagtgatcaaaactttaacactcatcacctcatttcctacgttatctcagacctgcctgcatgttcaatgccctgamcctaataagccctactagaattataagcaccatttattattattttttaatgctggcagtgcttggcaccatttcctaaacggaggttaaaaatttgccaaagatgtattctacttttctctttctttccaagatctttcaagagatgagctaaaagaagaggtcttttgggtgagtgatattttacagcttgaattacattaaaagccagaaacattctgagtccaaagtcttttacttcttaatacaacaagagctaacatgtttgatgtgtttca

SEQ ID NO: 235670 - DNA, 488 bp, Homo sapiens
tatatacttaaaaaagaaaaagaagaaacacctttgtgtgtgatgaccagagcagagactgggtcagcagaggtctttatggaataagagacttcagggggcagaaatctcacctcattagttaacatgatttgagtgatcaaaactttaacactcatcacctcatttcctacgttatctcagacctgcctgcatgttcaatgccctgaacctaataagccctactagaattataagcaccatttattattattttttaatgctggcagtgcttggcaccatttcctaaacrgaggttaaaaatttgccaaagatgtattctacttttctctttctttccaagatctttcaagagatgagctaaaagaagaggtcttttgggtgagtgatattttacagcttgaattacattaaaagccagaaacattctgagtccaaagtcttttacttcttaatacaacaagagctaacatgtttgatgtgtttca

SEQ ID NO: 235671 - DNA, 515 bp, Homo sapiens
tacggctggaatttcttgtggcaggctggccgccggtgttcatgtagttacacctwttgttgctatttcaccactgatcaaaaaataaaattgtattttttcaaaagaaacatggaatgacatgaagaaagtccttaatatatcatggagtgaaaaacagcaagttgccatgcaaatgtcaaatagatcctatatttttaaataagcaactgcatatgtatcatttaaatatatatgtttagatatttgctaaattatgaaccgcagttacccctggggagtgaggttaggaaaagtaaagtgagattttcactttttacattatactttttactttacccacttctgtattgtttgaatctttaaaatgaacaagtgttattttgtaattaaaaaaaacaacaactgacaaataactatggggagtaagaaattacttggaatggaatatgtttaaataattaatttgttgatacactgcttgactattattttcttttgctaaatcaaaactc

SEQ ID NO: 235672 - DNA, 392 bp, Homo sapiens
gaattcaccggaagcccctggggagctttcttggcactgtagagttttggaccgacgtccagatctatggaactgagatcgaggagagtttggctagcaaatctgcaattttaataagcctcctaaatgattctgaaagaggcagccttgaagggcttcatattaagcaccattcaattttcgtcttatctccatcttgtattctcaaccatctgtgagacctgaaggaaagaaattagacatatttctttgtayatataacatctagcccattcattaattcattccctcaaaaatattgattgaatgcctgctatatccccgaccctattctaagtgtaatgacgatcaatgaataaaacacacactgtcactcaataaattgctggtga

SEQ ID NO: 235673 - DNA, 565 bp, Homo sapiens
tgggaccttgtgattatgtaaattaatacttagtaaactcccccttatatatagttctgtccctctagggaaccctgactaatacccccgtatgcagtggtagtaaacggctttcccactttgtgtccattttgcgtcatccacacacccctattatactactcatcacatttccttatacagttatgtgttactgaactacattgacaccttctgagaaatgcattgttaggcaattttgtcaaacgatcatcatagagtgtgcttacacaaacctagatggtgtagcttactccacacctaggctgtatgtgtagccttatactcctagtctagtaacccacacagcacgttactgtacygaatactgtagtcagctgtaacacaatgataaaaattggtgtatctaaacatatctaaacatagaaaaagcaaaataaaatatgctctgaaagattaaaaaactagtacacctgtatagggcacttaccatgaatgaagctaagaggactaggagctgctctgggcgagccagtgagtaaatgagtggtgagtgaatgtgaag

SEQ ID NO: 235674 - DNA, 536 bp, Homo sapiens
cctagatggtgtagcttactccacacctaggctgtatgtgtagccttatactcctagtctagtaacccacacagcacgttactgtaccraatactgtagtcagctgtaacacaatgataaaaattggtgtatctaaacatatctaaacatagaaaaagcaaaataaaatatgctctgaaagattaaaaaactagtacacctgtatagggcacttaccatgaatgaagctaagaggactaggagctgctctgggcgagccagtgagtaaatgagtggtgagtgaatgtgaaggcctggcacattactggaaactactgcagactttatagacactacacatttgggctacattaagtttatttttaaaattgtctatcttcactaataaattaactttagcttactctataaacttgatattagtttaaaaatttttactttttttaaacttttttactcttttgtaataacacttatcttaaaccacaaacacatggtatggttgtacaaacatattttctttctttttattctat

SEQ ID NO: 235675 - DNA, 536 bp, Homo sapiens
cctagatggtgtagcttactccacacctaggctgtatgtgtagccttatactcctagtctagtaacccacacagcacgttactgtaccgaatactgtagtcagctgtaacacaatgataaaaattggtgtatctaaacatatctaaacatagaaaaagcaaaataaaatatgctctgaaagattaaaaaactagtacacctgtatagggcacttaccatgaatgaagctaagaggactaggagctgctctgggcragccagtgagtaaatgagtggtgagtgaatgtgaaggcctggcacattactggaaactactgcagactttatagacactacacatttgggctacattaagtttatttttaaaattgtctatcttcactaataaattaactttagcttactctataaacttgatattagtttaaaaatttttactttttttaaacttttttactcttttgtaataacacttatcttaaaccacaaacacatggtatggttgtacaaacatattttctttctttttattctat

SEQ ID NO: 235676 - DNA, 595 bp, Homo sapiens
cattatgtgagagaattgggctcacagccagacccaacacaccattgacagagaaaacaatgtaatgctgaaccatacgtaaaatctcaagtggcacttttgtactttaaacagacatctgctttccacatgtcatgtttatctgatatgcacatatcaaatattatatatattatataagtatcagcctatatagatgtcagctattcctatttctcacacacataaatacatacattagaattktaaaaaatttaggcatttttctgtgctctccttctaggttttttcccctaagactttcttaagggtgatgttattttacttacccaggaaatttcccagcttaacaaagtcatcatctagacacagtgcatgggtaaactccctgctttttctgagagaggattcttctatttgttttgggaacaacttctgcagagatatcttctcatttgaattttttttttaagtacaaatgtttctatttcaacaagcaaaaagagagcctagttttctcctagctttcttctcttctctttgcttttacttttttctgttttttgtttgtttttttgttttgttttgccaatat

SEQ ID NO: 235677 - DNA, 314 bp, Homo sapiens
  misc_feature (1)...(314): n = A,T,C or G
nnnnnnnnnnnnnnnnnnnnnnnnnnnnnnaaaagatgatttgaacagttggtgcataacaaagtttatccgctaacagtcctcaatgtagtgtggtaacagagacttagtctatattaggccttttcctaaatgtaggaatctataaatgctttctcttakactctgcaatacccttggttggggcaatgggttaaaagtaaatatagagacttctgccttaatttgctatattgagaactaatggtttggctgtctccccacctaaatctcatcttgaattgtagctcccataatttcttcatgttgtggga

SEQ ID NO: 235678 - DNA, 496 bp, Homo sapiens
taataacataatcctgctaaacatctgataacagctatttgcagtgtgattggacttgcccggtcttactgattaccttgggaacttgttataaataaagatttctaggatcaacacagactaagtgaatcagagattctaaaagccttgacatatttattttcatgtccaagatgattcttgtgctcagattagtttgggaaattccggggccttagatcatattcgttgacattaggtcctagattgcagtcagttaatctaagttgcctgggtcaatatgcagttaaatgatatgacattgataatttaggaaactagcgaataagtgttgccctttcagctggcacctaggaattcttagcctgaacgacttcttttagtgcctaaacaactctctaggacttccattractctcctggcctttaagacacagtaaaaaggtaacttttgatgtcagggataaagcttgtaaattctctgtgacctaacaac

SEQ ID NO: 235679 - DNA, 591 bp, Homo sapiens
gacaaattgtgctctctgccactaaaatgagcataggcagcattgactggaagttttggaatactctgataattgcctgcattttctttcaactgtagtgccaaaccccttattaaaggcttatagaggtatacctagggagtcttctgagttttgaaaattatccaactctgtgtagtttttgcagttgatgctgtgagcagaatattttaaataatactttaatctataattcaaatgatggctaaggctttgttcagaagaaaggaaaggaaacaggattctggtgatcctttactgaggatgtgtcgctgcctactcttggggtgaagttgcccaagtggtgcaattatgaatgrgaagaaaagcttatcaactgggggtggagatagtaaatccagggtcggtaaaaacagttaaggagattacaaaggaaattcaaacacagaggaaatcagccaagaataagaattgtagctgctccttgctcctttggcaaaaatgaaaatacttgagaagcagcctgaggttggtaaaatttccaagtaattgctagtgattcaatatgtaaaggagattttgattgccaaa

SEQ ID NO: 235680 - DNA, 591 bp, Homo sapiens
gacaaattgtgctctctgccactaaaatgagcataggcagcattgactggaagttttggaatactctgataattgcctgcattttctttcaactgtagtgccaaaccccttattaaaggcttatagaggtatacctagggagtcttctgagttttgaaaattatccaactctgtgtagtttttgcagttgatgctgtgagcagaatattttaaataatactttaatctataattcaaatgatggctaaggctttgttcagaagaaaggaaaggaaacaggattctggtgatcctttactgaggatgtgtcgctgcctactcttggggtgaagttgcccaagtggtgcaattatgaatgagaagaaaagcttatcaactgggggtggagatagtaaatccagggtcggtaaaaacagttaaggagattacaaaggarattcaaacacagaggaaatcagccaagaataagaattgtagctgctccttgctcctttggcaaaaatgaaaatacttgagaagcagcctgaggttggtaaaatttccaagtaattgctagtgattcaatatgtaaaggagattttgattgccaaa

SEQ ID NO: 235681 - DNA, 591 bp, Homo sapiens
gacaaattgtgctctctgccactaaaatgagcataggcagcattgactggaagttttggaatactctgataattgcctgcattttctttcaactgtagtgccaaaccccttattaaaggcttatagaggtatacctagggagtcttctgagttttgaaaattatccaactctgtgtagtttttgcagttgatgctgtgagcagaatattttaaataatactttaatctataattcaaatgatggctaaggctttgttcagaagaaaggaaaggaaacaggattctggtgatcctttactgaggatgtgtcgctgcctactcttggggtgaagttgcccaagtggtgcaattatgaatgagaagaaaagcttatcaactgggggtggagatagtaaatccagggtcggtaaaaacagttaaggagattacaaaggaaattcaaacacagaggaaatcagccaagaataagaattgtagctgctycttgctcctttggcaaaaatgaaaatacttgagaagcagcctgaggttggtaaaatttccaagtaattgctagtgattcaatatgtaaaggagattttgattgccaaa

SEQ ID NO: 235682 - DNA, 412 bp, Homo sapiens
gctattgcttctttttaacagtttaaaataaaattaacattttctgtctctttcttagctagcagaccagagtaccataagtttatacttgtctaacattactccacacaactaagaatggtcaaayggaaaatgattagccatattcatactgccagttccatggatcagtcctcctgctgaacctgacagtcctaccctagaagggaggatctggtgaaaattaattacaaatagaaagaagagaatgtgattgcaaattaaaaggaagccatttggatattgcaaaaatgtgacgttaacaatatctagtatgtcatgagattatatggcatatttgcagataccaataagggcgaagctcttggaatgcagaaaacatcttttttgtttgaagctgtagatttaaaga

SEQ ID NO: 235683 - DNA, 550 bp, Homo sapiens
tgtccatatacaatataataaagaacatctttttgcaacaatttttaatgccataaatggctataatagctggcatgaatttttttaagtgatrttaagtcctaggtcaggaatccagctcagaatgataagcattttttctccagggggaaaacaatcatacacatagtgacaatatattttatttcattgtatcactgagaaaagctttgactttaaatataaatgggatgtcatactttcatactataagaagaatgttatttagaagcaagtataaaaactacttctttcacctaagtagtaatgaatcaaaagtgagagcctttgtaaatatgtgcatatgaaaaatgttgagattgtatatctaaatttatagccttcagatagtattctaattagagactaggtagaaagcacagcacaatttttgttcaacatatgaatacaggtaattttttcttaaaattgtatcagtacaactgatttacaatgcattttttctttattggagtgacataattgcctctctattagctatcatacagca

SEQ ID NO: 235684 - DNA, 567 bp, Homo sapiens
tggcactatctcagctcccgcaacctccacctccckggttcaagagattctcctgcctcagcgtcccaaatagctgggattacaggctcctggctatctcagctccctgcaacctccacctcccgggttcaagcgattctcctgcctcagcgtcccaaatagctgggattacgggctcctggcaccacgcccagctagtttttgtatttttagtagagacgtggtttcaccatgttggtcaagctggtctcgaactcctgacctgaggtgatccacccacctcagactggcaaagtgccaggattacaggcgtaagccaccgtgcccggcccccatggcaattcttaaatacatcctggcacatgcttacatcgccttgattgggactcattcccgattcctatgtataactcttggcttttttcttgccctctgaaaacttccttttccacataatatagcctttttcactaaaacatttcccttaatgactagttttcttagattacttactgcctatagatattgggatatctaatggcctccttaaatattgtttactctgtc

SEQ ID NO: 235685 - DNA, 613 bp, Homo sapiens
tccaaacaaacttaccaaaaacttaaaattcagacttactttgacactgaaactaggcttccaaaccaagatataaattaaatgtaaaaaggcatgccttattaagaaaagatataattatcacactctttatctttattctttaaagctgtttcaaaaaattatctttaagcacattgcatgaagtttaatttcaaatgttttttaaaggttatccagttctttggatataragttacatgtattctaatatctaatacctagggacctattcactgccatctggtgtcaatgtaatcaaattgcaatggcaggtccttagactaacacattttttacctcttatgagttgagactgcaaaaataaatatgcaaagagacaagcttgacattaaatgttctactacactcaaaagtattataagtttaagcaaagacagacaattaaatcattttcttatagtgccgtacaatgcagcacaagcacagtgaagtaacatttatgttattgaaaggcaatggcacagtaaatcctacttcattgccaataaactgaagatcaaaacaatcaaccaagctccactgctaataaattgaaagtcagtggaccaca

SEQ ID NO: 235686 - DNA, 472 bp, Homo sapiens
gagaaccctttccctggcctcttagggtcagcatggcatttggatcaatgattctcsctgttagttttgtagagtaaccttgttttttgagtcctgccaaggaatgagcttacctgatccaccattggttgcttgatcaggaggtggaaagcatggggcttgggttgtcttctgttggatagggttttgtaagagttgtgcttctacatcattcctccagtcctggactccctaccctttttcttcctcttactaactatacttatccttggttttctgttaagtcatttaaggaatttaaggaatttatagttgtacttggagggaaggggcaagcagaaaaaaattctgcaccaccttgtctctactggaagtactttgtctctaattaaaaccagtggttccctactgtaagcaattttgctctcatacacagttggcaatgtctgtagacattcctgattgtacaact

SEQ ID NO: 235687 - DNA, 615 bp, Homo sapiens
tatatttttgtggagtacatgmaatatttttataaacacatacaatgcgtaataattaaatcagggtaattagggtatccaccatttcaagcatttgttatttctttgtgttggaaatattcctaattctaattttggttatttaaaaatgtacaacgaataattaattctagtccctgttgtactaccaaatattctatcttattaattctaatgaactgtattcatagccattaaccaaccctctcttatccaccccctctctgctacccttcccagcctctagtaaccatcatactaccctatctctatgacttcaatgttttaaaaaaattttagcttgcacatatgagtgagaaccgcaaaattagtcttttggtgcctggcttattttacttaacataacctcctctaggtacatccacgttgttgcaaatgacaagagttcattctttttaatggctgaattatattccattgtgtatatgtattaatactatatatgggccacatttcctcattcacatctgggctgattccatatcttggctattgtgaagagtgctgcattaaatatgggaatgcacagatctcttttatatactgatttccttt

SEQ ID NO: 235688 - DNA, 443 bp, Homo sapiens
tgagtttgactcttgggtctgaaagctgggaattccaagattgtggcattggtatcttatgagatgccacaatcttggatatatgcagcctttttgttttattatttcatggcagatgggcaagtgagcaagagagacaaagagagaaaataagggttgaacttatccttttatcaggagcccacccttgtgataaataacctactcctgtaatctcctgtaataattgcattagtccatgtttgagagcagagccctgatgacctaatcaccttttaaaggccctgcctattaacactgttaccatgggaattaaatttcactatraattttggaaggggcatttaaaccatagcaaccactctcaccattatatcttagagtacttccatctcagttcttcatcatttttgtttaaactgtcctcactttctagactatct

SEQ ID NO: 235689 - DNA, 388 bp, Homo sapiens
  misc_feature (1)...(388): n = A,T,C or G
tttttagacatgtctgacctcttatcccatcatggctaagaacccagttttaagctttttctggggtctccttgaccacaaggcggtccattcagtcagtgggttyttatttttcatttacaattattatgccatatcttgccatcagccagctcccntatagcatattattagacaatttgaacagaaagaaattacaaaaagaagctattgaaagtttatggaaattgtttaaataatatattcagaaatgaaatgctgcctataataacattccaattctttaagaggaaaacatagaggtcttctgagaaaaaaaccctcaaaataattagggaaagcatctttccctaataaactattttaaaaactccaccaataggatatt

SEQ ID NO: 235690 - DNA, 557 bp, Homo sapiens
ttttctacccaataaactataatatctcctggaaaaatattcagtgccttgccactattaaacatcaatcaatttcttttaatatggctggtatattggaacatattagtagacaggcaaataattgttgctttcataaagactgtattctgttgggagacacttgaatctaattatgcacaaatcataataaatgcatgattaccaactgagatttttgactattaaagaaaccattcatgtaaatgaaaataaataaatcttaattaggatagggattggggtagggctttagcrgctattctgtagaaataactgtttattttagatttgaaaggtaagtaattttaaagaggctcgagaagaatacaatgaaaagaagaaacagcatggactcttctacaaggagggaaggaacatgagagatttgtgaaactgagaaaccaaccagcatttagaaattaatggaaggtgcagtgtgagatgaatatgaagttgttggcagagacaagatcactctaggtcataaaacccaccatgtcagctatttttatatt

SEQ ID NO: 235691 - DNA, 589 bp, Homo sapiens
ttaaattcagtatacatatatagcggtattggactgttaacccatactcctatgggaaacaactttaactgtttaggtacagtacttatagctgtttcattttgtttttagtttttcagaatccacttgtttccaaaactacttaggtgaacagttctcccccaaccccttctgtgagattatttcatacatttgtaatgcagttagattgttgtgtcaaagtctgaattacttcmtgggatttctttgatgtcctaaatgattttataaatttgcatgcaattggattgactctttgtactgtaaaattctgtacattttgacaaatgcaccattaaagtattatgcagaataattactattctaaaagtcccctgtgcctcttctctacacccttgattctctggaagccactgatcattctatgtctctatagttttgtcttttataggatgctataaaattggaatcatacaatatgtagcctttctggacgagcttctttcacacagcaatatttatttaagcttcctccatgtgcttttgtgacttgatagttcatttctttttattactgaaaaatattcca

SEQ ID NO: 235692 - DNA, 609 bp, Homo sapiens
gtttggggctattagttcctagggctactgtaacaaagtactacaaactgggtggcttaaagcaacataaatgtattctctcatagctctggaggctagaagtctgawatcaaaggtaagaagccccttgcttccactgagactccacttggaatccttacctgccttttcctggcttctagtggtgtcattcagtcccgggtgtttcttagcttgcaactgcatcactccagtctctgctactatcacatgatattctcactttatctgtctacctctcttctattcttcttataaggacgtcagtcatattggagtagattcaccctaatgaccccatgttaacttgattacatctgcaaaaaccctatttacaaataagggcacattcacaggtactgagggttaggactctgacataccttggggacacaattcaacctataacatctactatgaataaaactctgatatatgatttaaaaaacacttggttaataccacttttattgggtaaaattggtttacaattgattttttaaacatagtaagtgcttggtaaatatttgtggagtaaatagttgttatgtttcaagagacattatatcg

SEQ ID NO: 235693 - DNA, 565 bp, Homo sapiens
aaacagggcaaattaggaaaggtgtcaggggttttacaataagtatctctcattcttgcaatcatactacatagtagctattaagaccattaggacaccttaagcaaatgacagcctagggtacatactaaaaacacagctacaaggggatacaactgagatttaaaacaagtttgtcagattctaaacctcccacaagctcacaccagcttatttattccaaaagataaacattgaggaatttaaaaggccagttattaaagcgttggtggcttaaaatcagccacggtggaagtaatttcatcacagaatttggcaaacactacaaatcagkgtttgggaagatttatttttttaaaaaaagttagtcctaaataataaaagttttcattctacctttaaaattttttcagggtaaaatgtttatagtttcaaccactatcccattcttgtgactaaaatctgccaaagcaggaatggctgatatgtaacctagattaaccgcattgtgtagtctttttggttctccacgtaattgtcctgataattcccagatggatgactc

SEQ ID NO: 235694 - DNA, 639 bp, Homo sapiens
taggtcaacggtagagagtttgtgggggattgtaagcatgtgaaattgatgatggtggtctctgtaacgggatccctgatkgatcccacagcagcatggaggctctgacttcttgcaagggagagaggcgctagggaaagaagatgttagagacagtaacaaagcaaaatttcctcatgtgcagtttatccaaggatggctcacaaatagaattattctactcatgaaggaaaaagaaatacaactagccaaatgatccacctggaattatttcctccttagctacacaaacaggtaaaaacaaatccatacattacattttacaattatattctgaagaggtgtccacttctgagcaagatggagtaggtgggactggattcaccctccagcctgaagcaataaaaaaagcaacctggcaacacatatgaaacaatggtttccgagacatcagctatcagagaatgaagagtagtcatccctaagaaatggaaaacaaacaaggtgagccctattgcttgaacttactaccatgagagagtttccgggcaacagcacagggagagggattcatagagagccgagtgtttgaggagacccagacagatgaaattcatgagacggagtacctgaggggag

SEQ ID NO: 235695 - DNA, 552 bp, Homo sapiens
ctatttcacagaagaggaagcacgaatggtcaaaaacataagaaaatgcagtccatctcactagttatcagggaaatgcaagttcagatcacagataaatgccattttgcatctagattggtaaaaatgattacatcttacaaagccaacctgacagacatgtggaacaacaagtaagagtgactcttacatagaactaatgcatgtatccattggcataagctctggaaagcaatttgaagttattttataaatttgaccataaatttactctaaattgactaagtaattccactcctacacacacactaaaggaaaaatcttcaatgtgtatgtgcaatcgtgtacaaatcaaaatatgtaaaaaaagttcatacagcaaaaaacttgaaaaataaaagtatttttgccttgacaagaaaaggaaaaaamaaactgtagtatatttatataacaggttgttagagaatattgaaaatgaatgaactactgttatgtgcaactacatgcataaattgttaaaacctaagttgaaccaaaaaaggcaggact

SEQ ID NO: 235696 - DNA, 472 bp, Homo sapiens
agctgaatttcaactctttacatttctagtagggatacagaataatcatactatcttaattctagtcagaatttctaaatccatgaaatatattgttttttagtcacttatgtcaggaawaaaaggttttttcagtgttgccatatatttgaataagaatctgaataagaagtcacagaaaaattattttaaagtgtatctcttgaagtggtcagtctaaaaatttgacattcatcaggtttttaaaaagaggtaggctgctatagtaacagcaccaacaataatgacatagcacatattatatataccaggcacaacgctaagtaattcatggattatttttcttgattctcacaataattctgtgagatagatgcaactggcattattaacattttatagccaaggatgatgaaacttggtaaggggaagacactatcttatgcagactaaaatactgtaataaataatt

SEQ ID NO: 235697 - DNA, 466 bp, Homo sapiens
gattttaaattagtactaaaggtagctgaatttcaactctttacatttctagtagggatacagaataatcatactatcttaattctagtcagaatttctaaatccatgaaatatattgttttttagtcacttatgtcaggaataaaaggttttttcagtgttgccatatatttgaataagaatctgaataagaagtcacagaaaaattattttaaagtgtatctcttgaagtggtcagtctawaaatttgacattcatcaggtttttaaaaagaggtaggctgctatagtaacagcaccaacaataatgacatagcacatattatatataccaggcacaacgctaagtaattcatggattatttttcttgattctcacaataattctgtgagatagatgcaactggcattattaacattttatagccaaggatgatgaaacttggtaaggggaagacactatctta

SEQ ID NO: 235698 - DNA, 553 bp, Homo sapiens
ggtctggttaaattttaaaagggtaacagattcattaactagcacagttaaaaccagtttaaaaacgcctggctaagatttgctaaaaacctgactaagatttgctaaggttcttggatygacatcttccaccaaatttgggaaatatttggccattattaattcagaatatttttcctccctgttctttttctcctctccctctggtactgcaattatatgggaacctacttggaattatcccacagatcactgcagctctctgcagttttttgaaatattttttctttccattcttcagattatgtaatttctgttaatcgtcttcagatatgtgaatccttccttctctggttccaatgtactgttcagcccatcaagattattcttcatttcagatattttacttttcaattctgaaattctcattgggtccttcttatagttttcatttctctgcaaagttttctcattgtttactcatattcattcttttatttaagtccttgaaaaatattaagttcttgcaagctaatttcaacagttatgtcat

SEQ ID NO: 235699 - DNA, 482 bp, Homo sapiens
  misc_feature (1)...(482): n = A,T,C or G
agctgaatttcaactctttacatttctagtagggatacagaataatcatactatcttaattctagtcagaatttctaaatccatgaaatatattgttttttagtcacttatgtcaggaataaaaggttttttcagtgttgccatatatttgaataagaatctgaataagaagtcacagaaaaattattttaaagtgtatctcttgaagtggtcagtctaaaaatttgacattcatcaggtttttaaaaagaggtaggctgctatagtaacagcaccaacaataatgacatagcacatattatatataccaggcacaacgctaagtaattcatggattatttttcttgattctcacaataattctgtgagatagakgcaactggcattattaacattttatagccaaggatgatgaaacttggtaaggggaagacactatcttatgcagactaaaatactgtaataaataattaactcannnn

SEQ ID NO: 235700 - DNA, 579 bp, Homo sapiens
ggtcattcaaaagcctgtccttattaaaatatacattgattataataaggtcagtgatttcaggcctgattagctttaaataaatgtaatgtcaaaggaatataattagwtcctcattaaaatttttcatgattgacagtgagtaaaaatgaccttcacaacttgcatcatttagtcatgttctaaggatgacaaagggcagggcatcttctatgaggtaaatgtgtatgattgcagcctgaggcacatgcacttggtcccttaccctacctaaccctaacgcccaagacctgatccaagccagaccctgtgcttaggtgtgtaggctgtgtaaaggaggacccagaagctttgattctcatggggatgctttgagagaaaaagaaacctttgaaccggcaggacctgatttcatctgtgatgatgctgatgatcagaaattatatataaaagcaaatagcaacgtgcctatcagatataggggatttaaaatatgttgacagaaaactttctcagtgaggccactgaccttctaaagaggagctaatagtagaatagggatattaagatacaggtgat

SEQ ID NO: 235701 - DNA, 493 bp, Homo sapiens
ttcgacctgagcagatctgctttccaattgtgtacattgggattcctcatgacattttccttgaaggaattctgctgctcttaaaaagaaaaaagaaaggaaaagagggaaaacaaaaagtctgaaactcacagtggtagaatttcttaaaacagccagtagatggcaaactttactgcaaggaaacaattttgcagcctatataatttggtctgaaaatagcaattaaactctacatccagtaaaatttgctatcctgtatataagtcttctgttaaatcaggaaacaaaattctctatggtactttctctgggaactaaatttcaattataatttaaaatatcctataacttctttctgtgtccatttaagtcttgctctgaaggtattatcactatgaaaattattgcattgttcactgaaagtacatacaatgtgctaggtatagtaatgtagrtgacgtagttttttcattaggatgaacccaactat

SEQ ID NO: 235702 - DNA, 608 bp, Homo sapiens
gggtgcttgcctactcacctatggaaccaaaatatctatgaggacagaagacatattaattctatttacagctgtatccttaataaccagtaaaatgtatagatcctgataataagtcagtaaatagttttgaataaataaactagctggaaatcgtcaattatacattagtaagaagccagaagtatactacaatactgtatcttgctgatattgagctactctgttayccttaagttagtgtaaagatacaagtttttcattggaggaatccaaaattattataaatcctggcatgatatttaccttcactaaaaattaattatgattcaaaaggatatagagctagattatttatttaaactagggcactggaaattttataaaactagtactcaggtatcacagtagttaagagaataatagtgtactgcaatgaggtcaaaactgaagagggcctacagggtcttttgaaagacctacatgagtgtcagctgccataggtcaggaatgaggacagttccttgtgatttgtgagaaacatttactctatgatcttcagagaaagaccaactgaggaaagcatggttataaagtgacattcaagc

SEQ ID NO: 235703 - DNA, 603 bp, Homo sapiens
tgaatttcactatgattttaccaaataaaaaactggagacaagacagtgttctactgactgacaaaatataagaaagacaaagaatgcgtaaaaaagaagtttagtaaatacagctcaaagaagctatatattagcaagaagatgtctcagtatatggaaggacaaactgaagaaagaattctaatgaattaatcataatagcacaatggaaagaaaatagaattaagatgctgaaattcagaaacgtaactataagcaaaattgcttggtagccacagtagctctgggtaaatttcaatgtgttttacacattagaaatgagagatgacctcaaaatgtacattgtattaagtatctttaatggattctcatttaaaacctctaatatttcatttttcatgggatctaaatattttactcatttattaactcattcaacaagtatttatttattcttaattcacatcaagcactgtgttaagtattatgaaaaatctctccacctcctctgaaccaaaaaaaggctctaagaaattgagaaaacgaaagtcagtayttacatagctgaaaaaaaaaggtgaagtaaatacacgtgccaaaat

SEQ ID NO: 235704 - DNA, 588 bp, Homo sapiens
acagcttttgtgctgatagcttcgattaccacctataagtaagccaactgagaaaaaaaaatctagatctgatattttgagaggtttgtgtttgtttgtttgtttttgtaataaacacatcagcaaataaatattcccagagcaaatgtcctagggatgctaatggtgaaaatgcttcaggcagctattgatccaaactctgggccttcattctctgcctcctcatcctcctaattcatacatctcttctccttctttacggagaggctagatacatttatttatagatataagtgtagttcatgggaagaaagccaccgcacttgtatttgatagaaagcttcctggagattcttcagacttgtgtgccttgtgattatttgcctgggaaagcaacccaagttcgccaaagtaaagagtcagcacatgaatccctttgtacttttttggccattccttgtcctgagtgatacacagaatctrtgcaatcattatttatagcaagatacaagaaaaaatactatagggagctaaaggtttcagtccacaaagtgtttttgaaattaatgttgatgtcactgatgacaa

SEQ ID NO: 235705 - DNA, 607 bp, Homo sapiens
tgctcctgttttctctttgttctgttttgtaagagatagcctcacgtttgcttcctcacctttatcttctatttaggtttttgtttttcttgttatatctcttaactttctaacactctcttcttgttttaaaaatgtcctgtgttatagtctctcttcttccatgcttgggtcttctttagttctctgaggctactgattatattattgtatatattttgtactattgactatatatatactatatagtatatrgtacactatatttgtatattatatatactaatgtatagtgtgtatatatttatatatgctatatagaatatataaatataaatatataatatgctataaatatttatattttatagtatgttatatatagtatatagcatatatactacatatatactaattttatgttgtttactatatatactgtatatactaagtatatgccatatatacactttttactatacttttctgtactgtttcctttattgtttcattttaatggttcctgtctttcatggtagaggctttccttaattcctgatgacccttggctattacttaagccttttctattacttaaacctaagta

SEQ ID NO: 235706 - DNA, 557 bp, Homo sapiens
tttacttttacttgtgtttgggtgtttctagactatgagcatataattgataattggtgtttaaagactttctaaactcagtccttgaagttaaggaagtcacataactgcattctctggcatttgttgctttaccaatatgttgaatgctaaaggattttctcttggctgttcaaaacacatgtttatcaaaatatattcacgagtgtactaacattcttggaaggtacaggacaacagcagtgtgtgctgagtcccaggtagactcaggaatagcaaaggaggacacagacgataaatctacaatatggagggattatgggaggatttggcaagaaaaccataacatttgatgactctaggattagacctggaggaaaactgagagcattttagatttgctttatatgcctctctacccttgytttatcattacattattgccagccttcctcttggagctactgttttttctttagactgattgtgatggaaagtaagagagtggggaagagggccttcgtaaacagtctctaatgccttcctgcctgcctgct

SEQ ID NO: 235707 - DNA, 607 bp, Homo sapiens
tattgtactttgattttacaacttcaaaaaaggtggtcccagtaataagtaatgtgctaagtttaaattagaactgttgcattttatccccccctttttgaacaaaaatgattttgaagaccaaatcacagatttcagtgtagtcaggaagtactaaaattttataacaatcaagtgacacagagaaaagagtcattagttttgtgactgtattttaaaaagaagacatcaaaaacctcttctgcatttattgagacaaccatgtggtttttgtctttagttctgtttatgtgaggaatcacatttattgatttgtgtatgttgaaccaaccttgcatcccagggataaggcctacttgatcgttgtggataagctttttgatatgctgctggattctatttgccagtattttgttgagggtttttgcatcattgttcaatatcctatgaggccaaggatattggcctgaggttttcttttttcattgtatctctgccaggttttggtatcaggatgatgctggactcataaagtgggttgcrgacaagtctgtcctcctcattttcttaggatagtaccagtaggaatggcaacaaaagcaaaaat

SEQ ID NO: 235708 - DNA, 622 bp, Homo sapiens
tttgtggtgtgagaatgcagaggcccacctggacctgagggtctctgaggcacggtgggtgctcttttcatgtggacaatgcatgaacacccagaaatgattccatctgatattcaccattactgaaacaggatgcartttctttgtgcccctcaaccatggctcatgttgctccttgtaaaatgtgcactgtcacgagtattaggcaattactgccttcggtgccacatgcttgcctaaacctcccttgtgagagaagagggaggtgcaagactgaagtactgaggaccaaccagaatttagcacagcttatagacatctgagtcattggcagagtcaagattaattatggttcaacacatgggggcttataacagttaacaccattgagacaggtcaaatcaacagctcagttgtgctttagccctgtatataagagtatgaatttagtactgatgctgcattagagagaagatgatgccatgtagaaataacattaaatgttgctctagcaacttccatcttaaaggcttagagaaggaatcctctgagcagctcattgaatttcatgggagactccgctgccattgcaaatgctggtaaagaaaactatgaagggatg

SEQ ID NO: 235709 - DNA, 591 bp, Homo sapiens
tattatttgcttcagtctctgaaagaaattgcaaaaacattttgactaaatacttcgaaagacactcatttggatgcacatatcttatattttattttagaaagccaaattacactttttcagttaatgttttaaaattattccagaagttctcaccccttagcctrctggttgaccacagcatctgaaggcacactgcattttatttacagcctgactgtcattaatgggctttgtgacagtttacttagcttcctactgcctcagtttcctcacttgtaaaatgaggatagtaattcctccttcatatggctgtctctagaattaaatgagtcaattcatgttaagcacttagaatcttgtctggtgttaaagctgagcaactattttctgttggtattcttcctacaaagagctaacttactgtaccggaaagagaggctttgcgattaagatgcatgatcttgaagtcagacagaactggatctcagccttcactctctcactgtttaactagaaagtcttgattaaaccatttaacttagctgagcctcaagttttcttatctataaagcaggcatagttgcctta

SEQ ID NO: 235710 - DNA, 591 bp, Homo sapiens
tattatttgcttcagtctctgaaagaaattgcaaaaacattttgactaaatacttcgaaagacactcatttggatgcacatatcttatattttattttagaaagccaaattacactttttcagttaatgttttaaaattattccagaagttctcaccccttagcctactggttgacsacagcatctgaaggcacactgcattttatttacagcctgactgtcattaatgggctttgtgacagtttacttagcttcctactgcctcagtttcctcacttgtaaaatgaggatagtaattcctccttcatatggctgtctctagaattaaatgagtcaattcatgttaagcacttagaatcttgtctggtgttaaagctgagcaactattttctgttggtattcttcctacaaagagctaacttactgtaccggaaagagaggctttgcgattaagatgcatgatcttgaagtcagacagaactggatctcagccttcactctctcactgtttaactagaaagtcttgattaaaccatttaacttagctgagcctcaagttttcttatctataaagcaggcatagttgcctta

SEQ ID NO: 235711 - DNA, 591 bp, Homo sapiens
tattatttgcttcagtctctgaaagaaattgcaaaaacattttgactaaatacttcgaaagacactcatttggatgcacatatcttatattttattttagaaagccaaattacactttttcagttaatgttttaaaattattccagaagttctcaccccttagcctactggttgaccacagcatctgaaggcacactgcattttatttacagcctgactgtcattaatgggctttgtgacagtttacttagcttcctactgcctcagtttcctcacttgtaaaatgaggatagtaattcctccttcatatggctgtctctagaattaaatgagtcaattcatgttaagcacttagaatcttgtctggtgttaaagctgagcaactattttctgttggtattcttcctacaaagarctaacttactgtaccggaaagagaggctttgcgattaagatgcatgatcttgaagtcagacagaactggatctcagccttcactctctcactgtttaactagaaagtcttgattaaaccatttaacttagctgagcctcaagttttcttatctataaagcaggcatagttgcctta

SEQ ID NO: 235712 - DNA, 627 bp, Homo sapiens
ccttgtgttgccagtgtggtctggacataatatgagacactctgcaggagtctgggtagaggataaagttggagaaaaagagaatcataatcattattacaatgttgcaggccatgtgagccacatctctgctcaggagcactctgtgtgtctgttttatcatgcaggcagtacagcaatgtgtcacagagcttaagccaccaaggacacttgagagattggatgcagcrattcacaacttgcgaacttttgagacaagcacactaatacctatgtccaaggtttacttccaagagagtctcattcattggtctggcatagaccgtgggcatccagagtttttaaaaaattactcaggttattctactgttcagtcaggcttaaaaaacactaactaatctgcgcctagagaagttaaattattttcccagagtcacagttatttaacaacatagttcttgaacccagcctcctcaggactcctgtcagttctgtttcttctctgttgtatacacctagcacaggctatattagatgttttgttgggaaatatatatgtgggtaattgaaaggaagctaattattattatgtttctagctattgataaggaaacatcaatttagaat

SEQ ID NO: 235713 - DNA, 340 bp, Homo sapiens
ccagtgctgaaagccttactaaagagaaaaagacatggtcaggtcaaacacagtctctcccctcaaagctcttgcaacatagggagataaaattgacccatgggaaaaacaaccagaaaaaaatatatatatatcacactgggtttgawtaagagttatattgcatcaacctgaacttgcattctcaggaaaagtcacgttggatgaaacaaaggcctttgatagatgagaatgctttctgtagatgaaaggggagagattgcattatctaggacttagaggggagcagtgctggccaaatgcagggagaagtgaggaaagcctcagaattggcaagatt

SEQ ID NO: 235714 - DNA, 590 bp, Homo sapiens
ttgaataaaatgatggtggtcattagtgaagattcccctcaaaattatcaaattaaaaatattatctggtaagcttcttacacagtcgcaactcttttctcagctagcttaatgtactgccatctgtcctttttcttccattttatataataaaaatcacatgtaataaacatcaaaaaataaamcttttagcattagacatcaggtagcagagaaaaacaaaacaatgtattattaaaaatctttaccacttcagaattctatcaaaatgccatcatttgaaaaaatagaatagctgcatctttggtcaagtctgtttatactccagaataatattgaagaggtacaaaataaatgtcaagggaaatctgggaaatgtattggaaataaatccaaggataaaagaaaggctccatttcttatgcctgatattttattgcagtaaatttatttccaaactgatggaaaatataaattatgttatttttgtggggctggctctcagatgagaagcttcacttttagaaactgaacattcaagtactactagaattattttatttattgatagaagtagtgagtgcagcaat

SEQ ID NO: 235715 - DNA, 578 bp, Homo sapiens
agatgagaagcttcacttttagaaactgaacattcaagtactactagaattattttatttattgatagaagtagtgagtgcagcaattgctattcatcttaacccctttaggatggcactagcgaggcaaatactagtcctaaaaataaagaagaaaacttacttgtccttkagtgtgcttctaaatcttctgaaacactcacctcccttcaggtctcatctcatagctgggcttcatgttacttaagtgtagagcatttgtctttggattctcagaacccaacttagagcctcacacttagtaggtgctcagtaaatattgatgaagatggattgggcatgatgagattcaagctacagggaaaataagtattatggaacagataatgataaatcttacctacttcacaacttcatctctaatcctacccccaagctgcatcacatgattgtgactacagtggggacattttttaaccaagcatctggctgtaaaactgttttcttagatagcaactcaaggtggaaggtggaaggtgagggagcggcctgttgggtgtggcggtaaaacagtgtgg

SEQ ID NO: 235716 - DNA, 578 bp, Homo sapiens
agatgagaagcttcacttttagaaactgaacattcaagtactactagaattattttatttattgatagaagtagtgagtgcagcaattgctattcatcttaacccctttaggatggcactagcgaggcaaatactagtcctaaaaataaagaagaaaacttacttgtccttgagtgtgcttctaratcttctgaaacactcacctcccttcaggtctcatctcatagctgggcttcatgttacttaagtgtagagcatttgtctttggattctcagaacccaacttagagcctcacacttagtaggtgctcagtaaatattgatgaagatggattgggcatgatgagattcaagctacagggaaaataagtattatggaacagataatgataaatcttacctacttcacaacttcatctctaatcctacccccaagctgcatcacatgattgtgactacagtggggacattttttaaccaagcatctggctgtaaaactgttttcttagatagcaactcaaggtggaaggtggaaggtgagggagcggcctgttgggtgtggcggtaaaacagtgtgg

SEQ ID NO: 235717 - DNA, 578 bp, Homo sapiens
agatgagaagcttcacttttagaaactgaacattcaagtactactagaattattttatttattgatagaagtagtgagtgcagcaattgctattcatcttaacccctttaggatggcactagcgaggcaaatactagtcctaaaaataaagaagaaaacttacttgtccttgagtgtgcttctaaatcttctgaaacactcacctcccttcaggtctcatctcatagctgggcttcaygttacttaagtgtagagcatttgtctttggattctcagaacccaacttagagcctcacacttagtaggtgctcagtaaatattgatgaagatggattgggcatgatgagattcaagctacagggaaaataagtattatggaacagataatgataaatcttacctacttcacaacttcatctctaatcctacccccaagctgcatcacatgattgtgactacagtggggacattttttaaccaagcatctggctgtaaaactgttttcttagatagcaactcaaggtggaaggtggaaggtgagggagcggcctgttgggtgtggcggtaaaacagtgtgg

SEQ ID NO: 235718 - DNA, 630 bp, Homo sapiens
ggtggctttcctgacctctgtatacatacagttctagatggctcatctggaaataacctgatcagctattagaaggactttcatatccagctgagccactgataaaaatgtccagcagcaaaaccaaccctaatatcctctacaaatttacaatcagactgggtcctctgccttccctcttaaaatctacatgggatttagagaaaagagtaggattagtggggcaaatttgaccaagatacctcacctctttgagcccctataattcttcccacctataaagtatgccgtcaatgggttaatccttgggaaattgtccatcacagtgcctggcwtgcaataagtgatcaataaatgctaatatttttcagcctaaattaaaatgatggtgctattaggaaagaatgattgtttgggccacacatccactaccctgcctcttgtctggagcatgttggttcataattcagtaggtaatgaggtttgggattgcagaaggcctgtgattgatggcacaaaaacctgacgtagtccaattcaattctgtttggaaaagtagtcccaggtcatcaaactgccctcgcattgcagaaagcaccataaaatggaagagaccacaggacatgaaag

SEQ ID NO: 235719 - DNA, 562 bp, Homo sapiens
gccgtttttctctcttgactcccgcttgttttattcattttggggtagttgccagttagactcagttggtaagtataattaatggaaaatgtgaatttcttcttaaactccaagaaattaaccacagaagtcttcatttcctttataatttcctaacagtatcactccctatgactgttgttttatctctatctcttctgacattcaaccacatcagaaattagttactccctattatttatcatcctaaagataccatataggacagcttgacggcactattgggatactactaggagggaatgagcatttatttaggttccaagaaccatgctaggcattttcatatatactatctcttttaatactcacaaaaacccttcaasatagggattattttcttccttttatacagttgatgaaatggcacctccaagaggttaagcctttgccttaaatccaattagtgggacagctgggtgcaaacctaggctgacataattccaaaatactttctcctttcatcctacacatggaagcattatctcatttttttaaaaag

SEQ ID NO: 235720 - DNA, 553 bp, Homo sapiens
gattttcaagcttgttagttaaagtgaataaaaatgatcttttaaaaaagtacaggctgggcatagttgctcatgcctgtaatcccagcactttgagaggccaaggccggcggatcacctgaggtcaggagttcgagaccagcctggccaacgtggtgaaacccactatctactaaaaatacaaaaaatagctgggcgcggtggcaggcacctataatcccagctactcaggaggctgaggcaggagaattggttgaacccgggaggcagaggtggcagtgagctgagattgctccattacactccagcctgggcaacaagagtgaaactccatctagaaaaataataataaaataaaaaataaagtccmgatgcagaacaagaaaggtggagaaattctgagataaataagctaaattgaaaaaggacaaacccaagtatatgagagctgtatacatttgttatctactcttgagatttatattaccttactttataacacagtttattgaaaacagtataattttacttaaaaatacagtttatgtatgtt

SEQ ID NO: 235721 - DNA, 533 bp, Homo sapiens
tatctactaaaaccctgaaacctcaatttcccagatagaaacaatttttccccaggtgctttaaacaacttacagcacttggtccatttatcacaaattaccttacattataatgtgccacataattcttaccccaccctccttgattttcagctcactaacgatactggatattgtgctacccattttcatataagggtctatagatgtagtaggagctaaatacgtgtaagtcaaacggataactgaggcatgttctaataaaaataacrttattattatttgtattatgtccctaactttgatagctttatccaatagcagaatgcatattagccagaatttattggtctactattaccactgctgcagaacatcctatagcagtttacttctaaaataattttttggataaggtatcataatttgttttactacatatatcagcaaacaattgacttctttattgaagtatatcttgtagtaaacgtattctagtaaacacagtatgtcaatatgatctacaacaaata

SEQ ID NO: 235722 - DNA, 487 bp, Homo sapiens
tctgcatcttttccccccaatgcttgatgtacttttttttttttttaaccacacagggtatccagactctagatactaaccttgacctacccctagtttccttatccctctggaatggattcttgtagtttgttttctatctttcatcactctcctaacaagcccgtggctkatgccataggaaggcagtgcagtttgcttttccacgtgcagaagcactcgctatagaatatatttatggtctatccgccactcagctcactcgagaaagagctgttagtacaagaactgccacgatgacataatttcttacagcatccttccacccttacagtgaaactcccttccttcactccctgccccacctagagggaaacttcacagtgattctagtagaggcaagtttctcgttgaaatcctgcgcagttgttgatattctgctgcttttcaaacttgtgttttcacgtcgtttccatccgggtgtagt

SEQ ID NO: 235723 - DNA, 487 bp, Homo sapiens
tctgcatcttttccccccaatgcttgatgtacttttttttttttttaaccacacagggtatccagactctagatactaaccttgacctacccctagtttccttatccctctggaatggattcttgtagtttgttttctatctttcatcactctcctaacaagcccgtggcttwtgccataggaaggcagtgcagtttgcttttccacgtgcagaagcactcgctatagaatatatttatggtctatccgccactcagctcactcgagaaagagctgttagtacaagaactgccacgatgacataatttcttacagcatccttccacccttacagtgaaactcccttccttcactccctgccccacctagagggaaacttcacagtgattctagtagaggcaagtttctcgttgaaatcctgcgcagttgttgatattctgctgcttttcaaacttgtgttttcacgtcgtttccatccgggtgtagt

SEQ ID NO: 235724 - DNA, 525 bp, Homo sapiens
ggtaagagccaaccagtgacagatacatacttgtataatatcagcatcttcacaggtgaaagcagagcgagtcaacatgacatctgacggacctgataaaaccaaaataaaaaacagatcttcactgcaaccttcagggagccaatktgagaacagaagctgaaactgggagggatttcacacatttcaacatcagataagagaaagaggtctgcagtgaggtttgaaagagctatagttttgacctctcaaaactaaagaaacaaagattcattcaaggagaaagctacacacagctgcaaaaactggtgcaaaaagattccaaattaagcataactgggataaaaaaaaaaactaaagaaaaataagtttagataaaattgaggtgagaaatagagatgttagaaatactagaagctctagaatatgatgttaaagaaaaatcctgaaccatgccttcctcctgaaagattaggaaaactgattttatataaaattaagtaacaaagaagaattgaagtcaca

SEQ ID NO: 235725 - DNA, 446 bp, Homo sapiens
aaataggtaactgtgaccatggatatatgacacaagtttgcctgaagcagtgcgtgaaatgaatttattagtcagatttcctccgattttggacaactttcttgttgaatgtatttctggctttccttctcaaaaggaaagattgtaggtcacattgtcatgggaacagtgggaggaaaaggaaaggcaatcaaatcagggtacccaaaagaatggataaaaatagctcttcccaagacaacaaaacggggaagactgactatgtggcagtgtcycagtgagagtggacatctgacttccctggtgttatatacagcagctctaaggtgtccatttgctgggtctctctgcagtgaccatcaaaacttcttcactggtgtcaaacatcctgcctctctgttattctttaaatgacaggtatttcatttatttgctactcaccataa

SEQ ID NO: 235726 - DNA, 446 bp, Homo sapiens
aaataggtaactgtgaccatggatatatgacacaagtttgcctgaagcagtgcgtgaaatgaatttattagtcagatttcctccgattttggacaactttcttgttgaatgtatttctggctttccttctcaaaaggaaagattgtaggtcacattgtcatgggaacagtgggaggaaaaggaaaggcaatcaaatcagggtacccaaaagaatggataaaaatagctcttcccaagacaacaaaacggggaagactgactatgtggcagtgtcccagtgagagtggacatctgacttccctggtgttatatacagcagctctaaggtgtccatttgctgggtctctctgcagtgaccatcaaaacttcttcactggtgtcaaacatcctgcctctctgttattctttaaatgacagrtatttcatttatttgctactcaccataa

SEQ ID NO: 235727 - DNA, 571 bp, Homo sapiens
ttttaattatacaagatgaatgacttctagagatctgctgtaaaatgcggtrtctgtagttaacaatactatgttgtctacttaaaattttaagactatagatctcatgttaaatgttcttaatcaattttttttttaaagaatcttaatcctggtacccaaggccctgagtctcagtctgaaattccttgaattcctttctcccaagtcgtctagaccctggtcatgcagagaaaacccttgcagagtgccctgggtgaaatgcaagtgaagcctgccttcccactccaaaacactcttgattcagctcctaagagcatcagccaacctacttacaaagactaaacaggtaccccctggagagactgatgctttgtgaagtggtagatacatcaggttgtacagaagcccagtcttgggtgccccactctactttaggcaaaagcccagtatcaagggttctcctggccctcctctttgccttgtaggtaagaaatctagaaatagttacaactctgtacctccctcactgacttctccttgatatcccacttgtaaaacaggactaaaa

SEQ ID NO: 235728 - DNA, 571 bp, Homo sapiens
ttttaattatacaagatgaatgacttctagagatctgctgtaaaatgcggtgtctgtagttaacaatactatgttgtctacttaaaattttaagactatagatctcatgttaaatgttcttaatcaattttttttttaaagaatcttaatcctggtacccaaggccctgagtctcmgtctgaaattccttgaattcctttctcccaagtcgtctagaccctggtcatgcagagaaaacccttgcagagtgccctgggtgaaatgcaagtgaagcctgccttcccactccaaaacactcttgattcagctcctaagagcatcagccaacctacttacaaagactaaacaggtaccccctggagagactgatgctttgtgaagtggtagatacatcaggttgtacagaagcccagtcttgggtgccccactctactttaggcaaaagcccagtatcaagggttctcctggccctcctctttgccttgtaggtaagaaatctagaaatagttacaactctgtacctccctcactgacttctccttgatatcccacttgtaaaacaggactaaaa

SEQ ID NO: 235729 - DNA, 530 bp, Homo sapiens
tgtctttctaggcttgactttctgtcgttggattattttacatcttgtagaaacaagagtcaactgatagatttttgtccagtagaaatataactaatttctgttcaaatattcccaaaagtatgtttattgctctctaagactttaatcagttttgtatcatacatagcagtaaagttactctagaaattctagcttttacaatgcttttggactggattttacattgtattggttctctctttatttttaaattaaatttaattttttgaaacagggtcttgytctgacaccaggctggagtgcagtagcgcaatcaccaatcacagcttactgcagactggacctcctgggctcaatcctctcgcttcagcctccagagtagctgggactacaggcacacactaccatgcctggctaatttttaaatattttgtaaatgggggtctctttatgttgcccaggcccgtctcaaactcctgggggcaagtgatcctccgtttaggcctctcaaagtgctgggattacaa

SEQ ID NO: 235730 - DNA, 647 bp, Homo sapiens
aggaaggcacggaaattattaaattaactgatagattaacatacacttgggtacaaaaaaatgcaccagggcttttaggatttaacaatagctcattattttgacatgacactgtgggatatgatgaggtttctcttcaaataatctgatcaatcttttattctttaattcatagtaccctctcctttctcctttttccctttctgcctttgtcagatgcccaggcgccacagtaccaggcgttatcagtaccagctcacattcctttccttatttgraaagaggactaactttccagctcattacagacaccgcttcccctttcctctccactttcttttgcgtgcccaccttatcttaaaaaatcaaatgtttagccaaccgggattagtttaggttgtacgacccgaccccggccaatggggaaaggttacaggggcaggacttgagtcaggaataaaggctctcgtgcccatttgtttaggtgtgctctcatggtgactggccaaggaggaacccctctgcacagaggtaaaattgctttgctaagaatcctttgttcgagtgttcaattttcttaggattttgagaattactcctaacaacaccctgtgcctaaaaactacaaatgggttaggaagataact

SEQ ID NO: 235731 - DNA, 647 bp, Homo sapiens
aggaaggcacggaaattattaaattaactgatagattaacatacacttgggtacaaaaaaatgcaccagggcttttaggatttaacaatagctcattattttgacatgacactgtgggatatgatgaggtttctcttcaaataatctgatcaatcttttattctttaattcatagtaccctctcctttctcctttttccctttctgcctttgtcagatgcccaggcgccacagtaccaggcgttatcagtaccagctcacattcctttccttatttgaaaagaggactaactttccagctcattacagacaccgcttcccctttcctctccactttcttttgcgtgcccaccttatcttaaaaaatcaaatgtttagccaaccgggattagtttaggttgtacgacccgaccccggccaatggggaaaggttacaggggcaggacttgagtcaggaataaaggctctcgtgcccatttgtttaggtgtgctctcatggtgactggccaaggaggaacccctctgcacagaggtaaaattgctttgctaagaatcctttgttcgagtgttcaattttcttaggattttgagmattactcctaacaacaccctgtgcctaaaaactacaaatgggttaggaagataact

SEQ ID NO: 235732 - DNA, 568 bp, Homo sapiens
cagcgagtgggagtttgtaaatttattggaaatcaggtaagaaagcagagtaatcatttgggaaaataaaggccccagggaagtggaaatccatgttttcatccagtcagtatcaaaagcctgatgraagcatcccttgcttgggctactcatgcctttcccacccattctccctatttgtacttcatttactcattcaactaatatttaccaagcccattactatgtcctaggctcactgctcagcattcttcagcatgtgctttttccaagtaatctccataaattacttgaattcaatctgtgctccgcttcctgttatcaacttggcacgtattgtctgcatcacatgatttgacatttgcgtatgcatcggctcaaaccattagctctttgcttccatttgtattttatgttcctcctaaatgagactaaatctaccctaagcaattactaataataccccatggacccccaactgcactgtacacaatactaaatatatagaagataataaatatgcaatgcatgaagaaaattttgcgtcttggagaatagaatttctgta

SEQ ID NO: 235733 - DNA, 568 bp, Homo sapiens
cagcgagtgggagtttgtaaatttattggaaatcaggtaagaaagcagagtaatcatttgggaaaataaaggccccagggaagtggaaatccatgttttcatccagtcagtatcaaaagcctgatggaagcatcccttgcttgggctactcatgcctttcccacccattctcccyatttgtacttcatttactcattcaactaatatttaccaagcccattactatgtcctaggctcactgctcagcattcttcagcatgtgctttttccaagtaatctccataaattacttgaattcaatctgtgctccgcttcctgttatcaacttggcacgtattgtctgcatcacatgatttgacatttgcgtatgcatcggctcaaaccattagctctttgcttccatttgtattttatgttcctcctaaatgagactaaatctaccctaagcaattactaataataccccatggacccccaactgcactgtacacaatactaaatatatagaagataataaatatgcaatgcatgaagaaaattttgcgtcttggagaatagaatttctgta

SEQ ID NO: 235734 - DNA, 549 bp, Homo sapiens
gaatatgtagcatcttcatgttctctttccctctatcaaaattgactaytggccaagtttccaaaaattgcttcatgttaaaaggttggtttcatcattgttacttgtatttttgaatggtaggagcacttcttggttaaccaagagcaaacacagccttcagtaaatatttagccatagccaacttgactttcattcactattaaacccataaaccaaaggaatgaataataaatttatggttattagagtttttcgcaggagaagcttttatctctcctgtagcaccacaggtgactccacctgtaacagtaggtcccatagaacattgcatatttgccaaacactgtacatatcctatttaaccatcacaacaaccttcatttcacaaatgaggaaactaaagaaactagagtttagttcccaggtagtggtagagcagagatctgaacccacgtctgactgactcactccgaagggcatgttcttaaatattacactctttggatgctttcagctgtatagtacttgaaagggtcctacatgctc

SEQ ID NO: 235735 - DNA, 549 bp, Homo sapiens
gaatatgtagcatcttcatgttctctttccctctatcaaaattgactactggccaagtttccaaaaattgcttcatgttaaaaggttggtttcatcattgttacttgtatttttgaatggtaggagcacttcttggttaaccaagagcaaacacagccttcagtaaatayttagccatagccaacttgactttcattcactattaaacccataaaccaaaggaatgaataataaatttatggttattagagtttttcgcaggagaagcttttatctctcctgtagcaccacaggtgactccacctgtaacagtaggtcccatagaacattgcatatttgccaaacactgtacatatcctatttaaccatcacaacaaccttcatttcacaaatgaggaaactaaagaaactagagtttagttcccaggtagtggtagagcagagatctgaacccacgtctgactgactcactccgaagggcatgttcttaaatattacactctttggatgctttcagctgtatagtacttgaaagggtcctacatgctc

SEQ ID NO: 235736 - DNA, 322 bp, Homo sapiens
tgcccacattcaccactgttattcaacatagtacgggaagtctttgctcaagcaatcaggtaagagaaagaagtaaagagcatccacactggaaaggaagaagccraattacctttgtttgctgatgatacgatcttatatttagaaaaaccttaagactccaccagaaaactattagaactgatcaaccaatttagtaaagttgcaggatacaaaatcaacctacaaaaatcactagcatttatatatgccaatagtgaacaccctgaaaaagaaatcaaaattaatctcacttacagtagacacaaataaaattaaatac

SEQ ID NO: 235737 - DNA, 573 bp, Homo sapiens
tggtactgccatcgtaatgatattaagtcttccaatctatgaacgtgggatgcctttccacgtatttaggtcttctttaatttttttcagcaatgttttgcagatttcagagtacaagatttgcgcttcttctcttaawtttgttcctacatactttcttcttttcgatgctactgtagatggacttattttcttaatttcatttttttggattgtccattgcaactacatagaagtacaaatgatttttgtatattgtatctttcaaccttgctgacctggtttatcagtagtttattgtggttgattctttcagattttacaaatggaaggtaatgtcatttgggcattatgccatttaaaaaaatatttacatataccagtataaaagtatgatacctttttcatggacccactttttttggaagcaaaatacccagatagttatttttccaaattgcatgtgagtttccattactcattcctctgatgtcccaacagcccccatccccatgtactcccagcactcacttctgagaccactccagtttcatcccagactgggcagagaaa

SEQ ID NO: 235738 - DNA, 412 bp, Homo sapiens
attaataaccagtatatataaggagctcaaacaactctataggagaaaatctaataatccaattaaaacatgggcaaaagatctgaatagacatttctcaaaagaagacatacaaatggcaaacaagcgcatgaaaaggtgctygacattagtgatcatcagagaaatgcaaatcaaaactacagtgaggtatcatccgccccagttaaaatggcttatatccgaaagacagacaataacaaatgctggcaaagttgtggacaaaagggaacctttgtacactgtcggcaggaatgtaaattagtataaccactatggagaacacttggaagttcctcaaaaaactaaaaacagagctaccgtatgatccaccaataccactcctgggtatatttctaaaagaaagaaaatc

SEQ ID NO: 235739 - DNA, 412 bp, Homo sapiens
attaataaccagtatatataaggagctcaaacaactctataggagaaaatctaataatccaattaaaacatgggcaaaagatctgaatagacatttctcaaaagaagacatacaaatggcaaacaagcgcatgaaaaggtgctcgacattagtgatcatcagagaaatgcaaatcaaaactacagtgaggtatcatccgccccagttaaaatggcttatatccgaaagacagacaataacaaatgctggcaaagttgtggacaaaagggaacctttgtacactgtcggcaggaatgtaaattagtataaccactatggagaacacttggaagttcctcaaaaaactaaaaacagagctamcgtatgatccaccaataccactcctgggtatatttctaaaagaaagaaaatc

SEQ ID NO: 235740 - DNA, 307 bp, Homo sapiens
tctttgtctccagcaggaccatgtatgccctctaggattatactccttgtgtgtatacccyaactatcatgagaatgccctagctctagaagatatttaggtcagctttaacttactggtcagagttgtgctgtgcctgaattgatatcttgggccagataaaaatgattcatataaaaactttaaaaagaagcctcctgtatccttaaagtacaccctaatgttctgagacaatttttcctggcttggtaactgttgggattcatggttatatccaatcctctaggcaggtctaaacgcatcatcc

SEQ ID NO: 235741 - DNA, 307 bp, Homo sapiens
tgttccattggtctatatgtytgtttttgtaccggtaccttgctgtttcactgtcaagtgctggaaaaagaacaaaaggaactgtctctcattgtcgatggaagtataaaatggccaagacactttgaaaaacaatttggcaggtttgcatgaagttaaaggtacacttatacagcaatcgcactccagggtatttacccaagagaagtgaaatccttcttcccaggaaaccttccagcaaaacgttcttaattgctaaaaactggaaacatctcaaatgcccatcaactggggaatggataaacaa

SEQ ID NO: 235742 - DNA, 546 bp, Homo sapiens
tttatctttggtggagcgagatgaagcagtgaatcattgaagactgaaagaaagaaaaaggtcttttcccttttctttaagaagcatcattagttaaaaatatgttagttraaaccagagaactatatttaaagggacagcaataagcaaattgattactctggtgattattggagtgacattaccttttagttgtactttcacaaaaattcacaatatttgccaaagtcaagttatccattacactattaatttgtcattcttttgtttatatagtcaatatctctatctcaattggatctatctcaactgcttctaaacaagccaccatagtctctcccatttcaacaatctcttccaagtaccatttcatttcttcttttcatatttttgaaaacttttgaaaaactacctgttttcctcctccatttcttgttcattccattctagtggacatggaatctgttcctcctccaaaacagaatttggtaacccttaaattactaaacccaaaacaatatgttgtttttatctttacctctctgt

SEQ ID NO: 235743 - DNA, 546 bp, Homo sapiens
tttatctttggtggagcgagatgaagcagtgaatcattgaagactgaaagaaagaaaaaggtcttttcccttttctttaagaagcatcattagttaaaaatatgttagttaawaccagagaactatatttaaagggacagcaataagcaaattgattactctggtgattattggagtgacattaccttttagttgtactttcacaaaaattcacaatatttgccaaagtcaagttatccattacactattaatttgtcattcttttgtttatatagtcaatatctctatctcaattggatctatctcaactgcttctaaacaagccaccatagtctctcccatttcaacaatctcttccaagtaccatttcatttcttcttttcatatttttgaaaacttttgaaaaactacctgttttcctcctccatttcttgttcattccattctagtggacatggaatctgttcctcctccaaaacagaatttggtaacccttaaattactaaacccaaaacaatatgttgtttttatctttacctctctgt

SEQ ID NO: 235744 - DNA, 546 bp, Homo sapiens
tttatctttggtggagcgagatgaagcagtgaatcattgaagactgaaagaaagaaaaaggtcttttcccttttctttaagaagcatcattagttaaaaatatgttagttaaaaccagagaactatatttaaagggacagcaataagcaaattgattactctggtgattattggagtgacattaccttttagttgtactttcacaaaaattcacaatatttgccaaagtcaagttatccattacactattaatttgtcattcttttgtttatatagtcaatatctctatctcaattggatctatctcaactgcttctaaacaagccaccatagtctctcccatttcaacaatctcttccaagtaccatttcatttcttcttttcatatttttgaaaacttttgaaaaactacctrttttcctcctccatttcttgttcattccattctagtggacatggaatctgttcctcctccaaaacagaatttggtaacccttaaattactaaacccaaaacaatatgttgtttttatctttacctctctgt

SEQ ID NO: 235745 - DNA, 411 bp, Homo sapiens
gaattctctgcagccttcctacttcttccatagactcaccctagggaggagttgactccagacccggggaccccactggggagggctggactggttaaaattgggatcaaagtgagcatgagaaatgcaaagtctcattaacaaccagcccagacagccagcccaaragggtgagggcagcaggagtaaaggggtggagggtgggtgaagggaggctccagggtgcaaggagttgctgctgatccattatagggttaaagaaagaaaaacacatgttaacattggggccagggcctaaagtctgtgctgcctgttctgaggctgaggctatggcaagcacagaggaggcttgggcttcatcagggcgttctgccaggcacggtcccggagccaaactgatctgtgaagtca

SEQ ID NO: 235746 - DNA, 407 bp, Homo sapiens
actcaccctagggaggagttgactccagacccggggaccccactggggagggctggactggttaaaattgggatcaaagtgagcatgagaaatgcaaagtctcattaacaaccagcccagacagccagcccaagagggtgagggcagcaggagtaaaggggtggagggtgggtgaagggaggctccagggtgcaaggagttgctgctgatccattatagggttaaagaaagaaaaacacatgttaacattggggccagggcctaaagtctgtgctgcctgttctgaggctgaggctatggcaagcacagaggaggcttgggyttcatcagggcgttctgccaggcacggtcccggagccaaactgatctgtgaagtcactggccaatgatgggtgacactggaattc

SEQ ID NO: 235747 - DNA, 412 bp, Homo sapiens
cactcacaggtgaacagccattcaccctcactgcccacaggtgccagaggggcagggagcccagaggtgkcagcctattgtgacacccattgccaacaggatgttgatgaaaggtctggggagaaaagcgagtcctatgcagagaagtgtgtatccttccagattttttctatggaactgagagttgaacccagggttacctgatccccaaaccctccctctctccatgggttttgcaaatgagcctcaagtctttttagaacaccaactgacaatttctccttgataaatgtcactcatttctcagcaagaagttaagatagcttccagggtccccccaaccccatcacccacattgtctcctctatttgcttgccacccagaggctgaattccagtagccattctgcatt

SEQ ID NO: 235748 - DNA, 644 bp, Homo sapiens
cagcctccagcctccagggagcagacttaccccaggaaggagatgggtaaccaagcctgccatcagcagggcaaagcgacctgcagcccatcggaggaggggtctttccagccccatgctggtctgagccctaggaagaggacttgacacaaaatgggatcaccattcccacgaatggggctctggcctctcctaccacrcataacgccaaggggagactcgtctaccctcacagtctagagcccctgacacccgagggccaagcaacctgtggcagtggctggtgatgcaccgtggggcccactgggagggcagagacccaggcaaaggtgtctaggggtgagggcaagggagcagggaggtggcaggggtctgaggccctgtgaaagggggcacaagagacagtggcatttgattgtgacccaatctgcacctatagcgtggagagaaaattcaggtacacaaagccagaataactaaagactatctattgttttccttttttcattattttaatttttaaaaaattttttatagagatggggttttgctgtgttacccaggcttgtcttgatctcctgtcctcaagcgatcctcccatgtcggcctcccacagtgctgggattacaggcatgaggcactga

SEQ ID NO: 235749 - DNA, 644 bp, Homo sapiens
cagcctccagcctccagggagcagacttaccccaggaaggagatgggtaaccaagcctgccatcagcagggcaaagcgacctgcagcccatcggaggaggggtctttccagccccatgctggtctgagccctaggaagaggacttgacacaaaatgggatcaccattcccacgaatggggctctggcctctcctaccacgcataacgccaaggggagactcgtctaccctcacagtctagagcccctgacacccgagggccaagcaacctgtggcagtggctggtgatgcaccgtggggcccactgggagggcagagacccaggcaaaggtgtctaggggtgagggcaagggagcagggaggtggcaggggtctgaggccctgtgaaagggggcacaagagacagtggcatttgattgtgacccaatctgcacctatagcgtggagagaaaattcaggtacacaaagccagaataactaaagactatctattgttttccttttttcattattttaattttyaaaaaattttttatagagatggggttttgctgtgttacccaggcttgtcttgatctcctgtcctcaagcgatcctcccatgtcggcctcccacagtgctgggattacaggcatgaggcactga

SEQ ID NO: 235750 - DNA, 644 bp, Homo sapiens
cagcctccagcctccagggagcagacttaccccaggaaggagatgggtaaccaagcctgccatcagcagggcaaagcgacctgcagcccatcggaggaggggtctttccagccccatgctggtctgagccctaggaagaggacttgacacaaaatgggatcaccattcccacgaatggggctctggcctctcctaccacgcataacgccaaggggagactcgtctaccctcacagtctagagcccctgacacccgagggccaagcaacctgtggcagtggctggtgatgcaccgtggggcccactgggagggcagagacccaggcaaaggtgtctaggggtgagggcaagggagcagggaggtggcaggggtctgaggccctgtgaaagggggcacaagagacagtggcatttgattgtgacccaatctgcacctatagcgtggagagaaaattcaggtacacaaagccagaataactaaagactatctattgttttccttttttcattattttaatttttaaaaaattttttatagagatggggttttgctgtgttamccaggcttgtcttgatctcctgtcctcaagcgatcctcccatgtcggcctcccacagtgctgggattacaggcatgaggcactga

SEQ ID NO: 235751 - DNA, 566 bp, Homo sapiens
tcttatctgcggcatgctaatgctgcttcctgcagataatgataaaggaacaactcaaaataacaaaaaaggaataaaatgtgccagatgcytaaaaaataaggaggacaatgcaaataaaagcaactggtttttctattctggagaataaactctacccacaattgaagtaatcattttggtggttacttgatacacacttttttttttaagagattaggaaggaaaaaaaaaaagcaaacatcagctgacaagcactgccacattctgttagaaattaagagggaaataaacctaagtacgctataaatcactttggggtttaattttgcttctaccctgctacatcgtttcttctgtttcttcttttttcttcatttggctgtggcttaaacattgttaattaaaagccaaactgaaagattttgactcatacattttttaggaatataaaatatttcaaatatacagaaaagtaccaggaataccgtaaggaacattcgtgtatctaccatcagggtttaacaatttttctatttttccttcctgttcatttttaaagaata

SEQ ID NO: 235752 - DNA, 566 bp, Homo sapiens
tcttatctgcggcatgctaatgctgcttcctgcagataatgataaaggaacaactcaaaataacaaaaaaggaataaaatgtgccagatgcctaaaaaataaggaggacaatgcaaataaaagcaactggtttttctattctggagaataaactctacccacaattgaagtaatcattttggtggttacttgatacacacttttttttttaagagattaggaaggaaaaaaaaaaagcaaacatcagctgacaagcactgccacattctgttagaaattaagagggaaataaacytaagtacgctataaatcactttggggtttaattttgcttctaccctgctacatcgtttcttctgtttcttcttttttcttcatttggctgtggcttaaacattgttaattaaaagccaaactgaaagattttgactcatacattttttaggaatataaaatatttcaaatatacagaaaagtaccaggaataccgtaaggaacattcgtgtatctaccatcagggtttaacaatttttctatttttccttcctgttcatttttaaagaata

SEQ ID NO: 235753 - DNA, 568 bp, Homo sapiens
tgttgcccaggctggtcttgaactcctgagctcaagtgatccasccgcctaggcctcccaaagtgctaggattacaggcatgagccaccacattcagccaccatgcataaagttttgtgatcttctttattcacttaatagtttatatgattacttcacatctttaaataatcctttacaacattgtttttaatggctgagtatagttacattctattaatacatatatttatttaaccagatcccattttttgacatttagcttgtttctagtttctcacagctgtcaacatctttgtagttacatcacaaaatcattcaaaattattccttaagaataaatttctaaatagaattttgcacccaagggtatggagaattctaatgcttttgatacttacattgtcaaattgactcctcctgccctccagtattataccctctgagtatgaggatgtgttgggctttctaccaccctctccagtgtgtagaggtgttatagacctgtgaaaacggctgagtagaagatgttggagatagttcatggaaatgtaggtcagtgacaatg

SEQ ID NO: 235754 - DNA, 594 bp, Homo sapiens
ccgcacaatgtgcaggttagttacatatgtatgcatgttctgaacacatttttttaaacaatctgattttatttatttttaattgacaaataatgtgcatattcatggggtatataatgatatcttaatacatagaatatataatgatcagatcaggataattagcatattcataatctcaaacatttatcatttscttgtgttgggaacattcagtgtcttccttctagctatctgaaactttatatattattgttaactatagttatccggcagtggtggagaagtctgggacttagtcctcctatgtagcgtaattttgtatcctttgccaaatctctccctattaccctcttccccctacccttcccagcctctaggacccgctgttctgctttttacttttatgaaatcaacttttttttagcttccgtatgtgagtgagaacatgcagtgtttacctttctgtcccttaatgtctgagaacctcaggaattggtcacattctgatggtctgaggagagcagtggaagagggatgagatgctagggtaaccatcatcagggtttttgagggctgtgtctttttccagaa

SEQ ID NO: 235755 - DNA, 581 bp, Homo sapiens
ctacatcacatgacccttgcagccaacactgtcttgttcaagtttatgtccctaacatctagcacagtgcctggcttgccatagtactcagtaaatactgattgcatgaataaaattctctttcataatccccttcttattttaacacattcctacttatcccctgctcagataggggagatatttttatcagaaccagcactgagaggcagcatgcaatattccaggggttctagaggcctaggtctactgggaactgcctttcactacctaagggatgttacaacatttagccactaagacttaacttccctacctgtaaatggaaataataaaaactatctcaaacaaaggatytgaagatcaaaacagtaattaaagtgttagataaactgcaaaagaaaatagaggataggagtaaaggaggtacaagatgagaataaaagaagcagccaaacacttgccgcttaaaggagccatttttctcgtatcccctcatttatggtactaaagaagaataagggcttggcctggtgaatgcaggaggagtaaatcctccttaccatttcatcaggaagcct

SEQ ID NO: 235756 - DNA, 568 bp, Homo sapiens
ttttcttggaaatgtcaacaatcaccagatttaccacttggtggcatgaaaagttcaacaggactgacgaagccaggccttctggttgtgctcttgattctgccacaggagagctgtgatagtgctgatgaaatcctcctctgttctctccctcaattattccacacaaacaccaaattctgcatgcctgtatcttaagaaaatccactagctgaaacactraacttcctaaaacaaaagaatgaatgaatacccttcaatttactctataaaagtcctcttcgttttacaatagtctgtttactcattactcaacagggaagctggggtttgagagactggaatgtggcctgggagagttcaggacaagctgcaatgccaatcccatcctttgttggatccacagccttgaactagtcactttcatctctttgtacttcagtccccctcatctgcaaaataacagagctgatttaggacctaatctcagaggtgatctctgaggtcccttccaactccagcactccgtgattctatatttgattcttcctgtatattctgcagacca

SEQ ID NO: 235757 - DNA, 449 bp, Homo sapiens
acatagtatgtgattaatacctaataatataatgtgcctatctttccacgtgtcagtatcttcccagtgaggctgacatccttcaagtcaccatcttgtctcatctctctctggccttcaacactaagcactgtgtcccaaatatggtagatgcacaataaatgcttcctatagactggatccatttctacatctgcatttaggaatgcaaattcagggaacaggagtcagactcggaaagggctatatgaagaaagaaatctaaggagaatgcaacaaacccaggggaggaaagtggatattagtgaaataagaatttatgagggagtacacagtgattcataaagaccaccacttggggaggaccccagttcttcttggtcttcccaktgaaacttcctttgcctgctccaatgttttcaccctatgattcttaaattttcctgctt

SEQ ID NO: 235758 - DNA, 613 bp, Homo sapiens
tagaagaaggaacatcttgtctgtaacttactcttaaatggttcaagaaaaaaacaatgtgtgtgtgtatatagatagatgaagggatcaatgaatatgagagagggtgactggggaaagcggggtgaagggtaaattggagtccttcatcctatttttgtaattttcctctgtgtttgaaacgatttcaaaataagaaatttaaaaatttcaaatacacagaatagtaaatataatatgctcccttttattagatttaggaaggagaaggaaatatatatttttacatatgcaaaagacaaacactgaaaatattatccaaaaactaattttaaagtttgtttacatatagggtgaaagaggacacaggtagagagtaggcatctctggggcacagtggcccacacctgtaatcccagcactttgggaggccgaggcaggtggatcacttgaggtcagaagttcgagaccagcctggmcaacatggcaaaacccatctctactaaaaacacaaaaattagccaggcgtggtggcacatgcctgttagtcccagctacccagccagctgaggtaggagaattgcttgaacccaggaagcagaagttgcagtga

SEQ ID NO: 235759 - DNA, 484 bp, Homo sapiens
attctcttcctcctccctgcctctagttttcaagatgaaaccaatgytttacacctgagttactccaacttgccctcaacctcccactccagtgtttctcaaactatacggaaaaatcacatggggctgttggcaaaacgcacattggactcagtgggtctgggaaggggcctgagagtctgcatttctaaaaagctctgcaatgatacctgctgctggtctgcaagccacatttgagaggcaaagctctcaccatcccagattacatttctagacaattcctcttccaagaatcccctcacaaaaacctacaacaactcccagttcagttggcctggaacccaaacatcacagattcttaccttctttaaaaaaaaaaaaacagagcacctgaggctcaaagaggtgaagtaatttacccatcatcacatagctagggagtcattatttgaagtcagaaaatgaccacccaatttagagtcat

SEQ ID NO: 235760 - DNA, 484 bp, Homo sapiens
attctcttcctcctccctgcctctagttttcaagatgaaaccaatgttttacacctgagttactccaacttgccctcaacctcccactccagtgtttctcaaactatacggaaaaatcacatggggctgttggcaaaacgcacattggactcagtgggtctgggaaggggcctgagagtctgcatttctaaaaagctctgcaatgatacctgctgctggtctgcaagccacatttgagaggcaaagctctcaccatcccarattacatttctagacaattcctcttccaagaatcccctcacaaaaacctacaacaactcccagttcagttggcctggaacccaaacatcacagattcttaccttctttaaaaaaaaaaaaacagagcacctgaggctcaaagaggtgaagtaatttacccatcatcacatagctagggagtcattatttgaagtcagaaaatgaccacccaatttagagtcat

SEQ ID NO: 235761 - DNA, 484 bp, Homo sapiens
attctcttcctcctccctgcctctagttttcaagatgaaaccaatgttttacacctgagttactccaacttgccctcaacctcccactccagtgtttctcaaactatacggaaaaatcacatggggctgttggcaaaacgcacattggactcagtgggtctgggaaggggcctgagagtctgcatttctaaaaagctctgcaatgatacctgctgctggtctgcaagccacatttgagaggcaaagctctcaccatcccagattacatttctagacaattcctcttccaagaatcccctcacaaaaacctacaacaactcccagttcagttggcctggaacccaaacatcacagattcttaccttctttaaaaaaaaaaaaacagagcacctgaggctcaaagaggtgaagtaatttacccawcatcacatagctagggagtcattatttgaagtcagaaaatgaccacccaatttagagtcat

SEQ ID NO: 235762 - DNA, 519 bp, Homo sapiens
ggtcttgctggttttgaaaacgttgtactttggatgtggcgacagtttgactctttgttctctttctctttcttgatggtgtacgtgcaggctgttagcatctcacgaaaggrttattccatcaggtgtcttcttccttcaattcacacatttttcgagtatctgacatgtgcccagtgtggtcagtttctttagatttttttctttctcatgtatatgggtgaattggtgaagctcacctttttttccccctgaataaccttatcccagccatatttgctggagctaggagaactgccccgcttagtcccccgaaacattaaaccctgccgtggaatgcagagctgaattactgggtatggctgggacagagtggggctgcagccaagatcttatcttagttctctcatctctcagaatagacctggtcggtgggtctaagatgggatgcttgggttaatttttgcccaggcctgttgatttggtgagcagaggtttttattttaaagtatgagtttt

SEQ ID NO: 235763 - DNA, 617 bp, Homo sapiens
tcttctaacagcatgtgctcacctcatatctgtcacattttgttaattcacacaatatttcatactttttaataatcatctctgttatgataatttgtgattagtgatcgttattgttactattgtaatttttggagggcaccttaaactgtgcccatatgagacagcaaacttaatccataaatgtgtatgtgttctgactgctccaccaaccagccattcccccrtctctctccctctcctcaggcctctgtattccctgagacacaataatattgaaattaggccaattaataaccctacaatggcccatcagtaaagtggtcaagtgaaagggagagtcttacctctctcactttaaaccaaaagctagaaatgattaagccgggtaaggaaggaatgtccaaagctgagataggccgaaagctaggcctcctgtgccaaacagttagccaagatgtgaatgcaaagaaaaagttcttgaaggagattaaaagtgctactccagtgaacacatgcataataagaaagcaaagcagccttatggctgatatggaaaaagtttggacagtctagatagacaaatcaaaccagccacaacattctcctaagccaaa

SEQ ID NO: 235764 - DNA, 617 bp, Homo sapiens
tcttctaacagcatgtgctcacctcatatctgtcacattttgttaattcacacaatatttcatactttttaataatcatctctgttatgataatttgtgattagtgatcgttattgttactattgtaatttttggagggcaccttaaactgtgcccatatgagacagcaaacttaatccataaatgtgtatgtgttctgactgctccaccaaccagccattcccccatctctctccctctcctcaggcctctgtattccctgagacacaataatattgaaattaggccaattaataaccctacaatggcccatcagtaaagtggtcaagtgaaagggagagtcwtacctctctcactttaaaccaaaagctagaaatgattaagccgggtaaggaaggaatgtccaaagctgagataggccgaaagctaggcctcctgtgccaaacagttagccaagatgtgaatgcaaagaaaaagttcttgaaggagattaaaagtgctactccagtgaacacatgcataataagaaagcaaagcagccttatggctgatatggaaaaagtttggacagtctagatagacaaatcaaaccagccacaacattctcctaagccaaa

SEQ ID NO: 235765 - DNA, 617 bp, Homo sapiens
tcttctaacagcatgtgctcacctcatatctgtcacattttgttaattcacacaatatttcatactttttaataatcatctctgttatgataatttgtgattagtgatcgttattgttactattgtaatttttggagggcaccttaaactgtgcccatatgagacagcaaacttaatccataaatgtgtatgtgttctgactgctccaccaaccagccattcccccatctctctccctctcctcaggcctctgtattccctgagacacaataatattgaaattaggccaattaataaccctacaatggcccatcagtaaagtggtcaagtgaaagggagagtcttacctctctcactttaaaccaaaagctagaaatgattaagccgggtaaggaaggaatgtccaaagctgagataggccgaaagctaggcctcctgtgccaaacagttagccaagatgtgaatgcaaagaaaaagttcttgaaggagattaaaagtgctactccagtgaacacatgcataataagaaagcaaagcagccttatggctgatatggaaaaagtttggacagtctagatagamaaatcaaaccagccacaacattctcctaagccaaa

SEQ ID NO: 235766 - DNA, 526 bp, Homo sapiens
catctgggactttcatagctagagaagagaaatcaataactggtttcaaagcttcaaaggacagctagtgatacagctggtgactttaagttaaagccagtgctcatttactattttgaaagtcctggggtccttaagaattgtggtaaatcaagtctgcatgttctctataaayggaacaacaaagacggcatgacagcccatctctttacagcatggtttactgaatattttaagccccctgttgaaacctactgctcagaaatatatttctttcaaaatattactgtcattaacaatgcacctggttacccaagatctctgatggagatgttcaaggggatgaatgttgttttcatgcctgttaacacaccatccattctgctgcccatggatcagcagtcattttaactttcaagtcttattatttaagaaatatattgtgtaaggctacagctgccatagatagtgactcctctgaaggacccaaacaaagcaaattgaaaaccttctggaaaagattaat

SEQ ID NO: 235767 - DNA, 526 bp, Homo sapiens
catctgggactttcatagctagagaagagaaatcaataactggtttcaaagcttcaaaggacagctagtgatacagctggtgactttaagttaaagccagtgctcatttactattttgaaagtcctggggtccttaagaattgtggtaaatcaagtctgcatgttctctataaacggaacaacaaagacggcatgacagcccatstctttacagcatggtttactgaatattttaagccccctgttgaaacctactgctcagaaatatatttctttcaaaatattactgtcattaacaatgcacctggttacccaagatctctgatggagatgttcaaggggatgaatgttgttttcatgcctgttaacacaccatccattctgctgcccatggatcagcagtcattttaactttcaagtcttattatttaagaaatatattgtgtaaggctacagctgccatagatagtgactcctctgaaggacccaaacaaagcaaattgaaaaccttctggaaaagattaat

SEQ ID NO: 235768 - DNA, 526 bp, Homo sapiens
catctgggactttcatagctagagaagagaaatcaataactggtttcaaagcttcaaaggacagctagtgatacagctggtgactttaagttaaagccagtgctcatttactattttgaaagtcctggggtccttaagaattgtggtaaatcaagtctgcatgttctctataaacggaacaacaaagacggcatgacagcccatctctttacagcatggtttactgaatattttaagccccctgttgaaacctactgctcagaaatatatttctttcaaartattactgtcattaacaatgcacctggttacccaagatctctgatggagatgttcaaggggatgaatgttgttttcatgcctgttaacacaccatccattctgctgcccatggatcagcagtcattttaactttcaagtcttattatttaagaaatatattgtgtaaggctacagctgccatagatagtgactcctctgaaggacccaaacaaagcaaattgaaaaccttctggaaaagattaat

SEQ ID NO: 235769 - DNA, 585 bp, Homo sapiens
acacctattttatttgtccttacattgctctcagatgtcccagtatgttcctccacacctggtatcttgggatttgatggacaaatctatttccacgttagctgtacatttcatgattttatggctttcagtcgtagttcctttgcccacaatgtcccagtcctttttagtggtcaaaatcatgcagccacatctaatgatgacctttgccagttatctatactaatcaggcttgactcactgtttactattgcctactcataatgcagctactcccaagactcaaactttcagaatgctttcgctggctataattacctgccttccctttatacctttgttgccttgaggatgctcttagctcctcagtgacctttttgctgcccttgtcctgctgtctaccctccccagcagcctgggaccatgcccatggccgttccttcctgcctttttgccctaccctgcaaacttgatctttgctacttttcttcttcctttctgtttttggaaaagacsatttatatattttctttggagaatgtctattctgatcctttgctcatttaaaagttggattggcttttt

SEQ ID NO: 235770 - DNA, 647 bp, Homo sapiens
agtgacctttttgctgcccttgtcctgctgtctaccctccccagcagcctgggaccatgcccatggccgttccttcctgcctttttgccctaccctgcaaacttgatctttgctacttttcttcttcctttctgtttttggaaaagaccatttatatattttctttggagaatgtctattctgatcctttgctcatttaaaagttggattggctttttactattgagttccctcctttctaatagttttattgagatgtagttcacataccatacaattcactaatttaaaatgtataatttagtgatttttaagatattacagatctgtactaccagcaccacagtcaattttagaacattttcatcacattaaaaagaaacactaggctgggcgcggtggctcactgctgtaatcccagcattttgggaggccaaggcgggtrgatcacttgaggtcaggagttcaagactagcctggccatcatggtgaaaccccatctctactaaaaatacaaaattagctgggcatgatggcacacacctgtaatccttaccccctgcgtcttcccagacctgaacagccactaatctacttgctgtctctagatttgcctattcgggacatttcatatttatggaattata

SEQ ID NO: 235771 - DNA, 371 bp, Homo sapiens
tcagggccatcaataaccttctaaaggcctccagtgtcccacttgttctctgatccccctcatcccttaaacttttgccctatcaattttcttgaaatggttatcctcccactcaaaaacatgaaaagtttctgtacctactatattagaaccaaaattcttagtatgatattcaaggctgtttttgaacaattccctttaatcaccctgggcttcaacccaactgtagtacccaccattcccttaaccctcactgcagtttcccacccmgttcacaagtcactctgtgaagtggatgttaccagtcccacctgctttgtattagagctgcttgtcctgtccaattttcatccctacattgtcattgtcag

SEQ ID NO: 235772 - DNA, 550 bp, Homo sapiens
aggtacataattggctctaaataaaaagtaagccactgtcaaaatgattaaataaattagactattggaccaaaggggtaaaggagatgaaaaggttttcgctgataggacacagtctttagagttggttgtgtgaatgtgggggttaaagaacagttaccagtgcctcagtgctttgttaagatttgggttttctgtatctatacactctcttaccagttcttggtcttgcctttcccccagtcatgtttggaggaaaatgtggtaaaatggaaatctgtcaactgcttctgggttggaaggcaacatacttgatgaygataaaggaattgggaatgcctaatggtgacattggggctcaccatttagtgggttttattcaccaatgctgtcttcatttctttgctagtttggttgataccacgctctttctgtattaagctgtaatctattgattcatacgtttaacatttttgaggccagatgtacagcagagaactccgtatgttgcggggatttcagaagatgtggtgtgcagcacatagtagat

SEQ ID NO: 235773 - DNA, 299 bp, Homo sapiens
caagaggagactggatggaggtttttactctttgatggaatctcgcatagatgttccttaaagagtggggaaaagaggacagcaccatttatggaatatctgctccgctgctgcatgccggttrcgtcctcactgttgttttatttattcctttaaacccttgtaaggctccatagatgaagtgaggataaatagcaggaaactgacatagctggctgaagcccatgtccctgtcctctccactgtgtttctaaaactttctgagggatgtagaggtatgtgttatcatgggcttttag

SEQ ID NO: 235774 - DNA, 299 bp, Homo sapiens
caagaggagactggatggaggtttttactctttgatggaatctcgcatagatgttccttaaagagtggggaaaagaggacagcaccatttatggaatatctgctccgctgctgcatgccggttacgtcctcactgytgttttatttattcctttaaacccttgtaaggctccatagatgaagtgaggataaatagcaggaaactgacatagctggctgaagcccatgtccctgtcctctccactgtgtttctaaaactttctgagggatgtagaggtatgtgttatcatgggcttttag

SEQ ID NO: 235775 - DNA, 299 bp, Homo sapiens
caagaggagactggatggaggtttttactctttgatggaatctcgcatagatgttccttaaagagtggggaaaagaggacagcaccatttatggaatatctgctccgctgctgcatgccggttacgtcctcactgttgttttatttattcctttaaacccttgtaaggctccatagatgaagtgaggataaatagcaggaaactgacatagctggctgaagcccatgtccctgtcctctccactrtgtttctaaaactttctgagggatgtagaggtatgtgttatcatgggcttttag

SEQ ID NO: 235776 - DNA, 539 bp, Homo sapiens
ggaaccagttaccctcattttctagattaaactgaggctcagaggggtagggtgaggagtctcgcaggtctgggaaggggcaggcatgtggcctgaatgcatttcttcactcagtctcatgagaacatgcaactttcgagtgtttccaggcctcttcttttccttcaccttctagctcagatagaaagcacagaggcctcggctggggaacatctggaggtgttacagttgttaggatgggctgctactttcaccacagttgtggttgctgctgtgataaggactggacctgcagctggcctgtccttggggtttcaaccaaaaaaagtccctttttaattcacttttgacgaagagatagggaatatgttgtcagtaatrtcactatcattatgaaagtgatatctctgttaatagtagctactattaggaatagctacttatgtgccaggtgctttgttaggctttttaatattgaaataatattttattattttatttattatttacaactactctagatgaggatgttattatta

SEQ ID NO: 235777 - DNA, 608 bp, Homo sapiens
acagcaatcctagaaaccatggtgatgggtaccattaactctgatcaatagatggaaaaccttccagaggcacacgccaatccagatccagttaaagtgcaagcaaacggcaaatcaatagtgctgcagaagtgcagagggacagacaaacggctcacagggtggcaggagtggcccagaatttgaatgtgcttatcaatgtggctgagaggctgaaactgacaaagaagagatagatggaaagaaaatgttgagaaatggcatttttgcaggaggctgagtgcaaatgcmaatcgtgctttgtctcctaatctgtgacaggggggtccatcaaagacaaagtcaaagaagcaaacgaagatcaactccaactctcagctcctacctccactaaaaccaaggcccaagaggactgagggtagaacggaaattcagagatcaagtaccaagttgacgaggatctcagaatcttcatgagcaagtccgaggtgcttttcatatgagtcactaattcctcagcaacagactcagagctgctgcactctgacctgcactctggttgacctgatgtattacacctctttctaaaataccagagcatgtttgga

SEQ ID NO: 235778 - DNA, 608 bp, Homo sapiens
acagcaatcctagaaaccatggtgatgggtaccattaactctgatcaatagatggaaaaccttccagaggcacacgccaatccagatccagttaaagtgcaagcaaacggcaaatcaatagtgctgcagaagtgcagagggacagacaaacggctcacagggtggcaggagtggcccagaatttgaatgtgcttatcaatgtggctgagaggctgaaactgacaaagaagagatagatggaaagaaaatgttgagaaatggcatttttgcaggaggctgagtgcaaatgcaaatcrtgctttgtctcctaatctgtgacaggggggtccatcaaagacaaagtcaaagaagcaaacgaagatcaactccaactctcagctcctacctccactaaaaccaaggcccaagaggactgagggtagaacggaaattcagagatcaagtaccaagttgacgaggatctcagaatcttcatgagcaagtccgaggtgcttttcatatgagtcactaattcctcagcaacagactcagagctgctgcactctgacctgcactctggttgacctgatgtattacacctctttctaaaataccagagcatgtttgga

SEQ ID NO: 235779 - DNA, 514 bp, Homo sapiens
gattccttaatccttccactgaatgcatgcatctccacatcttgactttttccctactctccttcctctcctcccccatttacagcactacgggtttacttttttttttttttttttttagacaaagtctccctctgtcactccaggctggagtgcagtagtgtgakctcagctcagtacaacctccacctcccggttcaagcgattttcatgcctcagcctccccagtagctggaattacatatgcacctccaaacctggaatttttgtatttttagtagagatggtggtttgccatgttggccacgctggtctcaaactcctggcctcatgtgatctgtctgcctcggcctcctaaagtgctgggattacaggtgtgagccactgcgcccagcccagttttgctttgagataaattatccattataccagggcttactatagctcactccttagattcatgaatttagcataaatagtgtcttagcttttactgactgtttcacctgtgttt

SEQ ID NO: 235780 - DNA, 445 bp, Homo sapiens
aatggtcagaaatcgaacatcttatccatcctgtgtgagctcatgttaatcgcttatgttagrtctctctggtaattgttccttctctcataattttatttgtacacctgtcatggagtttcattctacatatgtacagcttagtgttcagtccagggttcaagacaaaaccttatgcccatttctgaacctatctcactcccttcttcctgatactgtaccttgaatattcaagctgccttggcctccctgaactctgatctctgtctccttaactcagttaggaagatgccacaatcttcctgggtttcccctccctgcatcacactccagaaagttcctccaggcagaaaactgtgctaatcttaagtctcaccttgtttgtttcctttctctgagggctcatggtcttgggctacctgttgtgcaatgtctgaaacttgtt

SEQ ID NO: 235781 - DNA, 576 bp, Homo sapiens
tgccaccacgtccagctaatttttgtattttaataaggacagggtttcaccaggttggccaggctggtctcgaactcctgaactcaggtgatccacccacctcagcctcccaaagtgctgggatcacaggtgtgagccactgtgcctggcctatcaaagaatcttaaaaggctgtgcagatggcaatctctaggcaaggctcctgtcctgacttcctctcatctgcagggctggcacagaaactccacawgaattagagactctaggtgtgttagaaatcccacagtgctgatggctccctaggagctcaatgccctgaaggactacttcttcaggcctttaaggattttgaccttggggaaataaggtcttaagccaagagtcacaaactcatatgccttctggtagttatcgtaggtaatattatcaggagaggggaagtctgtgcaaactagagtgcatgcccaacctaaagacattcaaattcacaaattaaaaacaaagagatcactgtgctggcctaactaaatacatctgcatccaaccactttgcaatttatgccaaactactcactc

SEQ ID NO: 235782 - DNA, 576 bp, Homo sapiens
tgccaccacgtccagctaatttttgtattttaataaggacagggtttcaccaggttggccaggctggtctcgaactcctgaactcaggtgatccacccacctcagcctcccaaagtgctgggatcacaggtgtgagccactgtgcctggcctatcaaagaatcttaaaaggctgtgcagatggcaatctctaggcaaggctcctgtcctgacttcctctcatctgcagggctggcacagaaactccacatgaattagagactctaggtgtgttagaaatcccacagtgctgatggctccctaggagctcaatgccctgaaggactacttcttcaggcctttaaggattttgaccttggggaaataaggtcttaagccaagagtcacaaactcatatgccttctggtagttatcgtaggtaatattatcaggagaggggaagtctgtgcaaactagagtgcatgcccaacctaaagacattcaaattcacaaattaaaaacaaasagatcactgtgctggcctaactaaatacatctgcatccaaccactttgcaatttatgccaaactactcactc

SEQ ID NO: 235783 - DNA, 574 bp, Homo sapiens
ttataagctttattctggtgcatagacaaacactgccatgctcagactgtatcttttgaaggttatagcatttagaccccaaagctcttaattttattggaaatgggagaaaaaatgtcatacaaatatttcattttgaagcataatgatcccaacacacacctcttactgcaataattaccacccactcagtttcaccatagtctgaaaatcagccacaggagggcccagctccctgccttgtctgtttttggggtccccagrcagcagaagtgtgctttttcttcaccctgatggtttatagactatcatctttatataacatatgaactggagccagagaggggattttggcttcaagtttagtattttagtgtgttcagtgtaaatacagaagcgtccttccaaatataatggtgccattgagacatattcctagcccagagttccctagtgggcaggctggcagaagtacctgatcatccaagcctagattgagtaaatgttgcctggaaggaaaagaaggaagagaaaccaaaaaccagagaagcttacagaatttggtaccaagaga

SEQ ID NO: 235784 - DNA, 431 bp, Homo sapiens
tcctgacccatactgctgggaggtagagaaagaactctaggattggctggatagagctttagcttttcagtcaggagccaagggttctaggcctgactgtgagtccttaagaagtcatttacctctctttgtctcagaatcccccagaaacatagcaaccactccttcaaatggattttctcaaagtggaacttttttactttttaaaaacagataatatgtttacattttggatggtaagtctttaatgaagagatcttagtggtagcagtatgaaaggaacaccatgtgacaaagagaagataattcttaaacttttattacttgcttgccctcccttaggaaacaagggctcaggcccttctactattmccacactctttttcaacctttctccctctgttagaatctggtcagctctctaatgtcta

SEQ ID NO: 235785 - DNA, 566 bp, Homo sapiens
gagccctgccctcatggagctgacatttcaattggaaagacaataagtaaataaattataaggtatgcaagaaagtwataaacgctatgaaaatacgtaaagctgcataaagggaattaaaagtacccagtgaggttctctccctgttttacagatttaaaaacctgagttttgagaagagaaatgaacttgcctggtatagtaacccagtctgtgggactttttctattttgccatactgtcttcagggacacacaactaaggagttgggagccagagggttgacctgctggcatgtttgcagtggggagtgtcctgtattaggcacaagatcaggaagaaggttctgatagggcctaaaaaacccaccagactaacagctttacttgctggccagggcttcaaaatgagacttccagtaccatcctagagaggccaaaacacaatggggaaaagcgaagcatgctagagagagctaggattcttatatccttagagtgcagttccacctgcctaagtactgtgtgttgacaggttcatctctattcctttctgggccacagacc

SEQ ID NO: 235786 - DNA, 566 bp, Homo sapiens
gagccctgccctcatggagctgacatttcaattggaaagacaataagtaaataaattataaggtatgcaagaaagttataaacgctatgaaaatacgtaaagctgcataaagggaattaaaagtacccagtgaggttctctccctgttttacagatttaaaaacctgagttttgagaagagaaatgaacttgcctggtatagtaacccagtctgtgggactttttctattttgccatactgtcttcagggacacacaactaaggagttgggagccagagggttgacctgctggcatgtttgcagtggggagtgtcctgtattaggcacaagatcaggaagaaggttctgataggrcctaaaaaacccaccagactaacagctttacttgctggccagggcttcaaaatgagacttccagtaccatcctagagaggccaaaacacaatggggaaaagcgaagcatgctagagagagctaggattcttatatccttagagtgcagttccacctgcctaagtactgtgtgttgacaggttcatctctattcctttctgggccacagacc

SEQ ID NO: 235787 - DNA, 577 bp, Homo sapiens
ttccattggtggtgcaaccatttcttgacaaactagggtccaagaaagtattttcctggggaagatgagatttctcaaagaaggcacgcactttctaacctaagcttatttcagtaatcaatgtaacaagctggtcttgatgattgcagcagtaccaatactgtgggagtgtaccagttctagaacagctacaacattggaattgaacgcactagaattggatacaggacctgtttttgaggagctaacacccaaaggctgaacagcactcgtagcaccgtcctttctgtgcacatatkgtagtcctcagtttgcaacagaaataaagctgttagcaaattatgtgttctatttatgcaaataaaatcttgtggtatgctagaaagagcactggcctggagaccttagttttctcatatgttaaaaacccctaacacaggcctggttcatagtaggcacccaataaatagtagttttcttcctttgggggcctccgattcagtgtgcttcttcaggtaagtcacttccctggaactcctccttggaatgagagttgtactgttgtgatttttaacag

SEQ ID NO: 235788 - DNA, 518 bp, Homo sapiens
ttgaataaatgtagactaattaataatgtgaaacatcttttatttgtatttgatacagatttatttttcaacttatttaaataaattctattataattgtttccaaattccttttccatttataaataacttctcatatcggttcaaaataaatcaatttgatttaattggctatataacacactaagacactaatattgamtctttgaacaataatcataatatccagaaaaactattttccaatataaataccttattatattctattaaaatattttttcttctgttattattcaattctcatctcagtaagagaatctgacagcataggtcagaaacaattactcaagaaacctgacttcatttttttttaattatgaaagtgaaaaataaaaacacaaagaaaaattatcatttgggcacagatgtctcagtccttttttcttatatgattacagaggcagagaaaaaaaagatacgacacaggaatttttaaataattgctatgtagatttt

SEQ ID NO: 235789 - DNA, 518 bp, Homo sapiens
ttgaataaatgtagactaattaataatgtgaaacatcttttatttgtatttgatacagatttatttttcaacttatttaaataaattctattataattgtttccaaattccttttccatttataaataacttctcatatcggttcaaaataaatcaatttgatttaattggctatataacacactaagacactaatattgaatctttgaacaataatcataatatccagaaaaactattttccaatataaataccttattatattctattaaaatattttttcttctgttattattcaattctcatctcagtragagaatctgacagcataggtcagaaacaattactcaagaaacctgacttcatttttttttaattatgaaagtgaaaaataaaaacacaaagaaaaattatcatttgggcacagatgtctcagtccttttttcttatatgattacagaggcagagaaaaaaaagatacgacacaggaatttttaaataattgctatgtagatttt

SEQ ID NO: 235790 - DNA, 495 bp, Homo sapiens
caataatatatatatataatatatatagagagagacctatatccaagttatacaaagagatgcattcaaaaacagtatcaataagtaaaactggagttaaaaaaatatgtacaagtaacccacaaggatatggaaaaaagaagacattgaaagaaaaacaaatagaaaaaaaatactgaagtggtagactaaagctgtagcatatcagtaattaaaatttaaaaagaatatcacacctcatataaaaattaacacaaaacggatcaccaamttatatgtaaaatgtaaaactgtaaaactcagaaaataggtacaagagaatcgctgggctctagggctaggcgaataattcttagctgtgacactgaaagcataatccacgtttttttaaatagactcaattcaaattaaaaacctttgctctgtgaaagagtctgctaaagggatgaagacatgaggtatatggagtacaaaatatttgtaaaccatatatcc

SEQ ID NO: 235791 - DNA, 588 bp, Homo sapiens
ctctttgagaaaagttgttctgaaagcagatgggaataatcgttaaatgtgaagccctcaattgtatcctacccactatttcctcttttctccttcttttagtgacagctggcactgagacaagctcatcaaataataaacatatttgtacctaaagttacatacaaatgttggactatatggtataaacatttaataatgatatctttttgtctttgtacagcttgcaaatggatcttacagacgttgtcacagagacaagaaaagtaagrtgctgtcttctccaatcttttaaaaaaaaatttaggtgacagtaactactatgtactggtgtaattaccttagaagaaaacaacaaattaaatatcagtcagagtagttattagtcccaggagcaaagctgctcagttcacacaattctgaaagggtagaggggaaggatgcagagacccacaggggaacatatagttcccctgcattcccatagcatttccagctgcattcctgggtacgtgggagatacagcatgatatgtgttcttagttgaaataaaccaggtaataccccaggcaccccataacctaaagt

SEQ ID NO: 235792 - DNA, 243 bp, Homo sapiens
cagttacaatctcagaagacttttccaactaatggggaaagacttccatccatccagtgaaaatgtccataaataccaacaaaatccctgaaattcctggtggctctcagcaaagtacattcaatttacctgtcttctgygagtccagagcctctgggttgtaccccttttattattagcgcatgtcctgattgagtgtctagtaaggcttggtcctttcctagcctcccaaaagtaagtcaa

SEQ ID NO: 235793 - DNA, 533 bp, Homo sapiens
gtatacttcaaatagttaatatggtaaatttaatgttattatcttttatcacaatttttaaatggcccaaataagtacaaatcaacataacattatttatttgctcactagataggaaatcatattattaaatttctttataaaaagctyaaatgtgaaatctttttgtccaaaaaatgtatgtccaaaaaatagatcaaagtagctctggaaacccttcagacattaagaataagatagctgggaaagaaatagtgaaggccagctctgattgccagacagaactgtgggcagcctgaggagacctatcactgacatgtcctcaataactccaccacaggatagatattcagcaaccatttggctttgctttcaattaaaaagattaccttttcatttaacttaaaaagttgaaattccatgggatcacttgctgattgccatgacttaaaaaatagacatatttaagttttaacttggcttttaattttataggaagagtgtgaaagtgtaaaggaggagagaaagtgtca

SEQ ID NO: 235794 - DNA, 608 bp, Homo sapiens
cttgtatactgaatgactaactaaagataggcatattcatatacttagaagtaatgaaatgctcttcaaaaacatctcaacagatgcgaataaaatgctggaagttctgatgctatgaaaaaggaaattcaacttgcccaggtgtaacttattccaacaaatcaagtttctgaaggtttaattagctttcaaagctgtctgaaggcctggcaccatggctcacgcctgtaatcccagcactttgggaggctgaggtgggggtggctaggtcaggctgggggaaatcacttgaggttaggagtttgaaaccagcctggccaacatggtgaaaccccgtctctactagaaatacaaaaattatccatgcatggtggcgggtgcctataatcccacctactcaggagggtgaggcrggagaatcgcttgaacccaggaggtggaggttgcagtgagctgagcttgccccactgcactccagcctgagtgacagagtgagactctgtatacccccgccaaaaaaaaaagctttttgagcactcatgagttcccatgacacaccatgaaattatcacattcaaaaaaggagaaaagaagaagaaagtggattc

SEQ ID NO: 235795 - DNA, 217 bp, Homo sapiens
gggttattgatatatagaccgaaattgaaactgtaagcatgaattaggtaactgggagaagataatgggcaacggaccacacatcctttatggcaaaagtttttttttgtttgtttgtttctggaattgataatgccccattgttaatcccactgtgcagcaagcttttagaaagtctrtggcagtacttctcagattttatgtcatgcatgcctgg

SEQ ID NO: 235796 - DNA, 561 bp, Homo sapiens
aatactgtagatctgtgctgcccagtacagcaaaccactagtcatatgtggctatttaagttgaaatgccgttttttaaaattaaaaatttagaccctctattgcactagctacatttcatgcccacactagccatacaaatctagtggctactatacaggacaacagaatttatacaatatttatatcatcacaaagagttatattaaatagtgctatgattgtgtaaactttattttagacaaagccctacttgttgactgcctaatagggagagctgggattaaccaattaactaaaatatttatgaaaaactttaagacagagtaggtgctagatttctaggagaaaatgagaaaggtaagttttctgctctttctgtgttyacaattctcaaacttaagtttttctaaacatctgagtcttttcggaatgtttcttccttagaattcattatgacacattaattttaatcttgttaaactgtgggtttgtggataggattctacatagccacattagtctgttaagggtattcctctaaacataaaaaaccacaag

SEQ ID NO: 235797 - DNA, 561 bp, Homo sapiens
aatactgtagatctgtgctgcccagtacagcaaaccactagtcatatgtggctatttaagttgaaatgccgttttttaaaattaaaaatttagaccctctattgcactagctacatttcatgcccacactagccatacaaatctagtggctactatacaggacaacagaatttatacaatatttatatcatcacaaagagttatattaaatagtgctatgattgtgtaaactttattttagacaaagccctacttgttgactgcctaatagggagagctgggattaaccaattaactaaaatatttatgaaaaactttaagacagagtaggtgctagatttctaggagaaaatgagaaaggtaagttttctgctctttctgtgttcacaattctcaaacttaagtttttctaaacatctgagtcttttyggaatgtttcttccttagaattcattatgacacattaattttaatcttgttaaactgtgggtttgtggataggattctacatagccacattagtctgttaagggtattcctctaaacataaaaaaccacaag

SEQ ID NO: 235798 - DNA, 561 bp, Homo sapiens
aatactgtagatctgtgctgcccagtacagcaaaccactagtcatatgtggctatttaagttgaaatgccgttttttaaaattaaaaatttagaccctctattgcactagctacatttcatgcccacactagccatacaaatctagtggctactatacaggacaacagaatttatacaatatttatatcatcacaaagagttatattaaatagtgctatgattgtgtaaactttattttagacaaagccctacttgttgactgcctaatagggagagctgggattaaccaattaactaaaatatttatgaaaaactttaagacagagtaggtgctagatttctaggagaaaatgagaaaggtaagttttctgctctttctgtgttcacaattctcaaacttaagtttttctaaacatctgagtcttttcggaatgtttctyccttagaattcattatgacacattaattttaatcttgttaaactgtgggtttgtggataggattctacatagccacattagtctgttaagggtattcctctaaacataaaaaaccacaag

SEQ ID NO: 235799 - DNA, 623 bp, Homo sapiens
tagtgagaacaatataaatgtttgttaaatacttttaaaaagttatatggaatagaaagaaatgaatcaattgagctgagttaaatagggaaagtatcatataagaggaaggaaatgatatgtactaaagaatagaaatttagagagtattccaagaaaggtaagaatgagaaaaatatttgggagtatggtaaagacattaatctgatgagaagtttcaaaaaggaacagagaaattacagtgtaaagatatttggaaagctagtagaaggttttcttttaaactaaagggttcagaaacagcatcagagacttcagaactaaagcagaaattcctccttcctatgagtcacacggatatctagctagctttttttagattcctttcagtttgagaagtccgcactttgtatagcaattkattctattgttaaacagctttaatatttagaaggtgtacttttatattgagccaacttcttttaatttctactaattggtcttatttctgatgttaggagtcatagagtatttttattttttctattactataacatttccactttgccaggactgctgcatgctaaaaactcttagttttgttcacttttcaccatatgac

SEQ ID NO: 235800 - DNA, 314 bp, Homo sapiens
taaatacatgcatagtaaaatttggctttttcccccctacttaaggatgttaaygattgggttgggccaccaaataataatggagtaattaaagaagttactattaatccagacactacttgtggcaatgactgggtctgtgaacatcgatggcgccaaataaggtgagaatatgtatttagacatgtcctctaatagtaaactttccactgcattttatttaaaacagttgaagtttaagaatatcaacgttttatatggtattgtgtttttaggaacatggttattttccgcaatgtagtggatggccagcc

SEQ ID NO: 235801 - DNA, 314 bp, Homo sapiens
taaatacatgcatagtaaaatttggctttttcccccctacttaaggatgttaatgattgggttgggccaccaaataataatggagtaattaaagaagttactattaatccagacactacttgtggcaatgactgggtctgtgaacatsgatggcgccaaataaggtgagaatatgtatttagacatgtcctctaatagtaaactttccactgcattttatttaaaacagttgaagtttaagaatatcaacgttttatatggtattgtgtttttaggaacatggttattttccgcaatgtagtggatggccagcc

SEQ ID NO: 235802 - DNA, 624 bp, Homo sapiens
gaagacttagctttccaaacagtctgtctcctgtctactcttttctctccttggcagtctaccaacaaggcaaaccaaatatttcattattcttctctattacatgaaaaatctgtacaagggaaagaaaaccaaattttacccttacattggtttcaaaacattcctttttccataggcaacgtttacatttttatgcctttttataatcttttatgacaaacacattttactgtttttacacacattttacacactttgcatgtaaatttatttttagttgtcttatttacatgttttaatggtaaatcttaactttgccattttagttaaaatggtaactttaatgtaaaacctggtaagttttttcaattatgtactagatgcagataaagtctgactttttccatcctagttaggggcatggttaatttcatatgtccccaggccttatcaagttgtaaagtaggcagtatacaaccttgaaacatttarcaaacctggtatctaacttatatgatttaaacctcctatttacgtgttgatgatatttgcattttccaatttgatctttaaaacaatttttatttcttagagatgaaagtcacataaactaaaaggcat

SEQ ID NO: 235803 - DNA, 526 bp, Homo sapiens
ttgaatgtcttgctattgaaggaaaggttgaggtgtaagagattgaggttgagtgtgagaagctctgtatataytgtatttttcttaaaaatatatatttaaactcacatttcttgtttttcaaatgttcactccaatgaaaattcttttacttttcctgttagaatttttatttccactctcacatatgcagtgtactattgttcagaaatattagtgatcctccttgcaaatgaatactcccatcctgctgattttcagaaggtccaagtgatttgctttggctgtgaaatgtaagcagaaagagtgttattttggggacttcccgattgcaaaacaacatagtatcgcaacttttgacatagcatttacgttgcattagtcattataagtaatctgagatgatgtaaaggttatatggaaatactacattttatataaaggactcgagtagttattgctttaagtatccatggtgggtcctggaaccaattcctcatggatatggaggcacaaggaaccactg

SEQ ID NO: 235804 - DNA, 534 bp, Homo sapiens
ttcactgagttccagagcccgagttagaggaatgagttctgctttttgggctgaagtgctctgagscaatggcttagcttcaacaacatcatctaagtttactactgcatatcctgcacacctttctctttgcgggttgatgaagctgcttctgtccatgtagaactcctaatctaccaatgcctatggctggtctcaaagatctggtctgctagaatagacatagtccaacacctctacacagttatgtttaacagggctgtctgatactgggagcaaagtggcaggatttaaagaattacagacttctatggttatacattgattttcacataacaagctttggtgtttagttaatgtagcatttgttagccaatggtgtcttttggtgttccttagagttacattagagtcagcttgggctgacataagtttttcttttaacttataagtcttgttgttgtagagacctctatttaaaaggctctcggtcaccccctttataactccattcaatgctttggctaacaccac

SEQ ID NO: 235805 - DNA, 409 bp, Homo sapiens
tttcttgctgaccatagactgcactccccttttcaaatagtgaatcctaggtagtgtacctgctgtctgcagatctgagctttctttttgggcactttatatccacagtcctccaggtgtcgaagcagggcacccgtcctttttgcacacctgactgccatggagtgtcctagcagaaggtcatctacatactggagcaggatgcaacctaggtctttagcaggaaacatttggaggtctccaaccgaggcctcccsaaagatggtgggggactttttgaacctttgggaaagtcgagtctaagtgtactgaatggtgacatctgactccggatcttcctactgaaaggcaaacagcttttggctctcaggaactagcctgatgtgaagaaggcatctttcaagtcctg

SEQ ID NO: 235806 - DNA, 592 bp, Homo sapiens
tgagcatccccagtgtccaatgcaaggaagtcaccatagaatatctcttgaggaatcatggaataaatgaataatcaaatggattctcaggcgaaaagtgaggttttattaatcaatcataacattcttacctcaacaggtcagagattgtcgtctgtctggtcttctcgatcttgcactggggaaggattatgtgcgttctaagattgccgaatatatgaaccatctcattgacattggtgttgcagggttcagaattgatgcttccaagcacatgtggcctggagacataaaggcaattttggacaaactgcataatctaaacagtaactggttcccggaaggtagtaaacctttcatttaccaggaggtacgtcaatacatataggcatataaaatatcatcctattcattagaaaattcacrgcagattcaattaaaaatgcaatttctgtaggataaagactgagtcatttccttaaaacagtgttctttaacctcctcttcttcacatacagcatatctaattctttatcacaacaggttttatggaggtacacagaatgtaggatactgataatagttatgtctt

SEQ ID NO: 235807 - DNA, 613 bp, Homo sapiens
ttaatgattgggttgggccaccaaatgataatggagtaactaaagaagttactattaatccagacactacttgtggcaatgactgggtctgtgaacatcgatggcgccaaataaggtgagaatatgtatttagacatgtcctctaatagtaaatttccgtagcactttatttaaaacagttgaagtttaagaatatcaacgttttatatggtattgtgtttttaggaacatggttaatttccgcaatgtagtggatggccagccttttacaaactggtatgataatgggagcaaccaagtggcttttgggagaggaaacagaggattcattgttttcaacaatgatgactggtaagtaaatatcaattaaaaataatattttgtaccagtatgttcttggkttattcttttttttttctgttcattgacatttatcatatctgaaaaatcatgtagtcagtggagcgagaagacaatagagatcaaaattgggtagaagcaaaaggatgatggctgttactccttcgttctcctgttttcataagtgctttctgttgtaagcagaatcctttctgtgcacccttgcaatatcttatgcatatatagaatgcac

SEQ ID NO: 235808 - DNA, 534 bp, Homo sapiens
tatgtggatgctgtaattaatcatatgtstggtaatgctgtgagtgcaggaacaagcagtacctgtggaagttacttcaaccctggaagtagggactttccagcagtcccatattctggatgggattttaatgatggtaaatgtaaaactggaagtggagatatcgagaactacaatgatgctactcaggtaaatttttttatgagagtcatctgaataaggggtgatatatgccttttcttgtagacatgtagctaattgaacttcattttaaatacgaatttagatctcttagggacacaggttaacaggtttgactactttaagaaactcaaatccatatttaaaaacttaaatatagatttaagatttttaatcaatacacatttgcccacttttaaaaagctcccaaccaattaaaaagctcgtcgactttatttcctaaattctctattttctattagaaaatatttccaagatacatctatagtagaatgtgagcatccccagcgcccaatgcaaggaagtcactat

SEQ ID NO: 235809 - DNA, 534 bp, Homo sapiens
tatgtggatgctgtaattaatcatatgtctggtaatgctgtgagtgcaggaacaagcagtacctgtggaagttacttcaaccctggaagtagggactttccagcagtcccatattctggatgggattttaatgatggtaaatgtaaaactggaagtggagatatcgagaactacaatgatgctactcaggtaaatttttttatgagagtcatctgaataaggrgtgatatatgccttttcttgtagacatgtagctaattgaacttcattttaaatacgaatttagatctcttagggacacaggttaacaggtttgactactttaagaaactcaaatccatatttaaaaacttaaatatagatttaagatttttaatcaatacacatttgcccacttttaaaaagctcccaaccaattaaaaagctcgtcgactttatttcctaaattctctattttctattagaaaatatttccaagatacatctatagtagaatgtgagcatccccagcgcccaatgcaaggaagtcactat

SEQ ID NO: 235810 - DNA, 534 bp, Homo sapiens
tatgtggatgctgtaattaatcatatgtctggtaatgctgtgagtgcaggaacaagcagtacctgtggaagttacttcaaccctggaagtagggactttccagcagtcccatattctggatgggattttaatgatggtaaatgtaaaactggaagtggagatatcgagaactacaatgatgctactcaggtaaatttttttatgagagtcatctgaataaggggtgatatatgccttttcttgtagacatgtagctaattgaacttcattttaaatacgaatttagatctcttagggacacaggttaacargtttgactactttaagaaactcaaatccatatttaaaaacttaaatatagatttaagatttttaatcaatacacatttgcccacttttaaaaagctcccaaccaattaaaaagctcgtcgactttatttcctaaattctctattttctattagaaaatatttccaagatacatctatagtagaatgtgagcatccccagcgcccaatgcaaggaagtcactat

SEQ ID NO: 235811 - DNA, 534 bp, Homo sapiens
tatgtggatgctgtaattaatcatatgtctggtaatgctgtgagtgcaggaacaagcagtacctgtggaagttacttcaaccctggaagtagggactttccagcagtcccatattctggatgggattttaatgatggtaaatgtaaaactggaagtggagatatcgagaactacaatgatgctactcaggtaaatttttttatgagagtcatctgaataaggggtgatatatgccttttcttgtagacatgtagctaattgaacttcattttaaatacgaatttagatctcttagggacacaggttaacaggtttgactactttaagaaactcaaatccatatttraaaacttaaatatagatttaagatttttaatcaatacacatttgcccacttttaaaaagctcccaaccaattaaaaagctcgtcgactttatttcctaaattctctattttctattagaaaatatttccaagatacatctatagtagaatgtgagcatccccagcgcccaatgcaaggaagtcactat

SEQ ID NO: 235812 - DNA, 514 bp, Homo sapiens
atgtaggatcctttaatttatatttgtatttcaagaaagtgtaatctcattttaatttaggacaaaaacctttagctctcttaactcttagtcagcaccatctcactcctctgtaatttcagattcttgccctgcccagcatactgtgccggaaagagcacaggtcacctttgttctttatggcgctaccactgccagtagctcgaccttgagcaaattactcagcatcacaaatcttgtctccttcatctataaagaaggtaggattggggttgatctcaaagatcacttttgctctaaattaatttgaccaaaacaagaagaaaataacgtcttaccctcccatggcttggcacttacatttcctgctgcagaaaaagtgtgatttagggggtaaagagcatgatttaatctttacctgcatgctaattcttctaccttgagcaaatgaccttatctccctaagcctgcttccttgtctgtaaaatacacrtaatagccatacctacttcat

SEQ ID NO: 235813 - DNA, 483 bp, Homo sapiens
gaattcctgtaactctagcccaaagctcatttttaacctaaaaaatgatctcgacactaattagaggctggaactatttctaggagtcagagtgtccctaccctgggtaaagcaccattaacatttcaacaggccacccaaatcagaaaactaggaagtattttagaccccttctcctcctcacagtcccctgtccctgacacatccaatcactaaggcatctgattctaccttttgaatctgagtgactttagaacaagtgtcctggagtcaaagagactccaggttcaaatttgaacctccaagagaagttcaaatcctcctgccatcacttatgaattgtgagaccttaagcaagtcattctccctcctatgcctcatttctctcaactccattgcagagttactatacctaccttaagggagattaaataatgatgaaatgagamaatgtatgtatcaaatgcagcgtttgttgtatat

SEQ ID NO: 235814 - DNA, 486 bp, Homo sapiens
tgatgaaagttgggggaagagcattggagagtacatgtgcaacatggtaaggatatggcctggaaatggcatatgtcatttgtgaagatttagtcacgtagtcacatrttggtacaatggagtttggaaatacagcttttcaatgggtggccacattcccagctgctagcctaattctgtggaaggagagtatggattttggtgacacttcgtctccatccactctcctcttggattatctatcaccactctttgctggtttccctttcaccttcttgaccatttttttccagtctcgcttgctgactccgaactctacttaacctctaaatactttttagggatcagcgtcaaaggggccagtttctgggtctctcctcttctctagcaatactctcccctgattatcccaactcattctgtgaaaatgccaaatcctaaattcctttttctagctttattccttctactatactcaaaatttct

SEQ ID NO: 235815 - DNA, 594 bp, Homo sapiens
taagagggagaggtgagaccagagtgaytgggaaagtgagggagtggggaatagattatatagaatcttagaagccctactaatgctctggattttaccctgagggatatgccagtgaaaggtttaagcagaggaatgacatgatctgctttatgtttttgaaaggctcactttggtcactatacaggggccaaggtagaggtagcagttaaatagattttgcaataggtcaaaaaagatcatggtggctcagacagagatggaggtgacggtgacaaaggtgtcaatggcaggcgatttttcaaaggcagaatcatttagcagctgggctactttgactgagatattttgcctctcctggctcaggtccctcatcagtaacatgaaggtaacaataccaaactcataaaatcacggtatggattaaatgagataatttatatgaaggctatacctgttgttttcctttgtattaaagacaaagtctgcaaccttatgcaaaacttaattacatatatgctcaaagaccaagatgtaagaacatcttgtcttcagagtagcagaaacaattttgtgtatagcaagattatttac

SEQ ID NO: 235816 - DNA, 594 bp, Homo sapiens
taagagggagaggtgagaccagagtgattgggaaagtgagggagtggggaatagattatatagaatcttagaagccctactaatgctctggattttaccctgagggatatgccagtgaaaggtttaagcagaggaatgacatgatctgctttatgtttttgaaaggctcactttggtcactatacaggggccaaggtagaggtagcagttaaatagattttgcaataggtcaaaaaagatcawggtggctcagacagagatggaggtgacggtgacaaaggtgtcaatggcaggcgatttttcaaaggcagaatcatttagcagctgggctactttgactgagatattttgcctctcctggctcaggtccctcatcagtaacatgaaggtaacaataccaaactcataaaatcacggtatggattaaatgagataatttatatgaaggctatacctgttgttttcctttgtattaaagacaaagtctgcaaccttatgcaaaacttaattacatatatgctcaaagaccaagatgtaagaacatcttgtcttcagagtagcagaaacaattttgtgtatagcaagattatttac

SEQ ID NO: 235817 - DNA, 505 bp, Homo sapiens
taaataatttttaaacttttacaaattaactataactagataaacaatgcaatagaaaaaagaaggaaatacttgagtggacacttcaggaaaaggatrtctgcatattttcaatcttatttgtagtcagagaaatgcaaattaaaacctcaatgagatactactactatttaccaaggagaataactaaaataaagaagagagataatcctaactgctgacatggatatgtagcaataggatgtctcttatattgctggtgggagttaaattgggacaatgatttaggaaaactgcttacattatctactaaagttgaacatgtacatacctatgacacagatattgcactccaaagtgtatattcaacagaaaggggatcatggtaaccaaaaatatttccaagaatgcccagagcaacatgatttataaaaatgaaaaactagaaacaatatattgtgataaattcataaagtggaatactatgaagcagtaatactgaatg

SEQ ID NO: 235818 - DNA, 546 bp, Homo sapiens
cctcttcctaatgatgctgagcaggactgacaagccatgttgtctccacaagggcagagcccagacgcctgagtcacccctgcctgatcaaccttacaggctgtacacacagtgacacaaccagggagaagtaggaaaatgggcagttccctttaccttaattccgtcatgtttttacagtatgttcttgctgatcaagccaattcaagcctgacaaaaaaggagaggacctgatcaagagtttgtctagattttgttcactcayggtcatcaaaaaggcctccttgggccagcactgcctccacattcacaggtccaggccatggccccgtgaggtggtggaaaactgggctcacagtcagcatgaaccccacaatcagcccagagtgcatgatgtgcctggaaatccattgaagaaaatccacttgttgaccccacaataactaatgaagctgaactgcagaaaggtaacatcagtgtctaaacccagaaacagattttcttagcctgccagcagaatggaaggaactgataggagaaatttgg

SEQ ID NO: 235819 - DNA, 546 bp, Homo sapiens
cctcttcctaatgatgctgagcaggactgacaagccatgttgtctccacaagggcagagcccagacgcctgagtcacccctgcctgatcaaccttacaggctgtacacacagtgacacaaccagggagaagtaggaaaatgggcagttccctttaccttaattccgtcatgtttttacagtatgttcttgctgatcaagccaattcaagcctgacaaaaaaggagaggacctgatcaagagtttgtctagattttgttcactcacggtcatcmaaaaggcctccttgggccagcactgcctccacattcacaggtccaggccatggccccgtgaggtggtggaaaactgggctcacagtcagcatgaaccccacaatcagcccagagtgcatgatgtgcctggaaatccattgaagaaaatccacttgttgaccccacaataactaatgaagctgaactgcagaaaggtaacatcagtgtctaaacccagaaacagattttcttagcctgccagcagaatggaaggaactgataggagaaatttgg

SEQ ID NO: 235820 - DNA, 546 bp, Homo sapiens
cctcttcctaatgatgctgagcaggactgacaagccatgttgtctccacaagggcagagcccagacgcctgagtcacccctgcctgatcaaccttacaggctgtacacacagtgacacaaccagggagaagtaggaaaatgggcagttccctttaccttaattccgtcatgtttttacagtatgttcttgctgatcaagccaattcaagcctgacaaaaaaggagaggacctgatcaagagtttgtctagattttgttcactcacggtcatcaaaaaggcctccttgggccagcactgcctccacattcacaggtccaggccatggccccgtgaggtggtggaaaactgggctcacagtcagcatgaaccccacaatcagcccagagtgcatgatgtgcctggaaatccattgaagaaaatccacttgttgaccccacaataactaatgaagctgaactgcagaaaggtaacatcagtgtctaaacccagaaacarattttcttagcctgccagcagaatggaaggaactgataggagaaatttgg

SEQ ID NO: 235821 - DNA, 433 bp, Homo sapiens
actaattggatttagcggtaagaagtgggatcagatagagtggattgcaaagagatgccagccaggctgcagattgttcttcagatctggagagaagaaattcagctgagtagcaggtccctctaggcttcatataaaaggacaataaagaattgttctgaagggcaccagaaatctaaagtctgagggcgaggctgtgttgggaacctgaactcattggaatcaagagaagtgaatcagccataggttggcttgtttcactcactgatgatcttgctgaggtggctcatttgtattgactcaactaaccctgtgacccagatccagggtactttgagagtaatatkaaagtaaccctactgagattgacttcctgtgtgtttctgaatgaagatagttttgactcaaaaaggtcattataaaacagacatgg

SEQ ID NO: 235822 - DNA, 329 bp, Homo sapiens
agtttagtgtcttaattcaggttctcaaggcaagcagatttctcttttccattcaattctacctagtaagggctggaactamtatcaaactgaagtttcctatgcattcatttgagatgactctgcagatgataatgacccaggttcagtcaagcaggaagggagctgaaagatatttcagacttctgtggataataaatcaagtctaggagacaatattttacatttacattcacttattccatccttacagtaaacacaaggtttctaggtcagcagcagactgatgatctatgtctcagtgccagttttccatgtccatttcttct

SEQ ID NO: 235823 - DNA, 560 bp, Homo sapiens
ctagtaagcaggcataatgtgccagtaagaaggcaacctggraaacatagccaggaactgggacaactgggaagctgatagaaagagttgtttaatgtgtaagctgtcgtctgcacacacagaagcatttccatggctatgaacaaagggtaactgcggggtggtttattaattgaaaataaatgtccttttctttgtgaaatggctagatattgaaaaaccaaacacatgctatgaggacgtgcacagtcagcagagaaacatcagcttggaaaaatctgccaacaaggagaaagtttagaatggattggtttcctgtctctgcacaacaaataaaccaccaagggattcccaaggatctaaataatgaaccaatctctctctctccttttccctttccatctccctctccctcactcccttctcttacgtgcatcggagaatggtgagcaagtacctagggaactacagtattttgggtcctccttctgacaaggcaactaacacctgaaaaaaaaaaatgaatcccatacatttcatactaaagaactgggggctta

SEQ ID NO: 235824 - DNA, 634 bp, Homo sapiens
tcttatagatgtccctgacaggtgagttgaaaagacatagagaacaaactatagagaaaatttactccaaaacaattatttaattctatcatgcccatgtcacactgatacagctggttaaaaaacacaaatgttcaatttaaaaaaatagcaagttacacttaagaaaaaatttgatcaaatagcgtacttaaaatattttcagatatgtaatattttaaaaatgtttttgttgggaagaacccattggctggggtggttgtcctggcatcacatgtagacacctgtcaattctgtcatagaggtaaaagagaagctggtttcttagcacaaccaaaaatgagctttagttaatgtactgaatttttcacagttcaaccagttgttttagcactgcacagacacaaatgtgtacattactccccagaagagcaccgtgtcccctgacagtcttatagcttagaaggagggaaatagacaatatgaggagtacgtgttggataaayctaatatctaatgtattccatgagatggtttgcgtctgagctccaccacctctcatcagttaactctcgcattcactcaccccacaatcaaataattcccttctaattctcttctttgatagcaagcc

SEQ ID NO: 235825 - DNA, 615 bp, Homo sapiens
aaaagaataaaattgtaacggatggaaataactaattaatttgttaatctttgcagactgccacggtccattgcatatgctctaaccagttaattagtctttagcctgtaattctaaaatgtaaataagtgcagttacctaacccaccagctcctaacaaaaatatccaactattcattatttaatttaaaaggaagaaggctttgcttttcattggtggtggtgttcctgagatgttaactaaacaccgtgacctaagtttaatttcatcacaccttactgaaatggttttattctaaagtatatgcccctctccccactccagaaagctaaaatcatgaggcttaactaaagtcagatctatccaatccaacaggagattatttttagatgttaatgaaggaaagggtttttgtaaactgtaaagtgctggtagctataaaccactataactgtaaacttgaacwaaagtacattatttattgatgttaattaatagtctattattctattagattgcatttcagtcactaaaatcattagtagactcattcagcctttcaaatgtgtgtgagaggtaggaaggagatcggtgggatagggcagaaagtggaa

SEQ ID NO: 235826 - DNA, 566 bp, Homo sapiens
agagagttaacataagaaaactggagagactgtctccctagaggcttttgaggaggaccaaggcaggaaagagtattagtttaacagaacccatttccttgtaaaaggagaaaaataaggtggtcatataatgtctcgccagatccaagtcaaaaatcagacacattcaaacacaaagtttaaaaagggaggagggagtcactccactaaaattattttacttttaaccctttctccaggggttgggggtagggggtggaggggaataaagagattagaaagtgaattggccaatcactaagttctttgactcatgcttccacttatcaacsccatcctacaatatcagcataaaaggcaacacaatttttctcaagtcccagctccaacagtgccacagaccctcacctcaagaattccgtgttttatggaggggggtacaaattttatatttttagggtacatatagggtatttatatgcccttcgaattgaaaatctgcttgattttctggagaggagtagttcaaaagtataacccttgcttagagaagaaaaagtcgtatc

SEQ ID NO: 235827 - DNA, 573 bp, Homo sapiens
agagagttaacataagaaaactggagagactgtctccctagaggcttttgaggaggaccaaggcaggaaagagtattagtttaacagaacccatttccttgtaaaaggagaaaaataaggtggtcatataatgtctcgccagatccaagtcaaaaatcagacacattcaaacacaaagtttaaaaagggaggagggagtcactccactaaaattattttacttttaaccctttctccaggggttgggggtagggggtggaggggaataaagagattagaaagtgaattggccaatcactaagttctttgactcatgcttccacttatcaacgccatcctacaatatcagcataaaaggcaacacaatttttctcaagtcccagctccaacagtgccacagaccctcamctcaagaattccgtgttttatggaggggggtacaaattttatatttttagggtacatatagggtatttatatgcccttcgaattgaaaatctgcttgattttctggagaggagtagttcaaaagtataacccttgcttagagaagaaaaagtcgtatcagtcaaa

SEQ ID NO: 235828 - DNA, 411 bp, Homo sapiens
gtatatttaagatagaatttattggccaggcgcagtggctctcacacctgtaatcccagcactttgggaggccaaggcgggcagatcacctgaggtcaggagtttgagatcagcctggccaacatgttgaaaccctgtctctagtctctacttcaaaaaaaaaaaaaaaaaaaaaaaaaaaaaaggaatttattggagaaaagagagacctgagaagaaagacaggcaattttagaattcactgcctagggtcaccatattaaacaactttaggaagcatcattcacattattgccattattggttcccaactggggcaattttgccccgccaggggacatttggcaatgtgtgtggaaacatttttggcttttcacaggtaasaaaatgaacactgtgattaagtaactt

SEQ ID NO: 235829 - DNA, 603 bp, Homo sapiens
gtgtggtatatatactcaagggagtattatwcagacatgaaaaggaataaaatcatgtcatttgcagcaacatggatgaaactgaaggtccttatgttaagtgaaataagccaggcatagaaagacaaatattatatattctcatttatatgtgggagctaaagaagtttatcttgtggaggtagagtatagaatgatagataccagaggctgggaagcttgtgtgggttggggttggggtgataaagagagggtcagtaatgggtacgaaaatagtgttagaaagaagaaagaagttctaatgcttgatagcaaggtaaggtgtccatagttaacaacaatgcattgtacatttcaaaatagctagaagagaggaattgaaatgctttaaatacataaaaataaaaaaaaatacttgaggcgatggtaccccagatatcattacttgatcattacaaagtctacacatgtaataaagtatcacatatacctcaaaaatatgtacaaatattacgtaccaataagaaataaaaataaaatatgtttagagaggtgaagaaagctgtatctaaaaaatcaaggaaaacaagacaagaagggaag

SEQ ID NO: 235830 - DNA, 284 bp, Homo sapiens
gaattaatgaggtaaactggagcaccatttttttgttcctgatcttagaataaaagccttccaactttcacctttgakcataatgttgacagtaaacttttctaatctgtcttttattatatataggtagttttcttgtactgtttgttaagtgttttcattgtggtagggcattaaattattgaattttgtttttatttacggaatttattgagagaatcatggttttaccttcctttttattatatattatttgattaatgtcatatgatgaactatttttg

SEQ ID NO: 235831 - DNA, 284 bp, Homo sapiens
gaattaatgaggtaaactggagcaccatttttttgttcctgatcttagaataaaagccttccaactttcacctttgatcataatgttgacagtaaacttttctaatctgtcttttattatatataggtagttttcttgtactgtttgttaagtgttttcattgtggtagggcattaaattattgaattttgtttttatttacggaatttattgaragaatcatggttttaccttcctttttattatatattatttgattaatgtcatatgatgaactatttttg

SEQ ID NO: 235832 - DNA, 569 bp, Homo sapiens
aattaatgaggtaaactggagcaccatttttttgttcctgatcttagaataaaagccttccaactttcacctttgatcataatgttgacagtaaacttttctaatctgtcttttattatatataggtagttttcttgtactgtttgttaagtgttttcattgtggtagggcattaaattattgaattttgtttttatttacggaatttattgagagaatcatggttttaccttcctttttattatatattatttgattaatgtcatatgatgaacyatttttgtattccagaaataactttcaatttgtcatgatgtataatccttttatgccctcttaaattatatttgcaagtattttgctgtggatatttgtatctatatttatcagagatattggcagaagggtttgtttgtttgtttatttgtagtgtcctggtctggcattaacatcagaataatgctgacttcaaaggatgagtttagaagtgttttctgtcatcttccaaagaaattttgggaaaatttgatgttaattcttctttgtatgtttcggagaattcacctgtg

SEQ ID NO: 235833 - DNA, 623 bp, Homo sapiens
gcctaatgctatccctcccctccaccaccccacaacaggccccagtgtgtgatgttccccttcctgtgttcatgtgttctcattgttcaattcccacctatgagtgacaacatgaggtgtttggttttttgtccttgcgatagtttgctgagaatgatggtttctagcttcacccatgtccctacaaaggacatgaactcatcctttttttatggctgcatagtattccatggtgtatatgtgccacattttcttaatccagtctgtcattgatggatatttgtgttggttccaagtctttgctgttgtgaatagtgcmgcagtaaacatacgtctgcatgtgtctttatagcagcatgatttataatcctttgggtatatactcagtaatgggatggctgggtcaaatggtatttctagttctagatctctgaggaattgccacactgtcttccacaatggttgaactagtttacagtcccaccgacagtgtaaaagagctcctgtttctccacatcctctccagcacctgttgtttcctgactttttaatgatcaccattctaactggtgtgagatggtatctcattgtggttttgatttgcattactctgatggccagtg

SEQ ID NO: 235834 - DNA, 537 bp, Homo sapiens
gaactttgtgcaaacaactgcatttaggatatagcagctgggaaaaaataaaccaaagcagagcaccccaccccacccccgccccgcaaagaaaaagatgatattaaaagcagagaaaaaaaagtagcaaggctgccttactagaggattggacctgggcctttgaggatagggaaagtagaaaagaaaggttgagggtgtcccaggagggagaagagcaaggtcacaaaaataaaatgatggaggaatgatgaagaaagatcytaaagaagatgggattcactcaccactgcctcttggggagacctgggagttgagagaaatttctgacccggtgcaactggaggttccttgttacacttctaggtgaggtggtcacttatcagtggaacatcccagagaggtctggccctgggcccaatgactctgcttgtgtttcctggatctattattctgcagtggatcccatcaaggtaaatacaagattggctacctggaggtgggtcaaactccctggcaaaaagaagctattaacca

SEQ ID NO: 235835 - DNA, 647 bp, Homo sapiens
ttttcttatagcagttttgtagtttgaggtcttggatttaagtttttactccatttcgattccatttttatatatggtgagaggggagtagctttattcttccgcataagaaatatccagtattcccagcaccatttcttgaagagacagtctttyccagtgtatgttcttggcacatttgtcaaaaatgagttcactgtgggtatgtagatttgtttctgggttctctattctattctatttaggtgtcttttttttttttttcccagtatcatgttgttttgtttaccatagctctgtagtacaatttgaagtcaggtaatgtgattctttcagttcggttctttttgtttaggatagctttggctattctacgtcttttgtggtttcatataaacgttagaattttttttcctatttctgtctaggatgtcatcggtatttcaatagagattacattgaatctgtagattgctttgggtagtatgacaattttaagaatattgatttttttttcaatttatgaacatggaatagttttccatttttggtgtcctcttgaatttctttcatcagcattttatagtttttattataaaaatcttctagttatttggttaattcctagatatgtaattttatttgtg

SEQ ID NO: 235836 - DNA, 620 bp, Homo sapiens
gccttaaaacaccacaatatgccatttaagagtattttgtctggtcagtatttctccataatcctttatccaggtggccactgctcagaatttggagttagaacatctgagtcttgtctgagttctgatttcaatgtgtggtaggagatatctccatctaattgggtttcttcatatttcgtatacactgatgatcatttcatatacactgatgataatggcttacctgttttccagagttcttgatcatstcgtggggctgtagaaagagcccagagcgtggatgacaggggtttcattgaatgaatgaatgagtgactgaatgaatgaggtaatgggtgccacatcaagaaaggcagttttactaagaataattaggaacaaatgttggatcttttttaaaaaaataaatcccataaggtgtgaggctgagatcctgtgaagtggtgccgaatttggaggcagagtcctgccaggagaatgttcttctctgctggtgtctgtgctgaccctctgctcaatctgctagttgcccaaaaagacacgttggtgatcttcacttgagtttctgcttcttttgtctttcagagtattgttggatcagggctgccaggaagcag

SEQ ID NO: 235837 - DNA, 620 bp, Homo sapiens
gccttaaaacaccacaatatgccatttaagagtattttgtctggtcagtatttctccataatcctttatccaggtggccactgctcagaatttggagttagaacatctgagtcttgtctgagttctgatttcaatgtgtggtaggagatatctccatctaattgggtttcttcatatttcgtatacactgatgatcatttcatatacactgatgataatggcttacctgttttccagagttcttgatcatgtcgtggggctgtagaaagagcccagagcgtggatgacaggggtttcattgaatgaatgaaygagtgactgaatgaatgaggtaatgggtgccacatcaagaaaggcagttttactaagaataattaggaacaaatgttggatcttttttaaaaaaataaatcccataaggtgtgaggctgagatcctgtgaagtggtgccgaatttggaggcagagtcctgccaggagaatgttcttctctgctggtgtctgtgctgaccctctgctcaatctgctagttgcccaaaaagacacgttggtgatcttcacttgagtttctgcttcttttgtctttcagagtattgttggatcagggctgccaggaagcag

SEQ ID NO: 235838 - DNA, 563 bp, Homo sapiens
gttcttctctgctggtgtctgtgctgaccctctgctcaatctgctagttgcccaaaaagacacgttggtgatcttcacttgagtttctgcttcttttgtctttcagagtattgttggatcmgggctgccaggaagcagaatttgatgacagcttttgggtttgacttgccagtgagcacgtttggctgggtgtagggcttccgtggtgtagctggcccatggccttgaatttcttccagtgggcccactgcatttcccaaatggactcttgcaaagggcatcttacaagtcagagagtgtgtgtaagtgtacgtgcatgcacatgtagagaacagacctcctcttggatgtccggcctttaaaacgacatcaaatcatcctcgtcaccatctgcaaatatgccttgagcactcagtatatgcaaagcaccgttctagatattatgaggaatgcaacaaaatagagttccttccatggctttcagaaatttatagactcggttaggcagataaaatcaataatatcccatttatatcagtctggtttcttggttgcatgcctta

SEQ ID NO: 235839 - DNA, 563 bp, Homo sapiens
gttcttctctgctggtgtctgtgctgaccctctgctcaatctgctagttgcccaaaaagacacgttggtgatcttcacttgagtttctgcttcttttgtctttcagagtattgttggatcagggctgccaggaagcagaatttgatgacagcttttgggtttgacttgccagtgagcacgtttggctgggtgtagggcttccgtggtgtagctggcccatggccttgaatttcttccagtgggcccactgcatttcccaaatggactcttgcaaagggcatsttacaagtcagagagtgtgtgtaagtgtacgtgcatgcacatgtagagaacagacctcctcttggatgtccggcctttaaaacgacatcaaatcatcctcgtcaccatctgcaaatatgccttgagcactcagtatatgcaaagcaccgttctagatattatgaggaatgcaacaaaatagagttccttccatggctttcagaaatttatagactcggttaggcagataaaatcaataatatcccatttatatcagtctggtttcttggttgcatgcctta

SEQ ID NO: 235840 - DNA, 563 bp, Homo sapiens
gttcttctctgctggtgtctgtgctgaccctctgctcaatctgctagttgcccaaaaagacacgttggtgatcttcacttgagtttctgcttcttttgtctttcagagtattgttggatcagggctgccaggaagcagaatttgatgacagcttttgggtttgacttgccagtgagcacgtttggctgggtgtagggcttccgtggtgtagctggcccatggccttgaatttcttccagtgggcccactgcatttcccaaatggactcttgcaaagggcatcttacaagtcagagagtgtgtgtaagtgtacgtgcatgcacatgtagagaacagacctcctcttggatgtccggcctttaaaacgacatcaaatcatcctcgtcaccatctgcaaatatgccttgagcactcagtatatgcaaagcaccgttctagatrttatgaggaatgcaacaaaatagagttccttccatggctttcagaaatttatagactcggttaggcagataaaatcaataatatcccatttatatcagtctggtttcttggttgcatgcctta

SEQ ID NO: 235841 - DNA, 506 bp, Homo sapiens
tcaccttctctcctccttccctcaaggtggttcacatacaactattagcaattgacattcatagctcttgtacttcacagtattttcatgcctgggactctgttttgatccctgcaagtacagtgttatgatactccttttatggatgatgaattggagacaccaagaggttcagagcttcttccaaagtcatagagccagtgagttgtgaagacgaggggctcagtcttccrattcatgcaaagggttgatgtgacattttcagagcctagttctagcttcattgtgctggaaagtggtcttggcctgaggacagcagggtgcttcagagtccagtctgatgccctttggcagccacacaccctcctgtgaaggcaccacaaattccttgggagggagacgcgttccagatgtgtatgccgcctctagagaaaacgtggcttcttctggtgagccacatgcaaggtgtctcgctggccactgtgaagtggggagagacgcctgga

SEQ ID NO: 235842 - DNA, 609 bp, Homo sapiens
tttaaattcaccacagaaagcaatgctattgactcaaaattcaaggcccaaagaggtagtagagatgtattaatgcaaagacctgtatttttcaaatacttgttttaaacagctactcaaaagtacaaagaatcacaagcaaatataacaaaatgatagaatcatgcttaatgtgaaattcttgtttacatacagccagtggagtgtatagtttagccaataacaataatgtgcaggccccagactaggaaagaacaccaaaagaaacagtgaatccttgatctcttgaaacttataatttgttcaggaaggaaagaaatttaaaaagaaaaacmtaatcaagagaaataattttaaaaaatattttataaaataataccttcacaaacacatataacctacagtctataaatgtcccaagattgatcaggcataagaaagtttgaaaagcaggctaaattaaaatatttcatcttcttcccatgcatactttccccatacaagaatagctacatttaaactatttgttttgtgttagtttcttcatgagaagaaaaatggtcacaaaaagttgttgtaagctgaagaaaaatggctacaaatatttca

SEQ ID NO: 235843 - DNA, 581 bp, Homo sapiens
agaacttatgcccccagctgctagaaacgctgcccactgccgaatggttttcagccctcgacagaaattagtctcagctagggagaaaaaaaaaagagaaatacatcaagcyaagatgtgtctgtttcttcagaggcagcctgcaactgatgactggtcaatatgggaatataaaggtccacctctttctttttcacaacttgggaatactctggtgggccatcgtaactttcaagctccctgtgcagaacagttgtggctttcttggtatcaaagcccaacttctacatcggcccaatcccgcttttttcccttttccttcacaagtgttgatcctgagagccttccaaataaagttcttcctgccattcttcgtgtcagcatctgcttcttgtggaaatcaagctgtgacatctaatgcatccaaatgcatgctacatgctaaactgacatcacacttgtttctctgtaggaatacttaatacattttcttccagtttgtagcatttatgtggcttaacctaatagaagcagataagtcatgtccacagattcaagctgatcttgccctgctgtaattt

SEQ ID NO: 235844 - DNA, 561 bp, Homo sapiens
ataggtgaaaggagggaggggagttttcttttcatcagaaaggggtagtaattctggacagattgttgaaactagaattaagcctttaaaaaaagacttttttttttccccacaaaccatccataatgttggaagtctaattgtgtgtgtgtgtgtgtgtgtgtgtgtgtgtgtgtgtgtgtgttggattgatccagcaagagatcccgcggtaatttactgtgattgaattcactgtactgtaacaagcagctctctttagcatgcttcgtcagtatgacaataataattcttatattgattctaaatgcaaatgataattttatggtctgggttatttagttccgaagcttagggatttaattatctattttttttgttataatccaagwggcatgttatgaattttccaatgtatttgtaacagtttgtgttacatatgagtttaactgtcagacagaaatcaagtaatgctgagtttgggtgctctctgcagaatagctgacaagaaatattagggttagtggatccaaatatctttgaaaatataaaatgtagaat

SEQ ID NO: 235845 - DNA, 550 bp, Homo sapiens
gagttgatttacatcacaatcatataacttcacagctgtgtgaccctgaacaagacacttatttcattgggcctctgcttcttcaactgtgcaaaagaacaaataaaaaatgtgatgcctatagggaggtacttagtaaactgataaactattaaatgaacataagttcttctcatatatatttatatttcatctgattsaattgacaaagttctttagaatggataaataacatttcagcaaaacaaaaccttgagtttattttataaagaataatttctagaaagtggtaagcccagctacattgctattatctcttatatttaaatctctctatacggagggcagtttaaatctttgaaaatctgtttggtttccttcttaaatttttcctcatttgccatcacagagaacacttttttttttcttttaagatagggtttcactctgtcacacaggctggagtgtaatggtgagatcatagctcactgcagcctcgaattcctgggttgaagtgatcctcctgccttggcctcccaaagtgctgggc

SEQ ID NO: 235846 - DNA, 520 bp, Homo sapiens
tgtttaaactttatgaattatgcttcccttttgctgtttgttcctatcccagataattttaaagttttcaatgcctgaggactttaatatttgcatttcttaggtgttggtaatctgaattactaaaatacgacaggaatgctgctgaggaaaamctctactctcaggaggacttgcgcaaggcaggtaagattaactgagtgtctgcctcctacctggctctgtgctaagttctttgaatgtatattatgtaattttatttgcataactaaatgcttttttatgtgataagtactattataaccactattttatagaaaaggaaatgaaggcttacaatgattagctaacttgcccaaaggttatatagctaattatgtagcagaacaaggccttacatatctgactctgcagtgtagactgaccccgtgctagtgatgtggtctatgcccatttgttcatacaagctagtggctgtcacagatgcatatacagattatgaagcaaggggatttgtgtt

SEQ ID NO: 235847 - DNA, 617 bp, Homo sapiens
ccttacttgtgttcattatgtacttgatattgagctcccaattataagtgagaacatggcaatatttgattttctgttcytgtattagtttgcttagaataatggctgccagttctatctgtgttgctgcaaaggacatggtctcattcttttatatggctgtgtagttttccatggtgtatgtgtaccacattttctttatccagtctacccgttggtgggcatctaggttgattctatgtctttgttattgggaatagtgctgcgatgaacatacatgtacatgtgtctttatggtagaatcattaatattcatttgggtatatactcaaatatgggattgctgggtcgaatggtaattcagctttgagttctctgggaaatcaccaaactgtgttccacagtggttgaactaattgcatttccacaagcaatatataagcatttccctttctctgcttccgtgccagcagctattattttttgactttttaataataacaattctggctggtgtgagatagtatctcactgtggttttgattaacattatttaatgattagtgacgttgagtactttttcatatgcttgttggatgcatgtacgtcttttctta

SEQ ID NO: 235848 - DNA, 617 bp, Homo sapiens
ccttacttgtgttcattatgtacttgatattgagctcccaattataagtgagaacatggcaatatttgattttctgttcctgtattagtttgcttagaataatggctgccagttctatctgtgttgctgcaaaggacatggtctcattcttttatatggctgtgtagttttccatggtgtatgtgtaccacattttctttatccagtctacccgttggtgggcatctaggttgattctatgtctttgttattgkgaatagtgctgcgatgaacatacatgtacatgtgtctttatggtagaatcattaatattcatttgggtatatactcaaatatgggattgctgggtcgaatggtaattcagctttgagttctctgggaaatcaccaaactgtgttccacagtggttgaactaattgcatttccacaagcaatatataagcatttccctttctctgcttccgtgccagcagctattattttttgactttttaataataacaattctggctggtgtgagatagtatctcactgtggttttgattaacattatttaatgattagtgacgttgagtactttttcatatgcttgttggatgcatgtacgtcttttctta

SEQ ID NO: 235849 - DNA, 617 bp, Homo sapiens
ccttacttgtgttcattatgtacttgatattgagctcccaattataagtgagaacatggcaatatttgattttctgttcctgtattagtttgcttagaataatggctgccagttctatctgtgttgctgcaaaggacatggtctcattcttttatatggctgtgtagttttccatggtgtatgtgtaccacattttctttatccagtctacccgttggtgggcatctaggttgattctatgtctttgttattgggaatagtgctgcgatgaacatacatgtacatgtgtctttatggtagaatcattaatattcatttgggtatatactcaaatatgggattgctgggtcgaatggtaattcagctttgagttctctgggaaatcaccaaactgtgttccacagtggttgaactaattgcatttccacmagcaatatataagcatttccctttctctgcttccgtgccagcagctattattttttgactttttaataataacaattctggctggtgtgagatagtatctcactgtggttttgattaacattatttaatgattagtgacgttgagtactttttcatatgcttgttggatgcatgtacgtcttttctta

SEQ ID NO: 235850 - DNA, 591 bp, Homo sapiens
ttagtatatagcagagaaatagtttcttcctatcacagaaattaagaaatataaaacattcagtgcttgtttaaattaaaaagattttgtctctcgcccacagagtaatwttttgtatttaagaaactagaattaagatggaggaactgtggtctcatatatagccatagatttaatgtgacacaattgatgcaatatttaagtctcattgttaggcaatctttccatagttctttttgtagcaaatacagtaacatgcatgagtccatcaacatacccttgaatatacccattgcctgtgcagtgtcaagtgttggtactaagaacttttaaatgtttagtacattatgttttaaaaatatggtgttcttttatttgtaatatacacagccgtctactggaaattcaaaactttggaaatagaaaataaaagaaaggaatagaaggccaaaatgtagacaaatgaaatttatgaaaattctttatcttccatcttattcttgctgagctatttgaaaaattattttgcctcagaccttagggaatagaacccaggaggagacctatgggaatatggcttcgcaagcctgt

SEQ ID NO: 235851 - DNA, 531 bp, Homo sapiens
tccacttagtacaagaagacattttctattttaaccatagtttcttttcaaaatcaaataataaattgtgaataaataattaacttctagcctagccagggctgatgaagttctttctagtatgatctcagagtcttatagcactgtttgcttggaaatcatatggcaaaaattaatggaaatgttgtgttgacatgtttgtgaagtgaaaccgcacctgcactggggaaattatgaggaagcatctaggcttcagacctgcatgactcaaacagtgcaaaggaggggcgggaaataaaggttgcagcttccacctccatgcgccacagctttgcagatctcatatgtgtcagaggcaaaacaaaaaacaaaaaacacaactgtgtacttgggtagttgctaagactcccaatgmattgatgatgcactttttgtatcacctgccttacattcttttataaaattaagtaaaggaaatactggattgaaaactgtttgtgtcttataagagattgcctagggatcttggct

SEQ ID NO: 235852 - DNA, 531 bp, Homo sapiens
tccacttagtacaagaagacattttctattttaaccatagtttcttttcaaaatcaaataataaattgtgaataaataattaacttctagcctagccagggctgatgaagttctttctagtatgatctcagagtcttatagcactgtttgcttggaaatcatatggcaaaaattaatggaaatgttgtgttgacatgtttgtgaagtgaaaccgcacctgcactggggaaattatgaggaagcatctaggcttcagacctgcatgactcaaacagtgcaaaggaggggcgggaaataaaggttgcagcttccacctccatgcgccacagctttgcagatctcatatgtgtcagaggcaaaacaaaaaacaaaaaacacaactgtgtacttgggtagttgctaagactcccaatgcawtgatgatgcactttttgtatcacctgccttacattcttttataaaattaagtaaaggaaatactggattgaaaactgtttgtgtcttataagagattgcctagggatcttggct

SEQ ID NO: 235853 - DNA, 531 bp, Homo sapiens
tccacttagtacaagaagacattttctattttaaccatagtttcttttcaaaatcaaataataaattgtgaataaataattaacttctagcctagccagggctgatgaagttctttctagtatgatctcagagtcttatagcactgtttgcttggaaatcatatggcaaaaattaatggaaatgttgtgttgacatgtttgtgaagtgaaaccgcacctgcactggggaaattatgaggaagcatctaggcttcagacctgcatgactcaaacagtgcaaaggaggggcgggaaataaaggttgcagcttccacctccatgcgccacagctttgcagatctcatatgtgtcagaggcaaaacaaaaaacaaaaaacacaactgtgtacttgggtagttgctaagactcccaatgcattgatgatgcactttttgtatcacctgccttacattcttttataaaattaagtaaasgaaatactggattgaaaactgtttgtgtcttataagagattgcctagggatcttggct

SEQ ID NO: 235854 - DNA, 566 bp, Homo sapiens
gcatttaggttgattccatgtctttgctgttataaaaatagtgctgctcactttttgaaagtacccttgatgttaaatctttctcctcttgtcctgccgcttatggcaccatggcaaatgttcttaaagccatatggtccttattttttgtaactctaaaatgcttctcttatatgttaatgcattgcttagtgaaggtgacataattgtgtccatcttaatacactgattagtttattagaatcccracagagaatatcatatgatcatagaatttaaagttaactttcattttttgttgaaagtagaaattatttttaaggcattcctgaggcatagcattaagtatctacttagttacttctggagagaaagaggaactcagtttaatttacctgtcctattgtctaaacagttgtagctattagaaaaataattattaggttgactagaaatttaacaataactgctattcattagtcttacttctgctcattgcagcaacataaatcagtttacatcttcctccatattacagatgttaatagaatattctgtgcctcaac

SEQ ID NO: 235855 - DNA, 502 bp, Homo sapiens
gaaaatattaaagttttagatgtgatgatattgatggatttacattttgaggggtactactataaattatgctaccatcaaagagataattactatgaaataattttaattaaaaatccctacacaaatcagttgatatttgacaaaatracaatgtacactatagattctaaatgaggagatttaaaaactttgatatgaattcctgtaatgtcagccaaaagctaagggaagctacatgcctacaggaagcaagtattatttcttggtctagcattgcctatgacagctagtttaactctgcctaattctggacatcagctttagcaaatttacttgtcaaagataactagttctgtagtgtttcactagtctctattagtaataaaatgatttgtttgatatctcatctgttcagactaagaatcttttttcaaaattacaataatccttatttcatggaaactttgcgaagttaaataatgtgcccaataccagaaaa

SEQ ID NO: 235856 - DNA, 564 bp, Homo sapiens
ttttggttgtgtgctctgtttgccaactagccattgaagttcaatgtattcattcattcattcattcattcataattcacattatatttcaaagagtatttaaacttgtattttatgctagcccctatgccaagtgctaggtaagatgatgacaaactaaataggagacctcaccttggctaatccacagtgtggcataattgatatgaagagaaagaccagcttgatatgtgaaaggttgacaaagaaattactttgattatgttgctctcttattttgactgtttatctggagattgaatcttacccttataatgaattttctttggtaaactgtggctgagtcagccccagccgcttctcagtttcctcttctgccccagcttcrtgtcctctttccctattctttctagtgtccactctaccccaataggcaatcagttatgttctggtcaattctatcaaatcatgtactaacttgattcactagtcacatctaaaatagagtttcaccaatctctaaagagtggaatgatgttagaaaaagtaaagtaagttttgtga

SEQ ID NO: 235857 - DNA, 564 bp, Homo sapiens
ttttggttgtgtgctctgtttgccaactagccattgaagttcaatgtattcattcattcattcattcattcataattcacattatatttcaaagagtatttaaacttgtattttatgctagcccctatgccaagtgctaggtaagatgatgacaaactaaataggagacctcaccttggctaatccacagtgtggcataattgatatgaagagaaagaccagcttgatatgtgaaaggttgacaaagaaattactttgattatgttgctctcttattttgactgtttatctggagattgaatcttacccttataatgaattttctttggtaaactgtggctgagtcagccccagccgcttctcagtttcctcttctgccccagcttcgtgtcctctttccctattctttctagtgtccactctacyccaataggcaatcagttatgttctggtcaattctatcaaatcatgtactaacttgattcactagtcacatctaaaatagagtttcaccaatctctaaagagtggaatgatgttagaaaaagtaaagtaagttttgtga

SEQ ID NO: 235858 - DNA, 581 bp, Homo sapiens
gactagtggtttcttgttttttttttttaaactagtgaaatatgagccaaagtgacgtgtgtcatttccaggccaaggtttttaaaaaagttggtgttcattccccatacttttccttcaacagctagaattatattagatgtggtcttaaacagaagaagcctcatacctgaatcaccacatgaaaagcagtgatctgtgcacatcgagcaatgctttgaactctgacattagccagaaatacttttgttttatttcaggtattagagactatatgttayagtacctagtattacccaaactaacaactctcttggtacatactgtgacaatacattaggaagaattgaaaataaggtttttattcttattcaagcaaagcgagtctcacattgtgaataaacatttttgatgcgagggaaggatttgaaaggatattctagtgtgaaacagcactttcttgagctagtcagagagggagaaacaattgaatttgagtttttgaaatgggtatttgaactcttaatgaattgatgtttttccaaaagtatgttttatcaaatatgattggaaaacaatgc

SEQ ID NO: 235859 - DNA, 528 bp, Homo sapiens
tgagccaaactattacactcatgccagacagggataggaaaatgactctgtagtaactgcagataaacagcgagtgcgatgttgtgcattttattttgtgaatggtgacatgccatgttaatcaaaataaccacatttcacctttcagctttctttaaattgaagcccttgaagtctttttggatcttttcttttctcctggagagctaaagcatagctccctacattttctcaggtgtgcctatggttgtaattatcactgtatgctgatgccactgattttcttcttagcccagttttgttctctagctcctgcataatttattcagccatatctattcaggtaggaccaaaatagagctcatgatctccaaccccaaygcatttactttgcaaatcaataagttagaaattacctatgacacctctctgtccctcatcatttacacaaaattcaccattgattccttctacatgtcattaaatagtcatttgaaatattaatttcatgattatgtagtattttat

SEQ ID NO: 235860 - DNA, 546 bp, Homo sapiens
gcaatactatgtaactattaaaaaggtgagatagaagtacctacatagaatcatgaatgaaaacaatccacaaaacatattacaatctttacaggatgttaagtaaaacagggaattttagaaaactgtattttatatggcattatttttaattaaaatgttgtattaatgtacgagtgtgtgtgaaatagtaattgtctgaatgacaagaatggataagggggccgggtgcggtggctcacccagcactttgggaggccgaggtgggcggatcatgagttcaggagatcgagaccatcctggccaacatggtgaaaccccgtctctaccaaaagtacaaaaattagctgggcatagtggtgcatgcctgtagtctcaactactcaggaggctgaggcaggggaatcacttgaacccaggaggcrgaggctgcagtgagccaagatcacactactgcaccccagcctggcgacagagtgagaccctgtctcaaaaaaaaaagaatggataagggaacaggaaattgtgggattaggggtttaaagt

SEQ ID NO: 235861 - DNA, 546 bp, Homo sapiens
gcaatactatgtaactattaaaaaggtgagatagaagtacctacatagaatcatgaatgaaaacaatccacaaaacatattacaatctttacaggatgttaagtaaaacagggaattttagaaaactgtattttatatggcattatttttaattaaaatgttgtattaatgtacgagtgtgtgtgaaatagtaattgtctgaatgacaagaatggataagggggccgggtgcggtggctcacccagcactttgggaggccgaggtgggcggatcatgagttcaggagatcgagaccatcctggccaacatggtgaaaccccgtctctaccaaaagtacaaaaattagctgggcatagtggtgcatgcctgtagtctcaactactcaggaggctgaggcaggggaatcacttgaacccaggaggcagaggcygcagtgagccaagatcacactactgcaccccagcctggcgacagagtgagaccctgtctcaaaaaaaaaagaatggataagggaacaggaaattgtgggattaggggtttaaagt

SEQ ID NO: 235862 - DNA, 573 bp, Homo sapiens
atgctgagtaataatttcatatgcaacaattattttgttgacaatatgaaaatgtttttatatcattgatggaacagttccrtaatgaaaccatactgactttcatgagttatgtgaataaaatgaacttttgtgacaaatggctttacaattgctcagcttttaaattacttttacaaatcattggcaaatcttagtaaaatagaagcctttacagcctgcaaaggctaaaatgttgactgtttgtctttttttagaaaaaaaaaaagccaacctgcaataactgaaaaagtaacagatttgggaaaatgacagagggagtttgaggttgctcaagaaaactgtgttgagttaatgtgaaagtcattataggagtgcagatacttctttgaggtcctgatttcaactctctttgataaatacctagaagtgggattcctggatcatatgatagttttcttttcctttttttctttttcttttttttttgaaacctccatctgtttgtggctgcaccactttggattcccaccaacagtttgcaaaggttccaatttctctaaatcctcacta

SEQ ID NO: 235863 - DNA, 503 bp, Homo sapiens
tataaagaagatacagtcactaattatcaattaaaataattgaaaaccggcttctctatttcctgtagcatagtctcatgttccaatttggcaaagtactcatttagaacaattagcccaggagttacaagtaagtataccaataaatgtactgaacttatttaattcaaaaaatcatcaccatgaggcatttartaccctgcataagtgaaatgacataattgggaatctctattcagactgtgagtgatgaagacaccttttttccatatagtggatacgtttaaaaataaaaataaaatcagaaagtttgcatttggatttaacatttttttaatcagacagccctaataagtagaaatattttactattgtcattaaatatttgttttcaagtttgtattttgtttattaagtaaatatatgtatatatcatagtacattaaataaaattacaaagattttttatatatgattcatattcctttagagcttggttaagg

SEQ ID NO: 235864 - DNA, 528 bp, Homo sapiens
agttttattagggaagcagagcatacaagttgaaaaatttgcagcctcacaatgtgatagaaaagaaaaatccattttctgaggagaaattcaagccagctgcagaaaattgcataagtaacaaggagatgaatgttaatccccaagacaatgtctctagggcatgtcagaggtcttcacaaccacctctcccatcacaagcccagagaaaatggttttatcagccaagcccagggttcctgtgctgtattcagcctagggacttggtgccctgcattccagccactccagtggtgactaaaaygggccaaggtgcagcttggcctattgcttcagaggatgcaagccccaagtcttggcagctttcatatggtgttgagcctgcaggtacacagaaatcaagaattgaggtttaggaacctctgcctagatttcagaagatacctggaaaagcctgaatgcctaggcagaagtttgctgcaggggtggggctgtcatggagaatctctgctaggacagtgcggaagg

SEQ ID NO: 235865 - DNA, 525 bp, Homo sapiens
ggcccaatacacatttagattaatttactctttgactgggctcagtggctcatgcttgtaatcccagcactttgggaagctgaggcaggtggatcacttgaggccaggagttcaacaccagcctggccaacatggtgaaaacccatctctactaaaaatacaaaaattagccgggagtagtggcacatgcctgtaatcccaagctactcagatggctgagggataagaattgcttgaacccaggaggcagaggttgcagtgagccaagatyggaccactgcacctcagcctgggtgaaagagcaagaatctgtcaaaaacaaaacaaaacaaaacaaaacaaaacaaaacaaaacaaaacaaaacaaaacaaaaaaacctttttccccttatatttttctccagttgctcaagacaattctcactaaagctagcctatgacaaaattgttattttgcttttggcagttcagttttcccatagttggatctcttcagttttcctttatatcctgttctcaacatgt

SEQ ID NO: 235866 - DNA, 401 bp, Homo sapiens
ctcactgcaacctctgcctctgcctcctaggttcaagtgattctcctgcctcagcctcctgagtagctgggactacaggcatgccccaccacgctgagctaatttttgtaattttagtagagacagggtttcaccatgttggccaggatggtctccatctcttgacctcgtgatccgcccacctcggcatcccaaagtgctgggattacaggcgtgagccaccatgccccactgacayaatcaattctttatgggcacatgcagaagtacagacaattattaaaaaaacagatattccaatttaaggactgcagacatggctttaagttattttacctttttggatatttattttattaatcctattaagtttaagctaaaattccaaaaagttttctatc

SEQ ID NO: 235867 - DNA, 501 bp, Homo sapiens
atttcatttttatatgtgtcacattttcttaatccattaatttgttgatgaacacttaggttgcttccacatctatgatattgaggatagcactacaataaacctgaaggtgcaagcctctctatgatgtattaattttccttcctttgaataaatacctagtagtgagattgctggatcatatggtagtaccatcttttttttttttttttttttttttttttttcagaaacctccatcctyttctccatggtgcttgtactaatttatattcccaacaacagtgtaaaagcattcccttctctccacaacctcaccagcattctttattgtcttttatttttattttttggataaaagccatttttgcttgggtgagataatatctcattgtaattttgactcagatttttctgataatcggtaatattgagtatcttttcatatgcttgtttgccatttgtatgtcaccttttgagaaatgtctagtaagatattttg

SEQ ID NO: 235868 - DNA, 501 bp, Homo sapiens
atttcatttttatatgtgtcacattttcttaatccattaatttgttgatgaacacttaggttgcttccacatctatgatattgaggatagcactacaataaacctgaaggtgcaagcctctctatgatgtattaattttccttcctttgaataaatacctagtagtgagattgctggatcatatggtagtaccatcttttttttttttttttttttttttttttttcagaaacctccatcctcttctccatggtgcttgtactaatttatattcccaacaacagtgtaaaagcattcccttctctccacaacctcaccagcattctttattgtcttttatttttattttttggataaaagccatttttgcttgggtgagataatatctcattgtaattttgactcaratttttctgataatcggtaatattgagtatcttttcatatgcttgtttgccatttgtatgtcaccttttgagaaatgtctagtaagatattttg

SEQ ID NO: 235869 - DNA, 547 bp, Homo sapiens
aattctaagagttgaaaaagtttggtgtcaagaacccaggtcaaagactaaatatacatttcttttatatcataatgttacacatattctataaatttttattacatcctgttgattgatgttgacattcagttattttacatcttgcagatttcatgtctgtatcacgtgtttcatgtctgtagcaccattgtgtcttgaatatatataatgtgttttgatttcacagactcacagctgagactctggactttggacttttgccttggtgctggaacaagttaagatttgaggttttgccatcratgacaaacacatagccaacatgttactgaatggggaaaagttgtaagcattccccccgagaactggaacatgacaaggatgcccactttcaccatttttattcaacatagtactggaagtcctatccagggcaatcagacaagagaaagaaataaaggacattcaaattgataaagaggaagtcagactgtcactgttgctgatgacatggttgtgtatttagaaaaccttaaagactcat

SEQ ID NO: 235870 - DNA, 490 bp, Homo sapiens
tgcaatctctatcaaaattccaatgaaatatttcacagaaaaaaaataattataaaactacaaaaaaccctaatagtaaaagcaatatggaggacaaagaacacatctagaggtggcacattaactgatctcaaaatcaactacaaagttatgttaatcaaaacagtatggtactggcacaaaaacagacatagagaaatagaatagaattgagagcccagaaataaattcacacatccatagtcaactgatatttgccaaagtgccaagaacacacatgaggaaaaaacagtmttttcaataaatgattttgggcaaagtggatagccacatgttgaataaaagtggatccttgtcttcccacatgcacaaaaatcaactcaaaatatattaaagatgtacatgtaatacctggaagacatgtatttattggctcaggacagctctggcagctgggcttcatgttggtgaagactacacagatcttctg

SEQ ID NO: 235871 - DNA, 530 bp, Homo sapiens
gaagggggtcactgtcctgcagaccccagaatggtagattcaccagaaccttgcaccctctgcctctaaaagccacagacactcaamtctaacaagggatgcagtctggagtcaaggattatgttggagctttaggatttaatgactgccttgctggatttaggacttgcatggggtctattgcccctttctttagactgatttctcccttttgatatggaaatgtttatccaatgccaatatcaccattgtatcttggaagtaaaaatcttgtattgattttacaggctcataggtggaagcggatcattctcagatgagacttaggctttatacttgacattggaacaagttaggactttgggggcactgttggtaaaggattgttgtagtttgcaatgtgagaaggacatgagatttgggaggccaggggtggaattatatggttcggatatttgtcccctccaaatctcatgttgaaatataatcccaagtgttggaggtagggcctggtgtgaggtgtttggata

SEQ ID NO: 235872 - DNA, 450 bp, Homo sapiens
ggcctctccctggtctctgcagttgagtggctggtctggtccctggacttgtgactgtggtggctgatagtcccatttgccctgcgagttttgtaaatacctaccattggactatttgcctatttgtctctcttcaggaccttgttagtccattggkccttctggaactctactttccccagcaggatacacaggcacttctggatcccctgctcaccacaagcaggccaggagagcagactctttggtctacacaactctctccaccaagtgccactgttgggcttctcaccccacttgtcctcccagaattccacagagggagcaatgcaaagactctcttctttcaggttccccagtatatctaatgcaccaccctgctggcaagacttttgcctggaagagatggttgagagtgagtcttacttcctgcctctgtctcccttctct

SEQ ID NO: 235873 - DNA, 542 bp, Homo sapiens
ttacagccaactgatcttagacaaagcaaacaaaaacataaaatggggaaaggacactctattcaacaaatggtgctggaatacttggcaagccacatgtgggagaatgaaactggatcttcatctctcaccttatacaaaaatcaactcaagatggatcaagaacttaaatctaagacctgaaactataaaaattcaagaagataacattggaaaaacccttctagacattggcttaggcaagtkttcatgaccaggaacccaaaaacaaaagcaataaatacaaagataaatagctgtgacttaattaaactaaagagctttgcacgggaaaaggaacagttagcagagaaaacacacaacccaccagagtgggagaaaatcttacaatctatacatccaacaaaggactaatatatccagaatctataacaagttcaaacaaattagcaagaaaaaaagcaaccaatcccattaaaaagtggactaaggacatgaatagacatctattgaaaaaagatatattaatggccaaaaaacat

SEQ ID NO: 235874 - DNA, 529 bp, Homo sapiens
tcattatcttttgcctatactctcctaattggtgtccctggttctgcttttgtctctctacaggatactttatagcagcccaggtgatttatctaaaacataattttaataatatctgctttaagttttccaagggcttcctacttcactctcaataaaaataaaaatccttgccttgacttccaataaatgatctggtcccacgccacctytcttacctccttttctaacaggcttcccttcccatcctacctctcaactccacttcagtagcactaggcttcttgttccttgaacagagaaagcatacttctaatttaggggctttatcacctgcagctccctccatctggaatgctcttatttcagatttttgtacggcttagttcctcacttttttcagggttctgcttgaatatcatcttatcttgaggacattcccttaacactctttaactcacaggcaaagatggagaatcaaacatgtgcatttcccttagcaccctcttcaacatccactaaatggcag

SEQ ID NO: 235875 - DNA, 532 bp, Homo sapiens
ggacaagaacatgagaatgccctaccccaaagacacagtcacatggggtatgagtaagactaagctggacaaggacaacagaaaaacttcctgcctcctccccagatagcaagcactgaacaggctaccagtagaaaagagtcaagattgtggagaaagatctccaatgtggcatagttgcacaggaagacttaaagctgagggtagatcaagaacattgggaaaaaaagaaaaaccattcagcaaagcatmttcaactctaaccacaaggtaagactagaggaaattgaaactggtggagaactgtaattataacaacaagaaaaccaaaatccacttaaatttctggctagactgactcaaccccaacactgatagtctagcagaaggaaaaaaaatgcttatttctatgcatgaatagcatttatttcaattttgactgttctatatacaatgcctagtattcaataaaaattaccagacataaaaagataagaaaaagcaacacattgtgaaaagacaaagcaattta

SEQ ID NO: 235876 - DNA, 577 bp, Homo sapiens
agaatatagtctggatattacatattaggaaattactgttagttttataagttataatagtggttttgtagttattcacaggaaatgtgtgctgaagtgttgagggataaatggttgtgatagctgcaactgattttcaaatgatttaccaaaaatattacccatacataatatacctattatatatgcatacatatgtatactcatattcatctagatagatacatatggcaaaatgtgtggtggttatattggtgtttcttacaatgtttttttctgtatgtttgtacatttttataataaaaagagaagtgggaaaaaatgtttttctttgatcttcttataagagaaagagggcaattactattataatcataaacattaggagaatgcttaccctgcgtaataaagaaattggcctgacccaaagagaggtctggtccttgtycctggcttctgggaggtaacctttaaactcttagaattttccaagtgaaagaaacgtcttgttattcatggtgggctagacaactcctggtagtttatgctaacaaggttacccatggtgtggcccttg

SEQ ID NO: 235877 - DNA, 535 bp, Homo sapiens
gtaattctgcaataaacataaagaattttttaattgggatttttattttacataatatatgagttctacaaactgtgctcataaccaaggggtggcaaactttttctgtaaaggaccaggcaataagtatttcaggctttgcaagctgcaaggtctctgtcacaaatattcaactctgctgttgtagtgcaaaagcagccataggtgacatgtaaaaatatgaacattgctgtgttccaatacaacttatctataggtgctgaaattagaatttcatttaattttcagtgtcatgaaatattctttccccccccccctccgccccatctatttagaatgtaaaaaccattcttagcttgtgggctagatttggctcatgggccatagttwgacaacttctgatataaactatccttcacaaaccaaatcatcctgtaagtgaaagagggaggctgtagcaggagttgttgagggtagggcatcgtggaatatgcctcagtgcctctccacactgaccaaacaggagaacttggca

SEQ ID NO: 235878 - DNA, 601 bp, Homo sapiens
attacttttcttctctaaaatattttatttagattcccttgttattgtaaagcttattttattaagagaagctttcttctatagaaaaatacttaagagaaaatgcctagtatctacaaatctgtgaccatcaatacttccaaggagatgatgtgcttcagtgacttccctgtccctgatcattttcccaactacatgcacaactccaaactcatggactacttcgggatgtatgccacacactttggcctcctgaattacattcgttttaaggtaaaatctaaatgaatcattgcatagtaratgtgtgtgtgcatgtgagcacacatgcatgtatgtgtgcagacacactcagttgtacacacatgagctatatttggcatcttcaggtatgatcagaggaagagatcatcagtgagcttccaccctagaaaatcaccacttataaagaagtaatgttttgaatatttcacttgaatataaggttgaagaattttgcccaacagaacctattctaacaagactttggtgtggcattgtaagggtcctttctgtcagccttaaattcaactgttgaaggacttacaatagtggcagtagt

SEQ ID NO: 235879 - DNA, 590 bp, Homo sapiens
gtttgctctatctctgcctccctcatgtattccttagtactagacgtggatcatggattttacaccgtgtttgggataatgggtatcccatggatagttcatttttcactcggttcaatagttttctccagaaaatactaactacaccacaaataaataaccagctagagaaaataatgaactcaagatttaatcatgcgcactgtggcctgcagcctcagcacagatgatcaccaaggggccttactttatgcaattatgtgtatgtgtaaaagggaagttaccytaaagacagttcagcttctggcaattaacatgtatttcggtcaagtaatctcatacactcgctaatataaatcacttatattatgacgtatataatatatatcattgcacctaaatgggtcagacaagtgtctggagaacagcttcaggaacctccaagatgagaatgggagaatggcagatcttggaaagaacttggtgtggactttggtaaatgtcaaagtcagcccttcatgaagaatgcctggcactagcactgcacaggttaagaaaaatatgaaggagtaggctgagtccttcctgag

SEQ ID NO: 235880 - DNA, 590 bp, Homo sapiens
gtttgctctatctctgcctccctcatgtattccttagtactagacgtggatcatggattttacaccgtgtttgggataatgggtatcccatggatagttcatttttcactcggttcaatagttttctccagaaaatactaactacaccacaaataaataaccagctagagaaaataatgaactcaagatttaatcatgcgcactgtggcctgcagcctcagcacagatgatcaccaaggggccttactttatgcaattatgtgtatgtgtaaaagggaagttaccttaaagacagttcagcttctggcaattaacatgtatttcggtcaagtaatctcatacactcgctaatataaatcacttatattatgacgtatataatatatatcattgcacctaaatgggtcagacaagtgtctggagaacagcttcaggaacctccaagatgagaatgggagartggcagatcttggaaagaacttggtgtggactttggtaaatgtcaaagtcagcccttcatgaagaatgcctggcactagcactgcacaggttaagaaaaatatgaaggagtaggctgagtccttcctgag

SEQ ID NO: 235881 - DNA, 580 bp, Homo sapiens
ctttgggaaataaagacagtgttaaagattattggtaaaataaaaatatcttcaaaatacaaacatgtggtctaaattatgcaggtcagatattaggtttgttaaatgctttaagttcatatactacttctttgacttttaaaaattgttcagtttattttggagcaattgattctagataagaccaggggacatgtgaaattagccatgccccctagctatgcaaagaaggttataaagaaaaaatattttatataagaaagatcttgtacagtaaattcttgtcctaaagtaaaataactggatgtttcaaatgggagrtgtttaggacagccagaaagtccaagcatgttatagatggtctgtgtaagttgtgaaatcatttataaaagagaatttatgcaagaaatgttgtacaatttaaaggagattaggcctcctaaatgcttcataaaatgccactatgactcttaactgtccaccttgcctgctttacagctaagtaaggcctaggacacatggaattagatgctggaaagagatagaccttatctgaacttctctctgggccctaggctcc

SEQ ID NO: 235882 - DNA, 647 bp, Homo sapiens
aactccatggtctaagagtcaaattacctatgataacccatcagttaccagtgctatgcacctaaattggagaaacgactggtattcaataggatataagtctaatgttaattaagcatggactcatgagagaaccaggatggccacyttgtccttcctgagtccttaaagcttttattattaaaagttctgcattccatcactcattatggaaaagataaaatgatacaaattgaatatattggtgtggtgacttataaattgctaaaatagtttataaccaatgtttcatctcatattcctgggaaaacaatcaaagcttcagatacatttggtcacttgatggaccattcaaacattttataacgggattttattccatttttaccttcaatgcatgttttctggttatataagtgctctcccacacaagagggctgatgttataacactaagttattatgccacagtgcattttcaccaggtaaagaaagctttttatgattcactgaagataatcaaccctttcataatctagaacccaaaaatttgatcttctgagaacatcagagaaagactgtcctttccatccacattgcagccaaactttggaaacttgaactttaggttcataatctcaaactgag

SEQ ID NO: 235883 - DNA, 591 bp, Homo sapiens
gcagagaaaagggaatgcttatatgctattggtgggaatgtaaattagttcagcagtgtggaaagcagtttggagatttctcaaataacttaaaatagaattaccattcaacccagcaatcccattactgggtatatatccaaaggaaaaaaaatctttctaccaaaaatacacatgcacttgcatgttcgaaacagcactactcaaagtagcccattaacagtgggacagaacaaagaaaatgtggtacatatataccatggaatactatgcaaccataaaaaagaatgaaatcrtgtccttacagcaaatggatgcagctggaggctagtaacctaagcaaaataatgcaggaacagaaaaccaaatactgcatcttcttatttataattgacagctaaacactgggcactcatggacgtaaagatggcaacaatagacaatgccagttactagatagaagagggaggaagggaatcaagggttgaaaaactaacttttgggtactatgctcacttcctgggtgatggattcaattgaaccccaacctcagtatcacacaacatacccttgtaacaaacctgcacatgt

SEQ ID NO: 235884 - DNA, 565 bp, Homo sapiens
cgttggcctcgaacaggtccatggggttcgtgtcgtatccaaccatggccttgatgaagttggagagattttctagctggtgccagttctgcatgagccgttgatcttggggactgagcccagcttgttcatgagtgtgcataagacaatcccttccttcagactcttctggaagtmggggctgaaagagaggcgggtgagtccctcgatccagctgcagagcgccgcctgcttctgagggtcgcatttgaacaggagctggttcttgatctcggcaaaaagctggtaagacggccccttgttgaactgcgtggaactcatggctgatgggaagggacagggtaagatggacccattagcattttaaaatctaattgaattacagcgccaattccagaaactctagaaccaattcagaaaacatattctcagaaaaaacattcttaaatttcttcctctggaatcattctttgtaccaaaatctatactggtttgagttctccagagaaatagaactaaaggaaatatctacatatctatatatttattgatatataaagttgtt

SEQ ID NO: 235885 - DNA, 565 bp, Homo sapiens
cgttggcctcgaacaggtccatggggttcgtgtcgtatccaaccatggccttgatgaagttggagagattttctagctggtgccagttctgcatgagccgttgatcttggggactgagcccagcttgttcatgagtgtgcataagacaatcccttccttcagactcttctggaagtaggggctgaaagagaggcgggtgagtccctcgatccagctgcagagcgccgcctgcttctgagggtcgcatttgaacaggagctggttcttgatctcggcaaaaagctggtaagamggccccttgttgaactgcgtggaactcatggctgatgggaagggacagggtaagatggacccattagcattttaaaatctaattgaattacagcgccaattccagaaactctagaaccaattcagaaaacatattctcagaaaaaacattcttaaatttcttcctctggaatcattctttgtaccaaaatctatactggtttgagttctccagagaaatagaactaaaggaaatatctacatatctatatatttattgatatataaagttgtt

SEQ ID NO: 235886 - DNA, 565 bp, Homo sapiens
cgttggcctcgaacaggtccatggggttcgtgtcgtatccaaccatggccttgatgaagttggagagattttctagctggtgccagttctgcatgagccgttgatcttggggactgagcccagcttgttcatgagtgtgcataagacaatcccttccttcagactcttctggaagtaggggctgaaagagaggcgggtgagtccctcgatccagctgcagagcgccgcctgcttctgagggtcgcatttgaacaggagctggttcttgatctcggcaaaaagctggtaagacggccccttgttgaactgcgtggaactcatggctgatgggaagggacagggtaagatggacccattagcattttaaaatctaattgaattacagcgccaattccagaaactctagaaccaattcagaaaacatattctcagaaaaaacattcttaaatttcttcctctggaatcattcttwgtaccaaaatctatactggtttgagttctccagagaaatagaactaaaggaaatatctacatatctatatatttattgatatataaagttgtt

SEQ ID NO: 235887 - DNA, 568 bp, Homo sapiens
tggtcccataacaattgaacatccaacatcaaacaatttggggttcttatgccactaaaccaacaagcggagaagaggattactgtattggctggggtgactgctctcagttaacattgggaaatggagttgctgatacacaacagagatagagaagacygtgtctgaaactcaggaaattcactggacattttctgaatgaaaagcaaatccttgggatgattgttgcaatttgtatcacaagaacatttggtaatctttattgaatttgcttaagagaggaattagagtgatactgattatttttagaattttgaatgtctttttatagaaatgaagaaatattaaatgtatatgataaaattatatattgattataaacaggaaaatattccaagtatctaggtccctaagatgcagttattctaacatagacttttaggttattttgttattgttgggaaactgtacggagtattaatttcggggccagatagaaaatatatcaaatatattaaaagttatatatagtaattactgtataaatcataaggaagggaaaacaggc

SEQ ID NO: 235888 - DNA, 594 bp, Homo sapiens
ctaaaacaatgcacaccaatatgcacaaagaggtctagttgggatcaacctctagccttatatcctactgcttgctcatctacacttgtccttcaagcgaccttgtgtctggaaaactttctgtgacactctatacctctccctttcctccaagtcagagggaatgagggttgcctctttgatccttccatcttccatagtgactgcaaacctctatcagatgcctgtctttatcattgttcattktaattggttgcttgcctgttgttcccaacttgactttagggcaagaaggatttattttattttattttattattattttttgtgcttaacacagttcactgcacacactgggcaaatacaatatgttaatatagtatttgggccaggcacagtgattcacacctgtaatcctagcactttgggaggctgaggtgggtggatgacttgagcccaggagttcaagaccagcctgggcaacatagtgagaccgtgtctctatagaaaaaatccaaaaattagccaggcatggtggtgcattcctgtagtcccagctactcaggaagctaaagtgggaggtcaagacctgag

SEQ ID NO: 235889 - DNA, 581 bp, Homo sapiens
agtagcaggacataaggctagaggttgattctagccagacgctgtggcaagtgctaaatttacataagctatctatttaattctcacagtgtgtgaaatagatattatcatcctttcctcttatggaaaakaatagatatcatcatcattttcctcttatggaaagtgttcattttacaaatggattccttacttttcaaaaatatgcactgtgtgtttcttttcatggcaagttcccatattaaaatttgactcttttaaataaatacttaattatagtgtatatataatgctatgtatacagcaggcatttaattcattatagtttgacatttttttcagatggttctgttatctccaaaaaagtttatctgacctgtcacccagttattttttgtcatcttccaacatacctcttactctacaacttttctactgtcattcctaatacaggataaaaaaatcacagctcaagaactcattctaaaaacacctacataatacatacttgtgtgaatttatgcttgaccagttagccaagcatgtctgtagttataagttgtaattatatagaattggaa

SEQ ID NO: 235890 - DNA, 468 bp, Homo sapiens
ctctggagcccttgggcagatggattggcatgggcaatggcagtagcactgttgagatgctcttctggttcccaagggctgtgtgcttatgttggcagtgggtacaatgagttgtgtaggccagccttcaggccagcaggaggtgtttgcagataggagccagmggaggtggtagtagggtgtttatgcccaacctcagtgtcccagaaggagtgctagggtgtctcaggtggtggattgggttgtctaatccccaggaccctggatcctacactctgtgtcagaggggagggggccgaagccaggcagagatggactgagtaagcttgcactgaggtctcccagtggcaagtgcatgcactggccatgatgggtaggggtgtggtgatcatcaagctcctggcagaatgcttgggtgaggtgcagtccctgctgtgctgaggtcctgccatgaaggggagggaggct

SEQ ID NO: 235891 - DNA, 468 bp, Homo sapiens
ctctggagcccttgggcagatggattggcatgggcaatggcagtagcactgttgagatgctcttctggttcccaagggctgtgtgcttatgttggcagtgggtacaatgagttgtgtaggccagccttcaggccagcaggaggtgtttgcagataggagccagcggaggtggtagtagggtgtttatgcccaacctcagtgtcccagraggagtgctagggtgtctcaggtggtggattgggttgtctaatccccaggaccctggatcctacactctgtgtcagaggggagggggccgaagccaggcagagatggactgagtaagcttgcactgaggtctcccagtggcaagtgcatgcactggccatgatgggtaggggtgtggtgatcatcaagctcctggcagaatgcttgggtgaggtgcagtccctgctgtgctgaggtcctgccatgaaggggagggaggct

SEQ ID NO: 235892 - DNA, 530 bp, Homo sapiens
tgaagagagaagaattgctcatattcaggaatctataggaattgaaataaaagcatacaatagcaaatataaataatgcttacatattgtaggtatggtaggtcataggtacagtaggtacaggcttacttagagtarctcatttaatcttaacaactaactgtgatttgcacacaattatttacattgcaggagagaaatcttgtgtggaaaatttttataacttatttagggttacccagctagtaaggagtggaccagcagtttgaacccagatagctgggactggggcatccatgctcttaccttccatgcttgaagactcctttgacagtcattgtggaaaatttttccttaactaaaagtacattttatttaaacatttggttaaatgtctcatagctcaagcagtaggatgtggaggtataagcatagcatcaccatgtcaaggccaaggcttagcaatctcatggctaagttctagtcgaggcaaagaaaaaggaaaaaatcctctttctttctttgaaaaa

SEQ ID NO: 235893 - DNA, 525 bp, Homo sapiens
tatgatggggtctaaaagaaaaaaatacaaacatttacattttataaagggtagaataattcctttaaaataagacccatacaataaatcacacagctatcaaaaataaatcttacagctattaaaaatgtgatattgaagaggaaaaagtggaggataggctagtgaaaaytccttgggtttcctttgagaggaagaaggtgcaaagataaattgagaaataaaagctagagtagaaacaaataacaatggtggagaatcaaaaaacaatgcaacaattacattgtgaacccaccaaggtataaaacatttacctttgtgaacaataaattaatatgtaaagaagaagacgttatgatttaacaaaagtagaataataaataaacttttaacattgtacattattacttccaagtctagtctctcctttgaatagaatttatggctcattgcacattaaatgacactgaaatggcttaggaaatctttgaatgtgtgtaagttttgccttactacaaacaagag

SEQ ID NO: 235894 - DNA, 525 bp, Homo sapiens
tatgatggggtctaaaagaaaaaaatacaaacatttacattttataaagggtagaataattcctttaaaataagacccatacaataaatcacacagctatcaaaaataaatcttacagctattaaaaatgtgatattgaagaggaaaaagtggaggataggctagtgaaaactccttgggtttcctttgagrggaagaaggtgcaaagataaattgagaaataaaagctagagtagaaacaaataacaatggtggagaatcaaaaaacaatgcaacaattacattgtgaacccaccaaggtataaaacatttacctttgtgaacaataaattaatatgtaaagaagaagacgttatgatttaacaaaagtagaataataaataaacttttaacattgtacattattacttccaagtctagtctctcctttgaatagaatttatggctcattgcacattaaatgacactgaaatggcttaggaaatctttgaatgtgtgtaagttttgccttactacaaacaagag

SEQ ID NO: 235895 - DNA, 525 bp, Homo sapiens
tatgatggggtctaaaagaaaaaaatacaaacatttacattttataaagggtagaataattcctttaaaataagacccatacaataaatcacacagctatcaaaaataaatcttacagctattaaaaatgtgatattgaagaggaaaaagtggaggataggctagtgaaaactccttgggtttcctttgagaggaagaaggtgcaaagataaattgagaaataaaagctagagtagaaacaaataacaatggtggagaatcaaaaaacaatgcaacaattacattgtgaacccaccaaggtataaaacatttacctttgtgaacaataaattaatatgtaaagaagaagacgttatgatttaacaaaagtagaataayaaataaacttttaacattgtacattattacttccaagtctagtctctcctttgaatagaatttatggctcattgcacattaaatgacactgaaatggcttaggaaatctttgaatgtgtgtaagttttgccttactacaaacaagag

SEQ ID NO: 235896 - DNA, 508 bp, Homo sapiens
gcccggagagctaacctgacccagagagagaggatcatcaagcccctgagcactcgcattactagtgaggacagccacccatcctmacagctctcttggataaagatggccccagtgagcctggcatttctggctgctggcttggcatactttcgatatactcattacggtaaatggaaataaatgaaagaacactgagggggaaaagcatggaatagtttctactcatcctgatcgttatatcttttaaagtcaatagcatatgtccaatattatttagtactactataactgccataaggaaatgtttagatagactttacaagtagatttattatttttaaaatgggtataattatatatattcataatgttatgaatgcacaagaaaatcttatttaaaaaaaatcctgtttaagccttaaaaatgatgctgcaacacagagtatacttaaattgttttcattaagctgaattcttcttgtagaaatttacccatggtgaaacc

SEQ ID NO: 235897 - DNA, 508 bp, Homo sapiens
gcccggagagctaacctgacccagagagagaggatcatcaagcccctgagcactcgcattactagtgaggacagccacccatcctcacagctctcttggataaagatggccccagtgagcctggcatttctggctgctggcttggcatactttcgatatactcmttacggtaaatggaaataaatgaaagaacactgagggggaaaagcatggaatagtttctactcatcctgatcgttatatcttttaaagtcaatagcatatgtccaatattatttagtactactataactgccataaggaaatgtttagatagactttacaagtagatttattatttttaaaatgggtataattatatatattcataatgttatgaatgcacaagaaaatcttatttaaaaaaaatcctgtttaagccttaaaaatgatgctgcaacacagagtatacttaaattgttttcattaagctgaattcttcttgtagaaatttacccatggtgaaacc

SEQ ID NO: 235898 - DNA, 440 bp, Homo sapiens
aggaagatgcttaaattttaccttgctaaaagaaaaatcttgtaagaattttcaatttttttttgtagaagtgattcagatttagaaattattgtcaagaattgaatgtttatagaatgaatgagtggcatggatgaatcttacctgttggtgctaactagttagaaaatacatcctcaggrctttatcaactcattgatgctagctagttagcattaacagtgctgtcagaaactggttcactttgttaactctgggccattataatgccacagtgaatggattgttttatttcagcctaccatcaaaaggctcatcccactcttttccttaaacctttatactctatctcatttggtacaatctgtttgatttggttcttatatcctgatcctcatattccttggaacgttttgtgttttactatggcttggcaggaa

SEQ ID NO: 235899 - DNA, 473 bp, Homo sapiens
aattttaccttgctaaaagaaaaatcttgtaagaattttcaatttttttttgtagaagtgattcagatttagaaattattgtcaagaattgaatgtttatagaatgaatgagtggcatggatgaatcttacctgttggtgctaactagttagaaaatacatcctcagggctttatcaactcattgatgctagctagttagcattaacagtgctgtcagaaactggttcactttgttaactctgggccattataatgycacagtgaatggattgttttatttcagcctaccatcaaaaggctcatcccactcttttccttaaacctttatactctatctcatttggtacaatctgtttgatttggttcttatatcctgatcctcatattccttggaacgttttgtgttttactatggcttggcaggaatggatacagcactttctatcctttatcattaccccatagtcaggct

SEQ ID NO: 235900 - DNA, 473 bp, Homo sapiens
aattttaccttgctaaaagaaaaatcttgtaagaattttcaatttttttttgtagaagtgattcagatttagaaattattgtcaagaattgaatgtttatagaatgaatgagtggcatggatgaatcttacctgttggtgctaactagttagaaaatacatcctcagggctttatcaactcattgatgctagctagttagcattaacagtgctgtcagaaactggttcactttgttaactctgggccattataatgccacagtgaatggattgttttatttcagcctaccatcaaaaggctcatcccactcttttccttaaacctttatactctatctcatttggtacaatctgtttgatttggttcttatatcctgatcctcatattccttggaacgttttgtgttttactatggcttggcaggaatggatrcagcactttctatcctttatcattaccccatagtcaggct

SEQ ID NO: 235901 - DNA, 633 bp, Homo sapiens
ctaatagctattgcattctttaaaaactcaggctcatacttcaaatcaatattggacctgttatgataataaattattatatcytccctgctctaagacattcatagccattaggagacttgatttagagtcttggctttgacactcagtaggtgggacacttcggcatgcaatagaattgtaaaattttactgctgtccttttttaaaagcagtaattcttgaacttgtttctctttgcccatgaataactttgaaatgctggtagaagtcatggaacttctaattagaaaatcgcatatacattatgcacacaagattttgcatacaaatcagagatttgtgaactccctgaaacctgttcataggtccatggactgtctctaaggttgcccagttgtgctatccatgaaacacaaaattgtcctacaatgaagatgtttacagctccatattgagatcatttgattctttaatgacaaattttcttagatgggagatcatcctgcctcagcaaataatgtcaagatcaagctccactgtatgggctacagaaaaatatgaccataaactcattgaaacttctgacatattaagagacgaaatgccatatatttaaaatttccaggtagta

SEQ ID NO: 235902 - DNA, 601 bp, Homo sapiens
catggtctataggatctgttcagcccaatatctcctctggtcttcttgacattgggtcttgaatgggctgctctggctttaagttccctcttcatttctggaccagaaatttctcatctttatttgaattcactttttattctcatttttttttgaagggagtgaatgattactcatcttagctcagtctacaagttgttagaaaaacaaatctctagatcctattaatttttataacccagagccttttattaatctctacagatcctctttcacttatgcattagaaattaagatatacttaaycataatgtgtgtatttatacacacattatgagcattatatatgtatatttgtgtgtgagtgtgtgtgtgtgtgtgtgtgttcaattatgttgatctttcccctttctgaaaagccactggttgaggctttcagtcattgggtttgtacagacctagaaaagcacacaaatgagggcagctcctgcactgtgcaggccaactgttcctgcaccagccagctggagcccagaaacatacagaagccatagggacaatccattaccttgagtagtataaacgtcaggacccttatgag

SEQ ID NO: 235903 - DNA, 601 bp, Homo sapiens
catggtctataggatctgttcagcccaatatctcctctggtcttcttgacattgggtcttgaatgggctgctctggctttaagttccctcttcatttctggaccagaaatttctcatctttatttgaattcactttttattctcatttttttttgaagggagtgaatgattactcatcttagctcagtctacaagttgttagaaaaacaaatctctagatcctattaatttttataacccagagccttttattaatctctacagatcctctttcacttatgcattagaaattaagatatacttaatcataatgtgtgtatttatacacacattatgagcattatatatgtatatttgtgtgtgagtgtgtgtgtgtgtgtgtgtgttcaattatgttgatctttcccctttctgaaaagccactggttgaggctttcagtcattgggtttgtacagacctagaaaagcacacaaatgagggcagctcctgcactgtgcaggccaactgttcctgcaccagccagctggagcccagaaacatayagaagccatagggacaatccattaccttgagtagtataaacgtcaggacccttatgag

SEQ ID NO: 235904 - DNA, 634 bp, Homo sapiens
gtgctaacagtggaatgtcaaaatctccaagtattattgtattgaagtttatttctccatttasaactaataatatttgctttacatatctgtgtgcttcagtgtggatggatacaaacttataattgttatatcctcctgctgaataaatccttttatcattatgtaataacatctttgtctcttttttcagttttttacttaaagtctattttatctgatataagtaaagctacccctgctcatttttgatttttgtttgggtggaatatctttttccattcctccatttttggtctgtgtatatctttttagatgaagtgagtttcttccaggcagcatatatttgggtctttcttttttatctattcagccagtttatatcttttaattagggaatttaatcagttttcattgatggttattgatacatgagaacttactcctgtcattttcttagttgttttcaggttatcttgcatatcctttgtttcttcctcttttattgtttatttttatagcttggtggtatgtttgtagtgacaaaagttgactcctttttttttcttcaaatttctgtatctgcctgctactgagttttatacttttgcatgttttatgatggtagtcatca

SEQ ID NO: 235905 - DNA, 633 bp, Homo sapiens
agtgctaacagtggaatgtcaaaatctccaagtattattgtattgaagtttatttctccatttacaactaataatatttgctttacatatctgtgtgcttcagtgtggatggatacaaacttataattgttatatcctcctgctgaataaatccttttatcattatgtaataacatctttgtctcttttttcagttttttacttaaagtctattttatctgatataagtaaagctacccctgctcatttttgatttttgtttgggtggaatatctttttccattcctccatttttggtctgtgtatatctttttagatgaagtgagtttcttcyaggcagcatatatttgggtctttcttttttatctattcagccagtttatatcttttaattagggaatttaatcagttttcattgatggttattgatacatgagaacttactcctgtcattttcttagttgttttcaggttatcttgcatatcctttgtttcttcctcttttattgtttatttttatagcttggtggtatgtttgtagtgacaaaagttgactcctttttttttcttcaaatttctgtatctgcctgctactgagttttatacttttgcatgttttatgatggtagtcat

SEQ ID NO: 235906 - DNA, 633 bp, Homo sapiens
agtgctaacagtggaatgtcaaaatctccaagtattattgtattgaagtttatttctccatttacaactaataatatttgctttacatatctgtgtgcttcagtgtggatggatacaaacttataattgttatatcctcctgctgaataaatccttttatcattatgtaataacatctttgtctcttttttcagttttttacttaaagtctattttatctgatataagtaaagctacccctgctcatttttgatttttgtttgggtggaatatctttttccattcctccatttttggtctgtgtatatctttttagatgaagtgagtttcttccaggcagcatatatttgggtctttcttttttatctattcagccagtttatatcttttaattagggaatttaatcagttttcattgatggttattgatacatgagaacttactcctgtcattttcttagttgttttcaggttatcttgcatatcctttgtttcttcctcttttattgtttatttttatagcttggyggtatgtttgtagtgacaaaagttgactcctttttttttcttcaaatttctgtatctgcctgctactgagttttatacttttgcatgttttatgatggtagtcat

SEQ ID NO: 235907 - DNA, 633 bp, Homo sapiens
agtgctaacagtggaatgtcaaaatctccaagtattattgtattgaagtttatttctccatttacaactaataatatttgctttacatatctgtgtgcttcagtgtggatggatacaaacttataattgttatatcctcctgctgaataaatccttttatcattatgtaataacatctttgtctcttttttcagttttttacttaaagtctattttatctgatataagtaaagctacccctgctcatttttgatttttgtttgggtggaatatctttttccattcctccatttttggtctgtgtatatctttttagatgaagtgagtttcttccaggcagcatatatttgggtctttcttttttatctattcagccagtttatatcttttaattagggaatttaatcagttttcattgatggttattgatacatgagaacttactcctgtcattttcttagttgttttcaggttatcttgcatatcctttgtttcttcctcttttattgtttatttttatagcttggtggtatgtttgyagtgacaaaagttgactcctttttttttcttcaaatttctgtatctgcctgctactgagttttatacttttgcatgttttatgatggtagtcat

SEQ ID NO: 235908 - DNA, 571 bp, Homo sapiens
gatagtgattttaaatgaaatcccggaaataactctatcattctgtgatagtgccatggtctggaccattggttgaaaattctgcattaaatgtttctccattgagttcaaagattcgataagattcctgagtatgcctatgtagagcagmgctttatgtcttcttacatttttataagtgttttctgtgattttgccatctaccacaaccacagcttacgtacagttgaaaactgtccaggattcatgtggttggacttatttctgtaatgcaacagaccccactgtgattgctgaaaaattggcagaagtgtttttcatgtacaagaataactcatcaaggagaccattgtttcagaaaagaatgtccaaaagatatggaaaaggtaaattagagctatttccatatgtggagcagcagcttaaaaggaaaatcggctaatatccttctagaatattcctactgtaaaatcccaagactatgccaccacttctcggctttggatttctatttaatgttatttataaatcaaatgctaaaataatttaatttatcatgaatctagttcta

SEQ ID NO: 235909 - DNA, 495 bp, Homo sapiens
ggtaaaggcaatgtaaatagttgcactgtattgcgtattatttgtattattttttatttttgtattattatttttgttgggtttttttctgaatatttttgatccattgtttattgaatccacagatrtggaacccacggttacagaaagtcaactgtgtatggaaatatattcacaaaactgttagatgaaaaagtaggttacatgctataagtagtacattaaattttaaaatacatatagattgatagatataaataagtatacacagagagagagagaaagagaaagagatgaaatctaaaactatatatactgtataatctctgggttgatgaaataagcaatttttatttttattttttcttttaatttgacattttatgattttctaaatttgcaaatatgtattaactgtgggatagaaaaaaatggaaaacattcctgagtccattgtaatagttcataagctataataactgtatgtgaataggt

SEQ ID NO: 235910 - DNA, 495 bp, Homo sapiens
ggtaaaggcaatgtaaatagttgcactgtattgcgtattatttgtattattttttatttttgtattattatttttgttgggtttttttctgaatatttttgatccattgtttattgaatccacagatgtggaacccacggttacagaaagtcaactgtgtatggaaatatattcacaaaactgttagatgaaaaagtaggttacatgctataagtagtacattaaattttaaaatacatatagattgatagatataaataagtatacacagagagagagagaaagagaaagagatgaaatctaaaactatatatactgtataatctctgggttgatgaaataagcaatttttatttttattttttcttttaatttgacattttatgattttctaartttgcaaatatgtattaactgtgggatagaaaaaaatggaaaacattcctgagtccattgtaatagttcataagctataataactgtatgtgaataggt

SEQ ID NO: 235911 - DNA, 416 bp, Homo sapiens
tggttctttctgtacacaatataatttatggtgtatattgtaaagaaaagaaaaatatttaaaatgtttctgtgttcacatgagataacatcacatgcatattatttaaaatatttccaaacacttatcaggaaaataactcaattatttaaggaaacaagttccgcccccccccccmcacctttttatctcctcctatgattgccagaaggcaatgaaaataataaatggagttccaaatatcataaattttgccaatgtatactggtgaaaactactcaaccgaatctgcaacttccattctttggcaagttaatttatattcacaatattgaagtatccaccaggagggctatgggaatcgagtcactagaatcgacgtaggaacacacagcagtgtagttccttttttatgt

SEQ ID NO: 235912 - DNA, 579 bp, Homo sapiens
ccaaaagcatgtgtgcagtagtgggataactccttatcatatagagaggcagaagctagtctatggaaaattcttcccaattgtatagcctctatataacagaaaagtggtagaaattctccaaatttgacagtaattgtgtaatcatttatgcttttaaccattaaatttataagctaaaggaaattctaaactatcaaccatctgaaacattttgacaaatcatgctgaggatattgctaaattacatttctactctctatataaaatataattataaaatcattagtattatagaaatccaacaggaaattcattaataaagtattacctaatataacataatttgtaagttttgttgttttgacagcttttttttttwaaaaaagatatttatttcctcatttgatgtgatttagctctgtatccccacccaaatctcatcttgaattgtactctgataattccctggtgggaattatcaccagataactcccaccagataactcctggtgggggataactgaatcatggaggcagtttcctcaatactgtcctcatggtaatgaacaagtctca

SEQ ID NO: 235913 - DNA, 579 bp, Homo sapiens
ccaaaagcatgtgtgcagtagtgggataactccttatcatatagagaggcagaagctagtctatggaaaattcttcccaattgtatagcctctatataacagaaaagtggtagaaattctccaaatttgacagtaattgtgtaatcatttatgcttttaaccattaaatttataagctaaaggaaattctaaactatcaaccatctgaaacattttgacaaatcatgctgaggatattgctaaattacatttctactctctatataaaatataattataaaatcattagtattatagaaatccaacaggaaattcattaataaagtattacctaatataacataatttgtaagttttgttgttttgacagcttttttttttawaaaaagatatttatttcctcatttgatgtgatttagctctgtatccccacccaaatctcatcttgaattgtactctgataattccctggtgggaattatcaccagataactcccaccagataactcctggtgggggataactgaatcatggaggcagtttcctcaatactgtcctcatggtaatgaacaagtctca

SEQ ID NO: 235914 - DNA, 579 bp, Homo sapiens
ccaaaagcatgtgtgcagtagtgggataactccttatcatatagagaggcagaagctagtctatggaaaattcttcccaattgtatagcctctatataacagaaaagtggtagaaattctccaaatttgacagtaattgtgtaatcatttatgcttttaaccattaaatttataagctaaaggaaattctaaactatcaaccatctgaaacattttgacaaatcatgctgaggatattgctaaattacatttctactctctatataaaatataattataaaatcattagtattatagaaatccaacaggaaattcattaataaagtattacctaatataacataatttgtaagttttgttgttttgacagcttttttttttaaaaaaagatatttatttcctcatttgatgtgatttagctctgtatccccacccaaatctcatcttgaattgtactctgataattccctggtgggaattatcaccagataactcccaccagataactcctggtgggrgataactgaatcatggaggcagtttcctcaatactgtcctcatggtaatgaacaagtctca

SEQ ID NO: 235915 - DNA, 427 bp, Homo sapiens
ctctgctcgtggatggctttaacaccccgccacacccaacaagtgtgggttatatcctataaggatgatattcacagtattgaaaggatgtagtttggaatgttcataagtgagtcatagagaataaaacagctctggacaatatcttctcaacacagaatggctacagccttgctgkagagtgagtccagctgctacgtgggaagggagttggattcttaataacaagggcagcatgacacaagtatttggtgagcaagaaggaggtagtaatgaggaaggagaaaatgcttcacaatttaaataaaagacaccatcaaaaggcactgctttttattgagtaccttaatattttaataataattttaactgttacatgaaaggttctctcatttttttcatatttggcgttagtttatggctttct

SEQ ID NO: 235916 - DNA, 427 bp, Homo sapiens
ctctgctcgtggatggctttaacaccccgccacacccaacaagtgtgggttatatcctataaggatgatattcacagtattgaaaggatgtagtttggaatgttcataagtgagtcatagagaataaaacagctctggacaatatcttctcaacacagaatggctacagccttgctgtagagtgagtccagctgctacgtgggaagggagttggattcttaataacaagggcagcatracacaagtatttggtgagcaagaaggaggtagtaatgaggaaggagaaaatgcttcacaatttaaataaaagacaccatcaaaaggcactgctttttattgagtaccttaatattttaataataattttaactgttacatgaaaggttctctcatttttttcatatttggcgttagtttatggctttct

SEQ ID NO: 235917 - DNA, 541 bp, Homo sapiens
aacatgagaaaaaattgattttattgaattcatgatccatttactcctattccccaatatgtgctctgttattaagctttaccaaattgtgtactgmtgtcattgatacattgatctctttttttaatacactgtcctttttgctaaaccaattgtttttatattctttcataacaagtccaaaaacatgatttagaggacaaagttgtttatttttccactaagtgtagggaagggagagcaggatcattcaggcatcattcaaatcaacacttcccccaacaataagtaccaggcactgcattatctggaagcttgtaaagtcagccgctaagttaacagaaatattatgctcagagggaaatcaaaaggagctattgacaaaaattgctctattaaatgacgctgctggaagtggcataatatcaatgcaacacaactccaaaaagcaggtcctgtcacatatgtggaaacaaggattttaatttaaaggtgaacaaaaccaatttgcatcataacaggcattaagaatcaccattta

SEQ ID NO: 235918 - DNA, 639 bp, Homo sapiens
tttttttttttttgagacggagtcttgctctgtcacccaggctggagggcagtggcgcgatctcggctcactgcaacctctgcctcctgggttcacgccattctcctgcctcagcctccagagtagctgggactacaggcgcccgccaccacgcccggctaattttttgtatttttagtagagacggggtttcaccatgttagccaggatggtctccatcccctgacctcgtgatccccccgcctcagcctcccaaagtgctgggattacaggcgtgagccaccgcggcgggcccaaaaacaatttttaaccttggagggtcccagtggtgctgtgctttgcatggaaatgagaagaatgatcktctccagaattctgtgaatccctgtgttatctattcctttaaataacactgtttgtctcagagttccataaataatctcaagtaaacattttcatcagacattgagggtgatcatctctccatcagggctcaatatcaatctgaactggatttaattgataaaccagaccactcagctcctatttgcagttttattttctctcatcttgagaattcatcacaaacattatcttccaggcagtagtcaaaatttcaaattcatattacatcatgca

SEQ ID NO: 235919 - DNA, 549 bp, Homo sapiens
cagcagcagatagtgaaggaactttcataattcaaatgtagagaacaaatatrttattattgtattagtttatagggctgccatgacagggtgcaacaaattggtggcttaaacaacagaaatttattgtctcatagttctggagaccagaagttcaaggtccgggcttctgcagggctggttccttccttggacctgaaggaaaatctcttccatgtctctctcctgacttctgggggtcactgggcatctttggtgtttgtggcttgaagacgcatcacttaaatctctgccttgatctcctcatggcattctttctgcctgtctaaatttctccttttataaggacgtgggttctattggattagggccactctagtgacctcatattatctgattatgagcaaaaaacctagttccaaataagatcccatcagaggtactgggggttacgatactaacatcttttgtggaaccacaatttaacccataataatgatcttaaattttttagataattacatgaaaacatgctttgtgtgtgtgtgt

SEQ ID NO: 235920 - DNA, 549 bp, Homo sapiens
cagcagcagatagtgaaggaactttcataattcaaatgtagagaacaaatatgttattattgtattagtttatagggctgccatgacagggtgcaacaaattggtggcttaaacaacagaaatttattgtctcatagttctggagaccagaagttcaaggtccgggcktctgcagggctggttccttccttggacctgaaggaaaatctcttccatgtctctctcctgacttctgggggtcactgggcatctttggtgtttgtggcttgaagacgcatcacttaaatctctgccttgatctcctcatggcattctttctgcctgtctaaatttctccttttataaggacgtgggttctattggattagggccactctagtgacctcatattatctgattatgagcaaaaaacctagttccaaataagatcccatcagaggtactgggggttacgatactaacatcttttgtggaaccacaatttaacccataataatgatcttaaattttttagataattacatgaaaacatgctttgtgtgtgtgtgt

SEQ ID NO: 235921 - DNA, 559 bp, Homo sapiens
gaattcatattaataatataaaaccaaatttccaaagaagagaaagggagaataaaagacttaaagcaggacagcacctcccctcccckactcccacttaagaacacatctgaaagtgggtacaccattttcattttcatgccattggccagaacattctcaaggcctgtccccttataaaggagccaaaaaccacaaatataattgcaagtttccaggtacacaggtggtatctagacctatcacatgaagaaggagaggcctgaaactgggaggcagatagcaacctgtcccaagcccataaaccaacatacgtgtgtgaatgcacctcccaaataaagccttaatatgacttgcaaatgttggaacatcattaagagtgatggtttccaggcataactgtacttaaccaggggctctatcttcagatgccgccatttgtggcattgtactagatacatcaatgttaaacataaacagtattcaatttaacacaaaatgcagttctaaaaaaattgttctgtgaggggaattgagcatattctgaaaggcaaaggtt

SEQ ID NO: 235922 - DNA, 338 bp, Homo sapiens
tcaattagtggctttaacataatttcggcaacatcagtaaaatttgcttcttaataagtctaggaatatgaaaacagcatttaatatagataaatctatgaataawatacactttctatttatttggggaattttgttttcccaaatatttaaatggttttttttttttgtatattgttattagagcaacaagaaaaaagacaaataacattttagaactttacatcttttccttcataccctgacatttcagtcatatgatatgattggcaatgcttgaaacctcgttatcagtcaaaccagtgagaactggataagccatttgttttgtatgcaaa

SEQ ID NO: 235923 - DNA, 532 bp, Homo sapiens
tctaatatagtattgaagaagtaaaagctccataatgaaaaaaactaaacacaaattactttttagaaacctctcakcgatagaggtaggacaggtatattttagttttgaatatcaatgccaagaaagaagcacatttgtgagacagctggctagttccatttcttcaacttgtcatgtaattaattggatgagtttataaatggaaattgtaacaaggcaacacccatatcataccagatggtacatacttccttagatctgagaatatctgtatttaatgtattttatttagtttgatatatctactaaaagtagtgtgcaaaaatggttatgaacaggagcactggagtgaaactgacctgggtttgaatatccagctcttctaatttgttcattcaatgaatgtttacccaatatacctactatgaggtaggtgctctccaaggttctggaaaaccagccaagattaaattgttccttgttcctgggtatttacaatctagtgggaggaagaaagaactagcaatga

SEQ ID NO: 235924 - DNA, 532 bp, Homo sapiens
tctaatatagtattgaagaagtaaaagctccataatgaaaaaaactaaacacaaattactttttagaaacctctcagcgatagaggtaggacaggtatattttagttttgaatatcaatgccaagaaagaagcacatttrtgagacagctggctagttccatttcttcaacttgtcatgtaattaattggatgagtttataaatggaaattgtaacaaggcaacacccatatcataccagatggtacatacttccttagatctgagaatatctgtatttaatgtattttatttagtttgatatatctactaaaagtagtgtgcaaaaatggttatgaacaggagcactggagtgaaactgacctgggtttgaatatccagctcttctaatttgttcattcaatgaatgtttacccaatatacctactatgaggtaggtgctctccaaggttctggaaaaccagccaagattaaattgttccttgttcctgggtatttacaatctagtgggaggaagaaagaactagcaatga

SEQ ID NO: 235925 - DNA, 532 bp, Homo sapiens
tctaatatagtattgaagaagtaaaagctccataatgaaaaaaactaaacacaaattactttttagaaacctctcagcgatagaggtaggacaggtatattttagttttgaatatcaatgccaagaaagaagcacatttgtgagacagctggctagttccatttcttcaacttgtcatgtaattaattggatgagtttataaatggaaattgtaacaaggcaacacccatatcataccagatggtacatacttccttagatctgagaatatctgtatttaatktattttatttagtttgatatatctactaaaagtagtgtgcaaaaatggttatgaacaggagcactggagtgaaactgacctgggtttgaatatccagctcttctaatttgttcattcaatgaatgtttacccaatatacctactatgaggtaggtgctctccaaggttctggaaaaccagccaagattaaattgttccttgttcctgggtatttacaatctagtgggaggaagaaagaactagcaatga

SEQ ID NO: 235926 - DNA, 509 bp, Homo sapiens
gagagaacaattcctgttgatttaagccacagacttcatggtaatatgttacagaagccacaggactccagtacmggtgagaaaatgagacagtattggtgtaggtgtagcactgggttcatttaaagacagcagtgttctgaaatattttgtctgtttttgtgagcctaaaaatactttatctcttaacagagatttttctccttcatctacattccgtctagctacccctgttcctgacattgctgagggccctggggtcacaagcataagtctattctgatggaatcaggttctgctgctgtagcctgggaaggccccacctcaacgacatctgctgtcttctgcagctcctccacctgcaggagggtctcagttattttgacccttgttcaaacctagaagttagaagttttgtggcccctggctgggacactccatgaccaagaatcagtgtataaattctctgcttttccacttttagagtgaaaaattatgggtatacattg

SEQ ID NO: 235927 - DNA, 590 bp, Homo sapiens
cacatagaataattccagaattcatttaataatgaaagctattggccgggcacagtggctcatatgtgtaatcccagcactttgcggggctgaggtggatcacttgaagtcaggagttcgagatcagcctggccaacatggtgaaaccctgtctctaataaaaatacaaaaattagccaggcgtggtggtgggtgcctgtaatcctagctactcaggaggctgaggcaggagaatcgcctgaacccrggagacggaggttgcaataagccaagatcgtgccacagcaccccagcctgggcaacagagagagactctgtctcaaaaaaagaaaaagaaaaaagaaaaaaaaatctattactaggtgttgcttattctatataattaacacacaatttgataaaggatagctattaatataaattttttacattaataggttaagggagagttaagtaaatatggtaatttaggagatactgaagagataacttccatttctgaagaaaaactttttttgctacaaggagatgatcatattaaggaaaacacctctattgcaaacagtcattgacatttaaattaaaatgaa

SEQ ID NO: 235928 - DNA, 590 bp, Homo sapiens
cacatagaataattccagaattcatttaataatgaaagctattggccgggcacagtggctcatatgtgtaatcccagcactttgcggggctgaggtggatcacttgaagtcaggagttcgagatcagcctggccaacatggtgaaaccctgtctctaataaaaatacaaaaattagccaggcgtggtggtgggtgcctgtaatcctagctactcaggaggctgaggcaggagaatcgcctgaacccaggagacggaggttgcaataagccaagatcgtgccacagcaccccagcctgggcaacagagagagactctgtctcaaaaaaagaaaaagaaaaaagaaaaaaaaatctattactaggtgttgcttattctatataattaacacacaatttgataaaggatagctattaatataaattttttacattaataggttaagggagagttaagtaaatatggtaatttaggagatactgaagagataacttccatttctgaagaaraactttttttgctacaaggagatgatcatattaaggaaaacacctctattgcaaacagtcattgacatttaaattaaaatgaa

SEQ ID NO: 235929 - DNA, 636 bp, Homo sapiens
tgtgctcctttatttaatttacagctgtttctgaaaaggcagcattcagtgttagatgaaacaacttatgcctcctgtcatatttcacattttgttttatgctttagtggatttcatggcgatctcttttcaaccaataaaatttgtttcagggaagaagatacattttctttaaatagtcagactacagaaagagtcctatctcatgaaaacttttcacaggactatktatcaacagcaggccctgcagagctttacaaatagttgggccttttaattctcatagaggtcagtttcattttctcgtggtcatattccacaaaagcaactggagtagaatgggaggcatgcttgacctggcctcagtttacttcagtctaaatcctgactcccacttgacaactataactttgaaaaaatcccttcatttctctaagcccatcatcctcatttgtcaggtggggttagtaacagttgtccacaggattattttaacaagccaaaacagtgcccatgtaaagtgcctcacactgacctggcccaaagtaagcaaccaagatatgcaattagaatcaccagggcatatgcaattcatcttacatgagattacatgagttaacagtttacaaggagtcc

SEQ ID NO: 235930 - DNA, 656 bp, Homo sapiens
agtgtatatctgagagtaattgcaagaaaatatgtaatcatctttattcaggccatgatacatctgatttctggtcttttatctgtttcctttcagtttggtaccaaccacaaataccagtgactctgaagcaaacaaggactgtatggagacggttgttggacatgctcttcttgcaaggcctaaactttctttcctatttctrgcctgaaatatgattctacctccatttactttctcttgttgtatttcccaagacaactaagacaggatactaaaacttgattttaaagcaatcttcattacgcaatctacaatggaaatttcatattagaaaccaggggaatttatctgtagccagaaggccttttagtttagagtgaggcaagagtaaaatcagagccactggctgaaagtcccaagcccacaattttctcctttattcacattttccattatgcacttggagacatgcccatgcactgatgaacaattgtattctgcattttgcattctgctttgtttgtggagacctggagagatttgtggactcttggataaattatgtgaggggatgtgactattctttactgttctgggtgatgagagtcggaagcccatggacatgcagagaaattattttcagaaaatgagca

SEQ ID NO: 235931 - DNA, 442 bp, Homo sapiens
gtgccttggctggcaccacccatcatagtgttgttaccagaggtctgcaaacaccttggccactccagcacagcaggtttctaacctcaagtgtccagaaaacaaagctggcaggccctcagaatcagagcacaaagcataggagtcctgaactgatatttgtccccctaatcgtcagccagttgactgaactcatcttagaccaaaaccaaagcccctaaaacatctaagaggataaaaggagggggtggaaagcctattcaaatgacaccaacttcaaagaccaaagtaacatcagcccacgaagatgagaaagaatcagcacaataactctggmaactcaaaaaaccagagtgtcttcttacctccaaacaaccacactagttccccagcaatgattcttaaccaggctgaaatagctgaaatgatagaaaaagaattc

SEQ ID NO: 235932 - DNA, 607 bp, Homo sapiens
gctaggaatattatctcccttattcctcacaagagccctgtgaggtagacaccaaaattatctctattttatagatggaagaacccgaggctcagaaaagttaagttcctaggccaaaatcactgctaactgggcagtagrtaaaagaggggtggtagagaggcagatggatcagcatatttgagaccccttaaaataaatttctgatctggagttacaggaaatctctcattgcccagaccctgccttattgaaggttatttttctgactatacacaccgtcagttttataacataagacatgcagaggacacaactcattcgatgaaattttgttttccactccacttttcaaaagcttgtatttttcataattgaagagtaactgctatagttattgatcatgataaaattaacatatttttctcaattagattcatatcagagcacctctcaaagctggctctcaaagaatctgctcactttacacctgcctctgaagggaataaggaaaaaacatgctacatgccctcccttctgttcaaagagaagccacatttgtcccgcacactaatcaaagaaatgtgctaccatcttgcccaatttg

SEQ ID NO: 235933 - DNA, 386 bp, Homo sapiens
ttttaacaacccttaaagcattaaaactaatagaagcttaaaaatcactgtagcccttgcttggggcctttttgttgttgttgttttatttttatatttttctcttcatctaccactgttrgaacattccctatgtaacactgtacaaacacaccagagtgaattctggtaggaagtagcaggctttctgtgactctcacccgagagactagtctggccgccgtacttgcacgaccctaggtccactacctttgtatccagattcaggattcttcacacgtgcatactcccaaccctatgacaatgacaagcctcctgggtaataatactagcccacacaatcctgtaacaactaataattagaatataagttatattccttttat

SEQ ID NO: 235934 - DNA, 386 bp, Homo sapiens
ttttaacaacccttaaagcattaaaactaatagaagcttaaaaatcactgtagcccttgcttggggcctttttgttgttgttgttttatttttatatttttctcttcatctaccactgttagaacattccctatgtaacactgtacaaacacaccagagtgaattctggtaggaagtagcaggctttctgtgactctcacccgagagactagtctggccgccgtacttgcacgaccctaggtccactacctttgtatccagattcaggattcttcacacgtgcatactcccaaccctatgacaatgacaagcctcctgggtaatratactagcccacacaatcctgtaacaactaataattagaatataagttatattccttttat

SEQ ID NO: 235935 - DNA, 388 bp, Homo sapiens
gccacatgctccctctgctgtggtctgctgctgtccaaatgctctattacactggaatttgttttcctctgggtacagatgagagaagaaggatctgtagagtggcgttaagtgaattgaatgttccttctgcaaatgaaaatgagcggctaatcggattccgtaatcactctctcygattagagtcaccctccctcccccgctgacttccgcacctctgacgtccctcagtgatgacctgcagcatcccctgcttagtcgaaatttgtctccttacacatctgttctgatcactaaacccgatttacttcatcctctaagtgccagcaacaatggcaggccacataggggtgggggcctgagatcatgcttgttctaactgccgaaa

SEQ ID NO: 235936 - DNA, 388 bp, Homo sapiens
gccacatgctccctctgctgtggtctgctgctgtccaaatgctctattacactggaatttgttttcctctgggtacagatgagagaagaaggatctgtagagtggcgttaagtgaattgaatgttccttctgcaaatgaaaatgagcggctaatcggattccgtaatcactctctccgattagagtcaccctccctcccccgctgacttccgcacctctgacgtccctcagtgrtgacctgcagcatcccctgcttagtcgaaatttgtctccttacacatctgttctgatcactaaacccgatttacttcatcctctaagtgccagcaacaatggcaggccacataggggtgggggcctgagatcatgcttgttctaactgccgaaa

SEQ ID NO: 235937 - DNA, 512 bp, Homo sapiens
ggaggttaatttcaaccacaggatatgtaaagccatactgagagccacattcaagaaaamgggagtgaaggagggtggcgcatgctcatcacctttatcaccagtaacagcaatgccagcagggcacactgcaagcttagcaagtgccatgcagtggcagaaagagctctgggtgggcagatctgacttcaggcactgagaagtcatgagacttaaagcagatctggcctctctctgacacaggttccctgtctttagaaggaagggattggacccacagcctgtaagttcttttcagctgtaataggctttgacacatgttttgtgacaggaacacacccaggactctccagagtcattaataaacaatgaaacaaccacccaccttgcccggctgctgtttgagagaccatgaagctcagcaggcaagtgaaagcataaaaatctggagctccaaagtctaatgctactatggatgttattcccatagcttgatttccccagctttaaga

SEQ ID NO: 235938 - DNA, 543 bp, Homo sapiens
tgctctaactcaaggtaaaaagaaaacaaacaaacaaaaaatatgggaatcacaaccacaaagttataatgatagcctggttgccaagactggctctgaggggcagatcaggtctttcaaacccagaatccaaaagaagtagagagattaagcatgatacaggtgattgcccacaccaggaagatccaatcagatgggcaaaaaacaaacatgttccaggtaaggccagtcggtaaagtctatgcctgcatgacaatatgcagtactcactttcagttcagacttttgtggatttgaatcttaagtctgccaccttactacctgggtgaccttgggtaaatcacacaacctctctaagcctcacttctctgcagcctcgcattttttaaaggagggtaatagttttgctcatagaattgtttcctgttgtttgcaaaacaaacattatagtacttggtacagaattggtgcttaataaattatagttctcrtaactcaacttctaagcgtaaccagatgtgagtcaaagaatgctgctcactg

SEQ ID NO: 235939 - DNA, 616 bp, Homo sapiens
ctggtctcaaaccctagctccttggaggtgtctctaggggaggcaggagactggtctgactgggctccaagggaccttccctgcttcgacctgagcagatctgctttccaattgtgtacattgggattcctcatgacattttccttgaaggaattctgctgctcttaaaaagaaaaaagaaaggaaaagagggaaaacaaaaagtctgaaactcacagtggtagaatttcttaaaacagccagtagatggcaaactttactgcaaggaaacaattttgcagcctatataatttggtctgaaaatagcaattaaactctacatccagtaaaatttgctatcctgtatataagtcttctgttaaatcaggaaacaaaattctctatggtactttctctgggaactaaatttcaattataatttaaaatatcctataacttctttctgtgtccatttaagtcttgctctgaaggtattatcactatgaaaattattgcattgttcactgaaagtacatacaatgtgctaggtatagtaatgtagrtgacgtagttttttcattaggatgaacccaactatgtattttattaatgagtttggttgaggcagcacaaaggt

SEQ ID NO: 235940 - DNA, 535 bp, Homo sapiens
acctatcatccatccttggttgcactccttacaattcagtaacaaagatattcccagaattgagactgataatgttgcaggcttgctcagttcttgctttttgttttttttttttcaattagatctcaaatatcagtttccaaagtgagtaatttatcacctatattatgtagatctttctgtattacattctttaaaatataaagaatagaggaattgcaagaactccttgcaatttgggaaaatattcacaaggattgaaggtatttgaatagttttagctcaagaagaatgtaaagtgttcatgtgcagttaatattgattatcaagacgttaaggaggtgacggcaaatatcaaatagttattcaggtgttgtaatggttaacccaagatgaatgctgtaaaaggacgctcataaaaaaatcacagattattagcagtcatccgcataattatttctcttctctctctmtatatatgtatatataaataatattttttcatattcatacaaaaaatccttttagaaaatac

SEQ ID NO: 235941 - DNA, 503 bp, Homo sapiens
taggccaaaaatcttcaataaacataaaacagattattatttatattaaaataaattttattttaaaaataatttagttattcaaacaayaaattttaagtcacagagctactaacagaagtagctatatatagacagaagtattaagtaaatatttgctatttttaaatactgaaaagttatattagaaaaataccagtttcaaaaatattcaagaaacgaaagatagtttatttcaattataagctatgtgggtttgaatcattttacttaaattctatgttttctcatctgcctaatgggaataattattttaaactgcataggagtgttgtgaggattaaatgaaaaatgaatgtgtgacactctacgacgtcttaacttgatttgatttatagtcagacttgagattcacaatagacttcatcaagcaccaattttacttgtcttgaagaaaatgcacaggaccagtgtcatagcatgcacaatgacaacacagcaga

SEQ ID NO: 235942 - DNA, 503 bp, Homo sapiens
taggccaaaaatcttcaataaacataaaacagattattatttatattaaaataaattttattttaaaaataatttagttattcaaacaacaaattttaagtcacagagctactaacagaagtagctatatatagacagaagtattaagtaaatatttgctatttttaaatactgaaaagttatattagaaaaataccagtttcaaaaatattcaagaaacgaaagatagtttatttcaattataagctatgtgggtttgaatcattttacttaaattctatgttttctcatctgcctaatgggaataattattttaaactgcataggagtgttgtgaggattaaatgaaaaatgaatgtgtgacactctaygacgtcttaacttgatttgatttatagtcagacttgagattcacaatagacttcatcaagcaccaattttacttgtcttgaagaaaatgcacaggaccagtgtcatagcatgcacaatgacaacacagcaga

SEQ ID NO: 235943 - DNA, 632 bp, Homo sapiens
taggtcaacggtagagagtttgtgggggattgtaagcatgtgaaattgatgatggtggtctctgtaacgggatccctgattgatcccacagcagcatggaggctctgacttcttgcaagggagagaggcgctagggaaagaagatgttagagacagtaacaaagcaaaatttcctcatgtgcagtttatccaaggatggctcacaaatagaattattctactcatgaaggaaaaagaaatacaactagccaaatgatccacctggaattatttcctccttagctacacaaacaggtaaaaacaaatccatacattacrttttacaattatattctgaagaggtgtccacttctgagcaagatggagtaggtgggactggattcaccctccagcctgaagcaataaaaaaagcaacctggcaacacatatgaaacaatggtttccgagacatcagctatcagagaatgaagagtagtcatccctaagaaatggaaaacaaacaaggtgagccctattgcttgaacttactaccatgagagagtttccgggcaacagcacagggagagggattcatagagagccgagtgtttgaggagacccagacagatgaaattcatgagacggagtacctg

SEQ ID NO: 235944 - DNA, 558 bp, Homo sapiens
gagaacaaataaaataattacaaagtatttagaatctatcaataaaatcacttactcaaagagagcaaaaacaaatgatatatatttatcaattcatagttactatacttttaattaaagatatcatacattcatttcctttaaaacaaactgcagcaaactccaggaatttccatatatattacattgaatgacaaagctstttgccataaaatgcaccataaactcacttcacattcattttatgacttatttctttttctcccttcttctcctacctgcacaactaaacacagcacttctcttcctcattcctcattgcctggggcccacattaagttcaaggagggtaaataactatttaaataacaactctttagtaaatatatatgtaaaaaaaatcttttgtgagtgtgcgttgcagtcaagtattatactgatcatttgtttaaagtttgacttggtttttctatatgtgccatcagctacctacccacagcatttacttatttcttcactcagtctctaatatatgttcaactgtaaaccgtacaagta

SEQ ID NO: 235945 - DNA, 558 bp, Homo sapiens
gagaacaaataaaataattacaaagtatttagaatctatcaataaaatcacttactcaaagagagcaaaaacaaatgatatatatttatcaattcatagttactatacttttaattaaagatatcatacattcatttcctttaaaacaaactgcagcaaactccaggaatttccatatatattacattgaatgacaaagctctttgccataaaatgcaccataaactcacttcacattcattttatgacttatttctttttctcccttcttctcctacctgcacaactaaacacagcacttctcttcctcattyctcattgcctggggcccacattaagttcaaggagggtaaataactatttaaataacaactctttagtaaatatatatgtaaaaaaaatcttttgtgagtgtgcgttgcagtcaagtattatactgatcatttgtttaaagtttgacttggtttttctatatgtgccatcagctacctacccacagcatttacttatttcttcactcagtctctaatatatgttcaactgtaaaccgtacaagta

SEQ ID NO: 235946 - DNA, 515 bp, Homo sapiens
cctctattctactctgattatttaggtaaaattaggttaaatatagataactatagaattaaaatttaaaaaactgtgcctttacaygtttggaaaattactcaattttttttcaaataacgccaaccatatatattgaaaataacattattccataccacaggtgacatattcttttcctatccctagcagcgacttccccaagtccctgcttgtctcaacagtttgaggaaaaaaaacaccagaaatatacatgttccagaacaatgaataaattcccaaataactttatatacattagtgaggatacaatgaggagtgtttatctagctaaatatgaggcatattaaaaattgctactttaacccagatatgagcaataataggagttttatctacgcctccttcctttccttctgctgacaaaggatacatttaattcttgacgttaatatcagttaaaatgagatctagagacagatataattagagagctagggagagaattaagttag

SEQ ID NO: 235947 - DNA, 463 bp, Homo sapiens
tcatatgtgctacagagggtgagggataaaaatatggagattcagggcctgctgtatcagtaaagattttatgggtctatttgcctgtttcatgcctggacatttcctccaaagtaaaagaaaaatcatttcatgtcatatcttccmccactaagaagaaaagataacacttggtaggtctcttcaaattttagaggcagtatattccacacttatgaatgctgtcctggtctattcactgggtgattaaaaaaaaaaaaaaagggctgctagctttggatagggctcagagcaggatagggctcttcagtacatctaggctgtggagtaagcagctctgatgtttcagctatagtaaccagaagcccttatggtattagaatatcagtagtggcaaaaaaaaagtctgacttacacagaaagctttagttgaagaatctggagccatttgtgtaggaatgca

SEQ ID NO: 235948 - DNA, 463 bp, Homo sapiens
tcatatgtgctacagagggtgagggataaaaatatggagattcagggcctgctgtatcagtaaagattttatgggtctatttgcctgtttcatgcctggacatttcctccaaagtaaaagaaaaatcatttcatgtcatatcttccaccactaagaagaaaagataacacttggtaggtctcttcaaattttagaggcagtatattccacacttatgaatgctgtcctggtctaktcactgggtgattaaaaaaaaaaaaaaagggctgctagctttggatagggctcagagcaggatagggctcttcagtacatctaggctgtggagtaagcagctctgatgtttcagctatagtaaccagaagcccttatggtattagaatatcagtagtggcaaaaaaaaagtctgacttacacagaaagctttagttgaagaatctggagccatttgtgtaggaatgca

SEQ ID NO: 235949 - DNA, 428 bp, Homo sapiens
ttggtgccatacctaagaatgccttggcaaattcaagatcctgaagcctacccttatgttttcttctaagaatttttattattttagctgttatatttacttgatccatttcaagttaatgttagcrtatgatgtgaggtaagaatccaatttcattcttttgcacatggatatccaatcatttcagcaccatttgttgaagatagtactttttccctaatgaatgatcttgtcatccttgtcaaaattaactgtttataaaatatatggatcagtttcttgatgatcaattttattccattgatcaatatgtctaatatcacactgttttgattagcaagttctgaagttgggaagattttgagccctccaacactgctttttccatattgttttggctatttaaaaccccttgcagttctgtatga

SEQ ID NO: 235950 - DNA, 567 bp, Homo sapiens
gaagcaataataactgattgtccccaaataattgtccccaaaacaatgttagataccaaactgyaggttgagaatgctcagagaacactgagcaggataaaaacaaaccaacaaaaacagaaacaatgacaacagcaaaagtaagactacacctaggcatatcatatgcaaagcacagaaaatctaaagtaaataagtcttgaaagaagaaagaggaaacaaagcattaggtatagggagtcaacaatgagaataacatctgacttctgctaatcatgtaagcaagaagagaagagagcaaaatatttaaaatgttgagagacaaaaacaaacaacaaaaaaatccacctagaattctgtattctgtggaattatccttcaaaagttaaggagagatgaaatctttctgagacaaacattgagggaatttgttatgagtagacttatcttgcaagaaaattttaaaaagttcttcagggataagaataatagggaagaaatatttctacataaagagaggaagagaattagagaaggaataagtgaaggtaaaatgaaactttttaa

SEQ ID NO: 235951 - DNA, 567 bp, Homo sapiens
gaagcaataataactgattgtccccaaataattgtccccaaaacaatgttagataccaaactgcaggttgagaatgctcagagaacactgagcaggataaaaacaaaccaacaaaaacagaaacaaygacaacagcaaaagtaagactacacctaggcatatcatatgcaaagcacagaaaatctaaagtaaataagtcttgaaagaagaaagaggaaacaaagcattaggtatagggagtcaacaatgagaataacatctgacttctgctaatcatgtaagcaagaagagaagagagcaaaatatttaaaatgttgagagacaaaaacaaacaacaaaaaaatccacctagaattctgtattctgtggaattatccttcaaaagttaaggagagatgaaatctttctgagacaaacattgagggaatttgttatgagtagacttatcttgcaagaaaattttaaaaagttcttcagggataagaataatagggaagaaatatttctacataaagagaggaagagaattagagaaggaataagtgaaggtaaaatgaaactttttaa

SEQ ID NO: 235952 - DNA, 567 bp, Homo sapiens
gaagcaataataactgattgtccccaaataattgtccccaaaacaatgttagataccaaactgcaggttgagaatgctcagagaacactgagcaggataaaaacaaaccaacaaaaacagaaacaatgacaacagcaaaagtaagactacacctaggcatatcatatgcaaagcacagaaaatctaaagtaaataagtcttgaaagaagaaagaggaaacaaagcattaggtayagggagtcaacaatgagaataacatctgacttctgctaatcatgtaagcaagaagagaagagagcaaaatatttaaaatgttgagagacaaaaacaaacaacaaaaaaatccacctagaattctgtattctgtggaattatccttcaaaagttaaggagagatgaaatctttctgagacaaacattgagggaatttgttatgagtagacttatcttgcaagaaaattttaaaaagttcttcagggataagaataatagggaagaaatatttctacataaagagaggaagagaattagagaaggaataagtgaaggtaaaatgaaactttttaa

SEQ ID NO: 235953 - DNA, 567 bp, Homo sapiens
gaagcaataataactgattgtccccaaataattgtccccaaaacaatgttagataccaaactgcaggttgagaatgctcagagaacactgagcaggataaaaacaaaccaacaaaaacagaaacaatgacaacagcaaaagtaagactacacctaggcatatcatatgcaaagcacagaaaatctaaagtaaataagtcttgaaagaagaaagaggaaacaaagcattaggtatagggagtcaacaatgagaataacatctgacttctgctaatcatgtaagcaagaagagaagagagcaaaatatttmaaatgttgagagacaaaaacaaacaacaaaaaaatccacctagaattctgtattctgtggaattatccttcaaaagttaaggagagatgaaatctttctgagacaaacattgagggaatttgttatgagtagacttatcttgcaagaaaattttaaaaagttcttcagggataagaataatagggaagaaatatttctacataaagagaggaagagaattagagaaggaataagtgaaggtaaaatgaaactttttaa

SEQ ID NO: 235954 - DNA, 576 bp, Homo sapiens
cactgtgttgcccaggcttgtctcaaactcctgggttcaataaatccaccagccttggcctcccaaaatgctgggattaaatgcatgtgccgcctcacctggctaggtttttaaatatgaacttacacctattccaagtcaacttttaaataacactatactgatttatgagtaatgcaagcaagtatcttataaaatatttcaaattcctctctcctgccttttctgtcattgcaatcattcattttacttatacataagcatatatgcagtgaaatccattattgctattattattttgaaaaaactyataccttagatcaattaataataataaaaaatattttaccttcacttattcattctctgaatagtttatgtagatttaagcttctcacttatataatttttattatttctgaaaagcttattttaacattgcttgcaaggcaggcctactggcagcaaattcctcaatttttgtttgtctgagaaagtctatatttctccttcacttttgaagaatgatttctcagggtacagaattctagtttggtggtatttttctctcaacac

SEQ ID NO: 235955 - DNA, 538 bp, Homo sapiens
cattaaacatcacctatcaataaatttgtatgatttcaataaaatcaaaacattagtaatatttaataatagaattacctaaagagttttaatttcaagagcttttggaaactgcaaacaagagaaaaatccaaatattctgctcttgaygtaatgtggctacttccatctggactttatttcatcatgaaactaatttaatataaatctgtgtgtcatgaccatattaattcagaattacactcaggcctagagtaatatctgggctgatagccatttaacttgagcattcaattccctgtaagtttgagcacataaatctgattcataaaactcccgactccatatttaataacttaaaagtcatgctagctttctttgcatcttatcaacagggattatttagaacttgataaaaatatggaaattaaattacaaaaatctttaaaaattaaagaatgtggaaataattcattctacatttataccacaatattcatttttttattaacagatacttattgagaaagtattatac

SEQ ID NO: 235956 - DNA, 645 bp, Homo sapiens
gacctataccctttgaattaataagtgctagaaaatatatttattcattcactaaaaaatactagtattacatgtcaggtactattttagattttgtggacacagcacaaagctcctgcattctaggagtttatattccagagggagaaacaaaataagaataatgtagtatgccagaaagtaataaatgctgtaaagaacataaagtaagaaaggatagcgaatatatgtcagaaagtaggatactctattataaagtgcaatcatggaaagtttcactgattaagagacactgagacagagacacttgaggaactgaggaaataaaaaatgctatatctaagagagagctttccaggcagaaggactaatgaatgtccaggccccatggcacaagcagccccaaggcaagagattaattaatatattcaagtgagggacaccttgtgaaccaacaatccacaggtagcaacatggagaggagacactgataaactctaacaggagaggcagagggtgtggyatgggtcacataaggtcctgcagactattggaataactttacaaatgaaatgaaatgccactggaagattatgagcaaagaggtggcacacttcattcattcatttgttcttttggccaggt

SEQ ID NO: 235957 - DNA, 645 bp, Homo sapiens
gacctataccctttgaattaataagtgctagaaaatatatttattcattcactaaaaaatactagtattacatgtcaggtactattttagattttgtggacacagcacaaagctcctgcattctaggagtttatattccagagggagaaacaaaataagaataatgtagtatgccagaaagtaataaatgctgtaaagaacataaagtaagaaaggatagcgaatatatgtcagaaagtaggatactctattataaagtgcaatcatggaaagtttcactgattaagagacactgagacagagacacttgaggaactgaggaaataaaaaatgctatatctaagagagagctttccaggcagaaggactaatgaatgtccaggccccatggcacaagcagccccaaggcaagagattaattaatatattcaagtgagggacaccttgtgaaccaacaatccacaggtagcaacatggagaggagacactgataaactctaacaggagaggcagagggtgtggtatgggtcacataaggtcctgcagactattggaataactttacaaatgaaatgaaatgcyactggaagattatgagcaaagaggtggcacacttcattcattcatttgttcttttggccaggt

SEQ ID NO: 235958 - DNA, 576 bp, Homo sapiens
atacaagcataacttgaagatatcgcatgttcagttccagaccaccacaataaagaaaatattgccaagatttttttcagtttctcagtacatataaaagttatgtttacactattctgttgtctattaaatgtacaaaaacattcagtgtaaaataaatgtatgtatcttaatataaaaatactttactgctaaaaaatactaacgattatttgaaccttcagcaaactgtartatttttgctggtggagggtctcacctctgtgtctataactgcttagggtggtggttgctgaggtttgaggttgctgtatcaatttcttaaaataaggcaatgatgaagtttgccacatcaattgactcttcctttcataaaagatttctctgtagcatgtgatgctttttgatagcattttacccacaatagaacttcttccaaaactggagtattttcaaactctgttgctgctttatcaactaactttatataatattctaaatcctttgatgtcattggtcaatagtcgtcaatcttcctagaagtagattgcatctcagaataaaacaatttttatc

SEQ ID NO: 235959 - DNA, 381 bp, Homo sapiens
ttgtagcaattttgggtcattttcatttctacacacatgttagaataagcttattaacttctacaagaagttgtggttttaatggggatttcatttaacctacagatcataatgaagacaattgaaatttttaaaaatcatggagttttctatttcctgtacataatataactccatttattttggtcttgtttaatttttttttacaatgttttctarttttcagggtaaatgtcttggacatcttttatttaattttttcctaagtatttttttttagtgctagagtaaatgaatttgtttctaatgtcatatttgaatattttcttcctaatatagaaaacacgattttttatattaaccttgtatcctatagccttg

SEQ ID NO: 235960 - DNA, 605 bp, Homo sapiens
aaattttttactattttctatatggctgtattaatttacattttcaccaatagtatgaaacagttcctttttctctacatctgcaccaacacttatcttttgactttttgatagttrccattcatactggagtggggtaatagctcattgcagttttgatttacatattcctaatgattaacgatgttgagcatttttttcatatacccgttagccatttgtatgtcttcttcaagatatgtttattcagacatcttgtccatttttaattggattacttgtttttttctattgagttgtttgagttccttacatgtttttaatattaaccccttatcagatgtatagtttgcaaatattttctcctgttctaaaggttgtctcttcactttgttaattttttcttttgctttgtaaatactttttagttaaatgtaatcctatttggatgtggtagggctgggatttgagccaaatgatctgacaagattcagaactttcaattgagatactgtactgtcttccacttaactagtctatgcatacatttatagcataaaaatgtattcatgcctcttgctgttttttcttttgtaatatgtttt

SEQ ID NO: 235961 - DNA, 605 bp, Homo sapiens
aaattttttactattttctatatggctgtattaatttacattttcaccaatagtatgaaacagttcctttttctctacatctgcaccaacacttatcttttgactttttgatagttgccattcatactggagtggggtaatagctcattgcagttttgatttacatattcctaatgattaacgatgttgagcattttyttcatatacccgttagccatttgtatgtcttcttcaagatatgtttattcagacatcttgtccatttttaattggattacttgtttttttctattgagttgtttgagttccttacatgtttttaatattaaccccttatcagatgtatagtttgcaaatattttctcctgttctaaaggttgtctcttcactttgttaattttttcttttgctttgtaaatactttttagttaaatgtaatcctatttggatgtggtagggctgggatttgagccaaatgatctgacaagattcagaactttcaattgagatactgtactgtcttccacttaactagtctatgcatacatttatagcataaaaatgtattcatgcctcttgctgttttttcttttgtaatatgtttt

SEQ ID NO: 235962 - DNA, 489 bp, Homo sapiens
gccctcccggaggccgatctctgmgaccaggttattccttccacacgcttagtggctttcagcttcccgagtagcaggcagcgctagattattcccttgggtgacttttcctgctaaatacagtgaaagtcctattaggactatatttgaattttgaaaggagttattatgttgattaattatgttgattcattcatttccacattttcaaggatagataagagtgtctttgaaagtgaaatccatcaaaaagtttgtattttacttttggtacctggtcaccggttggattggtcaattctgtcagcagttctgccctctgctggttttgtttattatttagaattcctgcgtctaccgtgggacatgaggcctctgtaagtccctcttaactacagtggtactggaaaaggacctttgattaaggaaaaatggatatgccatttctttttcagcatgtcacacacgcatgtaaatgagaatattgta

SEQ ID NO: 235963 - DNA, 593 bp, Homo sapiens
agcgttggtcagcatttctgcttttactccttcacttccctcatgtaatactggggaaatgtgacctgagttgggagtggtgagaggaaaccaaactttttcttttttgaccattcaagttttgttccttagcaaagaagagagataaacgctgatgttataaaaagttgcaatgttccctaagttctttcactaaagagtcaactttaaatgcagttttcagtgtagctttcagtatacactaaygcactttctacatgaggacatattccttctaaattctcttgcaatttaattcaaaacctaaaggtattttttttccattttaaaatactttctgttttagaatgcatctaatgtatttctttctccttccttcaaaaccctaatatggttttattgatataggtaagtgtattcttttatatgttcacttgtgtcagaactcaacatgaataatactagcttgtagcaaagatgaaagacaattttaaagtgatttagtgagtaatatctatttatcagttgcagtctttggcctactactaacttggctagtggttctttagacattggctgatcaccagacctac

SEQ ID NO: 235964 - DNA, 514 bp, Homo sapiens
ttgcaatcccctcaaatcttcttttttttttttcttaaaaagcatttctttcttattttaaccaaatttaattgctcttgaatggctctgtactgtacaggcaaatgaagctccctattcatagaacttgagtgcacagagtatcaggggaagcttccttcctctgtttgactggtaaactgacatccgggcttaaaggagtgaaccttaractgtgtgaggtagttggctttccttcctcactcagattttcacatagactccctgaaaggatgactgccagaaagagcagtagcttgctaataagaactctagtgcattttcatacttggtgctcttaggtagctctgcacagaaagaaaaaaatgtaaatattgaagtggtgtctgtctttcctttacttctgtctttagagtctaagagtggagctcaacctactgctgactgttactcttccttttgcatgcaaatgaaacttcaattatttcactggcttttaggataagtttgttgt

SEQ ID NO: 235965 - DNA, 514 bp, Homo sapiens
ttgcaatcccctcaaatcttcttttttttttttcttaaaaagcatttctttcttattttaaccaaatttaattgctcttgaatggctctgtactgtacaggcaaatgaagctccctattcatagaacttgagtgcacagagtatcaggggaagcttccttcctctgtttgactggtaaactgacatccgggcttaaaggagtgaaccttagactgtgtgaggtagttggctttccttcctcactcagattttcacatagactccctgaaaggatgactgccagaaagagcagtagctkgctaataagaactctagtgcattttcatacttggtgctcttaggtagctctgcacagaaagaaaaaaatgtaaatattgaagtggtgtctgtctttcctttacttctgtctttagagtctaagagtggagctcaacctactgctgactgttactcttccttttgcatgcaaatgaaacttcaattatttcactggcttttaggataagtttgttgt

SEQ ID NO: 235966 - DNA, 587 bp, Homo sapiens
gttgtaaaattcttttggaatatagttacatagtttttatactatattgctatccatggtatattttagttacactaaaatcactggtataggtatgtttatctgatttatttcatctagaacagaatccatctagaacagaaagcatctagaacagaatccaccacatagtaggcatttggtaaaactttgctgaatgaagtgagggcgttgttgacattgctaatgacttgattgtccataacctaaccacctgagatgtgatatatagctatgtgtatcacctactctcaatgtctatggaagtatcttgaaccaatttctgctgatattattgtgatttcctgagactatcagtctctattttggttctargccaacctatgacctctaccctaagcactctcccactttgttatttctgaaagtaaaaatcctctttgcttgagatttagatattgtctccctctagaaataactttcttcaagcattgaagattggggtagttagcctggcataacattataaagcacactatacttatccaaaactcaaatacttatctcaaaatatttttgatggtata

SEQ ID NO: 235967 - DNA, 591 bp, Homo sapiens
tgcatagcatggaaacatgtcactaattaaaaagtacaaggaaactgccaagttagcagggtcagtgcatacttcgatatcaacacataactaggttgtcccagttgattcctaccattggatcctctgacagtcagtgaactggggccatgytgttttttctggaatagccaaccctactgtcaaatcacttggggttctcaacagtaattagtacatttaagtcacactttatatggagctatggtcatgtagtcttgcaaaatatataagtaaacttccacttcataagggagtatgagaaaaatgttaaaataaaatctgctataagacaaaaacataacttagcatttctaaaccttatgtgactgttcttgttattaaccaaagtatatcagcttttagaacaaaaattgcaaacaatgatttttgtttcttaagattaatatatgaggtcatgatctctattttgattatttgagatgaccaattgtttattgtcagcatttttttaagtcttaaagttctctttcagtggaaattattcaaatagaattttaaagtaatcatgtcattgattgattaattgta

SEQ ID NO: 235968 - DNA, 591 bp, Homo sapiens
tgcatagcatggaaacatgtcactaattaaaaagtacaaggaaactgccaagttagcagggtcagtgcatacttcgatatcaacacataactaggttgtcccagttgattcctaccattggatcctctgacagtcagtgaactggggccatgttgttttttctggaatagccaaccctactgtcaaatcacttggggttctcaacagtaattagtacatttaagtcacactttatatggagctatggtcatgtagtcttgcaaaatatataagtaaacttccacttcataagggagtatgagaaaaatgttaaaataaaatctgctataagacaaaaacataacttagcatttctaaaccttatgtgactgttcttgttattaaccaaagtatatcagcttttagaacaaaaattgcaaacaatgatttttgtttcttaagattaatatatgaggtcatgatctctattttgattatttgagatgaccaattgtttattgtcagcatttttttaagtcttaaarttctctttcagtggaaattattcaaatagaattttaaagtaatcatgtcattgattgattaattgta

SEQ ID NO: 235969 - DNA, 563 bp, Homo sapiens
ctgcaccttcctctcaatttttctgtaaacctaaaactggtctaaaaaaaaaagttgattcaagtcatccttctmccctaaccttccaatggtttttaaatctcatttagaataaaatccagtctccctgaacattccacaggacctatacagcttgttatcagtgtatcctcacttttacttctctgaccacagctctttcactcttgttttgtccatgcagtcaatcttttttatagcagtattcacatattcacatagagtacatagaaagattttggcttttatataatacagagtttaaaataactttacagggaactaaatttcttcaatctgaagttcagctatcttttttttttgttaactttccatgctctctatccaaactgaacaatattttctgttacacaaatttacatgagaaaatatccaatgtacaaatgaagggacctgagcaggaaagagagccaaaatattaggaagtgggtatgggggataattttttgaaaaaagatccctttgttgagacatatttgtctccttgcatttctttcaacatt

SEQ ID NO: 235970 - DNA, 606 bp, Homo sapiens
atccaagttgtatattcaaggaatgtggaaatcatctgagagccagtggggttctttgaaggaatttaaacatcagagtgacatgagacatggatttttggaagcttaatcaagytggtggaatgaagattgatgggaaaaagtatggaacccagttaagtggctattttagtagcacattgggctctgatattctattctcccgtttaataaacctataggtattcaataaaggacaggaaaatataattgaacaaaacattgtgctgaattggatacatctgaattgcatacacatggtttgtgccagcagttggcaacatagagataattaaaatattaaggtcatttaagaattgctttgaatatggacattttacttttttcatatatcatatttagccataaaattacttcttttaatctttgaacagttgcagttagcaaaatataaagaatagctttcccacatatatgtatgtatgcgtataaaacagtagaatccatttaatgacaatttattaaacgcaatatctatgaggattatgagatcaaataacaggcagaatttcaaagtagcttaattcattatttagttcacttgaa

SEQ ID NO: 235971 - DNA, 606 bp, Homo sapiens
atccaagttgtatattcaaggaatgtggaaatcatctgagagccagtggggttctttgaaggaatttaaacatcagagtgacatgagacatggatttttggaagcttaatcaagttggtggaatgaagattgatgggaaaaagtatggaacccagttaagtggctattttagtagcacattgggctctgatattctattctcccgtttaataaacctataggtattcaataaagracaggaaaatataattgaacaaaacattgtgctgaattggatacatctgaattgcatacacatggtttgtgccagcagttggcaacatagagataattaaaatattaaggtcatttaagaattgctttgaatatggacattttacttttttcatatatcatatttagccataaaattacttcttttaatctttgaacagttgcagttagcaaaatataaagaatagctttcccacatatatgtatgtatgcgtataaaacagtagaatccatttaatgacaatttattaaacgcaatatctatgaggattatgagatcaaataacaggcagaatttcaaagtagcttaattcattatttagttcacttgaa

SEQ ID NO: 235972 - DNA, 576 bp, Homo sapiens
atattgacaaatgaagttccacccatgctaagtttacaaaaaaattaagtgaaatacgtaaatacttaggagtgcatttggtgcctccggtcctgtttaaaaacagccaaaatataaagcaaaacactgctttaagcgacataggtggttcctgtcaaatcactcatgaattgattaaattttgctcaatataaagttattcaatcatgtcataaatgcctcagaaattattaatacatgatttagacattaaagttgaagatttttatttaaattctaaatataagtgactaaacaccttctataagtagagagtaaagagcttattgatgaaacctaaggtttattcttatctggaaagtagaaaatccaccagcaaggttagacaaaaaatacagtgatagcaaatgtaggcaattttgtgatgtagacagtaaacaacacatgagatacatcctaggaaaaaatgcatgcaaattgtatatctcttatgcaataagcatgttakattttcagttgaaaactaaatatagaaaacaaaaaagcaaatgaaacaaatgaaatgttataataaag

SEQ ID NO: 235973 - DNA, 465 bp, Homo sapiens
ctaacttcctgatgtctgctgarctaactatagaatttaaaataatttcttttatgcatatgtattttaaaataccaaaaaatcttaatcatcaaattcactaaatatgaaaattaataattattgaaaaatcaatttcactatatcttaaagcttcttacttgaagattataatgtgcaaaatatctaaattcaaccaaattaattattatgaagcagctttaattttcattcttggatttactgaactcaagaaagtatttggcaacctgtttatgagttatgtatattgtaattaaagctgtaaatgtattaataagcacatttataaaaattataatggtgtgtgtttagaatctttgattttgttaaccttaaagttgcaagaagagtaaaaacctcttgaaagtaccataactttataacttcattttattctttatttctttgtagtacttaagtaat

SEQ ID NO: 235974 - DNA, 429 bp, Homo sapiens
ttcacaaacaataaatatgaatcatagcattgctatacagtgtgaatagatttcagatctctgagaaaagaaccaaaataattctaaaattatctccacctctggacaataataaccagtggtctttttttaatctacaagtttaaaacatattttaatgttgtttctcctaagccttaacacagtaaaagaaagttgaaacrtagtcttctttgtgataaacatgtagtatctgtgaagcacaacattaatcccatttgtaccataaaaagtatgatccacttgagccttgctctcctgtgaattatgaatcattgtaatactcgggggatagtcatcacatctctaaggttcctgctttgttcctacaatgtttttcctcggatacctaaagtatctaggaaatttgaaatccccatatgaaatatc

SEQ ID NO: 235975 - DNA, 568 bp, Homo sapiens
tgtcatgtcctcttaatggattgcttcctttatcattaaaaatgaccctctttattccagctaattctttcctttgaaatgcattttatctgatattaataaaactattccagatttcttttaatgagtgttagtatggaagatcttttttcattctttcacttttaacccatctgctttttaaatttaaagtgggtttcttacagacagcatgtagttatttttcgatgttatccaatctgacaaatctctgctttttatttggtgtgtttagatcaattacatttaatataattagtgattgttgagtttaaatctatgctttttgccaggtgcagtggctcatgcctataatcccagcactttgggaagctgatgcagggagataacttgaggccaggagtttgagaccagcctgggcaacatagcaagacaccttctctacaaaaataatacaataaataaacaaatacctctatgcttkttctatttattttttattaatgatcatactaaattacacattttggaaacttgacaattactacaagaaatttggaaaaaagac

SEQ ID NO: 235976 - DNA, 571 bp, Homo sapiens
agacttgtctcctcgttttgaaacttggtatattctaaaaagccattctagcktcagaactccctgtggggctggctgaggtctttgttgagactgcagttatagcctaacttctcccttttcccagcattcttattttccttcccttcttcaggtgttgatcaagagtacctctaataacttcttccatgcaaaaccactactcactctctggttccctgggcatccacctgcaacagtactataaaaatatataaaacagcaaaatgaaatagaagatcagatacaaggcgaggctactctagttatgatgatcagataagtctctaaggagctgagatgtgaatgatgagaaagatcacagaaagatctgggggagtagcatgtaccattccagacagaaagaaatatgaaggccctgaggtgacaatgagcttaacatgttccagaaaaagaaagaaggtcagtgtaactcaggcatgacaaatgagaatgaggctgatggaaacagtggccagatcatggaatttgaactttattctaaatgcaataaggagttactagaagtaat

SEQ ID NO: 235977 - DNA, 571 bp, Homo sapiens
agacttgtctcctcgttttgaaacttggtatattctaaaaagccattctagcttcagaactccctgtggggctggctgaggtctttgttgagactgcagttatagcctaayttctcccttttcccagcattcttattttccttcccttcttcaggtgttgatcaagagtacctctaataacttcttccatgcaaaaccactactcactctctggttccctgggcatccacctgcaacagtactataaaaatatataaaacagcaaaatgaaatagaagatcagatacaaggcgaggctactctagttatgatgatcagataagtctctaaggagctgagatgtgaatgatgagaaagatcacagaaagatctgggggagtagcatgtaccattccagacagaaagaaatatgaaggccctgaggtgacaatgagcttaacatgttccagaaaaagaaagaaggtcagtgtaactcaggcatgacaaatgagaatgaggctgatggaaacagtggccagatcatggaatttgaactttattctaaatgcaataaggagttactagaagtaat

SEQ ID NO: 235978 - DNA, 478 bp, Homo sapiens
tgtttgtatgcatgagtctttgtgtatgtgctaaatggcaaayaagaaatatgtgtgttaaatatgacacatagcctttttgccctagctaatataaattaacacacacataacacattggatgcagtagaataatagatttctctctatagattttttaataaattatgcagtaaagaatggaaagcatggtccatatgcttactggatgtgtttgtgtgaaccctgatctagggcacgtgcatttccattgtaggcagtgtttttaaagtttacttgtgatttcaaagattgccataagcaatgcattgttctgtgctaggtcattgcttaatgaagaaaaaagaaatctgccagtactgctttttccagattaacacgtttggtttgaagtcacagtgattacatgtcaactgtgttgagacaaacttttcatactctccttagatgcatttttgtagagaaagaaatgcttaca

SEQ ID NO: 235979 - DNA, 587 bp, Homo sapiens
ccgtaagttgaaccttgtgagtaacaagaatcattggcttaagacaaatatacctgtgaaattcaagttcacataacctttaggatgttaagtctccaagatgaaacattaataataaaaatatwaggctccaggtttgtgaaatctataggaatgcttctataatatagaacacaaaatataactataaacctttactgaaatgactttctggtaaaaattaagcatcacacaaagaacaaaccacaatgaataatcagcataggaagcaagtggaagaaccaatgctttatgaattggataattgtaaaatccaaaagatgttgtaaagtaagtatatttaaaatggcaaaagagatagatagatgtaagaatatattagtcaagaacaacagaatatatagaaagattagaagtatttttttaaaaaatgaatagaaactctagaaattaacagagttgtagacattacaaaccatggatggacaatacagtcaaatggaggagaagataattcttgaactggaatatagctccgaagaaatcaacgagaatgcagttcaatgatacaaagagatgaaagataa

SEQ ID NO: 235980 - DNA, 587 bp, Homo sapiens
ccgtaagttgaaccttgtgagtaacaagaatcattggcttaagacaaatatacctgtgaaattcaagttcacataacctttaggatgttaagtctccaagatgaaacattaataataaaaatataaggctccaggtttgtgaaatctataggaatgcttctataatatagaacacaaaatataactataaacctttactgaaatgactttctggtaaaaattaagcatcacacaaagaacaaaccacaatgaataatcagcataggaagcaagtggaagaaccaatgctttatgaattggataattgtaaaatccaaaagatgttgtaaagtaagtatatttaaaatggyaaaagagatagatagatgtaagaatatattagtcaagaacaacagaatatatagaaagattagaagtatttttttaaaaaatgaatagaaactctagaaattaacagagttgtagacattacaaaccatggatggacaatacagtcaaatggaggagaagataattcttgaactggaatatagctccgaagaaatcaacgagaatgcagttcaatgatacaaagagatgaaagataa

SEQ ID NO: 235981 - DNA, 587 bp, Homo sapiens
ccgtaagttgaaccttgtgagtaacaagaatcattggcttaagacaaatatacctgtgaaattcaagttcacataacctttaggatgttaagtctccaagatgaaacattaataataaaaatataaggctccaggtttgtgaaatctataggaatgcttctataatatagaacacaaaatataactataaacctttactgaaatgactttctggtaaaaattaagcatcacacaaagaacaaaccacaatgaataatcagcataggaagcaagtggaagaaccaatgctttatgaattggataattgtaaaatccaaaagatgttgtaaagtaagtatatttaaaatggcaaaagagatagatrgatgtaagaatatattagtcaagaacaacagaatatatagaaagattagaagtatttttttaaaaaatgaatagaaactctagaaattaacagagttgtagacattacaaaccatggatggacaatacagtcaaatggaggagaagataattcttgaactggaatatagctccgaagaaatcaacgagaatgcagttcaatgatacaaagagatgaaagataa

SEQ ID NO: 235982 - DNA, 587 bp, Homo sapiens
ccgtaagttgaaccttgtgagtaacaagaatcattggcttaagacaaatatacctgtgaaattcaagttcacataacctttaggatgttaagtctccaagatgaaacattaataataaaaatataaggctccaggtttgtgaaatctataggaatgcttctataatatagaacacaaaatataactataaacctttactgaaatgactttctggtaaaaattaagcatcacacaaagaacaaaccacaatgaataatcagcataggaagcaagtggaagaaccaatgctttatgaattggataattgtaaaatccaaaagatgttgtaaagtaagtatatttaaaatggcaaaagagatagatagatgtaagaatatattagtcaagaacaacagaatatatagaaagattagaagtatttttttaaaaaatgaatagaaactctagaaattaacrgagttgtagacattacaaaccatggatggacaatacagtcaaatggaggagaagataattcttgaactggaatatagctccgaagaaatcaacgagaatgcagttcaatgatacaaagagatgaaagataa

SEQ ID NO: 235983 - DNA, 392 bp, Homo sapiens
tcagccaactagtatgtgatgaaatgcaaattcaaagcagcatgcatttagggtctgcacacgtattgaaatattacactggagtgatttccatcttttccttgattgtattaagcttatcctatctctgcttttgctacacatagcagcacttgcattttgccattttcaatttacaattgtgagacaggaaggtcaaaaggcaatcacttgtataaacaaactgtgwtatttagggataatggcagggctgcccactctgaactgttggctggcaagcagtgccactaggtggtagctaaaaatgtcgaatgatcagcaaatgcacagaagtccaaattcagttttttatactgttgagtaaaagttaagaaatggtagtagaagactac

SEQ ID NO: 235984 - DNA, 604 bp, Homo sapiens
ccccacactacagtataaacaactctagtacttcgctttyctggagctggactagccccttagagtttgagttgctgagacacccctcttcctggggagtgaaatcaccactgttctgttccctgccctacaggttccaaatgacatctgtgttacactattctgggattcttactgccatgtatgtgacctcatagagtctgagatactgccgagccctaacatctcaggatttagagtcactactccacagtgtctcattccctgggaccagaaaggtcgctgagccctattggctcaggttcccaaatcacagccacaccttgtttcccaggcccaaacctctacagcacattctcttccatggaggcaggccagtgttatgctctgttccccaggagcataaaataatagctacccaacccttgggctcaagctgctagagggtgcctcagagtcacagattctggctctgtaggcaacttacatccaactttgccacaaagatggaacctgtatcctaagacccagttgctattttaggtttatgagtccctgagcctgtgaccccagatccatagctgatctgagatgctacacctgg

SEQ ID NO: 235985 - DNA, 604 bp, Homo sapiens
ccccacactacagtataaacaactctagtacttcgctttcctggagctggactagccccttagagtttgagttgctgagacacccctcttcctggggagtgaaatcaccactgttctgttccctgccctacaggttccaaatgacatctgtgttacactattctgggattcttactgccatgtatgtgacctcatagagtctgagatactgycgagccctaacatctcaggatttagagtcactactccacagtgtctcattccctgggaccagaaaggtcgctgagccctattggctcaggttcccaaatcacagccacaccttgtttcccaggcccaaacctctacagcacattctcttccatggaggcaggccagtgttatgctctgttccccaggagcataaaataatagctacccaacccttgggctcaagctgctagagggtgcctcagagtcacagattctggctctgtaggcaacttacatccaactttgccacaaagatggaacctgtatcctaagacccagttgctattttaggtttatgagtccctgagcctgtgaccccagatccatagctgatctgagatgctacacctgg

SEQ ID NO: 235986 - DNA, 635 bp, Homo sapiens
attttacccagcctcatatgtatattgttatgggagaagatgttgacactattgaaaggaacaaaggtgggcttatctccagcatgaatatcttttggagtcttgactcaggaaatgacttctttgagatattttcctctccctggacatgtggggtttccttcacctagctctcaaatgtattatggggaatattgccttcacaaagatctggaggttggtagacrttgttccatccaggagaccctgctaacaacccagccgcataagctggattgtgagtcctaactcttacacatgcaccagggctgagatatctgctgatggtcagcaggttatggcctatatatttgagtagatagaaagctatagtcagagggtttaaacaatttgtccaaagctacggagtggaccacttctatctcattgcatagaccactatttccatttttctgctttcattggctagaaactttgcattcctagatctgaaagttgagcagggttgatctcctttctatactgaaatttaaatatctcaaaccagagtgggagattagataccccctctgttttccttcttacactcataatctgaatatttttgctctcagttttattttggtagttgggat

SEQ ID NO: 235987 - DNA, 635 bp, Homo sapiens
attttacccagcctcatatgtatattgttatgggagaagatgttgacactattgaaaggaacaaaggtgggcttatctccagcatgaatatcttttggagtcttgactcaggaaatgacttctttgagatattttcctctccctggacatgtggggtttccttcacctagctctcaaatgtattatggggaatattgccttcacaaagatctggaggttggtagacgttgttccatccaggagaccctgctaacaacccagccgcataagctggattgtgagtcctaactcttacacatgcaccagggctgagatatctgctgatggtcagcaggttatggcctatatatttgagtwgatagaaagctatagtcagagggtttaaacaatttgtccaaagctacggagtggaccacttctatctcattgcatagaccactatttccatttttctgctttcattggctagaaactttgcattcctagatctgaaagttgagcagggttgatctcctttctatactgaaatttaaatatctcaaaccagagtgggagattagataccccctctgttttccttcttacactcataatctgaatatttttgctctcagttttattttggtagttgggat

SEQ ID NO: 235988 - DNA, 531 bp, Homo sapiens
acatcttaattgacccttatacagaaggcatctaactgtgagccgctgtggtctccatttgtgaaggggtctgagtcaatcattttgctcatcctctcatgggaaatgaaaatagcagacacactgaagcatatctctctggtctaatcagaaggccagatgtgaccaggcataacgttccccctgaagatgagtgaagtgaagggatatccaaatgttctggagttggacaaatgcaaagattgttgactgagattttcagtaatagaattctctatggtttgataaattgcaagtaatataatatatgaatatgtgggttttgaaattagacagattgggaatgagtcccagctcagttagtaatcagctatgtgaccacaggcctatcactttttttgtgacatttaaatgagataatgtagaaaaagtgcttacctcggtgcctgacacatrgtaattgtgtggtacgtggtattcattattattgttactgttatttttcagtactattccaaaaatacattccgt

SEQ ID NO: 235989 - DNA, 531 bp, Homo sapiens
acatcttaattgacccttatacagaaggcatctaactgtgagccgctgtggtctccatttgtgaaggggtctgagtcaatcattttgctcatcctctcatgggaaatgaaaatagcagacacactgaagcatatctctctggtctaatcagaaggccagatgtgaccaggcataacgttccccctgaagatgagtgaagtgaagggatatccaaatgttctggagttggacaaatgcaaagattgttgactgagattttcagtaatagaattctctatggtttgataaattgcaagtaatataatatatgaatatgtgggttttgaaattagacagattgggaatgagtcccagctcagttagtaatcagctatgtgaccacaggcctatcactttttttgtgacatttaaatgagataatgtagaaaaagtgcttacctcggtgcctgacacatgrtaattgtgtggtacgtggtattcattattattgttactgttatttttcagtactattccaaaaatacattccgt

SEQ ID NO: 235990 - DNA, 540 bp, Homo sapiens
caattattatttaatatttgtaacagaaggtgctagacaatgtcatgggacaagacaaagaatctaagctataaacattggaaaagaatataatagagataagatgatctctattacagataatataattatacacttggaaaacctaagagaataatgtgaaaactatctcaactaattagagaattcaataaagttgatgagcacaattttaatatactgaaatcaataactttcataaaaacaaataaacatttagaaaatgcaatgaaagaaaagactttatttacaataacaacaaataaaaatgccaaagatctgtatgaagggaaactaaaatactccaaacggcctgaacagctgraaagacagatcatgttattgaataggaaaactcaatatttttaattaaactttttattttgagataactgtatattcacatacggttgtaaaaaatgtggggggggatcccaggtatcctttacccagtttccctcaatagtaatgtattgcaaaactatagtacaatatcacaaa

SEQ ID NO: 235991 - DNA, 625 bp, Homo sapiens
ccccaaccaagccgctgacaagtaaactatgattataaataatcattgtgttaagcctatgcactctggggtaatttgtaatgcagtaacaggtaactggcacagagaataatcatacatattcatgcccaatgcgtggcatatagtagctgttggaaaaaaagaatagtcccctttcataccttttcaaccaatcagaaaagtcccagctcatcccagtgaaagttgcaaaattatgttaagatcattagtcacaaagatggaggaagcaagttcaggaataccatttatcaatgcttctactttggctccttgctgagaggagagaagcaaagcaacggctggaacatggacctcctgcactgggggcatgcagctccaccatcgacacgcaggtggcctgacagcctcagagcaggttttcctggaataattattcccattgccatgattggttatttctatgtcaragtcacttccccttttcactcctgatttttcatttttgtaaaaatgacagtgcttgatttagctcttggaagaggatagggaatttggggaggtgtagagacatggagcagaaagttgaggaagggaacaaaattagtcatcaaaatgggcttta

SEQ ID NO: 235992 - DNA, 592 bp, Homo sapiens
cttatctggtttggaagttatctgaaattaaaatcatgcctgacatatgaggccctgggagaaatgcattgtgcctttcttacctgagattatctctgtctagttcctgtgcaataaggaggctgacagggaaagcacggttggtacccttttctccctggcaggaaagtcatcttcctctaagccatggcttttggagaaaatttttctcggggtggcattcctgctaagaaagtgaaacactggcttttgtttggaagaggtcmtatctgtatccggacctggagtaaatgtcatttgtcctggtccctaaggcttcacttgaaagtagcatggtggctctttatggcaccatgctagtcatttatacatatattttcttattcttgcaaaaacctataatatagacaaaactatgaatcctgctttacagctgaaggtactgagtctcagatggtacagagactattaaacacaaacaaactttgattctaactaaagtcttttaactctggctcaatacggaaatgacaaacttatctttccaacttttattttggattcgagagtacacatgcaggtttgttacatg

SEQ ID NO: 235993 - DNA, 466 bp, Homo sapiens
gaattcaaagaagaaaaagttcctgttgtcattatctagtaaaccacattgcaraatttaaaaaaaaattgattctttgaatgatgactcaaagtgcgattctgataaaattttctctaatcattcaacattattgaaatgaagttgatttaattgaacctgtaaaagagattgcattttctaatcatacctcatctgtagatgcttattattcaaagaaagccatatacaatttcaagcacccttcattaaaataatatatataatcttagatgcctttctcccctagtgattattctaaagtggctctggtctttctaccatttctcatgcataggaaatattttctttttagcactgaacaaaggtaaatttgaaataattcatcaacagctacaccagtaataacttgaacaatatctttgtattttggaggtaaatgctaaaactcaacatctggatggaa

SEQ ID NO: 235994 - DNA, 470 bp, Homo sapiens
cactcaacatcttttagccttggctctctcatttgtaagcatccctgtttcgtcaattgtccagggttgttagagatcccaatagtgcagatagaagtattttgtgaattaagtgtagtgtccctaattattacaagctcctgggtctcccaattataaagcctgggggagttccttacttgctactggatttctagtctctgaaagtggtacctggaggccagggcctrgagtttctgaaagtgggacagtggtcccaatgtgccaggaccacagtgggtaggaccctgtacctgtgtattagtttattttcacactgctataaagaatacctgagactgggtaattgatgcaggaaagaggtttaattgactcatgatttcacatgactgggaagcctcaggaaactacagttgtggagaaggcaaaggggaagcaagcaccttcttcacagggtggcaggagagata

SEQ ID NO: 235995 - DNA, 510 bp, Homo sapiens
cagaaagcacaaagtcagaagaaaacttttttttttctggagatggggtcttgctctgttgcccaggctggagtgcagtggtgcaatcttggctcactgcaacctccgcctcccaggttcaagcaattatcctgcctcagcctccctagtagctgggattataggtgtgcacctccacacccggctatttttttttctttccttttttttttttttttttgatatttttagtagagatgggatttcacagtgttggccaggctggtcttgaactcctgacctcaagtgatctgcccacctcagcctcccaaagtgctaggaatacaggcatgaaccaccgtgcccagcctgaaaacatactttgaatgagttcggcataatgggaasaaggcctcccaacttgtcgagagagggttctctctcacacaagtggtggtgtctctttggccttgtttgtacctgaacactatttgtagtgaagcttcttccagtgcctctgcctggaaggtg

SEQ ID NO: 235996 - DNA, 539 bp, Homo sapiens
aaacaggaaggacaaaaggaagtagtgtttgaagcttaaatcagatggacaggaaaggccttgctgaaaggagccatctgagtaaagaagtgaagagaggcagggagctacacaattattcagaagagcattctatgcattatttcatttaatcctctcaataatctaactataaccctgggagataagtattattagtgtcctcatgtgcagatggggaaattgaaagactcaacttagtgttttcctaatgcaatagtggctctctttctcctatacctatcttctaaaaacgacttgtcactgagtgtagggcagcttcargcagctcaaaggctgctcaaaagctgtgagtctggggaatgagtcttctagcacccctcttgaactaccctgcaatgttagaaagtgtcacagcatttctccttcatcctccctctgcttccctcctccttttcctttcctgagcttaggtgggacacaaagatgcaagcagaacactgcaaccattgcaaaccttcacaccagcctccctcact

SEQ ID NO: 235997 - DNA, 548 bp, Homo sapiens
ccacatgaccaacgacatcagtgtgtaactcttaaatagaataagtaacaaacagaaaaaaagaccattctaccaaaagaaccatattgaaactggaaaaatgaaataaaggtccttttattacaaatgattaggaaatcttaaattatatttccccatgatctcattgaggtacatactcagtattttctgatcctgaagcagttgctcttgttgtttttttatatatattaacccatttattagcttgctgtttattgattgcttctcatgtcttggccacctggtagctcttaatttcacaaagggtattctcattttactttaattatttttgataaattgccaaattacaggtaactcctgatttaatccatggattatcataatattgctcccctagactgtgtaagacaacatatatggtcaatgytatgttattttattgtcctaatttacagttgttgttattgtttaaaccagtttagcaatgagtcatctctcccacttctttccatttttcacaaaaaaattcaggattccttact

SEQ ID NO: 235998 - DNA, 572 bp, Homo sapiens
catctctcccacttctttccatttttcacaaaaaaattcaggattccttacttttttatcaaaaatatttctggcagactgccacagtgaatggccttattaatacttgtatttcatcttttttattcatccctagatacaggttatgaaggcatgtgcttggacattcyaggaagtgactaagtagaagataaaagacagtgatagaaccataagccatcctggtagagtttcagctagtcaggttttgagctgagtattgaagtgtcctttgcacagttctaccacagttgtgtttgggaggaagagttgaggtggaaaaacaatttgatattcaaaatgtgagctattcttggagcacatgtgctgtgaaatgagttatctgatcctaatttaaagaacatttaccaaatacctatgtgttcagcactgttctaagctctggggatgtagcaacaaacagacaaaatcccagcccttatggagctaacattttaatggaatcttaatgaataagtaatttccaaaataagactcccattgatgaatctccaatggctgtttttactggt

SEQ ID NO: 235999 - DNA, 588 bp, Homo sapiens
ggttttgactatgtatacactggctcatagtaagacattaccccacacccagatgctaatgaccagctcttttctggaaaatctcaaagtgagaaggccatcttgaggccatctgatatgcttaccttcatgttaagctcagcagttagtgtttttgatgctgagcccccttggtccttgtgatctgtgacataatggaatcaaattaaaggcccatttaccagctttattgccgattatttataatactctggttccaaagtgcttctttatagagtgcttaagctgccattgctggatagaacttgccataaatgcattcacatgcayagcacattatgtcccatagccgcagcaaaaagggaaaagattattctcaattatttcatatagtctattttattgttttattgtaataaactgccataccttacaccactttaaaatcaatagtttgcattaaaaataatgaaacacggctattaatcttgcttagcatttctgctattactttctgatagtgaatctgtaatatagagaaggtaataattactcacttccgatcaataggaacattttcaaatactc

SEQ ID NO: 236000 - DNA, 513 bp, Homo sapiens
ttccttgagaaaatacaacaaaatggctaactgcttgggctttggagtcagaaagcctgggcttaattgccatttccatcattcaccagtaccgtttcagtgaccttgaacatgtcatttaaccatttgctgcctcagtctccttgtctataaaaaggaaatgataacatctaccttgcaggattattataaatattatgtgcaaaacttcacgggttatatttatcacagtgtctgaaatataataagtacactagaaatgatagctactattattatgccatgtgtacttgggattgatatatgacttsatagatcattgtttcccaaagagatagtggcaaaagcaggtgaatggtttgtaccatgtttacccttttgttccttcattttaacctagcataagactaagctgggctttctggtggtactcagcatctggacttgaaaccttgacaagggaaattaagccatcaatttggttgtaatacaaaaggccttttgactccaaac

SEQ ID NO: 236001 - DNA, 507 bp, Homo sapiens
cagcgaaaatagaggaaaaaaaaattctgtggagggggaataacaaaggcaaatgccaaaaggtgggcaagcgaatgtctcactataactccactagtgtaaaatcctcctccatttcccaccatctaaaacacacctcaggggattcacaatctcccagcctgaatttccaatgcacttactgtagtttactatccacccaaggctcctaaactacaccgcaaagtgtttgcacttttttttctaacataacaccttctgtttcatgcctctctgaacttgcatttgctactcattggacacaaaattgatttattcgcctgaaaaactattctcctgaaaracccaattcaaatactacctcctttttgaagcctcccgatactcccagataatttcacactgtgtcacgactcttcgtctgcatgtctgaatgttatgcttcttaaatgaatgaatgcacatgtgaatgaatgaatagattaatagaataatatataatatatt

SEQ ID NO: 236002 - DNA, 576 bp, Homo sapiens
caaggaacccctggcttgggcccacagcacagaccctccatcctgggctgattgcactgagtgattgctgaactgcatctctttggggtggagcccccaggagacaagcaagtaacccttggccacaaccactactaagatctcttcctctgctgcctccatggtgaggaagaaacataagcactgagatcaccccagagctgcagtgggcaactcaggagtgccaagtcacaatctatggccagcactgaagtgggagaagaactctgcaatttcagagcattgaaaaagaaaatgctgcaactgtgcagaaacataggragctgcataaccaagcaagagtctactgactgaccaataagcctaagtgccacttgctggatcacaccccaaagcttcaacaccaaaaatacctcactaacgagcctccctctgaaaccagaggcaagaagtcagcttcaaataaaggccccacacaaagcctcagcctggtgaacacatccagaaaagaagtgtagtgattgtactcaatctacactgcagttaaatgcacacccacagtcagagatgagaaag

SEQ ID NO: 236003 - DNA, 617 bp, Homo sapiens
atggaagccaagacatgggctgtagtctggcaagtcccatcctgasttgtagatatgtgcacagtggacagcaaagcaactgggcagacccagtcagcaaactgggagagtaagacccatcaggagctctaccaataaagtgggcctcagacaggaatcatgtctggaaaaagaagaaggaaactcaagatttattgagcactctccatgtgccaggcacatgtccctggagaacagtgggtaagtgtataaaaatctgagaaccctactaaaaactccagttggatgagtcagagacttgggaggctatgggtaagcaactcagttggggccaagtactcttgccctgtgctcccatggcaccccacaatagccctatctccccaactagtctctgagttcctggagggcagggatggtgtcaccaatttttggctgatctgaccaatgggatattggggatatgacagaatgtgacttctactatgctctttcttgatttacttactctgggagaagctgtctgccactctagaatccctatggagaagtacatcaaggaaatactgaggcctcctgccaacagccagcaccagcttgctagccatgtgagtgac

SEQ ID NO: 236004 - DNA, 617 bp, Homo sapiens
atggaagccaagacatgggctgtagtctggcaagtcccatcctgagttgtagatatgtgcacagtggacagcaaagcaactgggcagacccagtcagcaaactgggagagtaagacccatcaggagctctaccaataaagtgggcctcagacaggaatcatgtctggaaaaagaagaaggaaactcaagatttattgagcactctccatgtgccaggcacatgtccctggagaacagtgggtaagtgtataaaaatctgagaaccctactaaaaactccagttggatgagtcagagacttgggaggctatgggtaagcaactcagttggggccaagtactcttgccctgtgctcccatggyaccccacaatagccctatctccccaactagtctctgagttcctggagggcagggatggtgtcaccaatttttggctgatctgaccaatgggatattggggatatgacagaatgtgacttctactatgctctttcttgatttacttactctgggagaagctgtctgccactctagaatccctatggagaagtacatcaaggaaatactgaggcctcctgccaacagccagcaccagcttgctagccatgtgagtgac

SEQ ID NO: 236005 - DNA, 456 bp, Homo sapiens
agttaagtttttaaattctcactgtaatagtcagtagactttctgatggttacctataagttaacaggctaatgcttacttgtggtatttgaccaatatttcttcttcctgagatgtcctttccaccaacatggctttttctgcctccacaactcgaataaataagagtctttgcacccamaactccaaactgcatcttttcttccccattttaaattatccagtttgatgctagtcaatttacttccaccaaacaaacaaacaaacctttctagctattaaatacctgaacttaaaaaacaaaacagataaattagagaagttgtgatatggtttacgaaacattaattacaggcttatcataatcaggaacaaacctggagtgtttaaatactgtttataggctatacagttattgactatggcagaggatatgacagaattttaatacctata

SEQ ID NO: 236006 - DNA, 630 bp, Homo sapiens
gtatagataatgatcaataaatactgagggaactcagagaccggtgccggagtgggtcctccgtatgctgagcgctggtcccctgggcccacttttctttctctatgctttgtctttgtgtctctctcttttctcagtctctcatcccacccaatgggaaacacccacaggtgtggaggggcaggccaccccttcgcaaacactggtgatgaaataatgttgccttcttcaggactatgccatgatgtactggakagacaatgggatcctaacagaggagctcatcacagggctccccacctatgggaggaccttctggctcagaagctctgacacctcaggtagagcagggtcatctcatctggtccttctgcatgctaggctggattcgggacttaactgtgaggtaactgacatggctaattcagacttcagatgcgctggggaaaattccttcactcttcaattcaccctgtcattcttctcttgagttcctataccctggcttctcattgttctgagtataagcagctcaatggctgtggaacagtttcacttgggaaaaaaaaatgtgaatttcctctttgggctttgaagcacaccatcattcttctcacagcctccaagtaa

SEQ ID NO: 236007 - DNA, 630 bp, Homo sapiens
gtatagataatgatcaataaatactgagggaactcagagaccggtgccggagtgggtcctccgtatgctgagcgctggtcccctgggcccacttttctttctctatgctttgtctttgtgtctctctcttttctcagtctctcatcccacccaatgggaaacacccacaggtgtggaggggcaggccaccccttcgcaaacactggtgatgaaataatgttgccttcttcaggactatgccatgatgtactggagagacaatgggatcctaacagaggagctcatcacagggctccccacctatgggaggaccttctggctcagaagctctgacacctcaggtagagcagggtcatctcatctggtccttctgcatgctaggctggattcgggacttaactgtgaggtaactgacatggctaattcagacttcakatgcgctggggaaaattccttcactcttcaattcaccctgtcattcttctcttgagttcctataccctggcttctcattgttctgagtataagcagctcaatggctgtggaacagtttcacttgggaaaaaaaaatgtgaatttcctctttgggctttgaagcacaccatcattcttctcacagcctccaagtaa

SEQ ID NO: 236008 - DNA, 605 bp, Homo sapiens
catatgaaggaagttttagtggtctagatagaagatcaaaccagcsataactttcccttaagccaaagcctaatccagagccaggccctaactcttcaattctatgaagactgggaggagtgatgaagctaaagaaaaaaagtgtgaagctagcagaggttggttcatgaggtttaaagaaagaagccacctctacaacatgaaagagtaaggtgaagcagcgagtgttgacatagaagctgcaacaagttatccaggtgatgaagttaagatcattggtaaaggaggctacactaaataacagatttagttatttatgtagctaaggtgacaagacatccttctattggaagaagatgctcatctaggacttttgtaactagagaggagaagtcaatgcctggcttcaaagcttcaaaggacaggttgactctcttcttaggggctaatgcagctggtgactttaagttgaagccaatgctcattaaccattctgaaaatcctaggtccattaataattatgttcaaactactctgcctgtggtgtataaatggaacaataaggcctggatgatagcacatctgtttacagtatggcttcctga

SEQ ID NO: 236009 - DNA, 601 bp, Homo sapiens
actattaaacaaaaactaaaaattggaaatttccctagatgtgctagtgtcactgaaagtctcagaaagaaacagataaaaggagttttgaaaacagactatttacaaaggtttggactggtggggacaagtctaaagttgacaaggaatagtgtgatgctctggaaatagcagccgctggggacagttacccacccttgacaggaaggacacagaacggagagcttttcaggaggcccggctcctagaagctgctgcatttggagaagaaaatgtagccaaccctaagtggcccagagagaaggatccagcaattctcaaatctcttgccattgccctgttcaaacacacttgtctgcctcctgagacagaaagcagaggcaagaataatggagagtagatgggtgtgggcaactagaagattctcaaaacaactctattctacccaatattcttacgaagtcttgctcttctctagtaaaagtatactaataccaccaarttcagattttcttctttcataatgaagacttgaagataaatgaaaaggaaagcactgcctcccaatgttcatgccatgcccatgtacagttgaagccaa

SEQ ID NO: 236010 - DNA, 507 bp, Homo sapiens
tctgcaagaggagattaagccatgtgtatgctgtctgctgtatctaggggtgtcatttggagaatcaacttcaattaaatctaattacattccccttcaactagagaggcatgaaaaggacccataaacttaattttaattgtaagtcaattacattgtgaagacgcagaaaaaatattaaatgagtatgacagagtcatcctgcatggatactatactctcagacctcatgtaaagagaattactaggagtgaatttaaataaaaatccttattcaaatgttacccaaaatattgtacccatttttttttgaactaatacccatatttccaatgggaatgcaatctaatgtggaaagatgtcattgttcattgggaatgaagaatgaaaattccgtgcattcaggtcattcaagggaagagacagacaggaattctttaaaactcagacaaccagcctgctctgtaatcatggccaaaaayaacaaagttgtaatttttatacata

SEQ ID NO: 236011 - DNA, 395 bp, Homo sapiens
aatattccccttgttagggtgattaaacaaacatttaatgatctctctgtgagagataaaaataaaaatacctagatgacaaagcaaaagcctttcaaatacccttagaagaaaccaaccmcaaggcccttgtgacagcctccacatgctatcaaaaaccagtagctcaatcttattaagttagactcacctggaaaggttaaaagttttaaagtatagattcccaagacatcccagagattcaaacataaccctcctgggttggagcccagtcttggtatttgttaaatgtttttccaggtattttcagcactgagatcagcactgttctgatcccgagaagaaggaactggtaccatagataaagggaaaaaaagggaaaggaaacttttcta

SEQ ID NO: 236012 - DNA, 618 bp, Homo sapiens
tttgatttatgattttgatttgtatttccctaataactaatgatggtgagcatctatcatgtttactgttggtttttgcattcaatgtcttccttcagcattcggattccttcccactgamgtataacttgtaacagttctttcagaatacatcttggagaggtgaactttcttaatttacatatatccgtaaatttctttttgtcttatcttttgactatttattgacatgtaacaaatacagtataaattataatcatgtagctcaatacattttcacaaattcagaaaaaagcacttgaataaccaatacctataataaaaaataaaagcttaacagcatcttggaagccccactgggccactctaagttactgctctctaatagataacttttatcctagcttttgcaccacacacaagtttgcctaggtttaaacttcaaataaatggaataatatcattcagaacatacatattttttctctttcctaattgttttagtatatcatgtgctgtggggatacatattctcttcagttgtatctactgactatttatttcatgttagattacattctcatgcaatttgcaaattttgtagtgaccttatatttc

SEQ ID NO: 236013 - DNA, 618 bp, Homo sapiens
tttgatttatgattttgatttgtatttccctaataactaatgatggtgagcatctatcatgtttactgttggtttttgcattcaatgtcttccttcagcattcggattccttcccactgaagtataacttgtaacagttctttcagaatacatcttggagaggtgaactttcttaatttacatatatcygtaaatttctttttgtcttatcttttgactatttattgacatgtaacaaatacagtataaattataatcatgtagctcaatacattttcacaaattcagaaaaaagcacttgaataaccaatacctataataaaaaataaaagcttaacagcatcttggaagccccactgggccactctaagttactgctctctaatagataacttttatcctagcttttgcaccacacacaagtttgcctaggtttaaacttcaaataaatggaataatatcattcagaacatacatattttttctctttcctaattgttttagtatatcatgtgctgtggggatacatattctcttcagttgtatctactgactatttatttcatgttagattacattctcatgcaatttgcaaattttgtagtgaccttatatttc

SEQ ID NO: 236014 - DNA, 578 bp, Homo sapiens
tcaagtttccctgtgggcaggtatattgaatccaagttcctcttcttggcttcttgatcccaaacctccttaccaacatttccttctgcttctcaatcttcacaattcattgtagtttgagttcttgatagccctcttccctgtagcacattctagatttctggccttgctattgacagccccacctctgaaaaacctgcttattttattctttaaatatactttttatamtatccctcaggctatattttttttctgaagaactatcattttttctagtgctttgtctatgctaagaccatcagtgcttcataaaatgtggtttaattattcatacatagttataacagtaggatctgctttatatgcccctgagctttgcatagctcagggtaggccagtatacttcttaatcccttaagtaaagatttgggatcttgttctcagcaccgtgttttatgtttagtggtcctctttgaccctgtagttatctttgcagagttactgtagtgaggcacctttcacaaaatgagcaatgtttctgggtcaaccagttggatgcttggtacaaatagatt

SEQ ID NO: 236015 - DNA, 581 bp, Homo sapiens
ttatttgcctcattcacatatatagtgacagcactagcacttacttcatagaagtattggaagatgaaataagatagtgtattatttgtatagtattgcrtgaagtgcctagcacatactaccttttaaataaatggtagttattattgaggtgttactgctttattggtggtgttgatctggaaatgtatatgggaacttcaagagccttgaatgggcttcagttttgctcaattatctgcattgttttaaaggagtttcccacagatgttaactatcatcctggcttaggtggactgcaattgtgtttgcttcactacacatcttagcagccaaaagagtgtctctcttgttactacttaaattcttcttgtgccttaagaggtataggaggaggagaatccaatgtttctgaacagttttgttttatagccagatacaactgttacagtcaaagcgctacttgctccaatattagttatctatggctatgtaaaaaaactatcccaaacttagtacaaaacaaaacaaaaagccatttaaatcatgcagtttgaggggatcagttgttcaggagaagc

SEQ ID NO: 236016 - DNA, 581 bp, Homo sapiens
ttatttgcctcattcacatatatagtgacagcactagcacttacttcatagaagtattggaagatgaaataagatagtgtattatttgtatagtattgcgtgaagtgcctagcacatactaccttttaaataaatggtagttattattgaggtgttactgctttattggtggtgttgatctggaaatgtatatgggaacttcaagagccttgaatgggcttcagttttgctcaattatctgcattgttttaaargagtttcccacagatgttaactatcatcctggcttaggtggactgcaattgtgtttgcttcactacacatcttagcagccaaaagagtgtctctcttgttactacttaaattcttcttgtgccttaagaggtataggaggaggagaatccaatgtttctgaacagttttgttttatagccagatacaactgttacagtcaaagcgctacttgctccaatattagttatctatggctatgtaaaaaaactatcccaaacttagtacaaaacaaaacaaaaagccatttaaatcatgcagtttgaggggatcagttgttcaggagaagc

SEQ ID NO: 236017 - DNA, 639 bp, Homo sapiens
tgatgtcataagaaaaacagtattgagggctgggcacggtggcttcagaggtaatgacaacctgaccaagctctaagacaaaataaccgtttctgaggggatgccttctcttcaatattctaccaaccgtcacctaaggaagacaagttctgagtggcatggctacagtrtcagtgctagtgtcagaaactacagcacagggcagatagatgcattttttaagatcaccacaagtcaaggaaggacagaacgggaaggagcagctgagatcaccaaactctctaacttgatgcataagagaagtgatgcccaacaaacagaaaatggcttctccaaatccaggaattaagttgcaaaactggggccccagattttatttctgtgagaccatgatgcctcatgaacgataacatgctgaggaattctcagtcttctgtctctgcctttccagccagttaggctaaacccaagcctactatgtggccctcagttttcctgcatcaggatctctggtgtgtttgttgaaggtgcagaatcccagaaggcaaagtccttccacctgcatttttaacaaggctaattctgatgcatattcaagcttgatgaccactgctctaggcataattgagtcctaattca

SEQ ID NO: 236018 - DNA, 592 bp, Homo sapiens
caacccagtggtatcccagaagtcactggcaataagaacacctttgaatactttgcaaaatatatrtgcatctgttaactacttggaacaaagaagtcatgagttcaaatcttagctctgttctgtggccctaggcaagtcaatccactcccattttctcatctgtaaattgaggagttgaaccaaatcagggtcttaaccttttggtggatatggacccctaggaaaatctaatgccagctgtggactcttgcccctggaaaaatacacaaaaaagttcagagagccaacagagccccaaacccccaccaaagatccttcagggtgcaatgcatgggcctggactagatgacccctaagccccctgagagctccaaagcctttcttcctcctaactcctcttccttacagagagctctgggactgagtatcacaggaagcatgtgaaaacatgggaactagagcaggcatcagaaatagaaattaatttgcaagatcaaaaccaactgcaaatggccaacaatgagcttttagtttggcaagcctgctacatggctaaataagcaggagtaggtggccagcattggtaaac

SEQ ID NO: 236019 - DNA, 393 bp, Homo sapiens
ataaagttaaccatcaccatgcccaggaaaacttcaggataattttctttgccagatacacattcagaagacaaatcaaatgtgaaatgaattacttattttacaaagaatgctctagtatagaatgttcttctgggggatttcaaggataagaaaatcytaaatgaagagaacttataagagaagtatacctcatgagtaaatcacagtagtgagaaaatctccaaagagctataattatagctagatgtttctgtgagggtgtttttgtataagagatatattagcaaatgatgttgtcagagataaaatgaaaagaagctgtcagcaggcaaactagataatttataccagcacccccaaaattcctttatcctaagttttgtgatagct

SEQ ID NO: 236020 - DNA, 393 bp, Homo sapiens
ataaagttaaccatcaccatgcccaggaaaacttcaggataattttctttgccagatacacattcagaagacaaatcaaatgtgaaatgaattacttattttacaaagaatgctctagtatagaatgttcttctgggggatttcaaggataagaaaatcctaaatgaagagaacttataagagaagtatacytcatgagtaaatcacagtagtgagaaaatctccaaagagctataattatagctagatgtttctgtgagggtgtttttgtataagagatatattagcaaatgatgttgtcagagataaaatgaaaagaagctgtcagcaggcaaactagataatttataccagcacccccaaaattcctttatcctaagttttgtgatagct

SEQ ID NO: 236021 - DNA, 580 bp, Homo sapiens
ataataaacaactatgttactggtttatgtatttactatcttatacttttatcattattttaaagtatactccttctccttatwaaaaagtctaatataaaataggctcaggtaggtccttcaggaggtatctagaaggagacattgttatcacaggagatgacagctccgtatgtgttattgcccctgaagaccttccagtgggacaagatttggaggtggaagacagtaatattgatgatcctgaccctgtgtaggcttaggcaaatgtgtgtgtttatgtcttcattttcaacaaaaagttcgaaagtaaaaaaaataataataatttaaaaatagaaaaaagcttacacaataaaaatataaagaaagaatatttttgtatagctatacaatgttttcaaggcaactgtaattataaaggagtcaaaaagttttaagaaattagcttataaagttaaaaagttatagtaagctaaggttaattcactattgaggaaagaaaaaattttaaataaatttagtggagcctaagtgtacagtgtttctgaagtctacagtgatgtttagtaatgtcata

SEQ ID NO: 236022 - DNA, 580 bp, Homo sapiens
ataataaacaactatgttactggtttatgtatttactatcttatacttttatcattattttaaagtatactccttctccttataaaaaagtctaatataaaataggctcaggtaggtccttcaggaggtatctagaaggagacattgttatcacaggagatgacagctccgtatgtgttattgcccctgaagaccttccagtgggacaagatttggaggtggaagacagtaatattgatgatcctgaccctgtgtaggcttaggcaaatgtgtgtgtttatgtcttcattttcaacaaaaagttcgaaagtaaaaaaaataataataatttaaaaatagaaaaaagcttacacaataaaaatataaagaaagaatawttttgtatagctatacaatgttttcaaggcaactgtaattataaaggagtcaaaaagttttaagaaattagcttataaagttaaaaagttatagtaagctaaggttaattcactattgaggaaagaaaaaattttaaataaatttagtggagcctaagtgtacagtgtttctgaagtctacagtgatgtttagtaatgtcata

SEQ ID NO: 236023 - DNA, 610 bp, Homo sapiens
caaatgtgtactaactggtgtaattattgctacaacaattattgtaattgtttcttttcacactcccaaatttatatctccattttgagtgccatatctcaaactttctgcctaacatctagacgtgaatgtcttatgagcatttcaaactaaatataacctcaaatctcatgggtttcttcycactgaaatacataattccttctatacctctctttttttttttggagacagggtctcactctgtcacttaggctggagtgcaatggcatgatcacagctcattgtagcctcagcatcctgggctcaagcaatctcgctgcctcaacctcccgagtagctggaaccaaacacaggtgccatcatgttcaactaatttaaaaaaaattgtcgagatggtgtactagttcattctcacactgctataaagacctacccaagattgggtaatttataaagaaaagagatttaattggctcatggttccacagactgtacaagaagcatggctggggaggcctcaggaaacttccaatcatggcagaaggtgaaggagaagcaggcacaatcttcacatggcagagcaggagagagggagagtgaaggagga

SEQ ID NO: 236024 - DNA, 472 bp, Homo sapiens
tgggaattagtcactgcaggcttttactcaggttaaggtgatatgtttcattaatgaagataaggcttgagcacatgtctagagttttgcttctgagcttaaaataactatgacaataattttctatcacccaccctcaaagttgactgtccttgagttgacacaatagagttctcttgaaaacctaaagcacccaaaagaacttcagtgtaaacaacttaaggaattacctttggaagcaaagacttgtttcttatgataattttaaataaaagttcaataattatgcctgatttgtaatctataaatgtacatctytttaccttacactatttatagactttactaatttagaatttaataggccctttagatttatgaagagttaaaaaaagggtattttaatgatttagggtcttataatgtttgtgtatttaaagtagatccccatttagcagtgctccacctaata

SEQ ID NO: 236025 - DNA, 540 bp, Homo sapiens
ggaaaatattcaactttagcccagtatcaccttctttccatctgggggatgtaaaatacccaagtccagcttacaccagcctttcacataaagggataaaactacccaacttctgcccctactagcyatcctatctcacataaggggtaggtgggtggggtgggaaaatgagaagaactggtaattatcagtttaccagctcaccaaaagaataagacttaatcgtaagactataaaatgcttcccctactcccaaagcttaccatcacattactaaaggcctaatttaccacagatcactttacctagtacattatgctcagtttgtaccaaaaaattaagaccatacccaagagggaaaatacaatttgaagagacaaagaaaatatcagaaacagacataggagaaatgttggaattatgagattgggaattaaaacaactatgactaatacgataaaggctctaactgataaagtagatggcatgcgaaacaaaatgggtaatgtaagcagagggatgaaaaattagaaagaaacc

SEQ ID NO: 236026 - DNA, 588 bp, Homo sapiens
cgcttctgcatttttatcttaaggactgttatctactcaactgttataaacacatcccccaacattttctaatatttgtttagtttattttgaagattgaatgtttaatttatctgaaatttgttttgtgcatgatataaagtaagaatgtacatttatttattttctggataactagccagaaacattacttatccttcttcacttaaatggccactttaatcctatactaaattcacatataccttaatttaatacgcatttattgagttcctgctctttgccaggcattattctaggcaatgaagatacagcagtgaacaayacacaaaagctttaaaaagaaaaaaagcattaaactcaatgagaatgcaaaattatataatcaattttgacaagaaatacaactgaattaaatttccccatggaaaaaaaaggactcatggtttgggttttttaattacattattgtccaaaaatgatcaaatagaccggaggaacctaacagaaagcttagaaacagatcctagcacttaaaaaacttcagtaggtgataaggtactcttccaaatgagtggtaaaataatt

SEQ ID NO: 236027 - DNA, 527 bp, Homo sapiens
  misc_feature (1)...(527): n = A,T,C or G
nnnnnnnnnnnnnnnnnnnnnttttgttgtctccctcccaccttccaggttgttcagaggtgggtgctcttccagtggccccctctggcaaggcctctcttcatggcccactccccacacagcccctggtcctccagcagcctgtgccccatggcatctccctgttggaatcccattgccttctaggatgggagtcaaagtcggcctgggctggatctgtcttctgcatgggtccatctggtccaggggaagcactgtggacccagcatcctgggacccggtggtgtctgggcctgcaggccaatgttgtgcagcagggactctcctggttccaccgacagagcacccatcagcccgacccctgcccttcacacttcccaggtccatccgctcagttacagagccaggcactgagctgcctcgccccctgggaagcccctctccctmgatgtggtagaggaagcgggggctctggacacccagctctccaaaggctctctccaaaaacccttctcacaatagcctct

SEQ ID NO: 236028 - DNA, 561 bp, Homo sapiens
cattttctaacatcacccggatttgaggggtgggggcagggagtgacctctcccaccttgagtattgtctcagcaggaagaagattccaggtaactactttctggcctgaaagctgagcttttctttctcctgaccctagcacagccagggagtggacatggggcctcagttcccctcccaggtgactcttgagggatgctggcagagcaggaggctgaaggtcagccttggccacagctgcatacccccagcctgtgccagcctcaagaccaccttctgtttcccgggctcaccatcatcatcttagttcctgcctgtgcctaaggccagtcctaatgtctcctcctgggtctgggataacttcaaagacttccagtcaatgcccttttgcttaaattgaccacagttcatttctgttactttcaagcargaaccaggttgacccggactcacccaaggaccagatgttccgtctccatttgacagtcttccattccaacagtctgtgcattgatgagataagtggaagttaacacgcagagagcagggccctggtgcta

SEQ ID NO: 236029 - DNA, 512 bp, Homo sapiens
tcctattcacaagacctgtgccctcatatgctaaacacctatccaaagcactacttcctaataccatcaccttggatttcaatatacaaatttgggggcagtaagggagacacaaacattcaggtcatagcttccaccagtcggaagccctgtcaagacttataagagctttatttcaacctttgatgtcttattgattaacrgaagccattaatcaccaaacattcaaggaaaagttctaacatgaaaaatatgagtgagaacaaataaacttgagaaaggaaattgtagggaatagaatcaatgtagacagtcaaaactgccaaaataaatggaagttaaagaaatagaagaacagaaccaaaagacagaaaacagaaaaagatgatttcttaaaaatatcataaaagtatgttttaggaaatataaaacccaaacattctaaataaatatatagtaaatctagaagtatatatcgagctacttataaatgaagagggcataaaaaacat

SEQ ID NO: 236030 - DNA, 567 bp, Homo sapiens
actttgaggtgagctttatcttgtattctgctttcttcctgaagtcatctgtctactagtaagccacacagagcaataacttaatgtgattagaggggtgtgtaaaaagtactaggtaaggtgagctttcaacagtctcatgggctcagaggatacaagtactggaataaatggtcagaaaggcatttagaacttcataygctaaaattctgaggaaaagggacatataaaggtcaacccaatattctatattccttcttgccttgaggcatatactgatttcaaatcaacactaggttagaggtaaaaggttttttagagagtgttgtctaagaggctgagaagagaaatgcaaagtttgttaggatcaaagtgaaaagaaaagaataattgcaattcaaggagcattaaggatgagaagcactggaaaatacctaggatctgagttggatccactgaattgctataccctaggaataagggtaaattggaaataaatgtactagaatttaatacagcaactaattttaaaaactgaaaagataagcttaacaaatttagatgcat

SEQ ID NO: 236031 - DNA, 559 bp, Homo sapiens
ttgtgtcacttttacctaaataagttggctgtttatatgtgtttacatactaaatgagaaaacagtgtgcaataacattctccttcaaattttggtacatcaactatttgtggtctaagctgttgtttaagtgattcactgattgtaactagattcagagataaaataatttgmttcaaaaacatttcataattgaagggtatgtttaatcataaacctcaatagaagttccattacttcattaggtcataatttcaatggaagctaatattttatggacacaacatccttttcaacttataattaatgtcaaataatgacttggcaagctttgcacttctattaattcatggagccattattgacatttgaaattatcatttttcaatgtgatttaaatgtattaaagttgtcttttttaaaaatcacgtagtttatttcactgataaacttatcctttttcattgaagtcattttttaataacagttgtttttaaaaattttttttaaatatgtatacttttaaaatttatgtggaagctgctctattttcttcagg

SEQ ID NO: 236032 - DNA, 218 bp, Homo sapiens
catttttatatactgatttattttcctttggataaatacccagtagtgagattactggatcttatggtagttctgtttttagctttctgagaaatttccatgctgtttttcatagtggtcttactaatttaattacccatcaacagtrttcccttcccccaaatccttgccagcatctgttatttttttctctctttgatagtagccatcctaactag

SEQ ID NO: 236033 - DNA, 547 bp, Homo sapiens
ctatgaaatatttattctgtacagttttatatakttttggttcacaaaagtaattattcttgggtgcctttcaagaaaattaaaaatactactcactacaataaaactaaaatgaaaactcttttttaaatgtgctttcttaaatgcacgacaagctttacttgtcatgcaatcaagtaaggattaacacacatacacacaaacatacagacacacacacacacacactgcaggaggtttctatttgttgtttacacacagaagtatcttgttcatgttgtgaaaaagactatttgatttttggtatgcttaacagggagccaaatttaaagtatgtctagcagttttccctttcaagcaaatcatttctaatgcaacgtaaaaggaaatgttttatttctatcgtttctaattatagaatcaatcatacctgcacactttcacaaggcaaagtgaaattagtcaaggtaatctgggaatgttttctgaacaccacacagagtcatgtactgggctatgaaggaacacattttccataaggaagtac

SEQ ID NO: 236034 - DNA, 560 bp, Homo sapiens
gaatgatatattagcagattttagatacagctttacaaatgctgactgatttatcagactgaacaacatgtacatctggcaaccagaaastcattgtttggtttcttttttctaattctgaatacttatttactatttatcaataccaacttttaggaatttgttttatttcatagaataaaatattgacaaagtagttaacatacagacagttctaatgataatacattaatttaaaacttctataaacaatatgtgatttaagtgttattagaattatcatatacacaaagattatggtgacagatattttcatgttttaatgttttaagatatctgactgtagtaacctttgttttcatggtgcagcttgtaagttaaagattactatctcaatgaatgtgtcatttgaatcctaaagagacacccatatagtgtgaggaattttgttcccttttaaatggactttattttttagagcagttttgggttcacagcaaagttgactaaaaagtacagagttgccatatatcccttgttcccacacaagcacagcctcc

SEQ ID NO: 236035 - DNA, 560 bp, Homo sapiens
gaatgatatattagcagattttagatacagctttacaaatgctgactgatttatcagactgaacaacatgtacatctggcaaccagaaagtcattgtttggtttcttttttctaattctgaatacttatttactatttatcaataccaacttttaggaatttgttttatttcatagaataaaatattgacaaagtagttaamatacagacagttctaatgataatacattaatttaaaacttctataaacaatatgtgatttaagtgttattagaattatcatatacacaaagattatggtgacagatattttcatgttttaatgttttaagatatctgactgtagtaacctttgttttcatggtgcagcttgtaagttaaagattactatctcaatgaatgtgtcatttgaatcctaaagagacacccatatagtgtgaggaattttgttcccttttaaatggactttattttttagagcagttttgggttcacagcaaagttgactaaaaagtacagagttgccatatatcccttgttcccacacaagcacagcctcc

SEQ ID NO: 236036 - DNA, 560 bp, Homo sapiens
gaatgatatattagcagattttagatacagctttacaaatgctgactgatttatcagactgaacaacatgtacatctggcaaccagaaagtcattgtttggtttcttttttctaattctgaatacttatttactatttatcaataccaacttttaggaatttgttttatttcatagaataaaatattgacaaagtagttaacatacagacagttctaatgataatacattaatttaaaacttctataaacaatatgtgatttaagtgttattagaattatcatatacacaaagattatggtgacagatattttcatgttttaatgttttaagatatctgactgtagtaacctttgttttcatggtgcagcttgtaagttaaagattactatctcaatgaatgkgtcatttgaatcctaaagagacacccatatagtgtgaggaattttgttcccttttaaatggactttattttttagagcagttttgggttcacagcaaagttgactaaaaagtacagagttgccatatatcccttgttcccacacaagcacagcctcc

SEQ ID NO: 236037 - DNA, 562 bp, Homo sapiens
acatataccttctttgctgaggttatctgtttaggtctttycctcttttttatccaaatgttcattttctttttgttgaattttaagagttctttgtataatttaggtaaaaatcttttattagatttgttttgttttgtacttattctatgccagtctatggcttgttttcccatttgcttgacagtgtcatttacagagcagaagtttttaattttaattaagtctagtgtataatgtttttttaaaatagtgcctttggtggtacctgtataaagtcatctccatgcccaagatcatctagattttctatgttatcttctcagaatttttgttttgcattttacattgaggtatatgatccattttgatttaatttttgtgaaggttgtaaggtctgtatctagatcatttatttgcacgtaaatgcccacttgttccaccactgtttcttgaaaagacaatatatgaaagattttttaaaatcacctacaatttaaaaataatttatttatttacaatatatttcattttagcctttacatttaatacttgatgtcca

SEQ ID NO: 236038 - DNA, 619 bp, Homo sapiens
aagataatgcaagtatttaacaacatgtttgctacataaagcttaatagatagcatctattattatcaccaattatcatcacatgctaacctatggtatatgggtaacggataataatgaactcctatatttgaggttgggaagaaattttgctttattgaatatttacataggaatgggatgatgaaggagtacattattagcacatttccttttgtttagcttttattttaggttcggcagtacatgtgaaagcttgttacacaggtaaacttatgtcatggaaatttgttgtacagawtatctcattacccaagaattaagcccagtacccaatagttattttttctgttactttcccttctcccacccgccaccttcaagtaaacccaggtgtctgttgttttcttctttgtaagttttcaccatctaactcccacttacaagtgagaacatgtggtatttggttttctcttcctgggacagtttgatgagaataatagcctccagctccatccatgttcctgaaaaagacattatctcattcttttttatggctgcatagtattccatggtgtatatgtaccacattttctttatccaatctgtaattgatggg

SEQ ID NO: 236039 - DNA, 619 bp, Homo sapiens
aagataatgcaagtatttaacaacatgtttgctacataaagcttaatagatagcatctattattatcaccaattatcatcacatgctaacctatggtatatgggtaacggataataatgaactcctatatttgaggttgggaagaaattttgctttattgaatatttacataggaatgggatgatgaaggagtacattattagcacatttccttttgtttagcttttattttaggttcggcagtacatgtgaaagcttgttacacaggtaaacttatgtcatggaaatttgttgtacagaatatctcattacccaagaattaagcccagtacccaatagttattttttctgttactttyccttctcccacccgccaccttcaagtaaacccaggtgtctgttgttttcttctttgtaagttttcaccatctaactcccacttacaagtgagaacatgtggtatttggttttctcttcctgggacagtttgatgagaataatagcctccagctccatccatgttcctgaaaaagacattatctcattcttttttatggctgcatagtattccatggtgtatatgtaccacattttctttatccaatctgtaattgatggg

SEQ ID NO: 236040 - DNA, 619 bp, Homo sapiens
aagataatgcaagtatttaacaacatgtttgctacataaagcttaatagatagcatctattattatcaccaattatcatcacatgctaacctatggtatatgggtaacggataataatgaactcctatatttgaggttgggaagaaattttgctttattgaatatttacataggaatgggatgatgaaggagtacattattagcacatttccttttgtttagcttttattttaggttcggcagtacatgtgaaagcttgttacacaggtaaacttatgtcatggaaatttgttgtacagaatatctcattacccaagaattaagcccagtacccaatagttattttttctgttactttcccttctcccaccygccaccttcaagtaaacccaggtgtctgttgttttcttctttgtaagttttcaccatctaactcccacttacaagtgagaacatgtggtatttggttttctcttcctgggacagtttgatgagaataatagcctccagctccatccatgttcctgaaaaagacattatctcattcttttttatggctgcatagtattccatggtgtatatgtaccacattttctttatccaatctgtaattgatggg

SEQ ID NO: 236041 - DNA, 511 bp, Homo sapiens
tttcatatttaatatcaaagtataatccattttaaagttgacagatttgactttgttttaaaaattcttccaatttgcagaagtcactgttaagaaaattaatgaaaaaaaagccaaagactggtattagaayctttgcaaaacacacatctaataaaggccttgcattaaaaaaaatagagacaactcttaaaactttacaataagagaaaagaaacaaaaatggtttaaaaaacacactcccaaaaagatacatagattgctaagaagcatatggaaaaaaatgttacacatcatatttcattatggaattacaaattaaaataacagtgagatacaaccataaacatgttagaattgctaaaatcccaaatagaggcaacctcaaatgcagtcaaagatgtgaagcaacatgatgtctctttcactgccttgggaatgcacactagtagagttactttggcagacattttggcagcttcttagaaagctacacatagtcttactgtaa

SEQ ID NO: 236042 - DNA, 511 bp, Homo sapiens
tttcatatttaatatcaaagtataatccattttaaagttgacagatttgactttgttttaaaaattcttccaatttgcagaagtcactgttaagaaaattaatgaaaaaaaagccaaagactggtattagaatctttgcaaaacacacatctaataaaggccttgyattaaaaaaaatagagacaactcttaaaactttacaataagagaaaagaaacaaaaatggtttaaaaaacacactcccaaaaagatacatagattgctaagaagcatatggaaaaaaatgttacacatcatatttcattatggaattacaaattaaaataacagtgagatacaaccataaacatgttagaattgctaaaatcccaaatagaggcaacctcaaatgcagtcaaagatgtgaagcaacatgatgtctctttcactgccttgggaatgcacactagtagagttactttggcagacattttggcagcttcttagaaagctacacatagtcttactgtaa

SEQ ID NO: 236043 - DNA, 511 bp, Homo sapiens
tttcatatttaatatcaaagtataatccattttaaagttgacagatttgactttgttttaaaaattcttccaatttgcagaagtcactgttaagaaaattaatgaaaaaaaagccaaagactggtattagaatctttgcaaaacacacatctaataaaggccttgcattaaaaaaaatagagacawctcttaaaactttacaataagagaaaagaaacaaaaatggtttaaaaaacacactcccaaaaagatacatagattgctaagaagcatatggaaaaaaatgttacacatcatatttcattatggaattacaaattaaaataacagtgagatacaaccataaacatgttagaattgctaaaatcccaaatagaggcaacctcaaatgcagtcaaagatgtgaagcaacatgatgtctctttcactgccttgggaatgcacactagtagagttactttggcagacattttggcagcttcttagaaagctacacatagtcttactgtaa

SEQ ID NO: 236044 - DNA, 574 bp, Homo sapiens
ttacagctgtctggacagattcagagaaagacacaaatcataaagccttcagatgagcaaggtaaatattaacaaatataatggaaatccgtcttactccatttcccttttagggtttttatcacttgaataaatgaaatgttaagagaatacaggtggtatgatctgacatttgagcaataaaacagcttaataagagtccattgagaggtactgaggaataaagcacacagcatagtattaatcacagacattaaaagagaagactgttgcattgtttggagcatgaatgcaattttggtttgttattgtttttgtttcatgaatagaataattttcaaaataaatgaagtttgttagtagtttcaacctccctccctacccaaactcagatattcagtttcatttttctaatgctccaaaattgtcttcattctttccattcatggtattactatagtattcaaatttttaaaaacactcaattgttgaatcttttcagtgtcaatatrttaaaattaagcacaagcaagcattaattacattttaaaatgatgaaattgaaactaagaat

SEQ ID NO: 236045 - DNA, 609 bp, Homo sapiens
gagattcctgctgacttgggtcttaacttttacttgcagagtaagaaagtaaatgaataaacttcttaaaaatgaaataaaatgcatgaagatattttcctagtgctataatcgctaacggaaaaaaaacggaaaatgtgttagcaagcgaccaaattagggtgtggaacaggaaatagctgttaactgataaggtgcgtgaaggcttctctgtgacgatatcacttataatttaagtgatgataaaaatgatgtggctaataaaaacatttcagaagagcagtaacaacaattcccttttctgtagtaacactggcatatctaaaagaagagagaaaagtcaaatgtgtctgagttrttgtgaaccctgaagagttaggtaagagacagagcaagtaagagccacatgataattacatacgggaaagagtttgaaaaagttcaaagaagagtcactggatgattgtattaaatgatgcttaattaccatttgctaaataaacaaacaaatggaaactgctcagacacaatcacttttgcagccttgtatcttaccaatactttgatacttcattagtgagttttctgataatagtttaaaaaaaccac

SEQ ID NO: 236046 - DNA, 600 bp, Homo sapiens
ttttacaaaggaaccagcaatctgaaacccagatgttaagagaggtaattcaagtttattgaatgtctgagagaatgtgctaaagacttcttcttttatcatttaatcggtctaccattatcagaggtcattactctcatttacagagtagttagccaaatacttaaccatgacttccatggaaaatggaagtcaaccttctctgacctgtgggaagagccaggctcaaacccgccggctctctctaaagatttgagtcctgtattaagcgctaaattctttcactgagagctcgtctgtccacactcgatggttcacacacccatggacatgccttatacacagttacatagttttaacatttgctgaggtagtcatgygttacttaatgggggtggagcgtgtgtcggggttgtggggggacacttctgggaaatgcgtcattaggcaatttctttgccattggaacatcatagaatgtactttcacaaacctccatggtattgcctcctacacacctaggctatatggtatcgcctacagcttctaggctacaaacctgtagagcaagttactgtactgaatactgtaggcaattat

SEQ ID NO: 236047 - DNA, 569 bp, Homo sapiens
tatacttggtaatttattaagaactagagagatcatgctcaatataaattttacctgtctacacaaaaatttcctagttctgatataaaattattgaggatcataagttgatttaaacaggagaatgcatgaaaatctttgtgcctttcaaatacatgatttattaggtcatttggttagagggggaaaggtaaaaatgataacctaattctgaaattagaaactcaatgctacttcctattstctgtctgttttgggagccaggtcattcacatgtgtcatccaccaaggtcccgtatcttccttcagtgaattctgttgccgggtaggattaaatttcattagtattatgcagagctacaaggtgtcaccagctggtacaaatgaccagtttcaacttttgaatcacatttacaataaatatttaacaatgcagaaagtacatttttcacaaattagttataaattacctatttggaattttttttaattttttttcctgaaactcaaccactactcactaaaccccatatacagtggaataatgatatgttctccagcaagaacag

SEQ ID NO: 236048 - DNA, 638 bp, Homo sapiens
cacctcttcttgttctcccaatatctgtcatcagctccagtttgcatttcagttatttttagattgttttttccttagcagtgaagcaagcctgtggaaggaaacatattccttctaaagcaagcctgcagtttctctggacaggcaagagtgaggccgcccgcctaaacaaagagaggtctgacgtctgctagggtgttctgggactcagtgggtccacccctgtcttcagtctcggacctggctgctcccagaccatttcaagcctaagacaatgacatatctcgctgggttttgaaagctgctagaggggcttcctaacctccttggctgtcctcatcatagctgcctccactccctagccctgcgctcagtgttttttgcagggaagttcttccttaagtccaaactgtggctccaaagatttcgttaccaagggagagagggagttgccactgatgcgcagtgctcaaattggactgggtggcttgcgtgggatgggtctgggagaaactgtcacagaggtcatgggaatgatgacagctgcaacacacggtgccccagaggcttctcaaccactggtaggtaggacgataagtaggcaggcagcyggctgcagaggcctcttactcacccca

SEQ ID NO: 236049 - DNA, 584 bp, Homo sapiens
tccatcaatgaatggataaaggaaatgtggtttatatacaaaatgcaatactattcagtcataaaaagaaggaaaccctgtcatttgtgacaacatgcatgaacctggaggacattatgctaagcaaagtgaaccagacacagaaagacaaataccacatgatctcactaatgtggaatttttgaaaaagttgatatcatggaagcagagagtagaacagtgcttaccagagacttgagaaaggagyggagaagggaggatggggagaggttggtcaatgggtacaaagtgacaattagattggaggaataagttctggtgttttattgcatcgtggggtgatgacggttaacggtaagttattgtatgttactaaatagctggaagagagtcttctgagtattctcaccacaaagaaatgataaacgcctgaggtgacgaatatgccaaacatcctgattgggtcatgcattgaaacatcaaattgtatcccataaatatgagtagttacaagatgtcatgaggtggtgtatttgttaattagctacgtttaaccattgcacaatatatattcttcaaaacat

SEQ ID NO: 236050 - DNA, 566 bp, Homo sapiens
tttgcttttaccgtgcaacaagccatctcaaaatttagtaatttaataccacaaccatttattatttcttactcatttatgggcctgctgggtggtccttctggtctgggctggcttagctgatcatggaatttcctcatgcatctgcagtcagctgattggcagggggtggaggggctggtggattcagracagcctcatcatatggttggttggcctgactgttggctgggccaatgggggtgcctgggccacatggtttctcatcctccagaaagctagcctgggcttacttacatggtggcaagacagatttccaagagaagaggaaatgcatatggcatcttgaagcctaggctcagaatgggcaattctaccacttcacttctaccgtatttgaactgccaaagcaactcatgaggccagcctagattcgaggagtaggagaatagactgtgccttttgatgggagaagatacaaagtcacactgcaaagggtgtggttacaggaagaggaatcactgtggcccacctcctttttttttaagagacaagttctcactccc

SEQ ID NO: 236051 - DNA, 404 bp, Homo sapiens
aagttcttcaggcagaaggaaaattgtgccagctagaaatgttgatctacgcaaatgtatgaagggcactggaaatagtaacttcttgggtaagtgtaaagactttaaaaattatgatttaaaaattgtttaaagaaaaaatttttctttaaataataattgacggcctaaagcaaactgattaacaattactgtgggattcgtaacatatttagaactaaatgcatgacattacagagcattgcatgtcatcacattgcattgcatcttctaaaacactgaagagaagagactacttcctaactaattctatgaggacartattattattattattattattattattattacttgttgagacagggtcttcctctgtcatccaggctggagtgcaatggtgt

SEQ ID NO: 236052 - DNA, 372 bp, Homo sapiens
agccccaggagcacccccagacagacttcccgtgcttggggctgttctaggctctccagatccactgtcttctccatcgccctgtgccccacaaggctgagctgggtggctgcctctgtgggctacctgtgcttttgcttctggttgggtatgaccaatggaagagagggaggagtgagagaggtgggcatttacccgccagctccctcctggggctgctgtagcctggctgtgtccctgccccaggtgccagctgcttgtcaggcagctctccccgctcagccctttctgcctctgggttctaaccctccccgctrgcagctccctccccttggactgccaggccttgggtggtcacagattccagctgtc

SEQ ID NO: 236053 - DNA, 528 bp, Homo sapiens
acactagtctcccaagtacctttcttatgttggcttatctatttttcttcttaccttttcaaaagctacatgtaattttctttttaatggtttttattggctttttaaaaatcacaaaagtaactgcaactaacatgggaaagtttggaaaataaagacaagatagacaaatgtaggcccaacaataaacatatttaacattttgattcatttccttctatttttcctatatatacttgcacagatgtacatgtctgtagatatgtatatttgagtcatgctatctaaccttgcattctcctgtttttaactcaacattgtataataagcattttcttatcaaaattatctgaaaatattctattgtatgcaccatggtttattcaatctctattatttgayatttaggttctttgaagtatatttttgccaatatgaataacatttttgtgtataaactttgatatgcaatgataactatttcttaggaatagatttctagaagagcactcttgggtaagaggctag

SEQ ID NO: 236054 - DNA, 516 bp, Homo sapiens
cttttcgggtctccttgactccagtcttgctcctattttaacccatttcttattgtagctagagttaagagttctagaatacaaaccgaacagggtaatgtatgcttctgtttaaaacttttaaatgccacaccattatttttaggataaattgcaaattcagtaatatgacctacaagttccatcatggtatgasctctgtttacctctccagttccatcccttaccataccatggccactcaatacattacagtatattcttaagttcatattctctcttacctttgaacctttgtacatgctgcctcgctacctgggccactccatttgaatgtcatcctttttgcctgactagtccttctcatctttcagatgtcattttagtgatcgtttcctctgggaagccttctgtgacctaccaaatgtaagtcaataccctccctatgtgctccaataacactttgtactttttttttttaattcgaaggatcaccacacaatataataatggact

SEQ ID NO: 236055 - DNA, 576 bp, Homo sapiens
tttttaaatgacacattatagattttaaattagaatctaaaaattttccccctgcgctttctacaaacactttttcaaaggttttaatgtgtcattttcttgatagtttggtgttttccctgcaagcatgtgctctttctaaaatgtgtatcatctcctgcatctattgaygagttagacctgggaaatctaacccaaggcattggacttacaggagaactgccctttgcttggcctcatttagaaggaaggacctctggggttagtcacccagatacattatacataaaagaatttgcattagaactctgacactgcttctctttgaaaaatggaaaactatgagcgaagtaatgcatcacaggtaaactttggatggtaaacattttgccctttccagatgtcatcactatcttattttctttaagtcagcagttttcaaatgttcacttcgagtatcagaaaattgggattttgatgacaaattcacaatgtgctagaggccattaacatatttatggggcacctgtggtatgcaattcttagtacagaggctatttaaagtaaatcagtaaa

SEQ ID NO: 236056 - DNA, 562 bp, Homo sapiens
acttcagcatgtatggcataaaattgcttttaaaactatctgactatactagagtagaaatatgcttctaaaggggtgaatgcatgaagccrggctgtgcaaaagggctttcccttcatatttcattatgataattatcttcataattatcgcagtaactgaacttccattgagtgcaaaatctgtctcggacattttcctctgctgcttgagtgtgtcttgtgttttctcttttttattaaaaaaatttcagaagcaataccaagtaaaattcaatgtgtgatatcataatagcaaatatgccttcccattaaagatatttcttaaagcataccattttccatttactattttctagacttggaaaatgtcatgttggcagcatcaaactcctcccccatagcatttgacttgctctatgcttaccttacccaatcctattaactcaatctcatattctaccatgtattcaccaccataattaaactgacctgctctcatctccatcatatgttttatttcctagatttttttggttatgtttgtcccgtatttggatgcc

SEQ ID NO: 236057 - DNA, 562 bp, Homo sapiens
acttcagcatgtatggcataaaattgcttttaaaactatctgactatactagagtagaaatatgcttctaaaggggtgaatgcatgaagccaggctgtgcaaaagggctttcccttcatatttcattatrataattatcttcataattatcgcagtaactgaacttccattgagtgcaaaatctgtctcggacattttcctctgctgcttgagtgtgtcttgtgttttctcttttttattaaaaaaatttcagaagcaataccaagtaaaattcaatgtgtgatatcataatagcaaatatgccttcccattaaagatatttcttaaagcataccattttccatttactattttctagacttggaaaatgtcatgttggcagcatcaaactcctcccccatagcatttgacttgctctatgcttaccttacccaatcctattaactcaatctcatattctaccatgtattcaccaccataattaaactgacctgctctcatctccatcatatgttttatttcctagatttttttggttatgtttgtcccgtatttggatgcc

SEQ ID NO: 236058 - DNA, 562 bp, Homo sapiens
acttcagcatgtatggcataaaattgcttttaaaactatctgactatactagagtagaaatatgcttctaaaggggtgaatgcatgaagccaggctgtgcaaaagggctttcccttcatatttcattatgataattatcttcataattatcrcagtaactgaacttccattgagtgcaaaatctgtctcggacattttcctctgctgcttgagtgtgtcttgtgttttctcttttttattaaaaaaatttcagaagcaataccaagtaaaattcaatgtgtgatatcataatagcaaatatgccttcccattaaagatatttcttaaagcataccattttccatttactattttctagacttggaaaatgtcatgttggcagcatcaaactcctcccccatagcatttgacttgctctatgcttaccttacccaatcctattaactcaatctcatattctaccatgtattcaccaccataattaaactgacctgctctcatctccatcatatgttttatttcctagatttttttggttatgtttgtcccgtatttggatgcc

SEQ ID NO: 236059 - DNA, 565 bp, Homo sapiens
aaactaaagagtaggtcatccttgcttttttccccccaactaataaagaaaaatcaagcaacctcctagaattagagttcagtaataggtaacaatttcagagagatctgaagatctggtagatggataatgaccagttcaggatgctgacagctcatacctgtggctgaggacggcccatgctccatgtttgtttctcagtataagagcaagtgttaagctggactttaaattctgatgactgaaaagatcaccttcctctcagggcatcttctcagccattgtaattaaccctaaaatggaccctctctactccaggacagggacaccttgcggcctcctgcctctcctgyccctcccagcccacacttagatttaggagctgcatgaaaagagctctgtcttgaaatattctcatttctgttaaggcctagtgaccttcgaagtgtgtgtaatttgttgtctcatttactgtcaagctttactcactgctttggttggatttttactaagtgaagatctttcaaaatatatgtttaggccgggtgcgatggctcatgcctat

SEQ ID NO: 236060 - DNA, 526 bp, Homo sapiens
caaaatagaacttccaaaggggagtctcaaagatctgggttccaatttttttctgcagaatatatgtcccctgggaagttgattctgtctttttagtagactctaaatctcactatgcacaattggcaaattccctacttgtcaaccttttctctgaaagctctcttgactgtaagtgtaagttactgaaactatcagcactcccaccccacccatcccttcaagcaagggtgaatccagggtttttggagtcctgaaacatacaatttggagagcacccttaatgaaaagaaaataaataaactacaaaatacctggggcaatggcagtaaaaatgagaaatgtagaaggtccacagccaccctgggaggggccrgtacaactgaggggttctgtgcacaggtcacagtgatctctgcagccttctaagtaggaggctgtttgtcctcattcatctcggtacccaacagcctgaaattggaccagagtgctggttttaagtcatttattttccttcttccttcaa

SEQ ID NO: 236061 - DNA, 481 bp, Homo sapiens
aaagttctttctgccatttaacaatacattcacaggttttgaggattggaatgtgaagtctttagaggaagggtctccaactcttgggccaaagactggtaccaggcagctagaaaccrggcagcagccaggcacagtggctcatgcctgtaatcccagcactttgggagaccaaggcaggtggatcgcttaagctcagcagtttgagatcagcttgggcaacatggccaaaccttgtctctactaaaaatacaaaaaagcacattgcatttattgtgcactttatttacagctgggtggtggcacgtccctgtggtcccagctactcaggaggctgaggtgggaggaccgcttgagcccagaggatcagaggttgcagccagccgagattgtgccactgcattccagcctgggtgacagagcaagaccctgcctccaaaaaaaaaaaagagaggaacttagccacacagtaggtggcagg

SEQ ID NO: 236062 - DNA, 486 bp, Homo sapiens
aatctcaattgcagcaactttctttggcttcccttatcagataatgttatcacctttttccatggcatgatgctttcattatgtttttaaagatgtaattattcttgtgactcattgcaagctatctcaaattctttttggaagtaggtgtggcatgaataataaactaattaacttgcaatgttgtacaagaaatgattccattttaaagccttttctgaataatgtgtcctactaggcctaaatctttgtcagagtgaggaacaaagttytcaaagtcaggcaagcaatactaactcaacacttactgaccgttttgtatgtgcttcttggtgctaggaaacagaaataaattagaatcacctgccatgtccttgcgatatatcagctcagaaaattatagggctgggggtgggagatgtcttcagcagccacattcacagtttcatttttgccttttttgaagtcctatagaagcagagaaaa

SEQ ID NO: 236063 - DNA, 455 bp, Homo sapiens
aagaattgtggaaatgtgcaggtaaatctaaacaaagaccaattgtacagtataatttttaaaggcttaatcatagagtttgaaaagaagacaatacacaaagtatgtggttttttgtttgtttgatgtttgtttttgagacagagtctctcactctattgcccaggctggagtgcagtggtgcaatcctggctcactgcaacctctgcctactgggttcaggggatcctcctgcctcagccactcaagtagctgagattacaagtgtgtgccaccacgcctggctaatttttgtatttttagtagagacagggtttcatcatgttggccaggctggtctcgaactcctgacttcaaatgatccgcccaccttggcctcccaaagtgctgggattacatgcrtgagccatcatgcccagccaaagacaatacacaaaagatgagaatgaaaaaga

SEQ ID NO: 236064 - DNA, 564 bp, Homo sapiens
gggcacagggcactagctggcgcagggaactgaacactcactggggtgcttaggtaggatgacgatcccaggaacccttttccgccccttccctaaaaatgaggggggcggcactctcgaaggagasggattagatgtgcacacaccctatgaaccgccttcgccctcaaagagaccagctccttcttgcctctgcgcctccgcccgcgctgctccgaccacctgggaggctgtgccccctcctcgtgagccagctcttctccatgctgggggacatggccccgggaaactggatcaaagcgcagactctggaacccaggcgggggttgaatctcctctccgccatttaccaactgtgactaagctctatgtgtctctgtcttctcgtctgtagagataaaaatagcatcttcctcacaggatggattggggtggggattgaaagaataactacaagatcagagtttagaaccggctggcacgtgtgtgcagtgtttcctatgaagtagagtcgctttctgatgtgctttccaagaagggttgaggccccacccactcacaaaa

SEQ ID NO: 236065 - DNA, 587 bp, Homo sapiens
tcccactgggcacagggcactagctggcgcagggaactgaacactcactggggtgcttaggtaggatgacgatcccaggaacccttttccgccccttccctaaaaatgaggggggcggcactctcgaaggagagggattagatgtgcacacaccctatgaaccgccttcgccctcaaagagaccagctccttcttgcctctgcgcctccgcccgcgctgctccgaccacctgggaggctgtgccccctcctcgtgagccagctcttctccatgctgggggacatggccccgggaaactggatcaaagcgcagactctggaacccaggcgggggttgaatctcctctccgccatttaccaactgtgactaagctctatgtgtctctgtcttctcgtctgtagagataaaaatagcatcttcctcacaggatggattggggtggggattgaaagaataactacaagatcagagtttagaaccggctggcacgtgtgtgcagtgtttcctatgaagtagagtcgctttctgatgtgctttccaagaagggttgaggccccacccrctcacaaaaagagaagaccagagaa

SEQ ID NO: 236066 - DNA, 390 bp, Homo sapiens
ggaatctcgccagaagtaaacaaacaaacaaacaaaaatggccattcgayctcacagtccagggacacattgtaagtaactaatggaaagcagtgtcccatcatttctcaagaaacgaataatttcccacaactgaaatttgtatatgccttcaatgtatttcttaaagttctgagatttttttttaatgcccagatttcttgatttgctgcactcttgaaactaaactcggcccaagtttatcattaagaaaaagttttattctgcagtaaacacaatgacagctctcccctgtgctaagcttctcacgcgcgcatcttcattgagtctcaacaaagccccgcgcagaagctactgttgttgtcttcacttcacagacaaggaagcggg

SEQ ID NO: 236067 - DNA, 568 bp, Homo sapiens
ttattcactatgacaagaatagcacaggaaagcctggcccccgtgattcaattacctccccctgtgaccctcccgcaacatgtgggaattytgggagatacaattcaagttgagatttgggagggggcagtcaaaccataccatgacctcaccagagtgagggagtaaactaagaatatgtaggctacacgaaagagaagactcacaccaggagagagaaaaaaaaaaaagaattttcaagacaatggtaaagggagttgcctagtgataatagaatgcccatcaagtagagataatgaatgaaattgtgtgattcagatgattggcatgctggggctatcatcctgattccctctgctactataaaatcattcaacctagacgaaactcctggaggatattctctaattttaacaaaaaagagttagaaaaaacatttctgttttgttttgttttttttttttaaaaaaaaaaaaaaaaggttcagaaagcccaccaaggcctggaacaggagcaaaagtaatccaaaggtgtgactactatctagccagcctagaagtaagaagaa

SEQ ID NO: 236068 - DNA, 568 bp, Homo sapiens
ttattcactatgacaagaatagcacaggaaagcctggcccccgtgattcaattacctccccctgtgaccctcccgcaacatgtgggaattctgggagatacaattcaagttgagatttgggagggggcagtcaaaccataccatgacctcaccagagtgagggagtaaactaagaatatgtaggctacacgaaagagaagactcacaccaggagagagaaaaaaaaaaaagaattttcaagacaatggtaaagggagttgcctagtgataatagaatgcccatcaagtagagataatgaatgaaattgtgtgattcagatgattggcatgctggggctatcatcctgattccctctgctactataaaatcattcaacctagacgaaactcctggaggatattctctaattttaacaaaaaagagttagaaaaaacatttctgttttgttttgttttttttttttwaaaaaaaaaaaaaaaggttcagaaagcccaccaaggcctggaacaggagcaaaagtaatccaaaggtgtgactactatctagccagcctagaagtaagaagaa

SEQ ID NO: 236069 - DNA, 497 bp, Homo sapiens
ttcttatttgtttcagaattgattctgcccagagtgtaaacaccaaacagggtaattagtaaagagttcgtggttttaatcatctttgaacttaccggttgaataaaatactctatttgattattcattgaacatccaggtgctggttttagcttcaagaagtttacaacatatttggggaaactcagaagtaaacagatgatggcacagcaagtctatagtagacgtgttcacagagaaaaaactttaaggctktctaaaggaggaagcacctgagctgaattgtgaagccgtgcaggcagaagcagtggggaggatgttcatagaaggagcagctagcacaccgaggcaggaaggagcacagcacatttaaggatcaactagcctggctggaatgtggagttgaagggaaggactggctaaccaccatgttggacaggatggaaaggtcatgcaaaagaactcatggctccttagcaaatgatctcatgcaagat

SEQ ID NO: 236070 - DNA, 636 bp, Homo sapiens
tgctgaagatttagataatttccagttgtttatgctaagaaacaatgctagaatatctttgcagatttgtttctagatttattgtatttctgaagatttgaatccaggaaatgaaatgcatgacccacatggcatgaactttctatcakttttatagagtggcaaactgccttccaaaaaggctacatcaagctatactttcgcctagagtttatagaaatatgttttcctgcatctttaccaaaaaattgagataaatgttctaattttgacagttgaatggtaaaaatctatttaaaggctttagtttgtatttctttgattactcgtgagattgagaatcttttcatttgtccatttttatcttcttttccatggattatttgtatccttcagctattttaagttatatcttgctgacttgcctttgcttgttaaatatactgtagccaggcacagtggctcatgcctgtaatgccagtactttgggaggctgagatgggagaattgcttgaggcagggagttcaaggttacagagagcatgactgtgccgctgtaccccagcctcagcaacagaatgagaacctgtctctgaataaattgtaaatgtttttctcaatcttattgttcatatt

SEQ ID NO: 236071 - DNA, 617 bp, Homo sapiens
cttcataaaacattacctggtgacagttatagtggttatctttgcctttttaccaattatagtggagatggctcccgaggatgaaactcaggtttattgtgggatttaagggagttctcttctacttttagtttacaaagaatgttttaaatgattttccccattgaagattgaatttggcccattttcatttgttaacgtagagaatttgattaatatgaattgtattgttgaaccayctttttattcatgagatgaaacctattttttcatcatgcatttttaatataccactagatttgatttattaatatttaatctgtatacttgcatttatattctcaaattgaattataatttccctttgagtgtcattcttgttctcagggatatgctagctatatagagtaaacaaaggatcctctacttttctgatattcttcaacagtttataataataattatctgctcttaaaagttttgcagaactcattcataaactgggcctattttctttgggagaaggtgttcatagttaattactttccaccatctactgtagttaatgatttaaacaaattctgtaactctaagtcatgttttaagactatcattca

SEQ ID NO: 236072 - DNA, 502 bp, Homo sapiens
gatatttatgtttatatatgtataatatttatatgtttttatatagagagtatgtgtgttaagaatccaactgaccaagaacacaaagaagcagaataacagtacagttgacccaagattcttcatgtctgacaccagacttcaaaatgctgctgtttaaatgtgccaatctscctatctcttgaattcctcagaaaatgcatgttgcattgtagttgattttgaagagagatatctgtgcaaggtgagcagccgttaaatgcagctttggaataattggccttcctctattgttcagttcacagtagctgcaatagttcatactgctaaaatagatccaattatgtagaaaaatattaaagaaacagcaagcacttcctcagctagcctaaaaagtaaggaaatattttcttttcatcatgactatacttaaagttccaataaaatacataaatccagaaataaaaatacacaaaaaaccctcacttaggatttcacataa

SEQ ID NO: 236073 - DNA, 502 bp, Homo sapiens
gatatttatgtttatatatgtataatatttatatgtttttatatagagagtatgtgtgttaagaatccaactgaccaagaacacaaagaagcagaataacagtacagttgacccaagattcttcatgtctgacaccagacttcaaaatgctgctgtttaaatgtgccaatctccctatctcttgaattcctcagaaaatgcatgttgcattgtagttgattttgaagagagatatctgtgcaaggtgagcagccrttaaatgcagctttggaataattggccttcctctattgttcagttcacagtagctgcaatagttcatactgctaaaatagatccaattatgtagaaaaatattaaagaaacagcaagcacttcctcagctagcctaaaaagtaaggaaatattttcttttcatcatgactatacttaaagttccaataaaatacataaatccagaaataaaaatacacaaaaaaccctcacttaggatttcacataa

SEQ ID NO: 236074 - DNA, 502 bp, Homo sapiens
gatatttatgtttatatatgtataatatttatatgtttttatatagagagtatgtgtgttaagaatccaactgaccaagaacacaaagaagcagaataacagtacagttgacccaagattcttcatgtctgacaccagacttcaaaatgctgctgtttaaatgtgccaatctccctatctcttgaattcctcagaaaatgcatgttgcattgtagttgattttgaagagagatatctgtgcaaggtgagcagccgttaaatgcagctttggaataattggccttcctctattgttcagttcacartagctgcaatagttcatactgctaaaatagatccaattatgtagaaaaatattaaagaaacagcaagcacttcctcagctagcctaaaaagtaaggaaatattttcttttcatcatgactatacttaaagttccaataaaatacataaatccagaaataaaaatacacaaaaaaccctcacttaggatttcacataa

SEQ ID NO: 236075 - DNA, 560 bp, Homo sapiens
gaaaactgaccagggtgccttttttggaggaggtttggctagcatgaaaggaccctggtctaattggaatagctcctaagaatgatacaacagggtgtggaaaagctgtaaggacatgaaatgctgttcatattcaaaacaaatgtaatgcaataggttgcaacataaacaagtctttcttgttcaataggtctaaaaagatcagctcacacaaactgaccttaagactgattctaggatgctgtaatgtagcattttcccattttttaaaaaaagtatatactggcctgagtgtggtggctcatgcctgtaatcccagcactttgggargctgaggtgggcagatcacgtgaggtcaggggtttgagaccagcctggccaacatggtgaaaccctatctccattaaaaataaaaataaaaatagctaggcgtggtggcgagtgcctgtaatctcagctactcaggaggccaaggcaggagaattgcttgagcccaggaggtggaggttgcagtgagccgagattgggacactgcactccagcctgggctatagagcaaa

SEQ ID NO: 236076 - DNA, 468 bp, Homo sapiens
gttttgacaatatctgtcttttaatttgtatgtttagaccattcacatgtaatgttattgatatatttggattcaartctaccattttgttagctttttcccattctatcagttcttttcttcttttttctcttttactgctttctcttaggttacttgagcattttaaaataatgttgttcttcttacctattgacttattatttatatctttaaaaagttgttttcatagctgccctagtgttgataatttgtctttaatcagagtctaccttcaaataatatcataccatttcatgtctagtgtaagtaacttacaataatacattcccaattactcccttcaatttgttgtgctacttttgtcataattttactttacatgttaagattacataacacactgctactattttcactttagattgtcagttatcctttagaaaaactaaaactaaggtaaatttt

SEQ ID NO: 236077 - DNA, 468 bp, Homo sapiens
gttttgacaatatctgtcttttaatttgtatgtttagaccattcacatgtaatgttattgatatatttggattcaagtctaccattttgttagctttttcccattctatcagttcttttcttcttttttctcttttactgctttctcttaggttacttgagcattttaaaataatgttgttcttcttacctattgacttattatttatatctttaaaaagttgttttcatagctgccctagtgttgataatttgtctttaatcagagtctaccttcaaataatatcataccatttcatgtctagtgtaagtaacttacaataatacattcccaattactcccttcaatttgttgtgctacttttgtcataattttactttacatgttaagattacataacacactgctactattttcactttagattgtcagttatyctttagaaaaactaaaactaaggtaaatttt

SEQ ID NO: 236078 - DNA, 635 bp, Homo sapiens
tcactcaactaatttcaaagatagtagattaaatatgatgctaaaaataacaataaaataataccctcaagagtttccatacmtcaagtccccaccatgtacccttacatgtacatattattattttcatgtttttaggctcaaggaggttaagtaactctcccaactttccagaggatgggttgaaggatccagataccttcattgatttctggtgcattgcattgttgcaaactttattttgtttttggaagaaagtaatccaacaatagctattaggaacaaatatgcatatacctttggccctgcaatatcccgtgggggaactgaatctacaggtagtttgatctctggatttcctgccccctggctacatataaggatgttttctccagcattatttataatggcaaaaaaaatggaaaacaacctagaagtccattaaaacaagactgaatgaataaaataaatgacagtgttactgtaaagtggtctacgacataataaatgtcaaaagcaactctaaagtaatatttattatgttatgatcccattttggcaaaaactgaatcaaactaacccaaagccttgcatgtgcatatctgtgtccaactggtgtttgggttcaggtagag

SEQ ID NO: 236079 - DNA, 635 bp, Homo sapiens
tcactcaactaatttcaaagatagtagattaaatatgatgctaaaaataacaataaaataataccctcaagagtttccatacctcaagtccccaccatgtacccttacatgtacatattattattttcatgtttttaggctcaaggaggttaagtaactctcccaactttccagaggatgggttgaargatccagataccttcattgatttctggtgcattgcattgttgcaaactttattttgtttttggaagaaagtaatccaacaatagctattaggaacaaatatgcatatacctttggccctgcaatatcccgtgggggaactgaatctacaggtagtttgatctctggatttcctgccccctggctacatataaggatgttttctccagcattatttataatggcaaaaaaaatggaaaacaacctagaagtccattaaaacaagactgaatgaataaaataaatgacagtgttactgtaaagtggtctacgacataataaatgtcaaaagcaactctaaagtaatatttattatgttatgatcccattttggcaaaaactgaatcaaactaacccaaagccttgcatgtgcatatctgtgtccaactggtgtttgggttcaggtagag

SEQ ID NO: 236080 - DNA, 635 bp, Homo sapiens
tcactcaactaatttcaaagatagtagattaaatatgatgctaaaaataacaataaaataataccctcaagagtttccatacctcaagtccccaccatgtacccttacatgtacatattattattttcatgtttttaggctcaaggaggttaagtaactctcccaactttccagaggatgggttgaaggatccagataccttcattgatttctggtgcattgcattgttgcaaactttattttgtttttggaagaaagtaatccaacaatagctattaggaacaaatatgcatatacctttggccctgcaatatcccgtgggggaactgaatctacaggtagtttgatctctggatttcctgccccctggctacatataaggatgttttctccagcattatttataatggcaaaaaaaatggaaaacaacctagaagtccattaaaacaagactgaatgaataaaataaatgacagtgttactgtaragtggtctacgacataataaatgtcaaaagcaactctaaagtaatatttattatgttatgatcccattttggcaaaaactgaatcaaactaacccaaagccttgcatgtgcatatctgtgtccaactggtgtttgggttcaggtagag

SEQ ID NO: 236081 - DNA, 600 bp, Homo sapiens
tattcaaaaactatcatttttgagagtccactactgcacatgctctagaccaggtatcattacatactaatgtatgtaaaaggtattattacatactaaggtatgtaaagcgaatgctttaatcctcaaataagatagataccatccctgttttacagacgataacactgagggtcaaagacatgaaatcttttatcccaagatcacttagcaggtggcagagctgcaattcaaacccagattccctccctcatccagactggatatctgtggttcccctgccatgctgccagtcctgagatgggtctgtccccaaggtccaggcctctttagtgatcttatgtggcctgtagatttgtcaattcctgtgtcaatatatagctttctctttatgcatagattaatgtgatctgctattgtggttaattgatatgcattggcccaggctaaaggattccccttctcccttagcttgctcaagtttaaggcagataatacaaagtcccatggctaaagcattagaggagggtgactgagcttttgaagacttgggggccaaaatagtrgtaatgggggaatccaaggagacgcagcatggag

SEQ ID NO: 236082 - DNA, 545 bp, Homo sapiens
gttttgctctccaaatgcagaactggaggcagatggcattgcaagaactttgtctaaagtacaaccagggcgaggtcsacgcatggtggacattggcacagcagagagcaaggtatgtaaggcagagaaaggcaagccaaggaaacactgattaccaccaaggcagagggctgaggttcaggtacaaattaggctgactttgagggcagcagcaagtgaggaagacacaaggccctagaacttgggagatgccttctccaggcaggaactcttgctccttaactgctagaacagaatgaaagtcattcctgacatctgttggacaccctcatatgtggtttctcctttgattctcatgaccctgtgagcaggtggtccagatatttttagctccactctaccaaagtggagctgaggtagaatgacttgcctaggatcacacaccactaagaggcaaagctggtactctgcctgagtcagggcctactttgtatacctgtccactgcagtgaaaatctttcaggaccaagtgctcagcattggtc

SEQ ID NO: 236083 - DNA, 541 bp, Homo sapiens
caaatgcagaactggaggcagatggcattgcaagaactttgtctaaagtacaaccagggcgaggtcgacgcatggtggacattggcacagcagagagcaaggtatgtaaggcagagaaaggcaagccaaggaaacactgattaccaccaaggcagagggctgaggttcaggtacaaattaggctgactttgagggcagcagcaagtgaggaagacacaaggccctagaacttgggagatgccttctccaggcaggaactcttgctccttaactgctagaacagaatgaaagtcattcctgacatctgttggacaccctcatatgtggtttctcctttgattctcatraccctgtgagcaggtggtccagatatttttagctccactctaccaaagtggagctgaggtagaatgacttgcctaggatcacacaccactaagaggcaaagctggtactctgcctgagtcagggcctactttgtatacctgtccactgcagtgaaaatctttcaggaccaagtgctcagcattggtcccccaat

SEQ ID NO: 236084 - DNA, 555 bp, Homo sapiens
caagttttgctctccaaatgcagaactggaggcagatggcattgcaagaactttgtctaaagtacaaccagggcgaggtcgacgcatggtggacattggcacagcagagagcaaggtatgtaaggcagagaaaggcaagccaaggaaacactgattaccaccaaggcagagggctgaggttcaggtacaaattaggctgactttgagggcagcagcaagtgaggaagacacaaggccctagaacttgggagatgccttctccaggcaggaactcttgctccttaactgctagaacagaatgaaagtcattcctgacatctgttggacaccctcatatgtggtttctcctttgattctcatgaccctgtgagcaggtggtccagatatttttagctccactctaccaaagtggagctgaggtagaatgacttgcctaggatcacacaccmctaagaggcaaagctggtactctgcctgagtcagggcctactttgtatacctgtccactgcagtgaaaatctttcaggaccaagtgctcagcattggtcccccaat

SEQ ID NO: 236085 - DNA, 665 bp, Homo sapiens
tgatcatggctcactgcagcttcaacctcctgggctcaagtgatccttctacctaagcctcctgaatagttgggactacaggcatatgtgccaccttccctggctaattttttatttttattttttgtagagatggaatctkcttatgttacccaggctggtctctaactcctagactaaagtgatcctcctgtcttggcctcccaaagtactgggattacagacatgtccccggccacatttatcttaattcataagctcagggggcagaaaacaagaatctatgaattcatactcctgagataaataaataaagggaggaagcatttcaatacagtagctttcaaatgatggatgaagaaagaacgatggggttgaacattggcatccactacagtaatacttgtttcaggccagattcatccatggaggctaacatcattggttgaaattgtgataagatatgagatatttacctaacttcaatgtcactctccaaaagatacttatgaatgacagaagggaaaaggtaacaccgtggaaaaacctgacagacaccacatgaaccaagatcagagctaacatccccagttaacagggacaaatcaacaccgcgtagtgtgatgctctgagaaggcataacatccctgctggtgctatggtgt

SEQ ID NO: 236086 - DNA, 578 bp, Homo sapiens
agtcctcctgcttctacaatcacaataaagcctctcttaccagcccccggccacagttcagcacagcgttggcagaatctgtagtggtagctggaactgtcaccagctccacttttaagagaggacagtgtgtcactctttcccgacactttgcctgggccagtttggttttccaggtcttaccttagaactccttttccagaaagccttctgttaccatcccaggctaagttagttctgcctctgtgcatccacaggaacccatgctgacttctctcttaggtagcctgtcccacacttagggaaattctccacttgctcatggagccttaggatggggctgtgggctacaaagggcagggcctgtctgattcatcttcctggccctaaccccaaggaaggagctttgtgtagggtgaatgcttagtccatgcttatggaatgaatggagtgtaaacattcaaataaatagttggtcaatatcatgttatttmcccccatttgttgtgtgctgatgacattttgagaaggctacttaaaaccaaatgcaaacccagatcaaatcccttccacccaaa

SEQ ID NO: 236087 - DNA, 594 bp, Homo sapiens
gcattcagttcatcaccatccgttctgtgaattgtttctgttacactcaaacttgattgcacagtaagatgctttgttgggtacctggaaatgcctgatatggggcaacatcctgaaattggttagcatgcatcttgagagataggcagctgcagggaacaatcaccattcaatccccaggctggagctgtgagctcttgaccagctaaatcaggggcatgaggctttggctccatcagattacttttctttccttcctttccttctttccttctttctttccttctttccctcttccttccttccttccttccttcctttctttctttcttgcttgcttgcttgcttgatggagtcttgctctgtcaccaggctatagtgcagtggtgcggtctcagctcactgcagcctccacctcccaggttcaagcaattctcctgcctcagcctcccgagtagctcggactgtaggtgcgcaccaccacgcccggctaacttttttgtatttttaatagagacggggtttcaccatgttggccaggatggtcttgatcttctgacctygttacccacccacctcggcctcccaaagttg

SEQ ID NO: 236088 - DNA, 559 bp, Homo sapiens
ctgggggctgctcagaccggtagtcagtggagtagttgcaacggcgctgcatggagccatctgagctctttcctagccaatgaggcaccagtttgtgaaaagagcttagagggtgcaaggatgcaggctgcactcatgcagcaggacagaacaaggcagccccatcagttccaggccccaccagcttcagccgaggcagactgtgaggcaaagcggagttatgtgattctccagcaaggaccatggcatttatggatttatattgccttgcatagttgggaagttcaaggggcagaccagacttcaggccaaccagatccagggtttaaacaatgtcaccagggctcctctttctcccttgtctctgctctgctttcctgagtgtgtcctcattctcaatgcaagcctcaggcttgtatcttcctcatggccagtcccagagaggtactgccatctttctccctcattcttattcatccctgaaaaagactgattggtagacttggawagcataccctcttcaatcatgtgctagggattgagcgcagagtactctcat

SEQ ID NO: 236089 - DNA, 474 bp, Homo sapiens
gatttgcttagctgatgcattcaggatcctgagcaggaatcctgggtaccaactagcttctgaacaggtgcatcagcctctccgacaccctagtcccagcttcatacttttcctaaacaaaatcaggcccagccacttccagccttgccctgagcaccacctgcaggtcatctttcttcacagcctccagtggctgccgctgctgtgccttttccctctgctgtcttgttggtgttactctttcctcytcctggacttggcagacaggctggtcattggagacctcaggccacctggtcattggagtttcctgtggtgggaaaggagaatgctggaggtggttattgcagtgggcatgagaaaaggagcaggaaggagtgtatgaaagccaagaaagcaaaggagatgggattggcagatttccctgaagttggttccagagtagccagaagaggaggacattttaaagaaggg

SEQ ID NO: 236090 - DNA, 508 bp, Homo sapiens
tatctagcacacaaggactattggagtgttggatataaaacagatggtggaagaagaaggatgaggcagtcaggatgctctgagggtgtgataagtctttcagcctcagtggggtaaaagctacttgtgcgccaaacctccttcatacttcctgctgtgcttactttgtttttgttgatccttccatcaccccatcactttactccttgagattccagtttccctttccactgccaccacattcattttaaatgtcaagagaagttagagaagttaggggaggtgagggcaaaggtctattccccttggacmcagaaatcagtgccagcctctgtggcagtcccaatgccaatcccgtggagcaaagcagactgcattatgcttgtcctgacattgcttttagtcatgcagatgtaggctattacagagttttaggttcataccagaatcagttagataaattaatattacatgcaaacaccatgaatttcttttgatttgcaaattt

SEQ ID NO: 236091 - DNA, 431 bp, Homo sapiens
tttattcctttttactgtacagtaatattctattgtatgaatataccatcttttattcattcatcagtttgtaagtatttgtgtttctactttctagctatcatgagtaatgctgctgtgagcattcatgtacacgtttgtgtgtgtggacataagtttttatttttcttggatatgtatctaggaatggaattgctgggtcatatggcaaccctatgttttgtgtgttgaggaattcacaaattgttttccaaagtggttgtgccgttttataatcccaccagcaatgtatgagggttcaaatttctctacattcttaccarcacttattattgtctgtcttttttgttttagcttttctgatggtggtgaagtgatatctcattgtagtttgagattgcatttccctaattactaatgatgttgagcat

SEQ ID NO: 236092 - DNA, 613 bp, Homo sapiens
gatttaatatcttagattttccaattatcagtgaggaaactttgtgcaagtaatttaatttccctgattcctggtttccttaagatgtaaaaatatcaaatgtggaatttatgtccaacgtccccctaaaagctaagtcactgtgaaaacataaataattttattttcagtttaggtaaaatatataggtcaatcttggaggaaatacccataggatttctcacattctcatgtagaagtgcccttttcctccccaaatgatctccgcttcctgcattactaacaagggtaatygttaacacacttggagtaaacggatgcatgtagttccagtatccagatgtcccttaagaatgaggtgctaactgaaatgtgaaggaattctataacagtcttaaaatcacaataaggaaaatactctttcttctgggtttggagccatatctatggatataatatttaaatagtatattgtaatttttttattctttgacatttaatgaaaaatacatttcatacatccatctgtttatttagtagatatttattgagtacctatagtggtaggttaggcacctacctagctgggaacaaaagtaacatggtgcctgcc

SEQ ID NO: 236093 - DNA, 487 bp, Homo sapiens
caggtgcagcggctaacgtctgtaatcccaacactttgggaggatagcttgagtccaggagttctagaccagcctggaaaacagagcgagaccttgtcttacaaaaagaaaatttaaaaattacctctgtgaggtaatgtgtgcctatagtctcagttacttgggaggctgaggtgagaggaccccttgagccctggtggttgaggctgcagtgagctgtgatcacaccactgcacaccagcctgggcaacagagcaaggccttgtctctaaaagaaaaaaaagtagagtgagtgcttgtatgtagtttgtttttgcctttagtcttacagactccactcaaaggcacttttctcccaatccccttcttttaggttatttaatagctcataatataattagactctctttttacaatctatatttcttcctatgatttgcaaacctcctaygtaattgctgcttcttattttttatttttttcctgg

SEQ ID NO: 236094 - DNA, 614 bp, Homo sapiens
catgtatttcagctgaatgggatcgctctttcgcatatccatgagaagcttttaaaattgtactgaggctacactctactgactaaatatatgcactttttagtcttgactttggaatattaaaacaattccacttatacgattttttattacagtggctatatctaacaaccctggaaaaagagatcagactttcagaattcaaatggctcaatttgatgaaaatctatcgtaacagtttccataagcactaatgctagcactttcaggacttgaaaaactgacaaatcaagtcaagcacagttcttttttaaagacttaattgtatttttaattgacaaataataattgtaaaattccacttctggatatatgtccaaagaaattgaaatcagtatgccaagatatatctgtactcccacattcrctgtagcattatttacaatggcaaacagttctcttatggcctgatttctttgcggttgtatagatatggacaaacattaatttagctgtagcgtaacttttaaatttaattatcctatgttcctcccataacgaggttgaaagaaaaacataaagaagtgggaatcatgaaaatgaataaacatgat

SEQ ID NO: 236095 - DNA, 474 bp, Homo sapiens
acagttaagaaaaaagtaaaacaggaaaaagatttggagcaactaatacaaagtgcctgctgacagaatagcctgcactttgatgaggtcagtgtctttgcttacggctatggtatattaattaagcaaaacagctatatactgcagagcctcaacaggatcaaaattccacatgtcctacctttagaaaaatattgccaaggactaaattccactgccctggccatgcaataagcttttgattccctatattttaatgtactcccaagtccacttcttgtccatctttcaaaagttcagcctatacattagatttctgaattcaaagtggccaatatatatcaggtgtctttcatacctgagttttgarcaaattgataaatcaaatacataaatgaataaacgggagatcaaaatatcacttttatttataaaatataggttaaaagatgcagcttataactgccggaataa

SEQ ID NO: 236096 - DNA, 457 bp, Homo sapiens
tattgctaactggtaagaggcaatgctatatgcataattttgccaatggaggaataaccagcatttcttcctttttcaacctgcttgggaccctttaatgctgaggtgtaacagttttttaaaagttcccaatacaaagaaaggataagtgtttgagttcatagatatgctaattgtctgatcttatcactatatatgtatcaaaacatcgttatgtaccccataaatgtgtacagttactatgtgtcaaatacctttttttttccraaaaaaaagaagaaaagcttctacttgttgaccagtgaaggcaaggtaaaagttaaccaacagagaggaattatgagctctattgttgggttactgagagccagatcatagatttttgattatgttcagctcatatcatggaagatggctgttgagcttacgtatatgatgtgtacatataatattcaca

SEQ ID NO: 236097 - DNA, 549 bp, Homo sapiens
tctgcatttatacacatacatttaaaataatatttatttattacacatatgtatataaatgtgcctatttttctaaaatgttgataaatgcatgctatgaaaatatttgacactattgttccaatatcgtagattgtaaactttgttaaaaaagagagaacagtgaaccaaatgttagaagactggcattctaggctcctctgcgccactcagtaattttgtaatactggacgtgtcacgcatactcactgggcctcggaagaaattggagaaaataatctcttttagatctacaattgtgtgaagcttctattaatcgagataggaaagactatgtacactgtgtagtaacaaattaaacttcaaatcttgtggcttaaaacaacaaaagtttgtcactcatgaaaagcctgattacaagtagagagatacttggtaatgactgttctccatgtgatrtctcagctgatgcaaaccagtctgcttgaatattgtgtatctaccactgtatacacgaactccaccttcaccattacagggagtccatct

SEQ ID NO: 236098 - DNA, 555 bp, Homo sapiens
taccacttatagaatcacttgtgtgatcctggataacttttttacctctcagccttagtttcctcatcattaaaatggagatagtaatggtgcctaccttgtgttattattgtgaggattaaaatagttacagaatataatgcagataatatgcatagctcagagctcagcaagtctgcaaatttataaatgctacatcccttaagtattttattgttagactcttcaaataggtggaattatataaactatgaaatcagcagtcacctcttttttccccrttgtgcatttagattataatagcaaagcaagagggctagattatttttgttttcactttgtgtgtttatccatttttgtatgcaaaacttaggagtaggcaatagtcaggccttcggaaagaacatgagttgagggccagacaaagctttagagtgtgggtctgttatttgctgtgtgatcttgggcacataacttgtctataatttagtgtgcttatctgtaaaatggcactgatatttcttccctccttgggctgttgtaaagattgacaga

SEQ ID NO: 236099 - DNA, 555 bp, Homo sapiens
taccacttatagaatcacttgtgtgatcctggataacttttttacctctcagccttagtttcctcatcattaaaatggagatagtaatggtgcctaccttgtgttattattgtgaggattaaaatagttacagaatataatgcagataatatgcatagctcagagctcagcaagtctgcaaatttataaatgctacatcccttaagtattttattgttagactcttcaaataggtggaattatataaactatgaaatcagcagtcacctcttttttccccgttgtgcatttagattataatagcaaagcaagagggctagattatttttgttttcactttgtgtgtttatccatttttgtatgcaaaacttaggagtaggcaatagtcaggccttcggaaagaacatgagttgagggccagacaaagctttagagtgtgggtctgttattygctgtgtgatcttgggcacataacttgtctataatttagtgtgcttatctgtaaaatggcactgatatttcttccctccttgggctgttgtaaagattgacaga

SEQ ID NO: 236100 - DNA, 489 bp, Homo sapiens
gtctagaaagaaatattacaaactaatttgggttaaattcccatctttcttaagcactggttgcagctgtgctccctgggaagcgaactctgagactgagattacatgcaagattgctctcagagaagagaagggaagggaagatggagaaagggaaagggagaagagggaggagaaagaagggaatgaattggatgtgagagcaaagagaggaaaaggagggaggggatgaaagggagaagtgggggaggcagcaggattgggcagcacaataggctaaatgttttgtgtacccccaaaattcatatgctgaaacctaatgctcaatgtratggtatttggagctggggccatgggaggtaattaggttaggaaagtggagccctcagaatgggattagtgcctttatcaagaggccagggcattagctagccctccttgtacaacgtgagaatacaaggagaagttggcagtatgcagtccagaaga

SEQ ID NO: 236101 - DNA, 471 bp, Homo sapiens
ctctgtgtggagctgggtacaacaagcaaaaataaataaatatagataaaacattaggagtttattgaatcaaaaatatccttttgaaaacgtcaaactgcctatttatttttactgcmaagtctaagaactcaggatttctaaaatctctgaaatttagtaaagaaaagggctctcaaggagtctgatgtgagaaatactctaaccagttctgattactctccagctcagcacagttgctgaaagtaggaaccacagccgtcctgtttgattcatcaccacaagctgcttgttactcaaaactggagacattcttgggtagcgctccaccatgggacagaaacagtgtcaagtcatgattcaaatatgtctcaaaaatattgagaatgcataaggttggttgggaggttggagttgctaccctgtgtgtgaggccttgcactttggaccccacaccaaggagcccacaga

SEQ ID NO: 236102 - DNA, 573 bp, Homo sapiens
atcacatcggggtcagggagttttgcgtggctgagaacaaagtgggtttctgaacatcaaagtgcaattcgctttacggggcaaactccgaggcccagccccgcgtgggagccgcagcggggcgggcccgctctgggctgggcgggtttctctagcgcagcgctgggggttgcgggcctctcagcagccggagcagcatcctgagctccggttgttggagcgctgggacctctggctgccgcccccgcagcagcagcaaccactactccgctgtcgrcggcgtctccttgggaagcagcagcaactggtggagctggagccgcagcagcctgagtcgccgcagcagcccctgccggagccgcagcaggaggaggaggaggcgggcgccggggtgggcgccggggcgggacacggagcggggccctgggacgaccccttggaaaagcctttggcggaaacggcgctctgttgagaggacatcgcggagctcctcacgacaaacctggaagaaaggcagcctttcaaaggcgagccggctttttctttccaccaatggaactctgtctgggcttt

SEQ ID NO: 236103 - DNA, 455 bp, Homo sapiens
gttataattgtttgggcacacgacccacctatctgaccayatggtaaggtctttagtgcaggaatccctaaggggtctaatttagtgccttgtaggcagcaggtgctcagttttcatttccttgttcagttgaatttactattcagcaagcaagatgaatgcctcaaacaaatccaaacccagattttcattaacaaattctagacatttcatgggatgatagaatagttgtggaaaggaccttggccatcattcagagccggtggttctcaaccccggtgagatctaggctttgacattctccagacgtccatcaagtggctctgctgcaccactgggattgataattgctgatttagatcatgccccttgtttgacagaaaaggaacctgagacttagagatggaaaaaggctttccctggatcacatggagagttgggagcagagatggaat

SEQ ID NO: 236104 - DNA, 598 bp, Homo sapiens
atgctgtggattttccccttacatttcacatggggaagcaacaggttattactcttaccctccactagaggaaaagtcatagaaatttcaaggggacaaattgtagaacttatcaatgcctaaaaaacagaaagacttggccagtagcggtggctcatgcttgtaatctcaacactttgggaggtgaaggtgggtggatcacttgaggtcaggagttcaagaccagccttgccaacgtggtgaaaccccatctatactaaaaatacaaaaatagctgggtgtgttggctggtgcctgtaatcccaactacccaggaggctgaggcaggagaatcgcttraaccagggagacggagtttgcagtgagctgagattgtgccactgcactccagcctgggcggcagagcaagattccatctcaaaacaaaacaaaacataacataaaacacacacacacacacacactcacacgctaaacccaggaagactaaaatttcaggtctcagtgtcatcattggacttgctgaacagttctctggctattctggagagtgaaaaataattggaaagggaaaatggaaaggagaatggggaaaaga

SEQ ID NO: 236105 - DNA, 592 bp, Homo sapiens
tatgatcattaaatgaataattttcttcttctatcactagcacactaaaatatattcaaaatatttacagggaaatacactgtgaaatagttggtttaaatattaaactaacaaatcttttaatgtacyagctttgagtgtcaaaatttacgtttattaacctgtggtgactacgaataaactgctttcaagtaaattgtttttcacagaacagaaaaataaatccttaacaatagtaatggatctttacttcctcatttataaatacctgacaggaaaaattgttgcatcactgattaattactgaattaacaaacagtcattctagaaaatttcagataaaaacaaaataaacacacaacagattaagcaaaaagataacaatatctgttcactaacattaatttcatttaaagaaaatgaaattcttcctagaagaaaatcattactcagagtctttaatcaagagacaaataattgactacttttttttttctttttgattcattaaataggaagcttcccagataggaatccatttatatattaactctttaaactcttcaacaattcataaatatttgttaatatt

SEQ ID NO: 236106 - DNA, 560 bp, Homo sapiens
acctgcatcaaaacctacatattgttgaattcaatccgkttataaaataatcctatagtattataatactatcccagtttccagaacgtgcatgtgtgtgtgtgtctgtgtgtgtgtgtgtgagagagagagagaaagagagaggctattaacaaaaatgctaacaacagctattgcttttactaaggaaggttttcaactttgttctattatctatattttctgcatataaagtataacttttataataagaggaaaaaatatatttaattctcacttattcagtccaaagggctttagaaataactgtttatacttcccaaatttgaagggaagaaaatctatgtttccaagaaatacagttttattactttaaaaaatgcttaaatctcttttatttacttaaagacacaattttttcccactgtttatttcgacatgcttccttaaaaatacgaccaatatttctaggactgaagtatgagctttgcatactcaagcatgacatctaggtatgattttaaagaaaccaattatggggaagagttttcaaattatga

SEQ ID NO: 236107 - DNA, 560 bp, Homo sapiens
acctgcatcaaaacctacatattgttgaattcaatccggttataaaataatcctatagtattataatactatcccagtttccagaacgtgcatgtgtgtgtgtgtctgtgtgtgtgtgtgtgagagagagagagaaagagagaggctattaacaaaaatgctaacaacagctattgcttttactaaggaaggttttcaactttgttctattatctatattttctgcatataaagtataacttttataataagaggaaaaartatatttaattctcacttattcagtccaaagggctttagaaataactgtttatacttcccaaatttgaagggaagaaaatctatgtttccaagaaatacagttttattactttaaaaaatgcttaaatctcttttatttacttaaagacacaattttttcccactgtttatttcgacatgcttccttaaaaatacgaccaatatttctaggactgaagtatgagctttgcatactcaagcatgacatctaggtatgattttaaagaaaccaattatggggaagagttttcaaattatga

SEQ ID NO: 236108 - DNA, 560 bp, Homo sapiens
acctgcatcaaaacctacatattgttgaattcaatccggttataaaataatcctatagtattataatactatcccagtttccagaacgtgcatgtgtgtgtgtgtctgtgtgtgtgtgtgtgagagagagagagaaagagagaggctattaacaaaaatgctaacaacagctattgcttttactaaggaaggttttcaactttgttctattatctatattttctgcatataaagtataacttttataataagaggaaaaaayatatttaattctcacttattcagtccaaagggctttagaaataactgtttatacttcccaaatttgaagggaagaaaatctatgtttccaagaaatacagttttattactttaaaaaatgcttaaatctcttttatttacttaaagacacaattttttcccactgtttatttcgacatgcttccttaaaaatacgaccaatatttctaggactgaagtatgagctttgcatactcaagcatgacatctaggtatgattttaaagaaaccaattatggggaagagttttcaaattatga

SEQ ID NO: 236109 - DNA, 618 bp, Homo sapiens
gcttatcattttcacaaaaattaaaattaatcattttagcataatcccagcactttgggaggccaaggcaggtggatcacctgaggtcaagagttcaggaccagcctggccaacatggtgaaaccccatctctactaaaagtacaaaaattagccaggcgtgacggtgagctcctgtaatcccagctactcaggagctgaggcaggagaatcacttgaactcagtaggcggaggttgcagtgagctgagatcacacctctgcactctagcctgggcgagaagagtgaaactccatctcaaaaaataaaaatggtttgagagcagattaggcatagctaaagaaaaaaaaaacaatgtgaactgtaagacaggtcaagagaaaaataattctaaacttatacacatctaaaaaaagaataaaaatatagagagcaaaaataagaatataaagactcaaaaggarcaaaattacttgcttcagtgaaaatttgtaagatatctctctcagtaattagtagaaataggaaataaaagtatcagcagaatatagaatagtttattttatgttaacagagattttttagtgtcatatatatatcacataaaattactagtgtg

SEQ ID NO: 236110 - DNA, 460 bp, Homo sapiens
atgttggccaggctgatcttggactcctgacctcaggtgatccacccaccttggcctcccaaagtgctaggattacaggtatgagccacmatgcccggccagttttcttagtattttacatgacttaccatatcactctagtttctttgaaagcttctagcatctactcatcttccctcactgacagctccttctcaaaatcctatgatggttcttcatcaccccctgacttctaatattgtgctctaggacttattccttggccctcttctctttctttggtgatctcatctagtctcatagttttaaatatgaattctttatctccagctcagacgtctcccctttaaaccacagacatgagcatgcaaaagctggtttgataagtctgcttggatgtctcacaggcattgtgacttaacgtatttcaaaaatgaacttccacggcaagtctgtctat

SEQ ID NO: 236111 - DNA, 474 bp, Homo sapiens
agttggactggatgctgctgagtttataagtggtcatgatatggtgaaataatttaacagattaattttaacattcataggaaataaggttaaaaccaacaatagtttgggattacaaagaacagtggatgaagtacatgggtagaaccatctttataaaattccagacaatattttttgtcaataagcatttatattttatctctacatcatttccttgttctcctattttcctggctgcttagattagctggctggttaactaactaataygaaattggtcagtgcatttggccagaaaactcctccatgtctctgcaataccaactccaccatagtcatccttggaaaaagatccgatggccccaggtgttcaatgtaggccccagggctcagtgatcttctgagctctgcagcttacctgtggcctgggataactggataaagggctcagactctcaggatgcagagagt

SEQ ID NO: 236112 - DNA, 304 bp, Homo sapiens
gaacaggtgtaacacattcatggtcaggcaatttgtgaaatgtggaccagtggagggaaagtacaattccgaacctgttggtcattctgggactcttctcacyatgcatttttaatggtctaggtaggtggtctgtcctttggggctttctatggaaacataattatttgatatttatttaaatttttatagcatattcattccatcatattctcttcctggaaacttttatttctttctccacagtacaaggtggcaaatctggtatttcatctctgtttactgtgggccatgacttttccaa

SEQ ID NO: 236113 - DNA, 567 bp, Homo sapiens
ctaggcctgtggactcaccagtagtcatatcctctgttcctgcatgcataaactggattggcatacttagcattggtgtaagccaaacatagggtacttgaccagtaggtaacagctgctatagtggagaaggccaaatggaatattgtatcttcctctggtcaaaatagtaaatcaaaagcaatatgtcatccttggggggatagtggagataagagccactattaaagcatgtgggggcattgtttttttatcatatccccatttaattcatcaactaggctctgcagaaactgaacagatcctgaggaatgactgtacactactgcaagcttaactatgtagcagctccaattaatcacaaccaycatgccaacagcagattattacaaactcaggtatgttgcatggggccattaacttggtgaatacatccctattctgtttagaatagaatttctgtttagagtgaaagcaatttgtattcatatggaatggataacattatacacttagagtttgttcccaagatatgttaactcccattctttctatcataattcagtc

SEQ ID NO: 236114 - DNA, 607 bp, Homo sapiens
agcctgaaatattacattctgtagtataaatcttatcatacagcactttttaaaaatggtgcacttatttcaatgaattatatacaataatactttgagacagacttttgtacacctcagtgatggaattttaattctctacaccctaaagagaacctaaatgataagcaaagcccacctacgttaaaaaacaaacttttgttagttttgataggcacatccacatgaaaataggggtactagatccaaatatcacagagaagatgattcaattacaatgaaaggttcatgataaaaatttccatttgaaatatgtgaagaaaatccatccagtactagttacacaatcacctccacatacaaagccagccccaacaaggctttcttaaccgtactttaagatcttaaaccatataaacacttagtagacacacaaaatattcaattaaaaattggattaaaatcccaaaatactcttaggcctggaaaatacctttaaagaatagactaattttttatgactttggagaaaacaggaatatcgatttatcagtgccaagaggagycagctccaatgcagaaatggcttggcaaattaaaggcaaga

SEQ ID NO: 236115 - DNA, 596 bp, Homo sapiens
aacacttagtagacacacaaaatattcaattaaaaattggattaaaatcccaaaatactcttaggcctggaaaatacctttaaagaatagactaattttttatgactttggagaaaacaggaatatcgatttatcagtgccaagaggagtcagctccaatgcagaaatggcttggcaaattaaaggcaagaacagagggccaagacctttggtccaagacatggggaaggtgtttcctaggaaggtgtttcctaggtcttatattaatgttatccactgcaacacactactacaacacacccacgcccacccacactgccacaccccccaaaaccattgcctcaagtatccttccagactcttcttccagaatacatatgattactttgtgtgctttctttggcttccccattttgaggcaatttattaaagataaagacagatcccatacatgatgtttyggcttgtctctggcttcctagactgtccctgccctggtgaagtgaacaccactttctctttgaagcctatcccagaactatgaatctgccctaacctcgctcaggatttggactttagctttgggaagcagatct

SEQ ID NO: 236116 - DNA, 562 bp, Homo sapiens
aacaaaaaatcaaaattatcttctgtagatgctgaaaaagccttagaataattcaatatatttattataaaaacactgtgaacatagaaatggatagataccttttaaatcccaaagccaacattgtacatatgggaaaaattagaagcattcccacttaggccaggaaaaaggcaaggatgtccactaaccttattattatttaagagtatattgaggggattagccaatgcaagtggaaaagagagaacactagaggcataagaactgcaaaagaaagagggctgcctctatttgcagatgacttgacattactggggagtgggggtagaggaaacacaaaactagaccttgagaatcagtggcaaagctaatccaaacaaatarcaaaaaaaaagaactgagcaaaatataaagatataaatttacatgtaaaatcaatagctaataagaaaatatattggaaggaaaaaaacctcatttatagtagcatcaacaagaaaagttgaaatgcttaaatatgcacttaacaaaaaatgttcaaaacctttattaagaaaat

SEQ ID NO: 236117 - DNA, 392 bp, Homo sapiens
ggtaaatctaagagttactggctttaragaggaggtagaaaaagagatgggggtagaaagtttattcaaaggaataataacagagaacattccaaacctagagaaagatatcgatatccaagtacaagaaggttatagaacaccaagcagactgaacccaaggaagactacctcaaggcatttaataatcaaactcccaaaggtcaaggataaagaaaggattctaaaagcaataagagaaaagaaacaaatagcatacagtggatctctaataagtctggcagaagacttttcagtggaaactccataggccaggagagtggcatgaaaaatttgaagtgttgaaggaaaaaaaccttttaccccagaatactatatctagtgaaaatatc

SEQ ID NO: 236118 - DNA, 573 bp, Homo sapiens
acaatttctgctttggaattttcttttcaataacaagtaattataagcaacacttatgttaatatggctaaaaataataagttacttaagttaaaaatatagttagtaaacatgaaaggataaatatatgaagctatgtacagaggaaataggacttttaaactcaagattctttggcacaaccactttaagagtatatatcatgtgatggagatgttttaaaaaataaggctgttttgaagtcttgattttaaagtgctcctatcaaatgggtcaagtctacttctccattcattgaaattatctagtaacgtaaataaaagaatgtcaagtgcttctcctaaatcactatcaaagctaagtcaccttcttatattsggagagaaagtaagtagttttgactttattctaatggcatacctttggaggactttaacatcttctgatcatctctttctgttttaatgaaattaccttgctgctattacaaacaaacaaaggatagcatgcatgaccaagttaagagtccatttcagttcagttaagaaataatggtaaaaatggacttctatc

SEQ ID NO: 236119 - DNA, 573 bp, Homo sapiens
acaatttctgctttggaattttcttttcaataacaagtaattataagcaacacttatgttaatatggctaaaaataataagttacttaagttaaaaatatagttagtaaacatgaaaggataaatatatgaagctatgtacagaggaaataggacttttaaactcaagattctttggcacaaccactttaagagtatatatcatgtgatggagatgttttaaaaaataaggctgttttgaagtcttgattttaaagtgctcctatcaaatgggtcaagtctacttctccattcattgaaattatctagtaacgtaaataaaagaatgtcaagtgcttctcctaaatcactatcaaagctaagtcaccttcttatattgggagagaaagtaagtagttttgactttattctaatggcatacctttggaggactttaacatcttctgatcatctctttctgttttaatgaaattaccttgctgctattacaaacaaacaaaggatarcatgcatgaccaagttaagagtccatttcagttcagttaagaaataatggtaaaaatggacttctatc

SEQ ID NO: 236120 - DNA, 579 bp, Homo sapiens
ctaatcagctgaccttaaaataagatgatcctggattagccaagtgaacccaatgcaatcacaagggtcctaaaagtagagaaagaaggtagaaaagttagagtcagagaagcagatgtaacaaagggagcaagactagagtgatacaatgggaggactaaatacacccttgctggctttgaaaatgaaagggggccgtgagcctgggaatgcaggcagccttgaggatctggaagagggaaggacatgaattctaccttgcactttccagaagagatacaacccagccaacaccttgattttaacctggtgagaccccgttcagacatctgatctccagaactctaagataataaatttgtgttactttgtgttygtgatgatttgttagagcagcaatagaaaactaatataagcagcccagtgcaagctccttaaaggtagctcttttgtgtctagtgtatggtacacaattaatatttaatattttagtgttgaacaactaagcttaaatcatggttactgggggaattcaaggagcttgcctaccatctgtgcatgtgcaaagctttgaagcat

SEQ ID NO: 236121 - DNA, 361 bp, Homo sapiens
gggggcagtttcccccatactgttcttatggtagcaaataagtcttatgagattcgatgkttttatatatgggagctcccctatacaagctctcttgcctgctgccatgcaagacatccctttactctctctctgtcttctgccataatcgtgaggcctcactagccatgtggaactgtgagtccattaaacttctttcctttgtaaattacccagtcttggttatggtttgattagcagcatgaaaacagactaataaacatgataagcaacatcatcaccaaatctcatttggtgatgatgtattatcttcatattgttggggttgatttgctaaaattgtatttaaaatgcttgcatc

SEQ ID NO: 236122 - DNA, 532 bp, Homo sapiens
ttattttttacctctagtaatttttttttttttaacttcattattaattcagtgatgcatttaaaaaaattatattgagttagaaagtgatgcattttttaaaaagacataatttgcatattactaagcattttaattgtttctagggatgctttattcagggtatcaagtttacttcaaaacagataagatgrgagaagaaatatgtgataaataagaaataaagtaaaataattgaataaggacaaaatattttcataatcatgttatgtacaaataatcaaaattgcatttaagacagagcatttcaaaactgatttaagagaaagtctagatatagtcttctttctagatatacatttaaaacataagaaacaataaataaaataaataatagaaaaatatatgccaattaaatacaaaccaaaaataatttggagggtgtattaacaatatacaagatgaatagagttattaaaaataaagacagttgctacattacattaaataaaagattcagctcacctgaaaa

SEQ ID NO: 236123 - DNA, 394 bp, Homo sapiens
tagtacaaatcatttaacatatatcaggaaactatttgtattatctttaaaatttattttaaaataataattgaacctctatcttatattaggtactattctagttacttgtgaatataaattaaaaaaataggaaaaaaaatatgccttcatgtaggttccattctaatgaacatcctcatagtctatgtcttggaaatttcattctgcaacaatgttttaacatgaagattctcctaagaattaagccyacattccttaaggcaccagcaaacataaccaattaatttttctatgcatttagaatgatactagttatgtaccatcattggggaaattggaaaaataacaatttccatcattttctgtgttctgtggtgcatatgaggaattc

SEQ ID NO: 236124 - DNA, 612 bp, Homo sapiens
ggtctgctttgtttctgatgtttttctacctcaaaggattatcttaataccacaccacctgcctatgtcagaaacctcagcttataccttagcttctctcactcactgcccatacccaaaagctaattgtgttaaattttctttcaaattcgatctcaaatttgtttacttctctgcatctccattgctgctactgtagcttaagccaccagcatctcaccactggatttcagtaacagctcctcgtaagtctctacttccagctatcccacttctaatccaggttccataaaaaatatgaattmtttgtcaaatgaaccaaattctttctactgtaaaatacttatataattctctgttagcctcttgatgaagaaaatacctttaacatgccctgcaagatcctgcatcatttgctctttcctcttcttactagcattgtctccactactttctctgtgtcactcacacctgacacttcatgtcacatacctggcattcagtcaatgtgtgtttaatgactaaattaagctatgcattcacaaatggcacaaataacagttaataatgttaagatagttgataataaatgatatacttttttgatattat

SEQ ID NO: 236125 - DNA, 556 bp, Homo sapiens
ttgtccttcggtatagcctagacaggggctaggattgtctactttcagctaagtgcttgcatatcatacagaactaccagtaaaccaggcctaagttattttcctccttagtaagcttgttatacaggaytgcccattacagcacaggtgcaggctgacagagagaaagtcttgtgtagtgggattcgggcattgacatttgggccatttcctcatgaaatttacttgtgcatttagggtctgctccagttctctgtcatctataccagtttcatttgacaatggaatttggatgtgcacacccagtcatatgatttggtgggtcagccaatacccagttcatgatgggaagccaaagttgcatgataacttagtggtccatggttaactgttcagtttccactaagggccagtaacaggccaaaagctatttcttgaaaagaagagtagctattcacacatgacatggctttgctccaaaatcctaaaggtcagtgtcataattcacttatataggggtgccaaccgtccaaacagcattgctatttgccagtga

SEQ ID NO: 236126 - DNA, 629 bp, Homo sapiens
ctaatttgaagtattatgaataatgctgccatgagcatttatatatagaagtcttcatgcatatgtgcatggatttctgctggatataaaccttggaacggaatttctgagtcatggggtatgggaatgttaaattttagttgataattccaaaatgtttttaaagcggctgtgccagtttaccctctcaccagcagggcaygagagtgctaattatttcacatccctgacaataatcaatattgttttatttatttatttatttttagagatggggttcttgccatgttgaccaggctggtctcttactcctggcctcaagcaatccttccatctcagtctcccaaagtgcgggattacaggcatgagccactgtgcccggcctatttatttatttttaaattaactgaccttgtaagtgtgtagtagcattgcattgtgattttaattttaatttcctgtattggtaattacattgagcaccatttaaaaatatttattatctatttgaatatttatttttttaaaatacctcctcaaatgttgctcacatttgtatttgtttcttagttgttggtgtattctaattaatttataggggctcattacatagtctgtattattccttt

SEQ ID NO: 236127 - DNA, 614 bp, Homo sapiens
gtcttctgtattccagacatactcttcttacttgcactgtggagtacctgtccaatttccccttggtagttaggatagttaggatgaatgaccccagccagcatagtaactcttttttatgcctgttgattcagaagcatgagaagtccagtgtccaagcattagtcttaacttttagttcaatgaattattgttgtttttcctggtggaagttttcttgctgttggcactaagatttttaggccaataaagcatgaggacacggaaacatgaggcaaaaatattgctactgggttactaggggaaatagtgatgtcactctcattttcaccccttgatttttggacccatgaatcctagcaatgggaaaaacagcaccatattttgaacactgatttggagcacayagaggcttctgaagaacccttccccagtcctacgaagtattgttgccacctagctggtgctgtaattgagacttcaaaaggccattccatgattttgtcaaaccagctacttcaggatgctagggaacatggtgggagtgtgaatttcatgagcataggcccattgctatacttcttttgctgtgaagtgagtttcttgattagaag

SEQ ID NO: 236128 - DNA, 522 bp, Homo sapiens
ctagaaatagggagttaaaacataaaagactattgagtataaatcaactatgtatttaaatttcaaattttccctaaaaaaaccacatcattggcccagtagatttacagcagaggacactgtgaccatcagagctgccttatgatgtgctggaaggatggcctcacaaagtggtgagaactccagcattgaacatgtttagttaaaaccagatgataatgtgccagggacactgaagagaagattcctcrggtgaaaaatttctggaaggtatccttcctctctttccctcacatcacttccgactctgcttatacaaatcctatttgtctacaaccaaaatatttcagtccactttattttcactgctccaccctaggcaaagtcatgattatctcatgcctaaacactatgattggcacctctccagtctcctcttcttaaccagactccattttcacccagaaaattgtaagacaaattatgtcactcttctgcttaaaatacctagcacttagaatg

SEQ ID NO: 236129 - DNA, 577 bp, Homo sapiens
gattgtaccattttggatttcaaccagcagtgcatgagaattccagttgctctacagccttgccaacatgtgatatggtcattctttttaattatagccattctattagggaagtagtagtaattcagggtggttacttttgaattgactgtttttagtttattttgtctcttttgttggatttttagttataaatttctaccatgttattttaaaaggtgctttagagtttgtaaggtacatcttatttttatttttatwtttatttatttatttatttatttatttatttatttatttatttgtgacagagtttcactcttgttgcccaggctggagggaaatgttgggatatcagctcaccgcaacctccgcctcccaggttcaagcgattatcctgcctcagcctcctgagtagctgggattacagggatgcgccaccgctcccagctaattttttttatttttagtagagacgggcttcctccatgttggtcaggctgatctcaaactcccgaccttgggtgatccacccacctcagcctcccaaagtgctgggattacaggcatgagccac

SEQ ID NO: 236130 - DNA, 577 bp, Homo sapiens
gattgtaccattttggatttcaaccagcagtgcatgagaattccagttgctctacagccttgccaacatgtgatatggtcattctttttaattatagccattctattagggaagtagtagtaattcagggtggttacttttgaattgactgtttttagtttattttgtctcttttgttggatttttagttataaatttctaccatgttattttaaaaggtgctttagagtttgtaaggtacatcttatttttatttttatatwtatttatttatttatttatttatttatttatttatttatttgtgacagagtttcactcttgttgcccaggctggagggaaatgttgggatatcagctcaccgcaacctccgcctcccaggttcaagcgattatcctgcctcagcctcctgagtagctgggattacagggatgcgccaccgctcccagctaattttttttatttttagtagagacgggcttcctccatgttggtcaggctgatctcaaactcccgaccttgggtgatccacccacctcagcctcccaaagtgctgggattacaggcatgagccac

SEQ ID NO: 236131 - DNA, 577 bp, Homo sapiens
gattgtaccattttggatttcaaccagcagtgcatgagaattccagttgctctacagccttgccaacatgtgatatggtcattctttttaattatagccattctattagggaagtagtagtaattcagggtggttacttttgaattgactgtttttagtttattttgtctcttttgttggatttttagttataaatttctaccatgttattttaaaaggtgctttagagtttgtaaggtacatcttatttttatttttatatttatttatttatttatttatttatttatttatttatttatttrtgacagagtttcactcttgttgcccaggctggagggaaatgttgggatatcagctcaccgcaacctccgcctcccaggttcaagcgattatcctgcctcagcctcctgagtagctgggattacagggatgcgccaccgctcccagctaattttttttatttttagtagagacgggcttcctccatgttggtcaggctgatctcaaactcccgaccttgggtgatccacccacctcagcctcccaaagtgctgggattacaggcatgagccac

SEQ ID NO: 236132 - DNA, 577 bp, Homo sapiens
gattgtaccattttggatttcaaccagcagtgcatgagaattccagttgctctacagccttgccaacatgtgatatggtcattctttttaattatagccattctattagggaagtagtagtaattcagggtggttacttttgaattgactgtttttagtttattttgtctcttttgttggatttttagttataaatttctaccatgttattttaaaaggtgctttagagtttgtaaggtacatcttatttttatttttatatttatttatttatttatttatttatttatttatttatttatttgtgacagagtttcactcttgttgcccaggctggagggaaatgttgggatatcagctcacygcaacctccgcctcccaggttcaagcgattatcctgcctcagcctcctgagtagctgggattacagggatgcgccaccgctcccagctaattttttttatttttagtagagacgggcttcctccatgttggtcaggctgatctcaaactcccgaccttgggtgatccacccacctcagcctcccaaagtgctgggattacaggcatgagccac

SEQ ID NO: 236133 - DNA, 198 bp, Homo sapiens
taaaaacttcctttaatatctcttgtacagtgaatgtgctgacgataaatactttcaactactgtgtgtatgaaaaaagtattttgccttcaaatgtgaaatacattttcaytgaatataggattctggagtgacatctttttttttctttcagtattttaaagacatttgtctactgtgttctggcttccattgttt

SEQ ID NO: 236134 - DNA, 599 bp, Homo sapiens
ctcattgtcttatgctgaataagaattagatgaatagttcgccaaaggccactgtgtgctgtttctgacaaatatatgtgctagatgcaccaccccatcatttgggatttctggcagaaccacatgacttccaatggtcatgttgcctgagtgttacctagtggactctgagatgatgatcttcctgttttatacctatgaagtatagaaaaaaggcaatagaaatcaaggaaaaaaagaagggggggagtggaggagactaagaagaataaaaawaaggaaaagaaagagaaaaaaataagagaaggggtaattgaaggaataagagaagctgtaaagtataaaagggaaaaaataattgtagatagaatgtcggtatatttttagaagaatattcataacaatatatattaaaagcagcaagattttctcactcttttccttttctcacctcccattagcaatgactgaagttgtgaattatgaacaagtgtcagagattgcaaatttaacagcaaatagtgggggatgaagaaaagaagatgaggaaattattttacaagatgaatacaaaggccttgtgataaatgaattagaat

SEQ ID NO: 236135 - DNA, 544 bp, Homo sapiens
tattgagtcttatctcagaggactgtttgatttttttttttttttgagaaataattttactagactgcttaaattctatggtgaactgatggctgattttatacaaaggaaatgttgtggatctaatctcttacatcatagttaggcttttgattctgttttgaatgatatatatgtattcattacctgagtaggcataatagaccatatatacatattaaggtgggtagctatcactagtgaatatgcaaataattgatatcaatgggttatgttaacctagaatgacatatcaattgattttttatcacaattattcctgcatttaatgggatttaatagttcaatcaataacctgaatgaccatcttcattaggtgtgcaaatgatactagttagtggaatsagtattaaaattcagtacaactagagcatgcttcaaagatgtaagaaatacagaatatttaataagagaaaatacacttatggaaagataagatatataacaaaatatagagaattacatatatttctcagattagacg

SEQ ID NO: 236136 - DNA, 595 bp, Homo sapiens
atttatgtaacaatctatgtatgtgtgcatatatattatatggacattgtttctctgccttttgggtaagaccaactgtagtatagtatatggacatatatcaaattgtgaacatagacatacctcaatttttagattaaaaatacattctkccttctgtataggtcttaacggttttcaacgttttgcttttgaaattgcataaagtatgtattgctttttgggattaggaaaaatattaaattggaacccaaaaagtgtaatatacagtaaatacagcttcacttgtcatttatttctctgtcacctatttattacacacctattaagtgagaggtattgtgctagaatctgacttgattagctaattgtgttgttttgttgttgttatttatgtaaaaccctgaattaaaagatatctacaatttttatcttgatatggaagcatgaacaaatgatcaacttattaatagtttctattctattttgttctaagtaaaactaagtcggcttagatcaatttcaatgtttattagcaggggcaattagacaattgattgcccttggatgattgaagttgtcttagctggagacg

SEQ ID NO: 236137 - DNA, 595 bp, Homo sapiens
atttatgtaacaatctatgtatgtgtgcatatatattatatggacattgtttctctgccttttgggtaagaccaactgtagtatagtatatggacatatatcaaattgtgaacatagacatacctcaatttttagattaaaaatacattctgccttctgtataggtcttaacggttttcaacgttttgcttttgaaattgcataaagtatgtattgctttttgggattaggaaaaatattaaattggaacycaaaaagtgtaatatacagtaaatacagcttcacttgtcatttatttctctgtcacctatttattacacacctattaagtgagaggtattgtgctagaatctgacttgattagctaattgtgttgttttgttgttgttatttatgtaaaaccctgaattaaaagatatctacaatttttatcttgatatggaagcatgaacaaatgatcaacttattaatagtttctattctattttgttctaagtaaaactaagtcggcttagatcaatttcaatgtttattagcaggggcaattagacaattgattgcccttggatgattgaagttgtcttagctggagacg

SEQ ID NO: 236138 - DNA, 595 bp, Homo sapiens
atttatgtaacaatctatgtatgtgtgcatatatattatatggacattgtttctctgccttttgggtaagaccaactgtagtatagtatatggacatatatcaaattgtgaacatagacatacctcaatttttagattaaaaatacattctgccttctgtataggtcttaacggttttcaacgttttgcttttgaaattgcataaagtatgtattgctttttgggattaggaaaaatattaaattggaacccaaaaagtgtaatatacagtaaatacagcttcacttgtcatttatttctctgtcacctatttattacacacctattaagtgagaggtattgtgctagaatctgacttgattagctaattgtgttgttttgttgttgttatttatgtaaaaccctgaattaaaagatatctacaatttttatcttgatatggaagcatgaacaaatratcaacttattaatagtttctattctattttgttctaagtaaaactaagtcggcttagatcaatttcaatgtttattagcaggggcaattagacaattgattgcccttggatgattgaagttgtcttagctggagacg

SEQ ID NO: 236139 - DNA, 632 bp, Homo sapiens
gcacgtactatatttcattttctatatcataaccccataattcacttaaccattccctttatgttgtttcttttcttcctttataaatagtgtaatatctttgtgtataaaactttgtctgtatttatttcattttattttcctggaaatagaatgactgcatgaaatgggatgagcatttttttaggctatcaatacactttgccaaattgataaattaattttctgaaatttgtacaaatgtatattctcagaagtactgtacatgcctttgtccatcagtgctgtgtattatcatttaaagattattttcaaatttgataaaaatatatattcattctaaagttgtgcgatttttaaaaataatttattagccatttgtttcttcgtagtaaattgtccatttttgkattgaaatattgtgatcttgtactgattcaaaatagcatttcatatactaagaatattaactccttttcacttttattagaagtatagcttcatgttttagagcactatctttggaatcattcaaccttgacttcctagcttagttctgcaatttataaactgtgagatcatggataagttactgtacttttcaagcttctatttcctaaattacaaagtgg

SEQ ID NO: 236140 - DNA, 474 bp, Homo sapiens
tgctgtggctcatgcatgtaactccaacagtttaggacactgaggcaggaatatcacttgaagccaggaacttgagcctgggcaacaccatgagacctcatctctacaaaaaaaaawtttttttaattagccatgcatggtggtgcatgcctgtagtcccagctactcaggaggctgaggcaagaggatctcttgagcccagaaatttgaggctgtagtgagccatgattgtaccactgcattccagcctgggcaacaaagtgagactttccccaaataaaaattttaaaattaggtaatttttactaatggtgccccttccatttccctgctcccaagtagtgagcctggccctagttcttctctctgcatagcatattttttaatactttgcctcacagatatcaaatttctgactacaatacttgcttccagacccacagcctagcagtcatgtggcttcagactcatttt

SEQ ID NO: 236141 - DNA, 592 bp, Homo sapiens
cctggaggaattgggacaggagactaatcaggaatttatacccactattatgccaaaactattactcttaatattgaaaaaatctttttcattgagctattgtgcctaccacaatatctatgctaggctatttggaggaacccagaagccagyatttgcctttctctccatattgcccttaatttgagaaagataatagaacagcaccactgcctaaattgtggggagaggagatgttatggaagagccttgagttaaaatctcagaattttgtctgaggtcataggagcatatagcatcccccactttgatggcgtggcaacagaaattatggcaaatctggctcagacttcaatcttgcacttgaaggtttctcataaaaagatcacattttcaaatttcctcactcctgggcagttaagtgagaatccactgccttaggagagattttagaatgtcagtaattgagtaaccagggaccacagtgcccctgggctggaactgaatatgaaatcgcccaaggtcattcattgggttttagggatactgggtggacatcattccctattacttccttccctgccgtcctata

SEQ ID NO: 236142 - DNA, 399 bp, Homo sapiens
ttgttatgtcagcttctttttccatgattttttaatacttggtctcaagcctatcttttgtatatgctctaactcaaagtgttgtcttgactttttctctgagaaactttctccaatacaatcttcaaaatactacttataattacatgatgatataatctcatacctctcaaagcctggtgttctgtctgtttccattttgatcatgattttatattacttctataattaacagtatattccatggcaaaaatgggattaaaatctcattgcagaaaaaaatgccatttggaactgggaataactgcctacataaaagtgatctgaaaatattcatagcattgggtacataaataaatgccatkatattgtttatattacatccctaaatatttatca

SEQ ID NO: 236143 - DNA, 450 bp, Homo sapiens
gattattttattatttactaagctgcttctttgcaatcccaaaccttgtgtctacattgccctctctaaagtacttttacwtcatgcagttgaatttatcactatgctgatataaggcctgtgaatccaatgcatgattcagggatatgcttccctagttgagatagtatctgaactatactttattattaccttcaatatcttttttgagagaaaaaaatattacacactttggaaacttataagtgtgttggataaaaaatgggtttgtgtgtctttggcatagtttagtgggaagaaagagtatttaatctatgctttactctgagaagacaatactttctaattctggaatttacataattttaaagaatggtcttatcctttttatgaatcttgcgttgaaagtgtgacattgacaatgtttgactgagttttacttgtttccta

SEQ ID NO: 236144 - DNA, 631 bp, Homo sapiens
tatacgtgttactgtgaattgaagagcttgatacatattcattaagaagaacatgtaagggagaacccagaatcatttagaaagaatartgatgcttttttctgttgcccaggctgcagagcagtggggccatatctcagctcactgcaacctccaccttcccggttcaagcaattctccttccccagcctcctgactagctgggatttaaaaaaaaaaaaaggaaaataaaagaaagaaagaataatgatgcttttcaaaatggttaaatctttcattatcaacaggtatagaagtgtgacataaagaaatgtattggtggcatatcaaatttctatgtactaagtataatgcagtaaattccccacgtcccttggctctacacacatggtgctccatgttactggaaaatatatttccctgtgtgcacgcatacacacatgtgcacaaacataaatgtgtacagcatatcgctgcattgctcagttgttgaattatagataaaaaagatattctaaaaatttatttatcttaaaagactttaggagtataattagtacagtgtagttcctgcagatttagaatacaatagcagcttgcatgattttcagaaatataaatctgtgtaaaa

SEQ ID NO: 236145 - DNA, 631 bp, Homo sapiens
tatacgtgttactgtgaattgaagagcttgatacatattcattaagaagaacatgtaagggagaacccagaatcatttagaaagaatagtgatgcttttttctgttgcccaggctgcagagcagtggggccatatctcagctcactgcaacctccaccttccyggttcaagcaattctccttccccagcctcctgactagctgggatttaaaaaaaaaaaaaggaaaataaaagaaagaaagaataatgatgcttttcaaaatggttaaatctttcattatcaacaggtatagaagtgtgacataaagaaatgtattggtggcatatcaaatttctatgtactaagtataatgcagtaaattccccacgtcccttggctctacacacatggtgctccatgttactggaaaatatatttccctgtgtgcacgcatacacacatgtgcacaaacataaatgtgtacagcatatcgctgcattgctcagttgttgaattatagataaaaaagatattctaaaaatttatttatcttaaaagactttaggagtataattagtacagtgtagttcctgcagatttagaatacaatagcagcttgcatgattttcagaaatataaatctgtgtaaaa

SEQ ID NO: 236146 - DNA, 628 bp, Homo sapiens
cttgacatataaatccactagtcaaaacattttgagactttcaattgcttacaaaataaaatccagatttcttagtctggcccttgctaagctgctcaaaaytactttttatcttccgtccactctcacatacaacctttgcattcccaaaatcttagtggctttttatcttgatgaaccatatgcatttgatgtattttacctgtttttgacatttaaaaatggcaatttcatatggctcaactaataatggctatctgccttgaaagctctctcacccttaaaacttgttaaaacatcatcaacacccagcttaaatgttaccacctctgtgaagccagcttaaatgttaccacctctgtgaatcaatcatttgccacactaggttaaagagcagttccctctttgatgctcccttacctctggcataacactgtgttctaattatttgtacctacttgtctctatcatttgaatacgggaaacttcagggtagaacttggaacttaattaactctatatctttacttctataatcagtagttaataaatatttgttagataaatgaatggacttctttcgaatttgttatacaaaggagctggtaaaatttttggttaaaagtag

SEQ ID NO: 236147 - DNA, 628 bp, Homo sapiens
cttgacatataaatccactagtcaaaacattttgagactttcaattgcttacaaaataaaatccagatttcttagtctggcccttgctaagctgctcaaaactactttttatcttccgtccactctcacatacaacctttgcattcccaaaatcttagtggctttttatcttgatgaaccatatgcatttgatgtattttacctgtttttgacatttaaaaatggcaatttcatatggctcaactaataatggctatctgccttgaaagctctctcacccttaaaacttgttaaaacatcatcaacacccagcttaaatgttaccacctctgtgaagccagcttaaatgttaccacctctgtgaakcaatcatttgccacactaggttaaagagcagttccctctttgatgctcccttacctctggcataacactgtgttctaattatttgtacctacttgtctctatcatttgaatacgggaaacttcagggtagaacttggaacttaattaactctatatctttacttctataatcagtagttaataaatatttgttagataaatgaatggacttctttcgaatttgttatacaaaggagctggtaaaatttttggttaaaagtag

SEQ ID NO: 236148 - DNA, 564 bp, Homo sapiens
ggatgtcatcaggttttttcatggcccagtaataagtagcgaatgcaccagcaagggcgcactgacctaatgcaatgacgaagtttataagccagagaaagacaaataagttgtatacatggaaggtagggatgtactgatggtacaagctctttccaccatagaaagcaaagttacacagagccccagggcaagctttggcaatttcagttgtattaaaaatctgcattgagaaaaaggaacacaaggacataatattaaatatcactccaagataacaactccctgtgttttcctyttccccttaattgcatgtcctgttgtttctctgttagctcctgctcttactcctctattttctgttatatcactttatataattatctaatgagtgctggaaagtatcccatttttcatcaaatgctcataatctgcacccactataatttcacatttatcagtgttgttgttgaccatacttattttctatggtcttgggtatatggtagggcaagcaagctcaggaaatacagtgctttctctccattccacccactgttttcc

SEQ ID NO: 236149 - DNA, 612 bp, Homo sapiens
ggtggatcagtctggtccaggaacacaagaactttcatgccctaatcagaaactgcaaaaaaaaaagttgtttaaacatcttgtttttgtgttcctgcttggagcttaaaataaactctgccctttgccactggagagtctgggcttgtgattcaatcactcttgcattgtcatcaggaaggaaagggcagtaaagtctgctattgacttaactgatgtcttaagtagcaagaaaaatctgagattggctgtagtgcagttttgacaatggcaaaaaggagaaasatggtcaacatataaaaagtgcaggtaaaacaacttaattttcgctccctattgactccctagatagtattaacccaaaaattaatggtgtaggaagtaagcttgacagtaatttactgagggaggaaaggtccagttaggttgaggagtgtcagaaaataagactacatgtaactgacctctgctactatcctggacaattgactttctacatatcatgagaaaccaattttttctactgaaatttcctactgacagcagcccatttactagagcaaataacaatgtggatgtgtcatactgagcagagaaaaagccagactgttt

SEQ ID NO: 236150 - DNA, 612 bp, Homo sapiens
ggtggatcagtctggtccaggaacacaagaactttcatgccctaatcagaaactgcaaaaaaaaaagttgtttaaacatcttgtttttgtgttcctgcttggagcttaaaataaactctgccctttgccactggagagtctgggcttgtgattcaatcactcttgcattgtcatcaggaaggaaagggcagtaaagtctgctattgacttaactgatgtcttaagtagcaagaaaaatctgagattggctgtagtgcagttttgacaatggcaaaaaggagaaacatggtcaacatataaaaagtgcaggtaaaacaacttaattttcgctccctattgactccctagatagtattaacccaaaaattaatggtgtrggaagtaagcttgacagtaatttactgagggaggaaaggtccagttaggttgaggagtgtcagaaaataagactacatgtaactgacctctgctactatcctggacaattgactttctacatatcatgagaaaccaattttttctactgaaatttcctactgacagcagcccatttactagagcaaataacaatgtggatgtgtcatactgagcagagaaaaagccagactgttt

SEQ ID NO: 236151 - DNA, 612 bp, Homo sapiens
ggtggatcagtctggtccaggaacacaagaactttcatgccctaatcagaaactgcaaaaaaaaaagttgtttaaacatcttgtttttgtgttcctgcttggagcttaaaataaactctgccctttgccactggagagtctgggcttgtgattcaatcactcttgcattgtcatcaggaaggaaagggcagtaaagtctgctattgacttaactgatgtcttaagtagcaagaaaaatctgagattggctgtagtgcagttttgacaatggcaaaaaggagaaacatggtcaacatataaaaagtgcaggtaaaacaacttaattttcgctccctattgactccctagatagtattaacccaaaaattaatggtgtargaagtaagcttgacagtaatttactgagggaggaaaggtccagttaggttgaggagtgtcagaaaataagactacatgtaactgacctctgctactatcctggacaattgactttctacatatcatgagaaaccaattttttctactgaaatttcctactgacagcagcccatttactagagcaaataacaatgtggatgtgtcatactgagcagagaaaaagccagactgttt

SEQ ID NO: 236152 - DNA, 589 bp, Homo sapiens
acagcaacttcatgaaatggattctattatcacccttattttacaaacatagaaattaaaaaattgatatgtccactatcttggtggcaagtaacaaagccagtatttggatttagcagctcagtgattccagatgccataatcttaaccactatgctatactattaccattttaaatgacactgtgaaggcatctttgtggctacctgctaccttttaatgtatattcttatttccccagtgtgaattcttggaagtggaatggatgtgcatgcataggtttaaaaggctcttgaaatgcattgatttcccaccaaatgttgcactaaattacatytccaccagcagtgtttgaagtgtttttggaacccttgtctgtcctgcctaaattggagttgataaatattttttaatcttatactcaaaaatacaattttaaaaaactttatttattacttgatataaaattgtagtttgcatttcggagaaccagtatccttttttttttttttttttccaggcagagcctcgctgtgttccaactactgggcacaagtgatcttcccaagtagccagaactacagatgca

SEQ ID NO: 236153 - DNA, 638 bp, Homo sapiens
tgaggctctgttcacttttcttcattctttctttgttctgttccccagcgtaggataaacacaattgaactatcttcatgttgctgattcttttcctgccagctcagatcttctgctgaacccctctaagtgaatttttcatttcagttattacaattttcaactccagaatttctatttggttctttattacatatatctttattggtatcctccttttggtgagatatcgctcttatacctttagttctttagaaaatgcttcctgtaattacttgagcatatgtaaaatagctggtttaaagtgtccgtctagtaagttctgtatctgggcttcctcaggggcattttatatcaactgctttgttccccctgtgtattgaccatactttcctatttctttgcttgtctcataattmtttttgttgtaaactggatattttaaataacataatgtggcaatcatgaaaatctgaccccacctacagtttgttcttgttctgtttattcattttcctgaactaattctgtaaaatctgttttccatcatctgcagccacttaagtctctgctcagttaacctagtggtcagctaatgattgcacagacattgtcttaaatgtcttgaaccaataaat

SEQ ID NO: 236154 - DNA, 651 bp, Homo sapiens
aggtaatattactattataataatctactactactactatgtctttagtatgggtacctatactatagaaaatttatcattcaagccatgcagtatgtcttgacacttcctatagaaaaagtataaaaccaccatgaattacgtgaaaatgaatagttgcaaaagggcccacatcccatgagaagtaaaattttagggaacgttttggaatagsttagtagtgagtgacctaacctactttctagataaaatgtaacaaacatggtggactattttctattatttctgtgtagcttaacaaatgattttattctaaccagcaaatgaggaatatgtgctttcttaggtaaaaagataccatccatgcattctatatgggacaaaatagccacatttttattagtatactatctacacttttattagtggtatactaagaaaaaaattgccagactacagcagaccaaaaattgagacctatattctttaccatttagttttaaatgaaacagtttctctttaaagcttacatatttggattctggcttattgaatgaatatgtgagtttctgtcttttaacagttaatagtatctctaggttatataacctgttactttatattaacagttgctttatggttctattccca

SEQ ID NO: 236155 - DNA, 418 bp, Homo sapiens
ttatgcttcccatattaggaaattgctgcaggtrgagactacattttccagcctgccttgctgtcagaagcatccacaccagcaagttttggtaatgaatgaaagcagaagggaagtgagttacttccaaactggatccagcaggactttccatgaacctcttctccatattctttagatgattatagggtgaacttagaaggtaaatggggaagattgcagggtctttgtgtagatgttgatcattcagtaatttattcacttacataattctgttatgttacttttttgtgtttaagctaccatgcatttttgggtctgctcattgtaggaacccgcctgctgtaacttatatatataagatgcactggttaggagtgatcctggaggtatggggcccagtctcccagccacccag

SEQ ID NO: 236156 - DNA, 550 bp, Homo sapiens
tgatatcttccaatctgtagcttgtcttttcatcctgttaacagggaattttagagcacagaattttacattttgatgaagcctactatcttcttttttcttttggttcatgtgtttggcgtcatgtctctgaactctttgcctggacttagttcctgaagattgccttctattttttcttctaaaagttttgcagtttttattttatatttatatttgtaatctatttttaaataatgtttttacagtataactttcagtccaagttttgttttttgttgttgttgttgttttttgcttttatcttatatatgtaatagctccagcaccatttaaaacatttgtgttaaaagacacatactataaaatttaccatgtcaagcattttttaactgtrcagttcaggggcattaattacattcacactgttgtgcaaccagcaccaccatccacctccagaactttttcatctttccaaactgaagcttggtacccattaaacaataattcccaatttcccatccccccattctttggtaaccacatttct

SEQ ID NO: 236157 - DNA, 539 bp, Homo sapiens
ccctgcagaacagtgagtcagttaaacctctttcctttataaattacccagtcttgggtatttcttcatagcagcatgagaacagactaatacaccagcccttttcagccttgtgagatttttgtagaagcagcaaagtggtgggctggctgytgggcatggggcaaggggagtctggctgtaccttcctctggctccctctgcctccagggtgggctccaggtctccttcaaggaatgtggctggaaactgccggacaaggccaagccctgattttacagatgggcatgatatgtgtctaaggtcctatggcctgtgagtgacagagcaaggactacagctcaggtctttagagcttttttattttccatgccagccaccccctgccttcagagatggagtcaggcagggagtgctaagagtcagagtggaaaggaggactcctgcgctgagaacacagagggttcaccaccggggatgctgccaccgtctcaggagtaatttgtatcaattcgataaatgtttatctggaaacaccc

SEQ ID NO: 236158 - DNA, 564 bp, Homo sapiens
agatctccccagccctgcagaacagtgagtcagttaaacctctttcctttataaattacccagtcttgggtatttcttcatagcagcatgagaacagactaatacaccagcccttttcagccttgtgagatttttgtagaagcagcaaagtggtgggctggctgctgggcatggggcaaggggagtctggctgtaccttcctctggctccctctgcctccagggtgggctccaggtctccttcaaggaatgtggctggaaactgccggacaaggccaagccctgattttacagatgggcatgatatgtgtctaaggtcctatggcctgtgagtgacagagcaaggactacagctcaggtctttagagcttttttattttccatgccagccaccccctgccttcagagatggagtcaggcagggagtgctaagagtcagagtggaaaggaggactcctgcgctgagaacacagagggttcaccacyggggatgctgccaccgtctcaggagtaatttgtatcaattcgataaatgtttatctggaaacacccaagagtcaggtat

SEQ ID NO: 236159 - DNA, 534 bp, Homo sapiens
tttgacatcttcattttaccaataatctttaaggctgtttttatttttcaaagattaaagtcatgtgaactaaaaggtaccacagcttttatcgtccctgtaaaaaatgtttgatccaagcacttatccttcaagtcaattaactagatctcttatttatagaaatsacacacataacacatatagaactacacagacaggcagaagaagatccagtagctgtaagattttttgtttgccaagctcctaattgaattattggcctctgggtggagccctttaagagcaaggctaggaaagcatgtgattttctaggacctaataaacaggtatagctggaagacaaaaacaaattttgagaggtatccatctgcctctaattcctggggctccatgaggaaactaaaggtctctcccaaaatggaatccatggggcttattctgcttgtcccaaggactcctagaccatcagaaattatcttagaggctcttctgcatggattaagggtggcaagacaaaagggagaaaattca

SEQ ID NO: 236160 - DNA, 587 bp, Homo sapiens
cagttatgaactagctgttcaagactacacactcaccaaaaataatctgaaaggcaagaataaacataaaagtcatctctttgaagtcactggagagctaccaaagcaattacaacctaaagaaacatgattccagagaaaaagcgaagcccagagaggtgaggcaaatgttgggaacctctcttaccctgcaggcattagctagtttgaaagctttagatgagaaaaaaagaatctaagcagagcactcagcattttcacaggggtaaagacacaaaaactacattcagggcctgccaagaagagacacaggttaaaatactgaaggccttcagctgggaaaactaaaagaccaaaggaaaaccttgagatgggaaaatcaaaaaaacaacctctgactaaagagtgttcacaaaggcaaaactccagctttaaatcaacttgatctctgtttaaaatgccctatcctaccctaacttcctgcaagargcaaaagtaaattctttcaggagaaagaggtcatcatttcaaacctcatgttacctctacaaattgtaattcacaatggaagtctatgtaagtcaaaa

SEQ ID NO: 236161 - DNA, 620 bp, Homo sapiens
ctttgttgaaatatttcaaaatgatgtttattttctaagtaaaaagaaaaaggttagatatactaatgagggattwttttgctccttagttctgctaaaatccaggttcttgtctaatgaccaggaataattaggcacacagacacattgaaaggcaaggagagcaaaatttattaaaagaaagctctcagcaaaaaaaaagaggggtcctgccaataggctcccacctcacagattgaataccaggccaccatacacaagctgaagaggccaggctcctccccgctgcataaggtgcaaatccccagtggttccaccccactctcccagtgtgaaggtgggcccccagtccattgagggcatgccaagacaaggccctgggcaggttccctcatctgcacaaaagcatctgtatacatctgatgtatacacttgtggggtgggtcagagattctctgagtaccctcccttatctgcctcaatgcatctatcattcccccctctaaagaagtacatctaactgccattagaatagggataaggataaggacaaagactgatattaactgcctcttgatgacatggggtgctgttttggggaagtggcagtcagagctccc

SEQ ID NO: 236162 - DNA, 639 bp, Homo sapiens
aggagagatatgtgtgagcacagagagtggaagggcccttggaggaaaggaatgtctagaaagaatcttaaaattgttaggtgactccttctcatgatcctgaccttcagtaaggtgttctgttcttaataatgcagatgttgcttctgtggaaaygcaagaagtggctgttgaaattacatttgttttgctaagaagcaaaacagagactccacctctaagaatgcagaggaggcctccattagttcactggcaacctgagaaagcctttcagcttgcgcaggctgcggaatagaggtgggactttggtgacaattttacttagagtttaaagggcagagatttcatgctgacaactgaattatatacagtttggagtgaataagaacaaatctgatttgtagacaacattattcgaataagtcactgtgaaaactgtactttttttctcaaaccttatgggtaccatttagtaattattactgtgcattagtagtaatgtggtgactataaaagttcattttctttatatgcctaatttatgtccatgtcataacctaggtactggggaaaattcactcattatatgctcaaaaatagatttttaaaaagcaacacgggcaaaatctattaaaaaca

SEQ ID NO: 236163 - DNA, 543 bp, Homo sapiens
gtaatactataggtaatagggtgctgaaatataatttggagagatgcacaaaggaaatatacagcctatttttgtgtaattttgaagcgctcttgtgagctgtctaggcagaaatagctagtcagtagttagatatacaactgtaactcaggaaaaaaaatgggtctaattttcttttcagtattattgaggtagaatttacaaaccataaattcattcactgtaaatgcatagctcaataatttttaaattgttgcactgcttcaatccagctktagaaaagtatcaccctgaatcccatgcaaccactgatttacagtctgtctctatggatttggaaatgtcacagacatggcatcatataaaatagatactttttttgtctggctgtttttacttagaatactgattttgaggttcacccattttgctgcatacatcagtagttttttcctgtttattgtgagttgtattcattagatagatatattaattttctttcctattcagaatgttgacggacatttgaccatttttttttac

SEQ ID NO: 236164 - DNA, 543 bp, Homo sapiens
gtaatactataggtaatagggtgctgaaatataatttggagagatgcacaaaggaaatatacagcctatttttgtgtaattttgaagcgctcttgtgagctgtctaggcagaaatagctagtcagtagttagatatacaactgtaactcaggaaaaaaaatgggtctaattttcttttcagtattattgaggtagaatttacaaaccataaattcattcactgtaaatgcatagctcaataatttttaaattgttgcactgcttcaatccagctttagaaaagtatcaccctgaatcccatgcaaccactgatttacaktctgtctctatggatttggaaatgtcacagacatggcatcatataaaatagatactttttttgtctggctgtttttacttagaatactgattttgaggttcacccattttgctgcatacatcagtagttttttcctgtttattgtgagttgtattcattagatagatatattaattttctttcctattcagaatgttgacggacatttgaccatttttttttac

SEQ ID NO: 236165 - DNA, 536 bp, Homo sapiens
aaatatatataaatacacacacacacacacacatatatatatatatggttcaatactgtccatgatttcaggtatctactagacatcttggaatgtatctccctgagggtaaggaagactgctgtatggacaaagaatttagagagaaatgagggccatctgtgtatagaaccaggaaagtgatgcctcttatacagaaggtcctgtcagggatgtttatcagaagtcttctttctacagctctgatactgcaagtttatatagctggtgtctgacctaactgcaattccccaaatagacttctttttttttttttgagatggagttttgctctgtcgcacaagctggagtgcagtggcacaatctyggctcactgcaacctctgcctcccaggttcaagggattttcctgcctcagcctcccgagtaggtgggattacagatccaagccaccacgcccagctaattttttgtatttttgtagaaatggggtttcaccatgttggccagggtggtctcgaactcctgacctcaagt

SEQ ID NO: 236166 - DNA, 583 bp, Homo sapiens
ttcttatcttttgggtgtccagaaacccccaaagctgacccatctctgaaagttaaattccctttagaaaaggcaaatcttttctggttgactttaagccctaagactcataaaaagactagcgttagatccttttgtaattkataagcatcatggttaggatttaatgctcatatgtgagctgagcctccctcaaacattgttaggacatcaacacaataccagtctgatatggaaaaaaaaagactagtattagatgaaagtcattgtcaaagactttcatacctgtagatgagatagaaatttacaaaagcatttagaatagctttaaaaacataaaacccaggtttctggatcaatatcaattggtttatatgttaagagtaatcttatatacaaaaattggattaaaaaaggactaaatgggccataagaattactacttaagaagcctctgaattgcacaggaaaccagaatgatttacaaaagctgtggaattgctaaattaaaaattctcccttttagagcagttttagtttcacagcaaaattagtagaaagtaaaacaaacaaacaaaactct

SEQ ID NO: 236167 - DNA, 566 bp, Homo sapiens
gtagtcaagatggcaatggggctgcagtcatctgaaggctttgctgggacttgaggtttcacttccaaaatgacttatttacatggcctttggcaggatacctcgggttttttttttttttctccacatgcatctcctgaaaagactacctgagtgtcttcataacatgacagctgtytttgcccatagcaagtgacccaagagaggaaggcagaagctgcagtatcttttgtgacctggcctcaaaagttgtatgtggtcattgccacaatatcagattggttatacaggtcagctcctttcaatgtgggagagtactacagaagaagtgtggctacccagaggtggaattcactggtggtggcggtgcatcttggaggctgcctaccacagtcctttaagagagaagctaggcctttctgacattctttttcttcttctgattggaaactggatgtggaacttcatcctagattgtagagataatgggaccctaggggttgcatggccacaagatggaatgaatgtatatatttgaatcagattcctctactcaaattacaggg

SEQ ID NO: 236168 - DNA, 476 bp, Homo sapiens
ctgacttctgtttccccattcattattctgcatccccagtgcctctaatcttgtaaagattccctctgtgaggagttgttttgaatgggtataaatttagttatataagatgaataagtcccagagatctgctgtacaacatattgcctacagttaacaatatgatattgtgcatctagaaatttgttaagacagtacttctcatgttaagcattcataccacaaaacaaaaacaaataaaaccctraaggtccacatggaagcttttggagatgatgaatatgtttattattctggttgtggtgatggtagcatgaatgcatacatatatccaaactcaccaaattgtagacattaattttgtgtggttttttgtataccagttatacctcagcaaatcttgaggtgagggagccttccattatttcttgacttcagactccactttcaacattcttgaggctgtttctcctact

SEQ ID NO: 236169 - DNA, 588 bp, Homo sapiens
gtgaaattaagttatcttttgaaacagtctagcaaattagactaaacaatcaggaaattaattaaatagaggcaacarattgggatagtaaacctatttgtaatattaataatagctcactttaaaatatctgagaaagtgcctcagcaaatttatttggtgtagatttttgtgtttcccagacatgggaaagggaaggttcttgaaggagagaagaaatgtcccactcatctgaccacttcctttctgttataatttaagatcttttccatgattttattttaatcttctcactgactttttcaatgatttacaatctgaagtattttgaaaagattatcatactgtgcatactgtacatagtgtgattacttttgtgcagggatttaaaaaagtaatcagtggtctttctttgagaatgaacttttctggtaatgatttctacaacatagaacaaagccttcattctttgtattttccagtagttactttatccagtaattctcatgcatttctctgtgagcatttctaaggtcttgttctgagggtccaatttcctatattcacatcctggcacatctgtaaatg

SEQ ID NO: 236170 - DNA, 552 bp, Homo sapiens
atcaggctcctttcctcccatgcccaggctgagtagaaagagccctggattagtagctgtggccatttagggacatctcagagcctcattttctgctgtttgaaaaaatctctaattttagggattttgatgattaaatacaagaatgtatttgaartgttatgcaagcttcatagcactgtacaaacatgggatattattagtcttacagtctgtctcaattggcctgggtaatcagttgtcatctgaaatgttaaattctaaaacgtaacaacttttctcccctgttgctttactggggtaaattttatcacaaacctagaggagtaaatttagttaaaaggtcacctacctatgctcttgcttaggaaatggattgattacagtgctttggcatttgaaataaggtgggcagctccttttataaagagggtaaagatttagaggaactcctttctttagggagcccttcacattgcatctgggaagggaaagatactgacttaggatgaggtgttatatttggcacaacttgggacaacttttgtgtta

SEQ ID NO: 236171 - DNA, 552 bp, Homo sapiens
atcaggctcctttcctcccatgcccaggctgagtagaaagagccctggattagtagctgtggccatttagggacatctcagagcctcattttctgctgtttgaaaaaatctctaattttagggattttgatgattaaatacaagaatgtatttgaaatrttatgcaagcttcatagcactgtacaaacatgggatattattagtcttacagtctgtctcaattggcctgggtaatcagttgtcatctgaaatgttaaattctaaaacgtaacaacttttctcccctgttgctttactggggtaaattttatcacaaacctagaggagtaaatttagttaaaaggtcacctacctatgctcttgcttaggaaatggattgattacagtgctttggcatttgaaataaggtgggcagctccttttataaagagggtaaagatttagaggaactcctttctttagggagcccttcacattgcatctgggaagggaaagatactgacttaggatgaggtgttatatttggcacaacttgggacaacttttgtgtta

SEQ ID NO: 236172 - DNA, 529 bp, Homo sapiens
acaccaagaaatttcagaacacattaagtacaacaaaataatcattttttaccagcttgctatttcttcatatgacattaaaaacaattagacaaatgtaaggacctttctttgaattgttaattaatttttaattttctggttaccaccaaataagagacatacttttaggtataattttccatcatatgaatgtttgagtagatttttttaaggagacagaataacttcattgtttctcatttgctgctgttactattacattaggagtagtgacatttgcactatggtttaacatgcttgtggacccttaacatttataatcagttttataatcactgataatcatagcatgtaaattctgtgtgcattgttcattcagacttagatttatgtatttctttgtataaatggagaaaacatacccaccttactaaaactatagrtttatattaatactctcatggtcagaattagatagacgttttaggttgttaataaagcttttttgtgggatgtttaaaaccgt

SEQ ID NO: 236173 - DNA, 438 bp, Homo sapiens
actgtctcctaattaacctacacgtttctcttctctccccatctgcatgaacattctctcttcttaagagatccacacggttgattgctatttgcttgactgaggttattttcacyctcctgtcagattctgcctactagagtagaaacagtggctgtccattctccttggttggacagctgactcctctgctatccaaattctcaatccctacttctccaacaccgtgctctctagcttccctccttccaagtcctgcttaagttgttaacggctacttattctttggagttcaagtaccactcattttccagggcagctgccctgtctcccattcaagacaagttccccactagacttctgtatcataattgatctgtcataatgcttagtacagggtgtgaatattatattattggtgtgattatcgatatgggt

SEQ ID NO: 236174 - DNA, 400 bp, Homo sapiens
tatatatttccatgttcatgtttactttgatgtagcatgctatctaataaaactctgttttactgactataactttgataagccagctttgcattasttagtcctgccatccagggccctaccacctgttcctagaaaattttattcaccttgacacagttccagtttgctcataattacaaaagccaactttgagtccatctaactgtacaacttccagcccacatttttcgacttctccacatatactgatttttatgtgctaatttcctaaaatgaagattccccatacttatgagagctcttaaacctattacaactaataataatcattctctaaatgagtactagcttagcattttttttttttttgagaccaggtctcactctgtcacccaag

SEQ ID NO: 236175 - DNA, 400 bp, Homo sapiens
tatatatttccatgttcatgtttactttgatgtagcatgctatctaataaaactctgttttactgactataactttgataagccagctttgcattagttagtcctgccatccagggccctaccacctgttcctagaaaattttattcaccttgacacagttccagtttgctcataattacaaaagccaactttgagtccatctaactgtacaacttccagcccacatttttcgacttctccacatatactgatttttatgtgctaatttcctaaaatgaagattccccatacttatgagagctcttaaacctattacwactaataataatcattctctaaatgagtactagcttagcattttttttttttttgagaccaggtctcactctgtcacccaag

SEQ ID NO: 236176 - DNA, 571 bp, Homo sapiens
gttgaaaatcaccgtttatttaaaggtaaaaacccagccataaaacttaaaatacataactctcaatatttcatgtcaaactatgtctccagccttaactgtctctagtctatcttatccacaccatatttcagcctccatgaattgtacatcattcctagaatgcatcatgccttgctcaactcatttctatcctactttcaagacccctctagccttgaattaataattagtctagtattaaaatatttattgagtgctttctatgtgccagatactcttaaaactyttcacatgtattaacccatttaaaacttacaataacattttatcctaactttaaagataaggaaattaaggcttagagaattttgaaactagcccagggttacacagctagtaagaaggaagcaggagtataaacccagacttgtatgactccagagcatgcacttttaaatactacatttctttttcttaaatttttgttagatgttagaattacccaaggaattttcgagaatctccatacaagtcaaatattagaatttctgggagtatgactcagtta

SEQ ID NO: 236177 - DNA, 430 bp, Homo sapiens
aacaaatattagtccctgtggccagttctcccatggcatgagcttaattgactggctgattattatccaaatcaggtttacctgatttcaactcttttcccattagtgctcccctaagatatttattctttccratatatcagatttaaaatatcaactctggcgccaagtattaagatattcacattaaaatcactggcttaaagtttaattgtattgatttgatttttagaggcagcactcacaaaaaatattagctatgctatgctgcaatgcaacattgactcaaataggtattgaacataaaacctaccctgcaataatgcaatccggaaaacccacagaggcaaagacaagcataatctaggctgattctcacctcatcctctgctgattctgtctctctttcacgatgtctgtagtcgtctgt

SEQ ID NO: 236178 - DNA, 580 bp, Homo sapiens
taatttaggattaaacatatcaggtaaattctcccaaatcacatagtaattcagtgacagaataatattcaaaaccaagtgtcctcattatatattttatgtttttctttgctttctttcctattctttggggctttgatacacaaacagataagatcattgaggaacttcagttccaaaatattttctccttttatccctctggccctcccaccctctgtcatcactccttgtatctttctttgttccctttggctaatattattgaaagcttattgaatcctcttcccttaattaatttgaaaagatgaacttcaggtactgagtgtattgactttttttttttwatctccatgtctgtattaattaggatgagttttggctgaatatgctggaaatcctaaaataacagttgtttaaacagaaaaaggtctattatcccacataaaagccaaggaaagccaggtctggtgtggctgggtcatcagtaacccagcctcctctgtctttttgttctaccatattagctctggcttccaatttccaagtctttttagaagttatcatgacggctggaggg

SEQ ID NO: 236179 - DNA, 646 bp, Homo sapiens
ttgaattttatccagtgtcagaaccttccaaaattggggagtttacaatccaatttattcttgagaagttccaggtatcaaaaaattcttttatcttttaagtaataatgtttctctccataatttccctttgttgaaattgtgtgatcatggagcctaaatgaccattggtaatataatattaatattcaaaatggatgatgcaattcatactgacctgtcagcagcccaatattaatttaaactactgacctacattaatttacctcagagcaatggttctcttttcttgcttactttcgggtcarcttcaaacacaccaatgccccgttttcacgacagataaattggtctgcatatctggagttgatctgaacataagcattttttaacaactccccagatagttctaatgtgcagccaatattgagactcactatgatagagaaatgcacactaaatacagagggttgttgccaagcaaggaactacctggctgcccagccaagacaatccagaatagcattatttttatgaattcatcaagcatttgggtccagaatttgatcttaaccttgcataaaagttaatcagaccctaggaaattgataatatgttaatcaaacatgaaattgtctcatataga

SEQ ID NO: 236180 - DNA, 605 bp, Homo sapiens
aaaagcctgttaaacaagttggatgaccttggtcttctctggggtctttttcttgaatcattgctaaagccaagaagagaattgttaagtgcaaatgcacacactgcaaaaatgtatgctggtgagcccaagtttccatcaaaagttgctctgtgtgatctggagacaacaaaaacagtaggtctgaggtacacaatttcaagacaatggggaaaaaagagggagaaataatacgaaagaaataatccagtcacgcagtctcagcaggccttcatgtctaacttcctttgaaactaaaaggccaataaaacaattatttgtctctttaagaagggtcagagtttatctgcaggcctttatagcaccaacaacaaatgagatcagagaaaagtcagtataatttatattatgttcctgtactccacattcattgccatcacaaaatacggagcacgaacactgtgtcagccactgaacatgagtcgccaatcctaaaartagccctgcaaactaagttttattatcctattttacaaataaaaaagaaacctaaaattcagaagataacttccagttagaaagaaacagagatggattttgaagta

SEQ ID NO: 236181 - DNA, 497 bp, Homo sapiens
tattttatcattaatgctcagctgtatccctaaattgctatgtgatagcatttagaaatggttctttgtgatattatttggaggattagagtttatcatgtatttaatgtattaagctgataaaaaagacatatccccaaacaaggaaacaaaaaaatctttactggaaaacactrtaattctactctgtgttcctatcattgtctatgggggcccctcatttagaactcagcgcaaaaggctgcctgtgaagacagaaggggaggaaatggtgttgggaactggtctgggtggtgagagcagtcttgtctccaaagaaagctgtttcccatgccacattctgcttcagatattcctgactttaaagacaagctggatacaggttatgatatctgagaactttggacaaatgtggctcattgtgatataatctgatttcagaagggcttacgcaattcacattccttgtctgaggctttcccacatttctggatagc

SEQ ID NO: 236182 - DNA, 497 bp, Homo sapiens
tattttatcattaatgctcagctgtatccctaaattgctatgtgatagcatttagaaatggttctttgtgatattatttggaggattagagtttatcatgtatttaatgtattaagctgataaaaaagacatatccccaaacaaggaaacaaaaaaatctttactggaaaacactataattctactctgtgttcctatcattgtctatgggggcccctcatttagaactcagcrcaaaaggctgcctgtgaagacagaaggggaggaaatggtgttgggaactggtctgggtggtgagagcagtcttgtctccaaagaaagctgtttcccatgccacattctgcttcagatattcctgactttaaagacaagctggatacaggttatgatatctgagaactttggacaaatgtggctcattgtgatataatctgatttcagaagggcttacgcaattcacattccttgtctgaggctttcccacatttctggatagc

SEQ ID NO: 236183 - DNA, 604 bp, Homo sapiens
atttaacaaatgtttataactcctttacatttctactccatgctgagcagaaggttaatgaagtaaaataagttttggtatcaaacaactccaatttcgtactccatgtaactggacttaatgagcaagtatattctaayttctaaggtttattggcctgatcttgcagaatatgaaaataataaaaaaggtgagttccttgaggacagggtcattcttatttatttttgtatctatgtgagttccttgaggacaagggccatttcttatttatttttgtatctctagggccttccccaattcataacagagattaacactcacttatgtttgaattttactgaaaggttgctcgtgagaattaaatgagattatatatgtgaaaatatttggtcagctgttaaactctatataattgtgagtcattaccattagtaattttaaaagagtgatgattagtaatgagtttttaaaaattaaaccaaactttggtttacagctgtctttccaggaacatttgttattcatttgttgcaaatctacacatgagtttcctaaaattaataatcagtggtacaaagctggccatttggagtttaatgct

SEQ ID NO: 236184 - DNA, 610 bp, Homo sapiens
ttaatccaaaatttatcaagagcctatgtaggtgatgctgattgcataccaaagaactactgtgaaatatgccttgctagcatgaggttatcctgacattatcagctactttaaatagacacttttctgtagcttctagaatgcttaaactactwaacaaattgctgtaaaggttaacttaattgattccaagaaagacaaataactccctagctgggagcacccatgtgagaacaataaaaagcaagctctctttctacctctggtaagttaaagaataacacgtttcagcagcattttcaaacatttgcatttgcataaagccacagatcagaagagtgacttttattgctttacaattcaaaatctactctcattcaccatttcagttattataacagatgttctgatcctcattcccaggtcactgtgtacagtgtacatgtttatataattacaagaaaaaagaggttaacacattgtgcctcgtccaatcctgtcaaaatgaacccatataatgcttcacacaggggaacagcaaaagaataaatgcaagcactataaatatacataagccacaactgaaacggtttcccaacccaactttcaa

SEQ ID NO: 236185 - DNA, 610 bp, Homo sapiens
ttaatccaaaatttatcaagagcctatgtaggtgatgctgattgcataccaaagaactactgtgaaatatgccttgctagcatgaggttatcctgacattatcagctactttaaatagacacttttctgtagcttctagaatgcttaaactactaaacaaattgctgtaaaggttaacttaattgattccaagaaagacaaataactccctagctgggagcacccatgtgagaacaataaaaagcaagctctctttctacctctggtaagttaaagaataacacgtttcagcagcattttcaaacatttgcatttgcataaagccacagatcagaagagtgacttttattgctttacaattcaaaatctactctcattcaccatttcagttattataacagatgttctgatcctcattcccaggtcactgtgtacagtgtacatgtttatataattacaagaaaaaagaggttaacacattgtgcctcgtccaatcctgtcaaaatgaacccatataaygcttcacacaggggaacagcaaaagaataaatgcaagcactataaatatacataagccacaactgaaacggtttcccaacccaactttcaa

SEQ ID NO: 236186 - DNA, 450 bp, Homo sapiens
cttttcttttaacttggtttttaatttggaagcaggagcttggcattaatgtgtataacataacctgaactattttttcttttcttgagaaatgtagccttgtcttgcttgcttagtaaagtaatgcaccttaattcagctttgttatccttcttcttcttcttcttttttttaactgtagcctatttggtagttcctttttcctgtgaaacatgtataaagttctacaaaaataccaaaagtttaccatatttattgctaagatgcaggtatactacattacttatcctcacatcattagacgaaatgcatatgaactctccttacaactgggtattgaacttcactggtcattggttattagaacattttcttttaatgactgtatctttttgtaagatacargtgttactttggagagaggtaggaatagctctatggaaaatgtac

SEQ ID NO: 236187 - DNA, 437 bp, Homo sapiens
  misc_feature (1)...(437): n = A,T,C or G
ttatcattgatcagtaatatagatgaaagctcaataacgggttacagtgaatgttcattgaatgccaagcactgtgtttggtactgctgatacaaaggcaagtaaatcaagtgttacctcttcccttgttaattagttaaaattgcattcattcactccttaagcaaaaataatatatggttcccarttgcttttctgggcattggggatacaacagtaaataaatgttacagacaaaataaatgaatgaaaaaataancaagtcccaaaatacaactggatagcagctgtggaatttttcttagtagatggaatcttttattccgtatttaacactattaaattccttaatagactacaccataaactctacaatatagagctcaacttgagatacagaatgtttaaaagagaataaaaacttctctgaagaattc

SEQ ID NO: 236188 - DNA, 478 bp, Homo sapiens
atcttccattaaagaaatagataggtgtcatcctcccagccaaataactgggctttgcgcggggtaggtatttaagtttatggctatagcagtatctggattgcagggttcaaatcatatgtttctattttctggctaacctcttatctctcagcttcagggtttggcatagacctaggatggcacagaatcatctaccatttctatgagatagaagcctgagaattcttgccattaacgttcagcctttctctcataggggtttgccktgctgctgaaatacgcagttggtctagatggaaaatagctttctgacagtgtcaattcaaggatgttctgagtttattattaactctgggaattatatcataagaggcaaatactcctacaaaacattgatcaatgccactgttagagatacttggtcttaggttgatttgatcagaattacatttactatgttttaagtacaagaaga

SEQ ID NO: 236189 - DNA, 541 bp, Homo sapiens
ctggatgagatttgcgtggggacacagctaaatatcttagcccttgccttccttaacatttctctgctggaatcacagatacactccatataacacctcagtttagccctggctatgaccaggtaggtgctccttggcattgttatagggctagtcttgcatattgggcccagcctcaatcatatgatgggagttctggcactctctgtccacttcattttccttaaccctactgcttcccccatccagaacctgaaacttctggttatatytaagacaccacctagtaggactgcattctgttctccatgctgtttactatacaattttctatgaaaagactggttgtttggaatcacagtaactccctccacctggccaagagaagcacagccactgtcatagtgtatgtctgctttggagttcattgtatattgagtcaaatctaaaattttatattctagtagacactgaatatggtttcacctaggtgatttcatgtgtttaatactgcatcaaaacatccttggcaagttcctgc

SEQ ID NO: 236190 - DNA, 618 bp, Homo sapiens
tgcatttttgcaatttttgatgtgtatgtgtgtacatagttgtaaataaatcacaactgtagctagttgcgaatgcctcattgcacttatccataatgccagttccttctctttctctttgagttttctaggtatattataactttgggtagttatgctgatttagaagatctgttatattctctaaagatgtacaaattgamacaattgtacagtacagaaggagctagtaacaactttgatgcttatttacttcacagaagaaatgattcattcttttgactttgttcttctagattttgttcctcaaatagtcctatattcatatttcttacagcattaaaaatgttagttttgctactgtctcctaatgctaaggaaatatttcctgatgtacaaagcagacttttttagtcttattatgagaaaaaaaataagttctgtgaaattgcattaaactagaccatttttatttgaaaacctgagaattgattttcttgaagaaaaatcttcctctagagtgaaagaaacaaattctactaatgcataaaataatttgaattgtgtttgagtagatgggcacaactgagaggagaaagtttgccttattttaatatt

SEQ ID NO: 236191 - DNA, 637 bp, Homo sapiens
ttttctgtgcctggtttatttcacttaacataatgtcctccaggttaatccatgaggatagttttaatggttattaaattttcatagcttgaaagaggccatgttgagaacatttacacctcagaaaatatgctcagtattggtttttatttttttgagaactggtttactagctcatgactgagatttggacattggagctggaagtaatgattgggacatcaaaatagagatgtccagcagctgatagattaaakatatctggagccatggagagaagtagtttggaaacaaagatttgggactcaagaattgtgggtaactggattatttatttactaattcaacttgtttacctacttgaaggggaaactaataataacctggataaaataacattttaatatttgatgtactacaaaaggtagagtgatttttgtctttgcttcatactacatactgtatataaaactgtattttcctgtctatggaatatactcaggatacatttaggcatatttctttattttaaaaacatagtatatttgaaggaaactcaggcttgtttttcctcaatttgttattgttgtttataatatcatttaccaaagttaattctgtgatggactgtaccagt

SEQ ID NO: 236192 - DNA, 558 bp, Homo sapiens
taacaataacatgaacagtagattaacacatattttgtrtattatatgttaccaatataattctgccaatctttatctttatatacctattttatatatatatatatgtgtatatatatatatatatatataagcaaactagagaaaagaaactgttattaaaattataagaaagagaaaatatatttactatttaagtagatagtggatcattgtaaaggttctcatccttgtcatcttcatactgagtaagctgaaaaggaggaggaagaggaggggttggtcttgctgtctcaggggtgacagaggtgaaagaaagtctacatgtaagaggatctgtgcaggtgcaaacccatgttgttcaagagccaactgtacaagtgttctgtcttcttaaatgaagccaattttggtaagtgtgatcataatacatatgaaaacatgtagtgtatattttgaaatcttaagtttgatctgttggcagaatgtgactagattaaacttcaaatgtattgaagaaaatactttctgagggaatactatgtggaaagatatcac

SEQ ID NO: 236193 - DNA, 637 bp, Homo sapiens
ttttctgtgcctggtttatttcacttaacataatgtcctccaggttaatccatgaggatagttttaatggttattaaattttcatagcttgaaagaggccatgttgagaacatttacacctcagaaaatatgctcagtattggtttttatttttttgagaactggtttactagctcatgactgagatttggacattggagctggaagtaatgattgggacatcaaaatagagatgtccagcagctgatagattaaagatatctggagccatggagagaagtagtttggaaacaaagatttgggactcaagaattgtgggtaactggattatttatttactaattcaacttgtttacctacttgaaggggaaactaataataacctggataaaataacattttaatatttgatgtactacaaaaggtagagtgatttttgtctttgcttyatactacatactgtatataaaactgtattttcctgtctatggaatatactcaggatacatttaggcatatttctttattttaaaaacatagtatatttgaaggaaactcaggcttgtttttcctcaatttgttattgttgtttataatatcatttaccaaagttaattctgtgatggactgtaccagt

SEQ ID NO: 236194 - DNA, 524 bp, Homo sapiens
ttgtcatctgtgtgcacccaaaagtgatgaaaactgggttcttcagggttatctgtcttcyttccttacacttactgacaaaggccagtgtctcaagccatctgtacaaccggcagaatagccctataattcacataagttttgatcagctcatcacagtctgtctaagctctctgctttctacaagatgcattttaagagtatatgttgcaatgggaatcatttttttttccttaagactaaagcttaaggggcccaaacttgattttttattgattatgcatacagcactgctttgtggttttaaaagctatcttgtttcatgttaaccacaatcatatgtttacaaagatttagtccctttctttataccacaccatctattcagcaacatatgtggaggttatctccatgattgaccactcaacatgaaataaatgacaaacataacaaacagcatgcattcactcacaaattatttattgaacacctaatgttcacataggataagtactaaacttata

SEQ ID NO: 236195 - DNA, 470 bp, Homo sapiens
atatcagggcaaatgttggtggctaagctttggaatatacaaatgaataaaagagggaggttaaggtaccgagaaacctcaagtaggcattcatagamttttcaataacttttaaaattctaaaaagtttagaatagccacttttgacaatgtgatgatcagtcaaaaacatgaaaaccaaaaggaataaaaaggaagaaggcaagaaatggaaggagaaagggaggaaaacagggagagaagaaaggtgggagagacagacagaaggaggggagtgatgtacagatcagttagcaaactgtctgtgaaggaccaggtagttacagactttcagtatttgggggtatatggtttgttgcaactgttctactctgctttgtaaaagcacaaaagtagtcttagacaatatataaggcaatgagtgtggttgtgtttcaatacatctttatttataaaaacagatagctggt

SEQ ID NO: 236196 - DNA, 610 bp, Homo sapiens
gaaaagatactagttataattcattcatgagttattttcagtttatgaagttcttgccaaaagagagtaagaagcaaaaacatgttaaatcataaaattatattcagactttgcggagagtagcctttaagtttttttcacaaatagctttagacccaatctcactccattcttaaaattaggtaaytcttctttctcatcacatgaacttcagtagcccaaccaaaattcttgctttccaaatcgtggttatttattcctctctcctccaatgatctacaagactctgtcttatccaccagctcatacttctatcctctttcttcagtcctctaataaaattctcacctccttctaaggttattgtgattaagttaggtaaattaactacatatcccctttggcttgatgtcaacataagggaacttgtgaaattctactgtattcagttgatactgtgggtgtatatgttgattatttactctcttaggtctattttacatccagtgttttcaggtatatgataagatctttaagattagggattttgtcattgatttgacttatgtctgttcaaaggaagattatatattaaaataataatttggac

SEQ ID NO: 236197 - DNA, 548 bp, Homo sapiens
tttcgttatatttgatgcatagatgtttttcaaatattgaagctacatttagtaatattgcctttatttttactgcttgtgttttcaaacttagaaaggccttagcactttcatacaattgttttttaaagtaaaattttattaaagaatgatctatgtaaagtgcacacatgatacaagtaaagttctagtaataagtatccaagcactcagattaagaaacagatcatcaccagcatcccaaaagcacatcatgctctcttcttactgctattcccaccactaacattttttgaactttttgaacaatgaaatcatgcagcagtattcttttgtgtctggcttctttcactcaatcatttgtttgtgagattcatctcatgttattgcatgtagttctttattgatgcaggtcttccatgttgttataaatattcttgcacatatgctttgatgaacttatgtacagatttmtgtttatcagctatcccagagtgaaatttctgtgtcacagagtttgtatattttcagtggtagaagattcagac

SEQ ID NO: 236198 - DNA, 536 bp, Homo sapiens
cagtcattatatttatctaggatcagtgtcttacacatagtggatgtgcaaaaaatatatgtggaatgaatgaatgaagataacattttactcaaatttttaagtaggagacggcaggtcctactagtagtgaggtttttatctttttttcactcttcaatgttattccccagggaaactggcaaactgaaatctgttacattaatgccagcagagatgtatgagtgtgaagagaataagtaaacatttattgtacctgatggctcartggactatcaacatgagctcttaagagacttgaaaatacttggcagtgtttatccttaggatgaactctacaaaaactatttgtggacattattttcagaaaatttctattttggggtcagctgagctttttcaattcaaaacttatgagctaatatgtaactatataacgcctttcctttggcaatgagttaatttcttaatgttttttaattctaatgttaggttttctatctaaatcagtgtcaaaatatcatccaaaaatagag

SEQ ID NO: 236199 - DNA, 607 bp, Homo sapiens
ttgcttttttaattatacttaccatacactttaattctaaacataaacttcatcagtcattcctattctttctttttatagtccaaatttattgattttcacccatgtgtttgtattttctcktatacttccaatgttgaagcaatgtagtggcttcctctgtaatcaataacctgcctatagaacttgatttagttagtatttgttttagtggaggcttgttggtgataaatcctttcaattttggtattttcattgatatagtcaaacatatttggcaaaacacatttgtatctcttctctatatgttatgaaatgaaaataaatactaaagaagagtggatattgtagacattttatctttttcctgaccttaatggaacttcctcctcttatatataaaatttactgttcattcgtgatttttatcttaataaagtctcattattttattgttttccaaaaagtatttttaaataaaaataattatcaattgcatttatactatctagtatggtgaatctacttttttcttcttggaacaattactaagttggatgatagtaagattttccgaatttttaaatagaattaaaaagttctttct

SEQ ID NO: 236200 - DNA, 607 bp, Homo sapiens
ttgcttttttaattatacttaccatacactttaattctaaacataaacttcatcagtcattcctattctttctttttatagtccaaatttattgattttcacccatgtgtttgtattttctcttatacttcmaatgttgaagcaatgtagtggcttcctctgtaatcaataacctgcctatagaacttgatttagttagtatttgttttagtggaggcttgttggtgataaatcctttcaattttggtattttcattgatatagtcaaacatatttggcaaaacacatttgtatctcttctctatatgttatgaaatgaaaataaatactaaagaagagtggatattgtagacattttatctttttcctgaccttaatggaacttcctcctcttatatataaaatttactgttcattcgtgatttttatcttaataaagtctcattattttattgttttccaaaaagtatttttaaataaaaataattatcaattgcatttatactatctagtatggtgaatctacttttttcttcttggaacaattactaagttggatgatagtaagattttccgaatttttaaatagaattaaaaagttctttct

SEQ ID NO: 236201 - DNA, 607 bp, Homo sapiens
ttgcttttttaattatacttaccatacactttaattctaaacataaacttcatcagtcattcctattctttctttttatagtccaaatttattgattttcacccatgtgtttgtattttctcttatacttccmatgttgaagcaatgtagtggcttcctctgtaatcaataacctgcctatagaacttgatttagttagtatttgttttagtggaggcttgttggtgataaatcctttcaattttggtattttcattgatatagtcaaacatatttggcaaaacacatttgtatctcttctctatatgttatgaaatgaaaataaatactaaagaagagtggatattgtagacattttatctttttcctgaccttaatggaacttcctcctcttatatataaaatttactgttcattcgtgatttttatcttaataaagtctcattattttattgttttccaaaaagtatttttaaataaaaataattatcaattgcatttatactatctagtatggtgaatctacttttttcttcttggaacaattactaagttggatgatagtaagattttccgaatttttaaatagaattaaaaagttctttct

SEQ ID NO: 236202 - DNA, 549 bp, Homo sapiens
  misc_feature (1)...(549): n = A,T,C or G
agtggctctatcacttgatagctatgtgatctttgaccagaggggtaattcctgtaaaataatgctattttggatggctttgaaggttcattgtgacctcaaatacttgttgagtgcttactctgtgacagccactctaaatgttttgtacatgmtaacatttattctttattgcaattctatgcagtaacctcccttgacattcttctttcagagatgaggcagctcagactgaggttttaagcaactgcccaaaattatacagatagcaattggcaaatccaaaatgttaaacccggtctagctccaaataaatgttatatataagggtagagagtaaagaagaataccactgttcttctccacatacacagaangaatctaggttagttctttacacccattagacacatataattattatgcttttgcttaacataagtcaccaaagacttcaaatatattgagtgccatttcacaagttgattgttttagtaagtacacccttaaattggttaaaatccagaataagagaaatatttcaaatga

SEQ ID NO: 236203 - DNA, 612 bp, Homo sapiens
tgtcttattaaactgataattcttcaagtgcaaacatcatgtaatctatctatttatttatatttttcttatccttcacatgatataataccatacattgcatagagtagatgttcagtaaatatttggagaatgaatgaatgaatagcaatacataggaggttttttatgaaggatcgatttggtaccatttcaacatctgtgtctgtttactaacttcactttccccttctggttcaatttggtcacagggcattctgaagattaatgaataaaatatgtatgagttcttttagaaaggcaaatgaaagatcaacataatatttcctctgcataataaagcaggagaattcctaatatccgttaggmaaattcaccctaaaactcttcatttcatttttgtctgaaacattcttctgatttattaatgtggatttaaaaagtattggccaagcatatcttggaaattagtgcatcagagtagattcttgaccatttcttaggcctttatatcacaaaactgcataggctacattttttaaaatttgcctttctaatgtaaatataattactcagatagtgtcatgaaaaaaagcatcaacaatttgatat

SEQ ID NO: 236204 - DNA, 612 bp, Homo sapiens
tgtcttattaaactgataattcttcaagtgcaaacatcatgtaatctatctatttatttatatttttcttatccttcacatgatataataccatacattgcatagagtagatgttcagtaaatatttggagaatgaatgaatgaatagcaatacataggaggttttttatgaaggatcgatttggtaccatttcaacatctgtgtctgtttactaacttcactttccccttctggttcaatttggtcacagggcattctgaagattaatgaataaaatatgtatgagttcttttagaaaggcaaatgaaagatcaacataatatttcctctgcataataaagcaggagaattcctaatatccgttaggcaaattcaccctaaaactcttcatttcatttttgtctgaaacattcttctgatttattaatgtggatttaaaaagtattggccaagcatatcttggaaattagtgcatcagagtagattcttgaccatttcttaggcctttatatcacaaaactgcataggctacattttttaaaatttgcctttctaatgtaaatataattactcagatagtgtcaygaaaaaaagcatcaacaatttgatat

SEQ ID NO: 236205 - DNA, 678 bp, Homo sapiens
tttgaagctaaagaaatttaaataagtatgaaacatgtttacacctaagctcaatctcattgaagaatgaaagttcctaacagtcaacatttattgacatcatacgctacatcaggcactgtgtattttacaaacattaataaaaagtcmtcaaaaagtttatttgactcacgttttctgtctttaatctatttcccatcaaataaaatttatattttaagtctgaatataataatatttaagttgtcccaattactgagtctaagatttgtttttcttctttatgtttcagtcctgcaaggtagattaattcttagtccaaagaacctgcttcactgagcttattgaattctgctttagcaagaccgtgaaacaggtctagcatcctcagtgccttcctaaggtcagttacacagttggcaagtgatggatgctggattaagacacgagggacctcagtccacgccccatcttttaattgccattctgtattgcttcttgctgggtaatattgccactctttatcctcaacttctggctattttctcaataactttcctctttctaagtggtaaatactttgtttctttgaacaaattctaagagttttatgtccatataaacatgactataacaatttgaaattaattttgtgtgaagttggtgagtgcctaaatg

SEQ ID NO: 236206 - DNA, 631 bp, Homo sapiens
tgggggtaggctgtgatgagtgcacatcagcaacaatgtgggagtacgctacgggcaagttgcagyggaaaggcatttgggggaagctgtgggcaggtaaatgtcagtagggacccatctgctaaagctgtctgatatttaggtgggatctgccactgaaggagctatgatggcagcttccaggaagtgtccccaatggaattcaaagttgtactgcaagtgggcgtgaccaaggagggggcccagaagaggatggcagacagtggggtcctcagattagactggccccatcccatgtgcaaaacagcactgcactgtccaggtctgacagtcaataaaggccaaagacacatagaagttcatggtgggctttgggggatgggtgtccctggctgtgctccactgcagcccttcctacacaaaacattctgggctccacacaggatggtgtgctgtctctgtcacttcttcaagtacctctccccgccagctcaattatccatgggggttgtggagtctccttcggctaggattctggaggtccatggtgagaatgggccactccctgcctacttaactcaccctttccacaggagccactgacggctaggaatgagtcctggtacttggc

SEQ ID NO: 236207 - DNA, 564 bp, Homo sapiens
attgctgatattggccaccaataaatatttaagccagaaaggacttttagaaattcagtgctgtcatttcccaggtcaaaaaaaaaaaaaacaaacaagccattacaacaacaactacaaacggaatgcacccaaactaaaccaaaaatctctgaggtccagggagttgaatgacttgtccaaagtcacatgatccttagaagctgggtcagaaaaaagccttttgatctctgacactggrcctgggaattttcaattacaccaccctcagcccatattctgaggctcaatgcaaacctttgttctttctcctcttattgggaaacaaacaacagcaaaaactgtacctctgagtcattcattgagccagttgagttcatatttatctccagagcctggctgctttgtgacctttcctgtattccattttttaggcacaagaaggaaagcagtcctccccagatccactggttcacataattgagaagtctcttatttgtattcctgtcaatgtcaattgaatgcaggaaagcctgtgtttaggataataactggtctgaagtt

SEQ ID NO: 236208 - DNA, 564 bp, Homo sapiens
attgctgatattggccaccaataaatatttaagccagaaaggacttttagaaattcagtgctgtcatttcccaggtcaaaaaaaaaaaaaacaaacaagccattacaacaacaactacaaacggaatgcacccaaactaaaccaaaaatctctgaggtccagggagttgaatgacttgtccaaagtcacatgatccttagaagctgggtcagaaaaaagccttttgatctctgacactgggcctgggaattttcaattacaccaccctcagcccatattctgaggctcaatgcaaacctttgttctttctcctcttattgggaaacaaacaacagcaaaaactgtacctctgagtcattcattgagccagttgagttcatatttatctccagagcctggctgctttgtgacctttcctgtattccattttttaggcacaagaaggaaagcagtcctccccagatccactggttcrcataattgagaagtctcttatttgtattcctgtcaatgtcaattgaatgcaggaaagcctgtgtttaggataataactggtctgaagtt

SEQ ID NO: 236209 - DNA, 597 bp, Homo sapiens
  misc_feature (1)...(597): n = A,T,C or G
aaaatttaccgagaatcttttatacagggattgcgctagggactttaagtaaagcacagctccaatatttgtctggggggggttatagcccccatttttcagaggagacatgaacaatccaagagattaagaatttttatgcacaggaaatatctattttttacacaaatcatgggccatatgtttaaataannnnnnnnnnnnnnnnnnnnnnnnnnnnnnnnnnnnnnnnnnnnnnnnnnnnnnnnnnnnnnnnnnnnnnnnnnnnnnnnnnnnnnnnnnnnnnnnnnnntgaaagtttttaattgacatgtggtaagcatagaaccacagcttttgaggcctttacagccttactcttaggggaaaaaaccttgctttagaattcaaggtcattaaattccacattcccaaggatcctccaggcagcatgcattgactactatttctccatcatcacgggtaccagggaatattcaccttcattaggagacttttcacagagcaccctggattaccaaaggctggccttagaattacyaaaagttacatatcttttcttcattagaccatgagctctcaggatagagagtgaca

SEQ ID NO: 236210 - DNA, 558 bp, Homo sapiens
acaaaactatcttggatttgtgtaccctctgtctcatcacacctctaaacagtttttgttttgcatttttccccctagtttaataaatcttgcagcagctccaaaagataggtagggggcagtttttgcctgtatcttacagaatacaaataaatttatctaaggtcacagactcaaagacaagacttagagcagattgtctttttatccttttcccccctgttttgtccaattctgttcccaatttgtatattcatgaattaaaattccacattatttttgtgtagctattatgcagtgcttatacaatcatttcaggtttcaaaggatagtttgcataattaartaggaaaagagaagcatgaaataatatcactgtcattatgtaaactcacatatgcatatatatttttccaattttaatattcatacttaaagtgaaatagataaaaatatactatgattaaataagtttatttaaagattgtattattagatttttgaaaatatacctttaccaaaaagtctgagaatgcattaacataactttattatagt

SEQ ID NO: 236211 - DNA, 443 bp, Homo sapiens
aaaccctggccatagcaatcatataatagaaagaaataaaggacatccaaataggaagacaggaagtcaaattatccctgcttgcagatgatatgattctatacctagaagacaccatagttgtgccccaaaagcaccttcatctgataaacaacttcagcaaagtttcaggatacaaaatcaatgtacaaaaatcactaccattcttatacactgacagcagccaagtcaaaagccaaatcaagaatgcaattatattcacwaatgccacaaaaataataaaatacccaggaatatagctaactagggagctgaaagttttctaagagaagagctacaaaacactgctcagataaatcaaagacaacacaaacgaatggaaaaacatcctgtgctcatgaataggaagaatcaatatcgttaaaatggccataccacccaaa

SEQ ID NO: 236212 - DNA, 443 bp, Homo sapiens
aaaccctggccatagcaatcatataatagaaagaaataaaggacatccaaataggaagacaggaagtcaaattatccctgcttgcagatgatatgattctatacctagaagacaccatagttgtgccccaaaagcaccttcatctgataaacaacttcagcaaagtttcaggatacaaaatcaatgtacaaaaatcactaccattcttatacactgacagcagccaagtcaaaagccaaatcaagaatgcaattatattcactaatgccacaaaaataataaaataccmaggaatatagctaactagggagctgaaagttttctaagagaagagctacaaaacactgctcagataaatcaaagacaacacaaacgaatggaaaaacatcctgtgctcatgaataggaagaatcaatatcgttaaaatggccataccacccaaa

SEQ ID NO: 236213 - DNA, 443 bp, Homo sapiens
aaaccctggccatagcaatcatataatagaaagaaataaaggacatccaaataggaagacaggaagtcaaattatccctgcttgcagatgatatgattctatacctagaagacaccatagttgtgccccaaaagcaccttcatctgataaacaacttcagcaaagtttcaggatacaaaatcaatgtacaaaaatcactaccattcttatacactgacagcagccaagtcaaaagccaaatcaagaatgcaattatattcactaatgccacaaaaataataaaatacccaggaatatagctaactagggagctgaaagttttctaagagaagagctacaaaacactgstcagataaatcaaagacaacacaaacgaatggaaaaacatcctgtgctcatgaataggaagaatcaatatcgttaaaatggccataccacccaaa

SEQ ID NO: 236214 - DNA, 623 bp, Homo sapiens
aaagggaacatttatgcactgtaggtgggagtgtaaatttgttaaactattgtggaaagcagtgtggcagttactcaacagaactaccattcaacccagtagtcccattactgggtatgtactcagaggaatagaaattgttctatcataaagacacatgcacgcatgtgttcttcgcagtgctattcacaacwgcaaagacatcacatccacctaaatgtccatcaatgactaattggataaagaaaatgtagtacatatacaccatggaatactatacagccataaaaaagaacaagatcatgtcttctgcaggaacatggatgaagctgtaggccattatccttagcaaactaatagaggaagagaaaaccaaataccacatgttgttactgataagtgggagttaaataaagagaactcacaaacacaaagaagggaacaacaaacactgaggcccccttgagggtggaggctgagaggtgggagaggagcagaaaaaataagtattgggtatgaggcttagtacctggttgatgaaataatctgtacaaaaacctcagtgacatgagtttacctatataacaaacctgcataggtaccccgatcctaaaataaaagtt

SEQ ID NO: 236215 - DNA, 619 bp, Homo sapiens
  misc_feature (1)...(619): n = A,T,C or G
caggttcttggtatactcagattcctggttgaaacttggcctcgtatttaagccttctgtttcagctactttttcccaacaagggaaagaataggggtgggaagtgggctgcctcattactgacagaagaggaaataattccatgttcctctctcagtctctttgatacaggcaggggtgtcttcctcaatacttctgattggagtaggagttctggttcttcactaggccagcactgatacctccctgactggcaggaatttgatacagtttggatgtttacctcctccaaattgcatgttgaaatatgacctccaatgttggagatgggmctagtaggaggtgtttggtcatcagggtggatccctcatggattgcttggtgctgtccttgtagtaacgagtgcattctcactctgtttgcacgagagctggttgtttaaagagcctggtacctgccacctctctatcttacttgtcttcgtgccatgtgacgtgatatctccacatccctttctgccctgattgtaagcttcttgagaccaacanccaaccttctaccaggctacaacttcctgtaaagtctgcaaacacatgagccgaaaaaaccaatgtataaa

SEQ ID NO: 236216 - DNA, 600 bp, Homo sapiens
tttccttcttccctctggagcatgttgctcaaagaagccttgtttttttctgcacccttggttgtacatggtaagttttcagttattagtagatgccaataatctataatgagactgattaaaatatttattacaggtagaaaaaataaaaattgcagagtggaataaatgcaatgaaaaataaattaaccagcaatagtgttatgtggyaatatttgaacatgtttccaatgatcaatattaccttagcattccccttagtttactaaactttaaacagatttcttcctcaccataggccctttctttttcctagagcatttactttagaaaatttgcaattataaattctttctctgcctttttgagatgtaagtcttctcctagcttcttgccagttttataaccaaagtctttgttaaggacctgggagccatatctttgaaatataatcatcaagtaagatagtgccactatctcctgtctctgtgggaaagtacaaactaactccagtaacagccagttaggaaacatagcccggctaatcacatagaccaagctaaaatccaccctaatgtccaacagcactaacccactagc

SEQ ID NO: 236217 - DNA, 606 bp, Homo sapiens
cacgctaacagtagacaacaaatacttgtttcttgattcgataattcagtcacagctgggctgaagtttatctccgtactgtcaatgaaataaagggctggctaagcaaattaatactgtaaacatagagaatttggcctactttatgtgaaaatcaacacactattttaagcagcacttccgtgcctagttccattcaaacaatcgatgtgctgattgtgattattgtctgtttgttaaagcattaaccagattcactaagattaccacgttcaacagccccgttgttactctatgtgtataaccatatttctgctattacccttctcatatatttcaaaaataawaataaaaaaaaaacgagaccttgtacaactaactcaacatacacacaagcttttcccttcctttgaaacaacaatcacacttttggaagagtcagagcaattttgtttcgtcccccttatcagtgtggggacaaagggaactttccttacacccgctgaaggttcagcctctggaataaactagacaggagaaaagacgtacaaatttattacattcatattcacagagtctgacaaaataagagattcaaagaaaggc

SEQ ID NO: 236218 - DNA, 606 bp, Homo sapiens
cacgctaacagtagacaacaaatacttgtttcttgattcgataattcagtcacagctgggctgaagtttatctccgtactgtcaatgaaataaagggctggctaagcaaattaatactgtaaacatagagaatttggcctactttatgtgaaaatcaacacactattttaagcagcacttccgtgcctagttccattcaaacaatcgatgtgctgattgtgattattgtctgtttgttaaagcattaaccagattcactaagattaccacgttcaacagccccgttgttactctatgtgtataaccatatttctgctattacccttctcatatatttcaaaaataataataaawaaaaaacgagaccttgtacaactaactcaacatacacacaagcttttcccttcctttgaaacaacaatcacacttttggaagagtcagagcaattttgtttcgtcccccttatcagtgtggggacaaagggaactttccttacacccgctgaaggttcagcctctggaataaactagacaggagaaaagacgtacaaatttattacattcatattcacagagtctgacaaaataagagattcaaagaaaggc

SEQ ID NO: 236219 - DNA, 392 bp, Homo sapiens
ttaattggttcatgaatccacaggctctaattgaagcgtggtagggaaggcctcaggaaacttacaatcatggcagaaggtgaaggggaagcagatacctcttacctggcaggaaaaggaggaaagggtcagagggaggtgctacacgcttttaaataacaaccagatcttgtgagaactcacttgckgtcatgagaacagcaagggggaaatatgcccccatgatccaatcacctccctcaaggcccctcctccgacattggggattataatttgacatgagatttgggtgggacacagacacaaacaatttcaaactgacaataattcctaggaatccataatatgacagtggtcttcaagttaattagaggccaatggagtttaggcaa

SEQ ID NO: 236220 - DNA, 279 bp, Homo sapiens
tagtctgtcttcacttttgctgatgctttcttctatcagcctacctttcatcatttatcaccaaaatccccattattttcaagagtggctttagtttcarctactccaccctctttttcaaatgaaatcagttcattcagagaaagttttggagctctttcttacacacagcttctctccttgcaaaatttccaagacacagctccaaacctgtggacaagaataaaatgtctgcttctctcaaaacaacacttcagctttgtaagtagagaattgtgc

SEQ ID NO: 236221 - DNA, 621 bp, Homo sapiens
aagttttggagctctttcttacacacagcttctctccttgcaaaatttccaagacacagctccaaacctgtggacaagaataaaatgtctgcttctctcaaaacaacacttcagctttgtaagtagagaattgtgcagggtcagtggcttctaatgttcttggcttgccttcctcagcatagaatctccactttacaagcaagctggagtaagaccaataaaggctcagcattctaggcctgttgtacctaaggtagaacctccatgctgtgactagggactgagtacaggaagggattccctgacctctcagccacactttccaggaatctagtctcggcaatttgcagctgagaagtkatgtgaaatatgggggacatgtccgtcccagtgaaaggccacatcctttgactgagaattgaagatagagggaccattgcctttttggctatccccatctagagtggtgcaccatgctgcattagggaaggtggagggagggaccaggtcacagaccaagtgccacaaattcaccattctttctaaggtttagtagatttcttgagtaaatgtttcttcatggtatgcccataggataatttccagaaaatttaaattgtt

SEQ ID NO: 236222 - DNA, 565 bp, Homo sapiens
actaccttctcctctctaaaagcactgcatctagctgagcaaggcggtgtggctgtgttgactgaccatgtgccatatgtcagctgaggcccagggccactcccaggtccctgcattttataggcagctcagacgttgtaggtactgtaccaattttctatttctgctctatcaagtcacagcaactttagtagcttctaacaacacatatttatcttacaagtacgttggtcagaagtctgacatgggtctcactggactaaaatccrggtgtcagcagggctgcatttttttggaggctctataggaagatctgggtttttcgtaacttttccagcttctacaggttgcccacgtttgttgcctcctagtctccttcttctgtgttcaaagccatcaatagcaggttgagtccttctcacattgcatcactctgatcttcttttctacctccctcttccagttttagggacccttggggttacactgggccgacctagataatccaggataatcttactattttcaggtcatctgaattccatcagtgactttaatttcccct

SEQ ID NO: 236223 - DNA, 524 bp, Homo sapiens
tttaaaataaagctgccacctaagcatggtggctcacacctacagtcccaacaatttgggaggccaaggtggaaggaacacttgaggccaggcagcctgggccacacagggagactctcatgtctactcaggaggctgaagtgggaggatcacctgagcccaggaggctgaggctgtagtgagctatgattgcmccacctcactgcagcatggggcaacagagcaagaccttgccttaaaaaaaaaaaaaggtgtctctcagaagcaataaatgtaaggacaataaaattaagcatatttgctttaggttaaagtttgcaaatcagtagagtgagctttcagactctaatctttggacaggatgctgggctccctggctatgtgcagggctaccttgtgtcagcccagcacttttcagctcacttttactcttcacaaaactcctattagctccactttatagaaaaggaaatagaggctcagtaaatgagggcagagctaagaccagagcaggttttagaatt

SEQ ID NO: 236224 - DNA, 620 bp, Homo sapiens
  misc_feature (1)...(620): n = A,T,C or G
catcactgcactccaacttgggcaacagagcaagaccctgtctcaaaaaaaaagagttctggtaattgctcaggtcagaggagactgaagcctgaactagggcaaagggactagaagagaaactgttttgaggtgccatcaacacaaattggtaataactaaaacctctatttattaagtgactatagtaggcccaaactctgtactatcttcacaacagccaagtaagrttggtgttagtataccaattttgcaaataaaaaggcaaaacaagttgcagagaacttagataatttcccccaaagtcacacagctaaataaggggctcttctggattctgctgcagggctatctcattcccacctccaaggaatgaaggaaaaggagcgatgctaagtttccagctgatgtaattactcagattatttcctttgctgaaatatgtaaaggttttattggaatggtaatgaatgttgctttggacatgctgtgatagaatcctgtaatatagaaggtgattctgcatgaaacagaaactgactctggctaccttgctgaataggataattcttgttangctatcagggctcacacagtcacagttaggctggaggtacagg

SEQ ID NO: 236225 - DNA, 620 bp, Homo sapiens
  misc_feature (1)...(620): n = A,T,C or G
catcactgcactccaacttgggcaacagagcaagaccctgtctcaaaaaaaaagagttctggtaattgctcaggtcagaggagactgaagcctgaactagggcaaagggactagaagagaaactgttttgaggtgccatcaacacaaattggtaataactaaaacctctatttattaagtgactatagtaggcccaaactctgtactatcttcacaacagccaagtaagattggtgttagtataccaattttgcaaataaaaaggcaaaacaagttgcagagaacttagataatttcccccaaagtcacacagctaaataaggggctcttcyggattctgctgcagggctatctcattcccacctccaaggaatgaaggaaaaggagcgatgctaagtttccagctgatgtaattactcagattatttcctttgctgaaatatgtaaaggttttattggaatggtaatgaatgttgctttggacatgctgtgatagaatcctgtaatatagaaggtgattctgcatgaaacagaaactgactctggctaccttgctgaataggataattcttgttangctatcagggctcacacagtcacagttaggctggaggtacagg

SEQ ID NO: 236226 - DNA, 620 bp, Homo sapiens
  misc_feature (1)...(620): n = A,T,C or G
catcactgcactccaacttgggcaacagagcaagaccctgtctcaaaaaaaaagagttctggtaattgctcaggtcagaggagactgaagcctgaactagggcaaagggactagaagagaaactgttttgaggtgccatcaacacaaattggtaataactaaaacctctatttattaagtgactatagtaggcccaaactctgtactatcttcacaacagccaagtaagattggtgttagtataccaattttgcaaataaaaaggcaaaacaagttgcagagaacttagataatttcccccaaagtcacacagctaaataaggggctcttctggattctrctgcagggctatctcattcccacctccaaggaatgaaggaaaaggagcgatgctaagtttccagctgatgtaattactcagattatttcctttgctgaaatatgtaaaggttttattggaatggtaatgaatgttgctttggacatgctgtgatagaatcctgtaatatagaaggtgattctgcatgaaacagaaactgactctggctaccttgctgaataggataattcttgttangctatcagggctcacacagtcacagttaggctggaggtacagg

SEQ ID NO: 236227 - DNA, 620 bp, Homo sapiens
  misc_feature (1)...(620): n = A,T,C or G
catcactgcactccaacttgggcaacagagcaagaccctgtctcaaaaaaaaagagttctggtaattgctcaggtcagaggagactgaagcctgaactagggcaaagggactagaagagaaactgttttgaggtgccatcaacacaaattggtaataactaaaacctctatttattaagtgactatagtaggcccaaactctgtactatcttcacaacagccaagtaagattggtgttagtataccaattttgcaaataaaaaggcaaaacaagttgcagagaacttagataatttcccccaaagtcacacagctaaataaggggctcttctggattctgctgcagggctatctcattcccacctccaaggaatgaaggaaaaggagcgatgctaagtttccagctgatgtaattactcagattatttcctttgctgaaatatgtaaaggttttattggaatggtaatgaatgttgctttggacatgctgtgatagaatcctgtaatatagaaggtgwttctgcatgaaacagaaactgactctggctaccttgctgaataggataattcttgttangctatcagggctcacacagtcacagttaggctggaggtacagg

SEQ ID NO: 236228 - DNA, 525 bp, Homo sapiens
aattacagaaacggtggtttagcagtgaagtaaccaccaaagactcttggcactccaatcctctgccttcttcaggcgataggattaagaatgggatcctaggatgcttacatgcaatgatgaacccgaaaacacttgcaaagtgctacgcaaatattgatcacgaagaaggaagtcctcttcccgcctggagactgtgtggggtatggcgsggtggtggggagaatgtggtgtcttgctccaccctcctggcgaggggagggcctggcctggaccgcagaggaatcgagtgactgcccctaaaatctcctagaaccgatcccgcggccccgcccctcccgcggccccgcccctcccgcggcccgtcagcctctgccgcggagctgcgtccgccactcatgtttctccgagcaggcctggccgcgctctccccgcttcttcgcagtcttcggccctctcctgtcgccgccatgagcactggcaccttcgtcgtgtcgcagccgctcaattaccgcggcggggccc

SEQ ID NO: 236229 - DNA, 538 bp, Homo sapiens
tttgtgtcacctccctgtgaaggctttcttggctaccagtgggcaggtaagtggctttctctctatttcttataacaaattgtatttccctatkgtggtacttaccacattagaattactgatttgcttgtctctcttctccaataaattgtaaggacttacaagtaaggactgtgcttcattcattgttcaactctccttcctctgccctccctctatcacaatacatagcacatggaaggtacttaattttttttttttttttttgagatggagtttcgctcttgttgcccaggctggagtacagctgcacaatcttggttcaccacaacctccacctcccaggttcaagcgattctcccacctcagcctcctgggtaactgagattacaggcatgcgccaccaggcccagctaattttttttgtatttttagtagagacgggtttctccatgttggccaggctggtctcgaactctcaacctcaggtgatccacctgcctcagcctcccaaagtgctgtgattacaggtgtgagc

SEQ ID NO: 236230 - DNA, 613 bp, Homo sapiens
gtttgtttatatgttcaaattcatcaaattgtatacattaaatgtatgcaggtctttatatgtcagtatctcaataaaactttaaaaaaggatgaaagagtgctcattggttttttcctcctctacaacccaggttctgaattaattttaaatctgttaacgtttaccaaattgcaaactttcattgccttrtttaaaactgaagctccagtcactgttatgtctggggatctcacaaaatgtaaccaaagtaacttccatagtattaagagatttagtgaaccaaaatagaggataaaatggtctgcctcaatttaaccatgcaaacaatttccttgtttaaattttcccatggtcatagcacccattaccttaaaaaaatgggcaggaaccttctgatccaatgaataatacgttaaaacaaaattatatctttgatgtttatataatggattttttttttaaaaagtgaccaatagacattattttcttctgcctccacagttaaaataggagtttttatgagttaatgcagtcatatataatttaaaacgggtcttcaaagactgaaatctatatacaagacctatttaatagaagcagtgataatctc

SEQ ID NO: 236231 - DNA, 577 bp, Homo sapiens
aacaataacggagctgtcctctatctgtctattccaaacatacaatgcaatgcctatatcaacttacagattaccgttactcttggtcgctcacctctgtcagctatcaacaaaactgattctacttgaccctacattccttaatgtcctctgcacatccaagttctttgttcccctggaatgtaaactttcctttaaattattctgttgccttatgccatattatattgtattatattgcattgtactatattattattggtgcttccaaattaccaaaatgataatagactcagaaaaattaatttttgttaatgttcctggaaggaggacaggccagaacagttcctgacaattgataattgattaatttatgatraaatatataaataaataagagaactggcctctaatatttctttactgcttctctgataaaagataggcattttaaacataatgatttgaatgtttagtgtctgccttggtaatttgccctgtaaaaatatgacatcctctctataatggtattctttatactgggagcacagagaactcaacattttcggcaatcttt

SEQ ID NO: 236232 - DNA, 505 bp, Homo sapiens
aaccatataacaatacactcacatttcactttcttatgttttaaaaaatgatctaagaaacagacatgaaattccagctytgttaattaagtggaaataagatttacaaaacaattgcttgtagccttttctgatgtcacgaggtctaactctacttagcagaagactggggcataagaagatggcttaatgaatacttattctctattccctataaccactctttactctgtgtaccctcttttggacacatggaaacataatgcaaggaatgaacaaaagactcagtgatgtattttcttggctaatgacaaagaaaaaaaaaaccatgctgatcatttataacatgtaatgtactcatatcaaagattacataatcagagaagagtgggttacaaactacccaattgactcagcaggtatcaccaaaatatttgcaggttgcttggtaacccaattaaaagtctctatttaaatcccagatcattagtgactgaaagtcact

SEQ ID NO: 236233 - DNA, 505 bp, Homo sapiens
aaccatataacaatacactcacatttcactttcttatgttttaaaaaatgatctaagaaacagacatgaaattccagctttgttaattaagtggaaataagatttacaaaacaattgcttgtagccttttctgatgtcacgaggtctaactctacttagcagaagactggggcataagaagatggcttaatgaatacttattctctattccctataaccactctttactctgtgtaccctcttttggacacatggaaacataatgcaaggaatgaacaaaagactcagtgatgtmttttcttggctaatgacaaagaaaaaaaaaaccatgctgatcatttataacatgtaatgtactcatatcaaagattacataatcagagaagagtgggttacaaactacccaattgactcagcaggtatcaccaaaatatttgcaggttgcttggtaacccaattaaaagtctctatttaaatcccagatcattagtgactgaaagtcact

SEQ ID NO: 236234 - DNA, 505 bp, Homo sapiens
aaccatataacaatacactcacatttcactttcttatgttttaaaaaatgatctaagaaacagacatgaaattccagctttgttaattaagtggaaataagatttacaaaacaattgcttgtagccttttctgatgtcacgaggtctaactctacttagcagaagactggggcataagaagatggcttaatgaatacttattctctattccctataaccactctttactctgtgtaccctcttttggacacatggaaacataatgcaaggaatgaacaaaagactcagtgatgtattttcttggctaatgacaaagaaaaaaaaaaccatgctgatcatttataacatgtaatgtactcatatcaaagattacataatcagagaagagtgggttacaaactacccaattgactcagcaggtatcaccaaaatatttgcaggttgcttggtaacccaattaaaagtctctatttaaatyccagatcattagtgactgaaagtcact

SEQ ID NO: 236235 - DNA, 505 bp, Homo sapiens
gtggagtttttatttacctagggccaaagtccttcagtattacatccctgagggtacttattaamcttcttctcttgtcctgcatgaataagcagttatagacaacagagggtaagcctcagaaacctgtaacatcccataaatcctcttcaagaagtagcagatccctgaagagacaagtgattacctcagcctcctaattttgtttctgaaaatcctagccatttcttctcagtctcctttgttgcctccctttcgtctgttgggtctatgtaaccacatttcactatgggctcagtatgcactggattttagatttgaatgtgaagcaaagaacactatactttggatcccatgtgtgtgggtggctggctaacaataatctcaataaaatgtcctcctccaccttttgtagtttttatggaaattaagggcttgtactttgaaaatatgattctagctacctgatttgaaaaaggcttatgatctatgctactaaatatca

SEQ ID NO: 236236 - DNA, 605 bp, Homo sapiens
acaacattgtattgtacaacccatgaacatggaattctctccatttatttagttctttgatttattttctygacatttggatagatcttgtacatattttgttagctttatacctgcaagctttattttgggggtgctagtgtagatgtattgtgttttacatttcaaattccacttgttcactgctggcatacaggaagacaagtgacttttgtctattaaccatgtatcctgcaaacttgctttaatcccttattagttacaagagtttttttaattgattcttttggataccctacatagatgttcctgtaatctgcaaagaaagatagttttatttatttcttctcaatctgtacacattttatatttatttttcttgtcttattacattagataggacttctaatataatgctgaaaaggagtgctgaaaggagacatctttgtgtttttttttacctttttggaaatgttgctgaccattatgtatgatattagttgtaaattttttgtagctattctttatcaagttgagaacatttccttcttagtttactgagagttttttttttattacaaatgtatgttgaattttgtcaaatg

SEQ ID NO: 236237 - DNA, 482 bp, Homo sapiens
aagaagagagtattctagcatgcttcaaaatgattcattttcccctcactttgctgaaagcacaaagaaatttttatccaatatttactgggtcaagttcttagagataaaagacacaaaagtatggagtctcccttatgcttaggtccttctggagctgtaaactctgacttgtccacgctgattytccagcaattcatcaattacagtttaggtttttctaccctggcactagttcctgcagtggtttccacttgtgagtctctgtttagataagccatgactcccctttctgtatttgtctgtgtgtctctctaatcttggagccactagtttgcctggatcttcacctcttttatggatctaaaaagaattgttgacttttcagtttgttcagctttttacctattgttacgatggagtggtggcttctaagctccttatatgtgggactgggagttggaagtctattaagtttagag

SEQ ID NO: 236238 - DNA, 621 bp, Homo sapiens
tgtggtaaacaagagtctagggctctatggactctcacttttcatcatagttgttatagcactcctgacctcagcctagaattgtgagaatacagggctgctcccaaacaagtgaggctgagttattttgtttacttgacacttttgatagaagagagaggtttcattctaaaggactcattcctgtagaaatttgatttacagacataccccagatatattgtaagtkcaggtccagaccaccacaataaagtgaatatcacaataaagtgactgacacaaaatttttggtttcccaatgcatataaaagttatttttacaccacgctgtagtctactaggtatacaatgacattacatattaaaaaatacatatcttaatttaaaaatcctttattactaagaaatgctaacaatcctctgagccttcagctaattataatctttttgctggtggagggtctttcttcaatgttgatggctcctgggtaatctgggtgatagatactcaaggttgggtggttgtggcaatttctgaaaataaggcaacagtgaagcttgtcacattaattgacccttcctttcatgaagattctctgtgcatgtgatacttttcaatag

SEQ ID NO: 236239 - DNA, 621 bp, Homo sapiens
tgtggtaaacaagagtctagggctctatggactctcacttttcatcatagttgttatagcactcctgacctcagcctagaattgtgagaatacagggctgctcccaaacaagtgaggctgagttattttgtttacttgacacttttgatagaagagagaggtttcattctaaaggactcattcctgtagaaatttgatttacagacataccccagatatattgtaagtgcaggtccagaccaccacaataaagtgaatatcacaataaagtgactgacacaaaatttttggtttcccaatgcatataaaagttatttttacaccacgctgtagtctactaggtatacaatgacattacatattaaaaaatacatatcttaatttaaaaatcctttattactaagaaatgctaacaatcmtctgagccttcagctaattataatctttttgctggtggagggtctttcttcaatgttgatggctcctgggtaatctgggtgatagatactcaaggttgggtggttgtggcaatttctgaaaataaggcaacagtgaagcttgtcacattaattgacccttcctttcatgaagattctctgtgcatgtgatacttttcaatag

SEQ ID NO: 236240 - DNA, 431 bp, Homo sapiens
aagcttgtcacattaattgacccttcctttcatgaagattctctgtgcatgtgatactkttcaatagcattttatcagcactaaaacttctttcaaaattggaggcaattttctcaaaacctgccactgctttaccaactgagtttatgtaatagtctaaattctttgttgtcacttcaacaacatacacagcattttcaccaggagcagattccatctcaagaaacactttcattgctcatccataagaagtaacttgtcatccagtcaagttttatcatgagattgcagcaattcagtcatttcttccagctccacttctaattctagttctcttgctgtttccaccacaactacagtgacgtcctccactaagtcattcatagagattgaaattaacttcttccaaattctggttaatgttgatattt

SEQ ID NO: 236241 - DNA, 431 bp, Homo sapiens
aagcttgtcacattaattgacccttcctttcatgaagattctctgtgcatgtgatacttttcaatagcattttatcagcactaaaacttctttcaaaattggaggcaattttctcaaaacctgccactgctttaccaactgagtttatgtaatagtctaaattctttgttgtcacttcaacaacatacacagcattttcaccaggagcagattccatctcaagaaacactttcattgctcatccataagaagyaacttgtcatccagtcaagttttatcatgagattgcagcaattcagtcatttcttccagctccacttctaattctagttctcttgctgtttccaccacaactacagtgacgtcctccactaagtcattcatagagattgaaattaacttcttccaaattctggttaatgttgatattt

SEQ ID NO: 236242 - DNA, 583 bp, Homo sapiens
aattgacccttcctttcatgaagattctctgtgcatgtgatacttttcaatagcattttatcagcactaaaacttctttcaaaattggaggcaattttctcaaaacctgccactgctttaccaactgagtttatgtaatagtctaaattctttgttgtcacttcaacaacatacacagcattttcaccaggagcagattccatctcaagaaacactttcattgctcatccataagaagtaacttgtcatccagtcaagttttatcatgagattgcagcaattcagtcatttcttccagctccacttctaattctagttctcttgctgtttccaccacaactacagtgacgtcctccactaagtcattcatagagattgaaattaacttcttccaaattctggttaatgttgatattttgacctctgcccatgagtcttaaatgttcttaatggcatcaagaatcataaattttttttccagaatattttcaattggctttgcccaggtacattagagraatcactaactatgacagctgtaccattacaaagtgtatttcctaaagaataagatttgaaattc

SEQ ID NO: 236243 - DNA, 583 bp, Homo sapiens
aattgacccttcctttcatgaagattctctgtgcatgtgatacttttcaatagcattttatcagcactaaaacttctttcaaaattggaggcaattttctcaaaacctgccactgctttaccaactgagtttatgtaatagtctaaattctttgttgtcacttcaacaacatacacagcattttcaccaggagcagattccatctcaagaaacactttcattgctcatccataagaagtaacttgtcatccagtcaagttttatcatgagattgcagcaattcagtcatttcttccagctccacttctaattctagttctcttgctgtttccaccacaactacagtgacgtcctccactaagtcattcatagagattgaaattaacttcttccaaattctggttaatgttgatattttgacctctgcccatgagtcttaaatgttcttaatggcatcaagaatcataaattttttttccagaatattttcaattggctttgcccaggtacattagagaaatcactaactatgacagctgtaccattrcaaagtgtatttcctaaagaataagatttgaaattc

SEQ ID NO: 236244 - DNA, 583 bp, Homo sapiens
aattgacccttcctttcatgaagattctctgtgcatgtgatacttttcaatagcattttatcagcactaaaacttctttcaaaattggaggcaattttctcaaaacctgccactgctttaccaactgagtttatgtaatagtctaaattctttgttgtcacttcaacaacatacacagcattttcaccaggagcagattccatctcaagaaacactttcattgctcatccataagaagtaacttgtcatccagtcaagttttatcatgagattgcagcaattcagtcatttcttccagctccacttctaattctagttctcttgctgtttccaccacaactacagtgacgtcctccactaagtcattcatagagattgaaattaacttcttccaaattctggttaatgttgatattttgacctctgcccatgagtcttaaatgttcttaatggcatcaagaatcataaattttttttccagaatattttcaattggctttgcccaggtacattagagaaatcactaactatgacagctgtaccattacaaagtgtatttcytaaagaataagatttgaaattc

SEQ ID NO: 236245 - DNA, 608 bp, Homo sapiens
cttgtggagcacttacataaaaaccagtttcagtcagaaattgatcataagcatatgttgtgcaaagaatataatatccaatttggtgagaagaacaaatgaacatataagcttgaattaaaaataaatataaaatttaaaamgtaagttacatttggaacttttggtccaagaataaatgtctccatgaaagatatagaaaggaggttgattttttttttgaaacattgggatttatttatctttctcttctaaagatatatagtttctttttagcacaacagtcaagacagcaccttgggctctcagagatggtaaattctactctcagttgctccattaactcaatatatgaccttggaagtttctctaaatcccttggtgcctcagtttccttttctatcaaatacatatgtctgaaataactaaatcacttcacactgcctttaaggaaaaaataaaacaggaaaagagaagagaataaaatatctgagatcaaagaaagttggcatctaaatgccacatatcaattgaattgtaacatgtatgaaacttaaatgggagtaaataacagtaacaaaaatgagttgaattttaatatgtattaa

SEQ ID NO: 236246 - DNA, 608 bp, Homo sapiens
cttgtggagcacttacataaaaaccagtttcagtcagaaattgatcataagcatatgttgtgcaaagaatataatatccaatttggtgagaagaacaaatgaacatataagcttgaattaaaaataaatataaaatttaaaaagtaagttacatttggaamttttggtccaagaataaatgtctccatgaaagatatagaaaggaggttgattttttttttgaaacattgggatttatttatctttctcttctaaagatatatagtttctttttagcacaacagtcaagacagcaccttgggctctcagagatggtaaattctactctcagttgctccattaactcaatatatgaccttggaagtttctctaaatcccttggtgcctcagtttccttttctatcaaatacatatgtctgaaataactaaatcacttcacactgcctttaaggaaaaaataaaacaggaaaagagaagagaataaaatatctgagatcaaagaaagttggcatctaaatgccacatatcaattgaattgtaacatgtatgaaacttaaatgggagtaaataacagtaacaaaaatgagttgaattttaatatgtattaa

SEQ ID NO: 236247 - DNA, 608 bp, Homo sapiens
cttgtggagcacttacataaaaaccagtttcagtcagaaattgatcataagcatatgttgtgcaaagaatataatatccaatttggtgagaagaacaaatgaacatataagcttgaattaaaaataaatataaaatttaaaaagtaagttacatttggaacttttggtccaagaataaatgtctccatgaaagatatagaaaggaggttgattttttttttgaaacattgggatttatttatctttctcttctaaagatatatagtttctttttagcacaacagtcaagacagcaccttgggctctcagagrtggtaaattctactctcagttgctccattaactcaatatatgaccttggaagtttctctaaatcccttggtgcctcagtttccttttctatcaaatacatatgtctgaaataactaaatcacttcacactgcctttaaggaaaaaataaaacaggaaaagagaagagaataaaatatctgagatcaaagaaagttggcatctaaatgccacatatcaattgaattgtaacatgtatgaaacttaaatgggagtaaataacagtaacaaaaatgagttgaattttaatatgtattaa

SEQ ID NO: 236248 - DNA, 545 bp, Homo sapiens
cagattgcagcggattgaagactaaagagcaggattcacatagaaaatatggcaatatttcaaatcatcaaaatgacaatatggctgagtaggygttgtataatgaataaagaacttcataattaaatgcttattcacaacttttagtctgaacatcttttgctgtaggagatcttgccaaattgattcccttcgtacttcccagtccaaatctaaattagtcactgctattacatatatgttaccttatcatttttaaattgtagtctgtatcatagttacttatacttctgcagttacttaattttctctctcacgaggcagtaagcaatgtgagaacaaggatcatatttggtttattccattatctatggttagaacatagtggacatttaatatgcattaaataaaactaaaattcattcaacaatatgtcattaaaatctttacatgtcaaatatatcattttactgactggattttatgtatacatataatttacaccagcctttcctactataaattatactatctggaattgttta

SEQ ID NO: 236249 - DNA, 545 bp, Homo sapiens
cagattgcagcggattgaagactaaagagcaggattcacatagaaaatatggcaatatttcaaatcatcaaaatgacaatatggctgagtaggtgttgtataatgaataaagaacttcataattaaatgcttattcrcaacttttagtctgaacatcttttgctgtaggagatcttgccaaattgattcccttcgtacttcccagtccaaatctaaattagtcactgctattacatatatgttaccttatcatttttaaattgtagtctgtatcatagttacttatacttctgcagttacttaattttctctctcacgaggcagtaagcaatgtgagaacaaggatcatatttggtttattccattatctatggttagaacatagtggacatttaatatgcattaaataaaactaaaattcattcaacaatatgtcattaaaatctttacatgtcaaatatatcattttactgactggattttatgtatacatataatttacaccagcctttcctactataaattatactatctggaattgttta

SEQ ID NO: 236250 - DNA, 545 bp, Homo sapiens
cagattgcagcggattgaagactaaagagcaggattcacatagaaaatatggcaatatttcaaatcatcaaaatgacaatatggctgagtaggtgttgtataatgaataaagaacttcataattaaatgcttattcacaacttttagtctgaacatcttttgctgtaggagatcttgccaaattgattcccttcgtacttcccagtccaaatctaaattagtcactgctattacatatatgttaccttatcatttttaaattgtagtctgtatcatagttacttatacttctgcagttacttaattttctctctcacgaggcagtaagcaatgtgagaacaaggatcatatttggtttattccattatctatggttagaacatagtggacatttaatatgcattaaataaaactaaaattcattcaacaatatgtcattaaaatctttacatgtcaaatatatcattttactgactggattttatgtatacatrtaatttacaccagcctttcctactataaattatactatctggaattgttta

SEQ ID NO: 236251 - DNA, 544 bp, Homo sapiens
aatcatatggcacatattcagcagaacatggtgtcacaggaattcatccatgtagttgtatgtatcagtagttgatgcctttttattgctgcatagtatctttccaatgaaacatgttattcttttcaaagaataaaaaaattctttagaaacaattgcttatccattcacaagatgataaatatttaggttatcatcaggtgcttgagttttctattgctattttaacaaataaacacaaacttgatgggatacaatgacacaaatttatcatcttatagctctggagataaaaagtccaaaataagtttcatggtactaaaatcaagatgtggcaggactccatttcttctggatgtttagaggcagtgttttctttctttttccagcttctagaggttcccacattccttggctcctaggctcctttcatcttcaaagccaacacatctttctcatagcttcttacctctgasttgacaatgtctcttttttgcttgtaggtagccttgtgattacattgggcttacccagatccagatca

SEQ ID NO: 236252 - DNA, 541 bp, Homo sapiens
attaggcctttccaggcaaagaggtggaaatctttgtggggccatttttctgcctcctacacaaggtaaaggatattatgagtgaagctgtggtgagcatgcatgaacaagtctcttgcgaacataggtttttatttcatttagtggtggacgtgctgagctggacagtaaatatgtttagctttatgataaactgccaaatagttttccaaaatggttgctccatgttacatgctcactaacactayttgacatttcattgactccttatctttttcaatactcaatattgtcaaactttcaaattttagccatttagtgggtaaggagtagtgtctcaactgtggttttaatttgtattttcttgatgactaatatgttgagcatcttttcccatgataactgattacacatatatatttttgtgtgaagtatgtgttcaacatttatgcccattttcattgttttttgttgtcttgttaaactgtaagaatgtgtgtgtgtgtgtgtgtgtgtgtgtgtgtgtgtaacaagtgttttt

SEQ ID NO: 236253 - DNA, 500 bp, Homo sapiens
gatggttttataaggagctcttccccctttgctcttcactattctccttcttgctgccttgtgaagaaggtacctgtttgctctttgccttctgctgtgattgtaagtttcctgaggcctccccagccatgctgaactgtgagycaattaaacttctttcctttataaattacccagtcttgggcagttctttatggcagtatgaaaacagactaatacaagcacctcaaaaatcttcccatggactctctctcaattggctttatctcatttcttcacagatttgagacaaatgcctaaagtaataggggctacatgttttctcattcacaaccattggggagaaatataaagctttcctattctctcttaaaagcaaggaagaactttcccaagggcctgtcataaacctcaaggcatggcttgttgtccagaattggtcacatgaccatgactaaagcaatctctggcaagttggttgggagtatcccaggaccaac

SEQ ID NO: 236254 - DNA, 500 bp, Homo sapiens
gatggttttataaggagctcttccccctttgctcttcactattctccttcttgctgccttgtgaagaaggtacctgtttgctctttgccttctgctgtgattgtaagtttcctgaggcctccccagccatgctgaactgtgagccaattaaacttctttcctttataaattacccagtcttgggcagttctttatggcagtatgaaaacrgactaatacaagcacctcaaaaatcttcccatggactctctctcaattggctttatctcatttcttcacagatttgagacaaatgcctaaagtaataggggctacatgttttctcattcacaaccattggggagaaatataaagctttcctattctctcttaaaagcaaggaagaactttcccaagggcctgtcataaacctcaaggcatggcttgttgtccagaattggtcacatgaccatgactaaagcaatctctggcaagttggttgggagtatcccaggaccaac

SEQ ID NO: 236255 - DNA, 500 bp, Homo sapiens
gatggttttataaggagctcttccccctttgctcttcactattctccttcttgctgccttgtgaagaaggtacctgtttgctctttgccttctgctgtgattgtaagtttcctgaggcctccccagccatgctgaactgtgagccaattaaacttctttcctttataaattacccagtcttgggcagttctttatggcagtatgaaaacagactaatacwagcacctcaaaaatcttcccatggactctctctcaattggctttatctcatttcttcacagatttgagacaaatgcctaaagtaataggggctacatgttttctcattcacaaccattggggagaaatataaagctttcctattctctcttaaaagcaaggaagaactttcccaagggcctgtcataaacctcaaggcatggcttgttgtccagaattggtcacatgaccatgactaaagcaatctctggcaagttggttgggagtatcccaggaccaac

SEQ ID NO: 236256 - DNA, 500 bp, Homo sapiens
gatggttttataaggagctcttccccctttgctcttcactattctccttcttgctgccttgtgaagaaggtacctgtttgctctttgccttctgctgtgattgtaagtttcctgaggcctccccagccatgctgaactgtgagccaattaaacttctttcctttataaattacccagtcttgggcagttctttatggcagtatgaaaacagactaatacaagcacctcaaaaatcttcccatggactctctctcaattggctttatctcatttcttcacagatttgagacaaatgccyaaagtaataggggctacatgttttctcattcacaaccattggggagaaatataaagctttcctattctctcttaaaagcaaggaagaactttcccaagggcctgtcataaacctcaaggcatggcttgttgtccagaattggtcacatgaccatgactaaagcaatctctggcaagttggttgggagtatcccaggaccaac

SEQ ID NO: 236257 - DNA, 504 bp, Homo sapiens
tttagtacatttacatggttggggttattttcctaaaagttgcaagttggtctgctagagaaatctcataaaaatggtctaaagatgtttccttaaagagaagggcttttctttaaatgattttcatccagttatttattggaagaatagaattgaatactaactaaatgcagagttgcatttaattcatgacagccctctcgttcagcaaaacatatttttaaaaaatcactataccagaaagtcactgaggttctaatcttcctgaatcttttatagctgaaatggaatcattgaacttccatttgggcttcacttatgccatcatgtgaaaggcgatgaaaaatatcatgatgtctattgcttaaaaattgatactttatgctagcttaaaactcatatttggagttatcwgtcaaagtttccctgaagctcttaaatgcaaataatactagtcccagaagaaaaaaactggaaagctagtttgtgcccaaactacaaggt

SEQ ID NO: 236258 - DNA, 547 bp, Homo sapiens
agctagtttgtgcccaaactacaaggtatctcttggattaaagatctcaaaactcctggtttattttcctagtttctcactacatagatgatagaataacagatttattcaaaacttcatacagactatgtatgcttgatcaagtctcataaatggcaaggactttagttgctttaactctcaaatgttagagcaacttctgtcttaatacatttctaaaatatatggcagattatctatttactactttgaattgcttgctattttrtatcccttatgaattataatataactcttctcagcatctgatatattgcccagcacatagtaggcactcagcatatgtttgctattgctgatggcattctgtagcttactcttaccttgatatcagagagcagtgttatagttgacagacattagcctgccttatctaaaataaatgctttctcttgcctttactgataacatgctgttaacagcatgctgtgttacctaatataatacgtgaagtttaatcaccaaaagtagctacttcagaatacac

SEQ ID NO: 236259 - DNA, 547 bp, Homo sapiens
agctagtttgtgcccaaactacaaggtatctcttggattaaagatctcaaaactcctggtttattttcctagtttctcactacatagatgatagaataacagatttattcaaaacttcatacagactatgtatgcttgatcaagtctcataaatggcaaggactttagttgctttaactctcaaatgttagagcaacttctgtcttaatacatttctaaaatatatggcagattatctatttactactttgaattgcttgctattttgtatcccttatgaattataatataactcttctcagcatctgatatattgcccagcacatagtaggcactcagcatatgtttgctattgctgatggcattctgtagcttactcttaccttgatatcagagagcagtgttatagttgacagacrttagcctgccttatctaaaataaatgctttctcttgcctttactgataacatgctgttaacagcatgctgtgttacctaatataatacgtgaagtttaatcaccaaaagtagctacttcagaatacac

SEQ ID NO: 236260 - DNA, 547 bp, Homo sapiens
agctagtttgtgcccaaactacaaggtatctcttggattaaagatctcaaaactcctggtttattttcctagtttctcactacatagatgatagaataacagatttattcaaaacttcatacagactatgtatgcttgatcaagtctcataaatggcaaggactttagttgctttaactctcaaatgttagagcaacttctgtcttaatacatttctaaaatatatggcagattatctatttactactttgaattgcttgctattttgtatcccttatgaattataatataactcttctcagcatctgatatattgcccagcacatagtaggcactcagcatatgtttgctattgctgatggcattctgtagcttactcttaccttgatatcagagagcagtgttatagttgacagacattagcctgcyttatctaaaataaatgctttctcttgcctttactgataacatgctgttaacagcatgctgtgttacctaatataatacgtgaagtttaatcaccaaaagtagctacttcagaatacac

SEQ ID NO: 236261 - DNA, 547 bp, Homo sapiens
agctagtttgtgcccaaactacaaggtatctcttggattaaagatctcaaaactcctggtttattttcctagtttctcactacatagatgatagaataacagatttattcaaaacttcatacagactatgtatgcttgatcaagtctcataaatggcaaggactttagttgctttaactctcaaatgttagagcaacttctgtcttaatacatttctaaaatatatggcagattatctatttactactttgaattgcttgctattttgtatcccttatgaattataatataactcttctcagcatctgatatattgcccagcacatagtaggcactcagcatatgtttgctattgctgatggcattctgtagcttactcttaccttgatatcagagagcagtgttatagttgacagacattagcctgccttatctaaaataaatgctttctcttgcctttactgataacatgctgttaacagcatgctgtgttacctaatataataygtgaagtttaatcaccaaaagtagctacttcagaatacac

SEQ ID NO: 236262 - DNA, 575 bp, Homo sapiens
gatgaagagcaaaatagcccccagcaattaagaagcatatttaaaagcactttagaccaaatgcacctcttgcaggatttattttttccttcattctctgtagagtattttccagattcagtcttataattgaaagaaaatttaatcctgcattaaccatgtaatcattttgcaaactaagttttgaaactactctttgttgaagtgggttagtccagaatttgtggattaaagctgtgagaccctatttaaaatcttgtagatttagcataccttacaaactctctactttcattcttaytgaagtcacttgaatactaattcatagcatttagcacctttcttctaaaagcatgaagtgttataagcatgctagaaaagacagtgaaaactatattacgaggtaaggaaaatgtattcctacttcctacttagcgactggataatatagaaacaaatccatagctattaactgggcttcttgacaatgaaataaataaaacaaatttccctaaagcctcgaggataacagtgtacagaattaggtgttttgtaactgcttttcattaagatag

SEQ ID NO: 236263 - DNA, 581 bp, Homo sapiens
  misc_feature (1)...(581): n = A,T,C or G
nnnnnnnnnnnnnnnnnnnnnnnnnnnnnnnnnngtgattgccaccaaaagtcataaygaatgttttgcatatcacttataatttcatatatatgtgtggtattccctagccaatattcagcttatcttggttaatctctttttgtgtcttttttaaagctcctaattgaaaatgtttttgtcaagatttgttaaagaaaaaagtattctatgaaacattatgtttattaaagaaaaatacatccagccaacattgttattttcatcctagcctgagtgaaaaatcacataagcatatcacttagagaatgatttttaaacagtctattattatttgaatgacttcactccaatccaaagcacactgggaactgtaaaatgttacagacgctatttcatcataaaggcagtgtgttatgggggaaatcattcttagctgtgtgggagaagtcatgactcccgacccagccactcattgaccaactatgtcgcaatgggaaaatcacttttaatctgatacttttcttacctgtaaaaaaagagaagagaattattctatatgctgggactaaagagaataa

SEQ ID NO: 236264 - DNA, 581 bp, Homo sapiens
  misc_feature (1)...(581): n = A,T,C or G
nnnnnnnnnnnnnnnnnnnnnnnnnnnnnnnnnngtgattgccaccaaaagtcataatgaatgttttgcatrtcacttataatttcatatatatgtgtggtattccctagccaatattcagcttatcttggttaatctctttttgtgtcttttttaaagctcctaattgaaaatgtttttgtcaagatttgttaaagaaaaaagtattctatgaaacattatgtttattaaagaaaaatacatccagccaacattgttattttcatcctagcctgagtgaaaaatcacataagcatatcacttagagaatgatttttaaacagtctattattatttgaatgacttcactccaatccaaagcacactgggaactgtaaaatgttacagacgctatttcatcataaaggcagtgtgttatgggggaaatcattcttagctgtgtgggagaagtcatgactcccgacccagccactcattgaccaactatgtcgcaatgggaaaatcacttttaatctgatacttttcttacctgtaaaaaaagagaagagaattattctatatgctgggactaaagagaataa

SEQ ID NO: 236265 - DNA, 581 bp, Homo sapiens
  misc_feature (1)...(581): n = A,T,C or G
nnnnnnnnnnnnnnnnnnnnnnnnnnnnnnnnnngtgattgccaccaaaagtcataatgaatgttttgcatatcacttataatttcatatatatgtgtggtattccctagccaatattcagcttatcttggttaatctctttttgtgtcttttttaaagctcctaattgaaaatgtttttgtcaagatttgttaaagaaaaaagtattctatgaaacattatgtttattaaagaaaaatacatccagccaacattgttattttcatcctagcctgagtgaaaaatcacataagcatatcacttagagaatgatttttaaacagtctattattatttgaatgacttcactccaatccaaagcacactgggaactgtaaaatgttacagacgctatttcatcataaaggcagtgtgttatgggggaaatcattcttagctgtgtgggagaagtcatgactcccgacccagccactcattgaccaactatgtcgcaatgggaaaatcacttwtaatctgatacttttcttacctgtaaaaaaagagaagagaattattctatatgctgggactaaagagaataa

SEQ ID NO: 236266 - DNA, 581 bp, Homo sapiens
  misc_feature (1)...(581): n = A,T,C or G
nnnnnnnnnnnnnnnnnnnnnnnnnnnnnnnnnngtgattgccaccaaaagtcataatgaatgttttgcatatcacttataatttcatatatatgtgtggtattccctagccaatattcagcttatcttggttaatctctttttgtgtcttttttaaagctcctaattgaaaatgtttttgtcaagatttgttaaagaaaaaagtattctatgaaacattatgtttattaaagaaaaatacatccagccaacattgttattttcatcctagcctgagtgaaaaatcacataagcatatcacttagagaatgatttttaaacagtctattattatttgaatgacttcactccaatccaaagcacactgggaactgtaaaatgttacagacgctatttcatcataaaggcagtgtgttatgggggaaatcattcttagctgtgtgggagaagtcatgactcccgacccagccactcattgaccaactatgtcgcaatgggaaaatcacttttaatctgatacttttcttayctgtaaaaaaagagaagagaattattctatatgctgggactaaagagaataa

SEQ ID NO: 236267 - DNA, 289 bp, Homo sapiens
tttttccctcaaagattattcaaaataaaatcacatcatcagttctttaccaccaggaagcggcataattacctcagactttcaaggaaacaggtatgcccagcaattggtttaatttaggcttagaaytgttttcttcatccaaattgctagttcattttctctatccttgatatactttttaatggaaaagaatctatttctactattgacttgtaagagtataattgaaaaataattagcaaggcttttacaaatgaatacagggaagagaaaaaaaaaatatata

SEQ ID NO: 236268 - DNA, 289 bp, Homo sapiens
tttttccctcaaagattattcaaaataaaatcacatcatcagttctttaccaccaggaagcggcataattacctcagactttcaaggaaacaggtatgcccagcaattggtttaatttaggcttagaactgttttcttcatccaaattgctagttcattttctctatccttgatatactttttaatggaaaagaatctatttctaytattgacttgtaagagtataattgaaaaataattagcaaggcttttacaaatgaatacagggaagagaaaaaaaaaatatata

SEQ ID NO: 236269 - DNA, 534 bp, Homo sapiens
tgtacagattatttcgtcacccaggtaataagcatagtgtctgataggtagtttttgttgttgtcgttgttttgttttgttttattttgttattgagatggaatctcacttygttgccaggctggaatgtagtggtgcgatctcggctcactgcaacctccgcctcccaggttcaagcgattctcctgcctcagcctcccgagcagctggtagtacaggtgtgtgctaccatgaccagctaatttttgtatttttagtagagatggggtttcaccatgttggccaggatgatctcgatctcttgaccttgtgatctgcctgccttggcctcccaaagtgctgggattacaggcgtgagccaccgcgcccagatgatacatagttttttttatctttaattttctcccaccttccaccctcagtaggccccagtaactgttgttctctcctttgggttcacatgtactcgtgtttagctcccacttacaagtgaaaacatgtagtatttggttttctttttttttttttattgta

SEQ ID NO: 236270 - DNA, 534 bp, Homo sapiens
tgtacagattatttcgtcacccaggtaataagcatagtgtctgataggtagtttttgttgttgtcgttgttttgttttgttttattttgttattgagatggaatctcactttgttgccaggctggaatgtagtggtgcgatctcggctcactgcaacctccgcctcccaggttcaagcgattctcctgcctcagcctcccgagcagctggtagtacaggtgtgtgctaccatgaccagctaatttttgtatttttagtagagatggggtttcaccatgttggccaggatgatctcgatctcttgaccttgtgatctgcctgccttggcctcccaaagtgctgggattacaggcgtgagccaccgcgcccagatgatacatagttttttttatctttaattttctcccaccttccaccctcagtaggccccagtaactgttgttcyctcctttgggttcacatgtactcgtgtttagctcccacttacaagtgaaaacatgtagtatttggttttctttttttttttttattgta

SEQ ID NO: 236271 - DNA, 592 bp, Homo sapiens
ccttgaggagccaaattgaggcctgatgaaggagactgtacatcatccagagagaatgaacttggagcaggatgtaaagactgcaggggagaaatcagggtttttctgctggaggaagaagcagagggtacatagacataaggtatccaaagaagcccactatagaagctgggacagattkcatacttattctcaattcttcactccttcctatgcagtagagcagagaaaatcgagtatacctgtgacttgctttgaccaatggaaagttagaggggacaagagcacaggctttaaacatgcccatatgggacttctgtgcctaccatgagaacatgccccataattgttaatgcagggagaatgaggagatgtggtgcagactcttagccaatcccaagagctgggttcaagggtagccaacactcatcctagagaagtgtcccctctgacctgcagacacatggccaagaaaaatcaatgcatgttgttgtaaaccattgcatttcaaggctgtttgtgatgcagcatcctggctaataaaccagccaggtctattctaacaattgtagctcagagtaaagaatgtggg

SEQ ID NO: 236272 - DNA, 597 bp, Homo sapiens
aattcagctgccaaaaataacattaaagaagtagttcatgtcaggtaagatgagaatgccccataaatactgattctgaacctctagcagccatacatatgttaattcattattccacaaatattttgtgcacatattctgtgccaarcactgtgctaggtccgaaggataccaaaattaatcattacaaactcagagtccaaagaaaaaggcagactcacaaataaacagctgtaaaaatgtgtgttgctctatttggaggtattacgtagacattagggagagagcatctgtattagtccattttcacactgctgataaagacatatccgagactgggcaatttacaaaagaaagaggtttattggactcacagtgccacatggctgaggaggcctcacaatcatggcagaaggtaaaaggcaaggagaagcaagtcacatcttaacatgaatagcggcaggcaaaaagagcttgtgcggggaacctccaccttataaagccatcagatcttgggagacttattcactatcacgataatagcacaggaaagtcctgcccccatgattcaattacctaccaccaggtccctcccac

SEQ ID NO: 236273 - DNA, 597 bp, Homo sapiens
aattcagctgccaaaaataacattaaagaagtagttcatgtcaggtaagatgagaatgccccataaatactgattctgaacctctagcagccatacatatgttaattcattattccacaaatattttgtgcacatattctgtgccaagcactgtgctaggtccgaaggataccaaaattaatcattacaaactcagagtccaaagaaaaaggcagactcacaaataaacagctgtaaaaatgtgtgttgctctatttggaggtattacgtagacattagggagagagcatctgtattagtccattttcacactgctgataaagacatatccgagactgggcaatttacaaaagaaagaggtttattggactcacagtgccacrtggctgaggaggcctcacaatcatggcagaaggtaaaaggcaaggagaagcaagtcacatcttaacatgaatagcggcaggcaaaaagagcttgtgcggggaacctccaccttataaagccatcagatcttgggagacttattcactatcacgataatagcacaggaaagtcctgcccccatgattcaattacctaccaccaggtccctcccac

SEQ ID NO: 236274 - DNA, 597 bp, Homo sapiens
aattcagctgccaaaaataacattaaagaagtagttcatgtcaggtaagatgagaatgccccataaatactgattctgaacctctagcagccatacatatgttaattcattattccacaaatattttgtgcacatattctgtgccaagcactgtgctaggtccgaaggataccaaaattaatcattacaaactcagagtccaaagaaaaaggcagactcacaaataaacagctgtaaaaatgtgtgttgctctatttggaggtattacgtagacattagggagagagcatctgtattagtccattttcacactgctgataaagacatatccgagactgggcaatttacaaaagaaagaggtttattggactcacagtgccacatggctgaggaggcctcacmatcatggcagaaggtaaaaggcaaggagaagcaagtcacatcttaacatgaatagcggcaggcaaaaagagcttgtgcggggaacctccaccttataaagccatcagatcttgggagacttattcactatcacgataatagcacaggaaagtcctgcccccatgattcaattacctaccaccaggtccctcccac

SEQ ID NO: 236275 - DNA, 509 bp, Homo sapiens
tttgaaataacttttgtagaaaccgtgtcttgctatgttgtctaagctggtctgaaactactggcctcgagcgatcttcctcccttggcctcccaaagtgctaggattacaggtgtaagccactgttcccaggtttgttctgacttttctatttttwaaaaaagaaaatcattaggccattcagcccagggagcttttaattagcaatcctggacaacaatagttaattcctcctcactgccatctgtgcatgctgccctcctgtccctggtgcctttacttgtagttaactattcgcatgtctgtctttatattgcatgcttctatagcatgagtcacatttcagatgctccctgaaggtctgctacattaacatgtgaataaataacataaaaagaagtgatgtattaatattattttttgaagtaagctacctgtttctccacttccagatttagagagcatagaaaaagcactttcagaatgataaaatagtacaaactctcccc

SEQ ID NO: 236276 - DNA, 421 bp, Homo sapiens
tgaaaatcattcatctatgaaaatccagttaatagctactcagaaaagtatctggcagaaagaaagacatagtaagtattgttttaaatgaaagaatgtgaattatatactaaaaattgtrttaccagtattattaatactgatattaattattaaacatagcataaacatatagaatattaaagataacagtttagaattcatctataacaatcttctatttttttcagatgaaaaatcttaaatcttcccagttcagatctctttctctctctaataaattaggggcagaggaaaaattacagtaaaaatgggataattgctttcctcactctaagccagatacaggataattccactcaaccatcattaaatgagaaaaccaaattttttccataatagcagtattattgaatattta

SEQ ID NO: 236277 - DNA, 616 bp, Homo sapiens
tggctttgcagggtacagcttctctcctggctgccttcgtgggctggcgttgagtgtctgtggcttttccaggtgcacagtgcaagccgtcagtggatctaccattctgagttctggagaatggtggtcctcttctcacaactccactaggcagtgccccagtagggactctgtgtcagggctcccacccaacatttcccttctgcactgcygtggcagaagttctccatgaggacattgcccctatagcaaactcctgcctgggcatccagatgtttccatatatcttctgaaatctaggcagaggttcccaaatctcaattcttgacttctgtgcacctgcaggctcaacaccacatggaagcttccaaggcttggggcttccaccctctgaagcaatggctcaagctgtaccttggccccttttagtcatggctggaacagctggaacataggacatcaaatccctagactgcacacagcggaaatacccttagcctggcccacaaaatcacattttccttctaggcctccaggcctgtaatgagaggggctgccatgaagacctctgacatgccttggagatattttccccattatcttgggggattaacat

SEQ ID NO: 236278 - DNA, 344 bp, Homo sapiens
tcataaaggatatattaaaaaataacataacctcacatctttccattcacactccttgaaagtaacttgcaagctttcctacctgttctccctagaacaatgtctccttgtattcaagaagacttgctacacttgacctcctatatagactattacttgagccaatctgagcaaacaaatttggactgcatacctttattttgccatccatagcatcttgtttttatacctctatcaacacatattagttaatatattatcatttgtttacccatttctcccttggartattattctataccaacccaaacagccacagttgtcacacaccaatgaatacactg

SEQ ID NO: 236279 - DNA, 634 bp, Homo sapiens
ctttcttttccttagtttggtgagctccttgagcagagtcaagccaaaaaaggatgtaagacagaagctggaatctgggattgaggttgcaatagaaattctccccacaggatttaaagttgcttcctcagctgcaggcagctgacagcagcttttttatctggaaaagattttgcctgatattttctcagactccggaaaatcattcmacttgtcagtgaagctgaaaagacaggctctttgatatgtagcagcagcttggaaatggttcctctcttctcagctctcagagtaggaggaaacttttcaacaaatatcacaaaaggtatttcaggacacaattatttcagaagtttaagacaaaaatgcttccaaggccaaagacattcttagaatctgaactgtctaggaaattgaagggcatcagaagcaatgggcactttttgctcacctgtcctactagtgtgaatgaggacatgcatgttagttggaaagaaagtatagtagatagcaaaaactcaatatgttttattaatatcttacatgccaattcaaatcaaatggcagtggtttcttagaggtcaccctggagaaaaatatctatacccttgcatggcagagggtgcttatgaac

SEQ ID NO: 236280 - DNA, 634 bp, Homo sapiens
tgggaacatttataaatataaggaatgcgacagtggggtcagaaatatttctttcagtgggccctaagcaccaagaatgactatcacaactgggaatatcaaatgggttaggatgcatttccttgtacatgtggtagactctaagcacatgtaatattcatatatartatgaatttgattcatactatatatgaatttactgaaactttgttaaatctggagctaaatacctttcctaatttcaacaattcttttaaaatatagccattattttaattatttaatcattttcttaagcttagaactcaaatcaaggattcagtgaaaaaatccacgtgcatgttattcataatttctcagaaaggaattcatttatttagttgctccttatgaggaagactatcatcctcatcattgtaactgttcttctatgaactcctcagagctcttttacatctctgctgatagatttaacttggaatacaataaaaataaaactcagaagcaaatcttctgttctgtctttacccagcttggaaggagtgaaagcataagtgaatgaaaaatgtatatttacatctgcaaaccaaataactgcttgccatttcctctgaagtgttaaatgaatattaat

SEQ ID NO: 236281 - DNA, 541 bp, Homo sapiens
agagcccgcccctccccattcccttcgcgtctccatcctcagacactcactcggcggacttgtctctgagagctctggtcccggcccccagtcttcgagtacttccagctacaaccccacaaaagcaagttctttagtttggcctgggcggggacttttagggagggagccaagccacagccccctccccactcaggctttgggaacgttctgacccactcccccacatwgataggttacagccctccagctcctgtggggtgccctgcctctccccactacccagccctcatccgggcaaggcttcccggaaagaaggctgggtggctcagggtgaacagagaggagtaaaaaggagctgggttagaggctcccttttccattttgtgccaccctatctcagtgccccgggagacacaatgggatgggctgagctctgccagcttcaggcagcgactcaccttcaacctcatccacattcccccttctccccaaaggaggtacatttatgcaaaccggcaaccaaaacatacacagagat

SEQ ID NO: 236282 - DNA, 340 bp, Homo sapiens
cacacacacacacacacacacaccccaaagccctgaagcttggtcagcatatctgaccaaggaaggaacggctccaaccaaagctgcctgggacctgagtggcccagattttytttgtttattcttcactttataaaaggcctagagtcaggtggggtgagggaagcaaggcttggagcactccagtgggccaactgacagatagattctccaacagactcacgaaagcaaaagaggcagggaagccaccacactggaagatccgaaaactagagacattcactggcaaactctgaccattcccctaccccttcctctcctcaagggggtcactggcgct

SEQ ID NO: 236283 - DNA, 610 bp, Homo sapiens
gctgaattgtatcgcatttaatggatataccacattttgtttattcatttatttgggttatgcacagttttggactattatgaataaggctgctataaacatttcttatacaagagaaatggacatatgtctttatttcttgggtaaatactcagcagtggaattgctgggttgagtagatgtatttttaactttatataaaattaccaaagaggttgtatcattttacwctcccaccagcaatatatgagcatttttttccttccttccttccctccctccctcctttcctccttccttccttccttccttcttcccttcctttttttttttttttttttttgacagtttcactctgctgtccaggctgtagtgcagtggcacaatcacagctcactgaagtctcaaactcctgactttaggtgatcctctcacctcagcctcccaagtagttggaattacaggagtgcatcaccatgcttggctggtttaaattttgtttgtttgtttgtttttggagagatggggtcccaccatgttacccaggttagtcttcaactcctgggcacaagcgatcctcctgccttagcctcccagagtgttgagatta

SEQ ID NO: 236284 - DNA, 556 bp, Homo sapiens
aggtgagagcctggggtcaaggaagagagttgggatggagatgccgagttgggcattatcagcctatggaccttgagactacgattactgaggggaaaagagaagagaagagggtcgaggagtgagccctggggaacaccaacactaagagctaggcagaaacgggagggcccacagaggagattaagaaggcaggccatagaggaaggaggaaaaccaggagaagatgaggatgtgagagtcaaggaacagtgagggctctgagagccccgcaagccaagccagggaaactcttgctgggtttagcagcaggtaggtggcagccttgccacagcggggtagtgggtctcagggacagtgctgatgtgcagaggaatgggaggtgaagatgtgtagatactcggtgtagataactcttttttttttttttttttttgagacagagtctcactcttgttgcccaggctgwagcacaatgtcacagtctcggctcactgcaacctccgcttcccgggttcaagcaagtctcctgtcttagcctcccaagtagctgaga

SEQ ID NO: 236285 - DNA, 556 bp, Homo sapiens
aggtgagagcctggggtcaaggaagagagttgggatggagatgccgagttgggcattatcagcctatggaccttgagactacgattactgaggggaaaagagaagagaagagggtcgaggagtgagccctggggaacaccaacactaagagctaggcagaaacgggagggcccacagaggagattaagaaggcaggccatagaggaaggaggaaaaccaggagaagatgaggatgtgagagtcaaggaacagtgagggctctgagagccccgcaagccaagccagggaaactcttgctgggtttagcagcaggtaggtggcagccttgccacagcggggtagtgggtctcagggacagtgctgatgtgcagaggaatgggaggtgaagatgtgtagatactcggtgtagataactcttttttttttttttttttttgagacagagtctcactcttgttgcccaggctgaagcacaatgkcacagtctcggctcactgcaacctccgcttcccgggttcaagcaagtctcctgtcttagcctcccaagtagctgaga

SEQ ID NO: 236286 - DNA, 512 bp, Homo sapiens
caggagagaggtctagtgaagttccttccggagctaccctgggaatctccctcactctgccaccaagactgcactgtggattgcccttgcctctcgtgcctttccagctgtggctcatgtggcttatggctcctaatctttagcattctggtgctccactccagctgaacaagcctctcatcccatcttccaggggctagctcagctcccatcttccaggaagcagtcttcasatagaacagggaccagaaacaccctggacactcactatctggattcttcaaaatactccaccttacacagcctcagaggccatcattaatccagctctcactaagcacttttgagccagactctgggacagctcaatgaggaaaacagcagccctgccattaaaaggttgatggtagagggcttggggactgatgtgtagatgaaaaataaaaaggcggccagaaatggtggctcacgcctataatcccaacactttgggaggctgaggtgggaggatc

SEQ ID NO: 236287 - DNA, 577 bp, Homo sapiens
tcattaaaatacatgacaagtgctctgtggggcctgagggagaaaaggagggcagtatgtgcccaggctcaatagaggccctgcccctctcccagctcctcccttcaggtccataaattcttatacacacaaacacagtcaccccagcacacaccacaggtggtcagcgggcagggargctgcaggctgaggcttcctcctcagaacaacgctccctgcccacacctccgccatggccctttgggtggggtgaggtgggagggcggggagggcagaaggagcccccgtgtgtcattttcggcagcagtcagcagagccttgcaaagtgcaagatggcttttttagcccagcataaggatctagttaaaaaccaataaatcaggagtgaaatgtgcatagcagcctgctccgtaaaatcaacatggcttgtgcctctgcagggagccctctgcctgcccgctgaagactgcggctcaggcagagccctcctctgtcccatagacatcttcggagagagaggtctcctctgttccttgaaaagacagagccaggccaccggagcccctacttaggaggt

SEQ ID NO: 236288 - DNA, 481 bp, Homo sapiens
tatatatggccagaattactttttttctataacattaagataatacttgtcagcctgagcaacaaagtgagacctcatctttacaaaaaatarataaattagacgggtgttgtggtgatgagggtctgtagtcccagatactcaagaggctgaggtgggaggatcccttgagcctaggaggtcgcggttgcagtgaactatgattgcaccactgcactccagcctgggtaacagagcaagatcctgtctcaaaaaaaaaaagataatattggtataattcagggtttttgcctcaatccccatgcttcttcatttgaccttccctgactccctgatgaattttagtttgaatttttgctatagtccagaagttaatttaaaagatcttaaaatttccacctgcctagatattacttatttgttacactttagtccatgatttctattgtcatttacattaccccaaaaatatgacctgctg

SEQ ID NO: 236289 - DNA, 481 bp, Homo sapiens
tatatatggccagaattactttttttctataacattaagataatacttgtcagcctgagcaacaaagtgagacctcatctttacaaaaaataaataaattagacgggtgttgtggtgatgagggtctgtagtcccagatactcaagaggctgaggtgggaggatcccttgagcctaggaggtcgcggttgcagtgaactatgattgcaccactgcactccagcctgggtaacagagcaagatcctstctcaaaaaaaaaaagataatattggtataattcagggtttttgcctcaatccccatgcttcttcatttgaccttccctgactccctgatgaattttagtttgaatttttgctatagtccagaagttaatttaaaagatcttaaaatttccacctgcctagatattacttatttgttacactttagtccatgatttctattgtcatttacattaccccaaaaatatgacctgctg

SEQ ID NO: 236290 - DNA, 618 bp, Homo sapiens
ggttatattattatccacatattacagctaagaattggcatacttgggattcacacctgggtcatctgactctagagctcatacttttaattattatgctattctgataagtaatgtggatctatttttgtctcaaacaataaggaaaattattgacataactggaagtccagatgtagggcaggcttcacagttgacttggctgaagctcagtgtccccgtgattctcttggctctgctctcttccatgtgtggcttcatcctcaggctgacaatgagatagctgcagcaattccagcccccatatcaatgcacaaaaaatgtgtyggaagaaaaagaggattgctactctcagaaactcttccagaaaaacaataactttttgagacactccaacaaaattttcttcaaatctcattggtccaaaatgagccacatggccattcctgtatcaatcatgagtaagaagaatgggataaaatagattacataagctcatacctgcagttaggaatgatgtcagctttcttttggcacatgggctgcatagaagtgaggataactatcaataagaagtaagtccagctctcagatacagaaaacctaaaataatagtgg

SEQ ID NO: 236291 - DNA, 562 bp, Homo sapiens
gactgcatcacgatactgtggcaaaatcttgttcacaaaaaagttaaacctgatttggaatggcaaagggcaaaattaatgtctagagctaagcttatggtgtctcttaactgtgtgaccctgagcaaattacaawctcgtgttaaaagattacctccccagaggccaatatgatttacctcctctcaaagagattatgtaaggataaaacttgataagcacactaaaaaaataagtgtcaacactattcattgtaaaaaacagatgtaataccattatatcccagagaattactctaggaagtacacaccacactattcagtcagtcagtcagtcactcagtcactcagtccaacagtcaacaaataatcactgaacatctaccatatactaagcctcactaagcttctttggggtcccctaactaaacacaatgaagaaaaagggggaaattatacaattagaaaaatagttctttccctgaggggcttacaattaacttgctgacatgagacactttgtagcataaagctgtataattttaaaatgccacagtcaagag

SEQ ID NO: 236292 - DNA, 532 bp, Homo sapiens
aataaagacatcctatatttctctacaaaacaagatcccaccttaaaaaatcttgagcagggtattcccatcttcaccaaagaccaaacaaaacagcataagcaaaaaccacatgtgggattatrttaggtaaagatgttcctggtgaggacccatccatccatcaacctatcccatccacccatccacccaccctaaagttagtagaaagaaattttaagggaaagaaatcttttctggagatttgaaaatgactgacaggaattttaatctctagacagtttaattatggacaatctctgggtagaaaaggggacaaaagactttttcaaattagaaaatgtggagtgtgtgtccttgcttccaaacaagagttctaatctggacttaaataattctttaggacttaaaccactgggtgtcttatccctctaaatatgaatactgtcccactgaatgtgaatggccagcattaccaggacatgctcccagttctgcatcaggtaaatgtcagcttgatcaatgatgagaa

SEQ ID NO: 236293 - DNA, 440 bp, Homo sapiens
ttacatgatctcggtcctcattggctctgagacggcatctccttctcttctcccctcattgctcaagcactccaagaggcctcgcttggcctcctatctattccagagcatgcaaaatatgtttctacttctctataccacatggccagctgccttacttccttcagattcattcaaaaagttgccttttcctaggctaaggacatgaatagacaattctcaaaagaagatatacaaatggccaacaaacatgtgaataaaatgctcaacatcagccaggcatggtggctcatgcctgtaatcccagcacttygggaggctgagttgggtagatcacctgaggtcaggagttcaagaccagcctggccaacacggtgaaaccccatctctaccaaaaatacaagaattagccaggcatggtggcagcatctgtaatccca

SEQ ID NO: 236294 - DNA, 660 bp, Homo sapiens
gaatatataaaagtcactattaaaacaagtacacaaacaaatataaaattctctaatatagtaattgtggtgtgcaatctgttcatatatctagtatgaagactaaaagatgaatctatcaaaaacagtaaaccacagcatcctgttaagagatagataatrtaagagaaggggtggagcaagatggcagagtaaaaggttccatcaatcatcccccttgtaaggacacagatttaacaactagccacacacccccaaaaaagcaccttcttaagaaccaaaaatcaaatgagcactcgcagtactgggttttaactttatgttgctgaaagaagcactgaagagtaggaaaaggagtcttcaactgttgatgccaccccttgagtataccctgacagcagctgcatggtgcagagagcgtttgtgttccttggggagagaacaagccagcaattgtgaggcattgaactcagtgctgcccttgttatagcagaaagcaaaaccaaaccaaactcagctaacactcacagaggacacatttaagccagtgctagccagagaggaactgctgaccccagtgattggaacttgagttcctgcaatccacactattgcagactaaagtactctggggtccaaaataaacttgaaaggtggtct

SEQ ID NO: 236295 - DNA, 576 bp, Homo sapiens
gggaaaccgcatctctaccaacaaaaatacaaaaattagctgagcatggtaggtaccatgcacctgtagtcccagctactcaggaggctgaggtgggaagaaggcatgagcccaggaggttgcagtgagctgagattggattgcaccactgcactccagcccgrgtgacagagtgagaccctgtctccaaaaaagaaggtcgttcttctattttaatatgacttaaggcatgactagcaaattcttcctgaggtaccagtgtaggtggccactttacctttcagcctgacacctgctgggtagtaaagttttctctttgaacgtttgtgtgagtcagagcagattgcaaaactctgattctgtgctgagaatgggtttggtcctggagcaactattagcacagtatttcttcagctatgctgtttcttggaaggtggctcatctgacattcatccatggcttttaaaagataacatacaaataattgatatcttccaggtttttgagcattttgctattaagtgattgtcttcataggttgattgccgatttcagctgtgaaactgtctttgcgag

SEQ ID NO: 236296 - DNA, 458 bp, Homo sapiens
ggggaaagtgtgtactgtgtacagaagaggcattttacatagagaagctcagcaccaaaakctaatgtgcaaaagcaagatgcagagcagagaagattctgtactctacatttgagagctctttatttgtcaacaaggcagcagatatttctaggtagcgttggtgcaatccagtatagaaagtggatttgttggtattacacataattaggaagcaggaacatcagtaattactgtgagaggattttgtatggcataattaatgccctcaaactatttagaaattcttagatgaaagaaaatacagaagtgggaattttggtgttgaaaagacaaaggcaaactgtgttggaaatatgttaccaaacatcatgttttatgagcacagattggcaaaacatcaggacacagctgttgattatagctgctcttttcagtaactgcctcagagccaatga

SEQ ID NO: 236297 - DNA, 323 bp, Homo sapiens
aatatattgtgagtattgggtttcaggaccaaaaaggacctcagagatcgtctagactttagaacagtgattctcaaagttgaacttgtttcataatgagttggaaggctcattaaaaaccaaattcctgggccccacccgtaraggtttacatctagtagggtcaatgcatggaccaagaatatgtattcctaacaagtttctaggtgatgctaaaggtgctgttctgtggaccacactttgagaagctctgatcttcagcagcagctaacaggatccagcctctgtagtcaactagaggggttctacttgcatctgcttta

SEQ ID NO: 236298 - DNA, 323 bp, Homo sapiens
aatatattgtgagtattgggtttcaggaccaaaaaggacctcagagatcgtctagactttagaacagtgattctcaaagttgaacttgtttcataatgagttggaaggctcattaaaaaccaaattcctgggccccacccgtaaaggtttacatctagtagggtcaatgcatggaccaagaataygtattcctaacaagtttctaggtgatgctaaaggtgctgttctgtggaccacactttgagaagctctgatcttcagcagcagctaacaggatccagcctctgtagtcaactagaggggttctacttgcatctgcttta

SEQ ID NO: 236299 - DNA, 409 bp, Homo sapiens
attacaagacaattggaattgcatagatataactgcactctacagagtaacactgagcctttgcccttcctagctggacataggattcttgggatgtagcaaaattcacggaaaacataggaactacaagtcagataataaatgtttcaaagtaaattaactttaaatatgttaggatgatgaagaacataagaagaataatgagaatyggtaatagcagcaggtttgggactggtaggaattggtagagtcgagttaaaagctgacaagcacacaagcttgtcatgttgaaggaactgaaagaaaagcagtcttgctagtaaacaagttgtgttgattctttaggtgatgtaacaaattaccacaaacttagtgaatttaaaaaaaatacagttattgtttaatagtt

SEQ ID NO: 236300 - DNA, 409 bp, Homo sapiens
attacaagacaattggaattgcatagatataactgcactctacagagtaacactgagcctttgcccttcctagctggacataggattcttgggatgtagcaaaattcacggaaaacataggaactacaagtcagataataaatgtttcaaagtaaattaactttaaatatgttaggatgatgaagaacataagaagaataatgagaatcggtaatagcagcaggtttgggactggtaggaattggtagagtcgrgttaaaagctgacaagcacacaagcttgtcatgttgaaggaactgaaagaaaagcagtcttgctagtaaacaagttgtgttgattctttaggtgatgtaacaaattaccacaaacttagtgaatttaaaaaaaatacagttattgtttaatagtt

SEQ ID NO: 236301 - DNA, 584 bp, Homo sapiens
gagttgatttttgtataacatgagagaagaggatacaattttgtccttctacatgtgacttgcacctgtagaagaacaaataattatcccagcaccatttgttgaatagggtgtcctttcctgactttatgttttagtatgctttgtcaaagatcagttggctgtaagtatttggctttatttctgggttctctaccacataatagagttggtctatgtgcctattttttataccatttatctacatgcctatttttataccagtgtcatgctgttttggtaactatagcctcgtagtatagtttgaagtcagataatgtgatgcctccagatttgttctttttacttagcattgctttgactatgtgggcttttgttttttgttccatataaattttagaaatactttttctagttctatgaagaatgatgatggtactttgatgggaattgcattggatctgtagattgcttttggcagtatratcattttcacaatattgattctacccatccatgagcatgggagatgtttccatttctttgtgtcatcaatgatttctttcagcagtgttgagtagttt

SEQ ID NO: 236302 - DNA, 483 bp, Homo sapiens
aggtgagtctcttgaagataccagatacttggtcggtgagttttaatccattctgccattctgtatcaattaagttgagcatttagggcatttactgtcaatattactattgacatgtgaggtactgttctactcrtcatgctagttcttgccttaatacccttttaaaaataattgtattattgttttataggccctgtgagatttatttttgcacaggttctattttggtgtattttgagattttgtttcaagaattagagctccttttagcatttctcatagtgctggtttgacagtggcaaattctgtcagcatttgtttgtctgaaaaaaaaaactgtatcttccctttatctatgtagcttagttttgctggatacaaaattcttagctgataattattttgttccacaaggctaaatatgagacctcaataccttctagcttgtaagatttctgctgagaaatctactgttaatct

SEQ ID NO: 236303 - DNA, 570 bp, Homo sapiens
gggtaagtgacacaaaaattaaaaaaaattacagaatatagtagtgagagagttatcactgggcaatttaggctcaatcccactgtggatctctgtagattgggcagaataccaaaaagttgtmccacatagcgatgagaaacctgagggatttattcatcagcgtctatccatcattaatagaaagctgttcccagtgatgttaactgcctggcacttccatagaaaactgctggcatgattaggaatgatgaatgctaggaggatttggagagagcaccaacagcctctaatagagctgccattttttaagtaaatttacccaagagcttgtggagagagaagaaaagcctccacacatgtccaactctctgtctactttcttccctctaaggatggattgctatcgtcttggctaatttgcaaaatataaaaagtgctacatttgtgagtagacagcatattgtgcttgcaaaaattgtgtttttgtttatagttgtctttgggattctctttcatctttcctgcaggtccaaccccaggaacagcttaaccatgctgacctctctc

SEQ ID NO: 236304 - DNA, 460 bp, Homo sapiens
tagaccctaactgatctttcggaggaaggaatttgttcagatccagtattaccagagccttgaagttgagtatcaggttacgggcccatctaaaaatgagacagcattttctcccattatgttattggaccttttttgtgtatctcactcagaaattttacagaaaaagaagcaaatgtctgatgagrttcaggtagtctttggatattgtattagtccattttcacactgctgataaaaacatacccaagactgggaagaaaaagaggtttaatggacttacagttccacatggctggggaggcctcaccatcatagtggaaggcaaggaggagcaagtcacatcttatgtgaatggtggcaggcaaagagagagagcttgtgcagggaaattcccatttttaaagccatcagatctcaagggacttattcactatcatgagaacaacatggaaaaacc

SEQ ID NO: 236305 - DNA, 575 bp, Homo sapiens
tttttgccattacttttaatggtgaaaaccacaattagttttgcrccaacctgtatttcaggtatattacaaataggaaaacgagtatcagttgggttaattcattatcatatgggttacctacatttaatgattatttggctatttatgcctatattatgccttcagaccatgagtcccagtttgttgttttcacaaatgcaaaagtcagaacacaatagattataatgtggcaacccacagtcagaaaatcccagtgacttaacaagaattaattcttcacttgtcttttgtgggcctgagattctttctaggaacaccatcctccacatggctcctcagaattctaggctgatggaggatccatagcctgctgctgcactatctacaatatgtgatgtctgcagcaaggcaacaggaaaaaaaatattgcagggtctcaagccatcaactacgtgctttgttaaggaaatgatgtgtattacttctgctcaaaatacatttgctggagaagttacatttctacgtatattttttaaagagtttggaaatgtaatctcaacctttacttagaa

SEQ ID NO: 236306 - DNA, 634 bp, Homo sapiens
tgaagcattcaggagtcttgygactccagaactgatgtaaagtctctaggattcttgggttgttgatgtagttgagtcactatcaatctagatgccagaagtttatggtatgcatagaaaatttataaacctgaaaagattctaattaagaaaagtcaaagcttgtgtgtgggtgtggattttatagtgtcttggagttccatgtgacaacagtaaaagcctgagagattttgtacacaataacctgaattaacctgttacaacatagattaaattgaagcctcagggtttccagaggccaaaattaatataaaagtaaggtccacttttgcacaaagcagagttaaaaatgtatgatattctgcaaaataggaataaagttttcactttttaaaagacataataaacacttgattcaaaggaaagttaccagcatgcctagttgatctgcaaaacatatcatggttgaacagatatgaataaaccaggggcctttgatctagaagcattgagtttagaggctaaaatatgataaatatcttcaaatatgagaagaattatgatgttgaagagaatagccttattccatattgctttagtatacaatactagaaccaatggatagaagttattg

SEQ ID NO: 236307 - DNA, 392 bp, Homo sapiens
ttccttggggctttgaaaaatatttttcagagagcctggagttcttctttgtggttggcacagtgatgtcatttactgaccatttcagtggrgtcaaagacaaactagatgtatgcattatctgagccatctgactcttaaactttcattttctatgtgtgtgttatagcctgcctctttttcttttcttagagtactttaatattaacttttttatgcattatatgtattatatattacatatacatatgccttctattttggtctcttttttttcaaatattaaatcacagttggatattagttgtacttttaaaaatcatactgaggagaactaaaaaattatttctttaaaatataagaaataatcttttacccaaatttttaaatgt

SEQ ID NO: 236308 - DNA, 570 bp, Homo sapiens
atctgaccaatgttagttagcactcaatttttaagtagtatcaaatgttcagagactgtttgtcagaaaataaactcaataaaaaatgaaaacaacaatgtgggtaattatgagatrttactaatgatatcataatatctttcctggtttactttaaggcctttatataatccattcttgagagcacttgaatctagatttcctgataaaatgacttacttttatagcctatagtttaaaatattttaaaataattcctctcctattattaaatattttctataagtgtcttccttgacaagcttctcagatatcttacataaatacatatttctaggactaccaagatgctcaatttcagcacccctttttggtttccatattttattaagaagccttgactatatcttcattctttttctggtattttcctgattcaaagaccaactctcctagtacatgcactctatctctccgttctaacatagataaacacaactattattgtaaaagtcaatgatctctttagtgaagttacccaactctgttcttggtaatttgggtgtgtgt

SEQ ID NO: 236309 - DNA, 490 bp, Homo sapiens
ccttttcttcttagagtgttattaagctctaatggatattttacctaaggttggaggctagaagaggaattgctgggttcagtcttmgccattaagtaaaggtaaatgacagtattgaaggctcagctttaaagaaggaatacctagctttttctgtcagtgcagagtggtgaaaaggaaatgggtaacatacttcccaggcaaaatccacaccaaatacatttatttcaattgctagtgttctgactttaggcaaattaattaaacatcttcagctttagtttacctgtgaatgaataaagtatttttgagattgtcagtctattatctttgtggggtagagttgggttttagccacaggtagaatgcagtggtgattataaaccaataatctttagtacctggcttcaatttcattacagaacccctgtacttctggctatctcttcaattactgaaaccatttgcagttctagcacaaggtcatgaa

SEQ ID NO: 236310 - DNA, 490 bp, Homo sapiens
ccttttcttcttagagtgttattaagctctaatggatattttacctaaggttggaggctagaagaggaattgctgggttcagtcttagccattaagtaaaggtaaatgacagtattgaaggctcagctttaaagaaggaatacctagctttttctgtcagtgcagagtggtgaaaaggaaatgggtaacatacttcccaggcaaaatccacaccaaatacatttatttcaattgctagtgttctgactttaggcaaattaattaaacatcttcagctttagtttacctgtgaatgaataaagtatttttgagattgtcagtctattatctttgtggggtagagttgggttttagccacaggtagaatgcagtggtgattataaaccaataatctttagtacctggcttcaatttcattacagaacccctgtacttctggctatctcttcaaktactgaaaccatttgcagttctagcacaaggtcatgaa

SEQ ID NO: 236311 - DNA, 591 bp, Homo sapiens
actcactagtgtccctgaaaaagaggagaccaaacaatacaaaaaacrtgtttcagaatatcatccatgaaaatttcaccaacctcactagaaagaccaacatttaaattcagaaaatgtagcaaccccctgtgaaatactacaggacaaatcctcaagacacatattcattagattcaccaaggtagaaatgaaagaaaaatgttaaatgcagctagagaaaagaggcaggtcacctacaaaggtaaccccattagggtaacagtagacctgtcagcagaaaccctacaagccagaagggattcggattctacattcatcattcttaaataatttttggcctgggcgtggtggctcatgcctataatcccagcactttgggaggccaaggcaggcagatcacttgaggtcaggagtttgagaccagcctggccaacatggtgaaaccctgtctttactaaaaatgcaaaaattagccaggcatggtggcatatgcctgtagacccagctactgtactcaggaggctgaggcaggagcattgcttgaacccaggagccagaggttgcagtaagccaagattgtgccactgc

SEQ ID NO: 236312 - DNA, 507 bp, Homo sapiens
ctatttacaatagccacaaaaagataacatgtctaggaatatatctaaccaaggagatgacagatctctacaagaagaactacagaacactgctgaaagaagtgttttctgtcatagaacacaaacaaatgaaaacacagtccatgctcatggattgaaagaattaatattgttaaaatggccatactgctcaaagcaaacttcaggttcaacaccagtcctatcagattactaatgtcatttttcacagaattagaaaaaagcaattataatcatttagaaccaaaaatatcccaaatagccaaagcaatcctaagcaaaaaggacaaattcagarcgatcacattacctggcttcaaactatactataaggctatagtaaccaaaacagtgtggtactagtactaaaacagacacatagataaatggaacagattagagaacccagaagtaaagctgcgtacctatagccatctaaactccaacaaagttgacaaaaataagcta

SEQ ID NO: 236313 - DNA, 507 bp, Homo sapiens
ctatttacaatagccacaaaaagataacatgtctaggaatatatctaaccaaggagatgacagatctctacaagaagaactacagaacactgctgaaagaagtgttttctgtcatagaacacaaacaaatgaaaacacagtccatgctcatggattgaaagaattaatattgttaaaatggccatactgctcaaagcaaacttcaggttcaacaccagtcctatcagattactaatgtcatttttcacagaattagaaaaaagcaattataatcatttagaaccaaaaatatcccaaatagccaaagcaatcctaagcaaaaaggacaaattcagagcgatcacattacctggcttcaaactatactataaggctatagtaaccaaaacagtgtggtactagtactaaaacagacacatagataaatggaacagattagagaacccaraagtaaagctgcgtacctatagccatctaaactccaacaaagttgacaaaaataagcta

SEQ ID NO: 236314 - DNA, 601 bp, Homo sapiens
agacccattacagaggtgaactggggggtacagagggccagggctctttggtgatctctctaagacatgaggtcaagagwtccagaccagagacatgtccactttgttcctctagtttcctgataccttgcagttttgccttcagtgagcactattgtttaccaaataatacacaaaacacacagccaaaaaagaataacaacaacaaaggaagaggtcacattgctatataaagaattaccaaatgctagaccgaaaaggtgagacatgcaattaggatccttaaagtaagaaaataaacaacctttgcaagtttaagagatactcctctgattaggccattaatcatgaacaggtctgtctctgtagccattaattctgacaccacagtcgtggaacaaagggaaatagcaaagctgacctaggtgtcttcctgtgagctcaggtgcttgacagctgacctggaaagggagttgtatttgtcagctttgtccttctgattctgatggaagtgtggttgaaacctttagaaggagaagtcaaccctgccctggagagagtggtgaaatattcctatgcctttggactacattttatgata

SEQ ID NO: 236315 - DNA, 601 bp, Homo sapiens
agacccattacagaggtgaactggggggtacagagggccagggctctttggtgatctctctaagacatgaggtcaagagatccagaccagagacatgtccactttgttcctctagtttcctgataccttgcagttttgccttcagtgagcactattgtttaccaaataatacacaaaacacacagccaaaaaagaataacaacaacaaaggaagaggtcacattgctatataaagaattaccaaatgctagaccgaaaaggtgagacatgcaattaggatccttaaagtaagaaaataaacaacctttgcaagtttaagagatactcctctgattaggccattaatcatgaacaggtctgtctctgtagccattaattctgacaccacagtcgtggaacaaagggaaatagcaaagctgacctaggtgtcttcctgtgagctcaggtgcttgacagctgacctggaaagggagttgtatttgtcagctttgtccttctgattctgatggaagtgtgrttgaaacctttagaaggagaagtcaaccctgccctggagagagtggtgaaatattcctatgcctttggactacattttatgata

SEQ ID NO: 236316 - DNA, 561 bp, Homo sapiens
attcctttgatggggccaaaatgatctcaagagggtaatgggtgcctcctttgaggaagtagtaagaattatggcccaggtggacttgatgctakctaaactccatctccattggcaggaggtgaagcagcacctccttccagacactcggtctcagagtgtcatcaggccactgaggtagcggctggtcagttgggttcattgggcataatgtctcagttttttgaaatacttgaacgagattcacaggcagtaatgctttgctttaaaaatgccagagtaccttaaaaaagatagtatgccatttggtaaaaagcaggatcactgctgttgaactagatgagtaaagactcaatccaaagttggtctacacaaagggaagggaaccagcattcacagagtacccactgttgacaaatgttatcttaaattcagccaaatgcctcagaagatatttgtcattattctcatttcacagtccacaaaactgagactctgaggggttaggtgagttgctgagactacagggtctgtatattgaagatgctgaactcgaagaca

SEQ ID NO: 236317 - DNA, 561 bp, Homo sapiens
attcctttgatggggccaaaatgatctcaagagggtaatgggtgcctcctttgaggaagtagtaagaattatggcccaggtggacttgatgctatctaaactccatctccattggcaggaggtgaagcagcacctccttccagacactcggtctcagagtgtcatcaggccactgaggtagcggctggtcagttgggttcattgggcataawgtctcagttttttgaaatacttgaacgagattcacaggcagtaatgctttgctttaaaaatgccagagtaccttaaaaaagatagtatgccatttggtaaaaagcaggatcactgctgttgaactagatgagtaaagactcaatccaaagttggtctacacaaagggaagggaaccagcattcacagagtacccactgttgacaaatgttatcttaaattcagccaaatgcctcagaagatatttgtcattattctcatttcacagtccacaaaactgagactctgaggggttaggtgagttgctgagactacagggtctgtatattgaagatgctgaactcgaagaca

SEQ ID NO: 236318 - DNA, 561 bp, Homo sapiens
attcctttgatggggccaaaatgatctcaagagggtaatgggtgcctcctttgaggaagtagtaagaattatggcccaggtggacttgatgctatctaaactccatctccattggcaggaggtgaagcagcacctccttccagacactcggtctcagagtgtcatcaggccactgaggtagcggctggtcagttgggttcattgggcataatgtctcagttttttgaaatacttgaacgagattcacaggcagtaatgctttgctttaaaaatgccagagtaccttaaaaaagatagtatgccatttggtaaaaagcaggatcactgctgttgaactagatgagtaaagactcaatccaaagttggtctacacaaagggaagggaaccagcattcacagagtacccaytgttgacaaatgttatcttaaattcagccaaatgcctcagaagatatttgtcattattctcatttcacagtccacaaaactgagactctgaggggttaggtgagttgctgagactacagggtctgtatattgaagatgctgaactcgaagaca

SEQ ID NO: 236319 - DNA, 574 bp, Homo sapiens
  misc_feature (1)...(574): n = A,T,C or G
agttagcaaattcttatgtcattgaatatacttnaaacaagcactgtgttcacttctgcaaaggttattccttatcaccgggaatcagaggtaatgactagaaactgtggatcatgttgaatgcctatttgcttctctcaaatgatatttnacatgtgtgacagcaatttttttcctataggaccacttctagtcaaggaaaaaaaaatatgacttggaaaaaaaaaaccctctcatttcacctctagaaggaaatgaagacaccttccgaccagtcctgcatgttcaactctctgggacaatcctrgaatcagatgttaaccaaatagcccccaaatacatgaacaatgtttaaaatgttgaaaatggaaaaggatgagactgctttggaatacaatttgggtttattcattaaccaaaagaaagatgcatttgtattgattatgcatctaccccagactgaaaaacacagatgtagaggactagttcttagctgtaaggcacctcattactaatgctgcatgatggaggttttactattgggcagaggagtgaaagcgtgtgttgtgagaaa

SEQ ID NO: 236320 - DNA, 574 bp, Homo sapiens
  misc_feature (1)...(574): n = A,T,C or G
agttagcaaattcttatgtcattgaatatacttnaaacaagcactgtgttcacttctgcaaaggttattccttatcaccgggaatcagaggtaatgactagaaactgtggatcatgttgaatgcctatttgcttctctcaaatgatatttnacatgtgtgacagcaatttttttcctataggaccacttctagtcaaggaaaaaaaaatatgacttggaaaaaaaaaaccctctcatttcacctctagaaggaaatgaagacaccttccgaccagtcctgcatgttcaactctctgggacaatcctagaatcagatgttaaccaaatagcccccaaatacatgaacaatgtttaaaatgttgaaaatggaaaaggatgagactgctttggaatacaatttgggtttattcattraccaaaagaaagatgcatttgtattgattatgcatctaccccagactgaaaaacacagatgtagaggactagttcttagctgtaaggcacctcattactaatgctgcatgatggaggttttactattgggcagaggagtgaaagcgtgtgttgtgagaaa

SEQ ID NO: 236321 - DNA, 616 bp, Homo sapiens
atacacagaaggaaaagagctaaggagatggcatgccaatgtccctactttttacatgggaaatgtgtattttcaatttagaaacaccayggaagtcactggccccagaggcagatactatttttatcaagagaagttggcccctcaaactttgtttgctagctgattttactgctccgtgggtctcttgtctggctccccgcactcctttctgactggaagtgagatctcgtttcagggaaatgcttggctggcgggcaggcaggacacattgtataaaaagctagtatctgaaattaagatttcaacctgctgtcccagcaggagcttcttccaaatttttcttcctaaccttcaaactaaatgagaaacaccaaattttctttgaaaataaaaggtaaataatgaaacatttccttggttctgattaaaatgcacaggccaatgcttccttaacttccttgtatgagtgagtcaaaggatctcaaaaagaggagctcagatcactttcaaagcacttaccagggtagaagggacttcccatgtcacatgctgttggtgggaaagaatgtgaaggtcaagtattccatgctaactttgagataccattgattat

SEQ ID NO: 236322 - DNA, 525 bp, Homo sapiens
ggagcaaagtcatttgcagtcagagagctaataaaaccccatacgacaccactttctttctcagcagaataacagtgaaaagttaaagatgattatgacttttagtctgtgagcctttctgctgacggagatctttttyatgtatgttttacatttaaatggaatgatgagtatccttaaaaaaatgttatctctagaattagatccttcttggttccataaggatgatttgtgacccaaaatttgaaaagaattttgatttggttgtaagaagagaagcacatcttgaagttatttcaaactttgtcaaacttctttaatgaataaagtgccatctttcatgcttagtttcttagaatgtcataaatctataacctgaagtttctaaaacactttcattttcctgcttagagaggaagggagggcaaatatcattaccttcatgttatacatgaagaaactaaacttcagagaggttaggtgacttgcctgaggttgtacagctaataagtgacagagttagat

SEQ ID NO: 236323 - DNA, 570 bp, Homo sapiens
ctcacccttcttgaatcttcaacctgacctcctcgaggaaggaagaacctcctaaaagttcccaggtttattggtgattttttctttcttctggtcagagacataattatttctgtgactaggaaacaaggaaaatgtgtgggtgtcttttctgatactggcttgaagttattctgataaattagcctaaattagagtggaattcctcaagtgcagtgaatcttttatgttgaattcatgccaggctttcgtatgaccctggccctttcctgtcagtttctgggtctgcttttagagcacaacattacaggaagttaatggactggttgtagaattaatagactctgaatgttgccaataatatttaaactatatatatataatamcctatacacaatctttatatatataatgtacatgagctacactgcaaatacatactagtatgtgacatgcttttaaaacatacacagaaagtgcaaactaaagacaaaataactataaatagaagttgtgttttccttgtacttcaataagtaatttaatttcttccttaccagaggttttaaa

SEQ ID NO: 236324 - DNA, 555 bp, Homo sapiens
tctggaagcaggactaaggaaggtgtctgaggagtccagccttctacatgtagggtttcactcatcccctgcatcagcctgactctatctgacaatcacggtgtctggtgccttgagaccttggatcaccaggagagtgtccctcgggttttgtgtggaaagggtatgttgagccgggtggatgaaaaaaggaggaagacagccatgttgtaaggcatcagaaaaaccaattcctctttccaccagccccctactttggcctcatttgccttcyaaacccctcacattcctgatacctgttgtttctgagagcttggtgttcattgattctacaggcgaatcagctcatccttgatggcaaattatgacttgggtcacaattccgttcagctcaatctgttatcatctttacttctctttcccatgtctaatatctgttaaaacttctcatctgtagctatctcctccaattctctttctcgtatggttaatgccttttgggtcttgaaatagagatcaatgggtgtggttacctttgctatttttactctgaaa

SEQ ID NO: 236325 - DNA, 555 bp, Homo sapiens
tctggaagcaggactaaggaaggtgtctgaggagtccagccttctacatgtagggtttcactcatcccctgcatcagcctgactctatctgacaatcacggtgtctggtgccttgagaccttggatcaccaggagagtgtccctcgggttttgtgtggaaagggtatgttgagccgggtggatgaaaaaaggaggaagacagccatgttgtaaggcatcagaaaaaccaattcctctttccaccagccccctactttggcctcatttgccttctaaacccctcacattcctgatacctgttgtttctgagagcttkgtgttcattgattctacaggcgaatcagctcatccttgatggcaaattatgacttgggtcacaattccgttcagctcaatctgttatcatctttacttctctttcccatgtctaatatctgttaaaacttctcatctgtagctatctcctccaattctctttctcgtatggttaatgccttttgggtcttgaaatagagatcaatgggtgtggttacctttgctatttttactctgaaa

SEQ ID NO: 236326 - DNA, 610 bp, Homo sapiens
tcacttgcagcacaaaagttgttaatttctgttgaarttcaattgtattagtctattttcatgctgctgataaagacatacctgagactgggtggtttaatggactcacagttccacgtgggtggggaggcctcacaatcatggcagaaggcaaagggcacatcttacatggtagcaggcaagagagagaatgaaagccaagcaaaaggggtttttgcccttataaaaccatcagctcttgtgagatttactcactaccatgagaacagtatgggggaaactgcccccgtgattcgattatctcccaccaggtctctcccacaccacatgggaattatgggagctatagttcaagatgaggtttgggtggggacacagccaaaccatatcaccaattaattgatttttttcttttatcatgtgtgcttttgttcttgtattagaggtcaaatgcaagatcccaaaggtttactcccaagtattcttcttagggatttatagttttagctcttacatttagttctatgttctataatcaaatatgattcaacttttaaaaagaagaaaagtttgtcatttgctatctggaggaacctgggcaacattaggc

SEQ ID NO: 236327 - DNA, 502 bp, Homo sapiens
gtgaaaactcaacaaaatgtttgtgatatgtgttaattgaggcatagttcacattttaatagcctggctactaaatgatggtcaaaactcaataatgtgtttctgacataagtgtgttcaattacctttttccatacttttatccatcattttccttctccttaaaatatgtttctcaggatcctaagaggagtttacrgaaacaaatttctattgggaaaaatactgttttaaccagttgccttattctgtgagcccccagttttctggcatcaagtaaatcactatagtttcccacagcatagaaatctaccaagtgcagggggaggttgcaatgtcaagttcattcttctgggtctcctcaacaatcccaaaaccctcctccacagaagaggtgcctctcagcatcatccataattttgaaatctttaggcttcaaaattccatttagacagaaacctttatgttgggcaattcatgttcaccaatgttccaggctctc

SEQ ID NO: 236328 - DNA, 594 bp, Homo sapiens
agaatgtttaatttgaaattgagttaggttttacactgggctgaggattctagtcatagaactgagattagaaaagtcatcaagtctgccagttctcattctgttgcaaaaaaatcyccaatattcttatctaaaaaaaattaaaggggtagtagaaggaaaacaaaggggcatactgataacatcttgtaagtcatgcctgtttatggtcttggttatactagcaaaggccctgttacgtaaggcattcaatatgctttcaattaatgtaaataaaatcatttaaaataccagctaactcacatagtattcaatatgtgtcacttttcatatatttttatgcttcatttaatgcttacaacaactctgtgatatagggactattattatctctgttcaaaaaaatggagaaacaggcacagagaagtgcctcaggaataggctctatgaattggatgctccactgacactgagtttccagaaggaacagaacacagctagtaaagaggacagctaggattcatagccaggcagcctggccctcaagacacactatttacctccaggctattctgccctctcaaattagcaaac

SEQ ID NO: 236329 - DNA, 594 bp, Homo sapiens
agaatgtttaatttgaaattgagttaggttttacactgggctgaggattctagtcatagaactgagattagaaaagtcatcaagtctgccagttctcattctgttgcaaaaaaatccccaatattcttatctaaaaaaaattaaaggggtagtagaaggaaaacaaaggggcatactgataacatcttgtaagtcatgcctgtttatggtcttggttatrctagcaaaggccctgttacgtaaggcattcaatatgctttcaattaatgtaaataaaatcatttaaaataccagctaactcacatagtattcaatatgtgtcacttttcatatatttttatgcttcatttaatgcttacaacaactctgtgatatagggactattattatctctgttcaaaaaaatggagaaacaggcacagagaagtgcctcaggaataggctctatgaattggatgctccactgacactgagtttccagaaggaacagaacacagctagtaaagaggacagctaggattcatagccaggcagcctggccctcaagacacactatttacctccaggctattctgccctctcaaattagcaaac

SEQ ID NO: 236330 - DNA, 577 bp, Homo sapiens
atccttcagatggaaatggccttacggtggtgaggccagctagatggtgtggatcccaggacaatgtaataggccgtgctacctgcccaactcctatgactgcctttataaggaaggcaagaaaagagactggagtatccttgtgttgcctgattgactcccactggcttcatggattcaggcaaatgaaggaaacaagaaaataataggctatgtctaagcttttgtcttttgcctctgaccccacatttcttggggggggattaactcgccaccaattaacttgccccgttcccccagactcaccacagtcaccacaaccactggagtgaaaatgaaggtcctcgtgcttctttgcatcagattcctggaygagatttcacaaacagccaaagaaagggacagtatcgttaaagattaaaaacaaacactagtaaccccaaccaagaattgtaatggcaactaggggaacaagaacaacagcaaaaaagacaaaattgcttaccaaatgtttacagacacttcatagcctctctacctcattttgattaaactatttaatatgttgcatttactt

SEQ ID NO: 236331 - DNA, 417 bp, Homo sapiens
ttacaaatgaaagggcttctcagtaatggagattttttttttttcaggaggcactctgccaraaaattttttcaccaaaaggcagagatccataaaacctcccttttaataaactatatcattaatagatgtaccaggcatatttgcaacattggaggagagcatgtctctcagtagaaaaatgagtaaatagctagagctaaatatatatggttaatgaagtctgtactctttgaaggccttaaccatggacagtccagggagtacaaagactgttggtttcaaagtccaatgagtaagaattcaaatggagttccaacacttactagccctaggattcaggcaagtttttaacctctctgagccttggcttcctcagttggataaaaaggacagtagcatttgcaacccggaatt

SEQ ID NO: 236332 - DNA, 470 bp, Homo sapiens
tatccatttccttatctgcttattcaaytgactagtcacctcctctctttggatatctaataggtacttaacatttaaaatgccccaaattgagctccagattatcaccattcccctaaatgtactctttcctcagttttcccatttcagttgatgaaagcaccatccttccagctgctcaggctaaaaatcccccacagttattcttctaattttttttctttctcttatttctcataatcaaactgctagcaaatcttattggctctactattaaaatatatccagaatctgcccacatctcatcagctcttatgactagttctctagtccaaaccactgtcacctctcaccttgatttatgcaataacctcctgctgttttatctgctcctatcctccccaacttcagtctattctcaacatagaagcagagtgatcttttaagaatgtaagcagagcatgtcactc

SEQ ID NO: 236333 - DNA, 472 bp, Homo sapiens
tgtctaggtgtgtgcacacttttgtacatagaaaagacgagggagatataaagccttattcagatttatgtatccttttatgtagacagattttaatactcaggaacttgtctatttcttccaaaccacccatatttactgagaggacaaaaaatttattgccctgttgcctaaaagcagctgttccagatgtgtgaagagaggccatatgcaaacatcccaaaggtatgacacttcaaakgatgacactttatttaattgtaaatgtttagatttctgagaatttaatttctttcaaagtagaaagcagtatggcatattaggaaaaaccagaatggtgtaaatgctagtattctgtgatcttagccagaaaaattaagcttcctgagctttattttcttcagctaggaagtggcataatgtctaccttgtaggatttttgtgaggtttaggtagaagtattgtttcaagt

SEQ ID NO: 236334 - DNA, 619 bp, Homo sapiens
caaattttaagtatataatacagtaattttagctatagttacgatgctgtacattagatccctatccctaggacttgttaatcttatarctgaaaatatatagcatcttccctcttctctcatccatcagcccctggcaaccaccctcatgctatctatttctatgagacttcttaaggttccacatataagtgagatcagatgtttgttttctctgtttgacttatttcacgtgcataatgccttcaaaattttcctacgttgtttcaaatggcagaattttttttatagctgaatattatctctgtgtgtgtgtgtgtgtgtgtgtgtatgtgagtgtgcatgtatcccattttctttatccattcatctgttaatggacatttaagttgtttccacatcttggttattgtgataatgctgcagtgtacatgagaatgcagatatctctttgccatattgatttcatggcctttagatacatacccagaaatgggattgctggatcatatggtagttctattttaaaatttttgatgaatctctatactgttttctataattgctgcaccaatttacattcctaccaaccatgctccaggattctcttttccctgca

SEQ ID NO: 236335 - DNA, 548 bp, Homo sapiens
aaaacatacgtctcttctgtcagtaacaaaaaaaggagaaattcagaaaaggaaacaaactgatttatcaacaagtcattcaagtatgaataaaattatgagtttatgagttattgactgagtttaagagacaccaccttttcttgatgcttggagcattcaccactaaatgtcacatatttaatgacacaggattatatttttttccttttggggtaaaactactcagctcttcagtagatgatatgtacataataagggcatttagtgtttcaaatcaacttatatatagcacatacaaaaattatagatgggaaggtaaatgttttaaaatcttaccaatatamaagtaatacagaactctagataccagaactggaaaacaggattagttggggccttcctacaaagatatttaattaagcattctttgagttattgatttaaaccttactaatttcaccctcccttgcaacaaataaggacagccaaaagtaaatccaagtcactacggagccccagctgtgggtacttgaacacatggagaa

SEQ ID NO: 236336 - DNA, 548 bp, Homo sapiens
aaaacatacgtctcttctgtcagtaacaaaaaaaggagaaattcagaaaaggaaacaaactgatttatcaacaagtcattcaagtatgaataaaattatgagtttatgagttattgactgagtttaagagacaccaccttttcttgatgcttggagcattcaccactaaatgtcacatatttaatgacacaggattatatttttttccttttggggtaaaactactcagctcttcagtagatgatatgtacataataagggcatttagtgtttcaaatcaacttatatatagcacatacaaaaattatagatgggaaggtaaatgttttaaaatcttaccaatataaaagtaatacagaactctagataccagaactggaaaayaggattagttggggccttcctacaaagatatttaattaagcattctttgagttattgatttaaaccttactaatttcaccctcccttgcaacaaataaggacagccaaaagtaaatccaagtcactacggagccccagctgtgggtacttgaacacatggagaa

SEQ ID NO: 236337 - DNA, 597 bp, Homo sapiens
aagacaacgaacccataattggttattccaaataatagctgagttagtgattttcaatatttgttttattattgaatgcaaaagcaatggtaaagactgcaaactataaacattctctcatttttcttaaaggaacaaaaacatgcaggaaaaatttaatgatacaatgaattggtaacttcctaatttgctacaaaagaagcatttatcaggtgatgtttacakgtgtatgctgcaacaagccattaaagtaataaaaccaagtctcgtaaatcaaccaagcaaataagtcctcaaatatagcaaatgttataggggtgcctcaacccctgatttgcagatcccaatgaaaggataaaagacagtaacaggtggagataaaatttcagatatagggattttagaaatgtgtaaattgttgggcgtagtttgtgaatctgcaaaccaaatgagggtggagtagcagtggagagagcgatgcaaaacgattccaaaaaacattcactgtctttggtagtttaattataagccattacggtatcaattaaacagaaccaaagagcatcagaagaagaagtttgattatgtgaagaagta

SEQ ID NO: 236338 - DNA, 542 bp, Homo sapiens
attttaaatttatatatgacataaaaatactgtgacagcgaaggtctacctacagcaaaatccctaaagatgacccacaatagtcatcttcatcatagtcataatcatcacagtcaatcttgtgaaataatctcactactcttaaaagaaacaatgagcttacatttcatgtaatcattggattctgggtacaattttgatatgcagatgctaaatactcctttgagtttatgatgctcttacatcttgagcttatcatgctcttgcatcttgacaccatttactgccaatcrattcagacatcaataatctagtcctttcattttcaatagtggctaatagtttggaatatgcaaatgaccttcagatgggcttccctttctacctcacaaggagattccttctagaaagtcaaaaatctgactacagcagaatgtagtcaccactcctggagaaagagaaaagatagtattccaggagggatggagccagctagttaattgtaatagcacatttttaaatgccaagacttcattagagtt

SEQ ID NO: 236339 - DNA, 555 bp, Homo sapiens
cccaatctgatctgcctcagacaaaagagcatggattcaagtacagactttactagctcaaggagggttctgtgggagaaaaggattccatctcattgactacagatgcagaaaatcttaaataaatattttacatgaagccagttgggacaggtctcctgatccccattgagtctcagagaacgacatgagtagaagaaaatacaatctgtatgacggcttacagataattcatggaattttatcttgaagataatttagagagtatctagtccaagtgtggacttaaactaaacatctaaaacttaaaatgaataaatgaagccatttgaataggctctctgggaggcgcactataaggtttgctacaggactttaacgtctagctctccccacatcattcatttattttattacctgcccagcctctgaaactatttactgagctcctgagaaaaccagaaaattgagacctgcatctgttaagtaacttgctcaagatcacagagtgatagaattaaygaagacatgtttgttgggctaaggatggagatg

SEQ ID NO: 236340 - DNA, 470 bp, Homo sapiens
ccttagagactgactgaaacatgctgaaaagtctggttgaagtcaagagaccccatgcagtccagacacatagcaggcttcccagagaaccttaggagagcaggttttgagtcactttcctcttggctgtaaccaggaggctaaagtacgtatgagccaaagtcttgggaaatttacatcaggcgagcaattcaacaggtcttggccacacacagatccagcttctgtgaagagttaagcaccaaggattcayagagacagcagcacagatgttttcagtctcggtttcctattgtgtccacccatcccaacttcccacaccctctgcccagacccacagcccctgcctttctaccctctcacgattcacttgttcgacgtgtctccattaagtgtctctatgagccccacagctgcatccctactctcatactcctctctcagaaagaacaaatatttggataaattat

SEQ ID NO: 236341 - DNA, 193 bp, Homo sapiens
acttactcacccctggtcctgtggctgagcacgacccaactcaatcctgtgggcaaccaagaggatgtgttttctgtggtcacaccccgatgtatgaaccacaaccatgcagaagcrtccattaaatggcaagttatagtcacagaaagatttgttattagaaaatgtcctcttttacatcagaagagtagaa

SEQ ID NO: 236342 - DNA, 494 bp, Homo sapiens
aagacaaaagagaaaaaaaaatgaagcaataygaattaataaccagagagagaggaccagggcaaccacaaaggctgatggcaggaagaccaaaattagacccatgagtcggaagctccactggacctggagcttcctgaagccacagaatatagcttactttgtgtgcccagcatcatactagaaattactttgtattcccagtgtaatagattgttaaattggaaattttggttttgttttgttttttactttaagttctgggatacaagtgcagaacgtgtaggtttgttacataggtatctgtgtgccatggtggtttgctgcacctatcacgccatcacctaggtcttaagccctgcatgcattagctatttgtcgtaatgctctccctccccttgccccctaccccctgacaggccccagtgtgtgtgttgttcctatccctgtgtccatgtgttctcattgttcaactcccacttatgagggagaac

SEQ ID NO: 236343 - DNA, 452 bp, Homo sapiens
cagaatgctgagtatacaccacacagtagcctttgctttttgtgttttcattgccaggtggaggccctgctggcatccgaagattatggcaaagacctrgcttctgtgaacaacctgctgaaaaagcatcaactgctggaagcagatatatctgcccatgaggtaagcaaagggaggcgggccaggcccgagtgcctgggacacagctctgcctgactcctaaggaaaacaagcgtgtttgagaaaagagagtgacttctttcacttaaagcagccattctcaaaggttgtggcctcaggatcattatacacttggcagttattgagggctcttgagagatttttattatgtaggttttatcaatgctcaccattattaaaaattacataaattttaaggccaggtgcagtggcttacggctgtaatcccagcactttgggaggcccagaca

SEQ ID NO: 236344 - DNA, 426 bp, Homo sapiens
tgcatcaagtaagaactcagggtgggaytgttcagaggtgacttcagctttatctctagtgttttttttttttttggtaaagggaaatttattcgtatattgcttgcataattaaggattacatgtgtaattaaggatttcatatataattaaacattaatttaaaaatgtgggcaggagtctttaccttcccaagaccatttataaatcaattttcttttctgtcttctaataaatcagctactgtaagcatcgtgaatgagggccacacactgcataatggttccctctgccactctggcttctatttttactcttccttggaacctccgggcatttgatttcaatctgtaatgtcgagatttggaaattaaatttaggtgagttcaaaagaagagtgtctctaaatgtaagcagcttgggtat

SEQ ID NO: 236345 - DNA, 511 bp, Homo sapiens
ctccagagaaacagaatgaataggagagctgtatatatattataaagaattcattgatgtagttatggaggctgagaagtcccaagatctgtagtaagtaagatggagactcaagagctttgatggtgtagttccagtctgagtccagggcctgagaaccaggacatctggtggtgcaagttctggttcaaaaggtggcaggcrgccgggtgtggtggttcatgcctgtaatcccagaactttgggaggctgaggcaggaggatcacttgaccctaggaatttgagaccagctgggacaacatggcaaaatcccatctcaacaaaaatacaaaaaaattagctgagtgtggtctcagctactcaggatgctgagatgggaggatcactcgagcccaggaggtcaaggttgcagtgagctgtgattatgccactgcgcttcagcttggatgactgagggagaccctgtctcaaaaaaaaaaaaaaaaaaaaaaggtggcaggctccaaaccc

SEQ ID NO: 236346 - DNA, 511 bp, Homo sapiens
ctccagagaaacagaatgaataggagagctgtatatatattataaagaattcattgatgtagttatggaggctgagaagtcccaagatctgtagtaagtaagatggagactcaagagctttgatggtgtagttccagtctgagtccagggcctgagaaccaggacatctggtggtgcaagttctggttcaaaaggtggcaggcggccgggtgtggtggttcatgcctgtaatcccagmactttgggaggctgaggcaggaggatcacttgaccctaggaatttgagaccagctgggacaacatggcaaaatcccatctcaacaaaaatacaaaaaaattagctgagtgtggtctcagctactcaggatgctgagatgggaggatcactcgagcccaggaggtcaaggttgcagtgagctgtgattatgccactgcgcttcagcttggatgactgagggagaccctgtctcaaaaaaaaaaaaaaaaaaaaaaggtggcaggctccaaaccc

SEQ ID NO: 236347 - DNA, 545 bp, Homo sapiens
caggtgagcttgaggacctctgtgagcttatgaagtctgtgttttaaatgacttgcaagataagatgagttgttatgctcccatcctaaggacaaagccacatgataggaattaaggttaggggatttagagaacatcaaagcatttttatgcccttgagaacaagcttgtaaacatctggtaaggacatgaattgaattgataggaaccagggttatcatattaactaggatgcagatkattcatgttgaagctttggaaatataaacttaggttcacattgcaactctgcttctgacaagctgtgtcacctcagcctacaaacgtcatctttcttcagccctgtaagatcacccatgaaggatgattgggagaagatgagataatgcatccaaaggaatcagcatagtgcccaaaacatacacttagaaatgtaatttttcttcccttatggagcacttgagtccacacataatgcgtgtgcacagtctgtggaaacagcaaattcaaggatccagtctgggggcccattaaaaaggaagcct

SEQ ID NO: 236348 - DNA, 605 bp, Homo sapiens
tgtgtgggtgtctccctatttgtatctacccctgtgtctaaatttctcctttttataaaaggacacagccatattggattagggcccaccctaatgacctcatcttaacttgatcatttgcaaagacactacttccaaataaggtgatcttcacaggtagtggagtttaggttctcaatatcttttgggagggggacacagttcagtctgtaacacctgggatgactgctgttccctcgaagaacaattatgtccctaaacaagggtctgccaatgggcaagagtcattcattggcctaatgkttccctgccatagacctggctttctcctgggcccccagggacgtgttgtggggtagtagacagtgggcttgggaaggcagtgcccttttctctcctaagaccctcgccctggatcctgtgggggaagttctaaggccatggatgctgtcttgctctgctagggctcaggcaccagggtgaggcagagcatgtgctgatctctgtccatcttcttcatctgtacctgtagcaggtggtgcctcacccagacctgcattgaagtctagactttgtcatttaccagccatgcgactttagacatg

SEQ ID NO: 236349 - DNA, 530 bp, Homo sapiens
agccttacttttctcatctataaatgggggttaggatgctcacttcttttcacatgttgtggtgagaatgcaggaggtgagcctgtgtctggtacagtgttgctacataataagtggtggcctttgtcactgaggccttgcttagtcagagcctgacttggacaaaccagttccccctctctgagaagccacacagcaggcggcattctgagaccagcattgccagggaccacttcttctggccaatgacattcacacctggcttcaaaccctctggaggagctctccttgcacatccctgtrggcatttgcctttcagaggcaactgtggatgtggcagccctgaagttgggaccagataagcaggaagggagaggaaatgcatattaatgcagagatttgaacccccataaagaacccagttcgtaagaatctaccagaaaaacaaatggctatctgcccaacctcccaggatcccttgtagggggaagccagctgccctgttgtgaagacactcaagcaatcctata

SEQ ID NO: 236350 - DNA, 564 bp, Homo sapiens
caagcaatcctatagagaggttcacatggtaaagaaaagaggcctctagcaattgccaacaaatttcagtaacttgccaggtatgtgagtgagctactttggaagtaggtcctttagcctgagttaagacttcacttgaacgtagcctcagatgacatcttgactgcaacctcatgagagaccttgagccagaaccacctagctaatccatttctagaatccattccctcacacggaagctgtgcaagattattgttttaagccactgagttttagggtaatttttatgctgcaagagattactaatatactctccacccccaaagaaaakctgattaaggaaaaaggagagaaggcacaagaccagaatcaggaattaaaagggagccatcacagaagatcccacaaacattaacaaaattataaaaggctagttgaagaatttatggcaatagatttaaaaattagaaatggacaaatttctagaaaaacacaattcactaaacctgacccaaagaaaataaaggacttgcagaaagaaaattccaagcccaggtgtaaagg

SEQ ID NO: 236351 - DNA, 629 bp, Homo sapiens
gagagctgaggtatttataccccaactgacttcagtcattaggtaagggctcctggaggcagatactaattcgccaggacttgtggsttgccatgggccctgccaccctcaggcagagcaatgcagatgctgccagtgggaagccagctgtggtgaaccacagtggcaaaagctgaggagacacgggtggggctctgacggccgctgttcccatctcattccctatcttcccaacagggcacatgcttgatcctttatgctctagtgtatcttgctgactttagcacagattttgatgctgggtaagaaatcctcactatgggggtcttttgctccccttgtttctgcctcctttcctctgttctgcattgtctagcatttgcccaccaagatggtctgaagaagatgcaacaaaacgatcaggacaaaggcccacaacgatcaaagtgttctccatcttgagccataaggaataagaggcttgcattcattagccctgtggtagaatgcagctgcgagccagccagctgctctgttccacccatgtggtctccactcttattctgagacactcgctacctccaggagaacagctcccatctgctctctagcaaagcctcaccagggac

SEQ ID NO: 236352 - DNA, 508 bp, Homo sapiens
ctgcaaggctctgcataattgttccggtgcatcaaactatagcataatgtrgtaacaacggtgataggatgtgaatgttagggaaatgctgttgacctagttggtggaggaagagggtcacagcaggtatgtgagatcagtgattctcaaatttgagcatgacttagaatcacctacagggctgtataaatcacaaagtactgggcctccagccccaatctcctgcaagtttctgattcaggtctagggtggggcctgagaatttgcatacctaacatgctcctacactagccagcactatgctagttaatatttttcaaaaataactgcttcccttccataccaggcaccatgttcttaggaccttccttgagcaaggagtctattttcgtacctgaagacatcgggcttggttttatgacatggcttggcaatgaaatgtgaatgcagggattgtgtgccaagaactattgtggacttttgccgtgtctcttttcgtctctgtcag

SEQ ID NO: 236353 - DNA, 401 bp, Homo sapiens
agttaaggcccgggttcacacatgccttaggctgtgtggcctttgacaagttackgacctgctctgtgctggagaaaattcagccataaaattagtatcatattagttcctattttgtaaggtgattttgaggattaaataagttaatcattataaagtgtttaaaacctttctggcacatagtaaagttctccataaatgttacctatgttaatgttgttccattatttattcatgtctcttttctttttttctttatcattcttgccagagatttccaattttgttatttcaaagaaatcatttaggtttcattgatggtaatgtttatttgttttctacttcactaatttttctcgtaacattagttgcttcttccattttcctttgtatttactata

SEQ ID NO: 236354 - DNA, 401 bp, Homo sapiens
agttaaggcccgggttcacacatgccttaggctgtgtggcctttgacaagttacggacctgctctgtgctggagaaaattcagccataaaattagtatcatattagttcctattttgtaaggtgattttgaggattaaataagttaatcattataaagtgtttaaaacctttctggcacatagtaaagttctccataaatgttacctrtgttaatgttgttccattatttattcatgtctcttttctttttttctttatcattcttgccagagatttccaattttgttatttcaaagaaatcatttaggtttcattgatggtaatgtttatttgttttctacttcactaatttttctcgtaacattagttgcttcttccattttcctttgtatttactata

SEQ ID NO: 236355 - DNA, 417 bp, Homo sapiens
tacaatagaatattattagacaataaaaagaaatgaagtactgatatgtgctacaacacagatggaccccaaaaacatgctaagtaaaagaagccactcataaaagactgcatattgtatgactctatttatatgaaatgttcagaacaggcaaatttaaagagacaaaaagtagatggtggttgcctaggattggagaaggtggagggacatggacagggatggtggtgatggctaarggatgtggggtttcttttcagggtgataacaatgttctaaaattgactgtggtgatggttacacaactctgtaaataatctaagagacactgaattgtacaccttaaatgagtgaactgtatggtatataaattatatctcaataatgttctttaaaaatccagtggagggatctaga

SEQ ID NO: 236356 - DNA, 552 bp, Homo sapiens
ttctagatacacgttggttggaaacaaaaggttgtctgtatacaatttttttaaaactattttctctctctctctctcggcacacgtttgttggaaataaaaggttgtctgtatacaattttttagaaactattttctctttctctttctttttttttgagacagagtctcactctagtgcccaggctggaatgcagtggtgtgatcttggctcactgcaacctccacctcccaagttcaagtgattctcctgcctcagccttccaagccgctggaattacaggcatgcaccaccatgcccagcttaatttttctatttttagtagagacggggtttcacyatgttgcccaggctggtctcaaatgcctgacctcgttatccacccaccttggcctcccaaagtgctggtattacaggcgtgagccaccgtgcccagcccaaaagtattttcactggccaacagattatagaggttggattaaacacctgaatgaacatcaggttagaaaattaatagctttatttatgtatttatttatttatgagatgga

SEQ ID NO: 236357 - DNA, 552 bp, Homo sapiens
ttctagatacacgttggttggaaacaaaaggttgtctgtatacaatttttttaaaactattttctctctctctctctcggcacacgtttgttggaaataaaaggttgtctgtatacaattttttagaaactattttctctttctctttctttttttttgagacagagtctcactctagtgcccaggctggaatgcagtggtgtgatcttggctcactgcaacctccacctcccaagttcaagtgattctcctgcctcagccttccaagccgctggaattacaggcatgcaccaccatgcccagcttaatttttctatttttagtagagacggggtttcactatgttgcccaggctggtctcaaatgcctgacctcgttatccacccaccttggcctcccaaagtgctggkattacaggcgtgagccaccgtgcccagcccaaaagtattttcactggccaacagattatagaggttggattaaacacctgaatgaacatcaggttagaaaattaatagctttatttatgtatttatttatttatgagatgga

SEQ ID NO: 236358 - DNA, 506 bp, Homo sapiens
  misc_feature (1)...(506): n = A,T,C or G
aacaatgagtactcatggacacaggaaggggaacatcacacactggggcctgttgtggggtgacaggctaggggaggaaaagcattaggggatatacctaatgtaaatgacgagttaatgggtgcagcacaccaacatgtcacatgtatacatatgtaatgaacctgcacgttgtgcacatgtaccctagaacttaaagtataataaaaataagaaggaggttgggcaaaattaccaacaatcttcaactatgaakttttatgagtaggggcttcccacaccatcaggcactccaagttggagaaacaagggatgttgaattgaaagtttaattttttaggcttgatagtcagattaggaaagttttgggtacacctttcccactctagagccctctccctaactcacggccaatttgggacatgggctcaatggaaaagagtgctgagatcaattagaaatatccttcatgaacataggagcagcattctgctcaaggtgcnnnn

SEQ ID NO: 236359 - DNA, 415 bp, Homo sapiens
tttcttgtgtcctgttttcccagaaagagctgggaacctttgctcaaagctccatcgcccttcaccatcagtacaaccccaagtttcagaccctgttccaaccctgtaacttgatgggagctatgcagctgattgaagacttcagcacacatgtcagcattgactgcagccctcataaaactgtcaagaagactggtaggagacagatgtgtcagctttaagtttttacttgcggtgagaggtggtgggaatcttatcccatagataactaaggatacttgcctaggaatggaggacacaggacatttgtaatttcttccttctctcttttatcctccctttgtactcattatccaagttctagaattacatgataatctcygggcctgggtaaagtgtggaggcagtggacagt

SEQ ID NO: 236360 - DNA, 601 bp, Homo sapiens
tttatattaaaaaaagataattggctcacagttctgcaggctgtacaagcatggcatcagcatctgctcagcttctagggaggcctcagggagtttttacacatagcagaaggtgaaggaggagcaggcacatcacatggcaaaagcaggagcaagagagagtggcagaggtgccctataaacaaccagatctcatgagaactcactcatgacctcgaggacagcaccaagccatgagggatacaccctcaagactcaaacacctcccaccaggccccacctccaacattgaggattacctttgagcatgagaattgggcagaaacaaatatccaaattctgtcaccattaaataacaactctctattctctctttctcctagcccctagtaaccgccattctactkactgtctttatgaatttgattattctaggtacgtcatataagtggaatcacacagcatttgtctttttgtgtttggcttatttcacttagcaaaatgtgctcagagtacatacatgttttagcatatttcagaattttactcctttttaaggctcaataatattctattgtatgtatataccacattttgttta

SEQ ID NO: 236361 - DNA, 611 bp, Homo sapiens
ctaatatgcacaaagcataccttgttaattattgccaaaggattctttctacttctgagcactaacaaatgagtcattcagaaacagatcacgttttgtaatctgtacatgcagattagtttgacaaagtctaaaagatgtaaaaatcatttagcatgttagtataaatactacatacagcataacaagccagctttaaagattataatatggaatactaatgttttaaataaatggtgttgatattattttcagttttaaacttaaagtgaaaagcattcaaatctgtgtatcaaagtatatatttattattattttgccttctcaattcctattgtatcatcattgaagatattttatcagcactgaagatcaattgcttttgaaattaatagtggtaattaactactgatgttggtttgcagaaatagtactaacttatgacagattaaattaagtgtgcaaatacaattactgaagtagtgtctaattttcatgatgttttggtatcattcacatctataaatccccatgraagcatccaatttatgtcagctttgggttacactacaggaggattaccctcttgttcctgaggtacttctcatgaa

SEQ ID NO: 236362 - DNA, 560 bp, Homo sapiens
gctttccatctctctccttctcttggtgtccaagccatcctttactgtcataactctcatcttgcttttttttttttcttcttgcctatccaaactctttctgtctgttacttctatgatcttttctggttcttctcattcaatccttccctctcattctcttttccacttctccatgtgtctctcattrtatttgtttgtttgtttttgtttttttactatcttgatcttttaggttgtacttctcagaagtttgtaggctgtcactaccgattccatgtttagtttgtcccagtcaccaccatgggcatatcattctgttggtgtgagagaggtaacagatctgtcaggaaggaataatatattcatttattcatttgtcagacgtgttgtgtgactgctaggtaccaggcattatactaagagccaggtagggacagatacaaagaagaatgagatggtgtccacttgcgatgagctcatattctaatcagaaacaaataggtcaacaaattcttacgatgaagctctgacgtgggctgcaatagagataggtagaa

SEQ ID NO: 236363 - DNA, 498 bp, Homo sapiens
tgtaattacagtataatttaattttgtattctgcttttcacttttagcataaatatatttctatactgttgtacattcatagcacattccgtatataatacaatgtaatcatttccatattgttggactttgggtggcttctaatttttcaccattataaacaatagtgaatatattattatattattttgtcattatatacaatagtaaaaacttataataaaaaagtttttccttcaaccaagcatatctttaggataaacttccagaagtgagctccctaggttgtagatattcctatgtggatastcaaatgcaccagggatgtctaatgcatgtatttctaggtttgatatgaacctttgctagcatggaattatgttcttaaagatcttctttattcaaacactgatatggcattggtggtggggagtgattggcaacagtttgtacttttggatttatatttggtaacaaaaaagaaaaaaattaagacat

SEQ ID NO: 236364 - DNA, 474 bp, Homo sapiens
tttttctttaagcttttgaacagaaaagataggttccttggactggatagtttctattgatctatctttgagtttactgatttttcttcttacatttcaaatatgctgctgagcttaatgaatttttcatttcagctattgtacttttcaactctagaatttttatttggttctcttttatagtttctacttctctgttgagatttcctatttgttgagtcattgttatgttttactttaattcttttaacacagattctttaagttctttcaatgtatttattatagctgctttgaaggttttatcagaatcattttttgccatttatttgccatttattaatagtaaactgcagcctattttctctttttgttctaaacataattttaagagtattttgttaacattatcaktttcaggcttctctctatttaagcattaaacattttaatacctttttactaaaaagatct

SEQ ID NO: 236365 - DNA, 472 bp, Homo sapiens
gtggttactgttactgaaattgtaaattatgtaggggctgtctgttttatgtctgatgtatttgttaatatttagaattcctatttctgaaaaatatgtcaagcttcttattacaatacagaattgtattgtaatgtatatattacattatgtatacataaatatatgtatacatatatacaaatgtataaatttataatgtatataaaaatgtatacagaacatttttaatcaaaataaactaaaaactagtggatggtagcagtgagcttgatattagtaattcggtaggacatttggattgaaatgttctagtttcttaacattcaaggagagattccaaatctgcttatcttttattttattttattttatttttttttttttgagacagagtctcactctgtcgcccatgctggagtgccgtggcgcaatcttggcycactgcaagctctgcttcccaggttcatgc

SEQ ID NO: 236366 - DNA, 480 bp, Homo sapiens
gaattcagtcttggacatactgacttgaggtgtctaagaaacatctgtatgtttatgtgcatgtctgtctattcagcaggttgttggatctatgagtctgagacttagagacaaggtcagagctagagatgaagttgtgggagtcaccagtgtgcaagtggtgattaatccatgggtgtgcatgagagttcttgcaaggggaagaggaaacggaagtaagggcttatgcaaggaggattgttgagtaaagtggaaggcccagcctctgcctgctcactaatgtcagtgctgaacaagcccactggcagtggrtgctgagggaaggaaggaaggagtctgtctgtaagcttgagcactttttccaagaggtggagaaggcagagagcccaagccttgaagaaatgttccttagtggcctggcatctcggaaatttgactccatgactttggagtgatctttccattattattttccttgag

SEQ ID NO: 236367 - DNA, 451 bp, Homo sapiens
attgcactacatttcctgaaaacccctctcgctctcctaggactgttctacatttggcctgtgcccatggccgtgtgcaagtggtcactctcttgctgcacagaagatgccagatcgacatctgtgacagactaaacaggacacctttaatgaaggtatatagtagccaactctttcagcatgaaatggatttgatttaaatacatagaattaaaatgaatttgtctcatttaaatatagctagttggtgaaacctgtggaatatgtattttgaattcttagaatttatagtctagttttttgtctaacactaataggctgtacacagccaggaagaggcttgtgccatcgttctcctggaatgtggcgccaatccaaacattraggatatctacggcaacactgctctccattatgccgtgtataataaggggacttcactggcagaaag

SEQ ID NO: 236368 - DNA, 421 bp, Homo sapiens
aattacatttatttaaatgataaaatggtaakacagtgggaggaaagcaatgactgagaagagacatgaaaatgtatctgaccttgagagttgcaacaaatattcccagccaaaccagtctgtttaatgtgctttcatgcatgcaagtttatctgtttgactcaaactgtttaaacttataattccatcatggccactttaaatgtttttggaaacaaatacacatactttcacatatttaagaaaatcaccactctccaatgtttctgttgaatcagacttttacatgatgttgtttaataaaatatggtaggttttgacatgtatgattttatcatataagtagcgtaactcctcagccaaaaatttagcatttgactctatagtagaaggctgagtcctgtacgttatgttctaaaga

SEQ ID NO: 236369 - DNA, 389 bp, Homo sapiens
aattacatttatttaaatgataaaatggtaagacagtgggaggaaagcaatgactgagaagagacatgaaaatgtatctgaccttgagagttgcaacaaatattcccagccaaaccagtctgtttaatrtgctttcatgcatgcaagtttatctgtttgactcaaactgtttaaacttataattccatcatggccactttaaatgtttttggaaacaaatacacatactttcacatatttaagaaaatcaccactctccaatgtttctgttgaatcagacttttacatgatgttgtttaataaaatatggtaggttttgacatgtatgattttatcatataagtagcgtaactcctcagccaaaaatttagcatttgactctatagtag

SEQ ID NO: 236370 - DNA, 413 bp, Homo sapiens
aattacatttatttaaatgataaaatggtaagacagtgggaggaaagcaatgactgagaagagacatgaaaatgtatctgaccttgagagttgcaacaaatattcccagccaaaccagtctgtttaatgtgctttcatgcatgcaagtttatctgtttgactcaaactgtttaaacttataattccatcatggccactttaaatgtttttggaaacaaatacacayactttcacatatttaagaaaatcaccactctccaatgtttctgttgaatcagacttttacatgatgttgtttaataaaatatggtaggttttgacatgtatgattttatcatataagtagcgtaactcctcagccaaaaatttagcatttgactctatagtagaaggctgagtcctgtacgttatgt

SEQ ID NO: 236371 - DNA, 618 bp, Homo sapiens
aacttatacgccagaagagattgggagactattttcagcatcctgaaaaaaatttaactaaaaatgttatatcctgtcaaattaaacttcataaatgaaggagaaataaaatcctttttagacaagcaaatgctgaggaaatttrttttaagtagaccatccttacaaaaggtccttaagggagtgctaaatatggaatctagagaacctgctgccataaaacacttgagcacatagcccacaggcactataaatcaactatgctgtcaagtctacataacaaccagctaacaacatgggtatgaaatcaaaatcacacctatcaatactaatcttgaatataaatgggctaaacacctgcttaaaagacattgagtggcaaactggataaaaacacaagacccaaccatcactgccttcaagagacccatctcacatgtaacaacacccacaggctcaaaacaaagagaggggaaaatatctatcaagcaaatgaaaaacaaaaaaggacaggagttgctattcttctatcagataaaacagatgttaaacaatgaagggcattactataatgataaagagtacaatccaacaaggagacctaacaatcctaaatat

SEQ ID NO: 236372 - DNA, 601 bp, Homo sapiens
ttttatccagaatctaggtggtgggtacatgcatgttcactgtataaaactttcagcttctatagatgtttgaaaattctcataataaaatggaaaataatggcacaattctatgtattttttaatcaactttgaaatatgccgataagaaccacattgctaattaaagaagtgaagtacaggaaggtttgggctgtgtgtttctgtgtaaaagaaggaggagtcaaaagttagccaggcgtggtggtgcacgcctgtagtcccagctacttgggaggctgaggcaggagaatggcgtgaatccaggaggcggagcttgcagtgagccgggatcgcaccactgcactccagcctgrgcgacagagctagacttaatctcaaaaaaaaaaaaaaaaaagaaggaggaggagtcagatttacataaacttgaacaagcaagaactattatttctagaacatgtaccaaaacacttacaagactgtctctggagagggaacttattttttgttctctgttataattgaatcattaaccatgtgcatgtattaattcaataaataaacacattaaaattaaatgagagtttagtatccataacat

SEQ ID NO: 236373 - DNA, 556 bp, Homo sapiens
catgtaaagagaggggaatatgtttgcagttttgttttttgttttttgtttttttcaaacaaagagaatactgatgaagaggcaaagatttggaatttagtaaagaatagggatcatttgttaattttcagaagcttttaggataaatgaaatgaaaaagatgctgggttattttggcagggagtttgatacayttgactaaaagatttaaaaatatacctacatgtcaagaaaaactgaaatattctatacgttttactacttccacttagcagagtttatcttgagccactgtccgtggcatgtccaatagatgtaaaggcttcacacacactcctcatatgaacaagttactgaaatattgtcaaagtgtcacattttctctattataaggtaaattgtttttcacaattctattttctttgaaatatgggtaagtcctataatcaatcttcacctttaatgtggtagtactaaacactacccagagtaacaactaggtatttaatagaacatcgtataatagagagattctcagaatcaaattagataggtg

SEQ ID NO: 236374 - DNA, 517 bp, Homo sapiens
aagaaaacaaaaaacaaaaactattgcaccttttgaaattgtcaacggcatgtatatttgcctggttcttcaataaaaattccaccatatgctgtctcctggaatttatagcaaacaaaagtggagtgtttccctcctgtaagaaagcaaaaacaatttataattcacaaaattacatatttctccactgaactaaaaatcttctataagatgctatgaacttaaacatgcaatatagagagaaagtaaatgcaaagcagtcccgtccctttcactcctctgtgctttcccacacactgccttgaaacacccctcctctgcctccccacattaacttcagtcatctccaaaactcactttatttaccagtccccaaaatccttgcttctatctcagcatttagcacwgtccattgtaattatttcattgtttcccactgaaaccaagagattctcaagggcaagggctgtatcttttttctctataaccctaaaacctaagacatagtagcgaatgc

SEQ ID NO: 236375 - DNA, 562 bp, Homo sapiens
ctaaggccaatcaaatgtaaccttggctcctgttcacaagatgttcctcattttcatctgagaccttttaattctggccttcactgtccatctttctgtcagccttctgatcacaagtatttaacaattattttcagtggtccaaatttttcctcatcatgctgtcttctaagcattcccaactctcctgacctctctgttttacccacttctgaacctgcttctacattctcagatatctttgtcacagcctggtaatgtrgtaaaagaagaaaagtccattttcaggggaaaaattcacaaaggcttcagatatcttcatgaaaagcagctgagtactggttaccaacacaatggggaaaaggccttgaaggcatttcatagctccacttcacagcactaattttgtgtacaatcataaagaaagaggtgtaattggctcacggttctgcaggctgtaaaggaagcatagtggcttctgcttccgggaggactcaggaagcctcccaatcataccagaaggccaaggggcaaggaaatgcttcatgtggcagcagtagaa

SEQ ID NO: 236376 - DNA, 588 bp, Homo sapiens
tgtaaccttggctcctgttcacaagatgttcctcattttcatctgagaccttttaattctggccttcactgtccatctttctgtcagccttctgatcacaagtatttaacaattattttcagtggtccaaatttttcctcatcatgctgtcttctaagcattcccaactctcctgacctctctgttttacccacttctgaacctgcttctacattctcagatatctttgtcacagcctggtaatgtggtaaaagaagaaaagtccattttcaggggaaaaattcacaaaggcttcagatatcttcatgaaaagcagctgagtactggttaccaacacaatggggaaaaggccttgaaggcatttcatagctccacttcacagcactaattttgtgtasaatcataaagaaagaggtgtaattggctcacggttctgcaggctgtaaaggaagcatagtggcttctgcttccgggaggactcaggaagcctcccaatcataccagaaggccaaggggcaaggaaatgcttcatgtggcagcagtagaagcaagactgagagaggaaagaggagcccgccctgttataca

SEQ ID NO: 236377 - DNA, 592 bp, Homo sapiens
tgtaaccttggctcctgttcacaagatgttcctcattttcatctgagaccttttaattctggccttcactgtccatctttctgtcagccttctgatcacaagtatttaacaattattttcagtggtccaaatttttcctcatcatgctgtcttctaagcattcccaactctcctgacctctctgttttacccacttctgaacctgcttctacattctcagatatctttgtcacagcctggtaatgtggtaaaagaagaaaagtccattttcaggggaaaaattcacaaaggcttcagatatcttcatgaaaagcagctgagtactggttaccaacacaatggggaaaaggccttgaaggcatttcatagctccacttcacagcactaattttgtgtacaatcataaagaaagaggtgtaattggctcacggttctgcaggctgtaaaggaagcatagtggcttctgcttccgggaggactcaggaagcctcccaatcataccagaaggccaaggggcaaggaaatgcttcatgtggcagcagtagaagcaagactgagagaggaaagaggwgcccgccctgttatacaacca

SEQ ID NO: 236378 - DNA, 422 bp, Homo sapiens
ttaataacagctgtctatgtgggatatttggaaaaatagtgcacacataggcccatggaaggtgtatgtccaaagaccataagcatttacattagagtgattaacaaaggtcttcctctgtgcagagccattcttcaaagattgggagaggtggccatttaatccaaattgcagttttcaacaaaaacttacaaagcatataggaaatgggaaaacaygcatagcccattcaaagcaagaaaatgaatatccagactcatctttgaaaaaacacaggtctcagacttactaaattaagatttcaaaacagctgtcttaaatatgcttaaagggctaaaggaaaacacagacaaggaaataaaggaaatcaagaaaacaatatataaacaaataagaatatcaacaaagagattggaattgta

SEQ ID NO: 236379 - DNA, 422 bp, Homo sapiens
ttaataacagctgtctatgtgggatatttggaaaaatagtgcacacataggcccatggaaggtgtatgtccaaagaccataagcatttacattagagtgattaacaaaggtcttcctctgtgcagagccattcttcaaagattgggagaggtggccatttaatccaaattgcagttttcaacaaaaacttacaaagcatataggaaatgggaaaacacgcatagcccattcaaagcaagaaaatgaatatccagactcatctttgaaaaaacacaggtctcagacttactaaattaagatttcaaaacagctgtcttaaatatgcttaaagggctaaaggaaaacacagacaaggaaataaaggaaatcaagaaaacaatatataaamaaataagaatatcaacaaagagattggaattgta

SEQ ID NO: 236380 - DNA, 589 bp, Homo sapiens
tttctttcaaggtgcaatgatagtacaggcattgggtaagatttctcaatccaaagggaataaatttccyagaaaaataacacaaatgcaagtccaagcccaggaggacagtattcactcaatcttaaagctccataatcatcaagagaactcactatcatgcagacagcattaaggagatagtgtttaaccatttgggaaggatccaccccccatcctcatcttttgaccccactcccaaaataatctccaccattctccccacacccgtacctccaacccccatgcttcaccatgattaaatcaccttccaccaggtcccaactttcacattccccattacaattccacatgagtatcggtagggacacagaaccaaatcgtattattctgaccctagttcccccaaatctcatatctttgacacactgcaaaatacaatgatgccttctctacagtcccccaaagtcttaagtcattccagcctttactgaagtatccaaagcccaaagtcttatctgacacaaggctgcagtcccttctgcctctgagcctctgaaatacaaagtaagttaattactttcaaggt

SEQ ID NO: 236381 - DNA, 592 bp, Homo sapiens
taatatgtaataactttagatttttaaacaaaatttagaaaataatctttccacagtagcattagaacagagggttttgtctgtctcattactgttgaatcctaagcacctggagtagtatctggtccatattaggtgctgaataaacatcagctgaatgaatgtatccctctagttagcagcttaaaactaaccagaagacattgtctaggtttcagcctaaagactatcttaaccccaaaggcttctctgaccctaactaaagtagatcccctctagttctccttcacagaccactgcataagtctaccacggcacattttacaatctgtaaaatgactttctgtatctgtatatttatttatctttcttattcaccataatattaacatcataagaattagaattgtgtctgtcccactacatcttcagtgactagcgcaggctaggcacgcagtaattgcatgatttttcgtggaaataaaggtacactggggcttaacttcacgagaaaatamtcatttggacattttattgctcttcccacaagaaaaggtaggagatgggaattagtagtgatctcagtgggatc

SEQ ID NO: 236382 - DNA, 559 bp, Homo sapiens
ttactgataatctttaaaactgtctttatttctggaaaattacttaagtcacatgaactaaaaggcattatactttttacttttctgacaaaatatttgatttaagctctcattaaacccattaatcaatgctgttttagaaataaacatcacacacacataatacatgtaaatacatacacagaagaagataaaaaaaattcatcccgaggcagaaattgaaccctgaacacaggatgccattgtgaaaagagaaaacatggccacatgsttacagcttcaagttcccaaggacatgcaagacaagaaaaaaactcatccagtttttctcaggaaactgcagcaaagtttgtaacagaccagtttgctgttctgccttgaaaagcgtcctaagccagtgttctatcataaggtacccctctttatgacagaataatacagaaaaacacacaaagcacatcagatttgctgcagcttaagtctagcatcaaaaatcctttcttccattaatcaaaactttataggagataaacagtgattttttaccattaattcaacc

SEQ ID NO: 236383 - DNA, 583 bp, Homo sapiens
gatctggtcatttggttttcttcacctcttcctttggacatgtctgggattctgaagcactgacccattcttcctactcataagaagcaagtgttttagaatatgagtgctattattattcaggtatggtagagctaatggatcaggagacagctgccactgaaaatacagtttgttacttacagttcccaagaagaaggggcatgacacactatgcagggccacacaggcccagtttttttgtttgtttgtttttcttgagatggagtctcgctttgtcgcccaggctggagtgtagtggcatgatcttgggtcrctgcaacctctgtctcccagattcaagcaattctcctgtctcagccttccaagtagctgggattacaggtgtgcaccaccatgcctggccaatttttgtatttttagtagagatttcttcatgttgatcagcctggtctagaactcctgacctcaaagtgatccacctgcctcagcctcctaaagtgctgggattacagatgtgagccactgtgcctggccccaatttttttttaaggcctgaaacaaattatttgaaacccagtca

SEQ ID NO: 236384 - DNA, 615 bp, Homo sapiens
ccaggttaggggcatcatgcagtgacattctttgctaaagcaaaacaaatgtaaccttggctcctgttcccagtaaactcctcattttcatctgagaccttctaagcctggcctttactgtccatccttctgtcacccttttaattataactatttaacaagtctctacaatggtccagactttccctcatcttcctgtcttcttccaagtcctccaaactctccaacctctggctgttasacaattctcaacctgcttctacattttcagctctctttgttgcagcctgtcagtgtggtaaaagaagaaaagtccattcacagggggaaaattcatgcaggctacagatatttgcatgaaaagaagctgagagctgattaccaagacaagaaggaaaagaccttgaaggcatttcatacctccacttcagagcactaattttctgtaagatcataaagaaaagatgttgaactggctcatggctctgcaggctttaaaggaatcatagaggctcctgctcctaggaggaatcatgaagcctcccaatcataccagaagaccaagcagcaatgggctattttatatggcagaagtaggagcaagacagagaaagg

SEQ ID NO: 236385 - DNA, 620 bp, Homo sapiens
ggggcatcatgcagtgacattctttgctaaagcaaaacaaatgtaaccttggctcctgttcccagtaaactcctcattttcatctgagaccttctaagcctggcctttactgtccatccttctgtcacccttttaattataactatttaacaagtctctacaatggtccagactttccctcatcttcctgtcttcttccaagtcctccaaactctccaacctctggctgttagacaattctcaacctgcttctacattttcagctctctttgttgcagcctgtcrgtgtggtaaaagaagaaaagtccattcacagggggaaaattcatgcaggctacagatatttgcatgaaaagaagctgagagctgattaccaagacaagaaggaaaagaccttgaaggcatttcatacctccacttcagagcactaattttctgtaagatcataaagaaaagatgttgaactggctcatggctctgcaggctttaaaggaatcatagaggctcctgctcctaggaggaatcatgaagcctcccaatcataccagaagaccaagcagcaatgggctattttatatggcagaagtaggagcaagacagagaaaggagaaggttccaca

SEQ ID NO: 236386 - DNA, 615 bp, Homo sapiens
ccaggttaggggcatcatgcagtgacattctttgctaaagcaaaacaaatgtaaccttggctcctgttcccagtaaactcctcattttcatctgagaccttctaagcctggcctttactgtccatccttctgtcacccttttaattataactatttaacaagtctctacaatggtccagactttccctcatcttcctgtcttcttccaagtcctccaaactctccaacctctggctgttagacaattctcaacctgcttctacattttcagctctctttgttgcagcctgtcagtgtggtaaaagaagaaaagtccattyacagggggaaaattcatgcaggctacagatatttgcatgaaaagaagctgagagctgattaccaagacaagaaggaaaagaccttgaaggcatttcatacctccacttcagagcactaattttctgtaagatcataaagaaaagatgttgaactggctcatggctctgcaggctttaaaggaatcatagaggctcctgctcctaggaggaatcatgaagcctcccaatcataccagaagaccaagcagcaatgggctattttatatggcagaagtaggagcaagacagagaaagg

SEQ ID NO: 236387 - DNA, 615 bp, Homo sapiens
ccaggttaggggcatcatgcagtgacattctttgctaaagcaaaacaaatgtaaccttggctcctgttcccagtaaactcctcattttcatctgagaccttctaagcctggcctttactgtccatccttctgtcacccttttaattataactatttaacaagtctctacaatggtccagactttccctcatcttcctgtcttcttccaagtcctccaaactctccaacctctggctgttagacaattctcaacctgcttctacattttcagctctctttgttgcagcctgtcagtgtggtaaaagaagaaaagtccattcacrgggggaaaattcatgcaggctacagatatttgcatgaaaagaagctgagagctgattaccaagacaagaaggaaaagaccttgaaggcatttcatacctccacttcagagcactaattttctgtaagatcataaagaaaagatgttgaactggctcatggctctgcaggctttaaaggaatcatagaggctcctgctcctaggaggaatcatgaagcctcccaatcataccagaagaccaagcagcaatgggctattttatatggcagaagtaggagcaagacagagaaagg

SEQ ID NO: 236388 - DNA, 604 bp, Homo sapiens
agggacactgtgcagccaaattctttgctaaggcaaaagaacaaaaccttggcccctgttcccagtaagtttctcattttcatctgagagcttctaagcctggccttcactgtycatccttctgtcagccttgtaatcacaactaacaagtcattacaatggtccaaactttccctcgtcttcctgtcttcttccaagctctccaaacgctctaacctctggccattaccgaattctgaacctgcttctacattttcagctatctttgtcgcagcctggcaatgtggtaaaagaagaaaagtccattatctggggaaaacttcaagaaggcttcagatattagcatcaaagaagcccagtgctaccagccaaaagattggggaaaaggccttgaaggcatttcatagcttcacttcacagcattgattttctgcatgtacataaagaaaagaggttgaattgactcacagttctggaggctgtaaggaaagcatagtggtttctgcttttaggaggactcaggaagcctcccatttataccagaaggccaagcagcaatgaaatgtttcatattccaggagtagaagcaagacagaggaaagat

SEQ ID NO: 236389 - DNA, 604 bp, Homo sapiens
agggacactgtgcagccaaattctttgctaaggcaaaagaacaaaaccttggcccctgttcccagtaagtttctcattttcatctgagagcttctaagcctggccttcactgttcatccttctgtcagccttktaatcacaactaacaagtcattacaatggtccaaactttccctcgtcttcctgtcttcttccaagctctccaaacgctctaacctctggccattaccgaattctgaacctgcttctacattttcagctatctttgtcgcagcctggcaatgtggtaaaagaagaaaagtccattatctggggaaaacttcaagaaggcttcagatattagcatcaaagaagcccagtgctaccagccaaaagattggggaaaaggccttgaaggcatttcatagcttcacttcacagcattgattttctgcatgtacataaagaaaagaggttgaattgactcacagttctggaggctgtaaggaaagcatagtggtttctgcttttaggaggactcaggaagcctcccatttataccagaaggccaagcagcaatgaaatgtttcatattccaggagtagaagcaagacagaggaaagat

SEQ ID NO: 236390 - DNA, 613 bp, Homo sapiens
aattctttgctaaggcaaaagaacaaaaccttggcccctgttcccagtaagtttctcattttcatctgagagcttctaagcctggccttcactgttcatccttctgtcagccttgtaatcacaactaacaagtcattacaatggtccaaactttccctcrtcttcctgtcttcttccaagctctccaaacgctctaacctctggccattaccgaattctgaacctgcttctacattttcagctatctttgtcgcagcctggcaatgtggtaaaagaagaaaagtccattatctggggaaaacttcaagaaggcttcagatattagcatcaaagaagcccagtgctaccagccaaaagattggggaaaaggccttgaaggcatttcatagcttcacttcacagcattgattttctgcatgtacataaagaaaagaggttgaattgactcacagttctggaggctgtaaggaaagcatagtggtttctgcttttaggaggactcaggaagcctcccatttataccagaaggccaagcagcaatgaaatgtttcatattccaggagtagaagcaagacagaggaaagatgccacatcctgttatacaaccagatct

SEQ ID NO: 236391 - DNA, 604 bp, Homo sapiens
agggacactgtgcagccaaattctttgctaaggcaaaagaacaaaaccttggcccctgttcccagtaagtttctcattttcatctgagagcttctaagcctggccttcactgttcatccttctgtcagccttgtaatcacaactaacaagtcattacaatggtccaaactttccctcgtcttcctgtcttcttccaagctctccaaacgctctaacctctggccattaccgaattcygaacctgcttctacattttcagctatctttgtcgcagcctggcaatgtggtaaaagaagaaaagtccattatctggggaaaacttcaagaaggcttcagatattagcatcaaagaagcccagtgctaccagccaaaagattggggaaaaggccttgaaggcatttcatagcttcacttcacagcattgattttctgcatgtacataaagaaaagaggttgaattgactcacagttctggaggctgtaaggaaagcatagtggtttctgcttttaggaggactcaggaagcctcccatttataccagaaggccaagcagcaatgaaatgtttcatattccaggagtagaagcaagacagaggaaagat

SEQ ID NO: 236392 - DNA, 621 bp, Homo sapiens
cactgtgcagccaaattctttgctaaggcaaaagaacaaaaccttggcccctgttcccagtaagtttctcattttcatctgagagcttctaagcctggccttcactgttcatccttctgtcagccttgtaatcacaactaacaagtcattacaatggtccaaactttccctcgtcttcctgtcttcttccaagctctccaaacgctctaacctctggccattaccgaattctgaacctgcttctacattttcagctatctttgtcgcagcctggcaatgtggtaaaagaagaaaagtccattatctggggaaaacttcaagaaggcttcagatattagcatcaaagaagcccagtgctaccagccaaaagattggggaaaaggccttgaaggcatttcatagcttcacttcacagcattgattttctgcatgtacataaagaaaagaggttgaattgactcacagttctggaggctgtaaggaaagcatagtggtttctgctttyaggaggactcaggaagcctcccatttataccagaaggccaagcagcaatgaaatgtttcatattccaggagtagaagcaagacagaggaaagatgccacatcctgttatacaacca

SEQ ID NO: 236393 - DNA, 525 bp, Homo sapiens
tgttccctgctccaacagagtattttgctcgggtgtcctgcagtggtgttgaagctctggggcgggactggctgggaggagggcccagggccacccacggccacagaggacagtgccccaaaggagagcctcgggtgtcacgactgccacgccatcaaaaactgccggaaatgggaagttttygggatgacccaccaagtgcttttcccagtggtctgggctctgagttggaaccctcttgcctgcattccatcctgtctgcaacactgcacgcgtgccccgaagtgctcctgaatgatgagacgaaacgcattttccttgaccttttaaaccccatgttttcaaagcaaacaatagaattcaagaaaatgtttaaaagcacctcagatggtctgcagataacactggggttactggcgctgcaacattttgaattagcaaattcattatgccatagtttaaagtacaagcagaacaatgcaagtagattaattttaagagttgtcttagaatgatttctttcgc

SEQ ID NO: 236394 - DNA, 525 bp, Homo sapiens
tgttccctgctccaacagagtattttgctcgggtgtcctgcagtggtgttgaagctctggggcgggactggctgggaggagggcccagggccacccacggccacagaggacagtgccccaaaggagagcctcgggtgtcacgactgccacgccatcaaaaactgccggaaatgggaagttttcgggatgacccaccaagtgcttttcccagtggtctgggctctgagttggaaccctcttgcctgcattccatcctgtctgcaacactgcacgcgtgccccgaagtgctcctgaawgatgagacgaaacgcattttccttgaccttttaaaccccatgttttcaaagcaaacaatagaattcaagaaaatgtttaaaagcacctcagatggtctgcagataacactggggttactggcgctgcaacattttgaattagcaaattcattatgccatagtttaaagtacaagcagaacaatgcaagtagattaattttaagagttgtcttagaatgatttctttcgc

SEQ ID NO: 236395 - DNA, 595 bp, Homo sapiens
gcaggccttgttgagttgcggtgggcttcacccagttcgagcttccccagccactttgtttacctattcaagcctcagcaatggtggaggcccctcccccagccaggctgccacctcacagttcgatcttggactgctgcrctagcagtgagcaaggctttgtgggcatgggacccaccgagccaggcgtgggatgtaatctcctggtgtgctgtttcctaagaccgttgaaaaagcccagtatttgaatgacagtgtcctgattttcggtatagtctgtcatggcttcccttggctaggaaagggaactcccccgaccccttgtgcttcctgggtgaggtgatgccccgccctggttcagctcaccctccatgggccacacccactgtccaatcagtcccattgagatgaaccaggtacctcagttggaaatgcagaaatcacctgtcttctgcattgatcacgctgggaactgcagaccagagctgttcctattcggccattttggaatggaccaacaagatttatatgagaacatttatagtggcattattcataataggttaccaactggagcaatccaaatgtccaaaaa

SEQ ID NO: 236396 - DNA, 645 bp, Homo sapiens
cagccaggatgactgtggggctgggtcatttctcagcttgttagagactgagccagagatagtctttagtccagactgttacttaaagcacactggtccctcaaggctgaggagtctgggaagatttgcaggggtttctgtagtttaagataaggtttctgaaggcaagatgtcctcaccttagaggcgaccctttctgtgcagagtgtcggtatctatgtagcactgtgtattcactgctggcacagaggtactgagaggtatgtgaggggctggcagactccagggtcaggggaaaacgctctatccttattctggagactgttgactcagagcaaagatctcccttctctgtggaattaacccataggaatggtggatgaggtgtaattccattcctggatcttgaccagtacattttgtcatggcccatggtttgagaacattccagagtgatcttctttcctgcccctataacacggtgtcttggggtctggtagattycagcttccttaaggcctatgggaagagacaaaaactggcaacagagttcatgatgaactttgaggctgagccatgcacaaacccaacacagaggaagtgttccttctagattttggaatgaactgtgcctattacttacct

SEQ ID NO: 236397 - DNA, 517 bp, Homo sapiens
gtcctttgagttttaagctattgcttgtagtgttctggtgaatagttctgttgatttaactattggagtttagggctaagcgtattggggggtatataatcccagtttgggtctcagctattgtgtcttcagaagtattaaagcctccttcgtagtttattttatttcagctagggttttttacaacctagatgacgcttagcgttgttaaggatagatctaaaacactctttatgccgagttctattagctcaggttaattgtatggccgcggtggctggcatgaaatkaaccaaccctggatattagtatagcttagttaaacttttgtttattgctaaagatctatcactgctgtttcccgtgggggtgtggctgggcaaagtgttttgagctgcatttgtgcatgcttgatacttacttcttttgatcaaggtgatttagagggtactttcactgggatggggatgcttgcatgtgtaatcttactaagagttaatagaaaggccaggaccaa

SEQ ID NO: 236398 - DNA, 544 bp, Homo sapiens
ccaagtcctttgagttttaagctattgcttgtagtgttctggtgaatagttctgttgatttaactattggagtttagggctaagcgtattggggggtatataatcccagtttgggtctcagctattgtgtcttcagaagtattaaagcctccttcgtagtttattttatttcagctagggttttttacaacctagatgacgcttagcgttgttaaggatagatctaaaacactctttatgccgagttctattagctcaggttaattgtatggccgcggtggctggcatgaaattaaccaaccstggatattagtatagcttagttaaacttttgtttattgctaaagatctatcactgctgtttcccgtgggggtgtggctgggcaaagtgttttgagctgcatttgtgcatgcttgatacttacttcttttgatcaaggtgatttagagggtactttcactgggatggggatgcttgcatgtgtaatcttactaagagttaatagaaaggccaggaccaaacctgtctgtttacggggctgta

SEQ ID NO: 236399 - DNA, 549 bp, Homo sapiens
aattttaaaaaattattattttatcttaaggtctagattacatgtgtragaggtacaggtttgttacataggtaaatgtgtgccatgatggtttgctgcacgtatcaatgcatcacctaggtattaagccccgtaggcattagctattaatcttgatgctctccctcctgaccccaacaagccccggtgtttgttgttcccttccctgagtccatgtgttctcatcattcagctcccacttataagtgagaagatgcagtgtttggttttttgttcctgcgttagtgtgctgaggataacagctccgagttcatccatgtccctgcaaaaagcatgatctcattcatttgtatggctccatagtattccatgatgtatatacaccacatttttttatcctgtctatcattgatggacatctgggttgattccatgtctttgctattgtgaatagtgctgcaatgaacatacaaatacatgtgtcttcataatacaataatttatatttaaacataaggtaattttaaatcagtttggggattaaaatta

SEQ ID NO: 236400 - DNA, 549 bp, Homo sapiens
aattttaaaaaattattattttatcttaaggtctagattacatgtgtgagaggtacaggtttgttacataggtaaatgtgtgccatgatggtttgctgcacgtatcaatgcatcacctaggtattaagccccgtaggcattagctattaatcttgatgctctccctcctgaccccaacaagccccggtgtttgttgttcccttccctgagtccatgtgttctcatcattcagctcccacttataagtragaagatgcagtgtttggttttttgttcctgcgttagtgtgctgaggataacagctccgagttcatccatgtccctgcaaaaagcatgatctcattcatttgtatggctccatagtattccatgatgtatatacaccacatttttttatcctgtctatcattgatggacatctgggttgattccatgtctttgctattgtgaatagtgctgcaatgaacatacaaatacatgtgtcttcataatacaataatttatatttaaacataaggtaattttaaatcagtttggggattaaaatta

SEQ ID NO: 236401 - DNA, 615 bp, Homo sapiens
gtgagcaatctaaaaaaaatatcaagaaagcaatgccatttaaaatctctagaaaaaatataaaatacctaaaaataaatgtaacgaaaaaagggaaagatctctacaaggaaaagtaaaacctctggtaaaagaaattgaagaggacagaaaaaaaaataaaaagatattccatgaacatgaattggaagaattaatactattaaaatgtcagtactacccaaatcaatgtacagattcaatgcaatccctatcaaaatgccaatgacatttttcacagaaataaaaaaaaatcttaaaacaagtaccaagcaataaaagaccctgaatagccaaagcaattctgagcaaagagaacaaagctggaggcatcacaatacctgacttcaaaatatactataaagctattagcagtaaccacaatagcatggtagttatataaaaactgacacataaaccaaaggaactgaatagagagcytgtaaataaatccctccatttatagctgactcatttttgacaaagtttccaagaatatacagtagggaaagtacaatctctcccataaatggtgttgggaaaattggataaccatatgcagaagaatgattggat

SEQ ID NO: 236402 - DNA, 653 bp, Homo sapiens
cacaaaagactttttattacttgtttaatttactgagagaaattattgcacctcttcaaaaaaaaaaagtatattttttgtaaatgtttggtactggtgctttttgtgtgatagaaggaaagtgtttcaattagccaagtgtgggggtgcacacctcagtcccagctgcttgggaagctgaggtaggaggatcacttgagcctagcaggtggaggttgcagtgagccgagattgcaccactgcactcaagcctgggtgacagagtgagatcccacctgaaaaaagaaagaaagaagcgtttgaaagaatatattttctcaattacaaagaggtctagtaaagaaatacaaattttatctattaaaatgtacagtgttctctgaggactgaaagtgtttttatgaaaatgcaagttagttatgtccaatttgtttattcattagtaactctatggaagaatagtataaatatagaaagcactctaattacaagtgtgctacttgatggtgtcacctataaaatgatcacccccrgtaagcaacacccacatcaaaaaccagaatattaccagcactcagaaaccctcttctttgcctgcctcctcattcccaagggtaaccacttctaacagattatactagttgtgcgaattt

SEQ ID NO: 236403 - DNA, 532 bp, Homo sapiens
tcacatgctggataagaggtacctgggctctccacttacaagaagagagcatggttacatttataatcaccattcccaacatgctgtgagtgcaggcagctaccaggaggagaacaaaggaaataaccaggacacccatctctaaacctgttaatgtaatcacacggaacacttctatttaaaattcctgagggttaagatgtaagaatgcttatcaaggtaaatgctgttcacactgcttggagtgtcaggcctagatctctatccatcagaaacaacaatatcaataacaacaacagcaacatgatgatggggcaatttctkaaaagcaccatgtattttatcgatacatgtccgttgcagaaaatccaggtaaatccaaagaagtaataaatgtcttccacaatcccatagcccagagctaactaaccactataaagaacccagcgtggttttaactaatggatcaaaagatgctcatcaaaggctctgagctttcctgagtgccaacaggaaacatccagcatcactg

SEQ ID NO: 236404 - DNA, 532 bp, Homo sapiens
tcacatgctggataagaggtacctgggctctccacttacaagaagagagcatggttacatttataatcaccattcccaacatgctgtgagtgcaggcagctaccaggaggagaacaaaggaaataaccaggacacccatctctaaacctgttaatgtaatcacacggaacacttctatttaaaattcctgagggttaagatgtaagaatgcttatcaaggtaaatgctgttcacactgcttggagtgtcaggcctagatctctatccatcagaaacaacaatatcaataacaacaacagcaacatgatgatggggcaatttctgaaaagcaccrtgtattttatcgatacatgtccgttgcagaaaatccaggtaaatccaaagaagtaataaatgtcttccacaatcccatagcccagagctaactaaccactataaagaacccagcgtggttttaactaatggatcaaaagatgctcatcaaaggctctgagctttcctgagtgccaacaggaaacatccagcatcactg

SEQ ID NO: 236405 - DNA, 455 bp, Homo sapiens
acccagcgtggttttaactaatggatcaaaagatgctcatcaaaggctctgagctttcctgagtgcyaacaggaaacatccagcatcactggtctctccaaggctgcaggtgtctttgcccatagtgcctgttttgtgtcagggaaagaatcaacctgggagccaagcccaggaatcaggatgaccaagacatactgcacaaggagggaacaaagccatccgaggacactcaaggacaaatcaagcaaatgaatttaagggagacgtgctcatggtctgctttgctgctcagcatggctgggaggcacagtggaagatcatgcatcctgcccctgggactcctctgccagagcctgagagctttctcctgcccacaggctaggggtaggacagttggaattgatccatgccttctagctagactgtgggtcccctcagtcttgggcatggtgaca

SEQ ID NO: 236406 - DNA, 455 bp, Homo sapiens
acccagcgtggttttaactaatggatcaaaagatgctcatcaaaggctctgagctttcctgagtgccaacaggaaacatccagcatcactggtctctccaaggctgcaggtgtctttgcccatagtgcctgttttgtgtcagggaaagaatcaacctgggagccaagcccaggaatcaggatgaccaagacatactgcacaaggagggaacaaasccatccgaggacactcaaggacaaatcaagcaaatgaatttaagggagacgtgctcatggtctgctttgctgctcagcatggctgggaggcacagtggaagatcatgcatcctgcccctgggactcctctgccagagcctgagagctttctcctgcccacaggctaggggtaggacagttggaattgatccatgccttctagctagactgtgggtcccctcagtcttgggcatggtgaca

SEQ ID NO: 236407 - DNA, 571 bp, Homo sapiens
caaactagaaaatttaataaatgctgtcagatttgtagacccaagaaaatataaactgccaatcacggaaggaaaaaaatctctcaatgatcttatctttatatgattcccttgctgcctggaaattgacatttccttggggataatctggtcataggattggtgaaggtggaagggaggcaacctccgaaggtggggccctctgctcatctgggacagggagggcctgaggtaggtgtctgtgtgggctggggaggaggatgggagcagtgcttctagatgtttccactttctcctcattagataataatgaatgggtgatttccctagtcactgcagtgtgaggaaatctacaaaattaatttcacaatacactttacaggataggtggagaaacacatgaagcacaactgcagtgggttataaaaaayggcctttcgagttgagcaataaattcgttcaagcagccattctgaaggacaaactggctctgtatttaagaggggcattccagcacttctctagccactgggttgacaatgactcaccaaagcctctggtagccaccaca

SEQ ID NO: 236408 - DNA, 579 bp, Homo sapiens
cactgggttgacaatgactcaccaaagcctctggtagccaccacaggacrcccagagcatatgttttaaagctgaacaccaaactgcggacttcgggagtaagtgaactgactggtttttattttgttttactgcttttaacattacagtaactgttacaggttccagcaggctaactgggtggaaatgagtttggtttcacttagtctctctaaagagaaagcaagtcggtagactaatacctaataaaagcaaagttgccaacaattgaaattgcctgggctgctctgtgtgtcccacatgcatgggtgtgggtgccagtgtgtgtgcgtgtgtgcatgcatgtgcatgtgtgttgggatagagtggtaagaaaatgggaaataataagaatgttcagtccatagcccttcattataaaaaggtgagctgtaataaatattagtgccacatttagccaaaactttactccagccaaaggtgatattttcatgataacatcctgtgattgctttgttcttcgtcttttatgttcttcctagatgggctcagaacatacaagaattaagtacacatctt

SEQ ID NO: 236409 - DNA, 579 bp, Homo sapiens
cactgggttgacaatgactcaccaaagcctctggtagccaccacaggacgcccagagcatatgttttaaagctgaacaccaaactgcggacttcgggagtaagtgaactgactggtttttattttgttttactgcttttaacattacagtaactgttacaggttccagcaggctaactgggtggaaatgagtttggtttcacttagtctctctaaagagaaagcaagtcggtagactaatacctaataaaagcaaagytgccaacaattgaaattgcctgggctgctctgtgtgtcccacatgcatgggtgtgggtgccagtgtgtgtgcgtgtgtgcatgcatgtgcatgtgtgttgggatagagtggtaagaaaatgggaaataataagaatgttcagtccatagcccttcattataaaaaggtgagctgtaataaatattagtgccacatttagccaaaactttactccagccaaaggtgatattttcatgataacatcctgtgattgctttgttcttcgtcttttatgttcttcctagatgggctcagaacatacaagaattaagtacacatctt

SEQ ID NO: 236410 - DNA, 579 bp, Homo sapiens
cactgggttgacaatgactcaccaaagcctctggtagccaccacaggacgcccagagcatatgttttaaagctgaacaccaaactgcggacttcgggagtaagtgaactgactggtttttattttgttttactgcttttaacattacagtaactgttacaggttccagcaggctaactgggtggaaatgagtttggtttcacttagtctctctaaagagaaagcaagtcggtagactaatacctaataaaagcaaagttgccaacaattgaaattgcctrggctgctctgtgtgtcccacatgcatgggtgtgggtgccagtgtgtgtgcgtgtgtgcatgcatgtgcatgtgtgttgggatagagtggtaagaaaatgggaaataataagaatgttcagtccatagcccttcattataaaaaggtgagctgtaataaatattagtgccacatttagccaaaactttactccagccaaaggtgatattttcatgataacatcctgtgattgctttgttcttcgtcttttatgttcttcctagatgggctcagaacatacaagaattaagtacacatctt

SEQ ID NO: 236411 - DNA, 492 bp, Homo sapiens
ttccagcacttctctagccactgggttgacaatgactcaccaaagcctctggtagccaccacaggacgcccagagcatatgttttaaagctgaacaccaaactgcggacttcgggagtaagtgaactgactggtttttattttgttttactgcttttaacattacagtaactgttacaggttccagcaggctaactgggtggaaatgagtttggtttcacttagtctctctaaagagaaagcaagtcggtagactaatacctaataaaagcaaagttgccaacaattgaaattgcctgggctgctctgtgtgtcccacatgcatgggtgtgggtgccagtgtgtgtgcgygtgtgcatgcatgtgcatgtgtgttgggatagagtggtaagaaaatgggaaataataagaatgttcagtccatagcccttcattataaaaaggtgagctgtaataaatattagtgccacatttagccaaaactttactccag

SEQ ID NO: 236412 - DNA, 492 bp, Homo sapiens
ttccagcacttctctagccactgggttgacaatgactcaccaaagcctctggtagccaccacaggacgcccagagcatatgttttaaagctgaacaccaaactgcggacttcgggagtaagtgaactgactggtttttattttgttttactgcttttaacattacagtaactgttacaggttccagcaggctaactgggtggaaatgagtttggtttcacttagtctctctaaagagaaagcaagtcggtagactaatacctaataaaagcaaagttgccaacaattgaaattgcctgggctgctctgtgtgtcccacatgcatgggtgtgggtgccagtgtgtgtgcgtgtgtgcatgcatgtgcatstgtgttgggatagagtggtaagaaaatgggaaataataagaatgttcagtccatagcccttcattataaaaaggtgagctgtaataaatattagtgccacatttagccaaaactttactccag

SEQ ID NO: 236413 - DNA, 492 bp, Homo sapiens
ttccagcacttctctagccactgggttgacaatgactcaccaaagcctctggtagccaccacaggacgcccagagcatatgttttaaagctgaacaccaaactgcggacttcgggagtaagtgaactgactggtttttattttgttttactgcttttaacattacagtaactgttacaggttccagcaggctaactgggtggaaatgagtttggtttcacttagtctctctaaagagaaagcaagtcggtagactaatacctaataaaagcaaagttgccaacaattgaaattgcctgggctgctctgtgtgtcccacatgcatgggtgtgggtgccagtgtgtgtgcgtgtgtgcatgcatgtgcatgtgtgtygggatagagtggtaagaaaatgggaaataataagaatgttcagtccatagcccttcattataaaaaggtgagctgtaataaatattagtgccacatttagccaaaactttactccag

SEQ ID NO: 236414 - DNA, 579 bp, Homo sapiens
cactgggttgacaatgactcaccaaagcctctggtagccaccacaggacgcccagagcatatgttttaaagctgaacaccaaactgcggacttcgggagtaagtgaactgactggtttttattttgttttactgcttttaacattacagtaactgttacaggttccagcaggctaactgggtggaaatgagtttggtttcacttagtctctctaaagagaaagcaagtcggtagactaatacctaataaaagcaaagttgccaacaattgaaattgcctgggctgctctgtgtgtcccacatgcatgggtgtgggtgccagtgtgtgtgcgtgtgtgcatgcatgtgcatgtgtgttgggatagagtggtaagaaaatgggaaataataagaatgttcagtccatagcccttcattataaaaaggtgagctgtaataaataytagtgccacatttagccaaaactttactccagccaaaggtgatattttcatgataacatcctgtgattgctttgttcttcgtcttttatgttcttcctagatgggctcagaacatacaagaattaagtacacatctt

SEQ ID NO: 236415 - DNA, 269 bp, Homo sapiens
ttagtaacaatttggacaagacagcaaatgctattgtccaagttttctaaagaagaatctgaagtgaaatgacatcaagagacctatcaagacctgtatccaggaaaaggtaaatctgagctgaaattgtagcccttgtaarttacctacgtgacataccagatagtgttcatgatccatttagtattctgttctaaaaatgagacaatatccatttattcacttgttcatttatttagtgtttgttcagcccttactgcatattccag

SEQ ID NO: 236416 - DNA, 616 bp, Homo sapiens
gacagcctcgtgctttagttcttctgtcttctattaatgttggtttgtagacgtggcactgtgtgaatgctcatgtttctccggggagaaactggagaatagcacgtccggcagaaatagtgttcctgatccagctttggtatgatacatgaagtctttttcggttttctttttctccaataaaatggagacaccacaatataaaatacaaaaggtcatctgggctgttgtggtccagtggatggtgctcaacagtgtctttgtatgtgtaagctttacttaattagaaatttgaggcatcctaactggtttgccttctctcaatttctgtaggtttttagaggaagctactcagtgtcgaggaactgtagtggcagacagcagtggtgaactcgtgggcattattgtaagccttgaaatcaatccttctgtatggttctttggagctctaaaatgggatagcctggtttctttttggctccataggaggtggtagatgtgggagtaatttttcatcatttctgccttgttcctacacaggctggrtgaactcctgctggtttcctttttcacctctggggatgccagatatccccagagcaagtcacacactgtg

SEQ ID NO: 236417 - DNA, 540 bp, Homo sapiens
taggaaaggtatgaaggagaagatggaggtcaygaccagtagaaatctcagctgttctgcctgggctccatgtcatctccctgctattaggcccatcagaatgtaagcacaaatgcctagagaatgacaagcttctttgggactctgctgactagacatgacataagactggacagctccctgggaacttccaagagctggctccaggcagtaactaatcctaggagctgctggcttggctgcctctctcccttcctatttccaagattggtcacctcctgctctgaatagcaattgatttcagacatgagttgatagagccatgattttctaatactgttccaaagggattaaagtacctctgagaagcaggggaggggaggatcaaactctccctaccttccactccactccctaccttgcccctccacctctgcccactttctatttcctcaggcacagcagcttctaccttatggattacaaattctggtcatccatctatggttgcattaggaaaagagtactgctactttcatt

SEQ ID NO: 236418 - DNA, 540 bp, Homo sapiens
taggaaaggtatgaaggagaagatggaggtcacgaccagtagaaatctcagctgttctgcctgggctccatgtcatctccctgctatyaggcccatcagaatgtaagcacaaatgcctagagaatgacaagcttctttgggactctgctgactagacatgacataagactggacagctccctgggaacttccaagagctggctccaggcagtaactaatcctaggagctgctggcttggctgcctctctcccttcctatttccaagattggtcacctcctgctctgaatagcaattgatttcagacatgagttgatagagccatgattttctaatactgttccaaagggattaaagtacctctgagaagcaggggaggggaggatcaaactctccctaccttccactccactccctaccttgcccctccacctctgcccactttctatttcctcaggcacagcagcttctaccttatggattacaaattctggtcatccatctatggttgcattaggaaaagagtactgctactttcatt

SEQ ID NO: 236419 - DNA, 583 bp, Homo sapiens
taagcctttattgcattcagtgtaacatattcacaggttccagggttaggcatgggcatctttgagggcyattattctccctaccacattatttgcctagcatctttcattacattgtccatctatttacttactgatttctaatgacatccaaatcagttacaacattttatgtaagcattgtttttatttttatgttattccactagtctatttttctactcatgaattatggtacatgagtttatttttgcaactttaagctcaataacatgttttaagatttcctcaactttctttttccacttcttcagaagttgactcttttggccctttggtcttctatacacattttagaaatgctttgttgaggactaagaggaatgctaagattttgataggaatttcattgaattttgagtatattggcatgctacaatggttagtgttttatacatgaaaataatatatcccttcctcttttcctagtatcatgagatgtttgttaggcagacatgaatattgagttgtatcaaatgtgtttttctgcattattgtggtggtgatgtgatttagctccttt

SEQ ID NO: 236420 - DNA, 583 bp, Homo sapiens
taagcctttattgcattcagtgtaacatattcacaggttccagggttaggcatgggcatctttgagggccattattctccctaccacattatttgcctagcatctttcattacattgtccatctatttacttactgatttctaatgacatccaaatcagttacaacattttatgtaagcattgtttttatttttatgttattccactagtctatttttctactcatgaattatggtacatgagtttatttttgcaactttaagctcaataacatgttttaagatttcctcaactttctttttccacttcttcagaagttgaytcttttggccctttggtcttctatacacattttagaaatgctttgttgaggactaagaggaatgctaagattttgataggaatttcattgaattttgagtatattggcatgctacaatggttagtgttttatacatgaaaataatatatcccttcctcttttcctagtatcatgagatgtttgttaggcagacatgaatattgagttgtatcaaatgtgtttttctgcattattgtggtggtgatgtgatttagctccttt

SEQ ID NO: 236421 - DNA, 583 bp, Homo sapiens
taagcctttattgcattcagtgtaacatattcacaggttccagggttaggcatgggcatctttgagggccattattctccctaccacattatttgcctagcatctttcattacattgtccatctatttacttactgatttctaatgacatccaaatcagttacaacattttatgtaagcattgtttttatttttatgttattccactagtctatttttctactcatgaattatggtacatgagtttatttttgcaactttaagctcaataacatgttttaagatttcctcaactttctttttccacttcttcagaagttgactcttttggccctttggtcttctatacacattttagaaatgctttgttgaggactaagaggaatgctaagatttygataggaatttcattgaattttgagtatattggcatgctacaatggttagtgttttatacatgaaaataatatatcccttcctcttttcctagtatcatgagatgtttgttaggcagacatgaatattgagttgtatcaaatgtgtttttctgcattattgtggtggtgatgtgatttagctccttt

SEQ ID NO: 236422 - DNA, 583 bp, Homo sapiens
taagcctttattgcattcagtgtaacatattcacaggttccagggttaggcatgggcatctttgagggccattattctccctaccacattatttgcctagcatctttcattacattgtccatctatttacttactgatttctaatgacatccaaatcagttacaacattttatgtaagcattgtttttatttttatgttattccactagtctatttttctactcatgaattatggtacatgagtttatttttgcaactttaagctcaataacatgttttaagatttcctcaactttctttttccacttcttcagaagttgactcttttggccctttggtcttctatacacattttagaaatgctttgttgaggactaagaggaatgctaagattttgataggaatttcattgaattttgagtatattggcatgctacaatggttagtgttttatacatgaaaataatatatcccttcctyttttcctagtatcatgagatgtttgttaggcagacatgaatattgagttgtatcaaatgtgtttttctgcattattgtggtggtgatgtgatttagctccttt

SEQ ID NO: 236423 - DNA, 397 bp, Homo sapiens
gggacccatattatgggaaacaaaacaggaagaatgagagtgaaaagattaatcctttcactaaattgggaaaacaggagaaagtgttgttggataaagaaggaactttagcacaatgtgcagagacaagacggtaaatgttccttatccagtaatctctgatgaaaggccagtgctcacatcattagtaatgtccagaactaataatatcagtartagcaatactcacaatgtaaataagtagctctcatgttttgattgccaatagtgctagcaactttacatgtatcactctctaccccagccctgttaattggtactatgatgaagaaagagactcgaagaaaataaatgactcactcgcgtatttttacacagctagaattgctacagaaag

SEQ ID NO: 236424 - DNA, 397 bp, Homo sapiens
gggacccatattatgggaaacaaaacaggaagaatgagagtgaaaagattaatcctttcactaaattgggaaaacaggagaaagtgttgttggataaagaaggaactttagcacaatgtgcagagacaagacggtaaatgttccttatccagtaatctctgatgaaaggccagtgctcacatcattagtaatgtccagaactaataatatcagtagtagcaatactcacaatgtaaataagtagctctcatgttttgattgccaatagtgctagcaactttacatgtatcactctytaccccagccctgttaattggtactatgatgaagaaagagactcgaagaaaataaatgactcactcgcgtatttttacacagctagaattgctacagaaag

SEQ ID NO: 236425 - DNA, 397 bp, Homo sapiens
gggacccatattatgggaaacaaaacaggaagaatgagagtgaaaagattaatcctttcactaaattgggaaaacaggagaaagtgttgttggataaagaaggaactttagcacaatgtgcagagacaagacggtaaatgttccttatccagtaatctctgatgaaaggccagtgctcacatcattagtaatgtccagaactaataatatcagtagtagcaatactcacaatgtaaataagtagctctcatgttttgattgccaatagtgctagcaactttacatgtatcactctctaccccagccctgttaattggtactatgatgaagaaagagactcraagaaaataaatgactcactcgcgtatttttacacagctagaattgctacagaaag

SEQ ID NO: 236426 - DNA, 565 bp, Homo sapiens
aagttttttggagtatctactctgggccaggcccgcaggatactaacatgaaatagagacagttcctgcctttgaagggtggtgatttacyggtggggagaaaggaagaagcccatgaaaagtcgtgtctgtagaaggtaagaaggggcacaaccgccatggcaggggagtcacaaaggagaagcattcagcctgccgagaggtcccaggactttcctggaggatcagtccccaaactgactgtgacagggagcaatacccagataacagcagaggcccagaataagaaagagtctgtgagtgggcagaattccctccagggtcatgaggggagctgacttctgattagggcatttcatccttctctgaaatgcagctgagaactggtcaagcctcactcccttgctgagaccaatagcaatccctgatgatctcgccacaggtccagcaggtgccccatccacactttgtccccagcccctacctggaagctccaaacacctacctgaggggccaactctgattcccaaggaggtgacacctcctgccccttgttgatagaaca

SEQ ID NO: 236427 - DNA, 565 bp, Homo sapiens
aagttttttggagtatctactctgggccaggcccgcaggatactaacatgaaatagagacagttcctgcctttgaagggtggtgatttactggtggggagaaaggaagaagcccatgaaaagtcgtgtctgtagaaggtaagaaggggcacaaccgccatggcaggggagtcacaaaggagaagcattcagcctgccgagaggtcccaggacttycctggaggatcagtccccaaactgactgtgacagggagcaatacccagataacagcagaggcccagaataagaaagagtctgtgagtgggcagaattccctccagggtcatgaggggagctgacttctgattagggcatttcatccttctctgaaatgcagctgagaactggtcaagcctcactcccttgctgagaccaatagcaatccctgatgatctcgccacaggtccagcaggtgccccatccacactttgtccccagcccctacctggaagctccaaacacctacctgaggggccaactctgattcccaaggaggtgacacctcctgccccttgttgatagaaca

SEQ ID NO: 236428 - DNA, 537 bp, Homo sapiens
cagttcctgcctttgaagggtggtgatttactggtggggagaaaggaagaagcccatgaaaagtcgtgtctgtagaaggtaagaaggggcacaaccgccatggcaggggagtcacaaaggagaagcattcagcctgccgagaggtcccaggactttcctggaggatcagtccccaaactgactgtgacagggagcaatacccagataacagcagaggcccagaataagaaagagtctgtgagtgggcagaattccctccagggtcatgaggggagctgacttctgattagggcatttcatccttctctgaaatgcagctgagaactggtcaagcctcactcccttgctgagaccaatagcaayccctgatgatctcgccacaggtccagcaggtgccccatccacactttgtccccagcccctacctggaagctccaaacacctacctgaggggccaactctgattcccaaggaggtgacacctcctgccccttgttgatagaacattgataaggaaataggactgagttttaagct

SEQ ID NO: 236429 - DNA, 668 bp, Homo sapiens
tcaagcagtcccctgcttggtcacccctggcaaggtggggaatgttctcttaacctgcagctttctccttcgggaacaaagcgcagcctcttagcagctagcaatcaactcctgtgctcggggccttccagccagrccttctgcagtgcaccctggtagggggtaaattatcctgagcttggaaaatgtgactgaaatcacctctgacagagggaaatgggttttcataaaagacgtttcctcaccttcggttgcaactcaattcaactgaccatttcccaccctggatctcaaaagaaatttctgctttgcttctgggtatgagcctgggtgataatgaaaggtacttaggaagccaggcctattgaagcagcgtagccctcagaggggcatggctgacttggctaagagtaggacagggtgtggggttgaggaatccatggggactcagggcatcctgtcgcagacacaggagctgacccagccacagggtcacaggacagcctgtgtcaccacagtctctgtgcagagtccagagttcacaaatgagataaatggacatttgctgactggggtaactcagcatctattcaccctatttctgggaaaagcctcaatttacatgtgggaatggaccacccccttattgttataggagttattaagaa

SEQ ID NO: 236430 - DNA, 668 bp, Homo sapiens
tcaagcagtcccctgcttggtcacccctggcaaggtggggaatgttctcttaacctgcagctttctccttcgggaacaaagcgcagcctcttagcagctagcaatcaactcctgtgctcggggccttccagccaggccttctgcagtgcaccctggtagggggtaaattatcctgagcttggaaaatgtgactgaaatcacctcygacagagggaaatgggttttcataaaagacgtttcctcaccttcggttgcaactcaattcaactgaccatttcccaccctggatctcaaaagaaatttctgctttgcttctgggtatgagcctgggtgataatgaaaggtacttaggaagccaggcctattgaagcagcgtagccctcagaggggcatggctgacttggctaagagtaggacagggtgtggggttgaggaatccatggggactcagggcatcctgtcgcagacacaggagctgacccagccacagggtcacaggacagcctgtgtcaccacagtctctgtgcagagtccagagttcacaaatgagataaatggacatttgctgactggggtaactcagcatctattcaccctatttctgggaaaagcctcaatttacatgtgggaatggaccacccccttattgttataggagttattaagaa

SEQ ID NO: 236431 - DNA, 276 bp, Homo sapiens
tggttaataagtcaatgtgaactgggaggggagatttttcaggagtgccacagggctctccctttaatcatatacactccctgctttcattggaaagtgtacratgatgtcagagtgccccagaatggagctagttggaagactgccgtcatagggatgccttagtgaattaataaggttttaatttctggctctcaactttgtagatgtaaaagttgatttatcaatatgtgagaaaggatgaatctttctgaaggttatgtcatcacactcact

SEQ ID NO: 236432 - DNA, 173 bp, Homo sapiens
gctctaactgtgcttcacaatactcaaracactgaatcaggatgtttcctggagtgcagggagctgtccgtgttactgagcagttctcagcaacacaaagatcctactgactcctcatcagacttctttctcactggaattttacacctgggctgttaacaccaggccaggtc

SEQ ID NO: 236433 - DNA, 437 bp, Homo sapiens
aagctcattatgaagggtaaaatccaaaacactgtgcataaagatatgtgtgcacaatttttatacataaagatttcataaarccaaagcatcaggaaatgaaaagagatacagaaagaaaaatgatggtaagtgagacattaatttacccttctaatctctatcacagcaaaaagataattaaaaaatctatatgaggaccacaaaatacacaaaaattatgtagcaaagcctatagcctgaaaaagtaaacattgaaatttgtatgtccataaaatgtttacaaaattcagtacatattacacaccccaccctaaaaacatctaagcaaagtagagaatgtagaaatgctacagattatattctctgattatgacccaacaaaactagaaattacagcatggaaatttaaaagctttctcttaaataattctatg

SEQ ID NO: 236434 - DNA, 539 bp, Homo sapiens
ctactgactcctcatcagacttctttctcactggaattttacacctgggctgttaacaccaggccaggtcaaattcaaaggagagaaaaaagctcattatgaagggtaaaatccaaaacactgtgcataaagatatgtgtgcacaatttttatacataaagatttcataaagccaaagcatcaggaaatgaaaagagatacagaaagaaaaatgatggtaartgagacattaatttacccttctaatctctatcacagcaaaaagataattaaaaaatctatatgaggaccacaaaatacacaaaaattatgtagcaaagcctatagcctgaaaaagtaaacattgaaatttgtatgtccataaaatgtttacaaaattcagtacatattacacaccccaccctaaaaacatctaagcaaagtagagaatgtagaaatgctacagattatattctctgattatgacccaacaaaactagaaattacagcatggaaatttaaaagctttctcttaaataattctatgtcaaaaagaaatc

SEQ ID NO: 236435 - DNA, 437 bp, Homo sapiens
aagctcattatgaagggtaaaatccaaaacactgtgcataaagatatgtgtgcacaatttttatacataaagatttcataaagccaaagcatcaggaaatgaaaagagatacagaaagaaaaatgatggtaagtgagacattaatttacccttctaatctctatcacagcaaaaagataattaaaaaatctatatgaggaccacaaaatacacaaaaattatgtagcaaagcctatagcctgaaaaagtaaacaytgaaatttgtatgtccataaaatgtttacaaaattcagtacatattacacaccccaccctaaaaacatctaagcaaagtagagaatgtagaaatgctacagattatattctctgattatgacccaacaaaactagaaattacagcatggaaatttaaaagctttctcttaaataattctatg

SEQ ID NO: 236436 - DNA, 539 bp, Homo sapiens
ctactgactcctcatcagacttctttctcactggaattttacacctgggctgttaacaccaggccaggtcaaattcaaaggagagaaaaaagctcattatgaagggtaaaatccaaaacactgtgcataaagatatgtgtgcacaatttttatacataaagatttcataaagccaaagcatcaggaaatgaaaagagatacagaaagaaaaatgatggtaagtgagacattaatttacccttctaatctctatcacagcaaaaagataattaaaaaatctatatgaggaccacaaaatacacaaaaattatgtagcaaagcctatagcctgaaaaagtaaacattgaaatttgtatgtccataaaatgtttacaaaattcagtacatattacacaccccaccctaaaaacatctaagcaaagtagagaatgtagaaatgctacagattatattctctgattatgacmcaacaaaactagaaattacagcatggaaatttaaaagctttctcttaaataattctatgtcaaaaagaaatc

SEQ ID NO: 236437 - DNA, 533 bp, Homo sapiens
ctctagaactatccatcagtgaaatggattgcaaatagaaagagtaataccatgtcacttaagaatasaatcatggatgaggctgccacctgctgttgggggccactgcagaagaaattccagaacactggactggagagcacctcactttccttacagctctaagtttctgactcagtgacctgattcagtaccatatacacaaagacccacttacacaaatgactgttcttcacactaggcccatggagacagggataaaatcctgaatttgctcagataccttctccgctactgacatctaggcattacacaattcatccttcatatttaacctttgaagtttgctacttctcagagagactaatgagtagtgagcaaatatcctgaagctgagaatgcttctacctcctctcaaaacaacggaatattcatcaaaacacagcagttctgcacttaactttaggccttttctaacaccttgtttcttggcagtaactgtggccagaatagctctttccacagataaagga

SEQ ID NO: 236438 - DNA, 521 bp, Homo sapiens
ccatcagtgaaatggattgcaaatagaaagagtaataccatgtcacttaagaatacaatcatggaygaggctgccacctgctgttgggggccactgcagaagaaattccagaacactggactggagagcacctcactttccttacagctctaagtttctgactcagtgacctgattcagtaccatatacacaaagacccacttacacaaatgactgttcttcacactaggcccatggagacagggataaaatcctgaatttgctcagataccttctccgctactgacatctaggcattacacaattcatccttcatatttaacctttgaagtttgctacttctcagagagactaatgagtagtgagcaaatatcctgaagctgagaatgcttctacctcctctcaaaacaacggaatattcatcaaaacacagcagttctgcacttaactttaggccttttctaacaccttgtttcttggcagtaactgtggccagaatagctctttccacagataaagga

SEQ ID NO: 236439 - DNA, 489 bp, Homo sapiens
taataccatgtcacttaagaatacaatcatggatgaggctgccacctgctgttgggggccactgcagaagaaattccagaacactggactggagagcacctcactttccttacagctctaagtttctgactcagtgacctgattcastaccatatacacaaagacccacttacacaaatgactgttcttcacactaggcccatggagacagggataaaatcctgaatttgctcagataccttctccgctactgacatctaggcattacacaattcatccttcatatttaacctttgaagtttgctacttctcagagagactaatgagtagtgagcaaatatcctgaagctgagaatgcttctacctcctctcaaaacaacggaatattcatcaaaacacagcagttctgcacttaactttaggccttttctaacaccttgtttcttggcagtaactgtggccagaatagctctttccacagataaagga

SEQ ID NO: 236440 - DNA, 339 bp, Homo sapiens
ccatcagtgaaatggattgcaaatagaaagagtaataccatgtcacttaagaatacaatcatggatgaggctgccacctgctgttgggggccactgcagaagaaattccagaacactggactggagagcacctcactttccttacagctctaagtttctgactcagtgacctgattcagtaccatatacacaaagacccacttacasaaatgactgttcttcacactaggcccatggagacagggataaaatcctgaatttgctcagataccttctccgctactgacatctaggcattacacaattcatccttcatatttaacctttgaagtttgctac

SEQ ID NO: 236441 - DNA, 489 bp, Homo sapiens
taataccatgtcacttaagaatacaatcatggatgaggctgccacctgctgttgggggccactgcagaagaaattccagaacactggactggagagcacctcactttccttacagctctaagtttctgactcagtgacctgattcagtaccatatacacaaagacccacttacacaaatgactgttcttcacactaggcccatggagacagggataaaatyctgaatttgctcagataccttctccgctactgacatctaggcattacacaattcatccttcatatttaacctttgaagtttgctacttctcagagagactaatgagtagtgagcaaatatcctgaagctgagaatgcttctacctcctctcaaaacaacggaatattcatcaaaacacagcagttctgcacttaactttaggccttttctaacaccttgtttcttggcagtaactgtggccagaatagctctttccacagataaagga

SEQ ID NO: 236442 - DNA, 360 bp, Homo sapiens
agtgaaatggattgcaaatagaaagagtaataccatgtcacttaagaatacaatcatggatgaggctgccacctgctgttgggggccactgcagaagaaattccagaacactggactggagagcacctcactttccttacagctctaagtttctgactcagtgacctgattcagtaccatatacacaaagacccacttacacaaatgactgttcttcacactaggcccatggagacagggataaaatcctgaatttgctcagataccttctcygctactgacatctaggcattacacaattcatccttcatatttaacctttgaagtttgctacttctcagagagactaatgagtagtga

SEQ ID NO: 236443 - DNA, 339 bp, Homo sapiens
ccatcagtgaaatggattgcaaatagaaagagtaataccatgtcacttaagaatacaatcatggatgaggctgccacctgctgttgggggccactgcagaagaaattccagaacactggactggagagcacctcactttccttacagctctaagtttctgactcagtgacctgattcagtaccatatacacaaagacccacttacacaaatgactgttcttcacactaggcccatggagacagggataaaatcctgaatttgctcagataccttctccrctactgacatctaggcattacacaattcatccttcatatttaacctttgaagtttgctac

SEQ ID NO: 236444 - DNA, 360 bp, Homo sapiens
agtgaaatggattgcaaatagaaagagtaataccatgtcacttaagaatacaatcatggatgaggctgccacctgctgttgggggccactgcagaagaaattccagaacactggactggagagcacctcactttccttacagctctaagtttctgactcagtgacctgattcagtaccatatacacaaagacccacttacacaaatgactgttcttcacactaggcccatggagacagggataaaatcctgaatttgctcagataccttctccgctaytgacatctaggcattacacaattcatccttcatatttaacctttgaagtttgctacttctcagagagactaatgagtagtga

SEQ ID NO: 236445 - DNA, 489 bp, Homo sapiens
taataccatgtcacttaagaatacaatcatggatgaggctgccacctgctgttgggggccactgcagaagaaattccagaacactggactggagagcacctcactttccttacagctctaagtttctgactcagtgacctgattcagtaccatatacacaaagacccacttacacaaatgactgttcttcacactaggcccatggagacagggataaaatcctgaatttgctcagataccttctccgctactgacatctaggcattacacaattcatccttcatatttaacctttgaagtttgctacttctcagagagactaatgagtastgagcaaatatcctgaagctgagaatgcttctacctcctctcaaaacaacggaatattcatcaaaacacagcagttctgcacttaactttaggccttttctaacaccttgtttcttggcagtaactgtggccagaatagctctttccacagataaagga

SEQ ID NO: 236446 - DNA, 516 bp, Homo sapiens
agtgaaatggattgcaaatagaaagagtaataccatgtcacttaagaatacaatcatggatgaggctgccacctgctgttgggggccactgcagaagaaattccagaacactggactggagagcacctcactttccttacagctctaagtttctgactcagtgacctgattcagtaccatatacacaaagacccacttacacaaatgactgttcttcacactaggcccatggagacagggataaaatcctgaatttgctcagataccttctccgctactgacatctaggcattacacaattcatccttcatatttaacctttgaagtttgctacttctcagagagactaatgagtagtgagcaaayatcctgaagctgagaatgcttctacctcctctcaaaacaacggaatattcatcaaaacacagcagttctgcacttaactttaggccttttctaacaccttgtttcttggcagtaactgtggccagaatagctctttccacagataaagga

SEQ ID NO: 236447 - DNA, 514 bp, Homo sapiens
tgaaatggattgcaaatagaaagagtaataccatgtcacttaagaatacaatcatggatgaggctgccacctgctgttgggggccactgcagaagaaattccagaacactggactggagagcacctcactttccttacagctctaagtttctgactcagtgacctgattcagtaccatatacacaaagacccacttacacaaatgactgttcttcacactaggcccatggagacagggataaaatcctgaatttgctcagataccttctccgctactgacatctaggcattacacaattcatccttcatatttaacctttgaagtttgctacttctcagagagactaatgagtagtgagcaaatatcctgaagytgagaatgcttctacctcctctcaaaacaacggaatattcatcaaaacacagcagttctgcacttaactttaggccttttctaacaccttgtttcttggcagtaactgtggccagaatagctctttccacagataaagga

SEQ ID NO: 236448 - DNA, 516 bp, Homo sapiens
agtgaaatggattgcaaatagaaagagtaataccatgtcacttaagaatacaatcatggatgaggctgccacctgctgttgggggccactgcagaagaaattccagaacactggactggagagcacctcactttccttacagctctaagtttctgactcagtgacctgattcagtaccatatacacaaagacccacttacacaaatgactgttcttcacactaggcccatggagacagggataaaatcctgaatttgctcagataccttctccgctactgacatctaggcattacacaattcatccttcatatttaacctttgaagtttgctacttctcagagagactaatgagtagtgagcaaatatcctgaagctgagaatgcttctacctcctctcaaaacaacrgaatattcatcaaaacacagcagttctgcacttaactttaggccttttctaacaccttgtttcttggcagtaactgtggccagaatagctctttccacagataaagga

SEQ ID NO: 236449 - DNA, 564 bp, Homo sapiens
agtgagcaaatatcctgaagctgagaatgcttctacctcctctcaaaacaacggaatattcatcaaaacacarcagttctgcacttaactttaggccttttctaacaccttgtttcttggcagtaactgtggccagaatagctctttccacagataaaggaccttttgaaaggatagggtctctagatagaaaagcaaatgcctcattccagaaggtcttcaagaagaaaatgttgtggtgataacaaacataactgattataatctattctatgaaaaaagcttatgaaacagtagatgtgtgtatctagtacataagagctgaatgtcaatatatatagatatatacacacactcaaataaataatagttatctctaactagagaaattctagttgccttatattttcttctttttccttactatattttctacaataaacatgtgtttttaacaagaaaagtcttttctggtgtgctttttaattttctttgtttaagtgagagtgaggctacataactacatggctaggtagacttttagaaaacttggctgctctagaa

SEQ ID NO: 236450 - DNA, 516 bp, Homo sapiens
agtgaaatggattgcaaatagaaagagtaataccatgtcacttaagaatacaatcatggatgaggctgccacctgctgttgggggccactgcagaagaaattccagaacactggactggagagcacctcactttccttacagctctaagtttctgactcagtgacctgattcagtaccatatacacaaagacccacttacacaaatgactgttcttcacactaggcccatggagacagggataaaatcctgaatttgctcagataccttctccgctactgacatctaggcattacacaattcatccttcatatttaacctttgaagtttgctacttctcagagagactaatgagtagtgagcaaatatcctgaagctgagaatgcttctacctcctctcaaaacaacggaatattcatcaaaacacagcagttctgcacttaactttaggccttttctaacacctygtttcttggcagtaactgtggccagaatagctctttccacagataaagga

SEQ ID NO: 236451 - DNA, 541 bp, Homo sapiens
gtttgctacttctcagagagactaatgagtagtgagcaaatatcctgaagctgagaatgcttctacctcctctcaaaacaacggaatattcatcaaaacacagcagttctgcacttaactttaggccttttctaacaccttgtttcttggcagtaactgtggccagaatagctctttccacagataaaggaccttttraaaggatagggtctctagatagaaaagcaaatgcctcattccagaaggtcttcaagaagaaaatgttgtggtgataacaaacataactgattataatctattctatgaaaaaagcttatgaaacagtagatgtgtgtatctagtacataagagctgaatgtcaatatatatagatatatacacacactcaaataaataatagttatctctaactagagaaattctagttgccttatattttcttctttttccttactatattttctacaataaacatgtgtttttaacaagaaaagtcttttctggtgtgctttttaattttctttgtttaagtgagagtgag

SEQ ID NO: 236452 - DNA, 564 bp, Homo sapiens
agtgagcaaatatcctgaagctgagaatgcttctacctcctctcaaaacaacggaatattcatcaaaacacagcagttctgcacttaactttaggccttttctaacaccttgtttcttggcagtaactgtggccagaatagctctttccacagataaaggaccttttgaaaggatagggtctctagatagaaaagcaaatgcctcattccrgaaggtcttcaagaagaaaatgttgtggtgataacaaacataactgattataatctattctatgaaaaaagcttatgaaacagtagatgtgtgtatctagtacataagagctgaatgtcaatatatatagatatatacacacactcaaataaataatagttatctctaactagagaaattctagttgccttatattttcttctttttccttactatattttctacaataaacatgtgtttttaacaagaaaagtcttttctggtgtgctttttaattttctttgtttaagtgagagtgaggctacataactacatggctaggtagacttttagaaaacttggctgctctagaa

SEQ ID NO: 236453 - DNA, 541 bp, Homo sapiens
gtttgctacttctcagagagactaatgagtagtgagcaaatatcctgaagctgagaatgcttctacctcctctcaaaacaacggaatattcatcaaaacacagcagttctgcacttaactttaggccttttctaacaccttgtttcttggcagtaactgtggccagaatagctctttccacagataaaggaccttttgaaaggatagggtctctagatagaaaagcaaatgcctcattccagaaggtcttcaagaagaaaatgttgtggtgataacaaacataactgattataatctattctrtgaaaaaagcttatgaaacagtagatgtgtgtatctagtacataagagctgaatgtcaatatatatagatatatacacacactcaaataaataatagttatctctaactagagaaattctagttgccttatattttcttctttttccttactatattttctacaataaacatgtgtttttaacaagaaaagtcttttctggtgtgctttttaattttctttgtttaagtgagagtgag

SEQ ID NO: 236454 - DNA, 564 bp, Homo sapiens
agtgagcaaatatcctgaagctgagaatgcttctacctcctctcaaaacaacggaatattcatcaaaacacagcagttctgcacttaactttaggccttttctaacaccttgtttcttggcagtaactgtggccagaatagctctttccacagataaaggaccttttgaaaggatagggtctctagatagaaaagcaaatgcctcattccagaaggtcttcaagaagaaaatgttgtggtgataacaaacataactgattataatctattctatgaaaaaagcttatgaaacagtagatgtgtgtatctagtacataagagctgaatgtcaatatatatagatatatacacacastcaaataaataatagttatctctaactagagaaattctagttgccttatattttcttctttttccttactatattttctacaataaacatgtgtttttaacaagaaaagtcttttctggtgtgctttttaattttctttgtttaagtgagagtgaggctacataactacatggctaggtagacttttagaaaacttggctgctctagaa

SEQ ID NO: 236455 - DNA, 541 bp, Homo sapiens
gtttgctacttctcagagagactaatgagtagtgagcaaatatcctgaagctgagaatgcttctacctcctctcaaaacaacggaatattcatcaaaacacagcagttctgcacttaactttaggccttttctaacaccttgtttcttggcagtaactgtggccagaatagctctttccacagataaaggaccttttgaaaggatagggtctctagatagaaaagcaaatgcctcattccagaaggtcttcaagaagaaaatgttgtggtgataacaaacataactgattataatctattctatgaaaaaagcttatgaaacagtagatgtgtgtatctagtacataagagctgaatgtcaatatatatagatatatacacacactcaaataaataatagttatctctaactagagaaattctagttgccttatattttcttctttttccktactatattttctacaataaacatgtgtttttaacaagaaaagtcttttctggtgtgctttttaattttctttgtttaagtgagagtgag

SEQ ID NO: 236456 - DNA, 541 bp, Homo sapiens
gtttgctacttctcagagagactaatgagtagtgagcaaatatcctgaagctgagaatgcttctacctcctctcaaaacaacggaatattcatcaaaacacagcagttctgcacttaactttaggccttttctaacaccttgtttcttggcagtaactgtggccagaatagctctttccacagataaaggaccttttgaaaggatagggtctctagatagaaaagcaaatgcctcattccagaaggtcttcaagaagaaaatgttgtggtgataacaaacataactgattataatctattctatgaaaaaagcttatgaaacagtagatgtgtgtatctagtacataagagctgaatgtcaatatatatagatatatacacacactcaaataaataatagttatctctaactagagaaattctagttgccttatattttcttctttttccttrctatattttctacaataaacatgtgtttttaacaagaaaagtcttttctggtgtgctttttaattttctttgtttaagtgagagtgag

SEQ ID NO: 236457 - DNA, 439 bp, Homo sapiens
gccttatattttcttctttttccttactatattttctacaataaacatgtgtttttaacaagaaaagtcttttctggtgtgctttttaattttctttgtttaagtgagagtgaggctacataactacatggctaggtagacttttagaaaacttgrctgctctagaaaattgacatatcctgatttcttccatagcttggatcttgacctagagggaaatataaaaatgttgacttgaacctgaggggtgccattttcactgctgaagtagtttcatggatcatgaattggagaaatgacttcagcaacacgggtgttaaaaacagaaagcacaagtgacccacaatagatgatggagaacaaagagcaagctgggaaaagcagtggcctttaatacagaaaagaagaagtatagccacaataaatattaggcagacag

SEQ ID NO: 236458 - DNA, 576 bp, Homo sapiens
tgaggctacataactacatggctaggtagacttttagaaaacttggctgctctagaaaattgacatatcctgatttcttccatagcttggatcttgacctagagggaaatataaaartgttgacttgaacctgaggggtgccattttcactgctgaagtagtttcatggatcatgaattggagaaatgacttcagcaacacgggtgttaaaaacagaaagcacaagtgacccacaatagatgatggagaacaaagagcaagctgggaaaagcagtggcctttaatacagaaaagaagaagtatagccacaataaatattaggcagacagcagttcagcagtttatactattaagctgttgtttaggggaatggtaaaccgacatgacccttgaggtaggtatatataggtaaattctatgtgtcccttgaaataggtgtatgacacaacttctggcgtctacatggatttggtcactctaaagtagccatgaggcttaagatagttcagctgtttggggataagttaaatcatttgccgttgtctttctgcaatttgcatatcctacagttatcat

SEQ ID NO: 236459 - DNA, 439 bp, Homo sapiens
gccttatattttcttctttttccttactatattttctacaataaacatgtgtttttaacaagaaaagtcttttctggtgtgctttttaattttctttgtttaagtgagagtgaggctacataactacatggctaggtagacttttagaaaacttggctgctctagaaaattgacatatcctgatttcttccatagcttggatcttgacctagagggaaatataaaaatgttgacttgaacctgaggggtgccattttcactgctgaagtagtttcatggatcatgaattggagaaatgacttcagcaacaygggtgttaaaaacagaaagcacaagtgacccacaatagatgatggagaacaaagagcaagctgggaaaagcagtggcctttaatacagaaaagaagaagtatagccacaataaatattaggcagacag

SEQ ID NO: 236460 - DNA, 576 bp, Homo sapiens
tgaggctacataactacatggctaggtagacttttagaaaacttggctgctctagaaaattgacatatcctgatttcttccatagcttggatcttgacctagagggaaatataaaaatgttgacttgaacctgaggggtgccattttcactgctgaagtagtttcatggatcatgaattggagaaatgacttcagcaacacgggtgttaaaaacagaaagcacaagtgacccacaayagatgatggagaacaaagagcaagctgggaaaagcagtggcctttaatacagaaaagaagaagtatagccacaataaatattaggcagacagcagttcagcagtttatactattaagctgttgtttaggggaatggtaaaccgacatgacccttgaggtaggtatatataggtaaattctatgtgtcccttgaaataggtgtatgacacaacttctggcgtctacatggatttggtcactctaaagtagccatgaggcttaagatagttcagctgtttggggataagttaaatcatttgccgttgtctttctgcaatttgcatatcctacagttatcat

SEQ ID NO: 236461 - DNA, 576 bp, Homo sapiens
tgaggctacataactacatggctaggtagacttttagaaaacttggctgctctagaaaattgacatatcctgatttcttccatagcttggatcttgacctagagggaaatataaaaatgttgacttgaacctgaggggtgccattttcactgctgaagtagtttcatggatcatgaattggagaaatgacttcagcaacacgggtgttaaaaacagaaagcacaagtgacccacaatagatgatggagaacaaagarcaagctgggaaaagcagtggcctttaatacagaaaagaagaagtatagccacaataaatattaggcagacagcagttcagcagtttatactattaagctgttgtttaggggaatggtaaaccgacatgacccttgaggtaggtatatataggtaaattctatgtgtcccttgaaataggtgtatgacacaacttctggcgtctacatggatttggtcactctaaagtagccatgaggcttaagatagttcagctgtttggggataagttaaatcatttgccgttgtctttctgcaatttgcatatcctacagttatcat

SEQ ID NO: 236462 - DNA, 576 bp, Homo sapiens
tgaggctacataactacatggctaggtagacttttagaaaacttggctgctctagaaaattgacatatcctgatttcttccatagcttggatcttgacctagagggaaatataaaaatgttgacttgaacctgaggggtgccattttcactgctgaagtagtttcatggatcatgaattggagaaatgacttcagcaacacgggtgttaaaaacagaaagcacaagtgacccacaatagatgatggagaacaaagagcaagctgggaaaagcagtggcctttaatacagaaaagaagaagtatagccacaataaatattaggcagacagcagttcagcagtttatactattaagctgttgtttaggggaatggtaaaccgacatgacccttgaggtaggtatatataggtaaattctatgtgtcccttgaaataggtgtatgacacaacttctggcrtctacatggatttggtcactctaaagtagccatgaggcttaagatagttcagctgtttggggataagttaaatcatttgccgttgtctttctgcaatttgcatatcctacagttatcat

SEQ ID NO: 236463 - DNA, 322 bp, Homo sapiens
tacacaattgtgactatttttagccataggaactcatagaaagaccaacttcattagacctacaaaatcgaattstgtaacagtatatgcagtatgtgtaggaataaaaagcatttctcaaatatgcagtactggattttgcaaaagcaccttacacttagctataaaggagtggaaaacacaaagatgagtaactgcacctttcaaaagactagagctataccaataatacaaaggtgtaaacaaataatgatgagatgacaaaggctgagtgttttctatttggaagctatgttgttgaattaatatgtatataatttca

SEQ ID NO: 236464 - DNA, 322 bp, Homo sapiens
tacacaattgtgactatttttagccataggaactcatagaaagaccaacttcattagacctacaaaatcgaattgtgtaacagtatatgcagtatgtgtaggaataaaaagcatttctcaaatatgcrgtactggattttgcaaaagcaccttacacttagctataaaggagtggaaaacacaaagatgagtaactgcacctttcaaaagactagagctataccaataatacaaaggtgtaaacaaataatgatgagatgacaaaggctgagtgttttctatttggaagctatgttgttgaattaatatgtatataatttca

SEQ ID NO: 236465 - DNA, 322 bp, Homo sapiens
tacacaattgtgactatttttagccataggaactcatagaaagaccaacttcattagacctacaaaatcgaattgtgtaacagtatatgcagtatgtgtaggaataaaaagcatttctcaaatatgcagtactggattttgcaaaagcaccttacacttagctataaaggagtggaaaacacaaagatgagtaactrcacctttcaaaagactagagctataccaataatacaaaggtgtaaacaaataatgatgagatgacaaaggctgagtgttttctatttggaagctatgttgttgaattaatatgtatataatttca

SEQ ID NO: 236466 - DNA, 329 bp, Homo sapiens
taatttcactcaaactattttccttcattctaacaatttactggagtacacaattgtgactatttttagccataggaactcatagaaagaccaacttcattagacctacaaaatcgaattgtgtaacagtatatgcagtatgtgtaggaataaaaagcatttctcaaatatgcagtactggattttgcaaaagcaccttacacttagctataaaggagtggaaaacacaaagatgagtaactgcacytttcaaaagactagagctataccaataatacaaaggtgtaaacaaataatgatgagatgacaaaggctgagtgttttctatt

SEQ ID NO: 236467 - DNA, 295 bp, Homo sapiens
ctggattttgcaaaagcaccttacacttagctataaaggagtggaaaacacaaagatgagtaactgcacctttcaaaagactagagctayaccaataatacaaaggtgtaaacaaataatgatgagatgacaaaggctgagtgttttctatttggaagctatgttgttgaattaatatgtatataatttcatgcaatcttcatgttatgggggtgttctaatccactgtgactctgtccttaaataaaagggagatttggacatagagagaggcatacggggaggatgccatatg

SEQ ID NO: 236468 - DNA, 295 bp, Homo sapiens
ctggattttgcaaaagcaccttacacttagctataaaggagtggaaaacacaaagatgagtaactgcacctttcaaaagactagagctataccaataatacaaaggtgtaaacaaataatgatgagatgacaaaggctgagtgttttctatttggaagctatrttgttgaattaatatgtatataatttcatgcaatcttcatgttatgggggtgttctaatccactgtgactctgtccttaaataaaagggagatttggacatagagagaggcatacggggaggatgccatatg

SEQ ID NO: 236469 - DNA, 295 bp, Homo sapiens
ctggattttgcaaaagcaccttacacttagctataaaggagtggaaaacacaaagatgagtaactgcacctttcaaaagactagagctataccaataatacaaaggtgtaaacaaataatgatgagatgacaaaggctgagtgttttctatttggaagctatgttgttgaattaatatgtatataatttcatgcaatcttcatgttatggggrtgttctaatccactgtgactctgtccttaaataaaagggagatttggacatagagagaggcatacggggaggatgccatatg

SEQ ID NO: 236470 - DNA, 540 bp, Homo sapiens
agatctacgagccaacaggtggtattttccatttagcggggtctggrtttctacagaacaactcagggacatatgttaagatgttatctctagtttctatagggaaacaaacattttgtggctctaattttctttttttttaattatactttaagttttagggtacatgtgcacaacgtgcaggtctgttacgtatgtatacatgtaccatgttggtgtgctgcacccattaactcgtcatttaagattagtttgtggctctaattttcttgactattgttttaagctattattaccttcttacttatcagggtgctcatctacttcttgaggctagccaggtggctggaattttccttggagggactcaagagtttcctttatttttcgtgccttaaatgggtctgttctccctcttcaaagctcaagctcttaaggactatgctattgttagatttttcgtattggagcagaccttccctcctactcaagaacaccccttcttcagacagcctggctgggtcttcatcctgggagagc

SEQ ID NO: 236471 - DNA, 522 bp, Homo sapiens
ctacgagccaacaggtggtattttccatttagcggggtctgggtttctacaraacaactcagggacatatgttaagatgttatctctagtttctatagggaaacaaacattttgtggctctaattttctttttttttaattatactttaagttttagggtacatgtgcacaacgtgcaggtctgttacgtatgtatacatgtaccatgttggtgtgctgcacccattaactcgtcatttaagattagtttgtggctctaattttcttgactattgttttaagctattattaccttcttacttatcagggtgctcatctacttcttgaggctagccaggtggctggaattttccttggagggactcaagagtttcctttatttttcgtgccttaaatgggtctgttctccctcttcaaagctcaagctcttaaggactatgctattgttagatttttcgtattggagcagaccttccctcctactcaagaacaccccttcttcagacagcctggctgggtctt

SEQ ID NO: 236472 - DNA, 545 bp, Homo sapiens
atctgagatctacgagccaacaggtggtattttccatttagcggggtctgggtttctacagaacaactcagggacatatgttaagatgttatctctagtttctatagggaaacaaacattttgtggctctaattttcttttttttwaattatactttaagttttagggtacatgtgcacaacgtgcaggtctgttacgtatgtatacatgtaccatgttggtgtgctgcacccattaactcgtcatttaagattagtttgtggctctaattttcttgactattgttttaagctattattaccttcttacttatcagggtgctcatctacttcttgaggctagccaggtggctggaattttccttggagggactcaagagtttcctttatttttcgtgccttaaatgggtctgttctccctcttcaaagctcaagctcttaaggactatgctattgttagatttttcgtattggagcagaccttccctcctactcaagaacaccccttcttcagacagcctggctgggtcttcatcctgggagagc

SEQ ID NO: 236473 - DNA, 523 bp, Homo sapiens
aggtggtattttccatttagcggggtctgggtttctacagaacaactcagggacatatgttaagatgttatctctagtttctatagggaaacaaacattttgtggctctaattttctttttttttaattatactttaarttttagggtacatgtgcacaacgtgcaggtctgttacgtatgtatacatgtaccatgttggtgtgctgcacccattaactcgtcatttaagattagtttgtggctctaattttcttgactattgttttaagctattattaccttcttacttatcagggtgctcatctacttcttgaggctagccaggtggctggaattttccttggagggactcaagagtttcctttatttttcgtgccttaaatgggtctgttctccctcttcaaagctcaagctcttaaggactatgctattgttagatttttcgtattggagcagaccttccctcctactcaagaacaccccttcttcagacagcctggctgggtcttcatcctgggagag

SEQ ID NO: 236474 - DNA, 540 bp, Homo sapiens
ggtggtattttccatttagcggggtctgggtttctacagaacaactcagggacatatgttaagatgttatctctagtttctatagggaaacaaacattttgtggctctaattttctttttttttaattatactttaagttttagggtacrtgtgcacaacgtgcaggtctgttacgtatgtatacatgtaccatgttggtgtgctgcacccattaactcgtcatttaagattagtttgtggctctaattttcttgactattgttttaagctattattaccttcttacttatcagggtgctcatctacttcttgaggctagccaggtggctggaattttccttggagggactcaagagtttcctttatttttcgtgccttaaatgggtctgttctccctcttcaaagctcaagctcttaaggactatgctattgttagatttttcgtattggagcagaccttccctcctactcaagaacaccccttcttcagacagcctggctgggtcttcatcctgggagagctcatgaaacacaaacca

SEQ ID NO: 236475 - DNA, 540 bp, Homo sapiens
agatctacgagccaacaggtggtattttccatttagcggggtctgggtttctacagaacaactcagggacatatgttaagatgttatctctagtttctatagggaaacaaacattttgtggctctaattttctttttttttaattatactttaagttttagggtacatgtgcacaacrtgcaggtctgttacgtatgtatacatgtaccatgttggtgtgctgcacccattaactcgtcatttaagattagtttgtggctctaattttcttgactattgttttaagctattattaccttcttacttatcagggtgctcatctacttcttgaggctagccaggtggctggaattttccttggagggactcaagagtttcctttatttttcgtgccttaaatgggtctgttctccctcttcaaagctcaagctcttaaggactatgctattgttagatttttcgtattggagcagaccttccctcctactcaagaacaccccttcttcagacagcctggctgggtcttcatcctgggagagc

SEQ ID NO: 236476 - DNA, 510 bp, Homo sapiens
ctacgagccaacaggtggtattttccatttagcggggtctgggtttctacagaacaactcagggacatatgttaagatgttatctctagtttctatagggaaacaaacattttgtggctctaattttctttttttttaattatactttaagttttagggtacatgtgcacaacgtgcaggtmtgttacgtatgtatacatgtaccatgttggtgtgctgcacccattaactcgtcatttaagattagtttgtggctctaattttcttgactattgttttaagctattattaccttcttacttatcagggtgctcatctacttcttgaggctagccaggtggctggaattttccttggagggactcaagagtttcctttatttttcgtgccttaaatgggtctgttctccctcttcaaagctcaagctcttaaggactatgctattgttagatttttcgtattggagcagaccttccctcctactcaagaacaccccttcttcagacagcc

SEQ ID NO: 236477 - DNA, 544 bp, Homo sapiens
gtggtattttccatttagcggggtctgggtttctacagaacaactcagggacatatgttaagatgttatctctagtttctatagggaaacaaacattttgtggctctaattttctttttttttaattatactttaagttttagggtacatgtgcacaacgtgcaggtctgttacgtatgtatacatgtaccatgttggtgtgctgcacccattaactcgtcatttaagattagtytgtggctctaattttcttgactattgttttaagctattattaccttcttacttatcagggtgctcatctacttcttgaggctagccaggtggctggaattttccttggagggactcaagagtttcctttatttttcgtgccttaaatgggtctgttctccctcttcaaagctcaagctcttaaggactatgctattgttagatttttcgtattggagcagaccttccctcctactcaagaacaccccttcttcagacagcctggctgggtcttcatcctgggagagctcatgaaacacaaaccagatct

SEQ ID NO: 236478 - DNA, 540 bp, Homo sapiens
agatctacgagccaacaggtggtattttccatttagcggggtctgggtttctacagaacaactcagggacatatgttaagatgttatctctagtttctatagggaaacaaacattttgtggctctaattttctttttttttaattatactttaagttttagggtacatgtgcacaacgtgcaggtctgttacgtatgtatacatgtaccatgttggtgtgctgcacccattaactcgtcatttaagattagttygtggctctaattttcttgactattgttttaagctattattaccttcttacttatcagggtgctcatctacttcttgaggctagccaggtggctggaattttccttggagggactcaagagtttcctttatttttcgtgccttaaatgggtctgttctccctcttcaaagctcaagctcttaaggactatgctattgttagatttttcgtattggagcagaccttccctcctactcaagaacaccccttcttcagacagcctggctgggtcttcatcctgggagagc

SEQ ID NO: 236479 - DNA, 544 bp, Homo sapiens
gtggtattttccatttagcggggtctgggtttctacagaacaactcagggacatatgttaagatgttatctctagtttctatagggaaacaaacattttgtggctctaattttctttttttttaattatactttaagttttagggtacatgtgcacaacgtgcaggtctgttacgtatgtatacatgtaccatgttggtgtgctgcacccattaactcgtcatttaagattagtttgtggctctaattttcttgactattgttttaagctattattaccttcttacttatcagggtgctcatctacttcttgaggctagccaggtggctggaattttccttggagggactcaagagtttcctttatttttcrtgccttaaatgggtctgttctccctcttcaaagctcaagctcttaaggactatgctattgttagatttttcgtattggagcagaccttccctcctactcaagaacaccccttcttcagacagcctggctgggtcttcatcctgggagagctcatgaaacacaaaccagatct

SEQ ID NO: 236480 - DNA, 523 bp, Homo sapiens
aggtggtattttccatttagcggggtctgggtttctacagaacaactcagggacatatgttaagatgttatctctagtttctatagggaaacaaacattttgtggctctaattttctttttttttaattatactttaagttttagggtacatgtgcacaacgtgcaggtctgttacgtatgtatacatgtaccatgttggtgtgctgcacccattaactcgtcatttaagattagtttgtggctctaattttcttgactattgttttaagctattattaccttcttacttatcagggtgctcatctacttcttgaggctagccaggtggctggaattttccttggagggactcaagagtttcctttatttttcgtgccttaaatgggtctgtyctccctcttcaaagctcaagctcttaaggactatgctattgttagatttttcgtattggagcagaccttccctcctactcaagaacaccccttcttcagacagcctggctgggtcttcatcctgggagag

SEQ ID NO: 236481 - DNA, 523 bp, Homo sapiens
aggtggtattttccatttagcggggtctgggtttctacagaacaactcagggacatatgttaagatgttatctctagtttctatagggaaacaaacattttgtggctctaattttctttttttttaattatactttaagttttagggtacatgtgcacaacgtgcaggtctgttacgtatgtatacatgtaccatgttggtgtgctgcacccattaactcgtcatttaagattagtttgtggctctaattttcttgactattgttttaagctattattaccttcttacttatcagggtgctcatctacttcttgaggctagccaggtggctggaattttccttggagggactcaagagtttcctttatttttcgtgccttaaatgggtctgttctccctcttcaaagctcaagctcttaaggactatgctattgttagatttttcrtattggagcagaccttccctcctactcaagaacaccccttcttcagacagcctggctgggtcttcatcctgggagag

SEQ ID NO: 236482 - DNA, 544 bp, Homo sapiens
gtggtattttccatttagcggggtctgggtttctacagaacaactcagggacatatgttaagatgttatctctagtttctatagggaaacaaacattttgtggctctaattttctttttttttaattatactttaagttttagggtacatgtgcacaacgtgcaggtctgttacgtatgtatacatgtaccatgttggtgtgctgcacccattaactcgtcatttaagattagtttgtggctctaattttcttgactattgttttaagctattattaccttcttacttatcagggtgctcatctacttcttgaggctagccaggtggctggaattttccttggagggactcaagagtttcctttatttttcgtgccttaaatgggtctgttctccctcttcaaagctcaagctcttaaggactatgctattgttagatttttcgtattggagcagwccttccctcctactcaagaacaccccttcttcagacagcctggctgggtcttcatcctgggagagctcatgaaacacaaaccagatct

SEQ ID NO: 236483 - DNA, 514 bp, Homo sapiens
tggtattttccatttagcggggtctgggtttctacagaacaactcagggacatatgttaagatgttatctctagtttctatagggaaacaaacattttgtggctctaattttctttttttttaattatactttaagttttagggtacatgtgcacaacgtgcaggtctgttacgtatgtatacatgtaccatgttggtgtgctgcacccattaactcgtcatttaagattagtttgtggctctaattttcttgactattgttttaagctattattaccttcttacttatcagggtgctcatctacttcttgaggctagccaggtggctggaattttccttggagggactcaagagtttcctttatttttcgtgccttaaatgggtctgttctccctcttcaaagctcaagctcttaaggactatgctattgttagatttttcgtattggagcagamcttccctcctactcaagaacaccccttcttcagacagcctggctgggtcttcatcctg

SEQ ID NO: 236484 - DNA, 632 bp, Homo sapiens
atgctcagctccttccctgcaaagtgctaatgatgaagsatggggatcaagtcagcaaactccagaaatggtcttagactaggagtcaagccttgagatcctattacacaccagattcattccctgattagagctgctgaattcttttactctcactgcactcatgctaaagtttcttttctccagcctcctaaccccagaggaggctgagccatgatacccattgtcaagcaatacatatttaaggagcccctgagatatgtcaggcaccatcgtaggtgctgggacaagtgaatgtgaccaggaaagtccctcccctctcagaggttcttttcaagttggaggacagcaaatacagaaatatagagtctaacataacaacagggagtaataaacactttgaagaaaaataaagtggaataagagggtagggttgccatagggttctctgggcagtcttctatgggaaggccacttgtttgggcagagaaacaaaagatgtctgaaaggaggactacgggccccccataagtgcgctccggtccgcgcacagggcaatgggcatgtaatgtcctatgattaagacctacagtatgtacaatattactgcaacagacactgagactcactta

SEQ ID NO: 236485 - DNA, 632 bp, Homo sapiens
atgctcagctccttccctgcaaagtgctaatgatgaaggatggggatcaagtcagcaaactccagaaatggtcttagactaggagtcaagccttgagatcctattacacaccagattcattccctgattagagctgctgaattcttttactctcactgcactcatgctaaagtttctttyctccagcctcctaaccccagaggaggctgagccatgatacccattgtcaagcaatacatatttaaggagcccctgagatatgtcaggcaccatcgtaggtgctgggacaagtgaatgtgaccaggaaagtccctcccctctcagaggttcttttcaagttggaggacagcaaatacagaaatatagagtctaacataacaacagggagtaataaacactttgaagaaaaataaagtggaataagagggtagggttgccatagggttctctgggcagtcttctatgggaaggccacttgtttgggcagagaaacaaaagatgtctgaaaggaggactacgggccccccataagtgcgctccggtccgcgcacagggcaatgggcatgtaatgtcctatgattaagacctacagtatgtacaatattactgcaacagacactgagactcactta

SEQ ID NO: 236486 - DNA, 632 bp, Homo sapiens
atgctcagctccttccctgcaaagtgctaatgatgaaggatggggatcaagtcagcaaactccagaaatggtcttagactaggagtcaagccttgagatcctattacacaccagattcattccctgattagagctgctgaattcttttactctcactgcactcatgctaaagtttcttttctccagcctcctaaccccagaggaggctgagccatgatacccattgtcaagcaatacatatttaaggagcccctgagatatgtcaggcaccatcrtaggtgctgggacaagtgaatgtgaccaggaaagtccctcccctctcagaggttcttttcaagttggaggacagcaaatacagaaatatagagtctaacataacaacagggagtaataaacactttgaagaaaaataaagtggaataagagggtagggttgccatagggttctctgggcagtcttctatgggaaggccacttgtttgggcagagaaacaaaagatgtctgaaaggaggactacgggccccccataagtgcgctccggtccgcgcacagggcaatgggcatgtaatgtcctatgattaagacctacagtatgtacaatattactgcaacagacactgagactcactta

SEQ ID NO: 236487 - DNA, 632 bp, Homo sapiens
atgctcagctccttccctgcaaagtgctaatgatgaaggatggggatcaagtcagcaaactccagaaatggtcttagactaggagtcaagccttgagatcctattacacaccagattcattccctgattagagctgctgaattcttttactctcactgcactcatgctaaagtttcttttctccagcctcctaaccccagaggaggctgagccatgatacccattgtcaagcaatacatatttaaggagcccctgagatatgtcaggcaccatcgtaggtgctgggacaagtgaatgtgaccaggaaagtccctcccctctcagaggttcttttcaagttggaggacagcaaatacagaaatatagagtctaacataacaacagggagtaataaacactttgaagaaaaataaagtggaataagagggtagggttgccatagggttctctgggcagtcttctatgggaaggccacttgtttgggcagagaaacaaaagatgtctgaaaggaggactacgggccccccataagtgcgctccggtcygcgcacagggcaatgggcatgtaatgtcctatgattaagacctacagtatgtacaatattactgcaacagacactgagactcactta

SEQ ID NO: 236488 - DNA, 571 bp, Homo sapiens
caaattcctggacacatatagcctcccaagactgaaccaggaagaagtcaaataaatgaatagaccaataacaagttctgaaattgaggcactaattgttggtgggaaagtaaattagttccaccattgtggaagacagtgtggcgatttctcaaagatggtagaataagaaataccatttgacccagcaatcccatttctgtgtacagaaccaaagaaagatatattgttctattataaacatgcatgcccattcgtgtatgttgattgcagcactattcataatagcaaagatatggaatcaacccaaatgcccattaatgatagactggataaagaaaacgtggtccatatacamcatggaatactttgcagccataaaatggaatgagattatgtcctttgcaaggacgtggatggagctggaggccattatacttagcaaactaatgtatagttttctggaacagaaaagcaaataccgcatgttctcacttataagtgggagctgaataatgagaacacatggacacagcgacgggaatgatacaccctggggcctgtcatgggg

SEQ ID NO: 236489 - DNA, 610 bp, Homo sapiens
gcagcaccgcacttcttagagaacataaatcagtcgctttggattataaaatcgttacggtatagggagttctcagttgtcccgaagccattcaatgcaaagcaaatattcagtgtttgcatgatagtttcctcatttccttgtgtcaggttcctgacaggaagatttatacgcatgcactgtttggcttgtacatgtaaacgcaacaatttccttatttgcctgtagtttgattagccttatgccagaaaaaaaaaatwaacaaaagaaaccttatgacctgttggtactaggcttgctactcatggtctaaatgttgataaaatttgaacctaataaaagtttacaatcttgttgtcaaaaaaatcataaactggaaactaggagaaaatatgagtgtatatatgtgtatatctatgtccaataaaattttagcatgtagaatataaagagttgctaaaaatagataacacaatgtgaagcagtccagtggaaaagtaggccaaacacatgacaaaagaaggtagggggcgagatgaaggaaaggtggttaaagggttcaaaaacacatttaaatagcaggaatacattttagtatttgacagaacaa

SEQ ID NO: 236490 - DNA, 607 bp, Homo sapiens
tagccaacaaatacagtagtattaaaaagtttagtatactgtgaacaatcaacattaatctgagtaatttgggattggttttacatttgaaaatgaaccattgcattttaccataaaaagagaataaaagacaaaaactgttctcatttcaatagatgctaaaaaagcatataacaaaatttaacagataaaaaactctcagcaaactaaagaayataaggagacttcctcaacctaataaaaggcagctacaaaaggcctacagctaaataataaatatttgaatattgaaaaaggaagtgatgtacatttctaccacttctattctgcactgcactggagctcttctccaatgaaatcaggaaaggaaaacaatgaaaacagatagatagatttaaaaacaataaagatataaaaggaagaagtaaaccatttatatttgcaaacgtcatgattagttacatagcaaatcctgaggaatctacaacaaaactatggaactaatatatttatttaatgaggttgcatgatacaaggttaatatataccaccagcaaacaaaatgaagaaaaacaatgccatttaaaatactgtccttacacataaa

SEQ ID NO: 236491 - DNA, 551 bp, Homo sapiens
tcaactgtaaagctcccaaggagaatggagaagcctgctgatcttgaatgtccactccattgtgtaacttttattttataaatacctcatattttatgacatatgtacctaaacatcgayttttgcctatcccatcaatttgaaggcattaattttaaggcatctcttatcaaattatcatttaaaaccttacaatttaaaaataattatacttttcagcagtcttttaaatctacattgctgtgaatatgacatctattctgagggtctttggaaattttgggaaggaggcctttgagataaagttacggtttgaatgttcttttcttacaagttattatctcttaaggctaccatactttgaatgtctcaaagtagattataaagaatttcaggactaaaaaaatacccattaggttatataattcctaatttattttcaaggctgagtggttaacaactaaattttatgaggccaaagttctatttgacttgatcactagcatatctgcagcctttgcccagaacaaagtcttcactacatacctgct

SEQ ID NO: 236492 - DNA, 549 bp, Homo sapiens
agccttgtactcattgactccagctagtgaagatcaaaacattggtatagaaattaaaagaatattcaaaattgctgcaatgacaattgctaaaaatgcaggtattgaaggatcttttatagtcaagaaaattacgcaaagttctatagaagttggttatgatgctatggtcagagattttgtgaatawggtgggaaaaggaatcattgatccaacaaagtttctgaaaactgttttattggatgcttttgggtggcctctctgttaactacagcagaaattttagtcacaaaaattcctgaagaagagaaggaccctggaatgggtgcaatatgtagaatgagaggtggtatgagaggtggcatgttctaattcctagaatactgctttacctatattaatgaactgtgacagaagctcagtgcagtgttcctcaccaatagctttagagaagtcagttggagaaaatgactgaagaaaaggctggctgatatttaagaaaccactataaccattactggtttcagttgacaaaatacataatggctt

SEQ ID NO: 236493 - DNA, 586 bp, Homo sapiens
ctaaacagaacaataacctttaggagtaaagtgaaaattgtattcctaaaacaattgtgatcccaattctacaatatactttagctataaatagacattacagagaattgttttactgctatcatttcttgggtcacttgtctcttgctaatttggaaacatgagtgctttcttgttctgtttaataaggtactaaaataaattctagatagcatataacattttattgtaaatttctttgacttcaatgaattgcattttatgtggagtgcaggttcgtagaatgctgccaaactcrtatgtttaaattgttaaaaataaactctttggattgctaatgactgtagtatatgcaattcaccagattgtttaaacagatttcaaataattttcctgtaattgctaatcattttgtaggagacctgagaccagcaatcaataatcacatgaaactgttgaaaaggaggctcagtgatcaatacaaattcttctttccgtgggaatacagcctgctcagatggttgacatatatagtgctctccttggtgttctcttctgttatgtatttattgcagtttcataggca

SEQ ID NO: 236494 - DNA, 619 bp, Homo sapiens
tatttatagcaattcagatgatcagcattatakttagcagctgaaaactgaaataatttctcttttctgatcgatgcatatattggaacaaaaataaaaatatgcacacatttgttcaatagtaagtattgtaactatcagtgcttaaagttagtatagatatataagtaaagatagatatatgagaaatactaagcagtagctagaactataaaattagggactgaatattttatgaaaatatgattgttgtatttttgaaaataatgtcaggtaaagggaaaatacaataaactattaaattttcctttttccaaaaccatcattgccatatagcttatgaaatcaaattctaatgtgcactttgactttagaaattgaattgcctagactcaattggaaccagtgttattgacctctttaatgcctatggaaaccccaccatgattatttggttctcattaaaaatgaggttgaggagacagctcaaaataaaaactttgccttttcacctaatttataccctatacccgcccccccccacaaaaaataaacattaaaactggttcgactcaacccaaatttaattgggaatttgtttctatctagttataatgaa

SEQ ID NO: 236495 - DNA, 619 bp, Homo sapiens
tatttatagcaattcagatgatcagcattatatttagcagctgaaaactgaaataatttctcttttctgatcgatgcatatattggaacaaaaataaaaatatgcacacatttgttcaatagtaagtattgtaactatcagtgcttaaagttagtatagatatrtaagtaaagatagatatatgagaaatactaagcagtagctagaactataaaattagggactgaatattttatgaaaatatgattgttgtatttttgaaaataatgtcaggtaaagggaaaatacaataaactattaaattttcctttttccaaaaccatcattgccatatagcttatgaaatcaaattctaatgtgcactttgactttagaaattgaattgcctagactcaattggaaccagtgttattgacctctttaatgcctatggaaaccccaccatgattatttggttctcattaaaaatgaggttgaggagacagctcaaaataaaaactttgccttttcacctaatttataccctatacccgcccccccccacaaaaaataaacattaaaactggttcgactcaacccaaatttaattgggaatttgtttctatctagttataatgaa

SEQ ID NO: 236496 - DNA, 583 bp, Homo sapiens
tgcgcattgaaaatgtattaattcaaaaccttgtggtttcatgaactatttagcaaattaagtgctgtatttaaatgtttaaaaaatmtaagtgaccctcctgaaagttgtttaattttaatagaataagaaagaaatagtttcagaacttgatctactattgtaactaaactgtatgtaatatcctattaatattagtgtatgttttatctctctttttaaaaatatagcagtgtcatagaataatgacttcttgagagacactaagtgacacatggacacagtgttacatataaaattagaaatgttaattaaaacattaatttaaaaatatgccttgatagctttatctagcacactgcattctttttgagaaatgacagtgaaattaaatgaatcagatattcattaattatattctgtctgtggtttgctgttagattttgaaatatgttgaaaaattacttcaagcaaatactatcaagagttcaaatttacctgaaacaggacctattgtgaaaaaagaaaagagggaaaatgggccaatatttatgagaatttaatgtacacttggcactatgtg

SEQ ID NO: 236497 - DNA, 606 bp, Homo sapiens
aagcatggcttcctgtctttcattactttcagaaaaattttggtcactatctctttagatatagctttgaccttcattttttccttcttaagacctccaaataaagatgtatgtagcttttcacactatgtcatgttctagtaaactgtactttttcttttaatgctttttccatttatttttgttctctgtggtggtaatctgtatattttatttacagctctcttcccatttatgaatcctcttttttcaccatgtcctatctgtaaactgatttatttattcattttgtatattttttatttttaattttttgtgtacatagtaggtgtatgtatttatggggtacaagagatattttgatgcaggcaygcagtcagtaataatcacatcatggaaaatggggtatctgttcacttgaccatttatcttttatgttacaaaccatccatttatgcccttttagttatttttaaatgtaaagttaaatgagtttgactttagtcacagttgtgatatcaaatactacatattattcattctttcaaactattttttgtgctcattaactgtccccactccctctcaacccccattacccatacc

SEQ ID NO: 236498 - DNA, 619 bp, Homo sapiens
ataatgcaagtttgaagtctggaacatcttcatgtactcatattaatcactgagcagcctttgtttttcttatcagccttagcaggtatgatatcttgtttccaagcttttaaaagctttatagcatttgctaaagtgttcatttttgaaggactagatttaattacagctgtacagcgtctaggaaaatatagcatccttactcttttcgttccatttctcatccttatttatcaatgtctggtttcaaaaagctctatgacctgaatatttccctctaaaaatttatatgctgaaatcttaaccctgaaagtgatggtattaggagrtgaggcctttggaaagttattgggtcatgaggggtctacccttatgtgattagtgccattacaaaagttccctagagagctacctgctcctttcaccatgtgggaacacagcaagaaggtgccatctatgaactagaaagttgggcctcaccagacttgccgctaccttaatcttgaacttcccagctttcatagctatgagataaaaattttgtgccttataagccactcagtctatagtacctatttcaatacaacagctacagaaacaaagataggaagaatcacca

SEQ ID NO: 236499 - DNA, 643 bp, Homo sapiens
ctgctattaaataatgaatatgatgcagcagagtttttaatgctttttttaaccctaaaagtaaattttctagaaaaamtaccagctatgtgagttttagaatattaaagatattcttggaagaggaaatgtgaatgcttgttgaaaaataagattgttggcagttcgttgtcaaaaaagcttaaaattccaaagtgtctaccagttgtatagtactaaaataaacctatccttgtttttttcaaaattttatcaataaccatgcagctgggaactgcacaagctaaattaaatcaacatattggaagaaaaggagttgatgatgacagtaatcactgagtatttaagtgatgtaaaggctgagaagcaaataaaagagtggggggacgggagagataaaataaatcataaacagcagatagtttataactagggcaagccagtagctttaatgaacattttccataaaatagcatgacaaatgatgcttaaaatattgtgcatacaattaattatgcagcttctcttttttacccagtggataacatactgaatttataattttattatttcaaactaataggttttgtacataattatgacaaatacctttaaggtttttatgagatgtcagtactagtta

SEQ ID NO: 236500 - DNA, 383 bp, Homo sapiens
acatatatgtgcctaaaagcaaagcatataatacatgaaataaaactaatataggggagaaattggcaattccacaatagtagttggagattttaatgctgcattgtcaatagtagaacaatagagagaagataagcaagaaaacgattcttgagcaactctataaaacaccaaattatataacttagatgaaatggacaaaatcctacaggcacaaactactgactgccttaaaaagaaataaatactctgaatagagctgtaacaagtgaagagattaaaatagtaatttaaaaaactcactaagaaaagcctaattsagagatcttcatgaataaattctaccaagcatttgaaataattaacaccaaattttctcaaac

SEQ ID NO: 236501 - DNA, 456 bp, Homo sapiens
tacttaattttacagtcacatttcttcactgtacccttttatattctatgctccaagtaacactgtgctctctttttcccttaggctggttcctctctctgaaatgtttctcttacccactcttaacctgaagattatctttctggtttctgcttagtcacagatcttccttgacacatcaamccaacccctccagcaagcttccataacgtcctgttcttacttttctcaaaggcctttgcacttactgtgttccctattcaaagtactctttccatagcattcttgtttgtgtcattcaaggatcagctaaaaaataaccttttagtgagttcttgtctgaattttaaaactaacacagacacccaaacagccagttgttagtacatcaaaccagttttttaccttagttaaaaaacctaaaatttttagattttattttattattgaagacta

SEQ ID NO: 236502 - DNA, 403 bp, Homo sapiens
atcaaactaaaaagcttctgcatagcacaggaaacaaccaagtgaagagacaactctcagaatggaagaaaatatttgtaaaccatatgtctgatgaggggttaatatttgaaatatataaagaagtcaaacaactcratagcgagagaataaataacttgattttaaagtaggcaaaggatctggacaacagatagtcctcaaaagaagacatacagatggtcaacaagtatatggaaaaaaatgctcagcatcactaatcattagagaaatgcaaattaaaatcacaatgcgatatcacctcacacctgtaaaaatatgaaaaataataagtgttggagaggacttagagaaaataaaactcttgtacattattagtagtaaagtaaatttgtatagcaat

SEQ ID NO: 236503 - DNA, 598 bp, Homo sapiens
aaagacatgttaggaagccagtgtgataagccagatgggaaatgtcacatttataaaacttcctgacaaataaatatcaccatgacagctgtgtgaacaggagttactaatcttcattttagagttgaaaaagaatatacagttgattctcattattcttggtagttatgttctataaagttaccacaagtactgaattagtgaatactgaattaatgggaagtatgtgagtctctggacatcaactgattgatacataatcttggctttatgtgtcttagagttctgtttaaagatatctatttaatattaatatatattgttgrttcattaacattgaactcatagccatcagcactatatcccaggcctaaatgaagtatatgtaatacctgtatttctttgtaatggacatcacagccttttgtgctcagtaacactaaataacacttcagtgtctgtgatagctgaacaggaaggctgtgtttccttgtttgatctccactgagaatgtgcacattgggtcattcaaatgttttgctattctgggaatgttgaccaacaactgggaaagcaccatgaatattaattttgatat

SEQ ID NO: 236504 - DNA, 617 bp, Homo sapiens
atctgtttaattttacctatatattcatctttttttgttctttattcttcctgtatctctaacctgccatctggaatcatgttccttctgcttgaaatcctttagaatttctttcttctggtgacgaactctcttagtgttttgtttgtctgcaaatgtctttatttcaccttaatttttgaaggatattttgctgggtatggaatttgaggctagaaattgttttcttccagtgcattgaagatatattactttttttcctggcttccattgtagttttggtcaaaaaactacccccttgaatataatccatttcttctctctgattacttttacaatcttctcttagatgtgggtgttctccagtatgtaattatggtttccttttaagttttcttgcttgggatttattggccttgaaggatgaactaaaaataaacctttctyccaacccactcccattctcataatcaggactggaaggaaaatgcttagctgttgagaggagtaagacaaatagtagtttttgaaatatgaaaaatatgaggggagctgtaaccacaagctcctctcctatacttagcctgaagacaaactacttgaatggcctgataaaa

SEQ ID NO: 236505 - DNA, 617 bp, Homo sapiens
atctgtttaattttacctatatattcatctttttttgttctttattcttcctgtatctctaacctgccatctggaatcatgttccttctgcttgaaatcctttagaatttctttcttctggtgacgaactctcttagtgttttgtttgtctgcaaatgtctttatttcaccttaatttttgaaggatattttgctgggtatggaatttgaggctagaaattgttttcttccagtgcattgaagatatattactttttttcctggcttccattgtagttttggtcaaaaaactacccccttgaatataatccatttcttctctctgattacttttacaatcttctcttagatgtgggtgttctccagtatgtaattatggtttccttttaagttttcttgcttgggatttattggccttgaaggatgaactaaaaataaacctttcttccwacccactcccattctcataatcaggactggaaggaaaatgcttagctgttgagaggagtaagacaaatagtagtttttgaaatatgaaaaatatgaggggagctgtaaccacaagctcctctcctatacttagcctgaagacaaactacttgaatggcctgataaaa

SEQ ID NO: 236506 - DNA, 373 bp, Homo sapiens
cttggaggagtaatgcatcatcattttacctgctttctgatacaattccagaaaagtttgagagttctatatgggcacagcactgtactatgctttttaagggaatgcaaaatgaatatacatggtttgtgctttccagaactctccaaatgatggaggaataagataaacacacaaaaagctcacataaaaatagactatgtatatattcttacataagaatcaatagcatgcaggtatacaacatgggagtttgagagggatataaattctgaaggcaacacaattgacgaaaattgttttcaaaaraattttattaaggataaatgctgtaacttttttcaaaagaaatttcctgaaacatcagtttgga

SEQ ID NO: 236507 - DNA, 540 bp, Homo sapiens
aatgctgtaacttttttcaaaagaaatttcctgaaacatcagtttggatggaaactgagatctcaggtgtcctgaatgaattgccctaactaggacaaagcaagcaatttgtcgttgttggtggtgagggagagaggtagagagggagagacagggaaagagttgggggagagtgagagagagcaaagaaggcggggagagagagaaaggaagtgggagcttgacacmgagccaggagaggatgcaaggttgcatgcttttcagtgtaattcctctctttgaagtgctatatcttcaaccatgcctacaaagattatgaaacgcttcatataaatcctttttcatacactaagttgtgtgctctggccctagtaaggcagaatggagatagtttgatgcagggcactggccacagagtgaaacaggaggttatgtctcaggaacttgaggatgtgaaggggagagcttcacactagacctggttaagaaactggaaactggccacgtttaactacatttctgaggagaaggagatgcccc

SEQ ID NO: 236508 - DNA, 450 bp, Homo sapiens
agtgttttcagtaagcttcatgtaaccacaaggcaaagatatatagtacatgtaaaaaacacacatagaaatgattcgaagcataccactacagaaaattgccaaatgacaacaaaagacagccagagaggaagaaagaaacaaatcatctacaaacaaccagaaaacaaattacaaaatgrcagtagtaagtccttagctatcaataattactttgaatataagtggattaaattttccaataaaaagatatagagtgactgaatggatttactcgaagacccaattatatgctgtctacaagagactcacctcagtttttaggacatacataactaaaagtgaagagatagaaaaagagagttcatgcaaatataaaccaaaagagagccaacttggctatagagatatcagacaaaacagacagtaagccaaaaactgtaaaaggag

SEQ ID NO: 236509 - DNA, 619 bp, Homo sapiens
atggaatttgaataactttgagcaagacctggacatactagttctacactggactttctactctattgttttatttgcaatgtgatacagacaattagttacctgcttatccccggtaggcatttgagttttctattctctctagctctttgtggctggttcagaaaagaagagtctgtgactgttggaatgtcatgatgatcacattcttggaggcaagaaaagtccaggatctcctcaatataaccaggtgatatagcaaagaggtcatagagcctccagtggactgtgtcactgtagcttctactcaatggaggaatcctttctaaagcattcctgacatagacacttaatgtctgstgcaattgtttctatgacagagaaattactacttatatatacttaagatacatgttaaactaggacaacctgcatccctcacctaaaactttcttcgaatgcttctgcccatggaggaacatagaacagatttttgttagaatgtcccttttattggaaaggcctctgaacatattgactccatcaaaggtttttccatttataatcatttctatatcccctccttggtttcatcccattcccatgggtaatcaatagt

SEQ ID NO: 236510 - DNA, 527 bp, Homo sapiens
taaattccttcttttagataacgggatgttaagagattccattttattttcaattttgattactagaaaaaaatacagcttaaaaatattttgtttaacttatgtggtaaagataagagtaaatacaacgtagaaagaaaagagaaattgcaatgaaatgaatacaatacaaaggaaaaataagagcagaaaatgaaaggcaaaaataataatttctcatgtaatgttttctttttccttctgtataatttcttgtcagcctcttgcaagttagttaarttgattggaccatgatgccaacaacggtaaaagccaattttcttgttttaaaagtatttcttgtaggagtgactccagtcagtcatttataaaaatatatgcaatttctccaagagtctctagcaaacatgtggatgactggtagctgaaagacattctttttttttttttttttgcgacagtgtctcattctgtcactgaggctggagtgcagtggtgcgatctcagctcactccaagttccgcctc

SEQ ID NO: 236511 - DNA, 558 bp, Homo sapiens
tctctagcaaacatgtggatgactggtagctgaaagacattctttttttttttttttttgcgacagtgtctcattctgtcactgaggctggagtgcagtggtgcgatctcagctcactccaagttccgcctcccaagttcacaccattctcctgcctcagcctcccaagtagctgggactacaggcgcctgccaccatgcccrgctaattttttgtatttttagtagagatggggtttcaccgtgttagccaggatggtctcgatgtcctgacctcgtgatcctcccatctcggcctcccaaagtgctgggattacaggtgtgagccaccacgcctggcctgaaagacattcttaaatcatggaacagtagattagaatacacatctttttcattgtgagtcaactgtattatgttctatattttaaaataggtgttatattggcacttgtttgctgggcattgccaggcacttaaaaggtatatacataatctctaatcataaaaataaggtcaaggtatgtattatccagtgcacttattatgtaaggaagcaaag

SEQ ID NO: 236512 - DNA, 581 bp, Homo sapiens
ttaggcatttgtctgcctcctgccaccatcactggctccattgcttactctcttggtgactttgacattttttacttgtaaaacaggtcaaatattacctgccaacatagggttgttattatagaattcaatatgtaaaacatataatgccttstggctataggtgggtataagcagtataagtaaaaccattttccataagaatacattctttctcagctttaagaaaggaagataatgagatatttgaaaacctttcagaaaacccattctaaactagctcttttagatcaagagatgcattagcttttctgacagctcttcccatggaagctttttcatggaagaaaggaaactggaacttaaatcgattatcttcatggtttgctgaacccttatgagctacttaaagcgcatctgaagtcaccaagcatttctgttgccctctgaatagcttcatggcctccatatgaagctacgactctcagtcaaaatgaaaatctacaccaaaagcaagagctgctgaaattctcaagcttgactggacaaatttaattcgaaagaagagtaactagtgctta

SEQ ID NO: 236513 - DNA, 581 bp, Homo sapiens
ttaggcatttgtctgcctcctgccaccatcactggctccattgcttactctcttggtgactttgacattttttacttgtaaaacaggtcaaatattacctgccaacatagggttgttattatagaattcaatatgtaaaacatataatgccttctggctataggtgggtataagcagtataagtaaaaccattttccataagaatacattctttctcagctttaagaaaggaagataatgagatatttgaaaacctttcagaaaacccattctaaactagctcttttagatcaagagatgcattagcttttctgacagctcttcccatggaagctttttcatggaagaaaggaaactggaacttaaatcgattatcttcatggtttgctgaacccttatgagctacttaaagcgcatctgaagtcaccaagcatttctgttgccctctgaatagcttcatggcctccatatgaagctacgactctcagtcaaaatgaaaatctacaccaaaagcaagagctgctgaaattctcragcttgactggacaaatttaattcgaaagaagagtaactagtgctta

SEQ ID NO: 236514 - DNA, 614 bp, Homo sapiens
ttcacatagccctgtggcaagatagtaaatgtgtactcttctgccatgtaaggctaaggcagctcagctgtctttgattctgctcattgttgtgaattgaaaatactccccacattggaagtcacataccaagtgccagaagctgtgttgccctctctagagaaaatacaacatttaccagagcagctgtgattgagagaactacctgggttcctttgcagtaattccccacgatctgccacaattcatctggtttgcagagagctcagttgagctgaacagggatatgatgagggtatggttgtgagatattacttctcattttattatctgagttgggcagggcaagtagtttcaggtacttctagctggcctttcctaccataatggctcttaatccacaaatcacaacacaaatgtgagctgctaaatattcctattccaattatacccttatggcttgggaaaataacccatttgtaataaatgtgagatgaaattaggatatatagtcatttaacactggacctccaaaacctcctcctactctgaccagagcacaatagcattttagttttccrttactagtgttagctcagactctgtatttaaag

SEQ ID NO: 236515 - DNA, 614 bp, Homo sapiens
ttcacatagccctgtggcaagatagtaaatgtgtactcttctgccatgtaaggctaaggcagctcagctgtctttgattctgctcattgttgtgaattgaaaatactccccacattggaagtcacataccaagtgccagaagctgtgttgccctctctagagaaaatacaacatttaccagagcagctgtgattgagagaactacctgggttcctttgcagtaattccccacgatctgccacaattcatctggtttgcagagagctcagttgagctgaacagggatatgatgagggtatggttgtgagatattacttctcattttattatctgagttgggcagggcaagtagtttcaggtacttctagctggcctttcctaccataatggctcttaatccacaaatcacaacacaaatgtgagctgctaaatattcctattccaattatacccttatggcttgggaaaataacccatttgtaataaatgtgagatgaaattaggatatatagtcatttaacactggacctccaaaacctcctcctactctgaccagagcacaatagcattttagttttccattaytagtgttagctcagactctgtatttaaag

SEQ ID NO: 236516 - DNA, 540 bp, Homo sapiens
caggctggaaaatgggggcatgttttgtttttcttctctctcttcagtcctcccatgccacttcccaaatgctatctcatgagtagggggattaataaaaaatgcttttccctggaaatctcttatcagctatggtatagttatagatatagtcttttttaaattaaaaaagtcacagacttttattatcattcatatacttcacaggaaaatatagcaaaggggtcagagttgtatgaaaagacatctgggagcaggactgtcctgacatccagcacaacagctgcactgtctgatgcccctttgcagatgaggtcctgggcacacttggcacagtccacagagcagcaggarcagcagctctttttgcagaaggagcatttgcattttttgcatttttcaggagccagcacaggtgcaggagccaccagtggccaggaccagtcggggttcatctgggaccgaggtaaggctggagttccaaagcaggaggctaagaggcatcagggatgttggaagatgtgttgaagcttccgtaca

SEQ ID NO: 236517 - DNA, 443 bp, Homo sapiens
tatttaattaaatatacatcagtttttctcagagtccagtctctagcttctgactggatttcgctttctcattccaccactttctctgggctgtgtgacattggtcaagctcttttatctttctgaatagaatatggctcattggtaaaatgctaayaggtcctacctcaaagatttgctgaaaacaattaaatagttttttaaaaagcatttaatacagcttctataatgcagtaagctcccccaaaaatgttctcacatattatgcccgagttctctgttagtttgctttgctatttttcttaaccagttcccaaactcccagttcctctagagcatgaatcttctttatttttccatgcatcctcttttccagccttgatatagagagaggttatcagctgggatatgcattgtagagtgacccccaacccctacgtcca

SEQ ID NO: 236518 - DNA, 661 bp, Homo sapiens
ccagtaatggcatgttaaaaagatgttcaacatcactaccattaggaaaatgcaaatcaaaactacaatgagatgccaccttacacccattaggagtgactactattgctactattaaaaaaaaaaaaccaaaaaacaaactgaaaacaaccagtgttggcaaggacatggagaaagatgaaatccttatgcgcttttgatgtgaatgtaaaatgatacaaccactgtggaaagcagtaggacagttcctcaaaaaacaaaaatagaattactgtatgatttagcaattttgtttctgggtatataccccaaagaatcgaaagcaggatctcaaaagatacttgtatacttatgtttatagcaacactgattcacaatagataaaatgtgggagtgacctaagtggctgccratggatgaatggataaacaaaatgtggtatacacaataccatgaaatagtattcagccataaaaaggaaggaagttatgacacaggctacattatggatgaatcttggggacattatgctaagtgaaataagccagtcacaaaaagacaaatactgtatgattccacttatgtaagatacttagagtagtcaagagcatagaaacaaataaaatagtgattgccaggagctgagggagaggagaaaggg

SEQ ID NO: 236519 - DNA, 562 bp, Homo sapiens
ttttgtttaatttcagtgggattacatgctatgaaatgacaataacaggaacaggagggagaatgccagggtctcatgtgtgaaacyctttgtaaaaggaatgtaaactgtgtggctgttttgctgtcattaaccaacacttgaacatgggtgtcagtgaaaaccacatttcctcctttactctgagctacgtcccctggagctgactgacactgctggcatggagctttctctttcttttgcaaaaacaaaacaaatgaaatcttgccaagaagaaggtgggggacgctcaggccgaggtggcagatactaacgctactggcccagtatccatcaggtttgccatttctgtcccaaactctggccctcatcatccttgagggggtgtgggaaggaaaaataaggggcagggacaaggagtggggacaggggaggagaaatagcttaggcatccaaaagcctgaagggttctgaagcgccttgaataggcgagtaggcgagaggtgacagggcatcattagatgacgttagtgcagcagccatcttgacctttgcctccctg

SEQ ID NO: 236520 - DNA, 562 bp, Homo sapiens
ttttgtttaatttcagtgggattacatgctatgaaatgacaataacaggaacaggagggagaatgccagggtctcatgtgtgaaaccctttgtaaaaggaatgtaaactgtgtggctgttttgctgtcattaaccaacacttgaacatgggtgtcagtgaaaaccacatttcctcctttactctgagctacgtcccctggagctgactgacactgctggcatggagctttctctttcttttgcaaaaacaaaacaaatgaaatcttgccaagaagaaggtgggggacgctcaggccgaggtggcagatactaacgctactggcccagtatccatcaggtttgccatttctgtcccaaactctggccctcatcatccttgagggggtgtgggaaggaaaaataaggggcagggacaaggagtggggacaggggaggagaaatagcttasgcatccaaaagcctgaagggttctgaagcgccttgaataggcgagtaggcgagaggtgacagggcatcattagatgacgttagtgcagcagccatcttgacctttgcctccctg

SEQ ID NO: 236521 - DNA, 343 bp, Homo sapiens
aatacctgattagatgctcttaaaatatgatgactacggcccataaaggaaaggaatttcagctgggcaacgtccggctgggrtgcaaggattgggtttcttctttatttgttgtcagcaagtgctcctgatctttcctaccttgccatctcattaagcatatgcttgaacgtggggatactgacaatgcagctgtatttcatttgtagataattgatgcaataaatgtaataaccaaacgagatatgttgactcatgagctaatttgggtgtagatgttacagcacttgtgcagctggaaatgtttccatcacacaatctgtttcagataaatgttcctcgt

SEQ ID NO: 236522 - DNA, 343 bp, Homo sapiens
aatacctgattagatgctcttaaaatatgatgactacggcccataaaggaaaggaatttcagctgggcaacgtccggctggggtgcaaggattgggtttcttctttatttgttgtcagcaagtgctcctgatctttcctaccttgccatctcattaagcatatgcttgaacgtggggatactgacaaygcagctgtatttcatttgtagataattgatgcaataaatgtaataaccaaacgagatatgttgactcatgagctaatttgggtgtagatgttacagcacttgtgcagctggaaatgtttccatcacacaatctgtttcagataaatgttcctcgt

SEQ ID NO: 236523 - DNA, 460 bp, Homo sapiens
ggagtgagtataattaggaaagagtatagatccagggactgagccctggagcatttcaaagtttagagatcagggagagcaggaagaagcagtaaaaaaataaaaataaaaaaaaaaagaatgaggatatcacagtaaatgaaaagagtaaggaaggaggtgttttgaagccaactgaagagagcacttaaagggagtaagggaatgattgtgattgttgtatattgattttaaatcctgcagttttacttgtttattagtctaacaggatttttttttttttggtggcatctttagagttgatgttgtttatctttaaaaaaataaacttagtttcgttaatctttcatactgtttttctagtctctattcaatttatttttgctctaatctttaygatttcctttcttctgctaattttgggatttgtttcttttctagtttcatgatgtgcaaagtt

SEQ ID NO: 236524 - DNA, 638 bp, Homo sapiens
catattgaaaagagacttgactccttttcaatggatcctacctccttctgcaagaaatttctgtacttccctaaatcttatgaccttacctggcatgacgtatatgtcatcctctcctctaccctcaccctggaggacagggaacacatctttattggcacccaggcccatgagaacaccctccaacaaaaagatgctactcacaacccaatagggaccctagctgtccccagaactgaccccaattggaattgtcaggcaacttctgtagacagacagaaaccaggccatatcatatcatgccttctagctggcatatataatatcgcccctgatcttttcctctcctgccttccaaaggtcacaactaaatatgccaccttaagccctaataacaataagggcaaaatcgacctccatttacactttatctcccagtcagccccagacatttgaaaaaaaacattaaaaaatgaaggatggccctcaaacctcccaaagagacttaatcaaagtggcctttaaggtctttaagaatagagaggaagaaccaaaaacctcaaacctaaagaaggaccaggckaaataccaaatgctggtggctgccactcaacagggttcccaaggcatacagaatt

SEQ ID NO: 236525 - DNA, 605 bp, Homo sapiens
tttaggatgtgtgcatgatatagggcctcaggaggtcctgatgaaatgtgccttaggtggtcrgagcacagttcggttttatacattttcgggacacatgaaaaaacaacatatgtaagataaacattgatttggtacagcaaggtgggacaactggaagcaaatgcgcaacaactcgaatcagggaggggtcttccaggtcataggtagataagagacaaatggttgtattcttctgagtttccgattagcctctccataggaggcaatcagatatgcatttatctcattgagcagagggatgactgaatagagtgggaggcaggcttgccctgcgcagttctcagcttgacttttccctttagctcagtgatttgggggccgcaagatttgtttttctttcactcatgtagccattcagattttcgagatattcaagtattgaccctcatattaaccatacaaattagaattatgcctttgcaagactttcttttgaaagtcagataaagtcactcagtgtctcctagaagttttcatcaaaggagctcaggggagctaattttgaccttaaaaggcagaagattttgcctgctttgttaaaa

SEQ ID NO: 236526 - DNA, 605 bp, Homo sapiens
tttaggatgtgtgcatgatatagggcctcaggaggtcctgatgaaatgtgccttaggtggtcggagcacagttcggttttatacattttcgggacacatgaaaaaacaacatatgtaagataaacattgatttggtacagcaaggtgggacaactggaagcaaatgcgcaacaactcgaatcagggaggggtcttccaggtcataggtagataagagacaaatggttgtattcttctgagtttccgattagcctctccataggaggcaatcagatatgcatttatctcattgagcagagggatgactgaatagagtgggaggcaggcttgccctgcgcagttctcagcttgacttttccctttagctcagtgatttgggggccgcaagatttgtttttctttcactcatgtagccattyagattttcgagatattcaagtattgaccctcatattaaccatacaaattagaattatgcctttgcaagactttcttttgaaagtcagataaagtcactcagtgtctcctagaagttttcatcaaaggagctcaggggagctaattttgaccttaaaaggcagaagattttgcctgctttgttaaaa

SEQ ID NO: 236527 - DNA, 620 bp, Homo sapiens
ttaaaaaacccaggatgtcagcaagatggcagaatagaagattccacccattgccccctcacagaaacacccatataagcagccatccatgcatgacaatatcttctggattccaggtaagagattgtagcaatagggcagaacaccaaaatgagaaaaaacccattgaagaggataggaaggacagtttcactctattgaagtcacctcttccacaagttgtctcattgcagggctgagagagatcttctcccccagagagctccccgtggggaatagagagtgaagtgtgcattcaactttaccacggactcaggttccaggcccaagccagtcgattccaacattaggctgacmcgcgtggatgtaggtttcaggatctcaccagtgatccctggagtcaaaataatatttatggacttagggtccagggctgtcctagtgctaggctgtccccctcagtcccaggtcccaggtccactccagcgatctcccttggatcaaggctccaggattgacccagcatcaggaaatagtgtggacaacagtttgaacaaaagtgtggacaaatagacctaacacaaatatacagtatattccatccaacaaaagccaaatcc

SEQ ID NO: 236528 - DNA, 523 bp, Homo sapiens
ggcacatgtctttttctggtcaccttagccatgtcactgcctcccagtgggctcacctaggattcgtggcctccctatatatatcactcttcaggaaaatgaagagctacgggtccagtttactttggtcagccaggcacacctcctagccagtgatggtcctggggtggctcacacattataaagcaccatttctgatgttttttccggggtgtggggcgggggtgggatggaratgctgagaagaccaagatggagaaaagaaggcatttctttactgcaccctcaaaagccttcccaaagttacttcccacacctcatctccctatgcttaattttggtggcacacatggcgtggagagggtgtttcctccaaggaatttaccatggccattccgttttctccctcctcccctcactttaatggcagctcatattttgaatggcttactctaaattccttcaaggtaatatggccacattcacatgtgataaatgtgtaaatcatcccacttctttcctg

SEQ ID NO: 236529 - DNA, 495 bp, Homo sapiens
aagagaatgcttaacatggactcaaaagaatggcatctgctgccacaaagacacacaaatatatagcccacaggcactgtaaaggaattgcacaatcaagtttacataataatcagctaacaataacacgataaggtcaaaatcccacatatccaaaaacactgagtgtaaattggcaaaatgcccacatttaaaaggcatagagtggccagctgcataaaagcacaagrtccaagcatcttctgtcttcaagagacccatttcatatgtaatgacatccacagcctcaaggtaaagggagagagaaagacataccatcaaacagaaaacaaaaaagagcaagagttgctagttttatattagataaaacagatattaaaccaataaaaattaagaagaacagggaagggcatttcataatgataaagagggtaatcaaacaagaagacaactatcctaaatatatatacacccaacataggggcacctgaattc

SEQ ID NO: 236530 - DNA, 588 bp, Homo sapiens
gtccattaaacctctttcccttataaattagtcagtctcagatatgtctttattagcagtatgagaacagactaatatactgtagatgtatgaaattatttcaagatacttcaatctattccattgttccatatgtatgattttatgccagtaccttgctgttttgattactatarctctataggtatagtatagtacctaaagttaggtaatgttattccttcagttttgttctttttgttcaggatggctttgagtattctggggtttttgtgattccatataaattttaggattctctttttccatttcagtgaagaatgtcattggtgttttgaaggggattacattggacctgaagattgctttgggtagtatggccattttaacaatattaatttgcccaatccatgaacatggaataccttttttggtgtccacttcaattttttatattagtgttttatagtttctatttcagagatttttcacttctttgattaagtttattcctaggtattttattttatttgtagctattgtaaatgacattagtctcttgatttctttttcaggttgtttgctgtt

SEQ ID NO: 236531 - DNA, 602 bp, Homo sapiens
aaaaccttttcattgaagtttaataaacatgtagaaagcatcacatgtcatgagtgtacatgttgaaaaattttcacagataaacaccctggtctgatcagctctgagataaataaaaaaacaaaacaaattcctcagatcatccaacaccacagaagccccaattcttttcctttcagtcaccacttctatgagagtaatgccttactctgacttctaacagcatagacacacaattaggattgtgttattttatttggtgtgtatatgtttgcatgcttttgtattttatatgtatgacttttacctgcrtgccttcctttctttctgacttcttctgctccacattatgtttgttagatttacccatgtttttctatgtagttgaaaatcatccattttcatttttgtaggatggcatttcattgtgtggatataatacactttatctgatgttaggcatttgggtgattgctatttataaggaattatcattaagtgctgcaatgaacattccaatacatatctttggaaggcaaatgcatattgtgtaggtatacacctggaattggtattgctcttatcaggtatatgtagtttta

SEQ ID NO: 236532 - DNA, 523 bp, Homo sapiens
aacaaattttggatttggtttgctcttgcttttctagttccttagcatgtattactgggttgtttatttgaaggttttttctgtttttttttttttatgtaagtgcttactgctataaactttactcttagtactgttttcactgtattccatgggttttggtatgttgtgtttttattattgtttgtttcaagaaaattttcaattttcctagtttcttcatttacctactggtcattcatgagcacattgattaattttcatatagtttccaaattttctcttgttattgatctcgagttttattccattatgctcagagaagatacttgatataatttcatgtaaatggaagccaaaaaagaacaggagtagctatacttatgtcagacaaagtcgattttaagacaaaaaatataaaaagatataaagaatgtcatttctgaaaaaaartctcgtttaatggacactactgaatggatgtcccataagcatctcaatctcaagatgcttaaaactggcc

SEQ ID NO: 236533 - DNA, 547 bp, Homo sapiens
tccattttgaattgagttttgtatatgatattacaaagcagtgatcaaagttcaattttcttctttttacatatagaygtccaatatttgcagaaatatgttttgaaatgattatcctttctctactgaatttcttttgcacttgtgtccaaaaaggatttccatatacatgtgggtctatttctggacactgttttacaccattgttctatttatctgtctaaagccagtactacacttattttagctttataatgagccttaaaatcagagtgtattagttcccctattttgttcattcctctttcaaagttgtttggatttttctcgttcatttgaattcccatataaactttagcatgagatgatgtcaagtttgacataaacaacaacaacaacaacaaaaagaacaacctgctgggtttttcactggtatcacacataattaaattaggggaaattaacatcttaacaataaagagtctttttaacccataaaaacagtatataacttcatttgtttaggccttccttaatttctctatac

SEQ ID NO: 236534 - DNA, 547 bp, Homo sapiens
tccattttgaattgagttttgtatatgatattacaaagcagtgatcaaagttcaattttcttctttttacatatagatgtccaatatttgcagaaatatgttttgaaatgattatcctttctctactgaatttctttygcacttgtgtccaaaaaggatttccatatacatgtgggtctatttctggacactgttttacaccattgttctatttatctgtctaaagccagtactacacttattttagctttataatgagccttaaaatcagagtgtattagttcccctattttgttcattcctctttcaaagttgtttggatttttctcgttcatttgaattcccatataaactttagcatgagatgatgtcaagtttgacataaacaacaacaacaacaacaaaaagaacaacctgctgggtttttcactggtatcacacataattaaattaggggaaattaacatcttaacaataaagagtctttttaacccataaaaacagtatataacttcatttgtttaggccttccttaatttctctatac

SEQ ID NO: 236535 - DNA, 547 bp, Homo sapiens
tccattttgaattgagttttgtatatgatattacaaagcagtgatcaaagttcaattttcttctttttacatatagatgtccaatatttgcagaaatatgttttgaaatgattatcctttctctactgaatttcttttgcacttgtgtccaaaaaggatttccatatacatgtgggtctatttctggacactgttttacaccattgttctatttatctgtctaaagccagtactacacttattttagctttataatgagccttaaaatcagagtgtattagttcccctattttgttcattcctctttcaaagttgtttggatttttctcgttcatttgamttcccatataaactttagcatgagatgatgtcaagtttgacataaacaacaacaacaacaacaaaaagaacaacctgctgggtttttcactggtatcacacataattaaattaggggaaattaacatcttaacaataaagagtctttttaacccataaaaacagtatataacttcatttgtttaggccttccttaatttctctatac

SEQ ID NO: 236536 - DNA, 547 bp, Homo sapiens
tccattttgaattgagttttgtatatgatattacaaagcagtgatcaaagttcaattttcttctttttacatatagatgtccaatatttgcagaaatatgttttgaaatgattatcctttctctactgaatttcttttgcacttgtgtccaaaaaggatttccatatacatgtgggtctatttctggacactgttttacaccattgttctatttatctgtctaaagccagtactacacttattttagctttataatgagccttaaaatcagagtgtattagttcccctattttgttcattcctctttcaaagttgtttggatttttctcgttcatttgaattcccatataaactttagcatgagatgatgtcaagtttgacataaacaacaacaacaacaacaaaaagaacaacctgctgggtytttcactggtatcacacataattaaattaggggaaattaacatcttaacaataaagagtctttttaacccataaaaacagtatataacttcatttgtttaggccttccttaatttctctatac

SEQ ID NO: 236537 - DNA, 646 bp, Homo sapiens
gcagtgatgagacaggcataggataatcactacagataatctttaaaactgagacatagataagtcattgatatagtacttctaaaatccagctaggtataaatgttgaaagtttcttgattaattaatttcaaggcctgaaaaataattcttcaggttcttggctctatcctgtgagtattcctcctttttcatgaaaggtagaatgttttcagatgagtagcttactcagtcctcttctggccagtagacttgtgaaagtctaactgcctcttttccttgtgtactgtctgtctctgtcactccatgctagtagtttttctgctgctgtaattctttgaaaaactttgtgagccacttgtgtatttcattggagtttactcaaaaatcactcctgcagatcccttctaggtgagccctcttgtaccttgggctcctcctaagatractgaaggacaatgcccttaaacttagttcaatcattgtggaagacagtgtggcaattcttcaaggatctagaaccagaaattccatttgactcagcaatcccattactgggtatatacccaaaggattataaatcattctactagaaagacacatgcagatgtatgtttattgctatttgcaatcgcaaagacttgga

SEQ ID NO: 236538 - DNA, 628 bp, Homo sapiens
catggcggactgactttaatatttcctgagttgcaaagtcatttctctgtgctcaatgtataaagaaaaacaggccatttaaaaaattatcccacagtctgctgtttagtcaaaaacactagcatcaatgatagtttcttaccttttcttctagcccacaacattttgacattattacaattctgcatgaacaattaagaatattataaaattcatgatgttataatgatatcttaaattgattcagactccaattgataatatgtttaacctatagagtaaaacaaagattgctttggcaatacttgtctccccatgtttatcaccacatatcatttataacatggtaaaattaaaaattcactcaatcatataagttgagtgaacaatatgtccaatgaatgaagcatgtatctacttttagtagtgacttttttgcacagaaaataaaatcaatatttcattcaagtgttaaatgtgtttgtattttaaatactyattaaaatttgtttgtatacatttataacaagtattccattgaggaagaatattctactccatctcaggtttagtatttgtagaaacttaaaaaaagttcgtatatgctgcatttaaaaatatgttattt

SEQ ID NO: 236539 - DNA, 598 bp, Homo sapiens
ggcttcctgtctttcattactttcagaaaaattttggtcactatctctttagatatagctttgaccttcattttttccttcttaagacctccaaataaagatgtatgtagcttttcacactatgtcatgttctagtaaactgtactttttcttttaatgctttttccatttatttttgttctctgtgttgtaatctgtatattttatttacagctctcttcccatatatgaatcctcttttttcaccatgtcctatctgtaaactgattatttattcattttgtatattttttatttttaatttttgtgtacatagtaggtgtatgtatttatggggtacaagagatattttgatgcaggcacgcagtcagtaataatcacatcatggaaaatggggtatctgttcacttgaccatttatcttttatgttacaaaccatccatttatgcccttttagttatttttaaatgtaaagttaaatkagtttgactttagtcacagttgtgatatcaaatactacatattattcattctttcaaactattgggtgtgctcattaactgtccccactccctctcaacccccattacccatacca

SEQ ID NO: 236540 - DNA, 507 bp, Homo sapiens
ggttgcaaacgtgttaatgggaaaagactatttctgagttgagggagggagaattaggtaaaaagaaaagaaaaaagactgcatttaaacaaaacatataatattatatttatgtacttataataaatgtaaatatatttgtgtgtatacttaygaataaaaataaaggtagctaattggatagaaataaacattagcaaaaattaggaggaggagaagagatggcagaaggtagaaataagttaactttttcattttgtcataatagccagttgataccattaagcaccaataaattgagaaaatgagacctaagcataaaattcagtattttggaggtaatgaccagaagaacttgaaatagaaacagttaagtgtggttatctccgctgaatagaattaggagtagagaatgggagatttttacttggtatttcataatcttttataatgttgaatatttttattaccacatctatcttatttttataattttaagaaatagaa

SEQ ID NO: 236541 - DNA, 515 bp, Homo sapiens
tcggggctctgtcagcagggagcagtgatgactgaatacccaccagcagaaagaaaaaaatcagaaaggctactgaaagcatatttgcctttctaatatgaatcacatactatatggctccttaacagttcatatatgttgcaacttaatattttggtgataattcaaagtgatcatattaccaactattttaattataatgctataatacactgaagcccttagagtctggctgaaatgtttttattttaccccaaataagtagtttccaaaagtgtgactataatatgaaacaatatgataataaaaatttcatgaaaatatgaaatgtacctgagaaaattttaataaaagtgaatgtaatttttaaacagacaagtatcagggcttraagaattatacatggcttatctgggaaacttgcttaagtttaagactttattagccagtggtgccagagagatgattatttgctctctctgagcatttaaatacacaatgcagggaaaaccaag

SEQ ID NO: 236542 - DNA, 490 bp, Homo sapiens
tgatccgcccaccgtggcctcccaaagtgcagagattgcaggcatgaaccaccgcacctggccactccagtctttttgagaaatctcttctttttgacttctatgatatcactttttattattccttcttctacctccaaacattccttytcagtcttacttggaatctcatttatttctgccctctcttaaaacgttggcaatcgtcaggtgctagcatcatcctctgcttccctcacccctccttcaacgaccacaccaactcccatgagagaactatcaaaaacaagcacacaacacttatttccagctctgaagtctctcctggatacagatttttatataggcagcctactagacagcccctcttggccactcatagacacctcaacctcaacatatcttaacacactcattacgtagctcattcaccaccgctctggctggctttacctctactatttatctcgttgaatggcaccaggaattc

SEQ ID NO: 236543 - DNA, 560 bp, Homo sapiens
tctcctagtttttattcttagcttctcttcaactgctagtacctcaatttcacttaataatttcactcattcagctgtaaaagtgtattcattattattattattaaagtgttattactactatttgataataaatgtgtttcttaccctcagtttcggttaagtgtgtatggagatgaggattagagcagatagaaatatatatttattgtttctaatgctgtgccatcagtttaatactgtgttcaaggaaaaatatgatggttgtatcaaggaaaaatgattaaatatccttctgtcaattgaactgcccaaataaaaataccatcaatctggatggtgaagaacaaatggaacatttatcaaggcatagaaagaacaatcactctagacagaagaaataatctatgtaaaatttaaacaatgaacttcaggataataatgcttcaatttacttttatgatcctgtttctctcctatacttcagccttgyctttctacctatctaatagacttctccatgaggacagccaggcagaccctcaaaataaataccttgt

SEQ ID NO: 236544 - DNA, 474 bp, Homo sapiens
acgcagcctgacttttgggaggacagggactgggaattggagagtcattgtctccctaggaaatgttctttctgactctcctctctgcttctccttttctttwccccaaaactgtcttatttgctccccagtccaagtgctgttgtaaaactggtcacagcttttaagtacagacctgtccagagaagacaattatattgaccagaattcccctaaggaggaatatctactcttgaaagtaatgcttcaataagctcttcgatcagctgattggcttagtgggtgagccctcagggcatgctcatgtctgaaaagacgattgctgtaaattgctatgcacaaaacaaggaggagaattagtgtggcccaggagagagacagagttaggaaggagagggagaggggagggactgaatgaactctcccctctccattccatttatagtaaagactattaaaatgataagatactgg

SEQ ID NO: 236545 - DNA, 622 bp, Homo sapiens
ttaccctcattaaattggcaaatactacaaagttccatgtttccaagtttgggccaagttgggaattcctagatagatagtggaagtgcaaaacaggtataggcactttggacaaaaacttggtaatacctagtaaaggtgaaggtatgtgtacctatgaccctgcaattccatgtctagatgtctccctggaaaagcccaaacatamacctacaaagatatttcttgaacacttctgccatattatgattatctatatatgtatatatatatagatacagattttcacccatggttcctagttcataagtttcataactcttgttacagccttttgttataatgtgagagtgctttaggcctcagaagtaggcctcagggaacagaatctctctctgggaacttctgctctcctttcacctgcccaagacaggaatctaatctgatggtgggtcataagaccctcaggccagagagagtcctgccccacgctctagagaaaggaatgctgcacagagagaccaggaaaatctgaacagaacagacaggccttgctgggtttagagcatacccttttgtgcaatcacatttcgacacaattatccatgcttcaatcatgaac

SEQ ID NO: 236546 - DNA, 489 bp, Homo sapiens
ccccttttccattatattatttttccaaagcacttatcactacatgatgttacattatttacttgatcatttacttattatatttctccctatttgagtttcagttctatggggacagagatgtttttactgctgtatctcacacctaggacataaaaagtactcactaaatatttgttgaattgatgaatgtataagtgaataaatagatactgtttaaagacctggatgaagcacataggattaacattgaagaaatctaatataactgaactgtaggctctggattaagatgaaaaataaaagtgactaaaatatggtcacataccagggcagatgtgtttgaaaggtctgagagaccttagagacatgctacctggaaatttccttgtagaatccatacaaataaaattgggagccagatatcaaggcagagggcataagctgaaaaaaaaaaaaaaagraaaaacatgataaatcagagggctg

SEQ ID NO: 236547 - DNA, 359 bp, Homo sapiens
gaattctattctatttgtaccttaaaattaaacctgactaagaagtctcagtggaggactagaaagcactaaaaatatattattatctacaaacagacatgaggcctcttcctggaccttcttagcaaggattctctagagaaacagaaccaataggagatatagttaggtcgatatctagagagatatattacatatattatatattgtataatatatctatctagatctagatatattcaataaaatatatatatatatatatatakagagagagagagagagagagagagaaagataggtagatatacctatatagatagagatagagatatccatacatacagacagaaagattg

SEQ ID NO: 236548 - DNA, 535 bp, Homo sapiens
ctgactaagaagtctcagtggaggactagaaagcactaaaaatatattattatctacaaacagacatgaggcctcttcctggaccttcttagcaaggattctctagagaaacagaaccaataggagatatagttaggtcgatatctagagagatatattacatatattatatattgtataatatatctatctagatctagatatattcaataaaatatatatatatatatatatatakagagagagagagagagagagagaaagataggtagatatacctatatagatagagatagagatatccatacatacagacagaaagattgattgattgattatgagactgtgtgattgtggaggctgagaagtcctgagttctacagttggcaagctggggacccaagagattccatggcatagttccagcctgagtccaaatgtctaagaagcaggagagtcagtggtacaagtaccagtctgaatctgagtctgaaggaaggaaaccagtatcccaactcgaagacagtcaggaaga

SEQ ID NO: 236549 - DNA, 535 bp, Homo sapiens
ctgactaagaagtctcagtggaggactagaaagcactaaaaatatattattatctacaaacagacatgaggcctcttcctggaccttcttagcaaggattctctagagaaacagaaccaataggagatatagttaggtcgatatctagagagatatattacatatattatatattgtataatatatctatctagatctagatatattcaataaaatatatatatatatatatatatagagagagagagagagagagagagaaagataggtagatatacctatatagatagagatagagatatccatacatacagacagaaagattgattgattgattatgagactgtgtgattgtggaggctgagaagtcctgagttctacagttggcaagctggggacccaagagattccatggcatagttccagcctgagtccaaatgtctaagaagcaggagagtcagtggtacaagtrccagtctgaatctgagtctgaaggaaggaaaccagtatcccaactcgaagacagtcaggaaga

SEQ ID NO: 236550 - DNA, 685 bp, Homo sapiens
cccaagtgtttcccgtaaatcttcagagacctgcaaatgtgtcctgaagatatatgtagtaatggtggttactgtgtctgtttcaatttctatttgtaaaaatccactsactgtaaaataattaatttaatgtttgggtttcctttaaataatatatatcaaatgggcatatagtggttggtcagatagatgagattgctcccaatgcatttttgtaaccatcagctgacttcaggattctgattggtacataatagaaacttcgtttatgcttatcatgtgccttattttattcaagtttctgtaataaaaaccagaggctgagtagcttataaacaacagaagtttctttctcacagatctggaggctgagaagtccaagatcaaagtgttagacaatttggtgtctggtgagggcccacttcctcatagactatgttctcacatagtggaagaagcaaacaagctcctttgggcctcttttataaggacactaattacgttccaacagcccctcctccaaatactctcacattgagtattaggtttcaacatataaattttgggagtgcataaacactcagaccattacatcatgtatgtttaatttccacctttaatagaccaagttaaagacagaaaaacgtagggaacactgatgatgatatacagcatgtgacagaag

SEQ ID NO: 236551 - DNA, 599 bp, Homo sapiens
tgtccttcttgtgaaggcttttgaggtatttcaagaaacttgggtgttgtgatctaagtttttggtcaatgcgaccatatcttcattagaggacaccccaagcccaaaagcagtgaggatcttgtacactcatagaggtaccacctcggtggtcttagataaggtccataagaattctctggattaccaggcagagactcttgttttcttcccttactatcccccaaacagagtctctctctctgctgagttccctagagtttggcggaggagtgactgaagcaggcctgtggccaccatcactgtgactttgctgggtcagacctgaagccastacagcacttggtcctacccaaggcctatggtaactactgcatggctactgcttgtgtttgctgaaggccttatggctatataatctgcaggcagcaaagccagccagacttgtgcccttccctttgggtgacaagtctcccctggccctgactgggtccaaagttgctgtctgggagtcaaagcttggagatagaaaccttaggtatccacctggtactctattctactgtggctgaactgccacccaaaccacaagacaaagc

SEQ ID NO: 236552 - DNA, 399 bp, Homo sapiens
gaatttttcacaaagcttattgttgctgtcttcgtttctctggttttcatttcagatagttcctatggctgttctttcaagtttactatctttacttctgcaatatctaatttcatccagtgyattttttcatcttatacattgcagttttcatttctagaaatttagtttttgaatattttccatatctctatttaaaatttcaagcattacaatatatttataataccagttttaatatccttatctattatttaatatcaatgtcagttctggattggtttttattgattaggcctcattatgattcatatttcactgctttgttgtaaacctggtaactttttaattggattttaaacattataaattttatcttgttggacgctgaatattttt

SEQ ID NO: 236553 - DNA, 589 bp, Homo sapiens
tgagttcttgatttgattcttggtttrgttgctgtggtctacagcagagcttctgatttgtgtacattaattttgtatcctgaaactctgctgaattcatttctcagttctaggaactttttggaggagtctttagggttttctatgtatattatcatatcatcagcaaaaagcaacagttcgaattctactttactgatttggatgccttttatttctttttcttgtctgattgctctggctaggacttccagtactatgatgaatagaagttgtgagagtgggcatctttgtctttttctagttcctagggaaaatgctttcaactttccctccttcagtattatgttggctgttggtttgttatagatggcttttattactttgaggtatgttccttttatgccgattttgttgagggctttaatcataaaatgatgctggattttgtaatgcttttctgcatctattgagatgatcatgtgatttttgtttttaattctgtttatgtggtgtatcatatgttaaacttgcatatgttaaaccatccctgcatccctggtatgaaacctacttcatcatggtggat

SEQ ID NO: 236554 - DNA, 514 bp, Homo sapiens
atgtgcacagcatttatatacaatctcactggctctttttagaagtttcaatgagatagtatatattacattttcatggatattgcttggcaaatgacagacaacttttaaaaaatttactttactacttagtacagtacttatcattatcaatattagtttgaatgaataagtccttataaccttattgggagaccagggtaggtaagtggtctatccattttatgagcaagggtaagaaatctcacaaaatacattttattaatatttcatagtatgagtggctcacaaccttcaaacattgcactattgtataaatgatcttcataggtcatttagtaagtagtacttgaggtatgcttgggttgcaaggaataaaatgtgtgacattagtctggcacaacatatcctgcaaaatcagagtgtaactttcaytttttcatttagctttcattgagtgaataatgcaatttcaattgagcactgaattggagatacagagaactaaggtttt

SEQ ID NO: 236555 - DNA, 578 bp, Homo sapiens
accttacttgttgggattcataaaagatactgcaaaatagtattctgttctcaagctgctaataaagacatacccgagactgggtaatttaaaaaggaaagagatttaattgactcacagttcagcatggctggggaggcctcacaatcatggctgaagttgaaggaagagcaaagtcatatcttacgtggtggcaggcaagagagcatgtgcaggggaaatgccctttataaaaccaccagatcttgtgagacttacaagatcttactcacaagaacagcacaggaaaaacccaccctcatgattcaattacctcccactgggtccctctcatgaaacgtggggattatgggagctacaattcaagataagattgggggaggtgggggggacacagccaaaccatatcgctgtgctttgacatactgaactgaagaagtctcaagatctctctaacatttccccatcctctctgtcyctcaattatctgtctctctcaaagtacaggatgaagtaattttctgaagttcccttacttgcctaaagtttggacctagcaaagaaggaaacaattacct

SEQ ID NO: 236556 - DNA, 606 bp, Homo sapiens
cactaatgatcagggaaatgcaaatcaaaaccacaatagatacgactttactcctgtaagaatgaccataataaaaaaaaaaatagatgttggtgtggatgtggtgaaaagggaagactcttacactgttggtgggaatataaagtagtacaaccactatggaaaacagtgtggagattccttaaataactataagtagatctaccatttgatccagcaatcctgctactggatagctacccagaggaaaagaagtcattacacaaaaaaagatacttgcatgcccatgtttatagcagcacaatttgcaattgtaaaaatatggaatcagcccaaatgcccatyaatcaatcagtaatgaaaatgttatctatatctatctatctatctatctatctatctatctatctatctatctatctatcactatcatctatccatccacccacccaccatggaatactactcagccataaaatggaaggaaataacagcattcacagcaacttggatggaactggagaccattattctaagtgaagtaagtcaggaatggaacaccaaacatcatatgttctctcttacaagtgggagctaagctataag

SEQ ID NO: 236557 - DNA, 605 bp, Homo sapiens
cctgagtcctgtgtacttgtccacccatgtgggagacatggccatgtggcacctgttgatgactgtcagtcttcgccaataaaccataagctccatagggcaaggccaagaycatgtgtgttttgttgaaaatcaatcctctgggctatagtaagccttcacggttgaatgaatgtattgaatgaatgaatgataatgtgtctagaaagaaatatgtaattaaaatattcaggtgatttttactttctttgtgatagtctctgaatttttcttttaacaataagtatttgtcatttttttgtttgttttgttggcattttttcaaagcattaaaagattcatttcaaaaagaagagacagaaatatatacaatacttttaggcccaaaggagaaaacacttcttgtcaaacagcccaaattctaagaaaactgtctgcacaaagatcttctatcaacattatcaccaaagagagagagaagagaagagagagtgggagcacttagccagaaggtcaggacagcaactctacctttttcccaagtggctcatgcctttttgtaggggagacttcagtctgaaatgttgcaccctacccaccaggag

SEQ ID NO: 236558 - DNA, 467 bp, Homo sapiens
atctttgaaattgttatctrttttttacagttacatgccaataggtaagaatctccctataatttctagttgtcttatcccaaattcagccagaatcaaactatatctgcagtctcagttctcttacccttcaatattgagtgctaaccagcatttcatatgcattgtctaattttaatctccacgacagttacaaggaaggtaccattcattcattcagtcatcaaatatttgagtccctactaacaggcaggcactggagatgcaatgattttgaaaatgacaagccaggcacggtggctcaggcctgtaatcccagcactttggggggccgaggcaggtggatcacctgaggtcaggagttcaagaccagcctggccaacatgatgaaaccccatcactactaaaaatacactaaagaatatacggtagacaggaattctttgtgttgcttaattacctccatg

SEQ ID NO: 236559 - DNA, 564 bp, Homo sapiens
ctcctttcccagctccaaaaagccaaatcatactcatcttttaagacccacgaacctctcagttaccctctcttattttttccagagatatgcacctcccttaaagcatcaaccacytctgccttataatcagattatttgtttatatttgttatatgctgtttgaaggataaatctgttgcttatctgtttttgtgtgctggactctgtttagcatggtttttgccaggactcagtgacaacttactggcttcaacctcaaactcaacatgtctgagctcatgatctgtttcctccactcccaccgcaacctctccctcttgaatttcctgtcatgctgatggaaaccccctccacttcactgcccatgccagaaaatttcgtgttactctttctcctctgtacctcaatccccagcccccatgtgatcaatgacagtcctgtcaattttgcctctctgataactcttaaatttataccccaatttacacccctgttgcttctagccacagacctatgactttagttctggccatcatcagccctggcctgtgtcacagcact

SEQ ID NO: 236560 - DNA, 564 bp, Homo sapiens
ctcctttcccagctccaaaaagccaaatcatactcatcttttaagacccacgaacctctcagttaccctctcttattttttccagagatatgcacctcccttaaagcatcaaccacctctgccttataatcagattatttgtttatatttgttatatgctgtttgaaggataaatctgttgcttatctgtttttgtgtgctggactctgtttagcatggtttttgccaggactcagtgacaacttactggcttcaacctcaaactcaacatgtctgagctcatgatctgtttcctccactcccaccgcaacctctccctcttgaatttcctgtcatgctgatggaaaccccctccacttcactgcccatgccagaaaatttcgtgttactctttctcctctgtacctcaatccccagcccccatgtgatcaatgacagtcctgtcaattttgcctctctrataactcttaaatttataccccaatttacacccctgttgcttctagccacagacctatgactttagttctggccatcatcagccctggcctgtgtcacagcact

SEQ ID NO: 236561 - DNA, 601 bp, Homo sapiens
gctctgctcaagtaaaaattaaatagcattactatagagctcaatgaaacctcaaaccaggtgaaggcccatagccttgacacatttatcactacatgtcaaagtgtcgtattttattagagatattttaccatttactctgaagttagggtgtttgatgctgacttttatattatgataagaaatgcaagccattgttaaatattgttgtgactaaaatttgaatctaaaaatctcttcaacttcttgtccaagtttttggattaattcatttgaggagtataytatacttgataggagatctaaaacacacacacacacacacacacacacacacacacacacacattccgtttgcatctacttatgtgaataagggttttctagttgcatagatgtacataaacaattttttaaaaaccaaaacataatcaaggacaactgaaatagataatttggattgatgtggagcaaagcatgatacctaattccaaatatttatgttcttcaaagttgtcttgctgttattacttattgataagcaaatattaaaaacaaaaatgttcaaagtaaatgtatactagtaaaaaaatgtcatact

SEQ ID NO: 236562 - DNA, 592 bp, Homo sapiens
atctacataattactattgcaaaaaaaaaaaaagggggagacccagaattggggacatgccatttaatattatggccatttacaaaaacaaagatagatgtgaatgcaacttgtaataagtcaaggtataggaaaaaacacaagatagttttccagactcaccagaagcctcccattcccgtggaacttgaaaagattcacaggaggctgcatactgttgcatctatacagacaactgttaagatctgtcgccccaaccacagttcagaggaggaatcttcagctgtaagaggttaaatgtcatatccataggcgaaacaatactgaaaagagaatctaactcctaattcccacagcatcctttactgtagcctttccttggctaccaccatagcaatatatctcagcttttagtccatccattgctggtaccagaaaacacagatgtgaacaaaagcacatgttaaattgcgagcatttggatttgttctggtttgactctccaacatgggttcttagatcagtagttctcaktctgagtcagataataatttttaaaaagcttcatctctgagtaagccaattttgaaat

SEQ ID NO: 236563 - DNA, 523 bp, Homo sapiens
gctaccaaccacacagctgggaagaacttaaaatattgaagccacaatgctactcactatctaatgattttgtgcagataactcaacttttctcaaattcaatgtccttttctttagaatggggatgatcacacaaacctattgaggttgatttctatgatttgacagtagtgttatttttcatgtggcttattgcaatagcctcatctccttttctcatcttctggcgtccactcttaaccactgttcatctatcagtaacaaaacaactgtagcgatcccgttaaagtattaattctatcactcttctgccctccactcttaaccactgttcatctatcagtaacaaaacaactgtagcgatcccgttaaagtattaattctatcactcttctgcccaatgtccctgccttcatgccttctcatctcwttcagagtagatgccaaagttcatttgcttacattgtctgccacctcttcattgcctctctgacctgacctgccaccactttcaccctggatc

SEQ ID NO: 236564 - DNA, 589 bp, Homo sapiens
ctgccttgaaaaagtgggttgatccctgacctggctggcattatgtcatgaggagtaaactttgacattgaaaggctggtgtctgattggccagggctggtttgttaatggagatgagcctgcaagggttcatgtggtagagaattaagcaggatgactcctttttcagtcaggatgaattacacctcatygttattcatttgaagcatagatttaggaagaattttaatcatattatatttttgcagcatttatgtttttcaaggctttttcacaaatatgtttaaataatctcctaacagccctgtaaagcaaatgactatgtatagacaaaatatggagaaatagaaagaactatgcattgtaggaagtgagaagccatccagaagaaaaacagactaatagcaccttcttaacttcgtctatttgtcagccttcaaccaaagaacagattggatccatcacagcttttgtaatatcccataagaaaaggcataaaagagagaagtatctacttccaggttggactattaaaagcatattatataataatgttcaaaatgatggaaatgtaattaattgaatcatt

SEQ ID NO: 236565 - DNA, 509 bp, Homo sapiens
ggcagatgatttacaagataattaaaatttattgaatattaacatcattgttacagacattcactgtgacaaacttggacatattttcttataatgggaactattgaaatatgcaccagataattaaactgtctagcatgcaagttaaattccctatagaaatttgattactttatgtcaatgcagcctgaaactattattaagagatggcatatgtcacatgctaatttgctttattgcattaagaatgaaaactcagctaaacgctgattatttttattttaaagaccctctagaactgataccatagttgacataaactttttctctcaattccatactctcaagacatttaaaacattgatataaggatgttttgtatgtcaaaatcacagttcaactaattgtgatgtaatatgccttttatatatattggtttatcrcttcagaataatttcataattattaaatcagctttactgtataatggcttatttcatttgagaatt

SEQ ID NO: 236566 - DNA, 567 bp, Homo sapiens
ataaagaagaaaatgttaagagaaaggaaaagacaaagaaagatgtcagaagttttatcaagattttaaatgctaaaataacacatctattatcattatggatcctagaaagtaccttagtattttgcataaaagagaaagcaattaggtctctgtttacttggagttagagacacaattactcatggcatggaggatgggagaaggaaacatggacaactaccgcgaaacttctcccctcttcttgccccagatttgccactaagggtatatgttggaaatgcttatttttttcacagggaaataaagctcagattactatgaatctaagtgaggtgggcccagaattagtttctgaagtgcctggtaactttctttctttcttttaacttttaggttcagggstacatgtgcaggatgtgcagatttgttacataggtaaacgtatgtcatgggggtttgttgtacagattatttcatcaccgacgtattaagtctagtacccattagttgtttatcctgatcttctccctcctcccaccctccagtaggctgctgtgtgtattg

SEQ ID NO: 236567 - DNA, 567 bp, Homo sapiens
ataaagaagaaaatgttaagagaaaggaaaagacaaagaaagatgtcagaagttttatcaagattttaaatgctaaaataacacatctattatcattatggatcctagaaagtaccttagtattttgcataaaagagaaagcaattaggtctctgtttacttggagttagagacacaattactcatggcatggaggatgggagaaggaaacatggacaactaccgcgaaacttctcccctcttcttgccccagatttgccactaagggtatatgttggaaatgcttatttttttcacagggaaataaagctcagattactatgaatctaagtgaggtgggcccagaattagtttctgaagtgcctggtaactttctttctttcttttaacttttaggttcagggctacatgtgcaggatgtgcagatttgttacataggtaaacrtatgtcatgggggtttgttgtacagattatttcatcaccgacgtattaagtctagtacccattagttgtttatcctgatcttctccctcctcccaccctccagtaggctgctgtgtgtattg

SEQ ID NO: 236568 - DNA, 394 bp, Homo sapiens
ttctttttaaaaagatgaagtcccaaagttacatattcttcagctatttttatagacacataaatcacaactgggtttgactttagtgacaawtgtagtcaataatctgatattcagagtgggaaaagtagaacagtagcttctcttaacttcttaacttcttaagttacaaagttgtaacttaagactggcttctatctaggcatgctcaggggtgatattcaaaaagtaatacaaattaatgtgtaaataaaatgcatttaaaattctgttctctaaattagacatgtgtatgacacacatctataattatacaattgcttacttagttatataaatcattcatccaatttaataattttcaaatcagttattgatttatttagaagtcaat

SEQ ID NO: 236569 - DNA, 394 bp, Homo sapiens
ttctttttaaaaagatgaagtcccaaagttacatattcttcagctatttttatagacacataaatcacaactgggtttgactttagtgacaaatgtagtcaataatctgatattcagagtgggaaaagtagaacagtagcttctcttaacttcttaacttcttaagttacaaagttgtaacttaagactggcttctatctaggcatgctcaggggtgatattcaaaaagtaatacaaattaatgtgtaaataaaatgcatttaaaattctgttctctaaattagacatgtgtatgacacacatctataattatrcaattgcttacttagttatataaatcattcatccaatttaataattttcaaatcagttattgatttatttagaagtcaat

SEQ ID NO: 236570 - DNA, 484 bp, Homo sapiens
ttctatcttctagtttttcagatgagacatccagtgcttttactccttgctagaaatttctcctttccactggcattgggtagaggtttatctttggagacgttttttttttttttttttttctttttaaccaggatatttatgctgtagtgcatgtctattttagtcaatactgaaattcagtgatgcctttcaatctgaaggctcaaaaatttcttaaactcaaatttttgtttactagttttctaattatttctttcttctgtttgtatataaggtcttctgaatttgttatcagtattagtttccaaaggctgctgtaacctattaaccataaactggggacatacacaactcagatttattctataacygttgttgaggcttgaagtctgaaattagggtgtcagtagggctgtactctctctttagaacctggggaagaatcctccttgcctcttctggcttctggtggttgccagca

SEQ ID NO: 236571 - DNA, 454 bp, Homo sapiens
gaattcaattaacttttctatgcttcattttcctcctctgtaaaatggggataatcttacaatacagagttgttgaagattaaatgaaaacatatgcaaagcccttagcacagaattttattgagcaatagtagtctattaagaaaagtccttgccaaacatagaactctagagagtcagagttggcacagcagctaaaacttactttgtgctgacatgtgtattaggagccagtaaaacattgaaggaactagtatataaaacagtgattaagtttagttttggagttagtgctgagcttgaaaccccacttactatgcttacaagctttgtaacttcgggcaagttatttaacttctctaagctgttcatctgtaaaatgatrcaactaataattcctacttcacagggttgttgtgaggattaaatgaaatgatccatgtaatgcacttag

SEQ ID NO: 236572 - DNA, 588 bp, Homo sapiens
atgaccaattttggctttgtagcagtagtatttttgtactgaaggcctcattgcccacaggcctcctttttattctgtaggcactggaatcwgtccagttgctcctgagaatctattactatggaagcagaaggaagacgtgacagcatcatcttattgggcttggtataaaaggagcaggaagagcactggctgtaaaaagatgtactacaacctttaacactatgcgtttatcttgcacactagggagtattttgaaatcctcatactgctcagctatcctagagagattgtagggaagggttgtcatccattcctgagttgcatggatctaaatagatccaactgtatttctccggagagagcagtatgatctccacagctgatatgatggtggctgcagaagtccaaaggtgagatccaagagggaaaggtagaacttaaggagaacctagttgtaatcactgatcctgtttggacatttttttccataggtaagctctggaggttctgggcctagtttaggaaacagttttcagatatagctatctttagcagtagaaatcacctcactttgggggctgttga

SEQ ID NO: 236573 - DNA, 588 bp, Homo sapiens
atgaccaattttggctttgtagcagtagtatttttgtactgaaggcctcattgcccacaggcctcctttttattctgtaggcactggaatcagtccagttgctcctgagaatctattaytatggaagcagaaggaagacgtgacagcatcatcttattgggcttggtataaaaggagcaggaagagcactggctgtaaaaagatgtactacaacctttaacactatgcgtttatcttgcacactagggagtattttgaaatcctcatactgctcagctatcctagagagattgtagggaagggttgtcatccattcctgagttgcatggatctaaatagatccaactgtatttctccggagagagcagtatgatctccacagctgatatgatggtggctgcagaagtccaaaggtgagatccaagagggaaaggtagaacttaaggagaacctagttgtaatcactgatcctgtttggacatttttttccataggtaagctctggaggttctgggcctagtttaggaaacagttttcagatatagctatctttagcagtagaaatcacctcactttgggggctgttga

SEQ ID NO: 236574 - DNA, 588 bp, Homo sapiens
atgaccaattttggctttgtagcagtagtatttttgtactgaaggcctcattgcccacaggcctcctttttattctgtaggcactggaatcagtccagttgctcctgagaatctattactatggaagcagaaggaagacgtgacagcatcatcttattgggcttggtataaaaggagcaggaagagcactggctgtaaaaagatgtactrcaacctttaacactatgcgtttatcttgcacactagggagtattttgaaatcctcatactgctcagctatcctagagagattgtagggaagggttgtcatccattcctgagttgcatggatctaaatagatccaactgtatttctccggagagagcagtatgatctccacagctgatatgatggtggctgcagaagtccaaaggtgagatccaagagggaaaggtagaacttaaggagaacctagttgtaatcactgatcctgtttggacatttttttccataggtaagctctggaggttctgggcctagtttaggaaacagttttcagatatagctatctttagcagtagaaatcacctcactttgggggctgttga

SEQ ID NO: 236575 - DNA, 478 bp, Homo sapiens
tccactgtctttttatgctgtagtcacttaatatctcttagatcatttcctctcatttttaggacatttacctcttggtcactgtcattctctccagaaatttccatcttagttcttgtagctttcaatatctacatagaaaatttttccaacattcttggcctctcacttcttcccrttagtgaacttgacccccagctcatcaaccccacagtcttctcctagaagttctttatgaacactaactacaagcccctcataaactgttttgagtaggccactttctggccactgccttctgtctttccaagctctttcctcttctgattccaattgtgtgactctatgaagacctacaatttacagttttggtcatattttaattacctctcacccatttcctgttctcacttttctctttatctagccaaatcattataatcactccattgtaaacagctttgtcctccttattcct

SEQ ID NO: 236576 - DNA, 360 bp, Homo sapiens
tctaactatcctttgctcttcactctaaacacccattaccgtttatatttacggtttttctcttgtttatcgtctgcctcctcctggagagtaaggamcatgtgtgttgtactctccagggaatatccagcatctagtatcatatccaacttgtgatagtggtttcataagtattttctggacaaatatactgaacaagttgcccttggagggaggaagttgcctgtgatggaaggtatttaatatggactggacatgcagttgtcaagatgctgtataatattcaaggatcagatagattgttactgaaatgacatttaaagttgctttctgtcattccattctattattccaacaaat

SEQ ID NO: 236577 - DNA, 585 bp, Homo sapiens
gaatttttcaaactaggaattgtaaggccatattctttaaccatatgtattactatttgaatttcccatacatacaaatgggaaattttaaaaaggcattgtcagtaagtattgagccagaaaatatatcaagcgattatttgtaaagtaaataagttaaagttataagtaaagactacttataacaagaatatttgcagagaacttttaaaatgagatataaagttaaaatagttaaaaagtatattattggcctgaagataatcagaaggtcagtggattcaaataaagactaggtatagatcatataatatgtaaatgttaaatgttgtatgtgacagaaaaggaaacataataggcagatctgatgaaaggacaaatcaatagcttttcaaattagtgggattattaaacaaatatttcaatagctgataaaatttttggaactaatatgaagttagttctcttcatttcagattctatatcagaataaattcaatatagyggagttaaatttaaaaaatgaaggtataggaaaatagaaggaaataatgttgaatatgtttctggtcttagggttggaaa

SEQ ID NO: 236578 - DNA, 592 bp, Homo sapiens
gagttgggaggggcattgtttgtttgtctatctgcttttgtttccaacttttattttaggttagcaggggtacatgtgcggtttgttacataggtaacttgtgtgtcatgggagtttagtgacagattatttcgtcacccaggtaatgagcatagtgactaatggatatttttttggatgtcaagtaggccctgatgtctattgttcccttctttgtgtccatgtgtactcaattgtttaactcccacttataagtgagaacatgcggtatttggttttctgtttttgcattagtttgcttaggataatggcctccagttccatcaatgttgttgtaaaggacatgattttgttatttttcatggctgcatagtatgtcatggtgcatatgtactacattttatttttctagtccactgttcttgggcatctaggttgattccatayctttgctattgtaaatagcactgtaataaacatatgtgtgcatatctttgtcataggacaatttatattcctttgggtatatacctagtaatggaattgctgggtcaaatgatagttctaagttatttgagaatttaccaaactg

SEQ ID NO: 236579 - DNA, 541 bp, Homo sapiens
agactatttgcttatgcatttcatttgattcttgctgttgaagagaggaagtctgttatttttcaatctgcactttggaaagattattcttagtggttatgctctttgttttcagacayttgcattgattgaggctaacactgaactcaaaattatagtgtatacattgtcctattgttgaaaaataatctactattgaagcaaccctttgctcatattttgtatagcagtttggtttgcctgtcactatcaatcagtgtttctgtatctgcaacaattcagccaatgtcattttgagtcagagggaaatagtattatctacagacattattgcaatatgtttcagaaattatacaactattttaggtaatttgaagcattcttcacctgtatagccacttaattgttttttaatagagaagttagctttggctatgaattggatccttctaagatgcttatttatgaggaagacaagttccctttttaaggatttggaggtaccaataaactttgtcttaactttgagttgtccccaact

SEQ ID NO: 236580 - DNA, 525 bp, Homo sapiens
aattagttaccactagaccagccttacaagagatcctaaaaggagttctaaagatgaaaatgaaagatcaatacctgctaccacatacaacaacatacttaagtacatagcacacagacccaataaagcaatcacactattgaaactacaaagaaatcagttaacaacttcatgatagaattaaaatctcaaatatcaatattaatcttgaaggtaaatggtctaaacaccccacttaaaaggcacagggttgcaagttagataaaaaataaataaataaataacacccatccatctgccaccttcaagaaacccatctcacacataacaacacccatrggttcaaagtaaaaggttagagaaagatccttcatgcaaataaaaaaacagaaaagaacagaggtcactatttttatatcaaataaaacaaactttaagccaacaacactaaaaaaggacaaagaagatattacacaatgataaagacttcaatgaaacaagaagacttaaccatcccaaatatat

SEQ ID NO: 236581 - DNA, 582 bp, Homo sapiens
ttgcagtgccttgttgtcttgaggtaagaaatatggttggctcagcagcatttgttaatttatgtaagaaggaaaatgaatcacatataaacatatggaaatatccaaatgccaatttttttttaggttagttctttgcgtcctcattttccttttagcctggggtttacattatcaacttttaacattaaacagactccttgctcttagttttcaaatgcgtgtatgtatgtgtgtgtrtgtgtatgtgtgtgtgtgtgtgtgtgtgtgtgtgtgtatgtatatatatttcagactaagtaaaattagtgttttctttggacagaaaactgacaaagaatgggaaatccttactttagaatattgcagttaagggtcatgaacatttaagcaggagttactgccatccagaggcagaaagccatgaactgccatatcctattacagttttactataaaggaagtaagccaagaaaaatgtgtaggttgttgcagttttgctcattaaatcatcaaagaatggaaaactaatacctagattcaagtgtcactgggtttgtgctcctactgtcatcatgaatg

SEQ ID NO: 236582 - DNA, 582 bp, Homo sapiens
ttgcagtgccttgttgtcttgaggtaagaaatatggttggctcagcagcatttgttaatttatgtaagaaggaaaatgaatcacatataaacatatggaaatatccaaatgccaatttttttttaggttagttctttgcgtcctcattttccttttagcctggggtttacattatcaacttttaacattaaacagactccttgctcttagttttcaaatgcgtgtatgtatgtgtgtgtatgtgtrtgtgtgtgtgtgtgtgtgtgtgtgtgtgtgtatgtatatatatttcagactaagtaaaattagtgttttctttggacagaaaactgacaaagaatgggaaatccttactttagaatattgcagttaagggtcatgaacatttaagcaggagttactgccatccagaggcagaaagccatgaactgccatatcctattacagttttactataaaggaagtaagccaagaaaaatgtgtaggttgttgcagttttgctcattaaatcatcaaagaatggaaaactaatacctagattcaagtgtcactgggtttgtgctcctactgtcatcatgaatg

SEQ ID NO: 236583 - DNA, 495 bp, Homo sapiens
gaattctgttaagagttcagcaaagtcttatgcagattagcatagtttcatcaagaagtcagcactccaaatctgtttttctaatttaaaaaaattaaagatctccttacaacattgatgtttttctgaatgtcgctgtttactacatgctataagttagctcgtattttgtacatatatcaaaaaagaataagccaattcaaaatgtgtgaagtcatttcatattcacrtgctattctaacagatagctttcattctttagtagaagcctttcagaactcaaaataacctctcttttttctgtttgaagaatttttttttgttaaacacatggttaatagccaaagagctcaatatttaattccccatgctgctaatgtaataaagatgaacctaagcaacttatttgactaacaaggtatatagaaaatatgtagtcctttgttaaggtaactcatcagatggaagacttcacggatttacttaatagcatta

SEQ ID NO: 236584 - DNA, 495 bp, Homo sapiens
gaattctgttaagagttcagcaaagtcttatgcagattagcatagtttcatcaagaagtcagcactccaaatctgtttttctaatttaaaaaaattaaagatctccttacaacattgatgtttttctgaatgtcgctgtttactacatgctataagttagctcgtattttgtacatatatcaaaaaagaataagccaattcaaaatgtgtgaagtcatttcatattcacgtgctattctaacagatagctttcattctttagtagaagcctttcagaactcaaaataacctctcttttttctgtttgaagaatttttttttgttaaacacatkgttaatagccaaagagctcaatatttaattccccatgctgctaatgtaataaagatgaacctaagcaacttatttgactaacaaggtatatagaaaatatgtagtcctttgttaaggtaactcatcagatggaagacttcacggatttacttaatagcatta

SEQ ID NO: 236585 - DNA, 586 bp, Homo sapiens
tctctggggtactttgttattatggtaaatcataagaaaagataaatagaaacatatttccctttcaggaggaaactgctatgtctattctgaattgttcctaggctaagtttcagatagtggttgatttccactctctctttcctcttcctctttcctggctattttggtatgtcagaagatgttattctaaaaaggggtagaagaaaaacaagctattttgttacttgatagttgttcttacacacacacacacacacacacacacaygcacaaaaatcctttggagacaggaaaattgaacatactggagaaaatacggttgatggatttgtaacagatttaatgttccctatcacctcagatgtattccatatttatgttgatgtgaactgaaatattatttttacatacttgattatactcaaggatacacgatgactgaataagttctttattggtactctttttgtctgtttttcctgaacatccattatgtagtagttgtgaattatatacagatagatagatgatagatacatagatagataaataaataaatagtgtaaaccaaaaacaaaattct

SEQ ID NO: 236586 - DNA, 598 bp, Homo sapiens
acagtgatagggaggtgtaaggatccttgtgcactgcttgggaagaggtaaaatggtttgacatttttagagaggatttggagcacttaatcaaaatacacgttcacattcctcaagatccattggctctgtgtgtgtgtgtgtgtgtgtgtgtgtgtgtgtgtatgtacataaactctcacataggtcccgaaaaaggcctgtatgaggatgtttawctccaaggcaacttgagtatccattattggtagagttaataggaaaaagatagtggatgcccacattgatttaagcaacagattagatgtacacgtagtaacataaatggatcttatacatctagttgggaaaaaataagaaacagaataaaataaatattgcaataccttatgcataactctaagataaagtgacacaaaaccacaatacatatttagaaacaaaaattgcaaatagaaagattcacattaaaacactctagaacaagggaccccaacccccaggccatggaccagtactgttaggaaccaagccacacagaaggaggtagtggcaggtgagcaagtgaagcttcatttgtatttacagccacccccca

SEQ ID NO: 236587 - DNA, 555 bp, Homo sapiens
tctagtatatgatagcacaacagagtgactatattcaacaacaatttaattgtgcattttaaaataactaaacaaatataattggattgtttgcaaaacaaacgacaaatgcttggagtgattaatatattatttgctctaatgtaattattatacattgtatgccatatcaaaatatcccaaactcccccataaatatatacacctactatgtacccacaaatatatgtagagaaaaaacatacaaaggagatttaatgtatataaagtggctattcctaaggaagaaaacaaaaatcctgagacagaaaagatatttgaagaaagtttagaacattgaataattaacagatatatattcgaataaatttattagactacaaagagaacaaaakgagtaaaaaaaggaagaaggagaaagagaaagagaggaagagatggaaggaggaaccctctacttttcatcactctgctataattgcttcttactgacggtaactgcttcaaaatctctcaaagaaactttcacgtggttaaaataatgttaataatgag

SEQ ID NO: 236588 - DNA, 609 bp, Homo sapiens
ctggttagcaggttattgcaatagtctggatgacagatgatggtggcttaggccacggttggagaagtggaaggattctgaatatatttagaagacagacccaacagaatttcctaatggaatgatatggtttgttagacaaaaatctgcattagggaatgttttttagatttgagagttgaccagctcagtaaatggtactgccatttcctgagaagaggaatacagaggaaagagctagtgtgaggcaggaagggaacagaggaatcaagagctgtgctctgaacaagtctactttgagatgtctgtttgacacatgcaggtagagatgtggagtagggygataaaacaagagtcagcagtggaggggagaatgtgaggctggacatacgaacttggaagtcagcagcctataaatatttgtttaaatcacagaaatgggtgagattacatagttagtatagacagaggcagaggactgagctctgggcactccaatgtttagtcaaaataagtaaaaaagaggttgaagaaaaagaggtgatcctctatcacgaatgtcctttgctgtgatatactcctctacctcttatgttgagggcagaaagg

SEQ ID NO: 236589 - DNA, 595 bp, Homo sapiens
aacctgcaaaatctacacttttgggcattcagtatccacaygcattttccaaactttattgaagcctccatacagaaaggacaacttcatgcatcttcctaacaagatgcacacgttcttcataaaaacaaaagctttctcatctcaaaaagagaagacacgaagttccatgagtgaccatacctatctctggacaatgttattcttcttctaattcactcatacccttgcctgaatattctgtaacacaaagactaagtttgccactgaaaacaactactacataagataataagggaaagattaataaaagggaaatttagttaatatatatgaagtatcatgaagaaaatatgcttagttgctacaggcttcaattccgcatctggtcccgacagcataggtgatattcataccttcttcgttcttcccccatcccgtgtcccctttgccctcagctagtcaggattctgtatctgttagagtgacatacaacttcatctgggaaggacttatctgcagctctgcttttgttgtgttgatcaagttttctgtcaaattttactaccaaaaaaaagtgaaacagttaagaggc

SEQ ID NO: 236590 - DNA, 630 bp, Homo sapiens
aagagaatcccaaagaatagaaagaaaaaagactcctggaaaaaataagcaattatatgggggcttcagaatttaaggttaataaaccaaagttaaattctttcttatatggcagcattaaacaattgaaatttgaaactaaaatcacaatattatttatgttagcacaaaaaaactacttaggtcgaaatgtaacaatatatgtatatcatttatataaagaaaactgcaaagctctgctgaaagaaatcaaacaaattctaaacaaatgaagagatatttcatgttcattggcaagaagactcaatactgttaagatgttgattttttccaacttaatctgtaggttcagtaaaatcctattcaagatcccactggtggaaattgataaaataattataaaatttatatagaaaggcagatacccagaggggccaaaataatgctgaagtaaagtaaactgaagtgttaacactacctgacttcaagacttactataaagctaaagtaaccaagacaccatggtattggcaagagaagaaataaatttatcaatggaacagaatagagagcctagaaatagaygccattagctgattttgggcataaaagcaaaagagttttgattga

SEQ ID NO: 236591 - DNA, 415 bp, Homo sapiens
caaattctgccttagagttccataaaggaatgtatctttactgatttatcccagtgagactcgttttgggcatctgacctagagaattgtaaggtataaatgtgtggtatttttaagccacyaaattggtagtattttgttatagcagtaatagaaaaaagtaatataccaaaaaaatgtaagaaagtagtcagctttaaagaaaaaattatttggttatccaagcaagaaagaaaatgagattgcaatcagagttttcaatgacattgctattgaatgtgagcaatgagagaatgtgatggagtaacattttcaagacaccaaaagaaaaaagtgtgaactgaagatttaatgtccagttgttgacaaattttaacaatatgcaagttcatgtggaatacccttaaatatttcc

SEQ ID NO: 236592 - DNA, 584 bp, Homo sapiens
caaggtgtgaagtatgaacttcaactggctttccccaaagaactctgctgattacgtgtttgaagctacagaagatctgtctaaaacatctctgttgaagccttttactagctcttgtgctaataagtgaagtcagtctgtggcttttctataatgtggagtcagagtgctgacaagcagcttatcagcgctaatgataactactgtgtttcagcagccgggatcagaagatgtatttcacatttgcattttttttttcagaattgaacacttaagaaatcagtagaatgttgccaggagccttgcttscaagctgctgcctttaagaatttttgcaagccctgaaagagtaaccagaatacattcaatttcttatgaattttttagttcatgataaggacagaattttaaggtgcccccactcctgggggactgttaaacacttctattattctaatcatcttctgtatatctgaaatatctcaagacggttcctccttttttgaagcacttcaaaaggtacagcttttagggagctgatctaaagctacacttgatgttgacaagggggatgctgagttaca

SEQ ID NO: 236593 - DNA, 532 bp, Homo sapiens
aatttaagaacatttttcagttttttttttagtttatgtagaaagctgaggagaaaatgaaaacttttatctcttattccctcatttccttcacctcttctcttcttttctttctctctctctctctctctctcwcacacacacacacacacacacacacacgcatcttctcttactctctttcttgctttttccattcctttaacttacatagatagtaaattcctttgagcactaccaggcataaaataagactgtgtcccagactgagaccaatatacaaaatactctgctacactcaaaattatttatttaaaaaaacaacaataattacccttctattgtaatatatacaggcattggtgtctttgcctgtaactgatgtaatgagctcagctatgtggcagacttgaaaggacgagtgcttgtacaatcaactgctggattaactggctgatgtgtatttaaatagagggcatataaattgaaggcatgaaatacaatttttaaaatgtggtaaatttgtattttg

SEQ ID NO: 236594 - DNA, 583 bp, Homo sapiens
gggaccacatatttaaagtgctaaaagaaagtaaagaaaattattgtcaactcaaactctttattcagcaaaaacttccttcagatatgaaattacagtaaaatagacattctcagatgaagggaaactaagggatggagagaaagcaagyaacttggaaaacatatttgaagatatcattcataaaaatttccccaaccttgctagagaggccaacattcaaattcaggaaatgcagacaacccctgtgatataatataggagatgaccatcccccagacacatagtcatcagattccccaaggctgaaatgaaggaaaaaatgttaaaggcagatagagagaaggggcaggtaacctacaaagggaacccccttcatgctaaccacggacctttcagcagaaatcctataagtcacaggagattgagaacctatgttgagaattcttaagaaatttcattcaagaatttcaaatccagccaaactaagcttcataagggcaggagaaataagatcctttttagacaagcaagtgctaagggaattttctaccactatacctgccttgcaagatgtccttaa

SEQ ID NO: 236595 - DNA, 512 bp, Homo sapiens
attagttctatccctgtagagaaccctgactaacacaggcacctatggaaaacctacagctaatattataatagcaaaaaactgaatgctttctttctaagatcaggaacatgacagggatgtccagtattaccactttwaggtaatattgtactggaggttctagtgagtacaatcaggcgagaaaaagaaaacaaaaggcatccagactgaaaataaagaagcaaaactattttgttcacaaaggatatgatcatttatatagaaaatctgatggaatctataaacgtaagaaataatgagcttagcaatgtaataagacacaaagtcaatatacaaaaatcaatggtattcctacaaactatcaaaattattaaaaattttaactaaaatttaatttcagttaaagattaaaattaaaaacagagtttacaatagcatcaataaatataaagtacctgagtataaacctaacaaaacatatgaatcacctgtacctttgaaactataaa

SEQ ID NO: 236596 - DNA, 588 bp, Homo sapiens
ctttaaaattgccatgattttgtattattctctcattattagtaattaccctggaagaaaatgtgatgttaatgcccagtaaaatgtagtctctctcactctctctctctcccctcttcagacattctctttgtatttacttttcacactttattttataaattgcaaattaaatacctttcttaagggcttctcttattatataaacctaaattgggcttaacaaattgasaaacatatatgaagtatttcatttggatacaaaccttaaataaaaatgtagctgaatgatatgtgacctattgaaaactaaataaagtaagggctcctaatgactaaaagtatagaaagggaattatctgatctcaacatgacacagaaagaaatctattttttgatagaaaaaattaataacatattaacatctggacttcatgtggatacagtgttgtttaacaattagcagcagtgccttttcagctgcattcctacatctgggaacaaaacatcataggaactaaaaataaagacaaggagaaaataaaaaattgcctgctgtaaaatagcacagttactctacattataaa

SEQ ID NO: 236597 - DNA, 588 bp, Homo sapiens
ctttaaaattgccatgattttgtattattctctcattattagtaattaccctggaagaaaatgtgatgttaatgcccagtaaaatgtagtctctctcactctctctctctcccctcttcagacattctctttgtatttacttttcacactttattttataaattgcaaattaaatacctttcttaagggcttctcttattatataaacctaaattgggcttaacaaattgagaaacatatatgaagtatttcatttggatacaaaccttaaataaaaatgtagctgaatgatatgtgacctattgaaaactaaataaagtaagggctcctaatgactaaaagtatagaaagggaattatctgatctcaacatgacacagaaagaaatctatttkttgatagaaaaaattaataacatattaacatctggacttcatgtggatacagtgttgtttaacaattagcagcagtgccttttcagctgcattcctacatctgggaacaaaacatcataggaactaaaaataaagacaaggagaaaataaaaaattgcctgctgtaaaatagcacagttactctacattataaa

SEQ ID NO: 236598 - DNA, 566 bp, Homo sapiens
gaatgcttttttttcccatttgaatctgatcatatcattcacttgtttaatacccttcaatgattcctttggacctttagtataaaattcatgctccttagaaagacccttcataaactggctcctactttccattctaaagttgacttgagcaggacttaccctttcctgaattagccatgctctcatgtcagtgctttcacattgcgacttctaccgagaacacttttcccatctcttyccctgtccccccaagtttttttttttttttttttttttttagatggagtcttgctctgtcacccaggctggagtgcagtggcaggatctcagcttgctgcaacctccgcctcctgggttcaagtgattctcctgcctcagcctcccaagtagctgggactacaggcatgcgccaccatgcccggctaatttttttatttttagcagagacagggtttcaccatgttggccaggatggtctccatctgttgaccttgtgatccgcccaccttagcctcccaacgtgctgggattacagatgtgagccaccatgcccggtccccctg

SEQ ID NO: 236599 - DNA, 558 bp, Homo sapiens
acatttatatatgttatcttcctcggttctcacaacagtcttatgcccaatattcttatgaatagctctttctaatagaaataaaataaaraactagccagtcttgggacacatttgatattcatactcagtgcctgtgcctccagagatcttgcattttacacaataccttgctagatatggaaatacagccagacctaaaagctcatgtggatgagctttgatcttactgccaaaccgaggtagataatcacttggaataatttcttatttattttgtatcatccaaaaaagagtattcttgctatatagttttctgattattaaggcacatacatgtaaaagttccaaacttattttaatattatcttgatttaaatctaaaatatattttccactttcatgccttcttgaaaacataactctaatcatgattgtatttttattttgatgacccagctcataatttcctgttataacagataacacatttactgtgttgctaatttaattggttatctttccattagattataaagtacatgaaagtaggcagca

SEQ ID NO: 236600 - DNA, 586 bp, Homo sapiens
tttggaggtagggcctttaaagaggtgattaagtaaaaatgaagctgttagggtgggctgtaatccaatctgactggtgtccttacaagaagaggaaatttagacctatagagacaccagggatgcacacacacagaggaaagccatgtgaggacacatcaagtatccacctagcatcagaagagctactgctataatgtttttcagcattctcagccctagccacgtgtgaaacctcaggtcagatgaacagccacgtgacatcacttcaatggtctcctcattgaaaatatgatgctttgtaagagatccaagtgcagccaccttcttagagccttaaattatgtygcagtccaagaatcagctgtatggaatcccctctgaaatccttcctccagctgcttggcatttccgtggagaccctagaaccatctgtgtggtgacactagctactagattctgatagtaataccccttcctctatgttcccttagccttaaggtggtagctgctttctacagttactaatgtctggattacctccctgtagtggattgaattgtgtcctcctcaaaaatatgttcaa

SEQ ID NO: 236601 - DNA, 552 bp, Homo sapiens
acttgttttagaagaacaagctggagctgtctggaaagcaaaagaagacaagtagtgagatccatgtccctgaaggtrtccaagaatatgcaggctgaaggaaaccctgcttagggctggttctatgagaatgttgagaaatagttttgctggttgtaatcttccagagattggtctattgatcagtattttggaatccgggtgagtcagaaccaggctaggtgtcgcccttgtgtagctgttgaagatagtgtgggagagtggggtgtgtgttttaagcaagtgcttggttcaaagtgccaatttctcttcaccagctaagtctcgatcagcctttgtcagagctcaatctgcctgtgaatttgcctggaatccattcccagcagcaccatctgtttgcaattgtcctaccatctgaccatttaccctttgtcaacttcctcctccgggcactcccactgccagttggaatccgcccatggattccacccattgtccatcctggataaactgagtctggagaaagacagcacaggagagaagggaagaggt

SEQ ID NO: 236602 - DNA, 552 bp, Homo sapiens
acttgttttagaagaacaagctggagctgtctggaaagcaaaagaagacaagtagtgagatccatgtccctgaaggtatccaagaatatgcaggctgaaggaaaccctgcttagggctggttctatgagaatgttgagaaatagttttgctggttgtaatcttccagagattggtctattgatcagtattttggaatcygggtgagtcagaaccaggctaggtgtcgcccttgtgtagctgttgaagatagtgtgggagagtggggtgtgtgttttaagcaagtgcttggttcaaagtgccaatttctcttcaccagctaagtctcgatcagcctttgtcagagctcaatctgcctgtgaatttgcctggaatccattcccagcagcaccatctgtttgcaattgtcctaccatctgaccatttaccctttgtcaacttcctcctccgggcactcccactgccagttggaatccgcccatggattccacccattgtccatcctggataaactgagtctggagaaagacagcacaggagagaagggaagaggt

SEQ ID NO: 236603 - DNA, 552 bp, Homo sapiens
acttgttttagaagaacaagctggagctgtctggaaagcaaaagaagacaagtagtgagatccatgtccctgaaggtatccaagaatatgcaggctgaaggaaaccctgcttagggctggttctatgagaatgttgagaaatagttttgctggttgtaatcttccagagattggtctattgatcagtattttggaatccgggtgagtcagaaccaggctaggtgtcgcccttgtgtagctgttgaagatagtgtgggagagtggggtgtgtgttttaagcaagtgcttggttcaaagtgccaatttctcttcaccagctaagtctcgatcagcctttgtcagagcycaatctgcctgtgaatttgcctggaatccattcccagcagcaccatctgtttgcaattgtcctaccatctgaccatttaccctttgtcaacttcctcctccgggcactcccactgccagttggaatccgcccatggattccacccattgtccatcctggataaactgagtctggagaaagacagcacaggagagaagggaagaggt

SEQ ID NO: 236604 - DNA, 552 bp, Homo sapiens
tgttgttgatgtgagaatttagtgatgtagtatatgtaaagtccgggctcatgcagaggaatttctttcaggctctcattgcattctccctccttgaactctaaaacactttctatttagctttcacttcactgggamaattccaaatgcaacattcacccagacatttatcttaaccactgtttttttttctttagaaaacatgactagttattcataatcattccttatcccttctcctcaaggctattttgttgacaacccccattagagaataagcacagtaggttcccagaagcactgatgtgatgatggatggcctgtcctcatcctggatggagaacatgctggcctacatatttctttgcacataataaagaatagtgattcatccatgggcaaagcagatatcatctgctcagcatctagaatggggctatggtggtctgctaagtactgtgggttaataaaccaccaaagtgacctcagttaatcctctttcctcattaaagacagttgtagattttcccagatctggctgacacattcctt

SEQ ID NO: 236605 - DNA, 413 bp, Homo sapiens
tccagacagttgttattatgctaaaagaaacttcagctgatgcaggcaaagacactttagattgattcccaaacggtattgttatttgcatcaacataggcagcagcagctccagcatctgttcccctgtctcctaacctctagctgtactgtgctttacaggtgaatatatcacccactggcacatgcagccagaggtggacagcacactcagctcccctccagggctcactctctagagggtgagacacacagccacattctatgatatagaaagtgttaagggagcagagaagcggggacagctcccttctcactcctccctcctagccttcacgttgcttccagatcagtcttcccaaggcccaactcygacaagccccctcctctactcaaatgtctgaaagatctca

SEQ ID NO: 236606 - DNA, 448 bp, Homo sapiens
ccttctctttcatgctattcataatttccaacattgtgccctgcagatctacttggctttaacacctggtttttgagggtgtataatgtactagaacatatataatctgatttagttctcacaacagccatataaaattttcaatactcacaaatacctattacaaatgctaataatgtaaacaccatatccctttctaaacgttacatgtactcttgtgtgggctgcatttttacatagatatttggaggaaaaccaagagatgtggttcagttaaataggcagttaatttaaactcccttgttcttacagtgtgtgttgtgttttgtttacatatgaagaaygggacatcacaaaggctggcagatccaagtgagcactgcatgaagggagagggcaggtaaactggagatggaggaattggccctagcgctgcactaccagcaat

SEQ ID NO: 236607 - DNA, 586 bp, Homo sapiens
gtctgtctggccccatgaatcttttggtgagataaatgcaagggaaaggcaagagacctcgagtgaggaaagccaaaagcacagcatctaatgtggcttcagcggtgagagcaactcaggatcctacaaaggctaaatctacaagctttawttccagtcttgtaaatgacccttttgaagctttatatgatcttctattttgttttgcaacaaaaccaccattgccctttaattacagtatttctgttgggtaaagtccattctctgtttcacatggaaattagctatactctctagagacagtactctcaatagccaggttccatggagcaggacgtgatgaatcagtttgagatgttctggcagggtgataatgcctgtaggtgctctattgattttactctcatcctgcttcttcttctcctccctgagtgtttaataaaggaaactttgctttgcttcggtcaagaaccagatcccctccttgctctttctggacaattatgccttcttagctccttagttctcaatgcacctcaggaacccagaccaggattaaaaggccattttagcattggtttctgga

SEQ ID NO: 236608 - DNA, 531 bp, Homo sapiens
gcttctaatttactcctgaactaagtgataagctcctcaaagatgctgtattctcttccactgaaggatgtttacacatgaggttccctgtgctaggagcaatgctcttctacaaatcccatccaaacttccctttaccagctaactgctatccatctaccaactctcagccccagatgtcctcagcccaggctaggtggtatcctccatgtgtgctttcaaggagtaaggctcttttccaccataacacttgcctcattttgtgtttatgcctttgtttgtgagattctgtcattaatccagtgtttcccactaagccataacaacagactggtttacctactcctgattccctggcacagtgcctgatacataggacacactcaaaaatatttgtttaataagtgaatgaaaccaaattgccaaaagaggagtctcttttcaaaagaggccctgagtagtaataagaaaaggcatgaactatataaatcaggtayaaatggaagtgtgcagtgaggccctgaggacaga

SEQ ID NO: 236609 - DNA, 480 bp, Homo sapiens
aggaagccatacttcagctttttaaaaaataagaataaaattagaatgtcttccaaatgatcttttatagcccagcttatgctcaaacaacattttagagaagcttctgttggtcattcaatattgaattctgtttttcttctatttctctaccactcaattagcacmttactttaaatatcccattctaatgtcctgtgacatgtcagctgatacagtttggctgtgtctcacccaaatctcattttgaattctcagatgttgtgagagggatccagtgggaggtaattgaacctttgggcaggtctttcctgtgttgttctcatactagtgaataagtcacatgagagctgatggttttaaaaatgagagtttccctgcacaagctctctttctgcctgctgccatccacataagatgtggcttgctcctccttgccttccaccatgattgtgaggcttcctcagccatggaactgtg

SEQ ID NO: 236610 - DNA, 480 bp, Homo sapiens
aggaagccatacttcagctttttaaaaaataagaataaaattagaatgtcttccaaatgatcttttatagcccagcttatgctcaaacaacattttagagaagcttctgttggtcattcaatattgaattctgtttttcttctatttctctaccactcaattagcaccttactttaaatatcccattcwaatgtcctgtgacatgtcagctgatacagtttggctgtgtctcacccaaatctcattttgaattctcagatgttgtgagagggatccagtgggaggtaattgaacctttgggcaggtctttcctgtgttgttctcatactagtgaataagtcacatgagagctgatggttttaaaaatgagagtttccctgcacaagctctctttctgcctgctgccatccacataagatgtggcttgctcctccttgccttccaccatgattgtgaggcttcctcagccatggaactgtg

SEQ ID NO: 236611 - DNA, 533 bp, Homo sapiens
cataatcctctctagtctgtatttatgggcaccttcaattcagccataactcagccattgtgactgaactgtttyatcaggcaaccaatcagggcaatgaagaaacaaacaatatatctgacttatttaactgaacaacttaagcacaatggttaaactgctcaagagtggaaaaaaaaaacagtcttagccaagcttaatattacctcattccttcagtgttatatttaacacactgaatccctgtttgtaaatggctctatcccctcataaaaattgcattttggctattagagtttttaataaaatttattttgatgacaaacatttattagactcttctggcttccttcatatctctgtactcttacataataccctatagtttactttttttaatttttattaagttactgaatgcattgtcactgctattatttaagcatcacatacattaaatgtctacagaattctccactttcctatgagaccataaatgtgtcttgaactattaatctgaatcactattcaaa

SEQ ID NO: 236612 - DNA, 594 bp, Homo sapiens
actttagtaaagaatttacaactcagaagcaccacaaaatacagttcttagactttcttctagatcatacctacaataagaatctttgatcttctgcaggcgtgacacttgtttattattttattttacatgactccagcactccttctctctacaaatactacatgaacaaccctgctattcagcataagtgaattaaaatgaaattttcccatttgttctttttagggatttttgcaaatgctctggaaatttgcaagaccagtgatttgttgacatcagatctatagccggtagcattgtcagctgacagctttccaaagaagataggaagtaatcagtgcaacctttgtggaaatttgtttaataaaaacccagagcaacattgaatctatattcaacaagaaagatctaagtcttaatattcatattgagaaactggtttggaatgttgataagataarttgaatataaattattaccaaacataaacctctttgggggattttgcttattttcattatcaaataatggcaatcagtttagttttgctggtcagtgactaaccctaaacctcttaacctagctgggaat

SEQ ID NO: 236613 - DNA, 571 bp, Homo sapiens
actcagatggcctggagaagttctctctccatcctggcccttcatccatatatatgtcttcatgcttgattgctttaacccaaacatgaaactcaacacttttgtaagttccttcagaaaaattcattctcacaaaagcattagtgctcacaaatgcttaaacagatctgggatttagtccccacaaactcaaaaacaacaacaacaacagattctgcatatttctgtctttataaatgttcttgttcaccgggaaatcaaggatttccatctctctagctggtcccccagctagctccaagcctacttggttcttctcttattaatcagagaaaatgtttctcaayatagtccatgaccaaacagttgtgcacatcacggtggccaatagaacagagatcacatagtcaatagcatccactctccttttaaagtctcagtcagttttaattaaaccacttctgtttaatcgaaccacattattaagcagtgctatctgaacctggttaccatcctgagatccagaattggtgagactggataggcagaacccttgacaaaatgttgccta

SEQ ID NO: 236614 - DNA, 563 bp, Homo sapiens
cttgccaaatctccctttcacaacatacaaaaatattattttaaaagtagggataaaaaccaaatgcataaatattctatgcaatctaatttatggtagtgaataattaccgtgtgtcaaaatgttatatgtaatctttcaaaatgtttaaactatctctgagggtcacacagatgaggaattgaggctgagagtgtcataaaaagcaagtcagaggagatgttgagattcaaatctgttctgactctaagccctctgcctttagctcctagactacaactctagaaaaacagaattttgttaggataagtgggcatggatgtttttactcttaaccactcatattttaaatttccactactattatgatatattctctttttttgtaaattagaagaatatttttaaatgtccacaaaataatgtcactagataatctgagttaaaatttgtcccgaattktggcaaagaaaggaggatgggatgtaagtatatattgactctagaattcatgaatatcagaaaatcactacgtaagctctagcacaaaaaaactgaacggt

SEQ ID NO: 236615 - DNA, 417 bp, Homo sapiens
cctaaatacacacacatacaaaggaataaaagtaatactggaaaattttcataagattggcaaattttatcaacatcaatatttgtggtagacaatacacatggtacacttacaccaggacacaccacagccttgacctrtggttattgtcctggttactcctgtcctattaaaataaggatgaaaaactacattaacaatgatagcctttgttgagtacttactatgccctgagtacttgctaaagttttacttctgttacatgctacaagagtacttgacacatgcatgaactcagtaaattacaatattcctatttcattataataattttacaaataagaaaacaaacttagcattttaaataaaactggcacaaagtcccatagctaataaattgcagaggtgggattattc

SEQ ID NO: 236616 - DNA, 564 bp, Homo sapiens
ttgccactagttaaaggggagccccagtccctkttgctatcttcacatctcctatagtaactgtccgctctcacagactccctccagatgagagtgggttgtgtcacaacctccactgagcctgtcaaagtgagagctccaggagcaccagtgcccaggccccatcaggaggctctggccttcccctacaattctgggtttagaagaagcatcacaccccatgctagcaaatctagcttccctagcagctgccctgaaggggcaggacatgcaactcaaaagttcagaggaaaggagagccctacggagtgaaatggggccagtgagagacaggagactgaaggagccagtagactcattccttccacttcctttcctagaaagtgatgagagaatgggtgattctatcatcttgtgaaatgatgtgctattccctgtcccatatgactgagcaattggctccatttccttgtgaagttgtggccagctctggaatgcaccatattgcacttgttttcccttcttcccatctcatttttcttttctcctcagtctttctgctct

SEQ ID NO: 236617 - DNA, 648 bp, Homo sapiens
ggtatcctattactataggataatttttaaaaatttaaaaaacaaacacaactacatataggtgaacattgtgaacaacamtgcaggcctcctgtttaagagtacattagccctatctaactttctggaaattaccaagctctattctgccctagtattgtcctctcccagcttcacctaactcttgtcacccccttcaggtctctgccaaaatgtgaattcctcaaaaaagcattccctgactccccaggctggttcagatcctcctgttccacacttacaaaacaccctataatttttcattacactaatgtcataaatgtatgtaattataaaatgtctgcttcttccactgaactggaagccacaagagtgcaggaaccacaactgcctagttcaaaagatgtggagcatcttcacataacaagtgctcaacggtatttgttaaaggttgagtatctgtcactgcctacaaccccatacaatgaacataagctaatataataaaatactgtaaaggcataagttttttccaacactttaaaacactgtataaaaaaaagcatactaggtaaaaattgataatgcgaaaccatcgccaccacccgtttccagaacttttcatcctgcaaaacaatgtgaatgtgc

SEQ ID NO: 236618 - DNA, 612 bp, Homo sapiens
tgtagaataatatcttattgtagcagagggaagaatagattaaaaaaagtractcaactatatgctgtctataagaaactcactttagatgcagagacacaaataggttgaaagtgaaaggaaggaaaaagatatcccatgtaaatagtaaccaaaagagagctggggtggcatactaatgtcagacaagataaactttaagtccaaaactattctaagagacaaagaagggcattttatattgattaacaattacaaatgtatatgcaccaggaaacatggccctaaaatatttgagataaacattgacggaattgaagggagaaacagactaattctacaatagtagttggagactttaatagcacactataagtaatggatgcaacatctagagagatcagtaagggagggaatagaggacttgaacagcactatatactaattagaccttatggatatataatgaccattctacccaataacaatataaggcacatttttctcaagtaactattaaaagaggaaaggagtgatgattgagttaaaataattgttaaagaaaaagaaaatataataacaaacaggagcaatatctcataaagtgttgcc

SEQ ID NO: 236619 - DNA, 606 bp, Homo sapiens
acttttgtaatcacgtttcctatctaaccatgaacgcttctgcccctgcctttaactcttaggtgcacttgtgattacattaggtccatctgggtaatctaggaatcgtctcctcatttttaggccagctgttagcaaccttaattctacctgcaagcttaatgttccttttccaagaaaggtaacatattcacaagttcaaaaaattaggacatgagcatctttgggggtctgctgactacagtttatcctcagtcccccaaagatcaatgtcttttttacatgcaaaatatatttacctcaacccgtggttcctgaaattctccacctattactgcatcaamttggtgtaaaacaaggtcatcaagacaacagttccaaaactcattatctatatcgtctaagttaggtgtgagtgaggctttggggacttgtgaaatgaaacaactcacctgctcagaaaatacaatggtggaacaaacatagaataacatacatttctggtcaaaaagggagaaaatggaacaataaatgaagtcacctgtttaaagcaacttcaaaattttccctgacacactgtatttggttttaaggcctgggactgaa

SEQ ID NO: 236620 - DNA, 498 bp, Homo sapiens
gaattctctttgcataaatatcaaaacttacaagctttgctcttcaaatataatttttcttgagagcaggcttttgttartgggaatacaatgttctgcatttcccaatgactacttctaacctccccatgctagaggcatgaagagattgttttttcctaatcttctctctgagaacctggtggatttcaaggtaaaccttataaaagtgtgcctcttgccccattccccaagactcagtcttagtgattttgagatcatccacactgagcctccttcaatttgtcaatcataactcaacgtttctattagtacaggctctactgctgggcttctgctcttagtaaactgtgattctctatactgcttgtccctacaactttggggacagcagcttgctttgtgacctcaattctctgatggatctaagaagggttgttgattttcagattcagcttatttttttttttattatgagcgcagaagcaacaaattcca

SEQ ID NO: 236621 - DNA, 498 bp, Homo sapiens
gaattctctttgcataaatatcaaaacttacaagctttgctcttcaaatataatttttcttgagagcaggcttttgttaatgggaatacaatgttctgcatttcccaatgwctacttctaacctccccatgctagaggcatgaagagattgttttttcctaatcttctctctgagaacctggtggatttcaaggtaaaccttataaaagtgtgcctcttgccccattccccaagactcagtcttagtgattttgagatcatccacactgagcctccttcaatttgtcaatcataactcaacgtttctattagtacaggctctactgctgggcttctgctcttagtaaactgtgattctctatactgcttgtccctacaactttggggacagcagcttgctttgtgacctcaattctctgatggatctaagaagggttgttgattttcagattcagcttatttttttttttattatgagcgcagaagcaacaaattcca

SEQ ID NO: 236622 - DNA, 607 bp, Homo sapiens
ttttgccattctggtgtgggatattgatagtgggagaggccagtcttgtgtaggggcaggaggtacagaagaactctgttctttcttctcaattttgctgtgagcctaaaatttctctaaaaaatagtctatatttttttattgtaacgaatgtggagaaaacatttgcattgcaatgtcaaacacggctccataattcaaactacctactcaagccaaacaatgaatttcttagtgaagttgacttctgagttaaaataacatttaatttcttaattgtcacaatttggacatattactgctttttaaatgaaatggctattaatttttaattaaaagttaattataaattagaaaatgtatataaatgaaatgatattcaatgtgttacatttaaaattttctgggtagtgatttatgtgcattttggggggagaaagcaaatttttatcrgcttcctgaagaagactgagacctcaaaataggaaaagctataaactaaaatactcaaaaaatgtaagggagtaaaatgataacttttcatttattttgaaatatagcaggtttgagaattgagtgaggaagaaatcagaggatggttgtgaaa

SEQ ID NO: 236623 - DNA, 610 bp, Homo sapiens
ccagggtttgtttttgttgtcacttattatagttcttattgtttgcttatttaatgatttttctgagcaaattttgtaaagactgtgttcttggctgtgggtggatactgaaatctatatatactccattagcttgacagctaataattgggtaattatttacttaaacacagaaaaccaaaaatattttcagtctttgcaaaggggctcttggtggacgtgcttgttggagcacaccttcaatactcagccatgcagtttaaacctctaccattgcctttattttcttcttgtacacagctttaagttcagccagaggcttgagatattagggtcttccaaaggctttcctgaggatgtgcacaccactatgcatgaatatggtcttctaaatttccaagaatgtgtcagagtttttcagtgcccttacagatgtctcattcttcaactttttcttttaagctttttggttggtttattgttcgcctcaattgttatatatcactccaggcaggcagaagtatgttaaaaacttkcctgtaaatgtttacaaaatgatactttctttccccctctacccccaagagtggcttttagcattatatgaatt

SEQ ID NO: 236624 - DNA, 557 bp, Homo sapiens
aggggtgggactaatgtaaattaaaaagccacaaagctcactgttctcaccaagatccattcatttttcttgaataagtgctcctaggttactgcaagcttttgtttaattttgagttttgaaaatttgattctgatattttccttcagttgttctgttattttttgggggggaggagcaatattttagaagtccttattctkctttttttttttatgctgacatcctgagatcccttcttccttccttaattctctctgttacttttctgagtagtcatactatttgcttattattgttagtatcatgaaaataccaagcccttctattggatatcaccaaattttgatttcattaaacaatgacattaggcatgaactttgtgaataaatacttaaataataaatacataagcgaatgaagtaagtccccttgggcagagttgtagaatttccattcttatgacctacctgtctctttctgggcataacctctgcaccactgcaccactgctgtggtaggggacagcatgccaattttccaggagtaacaccttt

SEQ ID NO: 236625 - DNA, 518 bp, Homo sapiens
gtacaagtgggttcaaatttctctggagacattgttttctgtctcttctctatggatttggggcttccctaaaaactcctttttagacagagtatgtgtcttgaagctttttctgttgttacctacttttattgtactggaatcctataggtatggtaatgagaggtggaattggcgggacttcctgggccgcttcgggggcttttgcaaaagacctctgtgacccagggttttgagttcttaaccaatcgagtgaaggattcaaaattaaccactccaagggaggaytgaaaaaagaaccacgctcaatgggcaaaaagaaagaatggggaggcagtaacacaggaatataagccttagccacccggcccagcaagggcaacccatacaggtccccttccaccacgtggacactttcctttagctttgttccataaactgtgctgctgctcactctcctggtccgtggactctttttgagctgtaatgttcaccacgaaggtccgcagcttcattct

SEQ ID NO: 236626 - DNA, 518 bp, Homo sapiens
gtacaagtgggttcaaatttctctggagacattgttttctgtctcttctctatggatttggggcttccctaaaaactcctttttagacagagtatgtgtcttgaagctttttctgttgttacctacttttattgtactggaatcctataggtatggtaatgagaggtggaattggcgggacttcctgggccgcttcgggggcttttgcaaaagacctctgtgacccagggttttgagttcttaaccaatcgagtgaaggattcaaaattaaccactccaagggaggactgaraaaagaaccacgctcaatgggcaaaaagaaagaatggggaggcagtaacacaggaatataagccttagccacccggcccagcaagggcaacccatacaggtccccttccaccacgtggacactttcctttagctttgttccataaactgtgctgctgctcactctcctggtccgtggactctttttgagctgtaatgttcaccacgaaggtccgcagcttcattct

SEQ ID NO: 236627 - DNA, 562 bp, Homo sapiens
agaccttatgtgaccctttgcagctaatatcatactaattgagaaaggctgaaagttttttttctctaagatcatgaaatagaacagaattgtgctggcaccatggtttagctggttaaagcgcccrtctagaaaaataacagaatgcctactttaccacttccattcaaaagagtattgaatgttctacccagagcaattagtcaagaaaaagaaatgaaaaacatcaaaattgggaaaaaagaagtaaatttatccctgttaacagatgacatgatgttatttgtagaaaaccctagagcttttttaacttaaaaaagttagtcctaataagtgaattcagcaacatttcaggatacaaaagcatcacacaaaaatcagttatagtctatatgttaacaatgaacaatccaaaaagaaaattaagaaggtaatttcacttaagaaggcatcaaaaagaataaaatagttacaaatttaatcagaaggcaaatacttatacactgtaaacaacaaaacattgtggaaataaattaaagaagacacaaataaatgacaagac

SEQ ID NO: 236628 - DNA, 562 bp, Homo sapiens
agaccttatgtgaccctttgcagctaatatcatactaattgagaaaggctgaaagttttttttctctaagatcatgaaatagaacagaattgtgctggcaccatggtttagctggttaaagcgcccgtctagaaaaataacagaatgcctactttaccacttccattcaaaagagtattgaatgttctacccagagcaattagtcaagaaaaagaaatgaaaaacatcaaaattgggaaaaaagaagtaaatttatccctgttaacagatgacmtgatgttatttgtagaaaaccctagagcttttttaacttaaaaaagttagtcctaataagtgaattcagcaacatttcaggatacaaaagcatcacacaaaaatcagttatagtctatatgttaacaatgaacaatccaaaaagaaaattaagaaggtaatttcacttaagaaggcatcaaaaagaataaaatagttacaaatttaatcagaaggcaaatacttatacactgtaaacaacaaaacattgtggaaataaattaaagaagacacaaataaatgacaagac

SEQ ID NO: 236629 - DNA, 596 bp, Homo sapiens
attacatttcaacatgagatttggaaagaacaaacatgcaaactatatcaattctttagtccgttttgaattcacttttgtataaggagtgagataaggctccattttcatcatctatatgtgaatacccagtttacccaacctcattttttttaagagagtgcccttcccgttgtttgttatttgtacctttgtcaaaaatcagttgactgtagatgtgtaggtttaatttctgggccttctatcctattctattggttgatgtgtctgtttttatgccagtaccatgctgctttgattactataattttgtaatagattttgaaataccgtagactgatacctcaagctttgttccttttggtaaagataattttgtttatgcagggtcttttgtggttctatatacattttaggakatttttctatatttgtgacaaatattggaattttcataggaatttcggtgaatctgaacatcacgttagatagtagggacattttaacaatattaattattataattcatgaaaacaggacaggaaagatacatcctggctcaataaatgtaataattccatgagcaatagcagtct

SEQ ID NO: 236630 - DNA, 544 bp, Homo sapiens
gtacaccacctggtacacagacgtgctcaataagctattgctattatcattcggttgccatcctcagaggacttgtggatcccttggtccctgcttttctatatctggaccacctatgggcctggctcccaccccagaaaatatttctggtgcctgtgatgtacwattatcctcatttacccttgtttgggttaagtagaggagatagcctttttgcataggggaggccccaagactgaggggacttcttgctaaagcactgcacaagggctgcttgtggagaacagctgattccttgacctcgaaaatgtttcacacagtgaccaaaatgggaacaaagcagaccctgctttacgactcccactggagcctggtcccatgaagcacaaagttctgtcattgccctccccacgcctcccctgtcggctccaccagccatatattcccttctgacattcctccaagacaactggtcagagagcacttagtctcctccccacataatatgttgagtaaggcaaccagatgctgccatagtgacaat

SEQ ID NO: 236631 - DNA, 594 bp, Homo sapiens
tgctgtgctagcatttgcatgtattatctcatttaatagtcacaaaaaccctatgaggcaggcactattatccccattttacagaggagcaattataataccagctaacatatattgagtgcttaccatgtgctaggcactgtgctagctgccttatatatttttttctcatttaatcctcatgataactgtatgaggtaggcattattactactaatagagatatctgtaggcctctggtagtaaaggactggataagaaccctgatacttatgaaatattcagaagggttgcatgacccaagaggactttggatgtacttttacaagtccttcctcactaggtgcttgggtacagtagacattgctcattttgaatcttgcagggaccctggccatggctggtgataggagaaggagtggtgagtctttcttaccctgggttgttttagggatatctgggatcaggctatggtagaggcacaaaaattttsatgccttgctcatggtgttttcctacttggtcttctctaaaaatccttctcagaccatgtcacttctttctttcattcctttagtcattcatcctttcatc

SEQ ID NO: 236632 - DNA, 530 bp, Homo sapiens
atgctgtggtctccatgggaactaattcccagtgagctctttgttctcagggcagcttagttgccctcatttactcttccaaactgtgattaagctcaggctgtaggcttttcatctgcatccaggaaaagggaaagtgcacactcttacctataaaaagggaaatttgccattgataaatctggtggttcccaggcccatgctataaaattgcctcaatttktccagttcagagaatgttcatggtgagtggagcctatggccatggccaggcttgactgacctaagcctctagtgtcatctctccctaaacaaatattcttattaaaactgctgttaagtaaaagcactgaattgaaaattaggttttcatcaggttctagtgctgattgtgccactcaactaactgtatgaccttgggcaagtcactgaacaattctcatttgaacacagaaaggacgatgttgaaccaagtgatctctaggattattttcagttctgataccttgagtctttgatactaggagata

SEQ ID NO: 236633 - DNA, 570 bp, Homo sapiens
aattggtttttgtatgatgatattgtatcctgcaaaccaaaacttcattgctagatcaaggctcatttttataaattcgttgacatattattctgtgtagatgwtcatgccatctgtaaatagagacaattttattctttccttttggatgtataagacttttattccctttcttgtcttattgcactgggtagtactacctcgaatagcagtgatgagagtagaaatcagtgcttcattcccaatcttagagaaaaacattcagtctttcaccattgtgatgttaggtttagctttagtttttaaaaatcagcttgagataagattcacatgctgtacaattcacccatttaaagtacaagattaaagactttgagtatattcacagaattttgcattcatcaccagaatcaattttattcagtgctctcaaaataaaccacataccccttagctgtcaccacccaatccacctcttccccggccataaacaaccactagtctccagttggtctctatagatttttctattcaggacatttcatataaatgcagtaatacaatatgtgg

SEQ ID NO: 236634 - DNA, 641 bp, Homo sapiens
aagcttgaatgatctggcccctgccttcctctgcaacctcatctcatatcaccctccctctcatgactgccccaaaccccacccacactgattttctgtcccttgagttcaccaagcacatatcattgtatttcttgtttatctgcctcccccttcctcctacctccctgcttctagagtgttaactctgttaagcagggactttgtctttttcatcattatgtcttcatcacctagcacagttcctggcatttaataggtggtcaataagtatttgctgagtgaataaataagtgaacaggaaaatgagcaattttgctccctattccactcattggctctaagatgaacctcagctcagcctcatctctagtgtgctttgagatcctctggtgaaatgagatggccagaaaatgcaaggttgttaaacatcagaaagttgcaagaccagtttggtcaggaggaataataatcagtataaccagcacktattgagatattagcatgtgctgggcattgctctaggcttttttctcatttaatctccacagtaaccttataaggtatttcctagtatagaattatccacatttgatgatgagcaaactgaaacccaggtgattcagtgacttggatgcaga

SEQ ID NO: 236635 - DNA, 591 bp, Homo sapiens
gcatattcagcaccttctatggtccctagcacatagcaggcactcaataaattttgttgaatggtgaatgatcaaatgaatgaagaaatgaataaataaacaaaagtagatgtcaatgagttgagcaagaaatactagcaggatagagtggcaggtgaattgagtagcaccttggctttagttctagtcattcctgccacactcctggcataccaaacttatcccaggcccagacggcttgtgaatgagttggcatggcacaactccctttgctaagagggcatgttatatctctgtagtcacttgttccagggagcagacaggctgttggactgtaagaatcaggtgcagccaggtgagactgtagagtccaggagtgtgccaaaagagatgcccctttgcatcatcaccattctctggtcctgatctgtctgtgatgcaggacatgggtgagacacatgctgcactggcatcccagcctgctcytacttgctggagggtagttaataacctcatgtaacacaggccaaggagcagctaaaccaaagtttaagaagaagaaacacatgcccatgcagtgaccagaagctt

SEQ ID NO: 236636 - DNA, 591 bp, Homo sapiens
gcatattcagcaccttctatggtccctagcacatagcaggcactcaataaattttgttgaatggtgaatgatcaaatgaatgaagaaatgaataaataaacaaaagtagatgtcaatgagttgagcaagaaatactagcaggatagagtggcaggtgaattgagtagcaccttggctttagttctagtcattcctgccacactcctggcataccaaacttatcccaggcccagacggcttgtgaatgagttggcatggcacaactccctttgctaagagggcatgttatatctctgtagtcacttgttccagggagcagacaggctgttggactgtaagaatcaggtgcagccaggtgagactgtagagtccaggagtgtgccaaaagagatgcccctttgcatcatcaccattctctggtcctgatctgtctgtgatgcaggacatgggtgagacacatgctgcactggcatcccagcctgctcttacttgctggagggtagttaataacctcatgtaacacaggccaaggagcagctaaaccaaagtttaagaagaagaaacrcatgcccatgcagtgaccagaagctt

SEQ ID NO: 236637 - DNA, 585 bp, Homo sapiens
tgtgtgtgtgtgtgtgcgtgtgtgtgtgtctgcgccatggggctgggctactcttggcattacatgtccttgggtctcattccatgccaagccagactgcagcaacacgcaggtggatcaggtccaacctgttctgcccacattggaaggataatgatygttttcaaagtgatggaaatccccccagctgggactgttgcttaggactttctggatgcggaatttcgagccaggttgaccaagccctaccagatagcgttattgttctcccaaagatgcccaactttcttagcagggtttcctctctcagccaatgaggatccaaagctcttacagtgatccctgcagtgccttcccacacccattttaattagcgcatcctaatgtcttcaggtcttacttactacagtgaagttagtggtgtgctaggatgtagttctatgtttgaactaaaaagaacaaactaaatgcacctatgtgttagtcatgaatttgatatagaggttttttttttctttcttgaatgataaggtatgaactggtatggccactttttaatcaaagaaagaagaggtcaataaaaat

SEQ ID NO: 236638 - DNA, 655 bp, Homo sapiens
ataccttgctgtggaggagttgatggcctagggtactttgggcacataaaggtcctttgttcactggctgtcaataccagaaggtatcaggcagtatctctaagatacattctccaaagcttgggctggaatggaatcgatctgtcagctgtgttgatgttcagatctgtctagttactagacagtgttttttgatgtaggttctaaagaagactagttccatagaatgttagtagggcacacctctccccatccacacacacacacaaacacacagggttttgtggtcaagttaagttttggaaattcttacttaaacataaacaggtttctttcctgcagggcttctaaaagtctttactaggctaatgaatattgtgactctccaggagtataaaatatgcagcatttctcagatggaattacccatagagcatggtgttccaacaagcatttgggtctactggtgttgagagacacgttctttgggtaaaagcattctctgctgagttctgagttcagaggctgtcggcatcttgctgggtaagcttggatgactygctttacccctccaggctttccttccttcccccctctttaaaatgaggttgataataatcatcactctcactgactgtgatggtgtgatgacaac

SEQ ID NO: 236639 - DNA, 564 bp, Homo sapiens
tacaaccctcctagattaaaccaggaagatacagaatctccaaacagatcaataacaagcagcgagattcaaatggtaatttaaaaattgccaacaacaaaaaatgtccaggacccaacggattcacaggtgaattctatcagacattcaaagaagaattggtaccaatcctattcatactattccacaagatagaaaaagagggaatcctccctaaatcattttataaagccagactaataccttaataccaaaaccaggaaaggatataacaaaaaaaaaaaaaagaaaactacagaccaatatcccgaaagtaggacatagatgcaaaagtcctcaacaaaatactagcaaaccaaatccaacagcatatcaaaaagataatccaccatgatcaagtgagtttcatatgagggatgcacagatagtttaatatatttaactcaataaatgtgatacaccacataaacagaatgtaaaacaaaaaatcacatgatcatctcaatagatgcagaaaaagcatttracaaaatccagcattcctttatgattaaaaccctcagc

SEQ ID NO: 236640 - DNA, 552 bp, Homo sapiens
agaagtaaaagtacatctaccatttgatccagcaatcccactactaggtatctatccagaggaaaagaagtcactatatgaaaaagatactttcatacacatgtttatagcagcacaatttgcaattgcatacatatggaagcagccgaaatgcccatcaatcaatgagtggataaagaaaatgtgatatgtgtatatatacatatatatgtatataatatatatgtgtgtgtgtgtatatatatatacatatatatrtgtgtatatatatatacacacaccatggaatactactcagccataaaaaggaatgaaataatggcattcacagcaacctggatggaactggagactattattctaagtgaagtaactcaggagtggaaaaccaaacatcgtatgttcttactcatatgtgggaactaagctatgaggacacaaaggcataagatacatttggctttggggacttgggggaaagggtgggagggggtgagggataaaagactagtcactgggtagagtgtacactgctcgggtgatgggtgcaca

SEQ ID NO: 236641 - DNA, 494 bp, Homo sapiens
cacacccaaaaaaagtaattcaacttattgagtttttttctttggttgctttcacttttggcatcatatttaagaaaatgatgcctagtccaaacacaaaatattgacccctatattttcttctgagtttcattgttttagctattacatttaggtctttgaccatttcaagtaaagttttgtatataagacagtggtcaaaatttattcttttgcatgtggatatccagttgtctcagtaccatttgttgaagaaactgcttttctcctttgaatggtcttggactctcaattctgttccattgactgacatagctatctatccttatgccacttggttactgtcactttgtagtaagttctgaaactgggaattatgagtcttcattttagatctttttcaagattgttttgcctatcaygaggccctggtatttccatatgaattttaggatcaacttttccttttttttttttttttttgaaaaaaaagg

SEQ ID NO: 236642 - DNA, 562 bp, Homo sapiens
atttaacatttttattgccaatacttgatttttttaaaaaaaattacattttgaaaatygatagatgaaggtgagagctcatggttaattagtggtaaaattgaatagatttttagacttattggccatttgggtttcttattccgtgaactgttggcttttattctttgcctatcttgctattgtgttgatcatctttgtcttattgatttgaaggtgtttattattatattctagataaaaatcttatccacatttttcatttacttcttcaattcacctgaaatttatttttgcaaatggtatattttaggcaagaatgttatttatttaaatgtattttttaacttatttaaatcaattttatctattgtccagataaaatgtattgaatagtcgggcttttcattgacttgagatgtcacttttattatatactaaattcccatatatacatgaatcagtactttttattatgccctattgatttatttttgtctagtcatgtgaatacattttaattacacaatgtataatatgctttgatatctgtaaggggaag

SEQ ID NO: 236643 - DNA, 495 bp, Homo sapiens
ttccaacagcatcttctcacttcacatctctgtgtcacacattggtaattctcacaatatttcaaactttttcattattcttatatctattatattgatctatgatcagtgatactactattgtaattgttttgaggcaccatgaactatgcccatataagatggcaaacataatcaagaaatgttgtgtatgttctgactgctccaccaaccagctgtcctcccatctctctccttctccctctcctaagccctgcctattttctgagacacaacaatattgaaattaggccaattaataaccccaaaacrgtctctaagcattcaagtgaaaggaagagccgcatgtctctccctttaaataaaaaactagaaatgattaagcttagtgagaaaggcatattgaaagccaagatagacctaagctaggcctcttgtaccagttatccaagttatgaatgcaaagtaaaagttcctgagggaaactaaaagtgc

SEQ ID NO: 236644 - DNA, 651 bp, Homo sapiens
agttacaggagtaggaatttttttttctttttcttttttactatagaggataatgcttttggtggagatttgtaatgagttctgcacttagcaagtrtggtagaccaggtgtattattgggaagatgaggtgtttgtttgtttgttttgtatttcttctgcctggtctattatttactgtagttagataaatggatttaaatgtctgaataaaatatttttagagtgggtagatgaagtggcttgtaatgtatggaagtaaaatatttctatgatgaataaagaagcattggacttcccatacagagattatgcatgtcattttgctgagggcatctacttccaccagaatgatattgtatcttcagaaggaaaaggggagaagccagtgataaaatacagggtgttattatctcagaggtgcttggagctcaagagggcttgaagtaattatttcccagatgtatgttgcctgtgtgcatgtgatataggagtttgcattttggatgttaacatgaaaaggcagagtcaccagaaattcccaagggccatttcaaatatttttagtggaccacaactgcccagtatggaagaaacacagcatttgtgtgtgtgcatctgatgccaagaaatagatctggcagggttggtt

SEQ ID NO: 236645 - DNA, 563 bp, Homo sapiens
gaattcgtgttaacaagttaaaaggatttttaagtctgagttttggttgaggtaacaaaggccaacaacaaaataatggtttcccaaaaccctgatgttttaagaagaggtgctagaccaccactgtaaaaacagaatacttaaacccctacccattttcctctcaaaggcataaatttaatgaggttaaagatgcagagtaagagagaggatttctttggagtatgttgctggaatacttcggggtttkcctgatcatatcttgtaaggggaggggttggtgattgtcagttctccatcaccttaagccaagctagagaagggcttcaaggaaaacactctgagagcttgacctatgcttcctgaagttggggagcatgagggctggtggagaagttctagctagagtagcccaagatggcagagcaaaggagtgggaaaggtctgtactgtgagtgcactgcttgctcagcaagggtggcaggagtgtgtagtggttcttggactcaactagacttaggccacataggaagaatctggcttggagccctgttgaatcaagt

SEQ ID NO: 236646 - DNA, 470 bp, Homo sapiens
ttatgtatatgtagcctgtcaattagaggcattgcttatatctaggggactgcagagggaggcctccagtgaggagcatctttaaggaatccayggaatcattccatcagaggaagaatcagctctgggaatctgctccaagcctgggaaccaggacctgatgacatcactgctggtccagcagggtccgccctgtcccttacctcttctacctctcgtcattctcagcctgcaactcagtaagggcaaaggaaaggagaaggaaggcaggagattggaagcctctgtgacccagtgggtccaggctggggtcagggagaagttctaactttaaatgaagcttggaaatgtgttacattgaactgcacattttgtttactaaaatgggttgctctggtgactaaaaatgacttgagtcacagcaaaagctaagaattggtttgaaggggcagaggaatagccttgttttc

SEQ ID NO: 236647 - DNA, 609 bp, Homo sapiens
gaaactggaaactccctaagtgattttgttgagtaattgggtttcagaaccctcatataggatggtagttcctgaatgtgctgcagattagaatcacctgctgcacattggcttttaaaaagtctaatgtctcaagtcttatcccataccaattaaatcagtatgtctggggtggccaggtgttagctgctcttaatgaaccccaagtgattccaatgtgaaataaaatttgggaaccactgatgtccattactgttagctagattaggccaaatgaagtgtttacacacagcagctgaaagacatgtagtcaaagtcctgggcatgattatagccaaggagcaaggccagatcagagctgaagaggcagcaccaagcatcagacytactgtgaagaggaggtagataaagctgacccatgtgacctacataaaaataagtgcgggactaacactctatgagtgctataagattaatgatgttctggatagaaacagggaaataagtaaaaaggtccaggttctcttatttctgtgaacagatagctgaaagattctaagtaaatttatttgagattgtacttgaagcaaacagggatggaattaaaga

SEQ ID NO: 236648 - DNA, 434 bp, Homo sapiens
gtaagtactatctattattatttttgatttgatgctactgaacctgacaaaataaaccctgacaggttttagttttacttcatctccactctttggagattatccaatcaatgttctaagaatccaaaaacccaataggagtggaaaaaagaagtatatgtcctgtttaattagtccctgagtaattgagagttgattcttaaagaattttgactgggttggtagtttatttttaagaattccatatttcagccaatgctgtttatagtagtgcagttaggatggggaatttatgagagaacttactttatgtggtgggtgggatrtaccgttggcatcccaaggatggataacttgagtgatccctgcggtattgtttctactagttacttaaccagtttttttctgagctcttatggtgttgaacacttaaa

SEQ ID NO: 236649 - DNA, 427 bp, Homo sapiens
ttatttttgatttgatgctactgaacctgacaaaataaaccctgacaggttttagttttacttcatctccactctttggagattatccaatcaatgttctaagaatccaaaaacccaataggagtggaaaaaagaagtatatgtcctgtttaattagtccctgagtaattgagagttgattcttaaagaattttgactgggttggtagtttatttttaagaattccatatttcagccaatgctgtttatagtagtgcagttaggatggggaatttatgagagaacttactttatgtggtgggtgggatgtaccgttggcatcccaaggatggataacttgagtgatccctgcrgtattgtttctactagttacttaaccagtttttttctgagctcttatggtgttgaacacttaaaagacgagatc

SEQ ID NO: 236650 - DNA, 603 bp, Homo sapiens
ttcctaagacagagcaatgccaggaggggtggacgttgcatctgggggagaataactgcacaatttaacatgtaaattattctatctcttgtgttatctctctttttacctttgggaattattcattcatttgttttcgacaaatatttgctgagcacctattatgtgccagccactcttcttwatttagagatagaacataaaaaaagacagaaaaggtaataggtttcaggaagtttattacacaccgaaagggaggacgaaaataaacaaatactatgctatgtatatatacaagataattttagatgctgatatgggctataaaggaaataaaacatgatgggtcaattgaatggggaggtgggagggcccatctctatagaggggccatttgagcagagactaggtgagaacggtagagccagccacgcaaggatccagcagaggcaaagcattccaggcaaagcaaagggcaaatgcaaaaaagactgagagaggggagtaagtttgatatgttcaaggatcagagtaagggacacctgagctggagcataaaggtagaaaatgaggttggtgctggggccagatcaaggaatgtcc

SEQ ID NO: 236651 - DNA, 362 bp, Homo sapiens
taaatgtgcccatggaaaaccttgtgcactcctggcaacgtggggctaacatgggyatgatagactgtataaaggcaagagtcttgagacacctggagtggtcagaatttgctagaaatagtgtggttgggaagagtcaacagaaccgcttgcagggtcctattcctgtagaaccttccacacccagctatgtgtacagagctgtgttaatgatactagtcaattacttcaccaatatttacagcagttgcttcaactctttataaacggcatctgttgtggtaggggctgggttagagcctcgagaaggaattgcttgtgagttcacagcttgggctgtggagacaaccaggagtaagtga

SEQ ID NO: 236652 - DNA, 453 bp, Homo sapiens
tatagacaggtataaagcaatggcaatattttgctttctggaatatcttcaaccattacttatgcaacataaatgtgcccatggaaaaccttgtgcactcctggcaacgtggggctaacatgggcatgatagactgtataaaggcaagagtcttgagacacctggagtggtcagaatttgctagaaatagtgtggttgggaagagtcaacagaaccgcttgcagggtcctattcctgtagaaccttccacacccagctatgtgtacagagctgtgttaatgatactagtcaattacttcaccaatatttacagcagttgcttcaactctttataaacggcatctgttgtggtaggggctgggttagagcctcsagaaggaattgcttgtgagttcacagcttgggctgtggagacaaccaggagtaagtgaggcagtttccagtggagaattc

SEQ ID NO: 236653 - DNA, 599 bp, Homo sapiens
cttatctttttttttaaaaatggactgtatcaaatcaatttttatacttctttcctcagtaagcaaaaataaatttttcatgtgctataaagacagcattaaatctttatgtcctctgttgattagaaagtatgatattagcaacactaggatatttatrctcggaactctgtaattattctaaaatacatgctgtcttttgtttgtctattttatgtgggttgctctctcttacctggtatttgagaaatctactaatgagatcaaagagaataaaaattgggatactagattattattatttatatatacatattcctagaagaatctaggcctgatataacttttttaagggactactgttctaggatcattttatctgttcattatataccctccaaaccaaattctgtaggtggttttttttttttacattttctcctgggaaagataaacgaggcactccatggtagaataaaaaaacagatttggctttggggagttgggaaagttctggtgaaatgccaagtgctgagctgcaggttttcaaaattgtttattttgaagcttagaattgttggaaaagtatcacatatgag

SEQ ID NO: 236654 - DNA, 599 bp, Homo sapiens
cttatctttttttttaaaaatggactgtatcaaatcaatttttatacttctttcctcagtaagcaaaaataaatttttcatgtgctataaagacagcattaaatctttatgtcctctgttgattagaaagtatgatattagcaacactaggatatttatactcggractctgtaattattctaaaatacatgctgtcttttgtttgtctattttatgtgggttgctctctcttacctggtatttgagaaatctactaatgagatcaaagagaataaaaattgggatactagattattattatttatatatacatattcctagaagaatctaggcctgatataacttttttaagggactactgttctaggatcattttatctgttcattatataccctccaaaccaaattctgtaggtggttttttttttttacattttctcctgggaaagataaacgaggcactccatggtagaataaaaaaacagatttggctttggggagttgggaaagttctggtgaaatgccaagtgctgagctgcaggttttcaaaattgtttattttgaagcttagaattgttggaaaagtatcacatatgag

SEQ ID NO: 236655 - DNA, 584 bp, Homo sapiens
tgttgattagaaagtatgatattagcaacactaggatatttatactcggaactctgtaattattctaaaatacatgctgtcttttgtttgtctattttatgtgggttgctctctcttacctggtatttgagaaatctactaatgagatcaaagagaataaaaattgggatactagattattattatttatatatacatattcctagaagaatctaggcctgatataacttttttaagggactactgttctaggatcattttatctgttcattatataccctccaaaccaaattctgtaggtggtkttttttttttacattttctcctgggaaagataaacgaggcactccatggtagaataaaaaaacagatttggctttggggagttgggaaagttctggtgaaatgccaagtgctgagctgcaggttttcaaaattgtttattttgaagcttagaattgttggaaaagtatcacatatgagactcatgtcattgcttctgacagtgaaataggtcagctgcccaggtggtgtctgagaaacctacagaaaaaagataatgtatacatctcttcttcagccca

SEQ ID NO: 236656 - DNA, 305 bp, Homo sapiens
caaactcttgacctcaggtgatccgcccaccttggcctccaaagtactgggattacaggtgtgagccaccgcgcctggcctctaaattctaatattgtgtttgtggctcgtgttgacagacaatgtcacaaggtatgatcaagtcacgttaaactctgtctttgtattggtcagmtgtagctgcagaacaacctcaagatctcaatggcataccccaggaaacgtgtatttctttcttatgagtttacaagtcagctgagacagctttgtctcatgttgagggttgactgtggtggccctgctct

SEQ ID NO: 236657 - DNA, 634 bp, Homo sapiens
tggacgaggtgtggggcataggggtaaacaagatttcgagggtccctgtccctgctgagcttatactatagcaaagaagacattagacaagaaatgaccagtgagtgtaataagtgttttggtgcctgtgggaacacataggagaggccctttatctggtctggggtttcctggaggaagtgatatgtctgcccaggggtaaagaatragtaagagctagccagacaaagaggtggagaaaagagtgacaggcaggggaacaccacatcccacgatgcagagacgggagagaagatggtgagtccagtgaatggaaggacatctggaatgatgggcgtgtagagtttcacattagtctggatgtgtccagggttaagattttctgggtggttgatgtggaacaataagcaagggatttgggaggtttgcaagagattggttgaagggaaggccatgttatggaagttagattggagaggaagagaagatcccaggagcacaggagctaagaagtgaccatttactagcattcattgagaaatgggaaattaagggtagatcctgaagacataaagatgtacaataggtagcagtatagcatattagctaaaggaacgagattggagaaccaaca

SEQ ID NO: 236658 - DNA, 309 bp, Homo sapiens
gaggtttatggaaatgcctccctacagggttgtcatatacctttgattgcatgcaataaacttcataaatcatgtgcatatagaaactatcaatgcatattcaacagctgctgctgtttactcagctctttaagggatgkgtcggtcccaggtgcagaaggaggaggctcttgtatgtggctggaaggaaaggaagcttcacatctgcacttttcactattattcgcagcatctaggtagtgcctacacacagtagatgttcaataaaattttttagatgaattaatgatggtgtaatgaataagtggt

SEQ ID NO: 236659 - DNA, 551 bp, Homo sapiens
gctttcccaaaagcttaaaataggaaaagtctccttttgccctgtttattccttggtgtggtgtttattcacctagctgtcargctttcttcctatcttcatctctcattaaaacctgttcaggtgcttcatttggactccagtgaatatgaactcagacagatgtttgaatattggcaagaatcataacaatataaagggataaaaatatgtagaagcaaaatatgtgacaaaaacagcacaaagactgaaagaggggaaaatgtgactatgttagtgtaaggtccttacacattatgtgaactaatgttacttgaaggtaaactgtgataagctaaagatggatagtgtaaaccccaatgcaatcaccaaaaagaacaaaattgaaatatataattaataaggaatcagataaaataaatcataaatattcaatctaaaagaagatagacaaagaagaaaaatggagcaaaatcagaggtaaccaatagcaaacaagcattaagatggtagatttaaacccaaccatatcaataatcacattaaatgta

SEQ ID NO: 236660 - DNA, 604 bp, Homo sapiens
atgggatgacctcttctgtccatcagctcctgcatctgatgggctttggggcagatttggtgattcctcaaggtaccggacaagggcttttgggaagagaacattgagaaaacaaagtgtgaggatgatttctacctcctactgggtaaaaatgccatactcatttggatctggatttcctgagtgaatgtacatgtgttactgaaaaggggtcccaatccagatcccaagagagggttcttggagctcatgtaaaaaaggattctgggtgagtccataaagtaaagtgaaagyaagtttattaagaaagaaaataaacgaaagaatggctactccataggcagagcagtggcatgggtttctcaactttcttgatcatgtgttaaacaaggggtggattattcacatatttttctgggaaaggggcaatttccagaactgaggattcctcccctttttagaccatatacggtaacttcctgatgttgccatggcatttataaactgtcatggaaccgaagggagtgtcttttagcatgctagtgcattataatgcgcatataatgagcagtgaggatgatcaaaggtcacttttgtcaccatc

SEQ ID NO: 236661 - DNA, 604 bp, Homo sapiens
atgggatgacctcttctgtccatcagctcctgcatctgatgggctttggggcagatttggtgattcctcaaggtaccggacaagggcttttgggaagagaacattgagaaaacaaagtgtgaggatgatttctacctcctactgggtaaaaatgccatactcatttggatctggatttcctgagtgaatgtacatgtgttactgaaaaggggtcccaatccagatcccaagagagggttcttggagctcatgtaaaaaaggattctgggtgagtccataaagtaaagtgaaagcaagtttattaagaaagaaaataaacgaaagaatggctactccataggcagagcagtggcatgggtttctcaactttcttgatcatgtgttaaacaaggggtggattattcacatatttttctgggaaaggggcaatttccagaactgaggattcctcccctttttagaccatatacggtaacttcctgatgttgccatggcatttataaacygtcatggaaccgaagggagtgtcttttagcatgctagtgcattataatgcgcatataatgagcagtgaggatgatcaaaggtcacttttgtcaccatc

SEQ ID NO: 236662 - DNA, 523 bp, Homo sapiens
accaaagcagtcgaaaaaaacaaaattcaaaggattaacagttgctgaattcaaggcttactataaagctgtaataatggccgggtgcagtggctcacacctataatcctagcattttgggaggctgaggcgggcagatcatgaggtcagaagatcgagaccatcctggccaacatggtgaaaccccatctgtactaaaatacaaaaaattagccgggcgtgagggtgcatgcctgtagtcccagctacttgggaggctgaggcaagggaattgcttgaacccaggaggcggagrttgcagtgagctgagattccaccactgcactctagcctggtgacagagctagactccgtctcaaaaaaaaaaaaaaaagctataataattaagacacaagtgttaccggcataaggacagacatatagatcaatggaattgaatagtgactccagaaataaaccttacatgtgttgtcagactgatttttgacaaggatactgtgatggttagttttatgtttcactt

SEQ ID NO: 236663 - DNA, 611 bp, Homo sapiens
tattactaatgacaaatcaatggctttcattatcccagatctaagtaggaaaggaaagggtgcacctgccctgtttcagacacttgctagttcctgcattggctcacctctcctttgctcgtagcactcattgtgagaaagtagatcagtcaatagtactgagcttttcttggtttgaactctttttatttgcagtgttatcattaattttttttcttaggaagtaccaggaaaagataagaaatttatgaaaaatgcagatggggataaaatctatgtccaaagagttagaatagaggccaagaaatgataccaatctagagtttcaggatgaatattgacatagtaaaagtcctagacatttacaaatttgtcctgatattttattttgtagatgaggaaatttaggtttaggaaaattaaatgattgatacaasgttgtgcagatagttattggtagagaaagtctaaagctcttttcaatattaaaaataaataacaaaaaacatggaagtgagcaggcagcaaactgctgcagtttgctttgggcagtcagcaagagaaaaagaacttagattgagtgtaagcaatttaagatagagttttccata

SEQ ID NO: 236664 - DNA, 592 bp, Homo sapiens
acacagatgactagacattgaatgaatgtacatttttttttttttttttttgagatggagttttgctcttgtttcccaggctagagtgcaatggcgtgatctcagctcaccacaacctctgcctcccaggttcaagcaattctccaacctcagcctcctgagtagctgggattacaggcatgcgccaccacgtccggctaatgttttttgtagttttagtagagacggggtttctccatgtcagtgaggctggtcttgaactcccaatctcaggtgattcacctgcctcggcctcccaaagtgctgggattataggcgtgagccattgcgcccggccgaacaaatgtactcttagacatttttttaatctttagattgagcatctttggatatcagataccagytgagtttaaataactagtttccattactagatgaaattttgatgagaacctttagaaggttagtaatttctttgtccaacccaaatgtagtttttatattactcatagtaaatgccattttacattttccttcaagatttgtcttgcttaacagtgctgtctgtcttccatgagtcatactgacccag

SEQ ID NO: 236665 - DNA, 367 bp, Homo sapiens
tgctagaagcattagtggaatgttgtagatatgggatataaaaatttagaygtggtgtatttgataaagtctctcttagtatccttatggaaattaagtgtgaaatgcaggaaaacagacaatggatgatggttcattgatgtggagacacaattagctcagtggctgattcctgaaaatactggttggtgatttgagagtagaggtcacccttgaggaacacctgccttacctgttttgggctcaacattttttatcagtgtcctgaataaggaccatagataataggcttataaaatttgtggaaaatgtagagttacttaaatgttagttagcagaacattggggttgcggttggaggccgggg

SEQ ID NO: 236666 - DNA, 409 bp, Homo sapiens
taaggggctgaataaccctgggttattcttactgtgaaaaattcccctacttttttcccatagttacctgggctatataagaggtatgcatgctacgcaggggcctctgagagctataaatgacatagggtcaaattgaaccattttcccaccgactggggtgtcagaatcccaaccagcatgtgaagaacacaccctgcctcctccagcaggactcagacrggcctcctgtctcgcacagtggtggtttagaatgcatgttgaatgcttggatctttctagaccaggctgtgtatgggaaggggaatattggcaagagggagaaggttttcctgttcaagcatactacaatgggaaagcaaagttatgtttcttagtacatcaacagttataggttggtggttaaaaa

SEQ ID NO: 236667 - DNA, 564 bp, Homo sapiens
tcaaaatgtcctcatagaggcttggctggaggatgctgcgttaagtcagctagcccagtaggcctgctarttgaattcctggaatgaggctgatgtaccgcagaggcctccctgggagcagggccgctggagcagcaacagaaccttgcagcctgcagaagctcacaaccaaaacagagaacagggctgagctgcgctgagcagagctctgggattctcttaaatctatcagtcgaaattatttctcctgaggcacataggaagtagagagggctgagagaggccgggagtgtgtaggggcgtggaggctgcagggtggaggagagtccctcctcctggcaatcaggaatgggaaaaagcatctcctttacacaccccaggtgatttgcatgatcaggaaagtctgggaagtgggtcttaggaagcctgcaatgttgtctcttgtctgtgctttccaccagcgttccagttttgcacttttggtatttctgagcaagctcagcttctgtgttttggggtactggctcctaagagcagctgggtgtgtgattagacaaggaactg

SEQ ID NO: 236668 - DNA, 564 bp, Homo sapiens
tcaaaatgtcctcatagaggcttggctggaggatgctgcgttaagtcagctagcccagtaggcctgctaattgaattcctggaatgaggctgatgtaccgcagaggcctccctgggagcagggccgctggagcagcaacagaaccttgcagcctgcagaagctcacaaccaaaacagagaacagggctgagctgcgctgagcagagctctgggattctcttaaatctatcagtcgaaattatttctcctgaggcacataggaagtagagagggctgagagaggccgggagtgtgtaggggcgtggaggctgcagggtggaggagagtccctcctcctggcaatcaggaatgggaaaaagcatctcytttacacaccccaggtgatttgcatgatcaggaaagtctgggaagtgggtcttaggaagcctgcaatgttgtctcttgtctgtgctttccaccagcgttccagttttgcacttttggtatttctgagcaagctcagcttctgtgttttggggtactggctcctaagagcagctgggtgtgtgattagacaaggaactg

SEQ ID NO: 236669 - DNA, 347 bp, Homo sapiens
gttgaaacctgcagtgattcagtgatgaagatatcccttgcaaggcttgaaggactattggctgaggaaagtcggttgcagcttattttcagtttttggttggtcagtgaaacactccaaacctgcttacctagctttctaaaaacaatgtagattttcaggcaggtgcagtggtgtgcctgtaatcccagctactcatgaggctgaggagggaggattgcttgagcataggggttygagaccagtctgggcaacatagcaagaccctatctcaaaaaaaaatgtagtttttaaactaaagaattcaataatggcctgtacagatttggacctccgtcctatcccta

SEQ ID NO: 236670 - DNA, 593 bp, Homo sapiens
gtgggttgtgaatcagagggctacaaagagattatgatggagcaatgctttgggaaagtttcaacttatagggaaataaaacatacaaatctgaaccatcttttaaggcctatattaatcaccatctccacaaaatcagcttcatttagtggaaacactcccttgaaattattaacgtgcacttgaaaacttaattttgtgccaccttatagtatgtattaattgcttgctctttgagtattaatcttgtttttccctccaatttgaatatctgagattagggaccatgctttactaatgaaatgatcaataggaaataggaaatgctcctagaataatcctatgtgattcctgaagtctctaacaattaatacttgacagacacagactgttatcaacagcagaatctttggattaactttcttaatattgaagaagggtatcttatactggtataaarcagttcaatttacaaaacaagtttatatgtattatttgtatttcgttaggatctgcaggatacacatgaatgatctcatttggaaacaatggattgtcagtgtttagaggaaatgtttttcagtggtgccaat

SEQ ID NO: 236671 - DNA, 469 bp, Homo sapiens
aacctgagggataacatcagaatgctgatttgttaactgatgctcagaaatgctactgtcggccaggctgggctttcacaggtgcccagctgtagacgtggtgagccatgtcattgttgggtgcacagtaggtttgggctcttggggtacagtgtaaacaagacaaatattcaaggttgggctgagagggtggtggggtttaagcagagacaggcgacaaataaataaaagaagaggtaaagctcccagttaatgatgaggrccaggcagtaggggctggcagtaggccaccgtggcagggactggctgatggctgggttaggtgggctggccagtgaggcttctcacacactttagccagagggcacttggtgagcttcaaatgaaaggtcacggcaacctcttacctttttgatagacatagggtttctttagttatgtttataaatacaatccagttcaggccaga

SEQ ID NO: 236672 - DNA, 513 bp, Homo sapiens
ttaaatactaaattttcttttgctgtaggttgtttctggcaaaaccggagttttattgatggacttcctttatgtactcactctgcgttagcatgttggagacataggatttgctggcatcatctggttatgaatgtgactgtggggccccwgggaggttcccaaggttctggttggtggttcgagtcaggactcaggttttcctgtctctggaacagtcgtttgtgttataccaggccataggcacagaatggtgagtggatttctatcctaggagaggtcctttgctgtgttcaagtacttgggatatcgaatgacagaacttgtttttagagagatgacagcaataagcctgctagtatgagctgttggcaatcatatagcccatttaacccttatgataactgttaaggttgttattattattactaatactacaaaagcatgttgacttaaatttgcagatgaggaaaaagaggttcagaaagatgaatctgcaacccaggtgccttg

SEQ ID NO: 236673 - DNA, 564 bp, Homo sapiens
agtatttgtcaagtatttccatttctagcaagggaaaaatgatctattaaatatactccacattaacaaaaaagtccctgatttatgtatgttgatcaatgaaggttaaaaaacactgttaactaaggttttctatttgcagtgttttctgacaaatatttttcctccagattttaagcrtgttatgatgagtcaacctttatgtttgtaaagccttagtcttgttaataatgtataacttccaaatgaatcatatacttatgcatagcacttgaatatgcagattttataatacaatctgaaggctcatatttttctgtttatttttaaaatgttaagtctcattagcattatattttacagatatattatgtaccatataacctctacaaatcacagtcaatctggatagtgtccccttagggcaccttaattatatgctgtagttctagaattcttttatgtggttttttagagataatttctcctctttattttccttatgaggcatcttaaaatagcaaaaaatggttgctttggaacctactgttatagatgccagtc

SEQ ID NO: 236674 - DNA, 510 bp, Homo sapiens
tgagtgcagtggcatgatcacagctcacagcagcctcaaactctcaggctcaagcaatcctcctgcctcagccttccgaacagctgggactgcaggcatgyaccaccacacctggctaatcttattttttgtagaggtaggatctactgtgtttcccagactggtcttgaactcctggactcaagcagttctcccacctcggccccccaaatagttggtactacaggcgtacgtcaccacgcctggctaattttttattttttgtagagatacagtctcactatgttgcccaggctggtcttgaactcctggactcaagcaatcctcctaccttggcctcccaaattgctgttacgggcatgagccaccacacccggctacatagaggccctttataccaaaacttcctgagcagcactattttacaggcagtgttaacataattgtaacatatttagatcttggcatatttttcaatattggctttagttaaattttgtgctccatata

SEQ ID NO: 236675 - DNA, 510 bp, Homo sapiens
tgagtgcagtggcatgatcacagctcacagcagcctcaaactctcaggctcaagcaatcctcctgcctcagccttccgaacagctgggactgcaggcatgcaccaccacacctggctaatcttattttttgtagaggtaggatctactgtgtttcccagactggtcttgaactcctggactcaagcarttctcccacctcggccccccaaatagttggtactacaggcgtacgtcaccacgcctggctaattttttattttttgtagagatacagtctcactatgttgcccaggctggtcttgaactcctggactcaagcaatcctcctaccttggcctcccaaattgctgttacgggcatgagccaccacacccggctacatagaggccctttataccaaaacttcctgagcagcactattttacaggcagtgttaacataattgtaacatatttagatcttggcatatttttcaatattggctttagttaaattttgtgctccatata

SEQ ID NO: 236676 - DNA, 541 bp, Homo sapiens
ggtatatatccaaaatggtgacagtgacagattctgattttcccattttgattaacagaatttcctataggcatcaataagctataaggtggataagatagttctgttgtaaaagtactgaggactcattatctggactctcaattctcattattcagtttacttagtttcataaaactttaagctaaatctatattctataaagtacatatgacaatattaattatmttgtcacctttctaagattaaaaaattaagtattttttgaaaacttctcagttcctggcttggtttttccttctcataataatttatttatttatttattttattttattttatttttttgagacaaggtctcattttgtcatgcaggctggtgtgcagtggtgcaatctcagctccctgcaacctcgaactcccaggttcaagtgatcttcccacctcagccttccaagtaggtgggactacagacatgtgctgccacgcctggctaatttttacattttttgtagatacggggtttcaccatgttgcccag

SEQ ID NO: 236677 - DNA, 513 bp, Homo sapiens
accagtggtcctgaaccctttagtatatttccacacagttcctttcccttaagaatccccagtctgttctgaatggctaagctttgcctgagaaatcacaacactgtaagggctagtaccgttgcaaattcatgatctacagcctcaactatacccctctgtcatctatcaatcaacctcccacccttcactactctccagcaatcagcactgcactgacctctcacctccaagagatcgatgcttttgcctcctacatcaacagataaaataatgccatcaaacatgaacttgatggcaagtcacatcctattcactgtatacgaatttctaacttagaaaccatttttccctttatcttattsaagaccaattgcttcacttgtgctcttgatccacctcttcgccatgccctaggaaccttggtgcatcaattgtcccatctccctacataatcagcaccttcactctcttcctctttaacagctacttccccttaaaacagggcctttc

SEQ ID NO: 236678 - DNA, 608 bp, Homo sapiens
ggaccacgcttcctgtgtcctccagtgagatgaattcttgttcgaagacccccaccaaactcttgccatactcgggtgccagaaaatctctctcagaatggtggaggggaagtaattggtgtggagttgaagcagagacaggcttaccctgcagttgaggaatctttggaattagggccctcccttgtacgatgccttccaaagacccgggaagacttactagtatctccggttgattatatatttttctaaaatttgtaaaaataagatttttgcatttgttttcataaagtagtcctttaaagtttcgtaagctttagacttwataatatctaggtccgctgctgggatggggccaagggatctaagaactgcattgtactttacatatgattgaagaaaaattacttgtgtacatcagcacttgaatgtgagtctcacgtagaggggtgaatgtctttcctgaatcacaatcctccatggcttaatatagacttgaaaggactttgcccaatgtttataattctgtttctaaatttatggagaacatcttggtactatttttttcctttactgtttaacatacaatactacacaggcagtacaca

SEQ ID NO: 236679 - DNA, 595 bp, Homo sapiens
tactatttttttcctttactgtttaacatacaatactacacaggcagtacacatccactgctctctcctgtaacaggatggttttgcacattacacaggattccctgccaccccctgccccccgccattaactggactgtacctggttaaaatttctccattctgaaaggtcaaggtttctatctcctctcattgcatttgaacagtaccaccaccaccatcactgatgcaaaataaccttttcatcaagacattagacactataaattcttaatttttatttttatgtaaactagctctaaagtctagtggcattatttactaaaattcaacaaatgaatttctgaactgattctccatgagcggcatgctgtcttgtttattaaaggagaagagacaggtagaaggcaggaatggtttaggcttcttctttaaagcgtttgtctgtaagataaatattagaagatcttcagatttcttttctcaatgagcaaaygatacagaacctctatttgcttgctcaggttttattggcaattagaaaagcaaagatcaaacaaaggaaaaaaatcctagagaattagtaattaccaag

SEQ ID NO: 236680 - DNA, 550 bp, Homo sapiens
attacatctatctgtaaagacccctagatattgctggcatacaccttcctcattgcccagggcttctgagacttcacactaccttgtctgtataagcctttggtggtgcttcttctctccacttataaataggatgacaacagcaactgtgactcttgccacatgatataaacttactatgagccttatcaggaatgagaataccagagaccattgtttcatgagatgatgaattccctaaacgtgtaaaaagacaatatacaaacaaatatttaatttttaaaattgtttttcaaaactgcagcaggaatcagcatgtttttatctgacataaaaccaaaacggccttcaacatctctttgtaatagtctcatgtgytcagacactacagacaatcgtcaatagaaaagactgtcaacttgaatgaactcaacctgcatcaatatttttccagagtcagcaccatgcccaaactaagagaaacatgcagttacataaataaatgaatatggatgcatgtgcatatatatgcatttgtatatacacaaaa

SEQ ID NO: 236681 - DNA, 398 bp, Homo sapiens
accacattgcttctgcatttgcctgttgtatgagatttacacttgttttaaagcaacattttgtttcagttgggctggtggccatacccggcactagccrgtcaatagtgagatggctcctcatggaggaggcttggcttgaggctgagggtctttaacccacatatacaagagagttgccactaagggatggaagccaggctaataaccaagtgccacacagagttcctatctgtcccttctcaccatttttggctggcaggttttgagcattttagggcttgggaagatagtaatactaaatctactaaatacattacccatccttacaggctttggccagctgctgagcaaattaacttcacaactgaaagtggccacactggcatttgtggtcc

SEQ ID NO: 236682 - DNA, 462 bp, Homo sapiens
ctgggttcgtgttttcactttttcattcaggaactcaggagctggggccactcccttggcccttcaggttctccacctgagtagtcgggataataaggcagacccggggatggctctggtgagggtagaggagtcactgtacagagagagtagagcgggggtggattttattgttagaagtggacactggtgattgggttgtataagtgggaaatctctcctgagaaaacacacagcctcacctgtacagaaacacacacattcacaccacacgatgcagcctcamacaagacaccaccaatcctcaagcacccaactcagcaccacccaaaagggagcacagctgcttcctcaaaatttggccataatttttccctggggaattcaggttttaaaaaaacacttcccctatacttattcctatcacaatcccaggatcagggtggctcttcacattgaaac

SEQ ID NO: 236683 - DNA, 618 bp, Homo sapiens
gaacatttctatttcagagaaagcaaggcaaccttaccctcacgttgactggcctctctccatctcctctgtccttgtgaactagagactcctcagaggctaggaggacacacagcaacagttagtcatagatgcttttgttcatgagttattcagggagctctgcttaatgtggacaacaggacagtgtgtgtggatgtgtttcattaaaagcacagcttgagctcctgctagaaaatcttccctcgtggaaagacargcaagaacgaggagctaaggagcaagaaatagagtccctggcattttgctgatggcaacttaaggcaatgggaatgagtcagtctacaaatggtactgaagcacatgctatagtttgatgagagtcccactgctcacactgtgaggtttgaaacccagctaaatggttttctaaaccctgtaaaaacaatattagcttgcaggatttatgtcccaagactaattttgcctctgaggatccacagtggctgtcactgtagttattatgtgttttagcattttgcacttgaataaaagcaaagtttaatagacagattggattcaattctaggcaaaacagtctatggtatttattcacta

SEQ ID NO: 236684 - DNA, 441 bp, Homo sapiens
gtttcaggaagatcacggagttcagtgagcactcaacacctctatcagacagactgtgtgggcagtgccttcctggagaggrgaacacagcaggatgactgtgagtgcagggctggtgcagagtgggggcccggattcaaattccactaagccatgtggacctagaaatctcatgtcctccctctgccctcagttctctgcactgtcataatgtaattttagcaatactttttaggccctatttaggccctacttcttagtatcacagtacggggctaaaaaatcactaaatacaggaaaaccttagagaggactggtacttcagtaatgttctctaagtgtttactacatgccaggaggaataagctggacacttagcagtggtggaatatggagggggaacttggatggctccggggcagtggagcatgctttcctgtt

SEQ ID NO: 236685 - DNA, 441 bp, Homo sapiens
gtttcaggaagatcacggagttcagtgagcactcaacacctctatcagacagactgtgtgggcagtgccttcctggagaggagaacacagcaggatgactgtgagtgcagggctggtgcagagtgggggcccggattcaaattccactaagccatgtggacctagaaatctcatgtcctccctctgccctcagttctctgcactgtcataatgtaattttagcaatactttttaggccctatttaggccctacttcttagtatcacagtacrgggctaaaaaatcactaaatacaggaaaaccttagagaggactggtacttcagtaatgttctctaagtgtttactacatgccaggaggaataagctggacacttagcagtggtggaatatggagggggaacttggatggctccggggcagtggagcatgctttcctgtt

SEQ ID NO: 236686 - DNA, 441 bp, Homo sapiens
gtttcaggaagatcacggagttcagtgagcactcaacacctctatcagacagactgtgtgggcagtgccttcctggagaggagaacacagcaggatgactgtgagtgcagggctggtgcagagtgggggcccggattcaaattccactaagccatgtggacctagaaatctcatgtcctccctctgccctcagttctctgcactgtcataatgtaattttagcaatactttttaggccctatttaggccctacttcttagtatcacagtacggggctaaaaaatcactaaatacaggaaaaccttagagaggactggtacttcagtaatgttctctaagtgtttactacatgccaggaggaataagctggacacttagcagtggyggaatatggagggggaacttggatggctccggggcagtggagcatgctttcctgtt

SEQ ID NO: 236687 - DNA, 408 bp, Homo sapiens
gactgggctcccttaattcttaattcccaagtttatgtgcatggagcctccagcgatttgttgtttacatgtaagtcttcccaccgtggttctggctycagtggccagcctccgatcctgttaggctgggactcactgcctctcaaatttgggggataacggtttgccctgttaacctcaagtctctgatggatctaagaaaagttgttaattttcagtttgttcaaggtgttttttgttgttgttgtgaggacaggagtgacagcttccaagctggaaaacagaagtcacatttgggttttgtttcaagatatttttccaatgacagagaatgatgccacacacatttccatagatgtcttttgatgcagatgtgcatgcgtttctgttatcctaagagtgaaatac

SEQ ID NO: 236688 - DNA, 408 bp, Homo sapiens
gactgggctcccttaattcttaattcccaagtttatgtgcatggagcctccagcgatttgttgtttacatgtaagtcttcccaccgtggttctggcttcagtggccagcctccgatcctgttaggctgggactcactgcctctcmaatttgggggataacggtttgccctgttaacctcaagtctctgatggatctaagaaaagttgttaattttcagtttgttcaaggtgttttttgttgttgttgtgaggacaggagtgacagcttccaagctggaaaacagaagtcacatttgggttttgtttcaagatatttttccaatgacagagaatgatgccacacacatttccatagatgtcttttgatgcagatgtgcatgcgtttctgttatcctaagagtgaaatac

SEQ ID NO: 236689 - DNA, 408 bp, Homo sapiens
gactgggctcccttaattcttaattcccaagtttatgtgcatggagcctccagcgatttgttgtttacatgtaagtcttcccaccgtggttctggcttcagtggccagcctccgatcctgttaggctgggactcactgcctctcaaatttgggggataacggtttkccctgttaacctcaagtctctgatggatctaagaaaagttgttaattttcagtttgttcaaggtgttttttgttgttgttgtgaggacaggagtgacagcttccaagctggaaaacagaagtcacatttgggttttgtttcaagatatttttccaatgacagagaatgatgccacacacatttccatagatgtcttttgatgcagatgtgcatgcgtttctgttatcctaagagtgaaatac

SEQ ID NO: 236690 - DNA, 631 bp, Homo sapiens
tgtttccactctgcaacttgtcttgtcactttcttagtggtgtctcttaataaacagaaattcttaatttgaatatagtctaatttatcaatttattcccttaaaactatggctttttgtgatctgtttaagaaatctgtccccattcatggtcataaaaatcggctgggcatggtgsctcacacctgtaatcccagcactttgggaggtcaaggtgggcagatcacctgagatcaggagtttgagaccagctggccaacatggtgaaaccctgtctctactaaaaatacaaacattagccaggtgtggtggcaggtgcctgtaatcccagctactcgggaggctgaggcaggagaatcacttgagcccaggaggtcaaggccgcaatgagcagtcattgtaccactgcattccagcctgggtgacagagcaggatgctctttcaaaaataaacataaaagtaaatctaatgagctctaggatttctaatttgaagatagaagcaataaacaaaatgagaaaccaaaatacattcgttttgattaaagcagaagtcagccataactctgaacctaaaaaggaggtcacctgaagcagctgtgagtaagcagggtaagaaaggaagcggaga

SEQ ID NO: 236691 - DNA, 463 bp, Homo sapiens
atgcatgagctcacattttgaatagaaggatcttggggacggggacactaaaagccccaaatatggtcctgtgtggcataatggttttttggtaaatgctacactgcatacaatggtggtcgcttaagataacagagctgaaaaattcttaccatctagtaacactgtggccatgatgacatcatagcacaacgcattactcatgtgtttgcagtgaggctggtataagcaaacccactacatttgtcagtggcattaaaggttagcacatctaattatgtaccatatgtcatacttgktaatgataataaatgatcatgtgactagtttatgtacagttgctccttgaacagcatggatttgaaatgcacaagttcacttatatgcaaatttccttctgcttctcccacccctgagacaacaggatcaacttctcctcttctcttcctcaggctgctcaaca

SEQ ID NO: 236692 - DNA, 463 bp, Homo sapiens
atgcatgagctcacattttgaatagaaggatcttggggacggggacactaaaagccccaaatatggtcctgtgtggcataatggttttttggtaaatgctacactgcatacaatggtggtcgcttaagataacagagctgaaaaattcttaccatctagtaacactgtggccatgatgacatcatagcacaacgcattactcatgtgtttgcagtgaggctggtataagcaaacccactacatttgtcagtggcattaaaggttagcacatctaattatgtaccatatgtcatacttggtaatgataataaatgaycatgtgactagtttatgtacagttgctccttgaacagcatggatttgaaatgcacaagttcacttatatgcaaatttccttctgcttctcccacccctgagacaacaggatcaacttctcctcttctcttcctcaggctgctcaaca

SEQ ID NO: 236693 - DNA, 441 bp, Homo sapiens
tgcagtgaggctggtataagcaaacccactacatttgtcagtggcattaaaggttagcacatctaattatgtaccatatgtcatacttggtaatgataataaatgatcatgtgactagtttatgtacagttgctccttgaacagcatggatttgaaatgcacaagttcacttatatgcaaatttccttctgyttctcccacccctgagacaacaggatcaacttctcctcttctcttcctcaggctgctcaacatgaatatgcagacgaagacctttatgatgatccactttcacttaatgaatagtaaacatatttcctcctccttatgattttcttaatagaattttcttttctctttctttaagaatacagtatataattaacaaagtatgcattaattgtttatttgatcagcaaagcttgcagttaagaataggct

SEQ ID NO: 236694 - DNA, 441 bp, Homo sapiens
tgcagtgaggctggtataagcaaacccactacatttgtcagtggcattaaaggttagcacatctaattatgtaccatatgtcatacttggtaatgataataaatgatcatgtgactagtttatgtacagttgctccttgaacagcatggatttgaaatgcacaagttcacttatatgcaaatttccttctgcttctcccacccctgagacaacaggatcaacttctcctcttctcttcctcaggctgctcaacatgaatatgcagacgaagacctttatgatgatccactttcacttaatgaatagtaaacatatttyctcctccttatgattttcttaatagaattttcttttctctttctttaagaatacagtatataattaacaaagtatgcattaattgtttatttgatcagcaaagcttgcagttaagaataggct

SEQ ID NO: 236695 - DNA, 441 bp, Homo sapiens
tgcagtgaggctggtataagcaaacccactacatttgtcagtggcattaaaggttagcacatctaattatgtaccatatgtcatacttggtaatgataataaatgatcatgtgactagtttatgtacagttgctccttgaacagcatggatttgaaatgcacaagttcacttatatgcaaatttccttctgcttctcccacccctgagacaacaggatcaacttctcctcttctcttcctcaggctgctcaacatgaatatgcagacgaagacctttatgatgatccactttcacttaatgaatagtaaacatatttcctcctccttatgattttcttaatagaattttcttttctctttctttaagaatacagtatataattaacaaagtatgcattaattgtttatttgatcarcaaagcttgcagttaagaataggct

SEQ ID NO: 236696 - DNA, 580 bp, Homo sapiens
atgcttttattggggttcagctaatggagggggtggcagaagayaggtgagagaagagtgtgtttatcccccacctctgcccctgcagggtcagcacaggcagactgtgtccctttgctgaagatcacagcttctgtctggtgccttcttggcaagctggcactctctctagtcaggtgactgcttggccccttactacttacactcttctgtctggtttctttgtgtctttcctgctgtgctgtaagtagtccctttattagaatccatccacattacccagttatataaagacaaatagttggtcactgatctagttcactccctgagaatcagccttcatcaaagatccctaacagtcagatattctgttggccgctccattcctgctccccattattctagttgtgtcttccttgtctctagtgcaatcacaaagcataagcgcctccactgtcacttgttctttgcaactctaggatcacatcattccccttgaaatcagagaacccacaatctccccaagcccacaaaattcagccgtcacagtacttttcaatcatgccagcagccctcccca

SEQ ID NO: 236697 - DNA, 580 bp, Homo sapiens
atgcttttattggggttcagctaatggagggggtggcagaagacaggtgagagaagagtgtgtttatcccccacctctgcccctgcagggtcagcacaggcagactgtgtccctttgctgaagatcacagcttctgtctggtgccttcttggcaagctggcactctctctagtcaggtgactgcttggccccttactacttacactcttctgtctggtttctttgtgtctttcctgctgtgctgtaagtagtccctttattagaatccatccacattacccagttatataaagacaaatagttggtcactgatctagttcactccctragaatcagccttcatcaaagatccctaacagtcagatattctgttggccgctccattcctgctccccattattctagttgtgtcttccttgtctctagtgcaatcacaaagcataagcgcctccactgtcacttgttctttgcaactctaggatcacatcattccccttgaaatcagagaacccacaatctccccaagcccacaaaattcagccgtcacagtacttttcaatcatgccagcagccctcccca

SEQ ID NO: 236698 - DNA, 580 bp, Homo sapiens
atgcttttattggggttcagctaatggagggggtggcagaagacaggtgagagaagagtgtgtttatcccccacctctgcccctgcagggtcagcacaggcagactgtgtccctttgctgaagatcacagcttctgtctggtgccttcttggcaagctggcactctctctagtcaggtgactgcttggccccttactacttacactcttctgtctggtttctttgtgtctttcctgctgtgctgtaagtagtccctttattagaatccatccacattacccagttatataaagacaaatagttggtcactgatctagttcactccctgagaatcagccttcatcaaagatccctarcagtcagatattctgttggccgctccattcctgctccccattattctagttgtgtcttccttgtctctagtgcaatcacaaagcataagcgcctccactgtcacttgttctttgcaactctaggatcacatcattccccttgaaatcagagaacccacaatctccccaagcccacaaaattcagccgtcacagtacttttcaatcatgccagcagccctcccca

SEQ ID NO: 236699 - DNA, 580 bp, Homo sapiens
atgcttttattggggttcagctaatggagggggtggcagaagacaggtgagagaagagtgtgtttatcccccacctctgcccctgcagggtcagcacaggcagactgtgtccctttgctgaagatcacagcttctgtctggtgccttcttggcaagctggcactctctctagtcaggtgactgcttggccccttactacttacactcttctgtctggtttctttgtgtctttcctgctgtgctgtaagtagtccctttattagaatccatccacattacccagttatataaagacaaatagttggtcactgatctagttcactccctgagaatcagccttcatcaaagatccctaacagtcagatattctgttggccgctccattcctgctccccattattctagttgtgtcttccttgtctctagtgcaatcacaaagcataagcgcctccactgtcacttgttctttgcaactctaggatcacatcattccccttgaaatcagagaacccacaatctccccaagcccacaaaattcagccgtcacagtacttttcaawcatgccagcagccctcccca

SEQ ID NO: 236700 - DNA, 584 bp, Homo sapiens
attatgataaatgtgatgagctaggcctagaaagacaaacactgcatgataccactcatgtgaaatcttaagatgtttatcttaaagaagtagaaagcacaatattggttaccagagtcygggagacagaaggggaatggagaaggattggttatggaaacaaagttatcttaacattaaaagaataaatctgagtgttctcctcagcctggtgactggacttaaccgtattacatttttctaaagagcaaggagaattttgaatgttctctttacacaaaaataatacctgtatgagggaatagagatcctaagtaccctgatttgatcattacccaatttatatgtataaaaatgtacccctaattatggccctttatgttgtaaaaaaattaacagaaataaatacatagtgctaaaaatcacagggaaccacaaaagcaatgaatatctaaaggaatcctgagaaatacaatcaaagtgagaacccacaatccttgatatcaaattaaattgccaagttgtagttatgcagtagatatatggtacttgcataaaaagaaatacctagaactatggacaaa

SEQ ID NO: 236701 - DNA, 584 bp, Homo sapiens
attatgataaatgtgatgagctaggcctagaaagacaaacactgcatgataccactcatgtgaaatcttaagatgtttatcttaaagaagtagaaagcacaatattggttaccagagtctgggagacagaaggggaatggagaaggattggttatggaaacaaagttatcttaacattaaaagaataaatctgagtgttctcctcagcctggtgactggacttaaccgtattacatttttctaaagagcaaggagaattttgaatgttctctttacacaaaaataatacctgtatgagggaatagagatcctaagtaccctgatttgatcattacccaatwtatatgtataaaaatgtacccctaattatggccctttatgttgtaaaaaaattaacagaaataaatacatagtgctaaaaatcacagggaaccacaaaagcaatgaatatctaaaggaatcctgagaaatacaatcaaagtgagaacccacaatccttgatatcaaattaaattgccaagttgtagttatgcagtagatatatggtacttgcataaaaagaaatacctagaactatggacaaa

SEQ ID NO: 236702 - DNA, 516 bp, Homo sapiens
tgttctcctcagcctggtgactggacttaaccgtattacatttttctaaagagcaaggagaattttgaatgttctctttacacaaaaataatacctgtatgagggaatagagatcctaagtaccctgatttgatcattacccaatttatatgtataaaaatgtacccctaattatggccctttatgttgtaaaaaaattaacagaaataaatacatagtgctaaaaatcacagggaaccacaaaagcaatgaatatctaaaggaatcytgagaaatacaatcaaagtgagaacccacaatccttgatatcaaattaaattgccaagttgtagttatgcagtagatatatggtacttgcataaaaagaaatacctagaactatggacaaaaacagggaggacaaaaacaacacaaatatggacacagtcaactgactttgataaagaacaccacaatgtggaaggcagagtctgatcaatgaatagctttgagaaaaatgatatccggatgcaaaag

SEQ ID NO: 236703 - DNA, 516 bp, Homo sapiens
tgttctcctcagcctggtgactggacttaaccgtattacatttttctaaagagcaaggagaattttgaatgttctctttacacaaaaataatacctgtatgagggaatagagatcctaagtaccctgatttgatcattacccaatttatatgtataaaaatgtacccctaattatggccctttatgttgtaaaaaaattaacagaaataaatacatagtgctaaaaatcacagggaaccacaaaagcaatgaatatctaaaggaatcctgagaaatacaatcaaagtgagaacccayaatccttgatatcaaattaaattgccaagttgtagttatgcagtagatatatggtacttgcataaaaagaaatacctagaactatggacaaaaacagggaggacaaaaacaacacaaatatggacacagtcaactgactttgataaagaacaccacaatgtggaaggcagagtctgatcaatgaatagctttgagaaaaatgatatccggatgcaaaag

SEQ ID NO: 236704 - DNA, 516 bp, Homo sapiens
tgttctcctcagcctggtgactggacttaaccgtattacatttttctaaagagcaaggagaattttgaatgttctctttacacaaaaataatacctgtatgagggaatagagatcctaagtaccctgatttgatcattacccaatttatatgtataaaaatgtacccctaattatggccctttatgttgtaaaaaaattaacagaaataaatacatagtgctaaaaatcacagggaaccacaaaagcaatgaatatctaaaggaatcctgagaaatacaatcaaagtgagaacccacaatccttgatatcaaattaaattgccaagttgtagttatgcagtagatatatggtacttgcataaaaagaaatacctagaactatggacaaaaacagggaggacaaaaacaacacaaatatggacacagtcaactgactttgataaagaacaccacaaygtggaaggcagagtctgatcaatgaatagctttgagaaaaatgatatccggatgcaaaag

SEQ ID NO: 236705 - DNA, 453 bp, Homo sapiens
tagtctaggggagacaaagttggatgtatctactgccagccccatggggtcagaactacaggggaaggatggggactgtgggattccagaggaacaacagggagggcttcttggaggaatgcttkttcttgagctgagtttttttttttctctgtagctcagtctgaaatgcagtggcacaatcactgctcactgcagccttgaccttccatgctcaattgatcctcctacttcagggtgggactacaggcacatgccaccacacacagctaatttttgtattttttgtagagatggggttacatcatgttgttcaggctggtctcaaactcctgggttcaagtaatcctcctgtcttggcctctcagagtgctggaattacaggcatgaaccaccttatctgacctgagctgagttctgaagtgtgaataggatttggctaggtgaagaagg

SEQ ID NO: 236706 - DNA, 407 bp, Homo sapiens
ggggagacaaagttggatgtatctactgccagccccatggggtcagaactacaggggaaggatggggactgtgggattccagaggaacaacagggagggcttcttggaggaatgcttgttcttgagctgagtttttttttttctctgyagctcagtctgaaatgcagtggcacaatcactgctcactgcagccttgaccttccatgctcaattgatcctcctacttcagggtgggactacaggcacatgccaccacacacagctaatttttgtattttttgtagagatggggttacatcatgttgttcaggctggtctcaaactcctgggttcaagtaatcctcctgtcttggcctctcagagtgctggaattacaggcatgaaccaccttatctgacctgagctga

SEQ ID NO: 236707 - DNA, 447 bp, Homo sapiens
gacaaagttggatgtatctactgccagccccatggggtcagaactacaggggaaggatggggactgtgggattccagaggaacaacagggagggcttcttggaggaatgcttgttcttgagctgagtttttttttttctctgtagctcagtctgaaatgcagtggcacaatcactgctcactgcagccttgaccttccrtgctcaattgatcctcctacttcagggtgggactacaggcacatgccaccacacacagctaatttttgtattttttgtagagatggggttacatcatgttgttcaggctggtctcaaactcctgggttcaagtaatcctcctgtcttggcctctcagagtgctggaattacaggcatgaaccaccttatctgacctgagctgagttctgaagtgtgaataggatttggctaggtgaagaagggaaaaa

SEQ ID NO: 236708 - DNA, 449 bp, Homo sapiens
gacaaagttggatgtatctactgccagccccatggggtcagaactacaggggaaggatggggactgtgggattccagaggaacaacagggagggcttcttggaggaatgcttgttcttgagctgagtttttttttttctctgtagctcagtctgaaatgcagtggcacaatcactgctcactgcagccttgaccttccaygctcaattgatcctcctacttcagggtgggactacaggcacatgccaccacacacagctaatttttgtattttttgtagagatggggttacatcatgttgttcaggctggtctcaaactcctgggttcaagtaatcctcctgtcttggcctctcagagtgctggaattacaggcatgaaccaccttatctgacctgagctgagttctgaagtgtgaataggatttggctaggtgaagaagggaaaaaag

SEQ ID NO: 236709 - DNA, 434 bp, Homo sapiens
gacaaagttggatgtatctactgccagccccatggggtcagaactacaggggaaggatggggactgtgggattccagaggaacaacagggagggcttcttggaggaatgcttgttcttgagctgagtttttttttttctctgtagctcagtctgaaatgcagtggcacaatcactgctcactgcagccttgaccttccatgctcaattgatcctcctacttcagggtgggactacaggcacatgccaccacacacagctaatttttgtattttttgtagagatggggttacatcakgttgttcaggctggtctcaaactcctgggttcaagtaatcctcctgtcttggcctctcagagtgctggaattacaggcatgaaccaccttatctgacctgagctgagttctgaagtgtgaataggatttggctaggtg

SEQ ID NO: 236710 - DNA, 433 bp, Homo sapiens
gtatctactgccagccccatggggtcagaactacaggggaaggatggggactgtgggattccagaggaacaacagggagggcttcttggaggaatgcttgttcttgagctgagtttttttttttctctgtagctcagtctgaaatgcagtggcacaatcactgctcactgcagccttgaccttccatgctcaattgatcctcctacttcagggtgggactacaggcacatgccaccacacacagctaatttttgtattttttgtagagatggggttacatcatgttgttcaggctggtctcaaactcctgggttcaagtaatcctcctgtcttggcctctcagagtgctggaattrcaggcatgaaccaccttatctgacctgagctgagttctgaagtgtgaataggatttggctaggtgaagaagggaaaa

SEQ ID NO: 236711 - DNA, 510 bp, Homo sapiens
gggaaagtacatctactgggaatktgtaagctgcacaattaccagagcttgcaaaaggctcaaagacaagtgaagcacaaccagtcagagtacaaagacactggtgaacagggggtagaattcagtagtgatcccagaaaggccaagtcttaagtatagggttaaactaatgctaggactgcagctaccaaaatgtggactagggaaccccagtgggtctgtaaagttaaaacaagtttaaataatactaagatttaatttgccttttttcactttaatttattcacaatgatacagtggtgtttatagaagctacatgttgtatcataatattacattgacattgtacaggttgtgcttctgtagtcttgtgttacaaaatgttcctagttttaatttctaaaatgctgaatagtccatagttaaaatcctcatgaacaaaaactatggcgtccccagtaattttaaagagtgttaaggttctaaaaccataaagtttgaaaatatcca

SEQ ID NO: 236712 - DNA, 453 bp, Homo sapiens
tagtctaggggagacaaagttggatgtatctactgccagccccatggggtcagaactacaggggaaggatggggactgtgggattccagaggaacaacagggagggcttcttggaggaatgcttgttcttgagctgagtttttttttttctctgtagctcagtctgaaatgcagtggcacaatcactgctcactgcagccttgaccttccatgctcaattgatcctcctacttcagggtgggactacaggcacatgccaccacacacagctaatttttgtattttttgtagagatggggttacatcatgttgttcaggctggtctcaaactcctgggttcaagtaatcctcctgtcttggcctctcagagtgctggaattacaggcatgaaccacctyatctgacctgagctgagttctgaagtgtgaataggatttggctaggtgaagaagg

SEQ ID NO: 236713 - DNA, 595 bp, Homo sapiens
gggcgtggtggctcatgcctctaaccccagcactttgggaggctgaggcaggctgatcacctgagsttgggagtttgagaccagcctgaccaacatgtagaaacccagtctctactaaaaatatgtaattagccaggtgtggtggtgcatgcctgtagtcccaactacttgggaggctgaggcagcataattgcttgaacctgggaggtggaggttgcagtgagccaaggttgtgccattgaactccagcctgggggacagagcgagactccatctaaaaaaaaaaaaattggaaaagttgttgggaatataatccacacaaaaatatcctcaatcacattagagtggccaacatgccaattcaagaaatttagagtacttttgtgaagtactatacaggacaacaatcaccaagacacagttatcagattctccaaggtcaacatgaaaataaaagccttaacaggagttagaggaaagggtcaggtcactttcgaagggaactctattaggctaacagtagacctatcagcagaaaccttacaatccttaaaatcttaggagcctattttcagcatccttaaagaaaataaat

SEQ ID NO: 236714 - DNA, 510 bp, Homo sapiens
gggaaagtacatctactgggaatttgtaagctgcacaattaccagagcttgcaaaaggctcaaagacaagtgaagcacaaccagtcagagtacaaagacactggtgaacagggggtagaattcagtagtgatcccagaaaggccaagtcttaagtatagggttaaactaatgctaggactgcagctaccaaaatgtggactagggaaccccagtgggtctgtaaagttaaaacaagtttaaataatactaagatttaatttgccttttttcactttaatttattcacaatkatacagtggtgtttatagaagctacatgttgtatcataatattacattgacattgtacaggttgtgcttctgtagtcttgtgttacaaaatgttcctagttttaatttctaaaatgctgaatagtccatagttaaaatcctcatgaacaaaaactatggcgtccccagtaattttaaagagtgttaaggttctaaaaccataaagtttgaaaatatcca

SEQ ID NO: 236715 - DNA, 509 bp, Homo sapiens
ttgaatttttgtattctgattctttctctgcaactttccaaagctgagagtaagtccagagtcctcgaaactgagctccattacacaagagaggctctgaaagaaaaggctttggtttttgaacacgtgcaaagtgagctaaagcaaaaacagagtygaatgaaggacactgaaaaaatgtacaaaagtggatacagtacaatggaaaaatgcatagaaaagcaggaaagattttgtcaactaaacaaaatatgttgcttcaacagcaactggatgatgctcgcaacaaagctgacaatcaagaaaaagcaatacttaatattcaagccagatgtgatgctagagtagaaagccttcaagctgagtgcagaaagcaccgtcttttactagaagaagacagtaaaaggatggtcaatggattgaatcatttgaaagaaaaagaaccccaatatgaaaaagagaaagcagaaagagaagtaagtatcaagaaaaataagtatttttcaaac

SEQ ID NO: 236716 - DNA, 509 bp, Homo sapiens
ttgaatttttgtattctgattctttctctgcaactttccaaagctgagagtaagtccagagtcctcgaaactgagctccattacacaagagaggctctgaaagaaaaggctttggtttttgaacacgtgcaaagtgagctaaagcaaaaacagagttgaatgaaggacactgaaaaaatgtacaaaagtggatacagtacaatggaaaaatgcatagaaaagcaggaaagattttgtcaactaaacaaaatatgttgcttcaacagcaaytggatgatgctcgcaacaaagctgacaatcaagaaaaagcaatacttaatattcaagccagatgtgatgctagagtagaaagccttcaagctgagtgcagaaagcaccgtcttttactagaagaagacagtaaaaggatggtcaatggattgaatcatttgaaagaaaaagaaccccaatatgaaaaagagaaagcagaaagagaagtaagtatcaagaaaaataagtatttttcaaac

SEQ ID NO: 236717 - DNA, 509 bp, Homo sapiens
ttgaatttttgtattctgattctttctctgcaactttccaaagctgagagtaagtccagagtcctcgaaactgagctccattacacaagagaggctctgaaagaaaaggctttggtttttgaacacgtgcaaagtgagctaaagcaaaaacagagttgaatgaaggacactgaaaaaatgtacaaaagtggatacagtacaatggaaaaatgcatagaaaagcaggaaagattttgtcaactaaacaaaatatgttgcttcaacagcaactggatgatgctcgcaacaaagctgacaatcaagaaaaagcaatacttaatattcaagccagatgtgatgctagagtagaaagccttcaagctgagtgcagaaagcaccgtcttttactagaagaagacagtaaaaggwtggtcaatggattgaatcatttgaaagaaaaagaaccccaatatgaaaaagagaaagcagaaagagaagtaagtatcaagaaaaataagtatttttcaaac

SEQ ID NO: 236718 - DNA, 509 bp, Homo sapiens
ttgaatttttgtattctgattctttctctgcaactttccaaagctgagagtaagtccagagtcctcgaaactgagctccattacacaagagaggctctgaaagaaaaggctttggtttttgaacacgtgcaaagtgagctaaagcaaaaacagagttgaatgaaggacactgaaaaaatgtacaaaagtggatacagtacaatggaaaaatgcatagaaaagcaggaaagattttgtcaactaaacaaaatatgttgcttcaacagcaactggatgatgctcgcaacaaagctgacaatcaagaaaaagcaatacttaatattcaagccagatgtgatgctagagtagaaagccttcaagctgagtgcagaaagcaccgtcttttactagaagaagacagtaaaaggatggtcaatggattgaatcatttgaaagaaaaagaaccccaatatgaaaaagagaaagcagaragagaagtaagtatcaagaaaaataagtatttttcaaac

SEQ ID NO: 236719 - DNA, 602 bp, Homo sapiens
cgtccctgggttggaagcatattctgtactgctacatcagcataaaagttcatttttgctagtgtgtaacagtattcttcctgtcattaaaattaagtcagtttccttcactattcaacagttctcttatgaactcaacatttctacctcattcaccattgtatttagaggaaaatttattattattgttattacttttatttttgagacaagaacttgatccgtcactcaggttggastgcagtggtgtgatcacagctcactgcagcctagaactcttgggctcaagtgatcctcctgcttctgcctcccaaagtgccaggattacaggagtaagccaaagcgtccagccaggaaaaattatttgaggattacaggaaagctgacaaaaggctttgtgaaagctttgctttaaataatctgaataataaatacttgaaatggaaataatttatctgacttcttacacaagaaataaacctatgggaaaatgtgttaaattccctgataatttcagacattaagtaccagagtatggtgttccctgccccctcacccttgtttgtactaattaattactccttgaaaaaacctggcaccta

SEQ ID NO: 236720 - DNA, 478 bp, Homo sapiens
tatagaatatgaagaaaaactgtcatctccggtcaatgaagtattttaacttttgagttaatactttttcaaattawtttttttctcttcaaaatgcatcacactacttaactcacttgaaggactggcagagccatcaaccaatgtcatgagggaaaaagccttgtcattttaaggtattaaacagacaatgaaatctgccacaattttggtatttcttgtccatgagaacataataaattaatggagttttttcttttgcttttttctaagcaacaaagttttatgatatcatgaatgaaaaggtccttaattaccttttggtctacatgtcaaggacttctccctcataaaaccagtagtaatcacaacaaaaggaattaaccataaaaagaggtattaaaaatgtatacttgatttttaaatgcaagcatattatttctttacattaaaatttttagatttaaaaagtgtttct

SEQ ID NO: 236721 - DNA, 483 bp, Homo sapiens
ccttgattagtctgaattaaacagccatattccagaatattaaatatagaatatgaagaaaaactgtcatctccggtcaatgaagtattttaacttttgagttaatactttttcaaattaatttttttctcttcaaaatgcatcacactacttaactcacttsaaggactggcagagccatcaaccaatgtcatgagggaaaaagccttgtcattttaaggtattaaacagacaatgaaatctgccacaattttggtatttcttgtccatgagaacataataaattaatggagttttttcttttgcttttttctaagcaacaaagttttatgatatcatgaatgaaaaggtccttaattaccttttggtctacatgtcaaggacttctccctcataaaaccagtagtaatcacaacaaaaggaattaaccataaaaagaggtattaaaaatgtatacttgatttttaaatgcaagcatattat

SEQ ID NO: 236722 - DNA, 478 bp, Homo sapiens
tatagaatatgaagaaaaactgtcatctccggtcaatgaagtattttaacttttgagttaatactttttcaaattaatttttttctcttcaaaatgcatcacactacttaactcacttgaaggactggcasagccatcaaccaatgtcatgagggaaaaagccttgtcattttaaggtattaaacagacaatgaaatctgccacaattttggtatttcttgtccatgagaacataataaattaatggagttttttcttttgcttttttctaagcaacaaagttttatgatatcatgaatgaaaaggtccttaattaccttttggtctacatgtcaaggacttctccctcataaaaccagtagtaatcacaacaaaaggaattaaccataaaaagaggtattaaaaatgtatacttgatttttaaatgcaagcatattatttctttacattaaaatttttagatttaaaaagtgtttct

SEQ ID NO: 236723 - DNA, 483 bp, Homo sapiens
ccttgattagtctgaattaaacagccatattccagaatattaaatatagaatatgaagaaaaactgtcatctccggtcaatgaagtattttaacttttgagttaatactttttcaaattaatttttttctcttcaaaatgcatcacactacttaactcacttgaaggactggcagagccatcaaccaatgtcatgrgggaaaaagccttgtcattttaaggtattaaacagacaatgaaatctgccacaattttggtatttcttgtccatgagaacataataaattaatggagttttttcttttgcttttttctaagcaacaaagttttatgatatcatgaatgaaaaggtccttaattaccttttggtctacatgtcaaggacttctccctcataaaaccagtagtaatcacaacaaaaggaattaaccataaaaagaggtattaaaaatgtatacttgatttttaaatgcaagcatattat

SEQ ID NO: 236724 - DNA, 478 bp, Homo sapiens
tatagaatatgaagaaaaactgtcatctccggtcaatgaagtattttaacttttgagttaatactttttcaaattaatttttttctcttcaaaatgcatcacactacttaactcacttgaaggactggcagagccatcaaccaatgtcatgagggaaaaagccttgtcattttaaggtattaaacagacaatgaaatctgccacaattttggtatttcttstccatgagaacataataaattaatggagttttttcttttgcttttttctaagcaacaaagttttatgatatcatgaatgaaaaggtccttaattaccttttggtctacatgtcaaggacttctccctcataaaaccagtagtaatcacaacaaaaggaattaaccataaaaagaggtattaaaaatgtatacttgatttttaaatgcaagcatattatttctttacattaaaatttttagatttaaaaagtgtttct

SEQ ID NO: 236725 - DNA, 478 bp, Homo sapiens
tatagaatatgaagaaaaactgtcatctccggtcaatgaagtattttaacttttgagttaatactttttcaaattaatttttttctcttcaaaatgcatcacactacttaactcacttgaaggactggcagagccatcaaccaatgtcatgagggaaaaagccttgtcattttaaggtattaaacagacaatgaaatctgccacaattttggtatttcttgtccatragaacataataaattaatggagttttttcttttgcttttttctaagcaacaaagttttatgatatcatgaatgaaaaggtccttaattaccttttggtctacatgtcaaggacttctccctcataaaaccagtagtaatcacaacaaaaggaattaaccataaaaagaggtattaaaaatgtatacttgatttttaaatgcaagcatattatttctttacattaaaatttttagatttaaaaagtgtttct

SEQ ID NO: 236726 - DNA, 484 bp, Homo sapiens
tccttgattagtctgaattaaacagccatattccagaatattaaatatagaatatgaagaaaaactgtcatctccggtcaatgaagtattttaacttttgagttaatactttttcaaattaatttttttctcttcaaaatgcatcacactacttaactcacttgaaggactggcagagccatcaaccaatgtcatgagggaaaaagccttgtcattttaaggtattaaacagacaatgaaatctgccacaattttggtatttcttgtccatgagaacataataaattaatggagttttttcttttgcttttttctaagcaacaaagttttatgatatcatgaatgaaaagrtccttaattaccttttggtctacatgtcaaggacttctccctcataaaaccagtagtaatcacaacaaaaggaattaaccataaaaagaggtattaaaaatgtatacttgatttttaaatgcaagcatattat

SEQ ID NO: 236727 - DNA, 483 bp, Homo sapiens
ccttgattagtctgaattaaacagccatattccagaatattaaatatagaatatgaagaaaaactgtcatctccggtcaatgaagtattttaacttttgagttaatactttttcaaattaatttttttctcttcaaaatgcatcacactacttaactcacttgaaggactggcagagccatcaaccaatgtcatgagggaaaaagccttgtcattttaaggtattaaacagacaatgaaatctgccacaattttggtatttcttgtccatgagaacataataaattaatggagttttttcttttgcttttttctaagcaacaaagttttatgatatcatgaatgaaaaggtccttaattacmttttggtctacatgtcaaggacttctccctcataaaaccagtagtaatcacaacaaaaggaattaaccataaaaagaggtattaaaaatgtatacttgatttttaaatgcaagcatattat

SEQ ID NO: 236728 - DNA, 598 bp, Homo sapiens
cttgtcacttccaccactagcagcacactcgtggccaccaccatctctcacctaacctgctacaagagtctactgctggttatgcttctctcaccctgcatctactcaagcctttccccacagcagccagaggaacttttcaaaagtacaaatgtgatcaagcaagtcactattctatttcaaaccttcaattgcttctcagagcacttaaaatacaaacctttcccagtgcctttctccaactcatcttgtggcacttgtctccccgctgctgtgctcccgctattctggcttccttgctgtccttcaaacatgccaagctctgtatcaatcagagcccagctgactcagaacacttcactataccattccggcccttcaataaatgtctggcattttctttctttctttctttttttgagatggagtctcactctgtcacccaggctagagtgtggtggtgtgatctcggctcactgcaacctytgcctcccaggttcaagcaattttcctgcctcaagcctcctgagtagctgggattacaggcatgcaccaccacgcccggctaatttttgtatttttagtagagaaaggttgt

SEQ ID NO: 236729 - DNA, 544 bp, Homo sapiens
aagaaacactgactctttccttcaaagaaggaaacaacaaaccttgtttgacaaccctggtcaaacaagacaaggrccaagtggccagtggtaaggaaagttggtcaactaatgaatgacattttagattaaaagtgaattttatttaacccaattattcttatcctatgcacacaaatttgaatttaagttagcttgatgtagatggtcaccccattccaaagcatgggtccaaataccctaaggttccaggaggagccagctttcttcagaaggtggcaagtgcattgcaaagtactgaggaaaactttctttaaagtatcttttttcatcattccatattttgctccttataattgcaactgctctccttatacatgtctcttttgaaacttctcacttgtctaaggtgctattgttcctcctcatcttttttttttttttttaatagcatagtctctctccctccttgccatgctgaaaaggcttctgacttgctgttcttgccaggaaacatttctgcagggcgtattggagtggaact

SEQ ID NO: 236730 - DNA, 544 bp, Homo sapiens
aagaaacactgactctttccttcaaagaaggaaacaacaaaccttgtttgacaaccctggtcaaacaagacaaggaccaagtggccagtggtaaggaaagttggtcaactaatgaatgacattttagattaaaagtgaattttatttaacccaattattcttatcctatgcacacaaatttgaatttaagttagcttgatgtagatggtcaccccattccaaagcatgggtccaaataccctaaggttccaggaggagccagctttcttcagaaggtggcaagtgcattgcaaagtactgaggaaaactttctttaaagtrtcttttttcatcattccatattttgctccttataattgcaactgctctccttatacatgtctcttttgaaacttctcacttgtctaaggtgctattgttcctcctcatcttttttttttttttttaatagcatagtctctctccctccttgccatgctgaaaaggcttctgacttgctgttcttgccaggaaacatttctgcagggcgtattggagtggaact

SEQ ID NO: 236731 - DNA, 544 bp, Homo sapiens
aagaaacactgactctttccttcaaagaaggaaacaacaaaccttgtttgacaaccctggtcaaacaagacaaggaccaagtggccagtggtaaggaaagttggtcaactaatgaatgacattttagattaaaagtgaattttatttaacccaattattcttatcctatgcacacaaatttgaatttaagttagcttgatgtagatggtcaccccattccaaagcatgggtccaaataccctaaggttccaggaggagccagctttcttcagaaggtggcaagtgcattgcaaagtactgaggaaaactttctttaaagtatcttttttcatcattccatattttgctccttataattgcaactgctctccttatacatgtctcttttgaaacttctcacttgtctaaggtgctattgttcctcctcatcttttttttttttttttaatagcwtagtctctctccctccttgccatgctgaaaaggcttctgacttgctgttcttgccaggaaacatttctgcagggcgtattggagtggaact

SEQ ID NO: 236732 - DNA, 544 bp, Homo sapiens
aagaaacactgactctttccttcaaagaaggaaacaacaaaccttgtttgacaaccctggtcaaacaagacaaggaccaagtggccagtggtaaggaaagttggtcaactaatgaatgacattttagattaaaagtgaattttatttaacccaattattcttatcctatgcacacaaatttgaatttaagttagcttgatgtagatggtcaccccattccaaagcatgggtccaaataccctaaggttccaggaggagccagctttcttcagaaggtggcaagtgcattgcaaagtactgaggaaaactttctttaaagtatcttttttcatcattccatattttgctccttataattgcaactgctctccttatacatgtctcttttgaaacttctcacttgtctaaggtgctattgttcctcctcatcttttttttttttttttaatagcayagtctctctccctccttgccatgctgaaaaggcttctgacttgctgttcttgccaggaaacatttctgcagggcgtattggagtggaact

SEQ ID NO: 236733 - DNA, 513 bp, Homo sapiens
actcctgcctctcgtcctctctgtggctctgctttctattattttactcataagcttgttttgtctccttgctgagaattgtcaaacatgaaatgtaatttcaggctatagtgaagaaagatgacgtaggcagaagaaattggcaatcatttggcctgtacatgttgcttttggttttttttctggacttaggatrtagaccacaccttgacagttctggcctttgagtctttcacaactgtgattataatacattagctcttctagaagttagaagtgactttggattaagtctttcataaggtggctaaatgaatttatatggctcatcacaattcacttgattggttaagcaggaagtttacagagatttttttctttgctgtaaatgtttttctaaattgaaaaacttctattactgtcttctggagtactagaaataagtgcaagtgattgtttttggcaggaggccacataaacatttctgcttctctgtgccttatgggtagcatt

SEQ ID NO: 236734 - DNA, 513 bp, Homo sapiens
actcctgcctctcgtcctctctgtggctctgctttctattattttactcataagcttgttttgtctccttgctgagaattgtcaaacatgaaatgtaatttcaggctatagtgaagaaagatgacgtaggcagaagaaattggcaatcatttggcctgtacatgttgcttttggttttttttctggacttaggatgtagaccacaccttgacakttctggcctttgagtctttcacaactgtgattataatacattagctcttctagaagttagaagtgactttggattaagtctttcataaggtggctaaatgaatttatatggctcatcacaattcacttgattggttaagcaggaagtttacagagatttttttctttgctgtaaatgtttttctaaattgaaaaacttctattactgtcttctggagtactagaaataagtgcaagtgattgtttttggcaggaggccacataaacatttctgcttctctgtgccttatgggtagcatt

SEQ ID NO: 236735 - DNA, 513 bp, Homo sapiens
actcctgcctctcgtcctctctgtggctctgctttctattattttactcataagcttgttttgtctccttgctgagaattgtcaaacatgaaatgtaatttcaggctatagtgaagaaagatgacgtaggcagaagaaattggcaatcatttggcctgtacatgttgcttttggttttttttctggacttaggatgtagaccacaccttgacagttctggcctttgagtctttcacaactgtgattataatacattagctcttctagaagttagaagtgactttggattaagtctttcataaggtggctaaatgaatttatatggctcatcacaattcactwgattggttaagcaggaagtttacagagatttttttctttgctgtaaatgtttttctaaattgaaaaacttctattactgtcttctggagtactagaaataagtgcaagtgattgtttttggcaggaggccacataaacatttctgcttctctgtgccttatgggtagcatt

SEQ ID NO: 236736 - DNA, 567 bp, Homo sapiens
cagtttctaatattttttaaaggcctatgtttacaacaaatttgggagatacctatatgcactactaactagtgttcttttgtggtgctttagaaattctggcttacttgtatttttgctggccttctaatgatttcactcatcaatcagaagataytagtgtccacctccctgcttcctctccggtgatcttgtctattcttggccattttagagttgacttagcagccttcacaaaactgattggaatttccactgggattaaattgataggtcatttttgggagacctttgcaatattgaactttccaatccatgaactttacttatctgcccatttatcatgtttgtttttggtagattacaaaattatatgatcactccaaaaattaccttgccctttatagtaaaaccttccattgtaaactggcaatcactgatctgtgttcctctagcattgcttttttttcagaattttatacaaatggaatcgttcaggatgtagccttttgagtctggctactttcatatactgtatcaacagttattcctttttattgccaaata

SEQ ID NO: 236737 - DNA, 567 bp, Homo sapiens
cagtttctaatattttttaaaggcctatgtttacaacaaatttgggagatacctatatgcactactaactagtgttcttttgtggtgctttagaaattctggcttacttgtatttttgctggccttctaatgatttcactcatcaatcagaagatactwgtgtccacctccctgcttcctctccggtgatcttgtctattcttggccattttagagttgacttagcagccttcacaaaactgattggaatttccactgggattaaattgataggtcatttttgggagacctttgcaatattgaactttccaatccatgaactttacttatctgcccatttatcatgtttgtttttggtagattacaaaattatatgatcactccaaaaattaccttgccctttatagtaaaaccttccattgtaaactggcaatcactgatctgtgttcctctagcattgcttttttttcagaattttatacaaatggaatcgttcaggatgtagccttttgagtctggctactttcatatactgtatcaacagttattcctttttattgccaaata

SEQ ID NO: 236738 - DNA, 266 bp, Homo sapiens
cttcagtttagaacaatatatacttgcttayttaaaaaaggagataatagagaaaaggtattgagaaaagtaggagaggagaaaatcactcatattctcaccattcagtgattcagcccagtatcatcaatgttttgtttggttgtttttgtaggtgtaggatttttttttttttaaacataattttcctgcatatgcagttttgcatttttaacccaaacttaatgttctttttaatgttcttgtacttacaaagatttatcctg

SEQ ID NO: 236739 - DNA, 266 bp, Homo sapiens
cttcagtttagaacaatatatacttgcttacttaaaaaaggagataatagagaaaaggtattgagaaaartaggagaggagaaaatcactcatattctcaccattcagtgattcagcccagtatcatcaatgttttgtttggttgtttttgtaggtgtaggatttttttttttttaaacataattttcctgcatatgcagttttgcatttttaacccaaacttaatgttctttttaatgttcttgtacttacaaagatttatcctg

SEQ ID NO: 236740 - DNA, 528 bp, Homo sapiens
tagatctctatatatactccattataatcttacaggatcactgttgcacatgtgtttcctcattgactgaaatgttattcagtgcatgactgtacatatagtaaaaaygttatgcaccatattttaacatactgatattactaatgagttgtcctcatggtgactttaaatatcataattaatgccatcaaccagaatatatcaaataaattcagataccacttgttctgtttatttccttcccctgccaattttttatttttcctgattctgctgaagccaagatggggttctgtgtaagattttgtttgtgaggaaaggttctgcatgaattaaagttttgcaagccatgggcatttcattgtatgggccgttttgaggtctgtcatcttgcagattagattagcttacactgaggcacagtcacctgctgggctgggcagagagctgcactccactagtatttgagctgtcccggctgttcaccagctggatccacttcagataggcatagccagggcagccgcc

SEQ ID NO: 236741 - DNA, 528 bp, Homo sapiens
tagatctctatatatactccattataatcttacaggatcactgttgcacatgtgtttcctcattgactgaaatgttattcagtgcatgactgtacatatagtaaaaacgttatgcaccatattttaacatactgatattactaatgagttgtcctcatggtgactttaaatatcataattaatgccatcaaccagaatatatcaaataaattcagataccacttgttctgtttatttccttcccctgccaattttttatttttcctgattctgctgaagccaagatggggttctgtgtaagattttgtttgtgaggaaaggttctgcatgaattaaagttttgcaagccatgggcatttcattgtatgggcygttttgaggtctgtcatcttgcagattagattagcttacactgaggcacagtcacctgctgggctgggcagagagctgcactccactagtatttgagctgtcccggctgttcaccagctggatccacttcagataggcatagccagggcagccgcc

SEQ ID NO: 236742 - DNA, 528 bp, Homo sapiens
tagatctctatatatactccattataatcttacaggatcactgttgcacatgtgtttcctcattgactgaaatgttattcagtgcatgactgtacatatagtaaaaacgttatgcaccatattttaacatactgatattactaatgagttgtcctcatggtgactttaaatatcataattaatgccatcaaccagaatatatcaaataaattcagataccacttgttctgtttatttccttcccctgccaattttttatttttcctgattctgctgaagccaagatggggttctgtgtaagattttgtttgtgaggaaaggttctgcatgaattaaagttttgcaagccatgggcatttcattgtatgggccgttttgaggtctgycatcttgcagattagattagcttacactgaggcacagtcacctgctgggctgggcagagagctgcactccactagtatttgagctgtcccggctgttcaccagctggatccacttcagataggcatagccagggcagccgcc

SEQ ID NO: 236743 - DNA, 363 bp, Homo sapiens
gtacacattttggggctttgtcccagaagtcttcaattggaggctcccgggatgggacctgggaagctggatttctggcacgcttcccaggtgattcttctgctatctacattttttttttcaagcaaagcttctagggcagaagcaattctctggacatcactttaataagtcatctaatggatgtgaaatcttttaccataggggttggtagggatagggrgcactttatctgctctgtagggcatttagcagcttctggatttttcagtattaaaaaatctatccaaggggctttattttatatttatcctttcccttcctggaaagttttgagatcaacttcaaaaatttgggccaaat

SEQ ID NO: 236744 - DNA, 363 bp, Homo sapiens
gtacacattttggggctttgtcccagaagtcttcaattggaggctcccgggatgggacctgggaagctggatttctggcacgcttcccaggtgattcttctgctatctacattttttttttcaagcaaagcttctagggcagaagcaattctctggacatcactttaataagtcatctaatggatgtgaaatcttttaccataggggttggtagggatagggggcactttatctgctctgtagggcatttagcagcttctggatttttcagtattaaaaaatctatccaaggggctttattttatatttatcctttcccttcctggaaagttttragatcaacttcaaaaatttgggccaaat

SEQ ID NO: 236745 - DNA, 407 bp, Homo sapiens
gggctggggctggggctctgggggttccttgaactgtgggagggaaggaacaataatgaggacatgcgggacctttgcatttgtggcagcattggctgccttttgtttttgtaaattctartgaaagagcccatccatcagatagactctgatagagatgctcagtgtgcgaaacacccagtgggtcctcagacataggggtctggggctcagagaccgagcctgagagtgatcagggccctggaagagctcatggggtcaaaatgggaaagggcctgggagaacagcagcagtaaggggtgaccagagaagcaggtgagagagtggaacagagtgggcaggccagcaagaagagcaggagagaagggatcatagagcaggctcagaggcctcaacctgcttgagga

SEQ ID NO: 236746 - DNA, 407 bp, Homo sapiens
gggctggggctggggctctgggggttccttgaactgtgggagggaaggaacaataatgaggacatgcgggacctttgcatttgtggcagcattggctgccttttgtttttgtaaattctaatgaaagagcccatccatcagatagactctgatagagatgctcagtgtgcgaaacacccagtgggtcctcagacataggggtctggggctcagagaccgagcctgagagtgatcagggccctggaagagcycatggggtcaaaatgggaaagggcctgggagaacagcagcagtaaggggtgaccagagaagcaggtgagagagtggaacagagtgggcaggccagcaagaagagcaggagagaagggatcatagagcaggctcagaggcctcaacctgcttgagga

SEQ ID NO: 236747 - DNA, 407 bp, Homo sapiens
gggctggggctggggctctgggggttccttgaactgtgggagggaaggaacaataatgaggacatgcgggacctttgcatttgtggcagcattggctgccttttgtttttgtaaattctaatgaaagagcccatccatcagatagactctgatagagatgctcagtgtgcgaaacacccagtgggtcctcagacataggggtctggggctcagagaccgagcctgagagtgatcagggccctggaagagctcatggggtmaaaatgggaaagggcctgggagaacagcagcagtaaggggtgaccagagaagcaggtgagagagtggaacagagtgggcaggccagcaagaagagcaggagagaagggatcatagagcaggctcagaggcctcaacctgcttgagga

SEQ ID NO: 236748 - DNA, 411 bp, Homo sapiens
tattagttctgtcctagttttcacttaatccagagagtttaaaattgtcrgctgccttttctcaggcctggaaattcttgtaaatagtgtttagtgggcagtgaggcaccaggtctgtagttgcctttgcctcagctgctgtaataaaatagcatttcttcttgtagccccacattctaactatgtgggtttccaggcttgctcaagcaacagagcaccaccaaacagtagccctttcaataaatgagccaggacttgcataagcgtccactgggatgacagtaggggatgagagtgaggtcctgcaagtcattctcctgcttaagacaagtgaaagaattttcttccttgatgctgcagttgcccttttaatcccttattttgaattgataacagtggggatgagtcttt

SEQ ID NO: 236749 - DNA, 578 bp, Homo sapiens
tcaaatgcattgttatgtgtatgtgtgtgttttctcttggtaattgggtgtgcctcttaaaatctgggatttgatttaattaattggtttaaattattgcatgtatttaatgtgggtggtacccaaaaattggagccaaattagttactttgtgttctttaatacttacagaccttctgaactcaatatagataattatacaaaatactacgtgcataattaaaacatattaggctatctgtgatgtttayaaaaacaaagagttatgtggaatagtaaaattaatcatgatcatgatgaccagtttttgaaaacctactatgtgttaggtgaatctatatgcatcatctcatttactttttaatatttaaagaattctacaattaaaggtggctctctacctgtcttacagaagaagaggctgaggcatgtcgagtttaaataatttgattgagtgattcagatagttaagcgagcagcagaggctagatgagacagggaagggagtggaatccttatcccaaacttttgattggccaaatgtttctagaaagagagcaaaggagccccagggctga

SEQ ID NO: 236750 - DNA, 578 bp, Homo sapiens
tcaaatgcattgttatgtgtatgtgtgtgttttctcttggtaattgggtgtgcctcttaaaatctgggatttgatttaattaattggtttaaattattgcatgtatttaatgtgggtggtacccaaaaattggagccaaattagttactttgtgttctttaatacttacagaccttctgaactcaatatagataattatacaaaatactacgtgcataattaaaacatattaggctatctgtgatgtttataaaaacaaagagttatgtggaatagtaaaattaatcatgatcatgatgaccagtttttgaaaacctactatgtgttaggtgaatctataygcatcatctcatttactttttaatatttaaagaattctacaattaaaggtggctctctacctgtcttacagaagaagaggctgaggcatgtcgagtttaaataatttgattgagtgattcagatagttaagcgagcagcagaggctagatgagacagggaagggagtggaatccttatcccaaacttttgattggccaaatgtttctagaaagagagcaaaggagccccagggctga

SEQ ID NO: 236751 - DNA, 578 bp, Homo sapiens
tcaaatgcattgttatgtgtatgtgtgtgttttctcttggtaattgggtgtgcctcttaaaatctgggatttgatttaattaattggtttaaattattgcatgtatttaatgtgggtggtacccaaaaattggagccaaattagttactttgtgttctttaatacttacagaccttctgaactcaatatagataattatacaaaatactacgtgcataattaaaacatattaggctatctgtgatgtttataaaaacaaagagttatgtggaatagtaaaattaatcatgatcatgatgaccagtttttgaaaacctactatgtgttaggtgaatctatatgcatcatctcatttactttttaatatttaaagaattctacaattaaaggtggctctctacctgtcttacagaagaagaggctgaggcatgtygagtttaaataatttgattgagtgattcagatagttaagcgagcagcagaggctagatgagacagggaagggagtggaatccttatcccaaacttttgattggccaaatgtttctagaaagagagcaaaggagccccagggctga

SEQ ID NO: 236752 - DNA, 578 bp, Homo sapiens
tcaaatgcattgttatgtgtatgtgtgtgttttctcttggtaattgggtgtgcctcttaaaatctgggatttgatttaattaattggtttaaattattgcatgtatttaatgtgggtggtacccaaaaattggagccaaattagttactttgtgttctttaatacttacagaccttctgaactcaatatagataattatacaaaatactacgtgcataattaaaacatattaggctatctgtgatgtttataaaaacaaagagttatgtggaatagtaaaattaatcatgatcatgatgaccagtttttgaaaacctactatgtgttaggtgaatctatatgcatcatctcatttactttttaatatttaaagaattctacaattaaaggtggctctctacctgtcttacagaagaagaggctgaggcatgtcgagtttaaataatttgattgagtgattcagatagttaagygagcagcagaggctagatgagacagggaagggagtggaatccttatcccaaacttttgattggccaaatgtttctagaaagagagcaaaggagccccagggctga

SEQ ID NO: 236753 - DNA, 177 bp, Homo sapiens
tggtatcaggttatcccctgagttttttcttactcaccatatgtctggtggttctcacagccaggggcactgaggrgctctgccctgggatctggaggccagcactgttcacctgatctccaccgctgagatacctctggctacagccataatcaggtggcccaaaggactgaacaa

SEQ ID NO: 236754 - DNA, 177 bp, Homo sapiens
tggtatcaggttatcccctgagttttttcttactcaccatatgtctggtggttctcacagccaggggcactgaggagctctgccctgggatctggaggccagcactgttcacctgatctccaccrctgagatacctctggctacagccataatcaggtggcccaaaggactgaacaa

SEQ ID NO: 236755 - DNA, 579 bp, Homo sapiens
atcttgtgcctcttttaactcctgattcttccagcttctgccacaaggtggctctaagacctggggataccagagctcagaaccagcgctgtcctctcttcttttgctctccctgcataccttgcccctcaaaacatagattcttagccctgctctggtgtcktccatagaagtgtcccctgctacccctgttttaaagaatattgtgttaaatattcgtattccatcagaatcaaataggaacccagggactgttggctcactcatgctggtccatttaccatcagccttccactgctgtgatatcatttatcacagcaagcttctctgtggtctgtgccccagactcgtccctgctgatcctgcccccatatcagtattcatcagaatctctggttggatggcacagttgacttgtggatctgttatttgaccatgccctgtgtgtgcttcctgttgcgtatgcacatccccaacagaatcttcaaggaatgccatgactgtcatgttgccattgatctagcttagtctgatccccattgatcacatagtgtgacccctcaaggggtgcttaggcaa

SEQ ID NO: 236756 - DNA, 579 bp, Homo sapiens
atcttgtgcctcttttaactcctgattcttccagcttctgccacaaggtggctctaagacctggggataccagagctcagaaccagcgctgtcctctcttcttttgctctccctgcataccttgcccctcaaaacatagattcttagccctgctctggtgtcttccatagaagtgtcccctgctacccctgttttaaagaatattgtgttaaatattcgtattccatcagaatcaaataggaacccagggactgttgrctcactcatgctggtccatttaccatcagccttccactgctgtgatatcatttatcacagcaagcttctctgtggtctgtgccccagactcgtccctgctgatcctgcccccatatcagtattcatcagaatctctggttggatggcacagttgacttgtggatctgttatttgaccatgccctgtgtgtgcttcctgttgcgtatgcacatccccaacagaatcttcaaggaatgccatgactgtcatgttgccattgatctagcttagtctgatccccattgatcacatagtgtgacccctcaaggggtgcttaggcaa

SEQ ID NO: 236757 - DNA, 579 bp, Homo sapiens
atcttgtgcctcttttaactcctgattcttccagcttctgccacaaggtggctctaagacctggggataccagagctcagaaccagcgctgtcctctcttcttttgctctccctgcataccttgcccctcaaaacatagattcttagccctgctctggtgtcttccatagaagtgtcccctgctacccctgttttaaagaatattgtgttaaatattcgtattccatcagaatcaaataggaacccagggactgttggctcactcatgctggtccatttaccatcagccttccactgctgtgatatcatttatcacagcaagcttctctgtggtctgtgccccagactcgtccctgctgatcctgcccccatatcagtattcatcagaatctctggttggatggcacagttgacttgtggatctgttatttgaccatgccctgtgtgtgcttcctgttgcgtatgcacatccccaacagaatcttcaaggaatgccatsactgtcatgttgccattgatctagcttagtctgatccccattgatcacatagtgtgacccctcaaggggtgcttaggcaa

SEQ ID NO: 236758 - DNA, 579 bp, Homo sapiens
atcttgtgcctcttttaactcctgattcttccagcttctgccacaaggtggctctaagacctggggataccagagctcagaaccagcgctgtcctctcttcttttgctctccctgcataccttgcccctcaaaacatagattcttagccctgctctggtgtcttccatagaagtgtcccctgctacccctgttttaaagaatattgtgttaaatattcgtattccatcagaatcaaataggaacccagggactgttggctcactcatgctggtccatttaccatcagccttccactgctgtgatatcatttatcacagcaagcttctctgtggtctgtgccccagactcgtccctgctgatcctgcccccatatcagtattcatcagaatctctggttggatggcacagttgacttgtggatctgttatttgaccatgccctgtgtgtgcttcctgttgcgtatgcacatccccaacagaatcttcaaggaatgccatgactgtcatgttgccattgatctagcttagtctgatccycattgatcacatagtgtgacccctcaaggggtgcttaggcaa

SEQ ID NO: 236759 - DNA, 516 bp, Homo sapiens
gaattcttgttctcagaccacgtgactgaatagaattttagtcacaggattccagtttaacatatgcagttactatagcaattgaggtttccttagtaacagttgcaaaaataatccagccccaattaataatacattttaaagctctttctactccatgctgaacaacccagtttttttggccaagaaccagataattcaggtggtgtcatttgcactgatatagatatcatttgcatgcggtgaattgggttggaaaggaatgaaaagggagccggttgtttcaagtattataggaatccaatctgaaaagtcractggcaagcgaatgcaaatctagcttccagagcttgggagcttaatggtaaaccctgtcctggattcctagtgtgccctagaggactttctgcatttgaagaagggagaaggcagaagattggacttgctaacaaaaaagatgaacccgggagggtggggccgtggcacacaggatttctctctaagtggtgcctggtg

SEQ ID NO: 236760 - DNA, 557 bp, Homo sapiens
cctgccatccagggccctgccagggctgcgtgaactttagtcatgygatgacaggccgagtcaccgtgccaagtcactgtgcgcctccttgctgctgtgacgtcagcttccccatcctcccagccaggctggatctctgtgagaggcctgcctgtcctgcaccctgtgcggatgcctcccactgtccaccagggctgctgggcaccccctggctggtctcttggactaggtaagctcatgggtcctccggccgctcctgctctttccctgcctctgctcctcctcggaggtggccacccccagatcccagtcccaatttggaggccccctgaggagtgctgcagggggccgcaggcgtggctctgagccactctggagagtgggggtgcccagccagttctgtggctgggactttcccaggcagacaagtctgtctcttcctccccagcaggtgcagcccagaactgtcttctgaggaagaggtgctctcctgggcccccactgtccccaggcctcaggtaagcccatcagggtcacaaggaagggggtctgggttt

SEQ ID NO: 236761 - DNA, 557 bp, Homo sapiens
cctgccatccagggccctgccagggctgcgtgaactttagtcatgcgrtgacaggccgagtcaccgtgccaagtcactgtgcgcctccttgctgctgtgacgtcagcttccccatcctcccagccaggctggatctctgtgagaggcctgcctgtcctgcaccctgtgcggatgcctcccactgtccaccagggctgctgggcaccccctggctggtctcttggactaggtaagctcatgggtcctccggccgctcctgctctttccctgcctctgctcctcctcggaggtggccacccccagatcccagtcccaatttggaggccccctgaggagtgctgcagggggccgcaggcgtggctctgagccactctggagagtgggggtgcccagccagttctgtggctgggactttcccaggcagacaagtctgtctcttcctccccagcaggtgcagcccagaactgtcttctgaggaagaggtgctctcctgggcccccactgtccccaggcctcaggtaagcccatcagggtcacaaggaagggggtctgggttt

SEQ ID NO: 236762 - DNA, 557 bp, Homo sapiens
cctgccatccagggccctgccagggctgcgtgaactttagtcatgcgatgacaggccgagtcaccgtgccaagtcactgtgcgcctccttgctgctgtgacgtcagcttccccatcctcccagccaggctggatctctgtgagaggcctgcctgtcctgcaccctgtgcggatgcctcccactgtccaccagggctgctgggcaccccctggctggtctcttggactaggtaagctcatgggtcctccggccgctcctgctctttccctgcctctgctcctcctcggaggtggccaccccyagatcccagtcccaatttggaggccccctgaggagtgctgcagggggccgcaggcgtggctctgagccactctggagagtgggggtgcccagccagttctgtggctgggactttcccaggcagacaagtctgtctcttcctccccagcaggtgcagcccagaactgtcttctgaggaagaggtgctctcctgggcccccactgtccccaggcctcaggtaagcccatcagggtcacaaggaagggggtctgggttt

SEQ ID NO: 236763 - DNA, 553 bp, Homo sapiens
gataaagaggaaactgtctgggcaaggtggtccacacctgtaatcccagcactttggggggttgaggcgggcagaccacccgaggtcaggagttygagactagcctggccaacatggtgcactctgtccctactaaaaatataaaaagttagcggggcatggtggtgtgcgcctgtaatcccagctactcaggggctgaggcaggagaatcgcttgaacccaggaggcagaggttgcagtgagctaagatcatgccactgcactccagcctgggcaactgagtgaaactctgtctcagaaaaaaaaaaaaagaaagaaaagaaaaagaagaaactgtaatcccagcactttgggaggttgaggcgataggattgctttagaccatgagttcgagaccagcctgggcaacatagaaagaccctatctctacaaaaaagacaaaaaattgcccagtgtggtggttcttacctgtagtcccagctactcaggagactgaagtgggagcattgcttgagcccaggaggtcaaagctgcattgagccaagactgtgcc

SEQ ID NO: 236764 - DNA, 594 bp, Homo sapiens
tctgtaactgagtcatccctgattcaatcaaacacacatcatcctgggtataagtcttgggtgggtctaaaattacaaaatcccaagaatacaaatttaaactttcattttaaatttgactgattactgttccaaaatacccatgtcaagggaatgtgactgtagttctagaaaacaattatgtatctatgaaatgcatgaataattaacttcatgatacccaataaaaactaggaacaataggtcaaacttccttggattatrggcagaaatgttacatgtttttaaaaaatggtcttcctgagctgggtgcgggggctcatgcctgtaatcccagcactctgggaggccgaggtggcaggcagatcacgaggtcaggagatcgagaccatcctggctaacacagtgaaactctgtctcttctaaaaatacaaaaaattagccgggcgtggtggcgggcacctgtaatcccagctatgcgggaggctgaggcaggagaattgcttgaacccgggaggcggaggttgcagtgagccaagatcgtgccactgcactccagcctgggcgacagggcgagactccgtctcaaaaaag

SEQ ID NO: 236765 - DNA, 594 bp, Homo sapiens
tctgtaactgagtcatccctgattcaatcaaacacacatcatcctgggtataagtcttgggtgggtctaaaattacaaaatcccaagaatacaaatttaaactttcattttaaatttgactgattactgttccaaaatacccatgtcaagggaatgtgactgtagttctagaaaacaattatgtatctatgaaatgcatgaataattaacttcatgatacccaataaaaactaggaacaataggtcaaacttccttggattatgggcagaaatgttacatgtttttaaaaaatggtcttcctgrgctgggtgcgggggctcatgcctgtaatcccagcactctgggaggccgaggtggcaggcagatcacgaggtcaggagatcgagaccatcctggctaacacagtgaaactctgtctcttctaaaaatacaaaaaattagccgggcgtggtggcgggcacctgtaatcccagctatgcgggaggctgaggcaggagaattgcttgaacccgggaggcggaggttgcagtgagccaagatcgtgccactgcactccagcctgggcgacagggcgagactccgtctcaaaaaag

SEQ ID NO: 236766 - DNA, 549 bp, Homo sapiens
tatacagtgatttcaaaaatacttatttgaagttgtctccagtaaccactgcttagtagaaatttaaacaatgctttctaataaaaatgtaaatcatatgttattacttattacctcttcctaatgtctgcattggttaggctatcactgaagttggtagctcaggaaagatggcattctgtaactgttacaatatgattacattctggtattatgtactcagtaagtaatatcaaactaaggaaattaataccattatagatttaaatttaaatttaaaaaatagaatgttgattattctggtgcacattataataacaattattattattattattatttgcctcttcttcctacttctgagctttaaagttatagctcatagattcacaatagtaattagatatttatttaatatgttttgcatatgatctayttttgtgtgtcaattcaaattttacccagatgaagactaatttactcatgtaatccgtgttatttaaatctcactcaactgcaatctttcctttccttcagaaggggtaaacg

SEQ ID NO: 236767 - DNA, 535 bp, Homo sapiens
tactgttcagtcagtgcataagaaccaatatactattaaatgaaaaaaaaatgccgttggaatcagaaaataattttctgaaaaagtgaagtttaaactgtgctctgaaggatgagtagaagaagatgcatttctcattcctggtgcaaaattagggggcagwctctaaaaccagcttcgcctgatcccaaattgcaagtccagagttctccaagaccaccctcagttttgataattcactagaagggctaaatgaattaaataaaagttattatactcatgaatatgatttattatagtaaaaaatatatatatacttaaaatcagcaaatagaagagacacgtaaggcagagctccaggaagtttcaagagtagagcttccagttgtcgtttcccagggcagtcacagacaatgctacttttcccagcaatgtgtggcaatacacatgagctatcaccctagtcagcccacttcagtgtccaggaatttgaatttaatacttcatgacctgaagttccccaccctagatgaca

SEQ ID NO: 236768 - DNA, 645 bp, Homo sapiens
aatactgatttttcatgtaaagccatattttatctcaatcactgcttcgcattatttactttccaaacacctggctggaggtaaatgcaactgttatttaaatttagagattagttgcctcatgtgcagaattttattataggtttattttattgtttggccagccagttaagactcaagagattatttataggttctcatttcagattctaaatttcctcttaaaatttagatttaagtaatctgttttaaatggcatctagtgacacccaacaggatgccaaaacaaccaaccagttgggaagattaaaaattccagcaataggccaagtgcggtggctcacgcctgtaatcccagcactttgggaggccaaggcaggcggatcacgaggtcaggagatccagaccatcctggctaacacggtgaaaccccgcctttactaaaaaatacaaaaaaattagccggacgtggtggcgggtgcctgtaatcccagctactygggaggctgaggcaggagaatggcatgaacctgggaggcggagcttgcagtgagtcgagattgcgccactgcactctagcctgggcgacagagcaagactctgtctcaaaaaaaaaaaaaaagaaaaaaaaaaaaattccagcaa

SEQ ID NO: 236769 - DNA, 592 bp, Homo sapiens
acacggaaatctgagacaacacaaatacatggaaaaacattccatgctcatggatagaaagaatcaatatcatgaaaatggccttagtgcccaaaacaatttacagattaaatataaaattaccaacatrattctttacagaattagaaaaaaattctaaaattaatttggaaccaaaaaagagcccaaatagccaaagcaaccccaagcaaaaagaacaaagccagaggcaccacactattcaactttgaactatactataaggctatatagtgaacaaaacagctgatactggtaaaaacagacatatagaccaatggaacagaatagaaaactcagaaataaagccaaacatttataaccatctgatgattgacaaggccaacagaaacgagcaatgggaaaaggactccctactcaatagatggttctgggataactggctagcaatgtacaaaaactggattcttacctttcaccatatacaaaaattcactcgagatagatcaaagatttaaatgtaagacctgaaactataaaaatcttagaagaaaacctagaaaatattcttctttggcaaagaatttttgac

SEQ ID NO: 236770 - DNA, 331 bp, Homo sapiens
actgagaggggaaaacaggcttcctgacagctcttattacgttattacagttcagcctggtttctgggtccctatgccagtgaagccactccttcagtgcctaccagtaagaggcaatttgcaactagcaccataaatggcatttgtaatctagctagtagtgtcgtaaatgcatcctattggtcatgagctgaaccagggcaatcaaatgtccctgctagataatccactttgggaatgtgattagcattgtcttcattgacagatggcaaaagatactgacttccatcacatrtataagttctgaccctaacaagtggtatataaacct

SEQ ID NO: 236771 - DNA, 506 bp, Homo sapiens
ctgtggcactttcaacatggcttcaaggagattttcgtcttactctttagtttcactgcatagaatttgggttagaagtgatacaaactgcagaaactcctttctagtgaattttagaaattttaagaacatttatatttcttattaaagatagtaaagcatcattaaatatatgaaagtgttttgattcaacaatattcagtaaatatctagagtgcctgctagatatgctaccacataaggatgtgggaataccacagagtttctccatgtaaggtagtggaaataaaaacataaaaaagacatggcctctgttacacagagttcccagtctggtggggagaaagacccataaacagttaaataaagcatcatgttaatcaggctgtagtctggctacatatgttgaaaatgctatagcaaaacagatgagtgtgattaatgttacctagataagggcaaagaagtctttttatagraggtagtatttgaactgggtcttaaaa

SEQ ID NO: 236772 - DNA, 584 bp, Homo sapiens
cacataaggatgtgggaataccacagagtttctccatgtaaggtagtggaaataaaaacataaaaaagacatggcctctgttacacagagttcccagtctggtggggagaaagacccataaacagttaaataaagcatcatgttaatcaggctgtagtctggctacatatgttgaaaatgctatagcaaaacagatgagtgtgattaatgttacctagataagggcaaagaagtctttttataggaggtagtatttgaactgggtcttaaaatataaaaggaaattgatcagggatttgggtcaggtcatgcattataagcagagaggacagcaagagcaaagaaatggtgcaatgaaggtactttgactaaaaaatggtctaactaaaccatagcatgtagaggtgggttggcagggaaggaaaaggggtgaaaatgcctaacggtatcattattgaaagtttggttggggcyaggttatgaactgcctcatatgctatgctgtggagttgatatatttatgctatggagattcaacttcatgttgtaggacgagggaaccatttattgtatttcaaactgat

SEQ ID NO: 236773 - DNA, 648 bp, Homo sapiens
atccaatctatgttactctttattcttggtaaggtttattgctataccataacctcttgctctgggaatagcattacatctataggaatatattacctttacaaaattacaatattgcctcatagttttaatctcaactaattaatttaatatttctgaatagatttagttcttcagaaattataacattgtggattggttatttgttcctatagagcacatttttggttttgccctaatagttcaattcccatttcttttcccaaaaccaggttaggaattattgctcattgcttattctaaaagaaactttgattctgttttccttctttctttaaggcagaggagatggaaattaggatatgttccattaacagccccacaagccaggaaagcatgagtgaaagtgttagtgctgtgactgaagatagtggttctgtaaggctgactctagtgytctctattgcttgtctttgagtttaaagaagagagtttttcccatttgtttagctgttttttgtttccctaatctgtgctacacgttcatagttttggtacaatatccagtacgatttttaaatgggcacacttattcatttatttcttcatctaataaacttttatcaaacatataccgtgagtcagttt

SEQ ID NO: 236774 - DNA, 547 bp, Homo sapiens
ttgctttctctacatgagtacatgtcaaattaatttgtggtatagayaaaaatttcctctccaaagcagcattaacaatagatcagggttcaatctaacaacaaaatgatgctgaggaaaactgagattactctatgaaagtactggaatgattaatgcaattttgccaatgaaatgctaagttacatggaagaaggtgatcctaagcatactttattttattctagtaagaaagtagttcattaatttgcctgtatctttgattatgtactattagcagtaaaatatagtttttgaatgacacatctaccaagggaaatcaattggttctcagagcagggcagagctcagatatgcagatttaaccttctttccaatttcaaaagtgagactgccagagaaaggcatgtagtgagcctcttgaagcctctgaatttggagtcacattgaggggtaattataattatcaaaatgtccatggtcattagaactgattgaacttttactccacactcgacctatacaatcaatagtaaagtggactgtg

SEQ ID NO: 236775 - DNA, 610 bp, Homo sapiens
ttcccagtgtgggaggtggaacctggtgggtggtgattggatcatgggacagatccttcatgaatggcgtagcaccatccccttggtgacgagtgagttcttggtcagttagttcatgtgagatctggttgtctaaaaagtcrgtacctcctccctctctctcttgcccctgctcttgccttgtcatgactgtaaactccctgagacctgaccagaagctaagcacatgttggtgccatgtctgtgcagcctgcagagccatgagccattaaacccctttgctttataaattacccagtctcagatatttctttatagcagcacaagaaagacctaatgcagtccgttgttaaggaaggataggattaggcacctctatggcaatcctagccaagtgccttttcaatctataaaaaacactgcttctgtggcactgctgacagcttcattcagtaaattaggacatggttcactaatgtgggtcttaccacattacaccatgttcctacatctccttcaaaattataaagttttctttggcctgcctcctttcataaaaatgtcagacacatcagatactttagacatttatttggagtaaagagcatca

SEQ ID NO: 236776 - DNA, 473 bp, Homo sapiens
tttcatttcatgtttaataattatctccttaattattatgtttttgtaaatatataaagttagtaagtatttgggaaacactatgagtttgttttttttttttttttttttttttttagcaagggaagtttggtagttaaaaataaccacgattgggaggctgatgcgggcagatcacacggtcaggagattgagaccatcctggctaacacggtgaaaccccctctctactaaaaatacaaaaaattagccgggcatggtggcagacgcctgtagtcccagctactcgggaggctgaggcaggaraatggcatgaacccgggaggtggagctttcagtgagccgagattgcgccactgcattccagcctgggtgacagagcaagactccatctcaaataaataaataaataaataaccacgaatactttgcaattcattcggtcaagaggaggagactgtttctccctcttt

SEQ ID NO: 236777 - DNA, 567 bp, Homo sapiens
gcaactttagcccagcccaagtcaccaacttggacagtctttcttgcctaacctagaacagatattaaattatttaagagaaaatgagactttactatcagttgtgcctgcatccttcatttttttttttttttttttgagatgtggtctcactgtcgcccaggctgaagtacagtggcatgatcatggctcattgcagcctcaacctcctggactcaagcaatcctccctcctcagcctcccaagtagctgggactacagtcacatgccactacacctggctaattttttaaaaatatttttgcagkgatggggtcttgctatgttgcccaggctcatctcaaactcctaggctaaagtaattctcctgcctagacctttcaaagtgctgagactacgggcatgagccactgcacccgacatgtttcattatttttttaaagtttagactgaaggtgatgtcatagatttaaacagtctctccctaaccaaaatttggatggtaaggcagaagaaagcatgagaaagggaaacttgagggaaggtctccaaatacagaaaaggatg

SEQ ID NO: 236778 - DNA, 556 bp, Homo sapiens
aactcttttactttacatgactcagacatggctgaacacattacagaaatcttctaaaataattcattattgaatatgtaatttattggtaaaataactagagaatacttatattctctatataataggaatgtgaaagaagtaactgtgtatggtgaactttggaagtttcttttaccaatccaaaatattttattttccctgaaaaaccatagtctaagctcaggcaaataaattgmaaataaaattttgaaatacaagttgtttgaaatatggggattgccagtaatcttgttacagtcaatacatattgctgaatgccatcaaaaaattaattgatcatggtttatattttgctcttggaacaaaaggaagctctcccacattggtgataaaaatccattgaaaatacatctgttgactatagatcaatgtgatgctacagactgtcttttcctttaaggaaagtgtaacttaagatggataattactgcaactcagaaggataaaacacatgtagccagtgtggcttttggcttttcctcagcaagcttgc

SEQ ID NO: 236779 - DNA, 556 bp, Homo sapiens
aactcttttactttacatgactcagacatggctgaacacattacagaaatcttctaaaataattcattattgaatatgtaatttattggtaaaataactagagaatacttatattctctatataataggaatgtgaaagaagtaactgtgtatggtgaactttggaagtttcttttaccaatccaaaatattttattttccctgaaaaaccatagtctaagctcaggcaaataaattgaaaataaaattktgaaatacaagttgtttgaaatatggggattgccagtaatcttgttacagtcaatacatattgctgaatgccatcaaaaaattaattgatcatggtttatattttgctcttggaacaaaaggaagctctcccacattggtgataaaaatccattgaaaatacatctgttgactatagatcaatgtgatgctacagactgtcttttcctttaaggaaagtgtaacttaagatggataattactgcaactcagaaggataaaacacatgtagccagtgtggcttttggcttttcctcagcaagcttgc

SEQ ID NO: 236780 - DNA, 615 bp, Homo sapiens
ttaagttttaaagaaaacataaaatacctaggtggcactgtataaagttttatcctcagtatggaacttgggctattttattttttaatagaaaagataaacaacctcctgtaattaataggacgtttgattttctttcttgaatagaggtatatttttactcagtaatacataactttcttaaaggaaaactatggctgaataagatgcatggaaatgtttccttttaatccatttccttatttttttttgtcacatcctatttggaatcgaaactattattagacatttactatattctaagraattcacatgcatttttctcctttattttatacaaaatcatgtgatgtaggcactgcttttatcctcactttatagaagaagaaactaaggcttaggggaaatagcttatccaaggtcagaaagccaggatgcagagccaggcatgtccagttctctaacttggaagctcatgctcttacctacaatgctagtgattcccaaagtatggtccctggaccagcagcttcagcattgcctgggaattggtagaaatgaaaactctcctggacatgttgaattggaatggggcccagctatcattactttaac

SEQ ID NO: 236781 - DNA, 349 bp, Homo sapiens
ggcactatctcccatccaagtactaacctggcccaaccctccttagcttccaagatcaggtgagattgggtgcattcagcatggtatggccttggacaaatttggctctatctacaaaatagcctgtctggagattacataatggcattaatatatccttaaaagaaaagtcaacagactcctcacctttatacccatttattgtttctgttttgttgttggaaaatgagttttagaattaatcgataggaaacccttctatgaatacctttrtaaagaaaggccaattatattttacttcatttatttgacttacagtattttactcactgactttctattgttgatc

SEQ ID NO: 236782 - DNA, 616 bp, Homo sapiens
tgattgcaagcaacagaaaatctggttaacagtgacctaaacaaatattaatataagactctgtcttacataactagaggtgagaagccaggtagcccagagctggtcaacaccaagatcttcctaaatgtctgctttgccgtccttcacatgctgacttttgtcaagcttcyaacctgatgttcatagggtcacctctaggcatcatgtctggagtcctaaccatgaagaagggtgaaggaccatgccagctaagcctttgttccttttcatgagaaaagcaaaagcattcctgagagccttgccttcccatatctcatgagccagaactaggtgacattaacatccctaggccaattgctacccaagaggaataagattaccataactggttatagcaatgattcattccattgctacctaaagaaatcaggattctgttggctgcggagagtggagagaaacaaataatggtgatagtgatgcactggaacacattatctttctccagcaagtaattttggaggataaatcatatttccttaggcatcacatctccacctgatttaattcaaaactattccatgtattacatttttaattgcaactgattttt

SEQ ID NO: 236783 - DNA, 571 bp, Homo sapiens
cactcaatgctctatggaaaaaaaactttaaacaaagtcatctgctagtttccataataatttttcacatttctttacctgtgtgcaatacttaatgagagtgaccaccctctgtcgaaactctcctttgtaggttccgtaaaacttctttcttgaaagacagtattttatagcagttaagtgcatgggctcaagattcagactcagacttcattccaagttgtatgatttactctttgtaaacagtaatgagaaaatcatttaagcaaactgtgtctgttttcttatttgcaaaaaraagaaaaaaagaaaaagaaaaatgcctatctgcctcatagggctgttgtgagagaattcaatgagataatccatttaaaagatttaacatagaaactatcacagttgatgttcaacaaccagtaacagctcttaactattaccttacacctcttccagtcctcctagtctttgcaaaactgtacactaatgcaaaagaggtatactactaaaacaaactcaaattattttaacaataaccttgttcagacctatatgtatcaagacaagacca

SEQ ID NO: 236784 - DNA, 553 bp, Homo sapiens
gggaatgagtagaggaaaacaagggagagagggattacaaagaagcatgaggaaactttttggggtaatgaatatgttcactatcttgactgtggtgatggtttcatggatgtcaaaacttatcaaatttaacattttaaatatgtgctgttgatgaaatgtgaatcatacctcagtaaaacttaaaacaacgatggttttctgctgagcctttcttcctcttcaatattcaataaatgtgtcacagaactacagaaaccttaaaggytcaaaatgctaatgccggatgaaagaataatctggcatactttcaacaggcatagagaactggagtgatatggtactttagatttcacggctcttcatgactgggcggatagaaatggacttacttgtggttgatcttgactttgcttttctcattagtctgtatttttatgtaattcataccatattaaaatgatagtttgatattaacaaatatacttttaattattatggactaagtattctagatagtataaaaaatacaatgcatgcaaaacaacccaaa

SEQ ID NO: 236785 - DNA, 552 bp, Homo sapiens
aattttcataagtaatgatgagccaaaggttaatcaccaagacaatggggaaaatgtctccagggaatgtcagagacctttgcagcagcccctcccatcacaggcstggagaagcaggaggaaaaaatggcttcctgggctgggcccagggcccactgctgtatgcagcctagaaacttggtgccctgtgtcccagtcactctagccatggctaaaaaaggccaaggtacagctcaagccatggcttcagagggtataagcccaaagcactggcagctccggtatggtgttgagcctgtggatgcatggaagtcaagaattgaggtttgggaacctccacctagatttcagaggatgtatgaaaagcctggatgcccaggaagaagtttgctgcaggggcggggtcctcatgcagaacctctgctagggcagtgcagaagaaaaatgtgggattggagcacccacacagagtccccactggggcactgcctaatggagctgttagaagagggccacaaacctctagacctcagaatgctggattcaccaaca

SEQ ID NO: 236786 - DNA, 446 bp, Homo sapiens
atacacttgtccaagcatgcactagaacctaagtaaaatataattttctaaaatgactctcatgtatgtaaattaatgagagaaccakcaggatggtaaagctgattcaaagagaattttaaatacaatgtatgtaggcactgaaagaatgctagacaattactaggttagatacaaaattgattaacttcctactgggcaattaaactgtaacatttggatatatcttttttaccagataggaatcccttgcacctttaacagataaacacctacaagatttcatacataactttgggggttggcctcaatcaatagtaaataataaaatacaccaaggcacaaataatcttataaagaataacataactctgcggtgaccccaatggagtactccagcatgcaggacatgcagtcaacctggcactttaaggctaagctcagat

SEQ ID NO: 236787 - DNA, 497 bp, Homo sapiens
atatctctctcaaaagtgtaaaggatacaggaacatcatatctccctctaattcaccaatctggcccttgcraaaaccatatggatcatgatggatgagagtagactacatcacagtctttctgggactctggtagctctcctgatctcaagcacaatatagtccaaaggaacctcaatcctctagacatttctcagaacatcgcctccagccgcagtatttgatgcaatcattggaactgaggatcatgaagttgcaatactccaaatgcccttgtaaggcaaatgcacctcagaggactggatataatcccttcaaagattcaagggcctgcaacactaatggaggattcagagatttagtggtctgtggaatgcagtaaaggaagtaaaggacaagttactgcatgttgcaattcttacaattaagaaagaggaatttcatagttatttagtagatctctttgggttgtggagaacatataccacatttgagaa

SEQ ID NO: 236788 - DNA, 497 bp, Homo sapiens
atatctctctcaaaagtgtaaaggatacaggaacatcatatctccctctaattcaccaatctggcccttgcaaaaaccatatggatcatgatggatgagagtagactacatcacagtctttctgggactctggtagctctcctgatctcaagcacaatatagtccaaaggaacctcaatcctctagacatttctcagaacatcgcctccagccrcagtatttgatgcaatcattggaactgaggatcatgaagttgcaatactccaaatgcccttgtaaggcaaatgcacctcagaggactggatataatcccttcaaagattcaagggcctgcaacactaatggaggattcagagatttagtggtctgtggaatgcagtaaaggaagtaaaggacaagttactgcatgttgcaattcttacaattaagaaagaggaatttcatagttatttagtagatctctttgggttgtggagaacatataccacatttgagaa

SEQ ID NO: 236789 - DNA, 617 bp, Homo sapiens
aagatgacacataaaattaaccacgattggcaccaaaagagggacagtgaaagcccacatgaaraggaagagctaggccagaagcctgagaagagccatagacaaactcagtgtctgtgatgggaagtaaacagctatgtctggttggtcagggctggaaaagcacaagatacaagttgtactgatgctgagcttgaccccatcatgcctttttagatttagcttagttcactgggcgatggtaaagatagtagatcaaaactcccaaggcttcccactgcaggtcttgctcaagtgggcagaggctaggattttgtttcccttatttctccagcaaaacatacttgtcctgtgtctcattttattaggatgttgctgaatgcttagcatagccaagtgttagtagtctgagtagtttaagacagcaaataccaaccttttgttaataaaaatataagctccttcaattgaaaacagatgagaaaattcatgccacagtctaagtacttctgcagtatctgttactttgaaaagtgtgtccttcacaacattttggagtatcctcattgtcctctccagtgacacattttctttttgtgctgtgctagctacttact

SEQ ID NO: 236790 - DNA, 635 bp, Homo sapiens
aaaataacaactactacacataattaccctgtttgcaaggatcttatgtatctatcagtatcagcattttatttaaggaatcatcaacttacaggaaatgaaattaagccttcatctacattagagactagaagaaaatactgcattcacaggcacacatgtgtgtgcatgcacgtktgtgtgtggtttatctcagagagtttaaatgttcttaaacaaaattgcagcagagtaggatatctgttttgcttcctcacacttctatgacctaattacatcttctgtttaaagtacttcacagataaagctcatattatagccaataccacagagagctttatttgaatgccagttatgtcttaggaactattctaaacgctggaaatatagtggttaagaagataggaaaatcccctgccctcatctgtgaaaactgagtaacatcccccaaagaaaattactcagtacctcacacgtacacaaaatagatgtctaagaaatatttgctgatttaactgaatttttattagaagttgagttctaagtgaaattgtattgtagcaagctatttgtaaatggatagttgggtgcatttattaaatcaaccaaatgtgaattaattaaaactcactatt

SEQ ID NO: 236791 - DNA, 592 bp, Homo sapiens
tacctgctcggcttctggtgagcttttactcatggcagagagcaaagtggaagcagtaagtcacaaagtgaaagcaggagcaaggaagggggaagtgccacacttttaaacaaccagatcacttgagaactcatttactgtcatgaggacaacaccaactcatgagagatcctcccctacaatccaaacacctttcaccagcctcatctccaacattgggtattacatttcaacatgagatttgggcagggacaaatacccaagctctatcattctgcctctggcacccccaaatctcatgtccctctcccattgcaaaataaaatcacgccttcctaattgttccccaggtcttaacttattccagcatcaattcaaaagtccaaagtccaaagtatgctcagatatcacaatttccttctgcctatgagcctataaaataaaaaacaaattatttattttcaagatacaataggaatacaggcattgtataaacattcctattccaaaaatgagaaaagaaaggggctacagtccccattcaagttcaaaacccagcagkgtagctgttacatcttaaaaggtccaaaat

SEQ ID NO: 236792 - DNA, 533 bp, Homo sapiens
atcccttcctccctggagtcaggccagggctgtaccctccccatcgggggtggaatcacagtacaactgaaccccctggacccaagctgccagggggtgtctcagagccacagattctgttgctgtgagcaaccaaccaaccctgcaacagagggtgaacctgcattccaaggcctaagtgccacaatakgtttgtcagactctgaacctagcatcgtcagccccacattgtccaagcacctgtatctgctggaatcctgctgtttggaaactgtaagacataatgagaaaagggatctcttcaattaagtctctccattgtgaggaaagtgagaatagaaggatctcaggagctttcatgacagagaatattaatagcctacactgccaccatgactactacaaacttccagagcctaggacactgaggacctccagttattgatgataatgaaaacagctgaagaaactgcatggagactatatcactgcagctatgcagaaacagaataaccataccctttctaactagc

SEQ ID NO: 236793 - DNA, 595 bp, Homo sapiens
aatagccccaagttacaataagggaattcccataaaataaatacagcttttgcagcagaaacctcacaggaggggagaaaatgaagttatattcaaaatattgaaagaagaaaattgtgayccatgaatattatacacagccaagctatctttcagaaatgagggagaaataaaatatttcccagacaacaattatgaaagtatgaaaaagcagggtgttacagcaccctcaaaagattgcactaactttctaacattggatcctaaccaaaataaaaattttgacattccagaaacagaattcaaactattgattttaaagaagctaatggagtttcaaaagaaacctgaaaactaacacaaagaaatcagaaaatcaatttgggatataaacaagaagttgaccaagtagatacatatatcttaatttaaaaaaaagaaataaaaaaatgttttgaaggaacttaaaaatacagttgaaattttcaacaacagaccaagcagaagatggaatctcagaacttgaatataggtctttttcattaatttggttaaacaaaaataaagaaaaatatttaaaaagaataaacatacc

SEQ ID NO: 236794 - DNA, 640 bp, Homo sapiens
aagctttccagaagtgcaaatgctaagacaattcatcaccactaaaccaacactacaagaaatgctcagagttaaaaacacagaaacaaaaggtcaatacttgccatcattaaaacacataaaagtgaaaaactcaaaagacttataagacagttacacaaatgaggaagagagaaatcaaatgacaacatgrcagaactctaccaaaccaaaattacaaacagactatagacaaaacaatctacaaagcaataagataacaattaatattatgaccagaataaaatttcacgtctcaattaaccttgaaagtaaatacattaaattatctgcttaaaaaatatagattagtaaaatagattttaaaaaccatgaaccaactatatattgcttaaaataaactcatcttactgatacagacatttatagactaaaggtaaagaaatgaaaaaacatattatatgcaaacaggaatgaaaagcaaacagactttaaaccaacaatcataaaagatagagaaggtctttatataataataaaaagataaattttttaaaaattgattttgaaaattttaataagacctaataatcctaaatacatatgtgtctaacattgaagaacccagatttataaaaca

SEQ ID NO: 236795 - DNA, 640 bp, Homo sapiens
aagctttccagaagtgcaaatgctaagacaattcatcaccactaaaccaacactacaagaaatgctcagagttaaaaacacagaaacaaaaggtcaatacttgccatcattaaaacacataaaagtgaaaaactcaaaagacttataagacagttacacaaatgaggaagagagaaatcaaatgacaacatggcagaactctaccaaaccaaaattacaaacagactatagacaaaacaatctacaaagcaataagataacaattaatattatgaccagaataaaatttcacgtctcaattaaccttgaawgtaaatacattaaattatctgcttaaaaaatatagattagtaaaatagattttaaaaaccatgaaccaactatatattgcttaaaataaactcatcttactgatacagacatttatagactaaaggtaaagaaatgaaaaaacatattatatgcaaacaggaatgaaaagcaaacagactttaaaccaacaatcataaaagatagagaaggtctttatataataataaaaagataaattttttaaaaattgattttgaaaattttaataagacctaataatcctaaatacatatgtgtctaacattgaagaacccagatttataaaaca

SEQ ID NO: 236796 - DNA, 541 bp, Homo sapiens
aggaaaccaaaaaatggaaagatatctcatgctyatggattggaagaatcaatattttgaaaatgtctatactgcaagtgttctgcagattcaatgcaatctctatcaaaataccaatgacattcttcacataaatagaaaaacaaattttaaaattcatatggaactacaaaagaccccaaatagtttaatcaattctaaccaaaaaagatgaagctgaggtatcataccacctgatttcaaattgtactataaagctataatatccaaatcagcctggtagtggcataaaaacagacacatagactacaggaacagaatagagagtcagaaataaatccacacacttacagccaacccattttcaataaaggtgccacaaacatacattgaggaaaggacaatctcattagtaaatggtgctgggtaaactggatatacgtatgcagaagaataaccctagatctccgcattataacatatacaaaattcaactcaaaatggcttgaagacttaaaagtaagacctgaacctatgaaac

SEQ ID NO: 236797 - DNA, 541 bp, Homo sapiens
aggaaaccaaaaaatggaaagatatctcatgcttatggattggaagaatcaatattttgaaaatgtctatactgcaagtgttctgcagattcaatgcaatctctatcaaaataccaatgacattcttcacataaatagaaaaacaaattttaaaattcatatggaactacaaaagaccccaaatagtttaatcaattctaaccaaaaaagatgaagctgaggtatcataccacctgatttcaaattgtactataaagctataatatccaaatcagcctgrtagtggcataaaaacagacacatagactacaggaacagaatagagagtcagaaataaatccacacacttacagccaacccattttcaataaaggtgccacaaacatacattgaggaaaggacaatctcattagtaaatggtgctgggtaaactggatatacgtatgcagaagaataaccctagatctccgcattataacatatacaaaattcaactcaaaatggcttgaagacttaaaagtaagacctgaacctatgaaac

SEQ ID NO: 236798 - DNA, 565 bp, Homo sapiens
tgaattcagcggatgccggatgcaggcacagattaaggtgaatacgagattccctgataaaaacaagggtattaactaaaagaaattctcaagccctagtccccagtcagctggcagaacctgcaagcaggcttagattcttttgacaaaagattagtggagtcctctctggaraaagttaccaaccctccaaaaatacctaaagatactgcaagttgatggctctccaacaaaaaggcccagccagaaccttctcgagtaaagcctaccagtttatatccattctccatccaaatacagtttctagtctgttttgttattacttctatcttaaagaatagccctctcttgaaagacaggattcaaaatgaaaagagagacaaaaatgttaaaaagaaagacaatccaagaaacagagaaaatagccaagaaagtttcaaaatataataattaatctccttgtaaaagaagagagtatattgtatccatgaaataaaaataagaggctgaaaaaacaaagaaccatcagagaacaaacaaacaaaaaaggctcttggaaattgaa

SEQ ID NO: 236799 - DNA, 575 bp, Homo sapiens
caggtaaataccaatcaaaaccacaatgagacatcatctcactcaagttagaatagatatcatctaaaagacaaaaaattacaagtgctagtaaggatgcagagaaagcatacactattgatgggcgtgtaaagttgtaaagccactatgggaaatcagtatggcattcatcaaaacactaaaaatagaactaccatatgatcaagcaagtccaccactggatatatatccaaaagaaagaaaatccatttatcaaagaggaatctgcactcccatgtttactacagcactattcacaatagccaagacatagaatcaacctaaatgctcaccaacagatgaatggataaaataaatgtggtatatatacaaaattgaatactatacaggcataaaaaataataaaattctgttgtttgcagcaacatggatagaactggagatcattatgttaagtgaaataagccagcacagaaagacaaatagtgcatgttctcactcacatgtatgtgytaaaaaagtggaactcatggaggtagagagtagaatggtgcttaccagagaccaggaaaaga

SEQ ID NO: 236800 - DNA, 573 bp, Homo sapiens
aaaatactaagtaaaatctgactaaatccattatgtcatttrcttaaaacaataatttaaaatagtatcttttctgaatccttttctttttgttcaaattttatttaaaaaggaaagcaaccactaactctgaaatcagcaccttgtatgtgtagtaataatccttggctatttctgtgtgctataaagatgtgggcctgggaattttcactggattgagggtagatttttattttcatttacacataaaaaatcattgagtttgatttaaggaaacctgtaactgttagtatttctattgacatgacatatatacttcaaggtttcattctgtcccttgacaaacaataaataaaaataagattatcattctataagtggctttacacattgtcatgacaaaaataaaagaactaaagatgaatgagaaggaagaagagaaaattaaggaatggaaagagagaaggagaaagagaaaaaaagcaaacatgagcttcatgttcttgaaggaaaacttgactttgggattagatttttagatatggcagttactgccacaaaagtacagtcatc

SEQ ID NO: 236801 - DNA, 573 bp, Homo sapiens
aaaatactaagtaaaatctgactaaatccattatgtcatttgcttaaaacaataatttaaaatagtatcttttctgaatccttttctttttgttcaaattttatttaaaaaggaaagcaaccactaactctgaaatcagcamcttgtatgtgtagtaataatccttggctatttctgtgtgctataaagatgtgggcctgggaattttcactggattgagggtagatttttattttcatttacacataaaaaatcattgagtttgatttaaggaaacctgtaactgttagtatttctattgacatgacatatatacttcaaggtttcattctgtcccttgacaaacaataaataaaaataagattatcattctataagtggctttacacattgtcatgacaaaaataaaagaactaaagatgaatgagaaggaagaagagaaaattaaggaatggaaagagagaaggagaaagagaaaaaaagcaaacatgagcttcatgttcttgaaggaaaacttgactttgggattagatttttagatatggcagttactgccacaaaagtacagtcatc

SEQ ID NO: 236802 - DNA, 573 bp, Homo sapiens
aaaatactaagtaaaatctgactaaatccattatgtcatttgcttaaaacaataatttaaaatagtatcttttctgaatccttttctttttgttcaaattttatttaaaaaggaaagcaaccactaactctgaaatcagcaccttgtatgtgtagtaataatccttggctatttctgtgtgctataaagatgtgggcctgggaattttcactggattgagggtagatttttattttcatttacacataaaaaatcattgagtttgatttaaggaaacctgtaactgttagtatttctattgacatgacatatatacttcaaggtttcattctgtcccttgacaaacaataaataaaaataagattatcattctataagtggctttacacattgtcatgacaaaaataaaagaactaaagatgaatgagaaggaagaagagaaaattaaggaatggaaagagagaaggagaaagagaaaaaaagcaaacawgagcttcatgttcttgaaggaaaacttgactttgggattagatttttagatatggcagttactgccacaaaagtacagtcatc

SEQ ID NO: 236803 - DNA, 536 bp, Homo sapiens
cactgcttaagtttgtaattagctgcaaatcaagtaatgtggcaaataacaagcaatgattagtatgaaactgaaataattaagtaattccaaaatatgttttttaaccactgggttttctcactcttcaattttccaatcaggtatttaattggagctattaaatattttcaagtctatttttacttcattttccatatttctctctcagatctctagtagagataagagaagaaaaatgaccgctaagcatcaaggagactagacatcaactgacaactgtgagagccaactacacatgaggcactatcctaggccattttgaatttgataaatttagcaatctttaaatgattgatratggcaagagatttctaccttttcatttttctaaattaaaacatttgaaagcaacaaccatctaatctcaaaatcatttcatgtttaaaataaagatactttgacaacaaaaaaatgttaaaaattatctcagaatcagttacaatcctttaaattctgcatcttcaggtttatgg

SEQ ID NO: 236804 - DNA, 448 bp, Homo sapiens
agactcatacccactttgcccctgagcccttgctgatgtcacaaaaactgggttggaggcaggggaaagggaagggggtccttgtttgcacacagacagtgggggtgggggctctgccaggtcttgggaggccctagaggcagtgcccacggaacctgtcactgccagttcyagctgaccatgaccatgtgaccagggcctgcctctgcttcccagagctgggcttctcaacaggcatgcacattccagaggcctgggggacttgtccacactctcacacctaagcgaccccaaaccccattctgttgcaatgggtagggctgggggcttgtgaatgatgttccatgggtgactggctgttatctggctgagaaacaagtctctgaacagagaccttctgaaaactctgggactgattcttgtaggtctaagatgtatagatgaattc

SEQ ID NO: 236805 - DNA, 562 bp, Homo sapiens
tctgggaaacatagttccggattagccaaattgacacattataaaattgctcatagaaccctatgagcatagagttgacaacartacccattaaaacataatttattacttgtaaaagggttacttaggtgttgcgaggaaaatagactgtaggggagtaactgtgggaacaggaggctagccaggaggctattgcagtcttccagtgagacaggagaatggcttgaagtagagggagagcagaggaggtgacctttggaattggggtgtattttaaaggtagagatagcaggctttgctgatggattgaatgtggcatgggagaagaaagataagtcaatgataacaccaagaagttttggcctgagccaatggtggctgtttcttaaaatgggaaagactaggggaaaaacaggttttgggtttgggagaaattaaagattctctttgcatgtgttgagattaagatgcctgttagctatccaaggagagagtttgtgtaagtatttggatcaacagtgcagctctggagttcagaaaagaggttggaggctgtgacacg

SEQ ID NO: 236806 - DNA, 567 bp, Homo sapiens
tgggaaacatagttccggattagccaaattgacacattataaaattgctcatagaaccctatgagcatagagttgacaacaatacccatyaaaacataatttattacttgtaaaagggttacttaggtgttgcgaggaaaatagactgtaggggagtaactgtgggaacaggaggctagccaggaggctattgcagtcttccagtgagacaggagaatggcttgaagtagagggagagcagaggaggtgacctttggaattggggtgtattttaaaggtagagatagcaggctttgctgatggattgaatgtggcatgggagaagaaagataagtcaatgataacaccaagaagttttggcctgagccaatggtggctgtttcttaaaatgggaaagactaggggaaaaacaggttttgggtttgggagaaattaaagattctctttgcatgtgttgagattaagatgcctgttagctatccaaggagagagtttgtgtaagtatttggatcaacagtgcagctctggagttcagaaaagaggttggaggctgtgacacgtatttgg

SEQ ID NO: 236807 - DNA, 480 bp, Homo sapiens
aattgacacattataaaattgctcatagaaccctatgagcatagagttgacaacaatacccattaaaacataatttattacttgtaaaagggttacttaggtgttgcgaggaaaatagactgtaggggagtaactgtgggaacaggaggctagccaggaggctattgcagtcttccagtgagacaggagaatggcttgaagtagagggagagcagagraggtgacctttggaattggggtgtattttaaaggtagagatagcaggctttgctgatggattgaatgtggcatgggagaagaaagataagtcaatgataacaccaagaagttttggcctgagccaatggtggctgtttcttaaaatgggaaagactaggggaaaaacaggttttgggtttgggagaaattaaagattctctttgcatgtgttgagattaagatgcctgttagctatccaaggagagagtttgtgtaagtatt

SEQ ID NO: 236808 - DNA, 568 bp, Homo sapiens
tatgatgaatgggtgctgattttgtcaaatgttttttctgcattgattgatatgcatgtggctcttcatttttagcctgttaatgggttgaattacactgattgattttcaaatactgaatcaggcgtgcaaccctggtataaatctcacttggtcagagaatataattctatgctgaattcaatttgctaatactttgttaaggatttttgtgtttatatcatgagggatattgatctttagttttctttttgcactgtctttacctggttttggtattaagacaatactaacctcstaaaatgaattgggaaatattcatgcctattctatttcctggaaaagattgtatagaattagtgttaattcttttttaaatgtttggtaaagttctccagtgaaaccatctgggatgtggagatttcatttttgggagttttaagataacaaattcaatttccttcatagttacaaatctgaactatctatttcatataagtaatttgtggcattttgtattttctgaggaattggtccatttcatctaacttgtcaaatttacatatgt

SEQ ID NO: 236809 - DNA, 597 bp, Homo sapiens
tactgctacacatggatagacttgacgggccttttaagtgacacttcgattcagtattgtgccttttaaaattgctttgggaaaaaactggtcttcaaatttgtgtcttccccaatccacattttattcccctggagggttctttttcttttcctaccttcactcccattcatcttccttgccacatactgcaacaagtactttgcttcagaggcacgctttattggatgccacataaaataccttttcataagcataaagcttattcccacagatgtcatgggaaagggaccaattgctctaaggttcctacttaactgtattttcaaaaccctaataatgcatctgagtttacgataacattttaaagtcactcttctctctagctggtttgtcctgatgtttccgttgagtttaactktttcttttttagtgcaatgagagtactactgacatcatttttgtataatattaatcaatgcattatttttgatcactggatatgtgctgaagtctcaggtgcattgtatattccacactttccttatcttccaatctagtacctctaaaaagaaggaaatgttaacgtagttttag

SEQ ID NO: 236810 - DNA, 592 bp, Homo sapiens
tttgtcctgatgtttccgttgagtttaactgtttcttttttagtgcaatgagagtactactgacatcatttttgtataatattaatcaatgcattatttttgatcactggatatgtgctgaagtctcaggtgcattgtatattccacactttccttatcttccaatctagtacctctaaaaagaaggaaatgttaacgtagttttagcccctttctttttccaaatgcacctatttaatgccagttatttttgcaactaaatattttaatacaaataatcttctctcctagtctctacagagaaatctggccttgtgttcccattgtcatcactggggcagcatactccttccagtgaaattcatggatccttctttagccttgtctactaatgttagagaatattcaatatgggcaaatttatttttacaaatgccttaccttttgtatagttaattttgctattggtaccctattatctctgatcaaaaatkatgttacttgtaccatttgctccccaaagagctatgtagtgattttgttcaaaaattctgtagacagtattaattgtgtacattttacagaacattta

SEQ ID NO: 236811 - DNA, 567 bp, Homo sapiens
tgaacatttgtgtacaactttttgttcattgtcttttaatatttctaagattaatattccccatagaatttcctatgaagaaattcacaatctttgcaacttcacagtctacacacaatcaaaccccaccctcaccacacttactgtgtgattatgcatctgcttaacttctctgagcctcggtttttttcatttgcaacaygtgctggcagaaagttaagtgcttgaaagtgacgcttatgcagaatactaaaaaatcttccgaatcttctatcctgtgtctatcttcacagccaccttagagatggcagatttggagtgcttcctttctaagtcaatttcaatatctaaaaaatccaggtaaaatttgagtaataaaaaaaaatgaactacaattcataatatttgttaatagagaaaaaattcaatttaacatgtcatttctgtcgaatgaaggtgactgactagtaaagaagacttaaataatacttatgagtttaaatgtaatttttattgagtttttctgtctgctaatttattgatataaaagaaaaaaggaaaaatgtt

SEQ ID NO: 236812 - DNA, 567 bp, Homo sapiens
tgaacatttgtgtacaactttttgttcattgtcttttaatatttctaagattaatattccccatagaatttcctatgaagaaattcacaatctttgcaacttcacagtctacacacaatcaaaccccaccctcaccacacttactgtgtgattatgcatctgcttaacttctctgagcctcggtttttttcatttgcaacatgtgctggcagaaagttaagtgcttgaaagtgacgcttatgcagaatactaaaaaatcttcygaatcttctatcctgtgtctatcttcacagccaccttagagatggcagatttggagtgcttcctttctaagtcaatttcaatatctaaaaaatccaggtaaaatttgagtaataaaaaaaaatgaactacaattcataatatttgttaatagagaaaaaattcaatttaacatgtcatttctgtcgaatgaaggtgactgactagtaaagaagacttaaataatacttatgagtttaaatgtaatttttattgagtttttctgtctgctaatttattgatataaaagaaaaaaggaaaaatgtt

SEQ ID NO: 236813 - DNA, 625 bp, Homo sapiens
tcttctctgttttccctgccctacggccttcacttgtattttatgggatcaccttccagttaaaataccaacactcaggtccctggttcagagttgctctcagagaatgccmaagtaagatagcgatctacatgtgaggtttcttctggcaatatttcatgttccattgaataaaatacgacatctatattgaattaaaacattagtttatatcagaatccatcattatcagatatcaaatattatttattaaaatatcattatttggcttctacttcaacatcagcaagtcactcatttctttcttatatcatcaacctttcatactctattcaatctgttcatttgtatataaaattataatttctcacatctaaaaaatccttctcttgtccctaatttttcctctacctaatgcttgactttatctttctttttagagaaaagtttgaaattttaatacatacttgctctttccactattgtctctttatttcactcaaaacatgttttaaccctcaacattccaccaaaatgttctggtcaaagtcaccagatcttctgtttagctaaatccagcagtaatttatgtcttcaacttacttggtccgtcagcaacatttaa

SEQ ID NO: 236814 - DNA, 566 bp, Homo sapiens
taatgtttaagaaattgccttgaaaacaataaaggtaatgttatttattttctctttagctcagtttcttccactgctcattgagaatactattagcttttcaggccaactcacagtgacatacaaaaattaactaaatcctactaaatttacttactccccagatagaactgtgattcttaaagctagtgtaataatatttagtgtagttcaccactatcctacacagcagcaaattttatcccatatcaaccattattatcaggatgcaatatatttttctatgtgtactgtttgaagcatatcacattctaaggaaatgtttggaaacatcagggaataaaaatgccaacacatttaagatagtagtaaggattatatgttgcaaaaaaaatcaccaataattgtgttttcttagtaatgtgagatttaaaagttgaaattgtttgcatacaatgttgtgcaataaacaatgtatgatcccatttttatatttgattttataatcataaaattatttcaggaagaagtgaagtayattaaattataagttatttcagaaataa

SEQ ID NO: 236815 - DNA, 579 bp, Homo sapiens
acaagaaccacatttggtttttccattggtctgttccagtacctagtacctaggaggatatccacttgttttaattgaattgaatgataattaataataataatactcaacaaatgtctaaacatcttatgagtctttacttcactttattattacaacaagcctatgaggcctaggtaatattattatctctatcttacagatgaagaaatgagccttaggcaggtccttagccaagattactcctaataaatgagaaagttctagttcaaatccaagcctatctgattaaagggctcttcattgctgttattatatattgaattaaaataagcgacatttccttctggctgaaatatgattctatgtcagctgagacagtttcttgctccatggaggtcctcaaaaaaaacaaaaaaaagattgaatcaagtccaggcagagctatcagaaaatctagaaaatttagagaacaaaatgaataaactgagaagttccaaacagggcagactcaaagagctgaatccaggaataaaasatgtgaaagcagatagaaaagtctcagtataaataagtggt

SEQ ID NO: 236816 - DNA, 588 bp, Homo sapiens
gtagattttatggtgtgattccaccataaaatctcttagagccttgtcctgagtgctcatataagattgggaccttatccaagaatggtgcaaagttaaaaacagattactctgttgaactgcaccgaagggtcacaatgtatagaatgcaaatgttttgcttgagtgaaggtagcaaagaaatgaaagacacaaccttttaggaatttaacataactataggaataaaaatgtaaacatacagttattcagtgaacaaggcagccaaagagataaaaagacaaaacaacacagccagaatgatatacttacacaaytggtatatttaaagtaaatgaagcatatgtattatttgttagttattatgctagattctacatttatctcatatccatccatccatccatccatccatccatccatccatccatccatccatctcttcctccagacttttgaatgactaatttgtacctttgccaggtgctatggctaaaatgataaacaagacattctttcactcaagaagtttataaggtattagaggacacaggtgggtatagacattgcccactaaaatgtgatagt

SEQ ID NO: 236817 - DNA, 417 bp, Homo sapiens
tcatcttcttatttcacttttgtgataatttgtttttattatatttttcaaaaacattcattgtgacggactggcaaaaaaaattgtttgtgaagcactattgtaacatttaaaagaagtgctaagactatatcatgaggaaatagagggaagaaagggaagagtcaggagtatcctatttcaatttttgctttgaattgagtgtttyatattttaatgaggcacattataaaaaatataagaatatttttggggaagcaaatgcccctcatctgcttgcatgtaggcccccctcctccatttttcttgtgggcccaattctttggagaaacttacatgtggcaaaaatgtatgcgactattcatcccatcaatgaaagatttaaaatattcataactgtttaagcaacacccatac

SEQ ID NO: 236818 - DNA, 528 bp, Homo sapiens
tatttaaaagaaaggccatgtaaaataasttggacctctgtaatgtttttgtttcataataatttttgtttagaaaaaagacaatttaaaattattacagattcatatgttgaactataaggagatttttgaaaagctgtgatacttacaaaatttccactaatgggaaatattctaaatattaaattcatccttacataaaactgaagtctgagagattctgtcatattagacggtaaaatctgaacattaaaatcccactaggtgatggacaaactgtatgcttctaagtgtttgtacatctactctgatatattcatttttaaagcctttttgtaaagtcttctttaacttcaaatatgttagaatatttatatattctgtcatccattttcccattttgatctagttttgattaaattccttcctttgggaaatggccatatctttttgaagtaattgaacattttatagtatcctgcattagactaatttgtcttttccaccatagtattaggatgtctgaag

SEQ ID NO: 236819 - DNA, 559 bp, Homo sapiens
atagtccattcctttctaccttccccctgccagaacatgtggattgtgagggagctattcagatatcattaagtttctttagatgccctataaatccaggataaaaggaagcaggaacacacgggctgtttttgaatcatgaagtgtgttgtatttctgctggcctaggcatcaggttgatgcagtgctcactcttcatcttcgtttgtgaccctgttgaaaattgtgtaagcttctccctttttcaagatgtgtatggtgcctcttccttccttttcatgcactcaacccagtcaactaagccacatgccttccattatcccaagggacatgctacaatgataacagactaygtaaccttgagctggctccaatctttatcaggtaacatctcttgatgatcacactgtggaagggtcattggttagaagataatagtttctgacacattatccttaagttacctgtgggtcacttcctagttgtgaagaatggtgtgcacgcatgcatacacaaacacacacacacacagaataagacagagtctctaatctcctat

SEQ ID NO: 236820 - DNA, 568 bp, Homo sapiens
ttatattggcattagatcattagaatcaactttgaatatttaaaaagtaacagtaatattgcctatattgaacagttggcttaactattttgtttgctttattttcmaaagtgcattatgcctatggtagttatatgcattatctataaataaaactttaagagaatatattaaacacacttatagcagaattagagttaaaaagcatagcttggaggtaaaatttactggaaataattgggaaaataatttattaagaataacaaagaaaataattgctaatgtgtgtaatacattgcaggttgtgaatcactttctcatataatatgtcctttagttcttataacaatgttgtaacatttatggtgagctctattttatgatgaagaaaatgaaattgaaagagattaagtgattttccccaaatgactctcagaaccaggaacccagccaaggtcttctggtaactgctctttatactcccatggtctaggtgaaaagaggttacatgcatattaaaaggttcatgatgcataagtaagagcagtgtaaaatattggtaaatagc

SEQ ID NO: 236821 - DNA, 449 bp, Homo sapiens
ttttatcacctcttgtagtagttttaaaaatgcatttctcatagttaaacacacttatgatttaatcacactgtagtttaattttttttttgagaccgtgtcttgctctgtcacccaggctggagtgcagtgatgtgatcttggttcactgcaacctccgcctcccatgttcaagtgattctcgtgcctcagcttcctgagtagctgggattacagctgcgcaccatcatgcccacctaatttttgtatttttagtagagacggaattttgccatcatggccaggctggtctccaacatctggactcaagttatccacccaccttgtcctcccaaaatgtcaggattactggtgtgagccaccatgcctggtctagtttaataattttaaaaaggaaaataaaatcattagttgatgcagtggttasacttttctaatacaaatttaaa

SEQ ID NO: 236822 - DNA, 518 bp, Homo sapiens
taataccagtaataaaatactaagaaaaaattattttaaaagaagtagagtttggataatatttaaatgagctatttccagttaaaaaartcagaggaaaactgcttgattaatgttttctgcacacacaaaaaagtgttctctaaatttttctaagtggcctttaatttaatgcaaattaagagtgttttagattgaagtcaagcattcagtagcggtaaggaaattctatcccttatacttactagaataggataatgatgatgcataaggttacaatagaacttgttctgagtcagattttttgaattataaataatatattggtggtcaagtacatttctttaaaaaaaagtcataaaatacactgcatcagaagtgccacttaaaattttattcattttaaaatttctaatctgtggtcaaatttactgatctcacaggtgtgaagtaggaaaagttgttatctgcttcctcttctaacatgaatccagatggggcaagattgcatttgagac

SEQ ID NO: 236823 - DNA, 613 bp, Homo sapiens
ttgtattgtttaatttttataaagctatatcaactttttagttgacagagaacaaatcgcaaaaatrcatacttaatactcttctgagtatatttttcaacattatgtataaaactcatatggacagatgtttaagttgagcagctcaaacaaagaaagtcaccattaattaattgtccttaagaaagactttgaaagatcacacaatttaacatcctttcttatagtattacaacagaaataatcaagagaaggtaaaacattataaaaaaagaaatgaaattccaaagttttagctcagttttttatatgtatgtcatccggtgtgtgtgtgtgtgtgtgtgtgtgcgtgtgtgtgtgtgtatctctctccttagttttatcaactagaatttttatgccaaaaattctagatgatcacagtgtatgaataaataaaatattttataataagcttagttttggaagtgttacagaacttagtctccaaaatttcagaattctagggcattattttaaaatgttctaattacaatatttatatgtgtgtgtattttctatattcacgcatacatagaaattgtctctttcatgatgagagagtgtgtgtgtg

SEQ ID NO: 236824 - DNA, 303 bp, Homo sapiens
caggctatttgatgctctgcaccacttttgatttagacagagcctctgacacaaacagagcaggcctcatatattccattgccttttgttccatttcatcataccccagggatgtcatttatcatcacccttggtcatgcacggctaaaagaacaagagaggtagatgtgctctgctattcacagctgggcttcctttgggctgcaaaagaaagttacttaakgcattgtggatcatttcttagccattcaatgatattcacagaagagcaaagagcaccttttataaaaacgacatttcaac

SEQ ID NO: 236825 - DNA, 511 bp, Homo sapiens
ttctgaaagaatatgtagtgatctgtgttcatactgtccatcctgtaagcaatgattaaaactaatttagcttggttattcattaagtctccatggacatttttgcataactatggactttatatttctacccaacagtttagcactgactagcccttgggtttaytgtaccctacactggcttcttgctgacagtaccatgcttgagactgacttttgagtttgaaaagagcagaaattctagactagaatttctagaggaagagtaggaagtggatcacttcacctctcatttttatttgcactccagtcactcaatacactgctttagatcaaggacaggaaccatagccacagaaaggtcgtgaggaagtacatcatcattccagtctgtagtctacctaattccaaatagcatgtgatatgtgtatgtgtttgggaggtgaaagggtaggatgcccttgccttacaaatagctaaagctcttaagggtagggttgtgcgttttatt

SEQ ID NO: 236826 - DNA, 581 bp, Homo sapiens
aaattccatcttccataaagccctggggcatggatacaattcagcaaagttctctgccactttatatcaaggatggcctttactccartttccaaaaagatgtttcccatctccatctgagacctcatcagaatggcctctactgcccatatttctaccagcattcctatcataaccacttaagtaatctatatgaagtttcagactttccctgtagctctccttcttctgagttttcaccagaatcgtctgtaatcctccatttatagcaatacaagctttttctagcattcatttcaaaactgtttcagcctctactcattacctagctctcaatcgtttccacattttcgggtattcgttatagtaccactcaattcctctggtaccagttttctatcttagtttgttttgggctactatgacaaaacaccccagactgggtaatttacaataaacaagaatttattttctcacaattctggaggctgggcactctaaaatcaaggggccggcatccatcaaagtccttcttgttgtgttataatatggcagaaggcatcaccaggtagaagggcaca

SEQ ID NO: 236827 - DNA, 455 bp, Homo sapiens
catgtattaaatatacataagataaactgcaccatttaaactattttaagtgttcaggtctgtggcactaagtatatttatattgttctgcaaccatccccaccagtcatctccagaatagtttcattgtctccaactaaaattttgttctctacacaattattctccttgactcccttcccccatccccwggggtccagcattctactttctgtctctataaatttgactactctgggtacttcctgtacataaattcatacaatacttgcctgtttctggcttattttgcttagcataatgtaatcaagtttcatctatgttgtagcatgtgtcaaaatttctttcattttaaaaactgaataatattccattgtatgtactcattacattttttattgatttctctgtggatggacacttaagttgtctctgcctttggggtattgtgaata

SEQ ID NO: 236828 - DNA, 620 bp, Homo sapiens
cctcatgggtttttaagttgcacggtctgtgtaccctagtgcagtaacggatccttaatcttgagtcaagcacagataacacacccattttacttggacacccagcattgaaacttttaaaattatactacttaagtatatgtcagtataaaattgactaggtataagattcctttgcttagaactcttatatataactataaaccaaaacaaactatcaaatgaataaattctcaatgtgtagatgatatttggctgacctggaagggccccatcccagggctgtggagggctgctgccstgcgagctcccttgcattcagcacacctgggcctttgtgtgtccaagatgtctgcaccctccagccctttgccaaatttgagctactttgaatgtttctacagtgtgtcgtgctattatttggcctccactgggtgtgactgaattacttccctgttaaatcccactctgttccctactcattagctcagtgcttctcagaatttaatgtgcagaggattcacctgtgggtcttgttgaacggcagatccttcagtatgaaacgaatgcttcagtaggtctggggtggagtctgagatgctgcgttaccagcaagctcc

SEQ ID NO: 236829 - DNA, 419 bp, Homo sapiens
tggccagaagttctcctatttttacttttttgagaaactttcatgctgttgtttataatggctgtaccaatttacattcccaccaatagtgtataaaagttccttttttctctacatcctctccagaatttattgtctttttgataatagccatcctaactagggtaagatggtatcacattgtggttttgattttcatttccctgatgattaatagtgytgagcattttttcatatactgcttggccatttgtatgttttcttttgagatatgtcttctcagattctttgcccattttaatgagattatttgttttttgctgttgagttgtttgagcttcttgtatattctggatgttagccccctgtcagaagaatagtttgcaaatattttctcctattcaacaggctatttgttc

SEQ ID NO: 236830 - DNA, 577 bp, Homo sapiens
ggaaagctttttaagtggtgctgttgggattctccagaaaaacagaatgaatagatgtgtgtgtgtgtgtgtgtgtgtttgtgtgtgtgtgtaagtaaaaagaggtgattttaatgaattgactcacatgattatggagactggcaagtccaaaatctggaaggcaggccagcaggctggagacccaacgaagagccagtgctacagttcagttctgaaggctgtcggcagaactccctcttggtcaggttggtctttcattctattcaggcctttcactgtttggacaaggctcactcacattacagagataatctgctttactcaagtccaccaatttaaatgttaatctcatcgaaaaacactctgacagaaacctccagaataatgttggaccatctatctgggcaccatggcgcagccaaattgacacataaaattaagcatcacagttaactgtgcaggattatgaaagagtgacattatataatgtattttatcaagatgattctggttattgattgaaaatagactatatgrtgagaattgtagactcagggacaccagagaagagact

SEQ ID NO: 236831 - DNA, 582 bp, Homo sapiens
agcaagcttacgattggacaatttgaataatttcaaagggctctggcatctagggtggtacttagttgtctggtacccagtccttgggtaatttaaggcagggaagtattgrcttggtgtatgagaatttgagaaaggaggttagtgagagtctgagctctagttggttggcttgcatatcaaaagcatgctcacaggcaagttgcttgcaatgtctaggaattagcaaaccctgggaggggaagtccctccctaagtccccatgacctcccaatatgtcaaagcattataaactatgagaaataaaaaacaggattaatacacaaagtgctatccaaaatgtatagaatgaaagagtgaaataaaaggataggtaaggagccgggaggcaatatcagcctgatacctgggtctcaaaatatttgacttagccacttagattcagatatagagatagataatgatagatagctatatagatgatagctagatagccaaatgatgatagaagatagatagatagatagatagatagatagatagatagatagatagttagatagatgatagatagatatagac

SEQ ID NO: 236832 - DNA, 565 bp, Homo sapiens
atgtccccacagctgatgcctgttactgctggggctgagctcagcgatccagcccacccggctaatccaggactttttttttcactgcgagaggctaagtggatcctggaggtgatagtaagaattgcgggragcgcggctctagctcagctgggagctttctggtgccggtgaggagaccatgaagccaccagccccagctgacccgcccgccgaggcccagagagtcagaccctggccgccccttgcccctccgctcgcactacctgccccaggtgtcgtgcccgtcacaggtgagaggtcgcagctcatcgaagggaaaggcattctccaggtagctgtcgtaggcgtggtagaacatggccttgactcgctccctgggtgggggacgagaaatcaggcatggggcaagaacacaaaaacaagcgggggaagaacaagatacagggcggaaagtgggaatcactagctgatttctccctgggacctagcggctgtgtcggagcaagtcggggtctgggatggacggaaagggaaaggaccgggttcacgcttcccattcccc

SEQ ID NO: 236833 - DNA, 419 bp, Homo sapiens
acctcggcctccccaagtgctgggattagacgtgagccactgcgcctggtcttctcactcattcttagacccagtgcaatctgacttctctataaactactstgagatcaccagtaacctctaattgtcaaaccatcaccctacatggtatctgcaaatttgcggactagaactctctttttgccttaacttctgagataccatacttcaatttttaaaactgttctgtctactttttttcaatccctttgactatgtcatcttacacgattcaccctggaaatgctggcttccttagaattccattttttggttccttttgttcctgtttgaactataccctttctaggtgacctactgaccttcatggctgcaaatactatctacctgtggtttccatggagaagcaatataatttt

SEQ ID NO: 236834 - DNA, 419 bp, Homo sapiens
acctcggcctccccaagtgctgggattagacgtgagccactgcgcctggtcttctcactcattcttagacccagtgcaatctgacttctctataaactactctragatcaccagtaacctctaattgtcaaaccatcaccctacatggtatctgcaaatttgcggactagaactctctttttgccttaacttctgagataccatacttcaatttttaaaactgttctgtctactttttttcaatccctttgactatgtcatcttacacgattcaccctggaaatgctggcttccttagaattccattttttggttccttttgttcctgtttgaactataccctttctaggtgacctactgaccttcatggctgcaaatactatctacctgtggtttccatggagaagcaatataatttt

SEQ ID NO: 236835 - DNA, 419 bp, Homo sapiens
acctcggcctccccaagtgctgggattagacgtgagccactgcgcctggtcttctcactcattcttagacccagtgcaatctgacttctctataaactactctgagatcaccagtaacctctaattgtcaaaccrtcaccctacatggtatctgcaaatttgcggactagaactctctttttgccttaacttctgagataccatacttcaatttttaaaactgttctgtctactttttttcaatccctttgactatgtcatcttacacgattcaccctggaaatgctggcttccttagaattccattttttggttccttttgttcctgtttgaactataccctttctaggtgacctactgaccttcatggctgcaaatactatctacctgtggtttccatggagaagcaatataatttt

SEQ ID NO: 236836 - DNA, 419 bp, Homo sapiens
acctcggcctccccaagtgctgggattagacgtgagccactgcgcctggtcttctcactcattcttagacccagtgcaatctgacttctctataaactactctgagatcaccagtaacctctaattgtcaaaccatcaccctacatggtatctgcaaatttgcggactagaactctctttttgccttaacttctgagataccatacttcaatttttaaaactgttctgtctactttttttcaatccctttgactatgtcatcttacacgattcaccctggaaatgctggyttccttagaattccattttttggttccttttgttcctgtttgaactataccctttctaggtgacctactgaccttcatggctgcaaatactatctacctgtggtttccatggagaagcaatataatttt

SEQ ID NO: 236837 - DNA, 253 bp, Homo sapiens
ggtaatagcaaaacaataaatcaagtgtaggatcccactgagtgtggaaccctgtgcawctgtgtaggtcacatgctcatgaagccagcctgctcccagaacacatagaaaaatgaatagggatacagaaggatatgaaggacataaatgtatacagcaccaatgtgttaccttggacaagttacttaggtattctgtatcacagtttacaggtctgttaagtggagatgacaagagtattttatattgttat

SEQ ID NO: 236838 - DNA, 253 bp, Homo sapiens
ggtaatagcaaaacaataaatcaagtgtaggatcccactgagtgtggaaccctgtgcatctgtgtaggtcacatgctcatgaagccagcctgctcccagaacacatagaaaaatgaatagggatacagaaggatatgaaggacataaakgtatacagcaccaatgtgttaccttggacaagttacttaggtattctgtatcacagtttacaggtctgttaagtggagatgacaagagtattttatattgttat

SEQ ID NO: 236839 - DNA, 253 bp, Homo sapiens
ggtaatagcaaaacaataaatcaagtgtaggatcccactgagtgtggaaccctgtgcatctgtgtaggtcacatgctcatgaagccagcctgctcccagaacacatagaaaaatgaatagggatacagaaggatatgaaggacataaatgtatacagcaccaatgtgttaccttggacaagttactyaggtattctgtatcacagtttacaggtctgttaagtggagatgacaagagtattttatattgttat

SEQ ID NO: 236840 - DNA, 594 bp, Homo sapiens
aatatctaaatcaccttcgcattttccttatttaactctaccccacctacccaaccaatatcatcatttctaaagtctattttctgccacagcttttccgttggtgcctttcttatccttttcactgctaccactgagctactccctgttacttcacacaaagagtattttaattatttgttaggtagtctgcctgtagacacactgtgtcttgaaagactaaccttctaaaagattattggctgtgtccagagccaacttcatgggtatacaacctatgcagtcacataagcctccacactaataagagcccatgctttgttcaatgttctgctgttccctgcttataatttttaattaatgaacaagagtcaccacttttattttgcactgagctcttcaaatgatgtagacagcakagccacgccacttccttgtttggaatatttacagcacattttcattgtttattaaactgatgatattcattccaaaccagcattcagggtcttacacatggctataataggcttctcctgacctgtcaactacggcacagttcagtagatctttattctttcatttctttatcca

SEQ ID NO: 236841 - DNA, 594 bp, Homo sapiens
tccatcattacctctaatctttgccctagcttaattactagccttttcccattcccattgtatctttatttgttttcatacaatttgacatttttttctcttatctgtcctggacaaatcccagttgttatctcttttaatagattattcacttctttagtctctcctgagataaccactagatgattaaatcttattatattttttcatrtcataaactttcagtttcattaccttgtctttctccattacaatctgattaatgattttagctttggcttctagttcaaattcttttttcaactttgtttaatctacagtttgaccatcgagattatacttttaattatatttctagtctagtagttctatttttttatttttaaaacaggtcagttaattattgacagatttttgacacttgcttaccacatacttcttaggacaatagactctgaaggatttgaattctagcactacaacttgcactgtgtaaatttagggaactttcttaatttctctaagttttcatttcctttttcataaaattagtagcatttactttatagagttgttgaggattagatgagtaaa

SEQ ID NO: 236842 - DNA, 594 bp, Homo sapiens
tccatcattacctctaatctttgccctagcttaattactagccttttcccattcccattgtatctttatttgttttcatacaatttgacatttttttctcttatctgtcctggacaaatcccagttgttatctcttttaatagattattcacttctttagtctctcctgagataaccactagatgattaaatcttattatattttttcatatcataaactttcagtttcattaccttgtctttctccattacaatctgattaatgattttagctttggcttctagttcaaattcttttttcaactttgtttaatctacagtttgaccatcgagattatacttttaattatatttctagtctagtagttctatttttttatttttaaaacaggtcagttaattrttgacagatttttgacacttgcttaccacatacttcttaggacaatagactctgaaggatttgaattctagcactacaacttgcactgtgtaaatttagggaactttcttaatttctctaagttttcatttcctttttcataaaattagtagcatttactttatagagttgttgaggattagatgagtaaa

SEQ ID NO: 236843 - DNA, 594 bp, Homo sapiens
aatatctaaatcaccttcgcattttccttatttaactctaccccacctacccaaccaatatcatcatttctaaagtctattttctgccacagcttttccgttggtgcctttcttatccttttcactgctaccactgagctactccctgttacttcacacaaagagtattttaattatttgttaggtagtctgcctgtagacacactgtgtcttgaaagactaaccttctaaaagattattggctgtgtccagagccaacttcatgggtatacaacctatgcagtcacataagcctccacactaataagagcccatgctttgttcaatgttctgctgttccctgcttataatttttaattaatgaacaagagtcaccacttttattttgcactgagctcttcaaatgatgtagacagcatagccacgccacttccttgtttggaatatttacagcacattttcattgtttattaaactgatgatattcattccaaaccagcattcagggtcttacacatggctataataggcttctcctgacytgtcaactacggcacagttcagtagatctttattctttcatttctttatcca

SEQ ID NO: 236844 - DNA, 607 bp, Homo sapiens
tgtgactagtatgagatgatatctcattgtggttttgatttacattactctgatgattagtgatgctgaggactttttcatgtttgttggctgcttgtgtgttttcctttgacaagtgtctgttcatgtcctttgcccattttttaatggtgctatttgtattttgcttgtttatttaagttccctatagattatatatactaggcctttgttggatgcatagtttgtgaatatcttctcccattctataagttgtcttttcctatgttgagtttcttttactgcacagaagctctttagtttaattaggtctcacttgtttatttttgtttttgttgtgattgcttttacggacttagccaaaattttttttaccatggctgatgctgagaagagtattacctaggttgtcttccaggagtttgagttttttttwaaattattattattatactttaggttttagggtacatgtgcacaatgtgcaggtttgttacatatgtatacatgtgccatgttggtgtgctgcacccattaactcatcatttagcattaggtatatctcctaaggctatccttcccccctccccccaccccacaacagtcc

SEQ ID NO: 236845 - DNA, 322 bp, Homo sapiens
ggagtaatattatcatctcccaccctggatattagaaacaatatcacagggaatgcggatagcccctggatattaggaacaatatcacaggatgagtggacaacccctgcgttatttgtagtarttttatcttctcttccctgtatattaggaacaatatcacaggatgggtgtacacccccttcgatattgagagtagtatcatcctcttctttgcctggatattacaagcaatatcatagggtggggtagaccttctgcgatattgggagtaatataatcctctcccctctgaatattatgaacaatataacaaggggat

SEQ ID NO: 236846 - DNA, 478 bp, Homo sapiens
caaataaaatcttttaaactccaaattcctaatggtctatctaaatagtataagactttaatcattgaataatgataaatgatatttcaaaaggaagaatgtgtttggagttctcccctcagatagcagaagcacacacacctttcccactctacacctgccaagagatcccaagaagttaccatgggtaacttctgtgatctccaggaaggtgactgcagggaaataaatggagggaattagattctatgcaggctctcgtctcagaaatcctccttgctttctacttctgccattacctatttctccagtgaataatttaatcttctttamcttaaccagactaccaaaaacagttgcatggcttctcctctaccattttatctgctaagcaagcacagggttcttcaacagtttttttgtggactccagagattgtataatagcagttctgtaagtcttcagaggaaagagaatt

SEQ ID NO: 236847 - DNA, 478 bp, Homo sapiens
caaataaaatcttttaaactccaaattcctaatggtctatctaaatagtataagactttaatcattgaataatgataaatgatatttcaaaaggaagaatgtgtttggagttctcccctcagatagcagaagcacacacacctttcccactctacacctgccaagagatcccaagaagttaccatgggtaacttctgtgatctccaggaaggtgactgcagggaaataaatggagggaattagattctatgcaggctctcgtctcagaaatcctccttgctttctacttctgccattacctatttctccagtgaataatttaatcttctttaccttaaccagactaccaaaaacagttgcatggcttctcctctaccattttatctgctaagcaagcacagkgttcttcaacagtttttttgtggactccagagattgtataatagcagttctgtaagtcttcagaggaaagagaatt

SEQ ID NO: 236848 - DNA, 478 bp, Homo sapiens
caaataaaatcttttaaactccaaattcctaatggtctatctaaatagtataagactttaatcattgaataatgataaatgatatttcaaaaggaagaatgtgtttggagttctcccctcagatagcagaagcacacacacctttcccactctacacctgccaagagatcccaagaagttaccatgggtaacttctgtgatctccaggaaggtgactgcagggaaataaatggagggaattagattctatgcaggctctcgtctcagaaatcctccttgctttctacttctgccattacctatttctccagtgaataatttaatcttctttaccttaaccagactaccaaaaacagttgcatggcttctcctctaccattttatctgctaagcaagcacagggttcttcaacagtttttttgtggactccagagattgtrtaatagcagttctgtaagtcttcagaggaaagagaatt

SEQ ID NO: 236849 - DNA, 572 bp, Homo sapiens
agtcttcagaggaaagagaatttatctcttattatctgaatgcctttgtgcagtttacgtaaaatatttggctttggttctacgttaaaacagtgatcatgatgtacatcttgtggttctttgagaagaaagtagtggatataaagcacaacctggaatttaaactattctaggtctagctaatagtttaggcataatgaggttgatcattttgctatatttttcactatgttttacttaaaacttgtagcaaaagggaaagttgtgcaggtgattgttctttatgtagacgaagaactgaagtattgaatacatttcaaaggttgcccatcaaggtcttttaaataagaaatataactgggtatcagatcagatactaagagaactgaatctstttgataatgctggctggtgaaatggtgggaggatttggaatcctgattatgaaccccaatacccttctttctttctgtcacttgcagtctcttgtcatcacagaccacatctagaatcatggtcaatccctggataatttcagaatgaggaattatggctcactgatttattcaacc

SEQ ID NO: 236850 - DNA, 379 bp, Homo sapiens
tctaggaagtttcaaactttccctcatcttcctstcttcttctgagccctccagactcttccaacctctgcccattacctagttccaaagttgcttccacatttttagatatttttgtagcaatatcctactcttggtaccaatttcctgtattaatctgttctctgattgctataaagaactaccaaaaactgattatcttactaagaagggatgtttaattgactcatgattttgcaggttgtacaggaagggtgactggggaaggctcagaaaacttacaatcatggcagaaggcaaagaggaagcaggtacatcttacatggcctgagcaggaggaagaaagaggaggaggtgctacactttttaaacaaccaga

SEQ ID NO: 236851 - DNA, 379 bp, Homo sapiens
tctaggaagtttcaaactttccctcatcttcctctcttcttctgagccctccagactcttccaacctctgcccattacctagttycaaagttgcttccacatttttagatatttttgtagcaatatcctactcttggtaccaatttcctgtattaatctgttctctgattgctataaagaactaccaaaaactgattatcttactaagaagggatgtttaattgactcatgattttgcaggttgtacaggaagggtgactggggaaggctcagaaaacttacaatcatggcagaaggcaaagaggaagcaggtacatcttacatggcctgagcaggaggaagaaagaggaggaggtgctacactttttaaacaaccaga

SEQ ID NO: 236852 - DNA, 379 bp, Homo sapiens
tctaggaagtttcaaactttccctcatcttcctctcttcttctgagccctccagactcttccaacctctgcccattacctagttccaaagttgyttccacatttttagatatttttgtagcaatatcctactcttggtaccaatttcctgtattaatctgttctctgattgctataaagaactaccaaaaactgattatcttactaagaagggatgtttaattgactcatgattttgcaggttgtacaggaagggtgactggggaaggctcagaaaacttacaatcatggcagaaggcaaagaggaagcaggtacatcttacatggcctgagcaggaggaagaaagaggaggaggtgctacactttttaaacaaccaga

SEQ ID NO: 236853 - DNA, 379 bp, Homo sapiens
tctaggaagtttcaaactttccctcatcttcctctcttcttctgagccctccagactcttccaacctctgcccattacctagttccaaagttgcttccacatttttagatatttttgtagcaatatcctactcttggtaccaatttcctgtattaatctgttctctgattgctataaagaactaccaaaaactgattatcttactaagaagggakgtttaattgactcatgattttgcaggttgtacaggaagggtgactggggaaggctcagaaaacttacaatcatggcagaaggcaaagaggaagcaggtacatcttacatggcctgagcaggaggaagaaagaggaggaggtgctacactttttaaacaaccaga

SEQ ID NO: 236854 - DNA, 635 bp, Homo sapiens
gatcatttttccatattttttttggccattcatatatcttttttttgagaaatatccatttagcttctttgccaattttttaattgcagcatttgtttttttgctattgagytgtttcagttgctttgaaatattttgtttattaacttcttgtcagatgtatagtgctatggttggatgtttgtcttctccaaatctcatgttgaaatttgattcccaatgttagaggtggggtctaatgggaggtgtttcaatcgtgggacagatctcttataaatatcttggttctgtccttgtggtaatgagcaagtaattgctcatttggttcttgtgagagctggttgcttaaaagaacctagcacttccccttctctctgttgcatctctctcacatgtgatctctgcacatgctgacttcccttcaacttccaacatgagtggaagcagcctgaatccctgaccagaaacagatgctggcaccatgcttcttgcacagcttgtataactgtgaaccaaataaacctagtttcttcataaatttggcagactcattggttcctttacagcaacacaaatagactaagacagaaaaattggtaccaaggagcagggtgttgccataaagatacttgaaa

SEQ ID NO: 236855 - DNA, 635 bp, Homo sapiens
gatcatttttccatattttttttggccattcatatatcttttttttgagaaatatccatttagcttctttgccaattttttaattgcagcatttgtttttttgctattgagctgtttcagttgctttgaaatattttgtttattaacttcttgtcagatgtatagtgctatggttggatgtttgtcttctccaaatctcatgttgaaatttgattcccaatgttagaggtggggtctaatgggaggtgtttcaatcgtgggacagatctcttataaatatcttggttctgtccttgtggtaatgakcaagtaattgctcatttggttcttgtgagagctggttgcttaaaagaacctagcacttccccttctctctgttgcatctctctcacatgtgatctctgcacatgctgacttcccttcaacttccaacatgagtggaagcagcctgaatccctgaccagaaacagatgctggcaccatgcttcttgcacagcttgtataactgtgaaccaaataaacctagtttcttcataaatttggcagactcattggttcctttacagcaacacaaatagactaagacagaaaaattggtaccaaggagcagggtgttgccataaagatacttgaaa

SEQ ID NO: 236856 - DNA, 635 bp, Homo sapiens
gatcatttttccatattttttttggccattcatatatcttttttttgagaaatatccatttagcttctttgccaattttttaattgcagcatttgtttttttgctattgagctgtttcagttgctttgaaatattttgtttattaacttcttgtcagatgtatagtgctatggttggatgtttgtcttctccaaatctcatgttgaaatttgattcccaatgttagaggtggggtctaatgggaggtgtttcaatcgtgggacagatctcttataaatatcttggttctgtccttgtggtaatgagcaagtaattgctcatttrgttcttgtgagagctggttgcttaaaagaacctagcacttccccttctctctgttgcatctctctcacatgtgatctctgcacatgctgacttcccttcaacttccaacatgagtggaagcagcctgaatccctgaccagaaacagatgctggcaccatgcttcttgcacagcttgtataactgtgaaccaaataaacctagtttcttcataaatttggcagactcattggttcctttacagcaacacaaatagactaagacagaaaaattggtaccaaggagcagggtgttgccataaagatacttgaaa

SEQ ID NO: 236857 - DNA, 458 bp, Homo sapiens
tcttttaggcacactctatactcagataacaaaagctgtttgcagttctctgtacatatcatgctgtttcatacctccaattcattatgcaggggctcctcccttgacttttgacattcttccctgcccaccctcgtttattctttttcaagcctacttttcctttattttagtctgttttctgtkctataactgaatacttgagactgggaaatttataaagaaagaggtttacttagctcatggttctggaggctgggaagttcaagattggatgaccacacctggtcagcttctagtgagggccttgtgctgcaccaaaacacggtggaaggcatcacagggcaaaggggcacataagagagagccaaactggcttttataacaaattcactctcatgctaacccatcaatccattaatctatgaatagattaacccattcatgagggcagagta

SEQ ID NO: 236858 - DNA, 458 bp, Homo sapiens
tcttttaggcacactctatactcagataacaaaagctgtttgcagttctctgtacatatcatgctgtttcatacctccaattcattatgcaggggctcctcccttgacttttgacattcttccctgcccaccctcgtttattctttttcaagcctacttttcctttattttagtctgttttctgttctataactgaatacttgagactgggaaatttataaagaaagaggtttacttagctcatggttctggaggctgggaagttcaagattggatgrccacacctggtcagcttctagtgagggccttgtgctgcaccaaaacacggtggaaggcatcacagggcaaaggggcacataagagagagccaaactggcttttataacaaattcactctcatgctaacccatcaatccattaatctatgaatagattaacccattcatgagggcagagta

SEQ ID NO: 236859 - DNA, 458 bp, Homo sapiens
tcttttaggcacactctatactcagataacaaaagctgtttgcagttctctgtacatatcatgctgtttcatacctccaattcattatgcaggggctcctcccttgacttttgacattcttccctgcccaccctcgtttattctttttcaagcctacttttcctttattttagtctgttttctgttctataactgaatacttgagactgggaaatttataaagaaagaggtttacttagctcatggttctggaggctgggaagttcaagattggatgaccacacctggtcagcttctastgagggccttgtgctgcaccaaaacacggtggaaggcatcacagggcaaaggggcacataagagagagccaaactggcttttataacaaattcactctcatgctaacccatcaatccattaatctatgaatagattaacccattcatgagggcagagta

SEQ ID NO: 236860 - DNA, 316 bp, Homo sapiens
gggaccacaggattggctatacactcatttcaggtgatgatgtgtgtgctcttggtgactcccctccacccagaatttgactcctcttgggctccartttctaggtctttgtttaagagcagaagcaaaggtgtcaagttgggggttgacacttttatcaccccatagttcagggccattcctctggctcttccctgccactgctgcctcaggtccattttgcctattccttcttgctaaaggctcaccaaaatgatagtggcagaagtgggggcctactttccaccagcttatttattcttaagactttctcatt

SEQ ID NO: 236861 - DNA, 316 bp, Homo sapiens
gggaccacaggattggctatacactcatttcaggtgatgatgtgtgtgctcttggtgactcccctccacccagaatttgactcctcttgggctccagtttctaggtctttgtttaagagcagaagcaaaggtgtcaagttgggggttgacacttttatcaccccatagttcagggccattcytctggctcttccctgccactgctgcctcaggtccattttgcctattccttcttgctaaaggctcaccaaaatgatagtggcagaagtgggggcctactttccaccagcttatttattcttaagactttctcatt

SEQ ID NO: 236862 - DNA, 565 bp, Homo sapiens
gggggatcagtgtggaatctttatttataataaagaataggaagtattagagcttaaatagtcaaaaaatggtccacagacactgatttttttcaaataacttactggcaatgcatttaaaagtataatgaattatctgtatttttgcgataaaattaatgaaactcattcataacaattaattcttctgtggaaggggcataaaaaggaaaactactggactatttttaggaactgtataacactaccattaatttactcttactgaaatagtctgattttgactagacagataagataaagtataatgcaggagaaatgaaaattaccaagtacatattatacaactctaataaagtttacaaacacaggtttatggcttaattastaatatttctctaatcttatgtagaaaactctagagaatactgcatgaataatcattatcaccacttactacactgctgagttagcatccaaaatatatctgcccttatatgtatatgtgtacctcagcacataaaatatatatggatagtactatttgactaactggtaaagcatg

SEQ ID NO: 236863 - DNA, 588 bp, Homo sapiens
ccatagaactgatatttacaggttttttgaataaacaaagaattgacccttccggtcttaaaacttgaaacttaaatttgtcttgcctgagatcttcctcagaaaagggactgagtcactagatcaccgcatccagccaggtccctccctaatttctctttaccaactcctcttccttaacccttcctaatttctgttttccatcatgtagttaaatttcttccctgctatataaacctctagatttatctgagttgacatcactgaaataaaaagwcttcttccctggcaatacttattggctcaatgactggctttctgtatggggagcaacaggacctagaccaaacccctggcatttttgtaacatcatcagcattaggttcgtattgttcttatacctaacggtcaaagagaaaaagaaaaactcccaggatggcctccttggcccagcctgagttgtacacctattcccgacttactcgcagtggccaataaaatgaagtacttggagttctctaattttttcattcctgtgtcacacatccaactttgaagccaaggtttgtgtcacctaatgggaatcta

SEQ ID NO: 236864 - DNA, 576 bp, Homo sapiens
cattaatttactcttactgaaatagtctgattttgactagacagataagataaagtataatgcaggagaaatgaaaattaccaagtacatattatacaactctaataaagtttacaaacacaggtttatggcttaattagtaatatttctctaatcttatgtagaaaactctagagaatactgcatgaataatcattatcaccacttactacactgctgagttagcatccaaaatatatctgcccttatatgtatatgtgtacctcagcacataaaatatatatggatagtactatttgactaactggtaaagcatgctaacgcctagtggaataattactaacaaactagattctggttgtttatgatttactggtctgaaaataacataatttatttttttccttaccacaagctccaytgataatttattacattataatgaataaaaatcacaaacctattttatcctgatgcattttcatctactctttatattggccataaaatttaccagcttgaaatctaggactcgtctaaaataagcatgggccaatgtcatataaagagttaaca

SEQ ID NO: 236865 - DNA, 576 bp, Homo sapiens
cattaatttactcttactgaaatagtctgattttgactagacagataagataaagtataatgcaggagaaatgaaaattaccaagtacatattatacaactctaataaagtttacaaacacaggtttatggcttaattagtaatatttctctaatcttatgtagaaaactctagagaatactgcatgaataatcattatcaccacttactacactgctgagttagcatccaaaatatatctgcccttatatgtatatgtgtacctcagcacataaaatatatatggatagtactatttgactaactggtaaagcatgctaacgcctagtggaataattactaacaaactagattctggttgtttatgatttactggtctgaaaataacataatttatttttttccttaccacaagctccactgataatttmttacattataatgaataaaaatcacaaacctattttatcctgatgcattttcatctactctttatattggccataaaatttaccagcttgaaatctaggactcgtctaaaataagcatgggccaatgtcatataaagagttaaca

SEQ ID NO: 236866 - DNA, 608 bp, Homo sapiens
tccaagtagaattaataaatgtaaaaatcttgactaaaaatagatcttctggacttcrcagactgtacttgaatcactactctatatgatctctttcctatgctagatacaatgataatcataaacaaggggtaatctagactttcattatctttggtaaattcacagaaaatgcccatttaattacaagatactactatactgagattttaatagtaaagaattaatgaagaatttaaatattctagttacaaaaataattaatttagaactatgtgtagcagtttgagatttaaatttatttatgaaaagttacattaaaatatgtttcatatattctcaatacctctctgaactttttcttattcttaagatatttcattgaattgtgatactgatttcagatataacattgttagaactctggttaaatacactggtaacatttgttagcggttaaaaatttaacacgggcttatggttcaatgtagtagattgagcatatgctgatgtctactgctttgttccaaaactcattttaataggaatacaagtatagaaataagaaatggaggaagagtgtcaatggggtatgaaagcatttgtaa

SEQ ID NO: 236867 - DNA, 608 bp, Homo sapiens
tccaagtagaattaataaatgtaaaaatcttgactaaaaatagatcttctggacttcacagactgtacttgaatcactactctatatgatctctttcctatgctagatacaatgataatcataaacaaggggtaatctagactttcattatctttggtaaattcacagaaaatgcccatttaattacaagatactactatactgagattttaatagtaaagaattaatgaagaatttaaatattctagttacaaaaataattaatttagaactatgtgtagcagtttgagatttaaatttatttatgaaaarttacattaaaatatgtttcatatattctcaatacctctctgaactttttcttattcttaagatatttcattgaattgtgatactgatttcagatataacattgttagaactctggttaaatacactggtaacatttgttagcggttaaaaatttaacacgggcttatggttcaatgtagtagattgagcatatgctgatgtctactgctttgttccaaaactcattttaataggaatacaagtatagaaataagaaatggaggaagagtgtcaatggggtatgaaagcatttgtaa

SEQ ID NO: 236868 - DNA, 541 bp, Homo sapiens
aatttatttatgaaaagttacattaaaatatgtttcatatattctcaatacctctctgaactttttcttattcttaagatatttcattgaattgtgatactgatttcagatataacattgttagaactctggttaaatacactggtaacatttgttagcggttaaaaatttaacacgggcttatggttcaatgtagtagattgagcatatgctgatgtctactgctttgttccaaaactcattttaataggaatacaartatagaaataagaaatggaggaagagtgtcaatggggtatgaaagcatttgtaaaatcttatgggaagtaattagtggatgaaggaatagaaatacaggaaaccacatcttagaaaatgtccaaagaggagcacatatcagaagagccttaccttgcgtttcaaataccaagaggtcatatgggacttggaaattccaggttagaatagacacaggtgtgtgtaactttttgaaaacaagggagtggaggataatggaaagcctgtagctgcataatgttca

SEQ ID NO: 236869 - DNA, 541 bp, Homo sapiens
aatttatttatgaaaagttacattaaaatatgtttcatatattctcaatacctctctgaactttttcttattcttaagatatttcattgaattgtgatactgatttcagatataacattgttagaactctggttaaatacactggtaacatttgttagcggttaaaaatttaacacgggcttatggttcaatgtagtagattgagcatatgctgatgtctactgctttgttccaaaactcattttaataggaatacaagtatagaaataagaaatggaggaagagtgtcaatggggtatgaaagcatttgtaaaatcttatgggaagtaattagtggatgaaggaatagaaatacaggaaaccacatcttagaaaatgtccaaagaggagcacatatcagaagagccttaccttgcstttcaaataccaagaggtcatatgggacttggaaattccaggttagaatagacacaggtgtgtgtaactttttgaaaacaagggagtggaggataatggaaagcctgtagctgcataatgttca

SEQ ID NO: 236870 - DNA, 456 bp, Homo sapiens
  misc_feature (1)...(456): n = A,T,C or G
gatggcagtggtggtggcatctcctcatcgtgctgctcccctcacntacattttatcaactcatttgycagtgaacatttaggttatttccacatcttggcttttgttaataatcatgcaatgaacacaggagtgcagatatgtcttcaaactcctgattgcaattcctttggatatatatgcagaagtgggattgctggatcaaataataattctgtttttaattttttgaggaacctccatattgttttccatagctgatagctgtgcaccaatttacatttccacgaacattgtacacattttcttttctacatccttgccaacacttgttgtccttttttttaatttttgataatagccatcctaacaggtgtgagatgatatctcattgtggttttcatttgcatttctctaacgattagtaacactgagcactttttcatatactgttgg

SEQ ID NO: 236871 - DNA, 592 bp, Homo sapiens
aagcttagtgccaaagacagccagctgggtctttaagccccaagttaccccagcaaagagctacactccagttagctattagcttttatttactcaaaaacatccacaggtgaattcagcagtttaagtcccccttaaactcagtttatttyttctgttcccaacatctcctaggcatcctccgagagcaggttctctgctcaattccacaatggtatggaaatgagtcaccaccacacacatgttcagcccaactggagccttttgtcagtaagtcaactaggcacccttcaggctccatgacttattcttctattgggaagaaggaaaacagacaataatatcaataatacgttgtccccaagtcaggcctccaaaacactgaattagagagaaaggacaagggaaaaatgaagtggaggaagagagtagtggagtgggggagatataattggggagcactggagatgctcccacctcagtggaagtaatcaaggatgtaaaaatcccttggcccaggcatacaggccctcaagtgtttgttgatggggaatctgaaggtcaatgagacagagtcatctctgatggataa

SEQ ID NO: 236872 - DNA, 592 bp, Homo sapiens
aagcttagtgccaaagacagccagctgggtctttaagccccaagttaccccagcaaagagctacactccagttagctattagcttttatttactcaaaaacatccacaggtgaattcagcagtttaagtcccccttaaactcagtttattttttctgttcccaacatctcctaggcatcctccgagagcaggttctctgctcaattccacaatggyatggaaatgagtcaccaccacacacatgttcagcccaactggagccttttgtcagtaagtcaactaggcacccttcaggctccatgacttattcttctattgggaagaaggaaaacagacaataatatcaataatacgttgtccccaagtcaggcctccaaaacactgaattagagagaaaggacaagggaaaaatgaagtggaggaagagagtagtggagtgggggagatataattggggagcactggagatgctcccacctcagtggaagtaatcaaggatgtaaaaatcccttggcccaggcatacaggccctcaagtgtttgttgatggggaatctgaaggtcaatgagacagagtcatctctgatggataa

SEQ ID NO: 236873 - DNA, 470 bp, Homo sapiens
taaactcagtttattttttctgttcccaacatctcctaggcatcctccgagagcaggttctctgctcaattccacaatggtatggaaatgagtcaccaccacacacatgttcagcccaactrgagccttttgtcagtaagtcaactaggcacccttcaggctccatgacttattcttctattgggaagaaggaaaacagacaataatatcaataatacgttgtccccaagtcaggcctccaaaacactgaattagagagaaaggacaagggaaaaatgaagtggaggaagagagtagtggagtgggggagatataattggggagcactggagatgctcccacctcagtggaagtaatcaaggatgtaaaaatcccttggcccaggcatacaggccctcaagtgtttgttgatggggaatctgaaggtcaatgagacagagtcatctctgatggataactactcagaattc

SEQ ID NO: 236874 - DNA, 561 bp, Homo sapiens
ttaagccccaagttaccccagcaaagagctacactccagttagctattagcttttatttactcaaaaacatccacaggtgaattcagcagtttaagtcccccttaaactcagtttattttttctgttcccaacatctcctaggcatcctccgagagcaggttctctgctcaattccacaatggtatggaaatgagtcaccaccacacacatgttcagcccaactggagccttttgtcagtaagtcaactaggcacccttcaggctccatgacttattcttctattgggaagaaggaaaacagacaataatatcaataatacgttgtccccaagtcaggcctccaaaacactgaattagagagaaaggacaarggaaaaatgaagtggaggaagagagtagtggagtgggggagatataattggggagcactggagatgctcccacctcagtggaagtaatcaaggatgtaaaaatcccttggcccaggcatacaggccctcaagtgtttgttgatggggaatctgaaggtcaatgagacagagtcatctctgatggataac

SEQ ID NO: 236875 - DNA, 619 bp, Homo sapiens
tttgcttccctgatggagttcaggttcttttagtagaattttaaaatttatttttaattaaaaaaaaaatagaggtggggtctcagtatgttggccaggttggtcttgagctcctggcctcaagcaatcctctcacctcagcctcccaaagtgctaaggttgcaggctgagccaccacacccagcctcttctagtaaaattgaaaacagccatggcctttcttttaggtgggaaattctcctgaaccacagttaactacagttaacatatatatatatatatatayacacacacacacacacacacacacacacacatatgtgtgtgtatatatgtatatatatgtatatgtgtgtgtgtgtatatatatatgtgtgtgtatatatatgtgtgtgtgtgtatatatatatataatatatatatatatattttttgtttttaagaaaaaattgtaccttgatccaataaaaatggtttcctttctggcccagagctcaccttggggccccagccttaccagcgacctgctcatgcagtcatctctctggtcctgccatctcttcttagctcagagcagttgccaaatctacattatacttgtgctttgtgcccatagtct

SEQ ID NO: 236876 - DNA, 619 bp, Homo sapiens
tttgcttccctgatggagttcaggttcttttagtagaattttaaaatttatttttaattaaaaaaaaaatagaggtggggtctcagtatgttggccaggttggtcttgagctcctggcctcaagcaatcctctcacctcagcctcccaaagtgctaaggttgcaggctgagccaccacacccagcctcttctagtaaaattgaaaacagccatggcctttcttttaggtgggaaattctcctgaaccacagttaactacagttaacatatatatatatatatatatacacacacacacacacacacacacacacacatatgtgtgtgtatatatgtatatatatgtatatgtgtgtgtgtgtrtatatatatgtgtgtgtatatatatgtgtgtgtgtgtatatatatatataatatatatatatatattttttgtttttaagaaaaaattgtaccttgatccaataaaaatggtttcctttctggcccagagctcaccttggggccccagccttaccagcgacctgctcatgcagtcatctctctggtcctgccatctcttcttagctcagagcagttgccaaatctacattatacttgtgctttgtgcccatagtct

SEQ ID NO: 236877 - DNA, 606 bp, Homo sapiens
tatggttgtaggagctgggaacccaagatagccaggttcaggccgggagaccaggctctggcctaggtgggagtaatcccctagcttggcactcagtagcttcaaaggacaagcaatctgaaagctcttaggtcacactttctaacacagctgttagaatacacaccctstaaacaggaaatgccttaggaagtacaactgagtacttttaatttttttaataaattattaaaaagcctgagcagagggtgacatttatctggcattacagttaacaagctagagatgctccctgactgtcctggttttatgttctaggcaatcgtgtgcccactgctgcttaaccggagcttaaatattcccaaattaatccataactcactttgcttgtaaaatgaatgtctcagtcaagggagttgtaagttacatagctcgtttttgctgtcataggaaagaaaaagatttactaaaccccaaaccaatatttagacacctctgtgcttggaatatgaaaaatatagtactgggcaaaagaaaaacagtgtaaaacagaggatagggaggctcaattatttgaacagcatcaggaaaggctaaaattaagag

SEQ ID NO: 236878 - DNA, 634 bp, Homo sapiens
ttataatacaagtaatagtgtgttgagcaggcatattgataggaaataaagataaaattaagcaaaaaagacactccctaccttaatggagtttacagccaagtgaagaagaaagatattcattaaactattccacaaataaatgtcatatgacaacttagagctttaataagaggatgaaacaactctggaaaatcagaaaagaatgaatgggaatcaactcactgatgtgcgatgatggaggatgctgagggctttaggctgcagcaacttacttaataagttcccaagcaggagagaacttggcttctacaggsaattaaaaagtttgccagaacaagttggtctggagacacaggcagctcagagtcttattggtcatgctaaggagatctgagtcttagttacatgaacaatcaaaaactcctgaagagttctaattctgttgacaaattatcagatttatcttctgaaaggaacactctgacagtcttgtggaaaagaaattggaaatgctgtggtaaatgcgggttacctgttagtataataatacctgtacagtagcccaggaagagagagagatagcatagacaaatggctgtggcaatagagagtggggagtgatttgaaacat

SEQ ID NO: 236879 - DNA, 571 bp, Homo sapiens
cttctgaggtggtttgttacagggcaagaaattactgggacatatattctgtgttcaaaaacaattttgagcaaaaccaaacttagggacacctgtgtccactaccaccccttcccacctgtagttcagcacactggcgtccttacttaacatgacatgatccagccaaggctggatggttggggcactagtgagaaacaaatccatcttccacccccattagtatctgtgccctcccacttgtaaactcaggattttgctcactattagaacttagaggaggtcccagacaccagatgctatgacagtaccacagaaaagcatcaaataaatggcttaaataaattatctgtcactcaaggaaatactcttaccatctgcagaggtaagaactcctggtctcacctctgcatgtcaaaaactccaaagagctacaagaagaaaascttgaaactcatgttctcccaatgttcagtcttcttctcaacacaaggcatatcagattggaagctgacccctgtgtcctgacaccatggattctataaacttgctgaatgactgatggagactg

SEQ ID NO: 236880 - DNA, 508 bp, Homo sapiens
accatggttataagactgaggaatgttatttggtttaattcctgatattatttgtgattcagcaatggggctggtcacactgtatatagatttcagattatttggctttccacattcagcagcactaggctagtcggtacccacattctggctttttattaggttctatctccctggggggtagggtatatacaaaatccattttgtctcttctgctattttggagactgctctgaaaatgtttttcatggttttgcatgactcttgggatcacgatttgcatcttaaaaaaaggagtcatggaaaatattgcaagatatgcatttggtggagagagaatgcttttcagcttgaagctatttgggggtctgatgatctgatgatctttctgttgtyggagctttgagcaggcacatgctgtagagatgctcatgtgtcactggggagctggtttctgatgcgactggaacttatagatatttgataagtcatcttttccttctgatac

SEQ ID NO: 236881 - DNA, 540 bp, Homo sapiens
ttcctttttgccaatttggatgccttttatttctttctcttgtctgattactctgactaggacttccagtattatgctgcatataagtggtgaaagtgggcattcttgtcttgttccagttctcaggggaaatgcttttaacttttccccattcagtataatgttggctgtggggtttgtcatagatggctcttatttccttgaggtatgccccttctatgccaattttgctgagggttttaatcataaagygatactggattttgtcaaatgctttttctgcatccattgagatgatcatatgattttggtttttaattctgtttatgtgatgtatcacatgtactgacttgtgtatgttaaaacttccctgcattcctgttgtgaaaccctcttgatcatggtggattatctttttgatatgctgttggattcaattagctagtataatattttgttgaggatttttgcatctagttttctttttttgttatgtccttgccaagttttggtattagggtgatactggtttcatataat

SEQ ID NO: 236882 - DNA, 589 bp, Homo sapiens
gatacttcacaagaagatcatccccaatacacataattgtcagattctccaaggttgaaatgaaagtaataaatgttaaaggcaggtagagagaaaggtcaggtcacctacaaagggaagcccatcaaactaagagcagacctctcagccagaagagaatgggggcccatattaaacattcttaaagaaaagatattttaacccagaatttcatatccagccaaactaaactttataagtgaaggagaaataagatctttttgagacaagcaaatgctragggaatttattaccaccagacctgcttcctgaaggaagcactaaatatggaaacacatttatgtacacagaccagtgacactgtaaagcaaccatacaaacaagtcagactaataaccagctgataccatgatgacaggatcaaattcacacatatcaatactaaccttgaatgtaaatgagctaaatatcccaattaaaaggcacagaatggcaagctgggtaaagaaccaagacccattggtacacttacttcaagggacccatttcacaagtgatgacacacatagtctcataataaagaaatgga

SEQ ID NO: 236883 - DNA, 384 bp, Homo sapiens
gcttttttctacatcataccatgcttttaagcttaatacataagacagattatttcctgcttcatttagtcgtcctatttctgccttgtttagaaatasttccaaggcgatttagtttcttgcacttttctaccctgttgctgctgttttatttttcttatacttcatttcacttgaactcctcacctccagcttcatttattctcttggggtccaaaaagaaaatgattataaaccaaggaaggttgcaatgatcctttcccccagggaattttcccagggctgcagccaagtgccagtttggtttagaagggacgtataaccatcggaggccaagctagattggcatgtgtccctagcaaattcacacagcatgaagttgct

SEQ ID NO: 236884 - DNA, 351 bp, Homo sapiens
tcttttctcctggcctttaacttggcaggctttatctgctcttcagagtcactgagatgagaaccaggtggcaaactctgctttccttctcctccaggcaacgcagaggcattcttaactcttaacctgcagactttgaaactaggcacagaactccagaggggataataacaccagyaaatgtttagctaaaaaatttagccatacatgccacacattgtgctacacattgagctctttggtcctcacatcaacgctgaattaggagctatgattatccccattctttagattagtaagctgggtatcaccaaggagaagtacttgccccaaagtcacatggctcatatg

SEQ ID NO: 236885 - DNA, 454 bp, Homo sapiens
gtgggagttggagggaacttggcaaagaggctgccccatgcaatccactccccatttgttcctgacagtgtgtatgggagaatgaaggttctgtcccacttgtatgctttttatttgtgaaacaatcctaggtctttgtgttccttttacctgattcccaaactgaacaaacccaagtaccaaccattccccttggatttttagtcaactgaaggttcagagagctgctcccttggggaagaggctgtggacatgacatttgcacatgcagcatatcaacttggaataatttccccctcatgtggggkctactcccaaggagtttattctaaacccaaagtacattagttgcctgtggcaccttagaaaaataaactatcctggggtccctggttttggaatgtcatttcctttatgatatgtgtctttgaaaggcaaggagtggcagtaagca

SEQ ID NO: 236886 - DNA, 613 bp, Homo sapiens
aagcttgacttggagaactaatttgcttcaaatcacacagctagkcagggacaaagaaaagccttggactcaattcttctgggttttaagcaaagcattttttctgtgataccttgcccttgttcctgtctgtttgctaggcaaggatattggtttcattgcatttaaaggttttgaaagtgcttaatgagttattttatcattttggaaaggaagtgttaagaaagacattatttaacttacttttattcatatttttatattgtgtaaaaattgccagaagacatagaagcagaacattttgccttaatagtgtcttaaagatccctagctggtagcccccaaaagaagtctgcattgagacatggttttactgaacatctggaaatgtgcacattcaaatacaggaataagaacttcattttgtaacaaaaacaataattatataacacttcttaatattagctatcacttcctaatattttcactgtcacactgagctaaattttaatatgaattatctcactcaatccttaaaccaatctgtataaggcaggcaacataacttttccaaagttgtacagggaacaagaaacaaaactaggacccaaat

SEQ ID NO: 236887 - DNA, 568 bp, Homo sapiens
tgcctcaaaatcactgtttacccagctgcttccatgtaaggtacctggaactctcgccagaactttttctctttatgcatctactctcattttcattgccatttctgtagattattttaagaggcaaaagaagcatcatgattttgaggaggtggctccagatactcttaatatttccacaggcaccaaatcccagcttgatggcaggatggaagttaacttgggtaacatacacatgattagagaatccatcatcggggcattcccacccacaattttcctcccaagattctgttattctttkttaggacaaagactacccaggggacgtcattggaaagtctcatgtagctatgaaccaaaactttcctgcagaaaaccctacagctatccttctaatgagatatgttcaatctcagaagcctgaaaaagtggaaatactaggttggcacagttagaataaaattcaggaaagattcacatagttggtaattgaagctataaccatgcaagaggtcacaaagcaagagaatagaaagagagaaggcccagagccgagctgcagggt

SEQ ID NO: 236888 - DNA, 535 bp, Homo sapiens
aatacagtaagaggcaaactgcataattagtaagaatttcatcaagaacagcattttcccagggggaaacagagactgcaatcagaaggcaatgtgtttggtggggcaggggatgctgaaagccccctgaaggagtggggaagaaatcagctatgacactcagtgctatgactgcaagacagctgcagacaccctgctaatttcaaacctagctgttattcaatatggatctgggctttatcgtctctagataattagtaatatttgtccttaggaggtgtgctttctttaatgggggtcaaagacatttgaagttctctttagtggtaatagggcgctgaacagtgctgaagttctcttcagtggtaatagagagagagaaaaaaaactcaaatggarcaagtgtgtccaatgtcacccatgtgaataaaactcctcatccacaatgatgtaagggtgtaggacaatggccaggttgctcacactgggctgggccacccttcaagactcagactttggggagattgaaggaggt

SEQ ID NO: 236889 - DNA, 590 bp, Homo sapiens
tttgtgatccctttgggcttatcccagaatataatattagaacattggagaggccgggcgcagtggctcacacctgtaatcccagcactttgggaggccgaggygggtggatcactttcaggagttcaagaccaacctgggcaacaaaatgagaccccatctcttaaaaaaaaaaaagaccattagaaaatgtattattataatttactacatttatacattaaaggagaaaaaattcaaattattttaatggatgcagagaaaacattttataaaatttaattcacagtaaacattcttagctaatcattacagagggaaattccctaacttgataaaggatattcatccaaaatttacagcaaataatatgcttagtatgcatgcttaatggttaaatatttgttagaagcattctttaagtcaagaataagacaagaatgtccaccatcactacctctattaaatttagtactgggggtcctagcaggcagtaataagataaaaaaattaaatgcctaaggatttgaaaggaagaaacaaactacagtattcacaatcaatgtgattatctacatagaaaattgaag

SEQ ID NO: 236890 - DNA, 599 bp, Homo sapiens
ggagactgagagaatgtgaattatgcagtgcaaatctataccactattacaaaagtttcaaaatgtaaatgagctaatattaacattatctttgtatatgaaaaactaaaaagcacataaaaactactgcttgtaatccccatacttcatgcacacaataaaagaaaaaatggacacttcatctgtctcagtaacatactaaagcttaaatatttttgtttaatgctaatctttttcataagatatgaatctggcattaagtaatgcagcaattatatgacatcagaataagcaaaaaattcttggaaataggccgtaactcttcttacaaatgattagatgtaatcaattaattgttataaccaattaatttgaaaagggacattataaacgagtaaacttacattcacaatttcaaatgtatyccaatattaaaatataaatgctttacattagttattttcattgaccaactaaaataagagaattttagaatcacgagattagaagtgatctgaggttcaatgaacatttacggtgtccctatcacatgtcagaaacagagcaaggtgctttcaagtaactcaagtgattcaacc

SEQ ID NO: 236891 - DNA, 622 bp, Homo sapiens
tgtctaattcatctctgtatccaacaattagcatcctgtagttaaatgttgaagagaggtaagctaacatccaaaatttaaatgtgagctattgaaaaattcaacttaacaatctgaaagttatctttttatgactgacattattttttaaatgttaaacaataatgtccaatgcaagtatacaagcgacattaccatggaatgtttgtcaacaactgtggctgtcaaaatcagtataacctagtcttaagagtataaggtagggtgagaggmtagaaacagtggcagggaagggtagtaagggaagacctgagactggtgcagagacctgaagaagtgagggatatatactgccttggggaaaaaggttacaggcagagaggacattaagtgcagacacctcagtgtatttgacctttttgggatgtaggaggccagtgtggctggagtacagtaagcaagaggaaaagtaaaggggcttgagattagggcaatagctgggcagctgtaaggcttgtaggccatggtaagaactttggattctactgtgaatgagatgggaaaacactggagggttttgaatagaagagagacttgttctgaagtttgtgagcatcattgt

SEQ ID NO: 236892 - DNA, 488 bp, Homo sapiens
ttactgtctatctggggagataagacattcacatatgaaataattggaaaacagtattccttgaaatgtcaggatgtggctccttaagttctccaaggccagattgagatttgtttttctgaaccttgagggacattcgggagaaacgagcctgagttttatataacaaaataaaagtttacaagagccctgagttatatacaataaattcagtgatcgaaggtgtagggtaggtagacaagagaattcatgggaaaatgcctccagagctaataacttgtatgtgtcaaacactttccagttcacagagcattttcacgtatattatgtcacatcatcttcacaaccctgtggaatacaaattatctctattttacaygctaggacaaagcattgattaagtagcttgccccatatcatgaataaatgttccaaagtggtcagtatgcagactcagaccccaacctctgcctcccagcagctatatt

SEQ ID NO: 236893 - DNA, 435 bp, Homo sapiens
aataacttgtatgtgtcaaacactttccagttcacagagcattttcacgtatattatgtcacatcatcttcacaaccctgtggaatacaaattatctctattttacacgctaggacaaagcattgattaagtagcttgccccatatcatgaataaatgttccaaagtggtcagtatgcagactcagaccccaacctctgcctcccagcarctatattttctgctatgactcactgtgactcaggactcaagcagcccagtgtccagtctggctgctcttcccaggagctttcccacctggcctccttctgctcaatgggtcctgctggagacccttccattggtccaactggtggtctctaccaactgccacagaagcttccaacagccacattccacccatccaacccttctgccattagagaaccaggaattc

SEQ ID NO: 236894 - DNA, 584 bp, Homo sapiens
ctactgtatttatatttaaagtgggtttcttatagacaacatatagttgggtcttgtttctttagtccgttgtgacagtctctttttttttttttctcttattattataccttaagttttagggtacatgtgcacattgtgcaggttagttacatatgtatacctatgccatgctggacagtctcttktaattggtgttggattaatatatatctaccatatttgttactgttttctattcattgccctcccttgttgtttcctttttttgccttctgatttcaattgaacattttatgttacttcattttttctcctcacttactgtattatacttgtttttacttttttttactagttgcccttgaatttgcagtatacatttacaactaagccaagcccactttcatataacatagcacttcatgggtagtgcaagtaccttggaacagaatattcttaattacttacactagtcccttataacattgctgtcattcattttacttatccataagctatagtcacctaataccttgttgctgttattttgaacaaactgtatatgtttagatcgataaagg

SEQ ID NO: 236895 - DNA, 392 bp, Homo sapiens
cgggcatggaatccctctggacttttgaaatcagatgggcatttgttcaacacattcctgtaggggtagtctacaaaattaaactaacacggmaaaaggacccagcagtccaagaacttgcccacctaaaatggtcatcgtaggcagagcaaatgtttaaagtgaggatacagcgtttaattgccccttgtcttactgaaaggtgttattcacatattgctcagcaatcactgaaaacatgtgccaatgagggccgataactccgtttggaatgtgctgcttgtttctgagactttacaacaatgactggccaggattttactctccagactcacgtagaaatgagtgtgtcctgtgtgatgtctccaacagagaacaatcaaaaggaatca

SEQ ID NO: 236896 - DNA, 441 bp, Homo sapiens
catttcaggcaccatctgattagatgctgtaagcagcgggcatggaatccctctggacttttgaaatcagatgggcatttgttcaacacattcctgtaggggtagtctacaaaattaaactaacacggcaaaaggacccagcagtccragaacttgcccacctaaaatggtcatcgtaggcagagcaaatgtttaaagtgaggatacagcgtttaattgccccttgtcttactgaaaggtgttattcacatattgctcagcaatcactgaaaacatgtgccaatgagggccgataactccgtttggaatgtgctgcttgtttctgagactttacaacaatgactggccaggattttactctccagactcacgtagaaatgagtgtgtcctgtgtgatgtctccaacagagaacaatcaaaaggaatcaaaaagatgttagc

SEQ ID NO: 236897 - DNA, 290 bp, Homo sapiens
agaatttgtcttccttgtgctctgagctaactggtgatgttagtgtcctcaggactgtcacaggattatcaccagcgagcatgtcagtgccaaaggggagcctcatccttaaactggaaaggtttaaggttgcaaaagagatgcagaagcargaggaggcggagggcagaaaatgaccgtcgctgtcccagcaatggaggtccaagaggagaaaggctggttggcaccagaatgctagaactcccccttgtctcaggtcctctacctctccttggctgctctttataacc

SEQ ID NO: 236898 - DNA, 573 bp, Homo sapiens
atttttaaatattgcattatagaatgtatagctataaagagcatcatgataatgcccaatccctttgtttcatgtagaagaaaatccagtgggagtaagtaacttgcctgtgatcactcagtaagttagtgaaatagccagttctggaaatctgatgccctattttccctaaacagtgtttcattcataagatgggctgtcttatgatgagtttatagaagtagaataattgtgtggtgctgtgcagtgatcagttggaaatacagatgtggcacttttgtaaaagatcggggacaatgatttgggaggcatctaaatgaaaataacatttgaaggtgtgaaaacaaatgtggtagcygaaatagatgtagtgcatttaagtcaaatgtgacagatgacaatggggactaagaagaagtctccactgaatttcacatttagaaggccattgggatgagagagaaagagagggagagagagacagagacagagacagtgcagagtgaggagctggtgcagaagtggaaacaaaatttaaaattatttttctggaagctgacagtaaaatgagaa

SEQ ID NO: 236899 - DNA, 516 bp, Homo sapiens
tacttctattgctcttcctccattatatttaagagagataaagcactaactggaagagaagcagggtttgtttgatcagttttatcttgattgggagagacttcagtatgtttttactgcgatcttcatcgcacttctgattctagtcaatttctaatatgaaccacttggactctgtccctttgtcccttccacaatcaaaaggagatgaacactttacatatctcgagcaatactactaaaatactagcaaatactagcaaaaccagtgtgtttgctacagaaaacacactggtttacaaatatatcagctgtggctataacatttacttacccccaaccacagacacaytttatcggtaggaggaactgaagctttgcaatacaggttatctgccagcaagaatctggtctccattgagttggtggactccttcaaaacaaaaaaaaaaaatgacagtaccataaacaggccagtttgataccaaggttataaaggagagattgcacagttga

SEQ ID NO: 236900 - DNA, 564 bp, Homo sapiens
agcctttgaactcctggacttactccagtgtccccctgctctccagttcacgattcttcagccttgaattgggagttacatcaccagtggctcgcctaatttgtaggcctttggactgatactggactacaccatccgcattcctggttctctaccttcagatggcataatgtgagacttctgggccataatcatgtgagccaattctgataagtttcttcttatatatgtctatatgtattctatcagttctgtttctctggagaaccctaatacaatgtgtgaacctctctgggagaagattctggaaggtcggacctgttttttcccctagacttcaccccatcagtttttccctttgctgattttgcctttgatttgtaacaaatcatagccatgagtatgacaatgtgatgartcctgtgaatcctcacagcagatcactgaacctggaaattgccctggagaccctcgacaaacgtagtcttaagcacttaggaatccctcccttttttgtgtgcatctgttttgcttaattccactgttgctagagaactacgctaa

SEQ ID NO: 236901 - DNA, 532 bp, Homo sapiens
gctcaagatctcagcccccatcttcacagattctcagctttatagacttttgttaaaatggctcagggggaaggatttcacagaactcccggtctataacaattcatttatcttatttcttgaatcttggtggtaactcaaatcatgactacttaaagagtgttccaatgttttcaaacaggggtgtgtgtgtgtgtgtgtgtgtgtgtgtrgggtgtggttctgttcatttgtaaattattctctttgaaaggattagtctgtaataagctatgccaactaaaacaggcaactcaatgtactcatttataaatctaagactttagatgttaccagttcaaactgaaatgtgagcttcatttacaatgattggaattctatcctattagtaaaatctaaatgtatattagttagtttgaaagcttctactctgccttcttacattgaatcagcagcatgtaaaactagattttttttttaaatgagcaactactgagcagtgttcttactagtgtagtatatttctttacat

SEQ ID NO: 236902 - DNA, 532 bp, Homo sapiens
gctcaagatctcagcccccatcttcacagattctcagctttatagacttttgttaaaatggctcagggggaaggatttcacagaactcccggtctataacaattcatttatcttatttcttgaatcttggtggtaactcaaatcatgactacttaaagagtgttccaatgttttcaaacaggggtgtgtgtgtgtgtgtgtgtgtgtgtgtakggtgtggttctgttcatttgtaaattattctctttgaaaggattagtctgtaataagctatgccaactaaaacaggcaactcaatgtactcatttataaatctaagactttagatgttaccagttcaaactgaaatgtgagcttcatttacaatgattggaattctatcctattagtaaaatctaaatgtatattagttagtttgaaagcttctactctgccttcttacattgaatcagcagcatgtaaaactagattttttttttaaatgagcaactactgagcagtgttcttactagtgtagtatatttctttacat

SEQ ID NO: 236903 - DNA, 532 bp, Homo sapiens
gctcaagatctcagcccccatcttcacagattctcagctttatagacttttgttaaaatggctcagggggaaggatttcacagaactcccggtctataacaattcatttatcttatttcttgaatcttggtggtaactcaaatcatgactacttaaagagtgttccaatgttttcaaacaggggtgtgtgtgtgtgtgtgtgtgtgtgtgtagggtgtggttctgttcatttgtaaattattctctttgaaaggattagtctgtaataagctatgccaactaaaacaggcaactcaatgtactcatttataaatctaagactttagatgttaccagttcaaactgaaatgtgagcttcatttacartgattggaattctatcctattagtaaaatctaaatgtatattagttagtttgaaagcttctactctgccttcttacattgaatcagcagcatgtaaaactagattttttttttaaatgagcaactactgagcagtgttcttactagtgtagtatatttctttacat

SEQ ID NO: 236904 - DNA, 532 bp, Homo sapiens
gctcaagatctcagcccccatcttcacagattctcagctttatagacttttgttaaaatggctcagggggaaggatttcacagaactcccggtctataacaattcatttatcttatttcttgaatcttggtggtaactcaaatcatgactacttaaagagtgttccaatgttttcaaacaggggtgtgtgtgtgtgtgtgtgtgtgtgtgtagggtgtggttctgttcatttgtaaattattctctttgaaaggattagtctgtaataagctatgccaactaaaacaggcaactcaatgtactcatttataaatctaagactttagatgttaccagttcaaactgaaatgtgagcttcatttacaatgattggaattctatcctattagtaaaatctaaatgtatattagttagtttgaaagcttctactctgccttcttacattgaatcagcagyatgtaaaactagattttttttttaaatgagcaactactgagcagtgttcttactagtgtagtatatttctttacat

SEQ ID NO: 236905 - DNA, 582 bp, Homo sapiens
agcttgttggattaaacacaatccttagtaaaacttacctctttaatagttgcttgatttttattaaatcacaaaatttcagcttatgaaacaaacatgggaaaatgccaaaatagaaaatcaaatcagaaaaaaaaataaaatgaaaaacaattttgcatacaaatgagtaaatggagaaaaagcataaacatatgtgagctttaattagatgctgatttttttctaagtcgcacatctatgatcatttatttaaatagaaaactgaaaatacttaataaaggatatttaaagaaaacagaatgggatttaagtagaarttgacttcaacttttgcacaaaagctgcaaaatcgagagggaaagaaggagaaacacttacaaactcagccagccaacttattcaaaagatgtaccaaaattgggtacataactgcttactctaggccattgatgtctgtacttgcagctagccaactccaagcaacaaaggaataaagctaggtggaacggctgcctccaggaattggccagctacctcaagacacattcatatagaacttggatgttaatggttttggca

SEQ ID NO: 236906 - DNA, 575 bp, Homo sapiens
ccacagtgtctcctaggttcccaggagataggattcagggaaaacctcaggcaaaaggactctgtgcaatgctaatgctactccacaaaatctccaggtattttcagagcctgaaaaaaaaawattaatagaaaagtaaaatcttcaaaacttcaaaactctcttttccccagggctctactccctcccacattccacaccctccaagttccaaacactctcctgagcagaggaccctcttcccctcagatacagggtcccagttgccacctagtagagaagcttgagtaagcgtttggagaaggagaacttagctcttttatccttctgtagatgactccactgctacgctgacctgctctcacgtcattgaacaggggtcttatgttttcagtgggttccccccactgaaagggttgcatattggatgaaatagtatttaaacagtttcttggctaacgtcatagggttgaagcccacctcagtagtttggggtggattctgtttctattcccatcttgttacacagattcatctgcatcccacacagggaaggagctagcaggaagaggccc

SEQ ID NO: 236907 - DNA, 575 bp, Homo sapiens
ccacagtgtctcctaggttcccaggagataggattcagggaaaacctcaggcaaaaggactctgtgcaatgctaatgctactccacaaaatctccaggtattttcagagcctgaaaaaaaaatattaatagaaaagtaaaatcttcaaaacttcaaaactctcttttccccagggctctactccctcccacattccacaccctccaagttccaaacactctcctgagcagaggaccctcttcccctcagatacagggtcccagttgccacctagtagagaagcttgagtaagcgtttggagaaggagaacttagctcttttatccttctgtagatgactccactgctacgctgacctgctctcacgtcattgaacaggggtcttatgttttcagtgggttccccccactgaaagggttgcatattggatgaaatagtatttaaacagtttcttggctaacrtcatagggttgaagcccacctcagtagtttggggtggattctgtttctattcccatcttgttacacagattcatctgcatcccacacagggaaggagctagcaggaagaggccc

SEQ ID NO: 236908 - DNA, 604 bp, Homo sapiens
gtgtgagcatgtttgctaacagcctttgtaaatgcatgggtttcctcagccctggttcatcagggccacagacctgctgtgtgtgcagcagtctgggctgctctgtgctgcccggcttgggactagagggaaggggaatcgatgggaacatgaagcctaaaaggcctgttgtgctgtgaataacaaagtcttttgtctctgatccaagagtttcatttcttcagctggcatccacgaagctgtggtaggctacacttttagcttgcacacagggtaaaatttcagacctttcacggttcttgacacaatcttgacracttccaaaaaaagaatcacgtagaatctcttgataaactcttcaaagcaacaactttttatctgctagatgataattaaaacagacatattgtcaatgagaaaaacagatacaagcacaagggggtaaaaacactatcacacgcagaacaaaaaccatattttagatgacttagaaatgaagataaatagacagatttgtggatagatgacagagtgacagagagagagtaaagtgcatatttggaagtgtgagtgtatatgtgtatgtgtgtgtattcatgtgtat

SEQ ID NO: 236909 - DNA, 512 bp, Homo sapiens
gttttctcaagtagtatttggccaccaccatagctgtgacttgtttgtaaaggaaagcctcaactcaatgagaataaacgtcaccactacaagaacatatttacatccatggggtggcaataacagaatgaaatcaacttgccattacagtgaagggaagtgaaagttaacttggaggagagtttaggggtttactgagggcagacattgcaaagtttatggacctgagaagcactccaggtayctgagggcagacattgcaaagtttatgtacctgaaggcagacattgcaaagtttatgtacctgagaaagtctccaacagtattgtctgctccattgaatcatttgtctggattgcaataggtcagattctgtatgaaggttaaagtcggtctctaaagagtgctgggtacaattggatgtctacttggactttcctataattttgtctgggggtttaaagaacaattttgttttatctaattcctcctttcagcctctgaaactgttt

SEQ ID NO: 236910 - DNA, 660 bp, Homo sapiens
tcagtctactttgggaaaagaattagttttctttatgatgatcaggatttttttttttgagccacattttctatttctcacaattctgtttaaagtgacagacttccctgtaaaaataacaatctgtgatttttttatgtcaggctctgctgtgtcttttgctccttagatggggcttgttgtttagtggaaagcccctgattctgcttaatgtgtagggccatgagttttgcagtttattcctggtaatgagtgtcttagctactcgagtatctttccttttctgttgtttttgagaggtagttgaacacgaaagccaattcatgaggccttttagagtccagccagaatcatggcttaaygggagtactggttaatctgcttgaccagagtactaaaggtctcattgagacctgaaagaaaaaatgagttggaaagcttggcattatcatcatttaaatctttgatgcctgaattctgtctgaaagtttttttaattgattgaaaaaaaatcaaagactggctcatcccttttttggatatatcattgaatagccttccaatctatttgacatggaaaaattactaggatggccttaattaattctgtgattacctcctgagccctcctaaaggctgcttcccacataagtacaagat

SEQ ID NO: 236911 - DNA, 479 bp, Homo sapiens
ttggcttttgcccaaagcatgttttttgcatctatgatcatgtggggttttctttccttctttattctaataagcatttattgatttcctaatgtgaaacaatccttgcaatcctagaaaaatcccacttggtcatggtgttctagcctacttaagtattgctatatttaaacagctggtgtttgttaagtccatgtttatgagttgtcttctcttgttatttcttargttttggtatcatagtcttggtatattggcctcataaattaagttgaaaaacattgcctcctcctgttttctgaaatttatgtactattggtattattcctatcttaaatctttgattgaattcaaagcaatctgggcctatttgaattttccctttcttgttgtatctgtcttgataatttgtgtttttcaaggaatttgcctgattcatctaatttgttgaatgtattttcataagttatgtaatatcc

SEQ ID NO: 236912 - DNA, 479 bp, Homo sapiens
ttggcttttgcccaaagcatgttttttgcatctatgatcatgtggggttttctttccttctttattctaataagcatttattgatttcctaatgtgaaacaatccttgcaatcctagaaaaatcccacttggtcatggtgttctagcctacttaagtattgctatatttaaacagctggtgtttgttaagtccatgtttatgagttgtcttctcttgttatttcttaggttttggtatcatagtcttggtatattggcctcataaattaagttgaaaaacattgcctcctcctgttttctgaaatttatgtastattggtattattcctatcttaaatctttgattgaattcaaagcaatctgggcctatttgaattttccctttcttgttgtatctgtcttgataatttgtgtttttcaaggaatttgcctgattcatctaatttgttgaatgtattttcataagttatgtaatatcc

SEQ ID NO: 236913 - DNA, 513 bp, Homo sapiens
aggaagaggccagaccagaatcaggcttagtggtctgggtacagagttgaggtagaatgccaataccgccattggcctgcacagctgccctgagtgtggtatgctcttccatggggagaaaaaccaggctctgatctctaaggaaaaatagaattaagtggcattatacaacctagtagcgatgccctcaatagcagcttcacaaaaagtgcacaggtcttacacatayaattgtttttaaatactagttctttttgaaaatgaaggacacaatgtcaacataatcttcatagagtcattttatttattagttcttaatacaaatgaggacttaatattaaagttatatgaggggtttttaccagacagtaaaattatgtagtacaagtctgtagttttctgaatctccaaatttatatagaaatgaggcttagaatcaattctggatttcatccctaccactgtacctctcctgctcttgctgagatgagtgtgattttcatgtggttcatt

SEQ ID NO: 236914 - DNA, 578 bp, Homo sapiens
agtatgggggaaaccacctccatgattcaattatctcctaccgggtctcttccacaacacaygggaactataggagctacaatttaagatgagatttggtggggatacagccaaaccttatcagccatacacattctcatctttgcctgatgtctatggatgaagctggaaagctattctgggaaacatcatccaatgtcccacctgtagttctccgcaaagccctgcttgtcctgaggcagggctggctttcgtctgactctggttgagttcctagggaatctttccccatagggcctatgttttctcctcccagggttattttgtctcttgtgcatgtgaatgtgtgtgggttactgttgtgcttgtacctgtttaactgctgtttgactgttctttataggataaaattaggccaatgccttgtcattaaactttctctgaaagacttagaaagtctcaggcggaaggttcttccaggaagggcacttaaaaagattacaggactgcaaataactcaataaattaaacacccttgcgtataaatgcaaccctggcttttatatgatacattgcta

SEQ ID NO: 236915 - DNA, 571 bp, Homo sapiens
gttggccaaagccagtcacaagaccagcccagactcaaagtgtggggaaataagttccaactctcgatgggagaagcagtaagtcacaggagaatacatgcagggatgagaggtgttattaccacactctgtgtaaataatctgccacgttcctgaagccaaaactgacagagggttgggctccactaaaacagaagagaggaattatggtagacaaatccttaaaatatattggaaatcttacacagaaattagaaagtctctaatgagtggaaactgtaaaaataaggaagatagaggaggagttccgatttggaattcattgggacagctatgacggtggaaagaaagaaaggaggcggaaatgggggtaggaaaacaatartgacagccgaagagtctgggaggaaaaagccctgatggaaggaccctcttcctgaaagggttccctgcctgctgccacagcatggcccaatcgcattcctgccctcattcagtcctcaaagccagggctgtgtttgctgatccatcccgtctactctcaataacaagggcaggagctcttcatctc

SEQ ID NO: 236916 - DNA, 468 bp, Homo sapiens
gaattccctacaggaaagaggctgttctgaaatacatgataaataaaaaatccttcttagacattttattattatatatgacagcaagaagaacaaaggaagcaaaaaaaggataagctctggatgtctttcaatgctctccttatatcaggttttcagctgtattctcccactcatggaagtcaaatcatcccagctagattctatttttgtttgggaatattgcttacattaggaggttaacatcaaatttatcacacacacacacacacatatatatatatgctttcaaaaactgatttcattttcctatatttctaaatcaccaaatatttctttcttaatggaatcattaattcattgaatcacttattaattaataaatatattaatctgcttacacagaactgtgttttgtttaataaaatatcacaagggaactatccrctgttgatatggtttggctgt

SEQ ID NO: 236917 - DNA, 508 bp, Homo sapiens
ccaatatctcatgctgcatttatacaacaaatttacattattctmataaccctaggatcccatacttgtttcatcttaaagataatcacatgctactttctaaaaccttgcaccatggtttcacagatttgtaaggttaaaaggaacatgcagaaatgtccattccactttctacaagcaagatctatctttaaaaatattccagatagatatatatccaggtggaatagacagctgtccaccaattcatgctctcccttccacagcatgaagtagtacttgggaactcagggactatgcttcccagcacccttgtttctacgggcagagttctgttttgtgtatagtagtgctatgtggcatttcccaaacaaggattttaagaagctcaccctccctccatcttctcaggtccctggagatcagttttcactcattaggaacacttatttggactgctaaaaaggttaaaaaatacacttatattaagccactcattttaattttt

SEQ ID NO: 236918 - DNA, 508 bp, Homo sapiens
ccaatatctcatgctgcatttatacaacaaatttacattattctaataaccctaggatcccatacttgtttcatcttaaagataatcacatgctactttctaaaaccttgcaccatggtttcacagatttgtaaggttaaaaggaacatgcagaaatgtccattccactttctacaagcaagatctatctttaaaaatattccagatagatatatatccaggtggaatagacagctgtccaccaattcatgctctcccttccacagcatgaagtagtacttgggaactcagggactatgcttcccagcacccttgtttctacgggcagagttctgttttgtgtatagtagtgctatgtggcatttcccaaacaaggattttaagaagctcaccctccctccatcttctcaggtccctggagatcagttttcmctcattaggaacacttatttggactgctaaaaaggttaaaaaatacacttatattaagccactcattttaattttt

SEQ ID NO: 236919 - DNA, 640 bp, Homo sapiens
cacccgtctaatgacaagtaattgaaggattcgacgccgcgcattaccagcggaacgggaggcattaattatttaaaaacgattagccttgccgtgtgtcctgcaggcgtcccatcatgttcagcgaagataaccagccacccgaggcgagccggggctcggagggcggcgggcgcgctccccagcaggcttcgggtgcggtggacacgggcgcacagcccaaggcaccagggaaggagaggaggggccaccaagggtccccacacaggaaggtgactacataacactgaccctgctgaacaacgaaacagatttctgcccacttgggttcgaagtctggtgactgcggcgcagatgggaaaagctttccggtcgggggtggtgggcaatttccatgtgccagttccctgtcgcatcagaccaaagacccaaagtaacccagccaggcacgggcctctcacagtgcctgctacccaggcgtttaaagaaaagaccccagagagaatgtggatctggygtgggggcagggattgggggggggggcgctggtagacacctggggaaatacaactttatgaggtttcaaggggcagcagcagaactactatttttccgaggtccacgcctttccgcaggcggc

SEQ ID NO: 236920 - DNA, 515 bp, Homo sapiens
cctagcctccaggctttcggagtgtttttacccaccgcaagccactgcgckcgggagtggctcccaagtctgcctgacccgcgacgacactgatcctgccctcgcccagccagcagatgtcctgggcaaaaccaacaccagactcccctttgcgctctcggccttggttttcactgccgttggccgtccttttaggccagcgaggtcgtctggggggagaggcagcatggtgtataagaattcactctgggatttttcgttatacttttagagtccttgaaggctcacaaaatacctgcataacccctgggccctgcaaacctggattgccaacctcacctaacttacaagaagatttgcaagagccttgagttttggagggagatggggagcaaatttgccgacagtggcatcttcactactgtcatggtccattggccagacaccccttacctcctcctcactcccaaatataccctatttttaaaaaacagacttggattgttaccctgact

SEQ ID NO: 236921 - DNA, 578 bp, Homo sapiens
agatctaatcttgaaaaaaggagcctgagcttagaaacctgaggcaaaaagtcctagcctccaggctttcggagtgtttttacccaccgcaagccactgcgctcgggagtggctcccaagtctgcctgacccgcgacgacactgatcctgccctcgcccagccagcagatgtcctgggcaaaaccaacaccagactcccctttgcgctstcggccttggttttcactgccgttggccgtccttttaggccagcgaggtcgtctggggggagaggcagcatggtgtataagaattcactctgggatttttcgttatacttttagagtccttgaaggctcacaaaatacctgcataacccctgggccctgcaaacctggattgccaacctcacctaacttacaagaagatttgcaagagccttgagttttggagggagatggggagcaaatttgccgacagtggcatcttcactactgtcatggtccattggccagacaccccttacctcctcctcactcccaaatataccctatttttaaaaaacagacttggattgttaccctgacttaccctttcaa

SEQ ID NO: 236922 - DNA, 578 bp, Homo sapiens
agatctaatcttgaaaaaaggagcctgagcttagaaacctgaggcaaaaagtcctagcctccaggctttcggagtgtttttacccaccgcaagccactgcgctcgggagtggctcccaagtctgcctgacccgcgacgacactgatcctgccctcgcccagccagcagatgtcctgggcaaaaccaacaccagactcccctttgcgctctcggccttggttttcactgccgttggccgtccttttaggccagcgaggtcgtctggggggagaggcagcatggtgtataagaattcactctgggatttttcgttatacttttagagtccttgaaggctcacaaaatacctgcataacccctggrccctgcaaacctggattgccaacctcacctaacttacaagaagatttgcaagagccttgagttttggagggagatggggagcaaatttgccgacagtggcatcttcactactgtcatggtccattggccagacaccccttacctcctcctcactcccaaatataccctatttttaaaaaacagacttggattgttaccctgacttaccctttcaa

SEQ ID NO: 236923 - DNA, 564 bp, Homo sapiens
ggatcaagcagaagtgtggtgtgttgcacacacatttaaatgactcctcaaaaattgcaggggctgggccggggagatttttatcacccaaaacccatttggcctattgaaatcagaatwattccctcaacttctgtaatgctgccctaccaagtaatagggactcttcttgataaaaatgatttgggaaacaaaaaaagggatagaaaactctatttattattttatagttacacggcattatactagaccaaataattctcccttaattagctttgctggagaaaaacaaagaaaggagagtgattagagaagacagaaatttttatacataattttaaactttttattaaggcagatttccctttgagctgttagaaacctcactgtctttgttcttacagggaataataaagaaaccagggaatttcagacaaggacaaaaatgttccagcctccctttggcgggaggtcagcagttgtgtcctgtggtagctgagtctgcaagggctgggcagagacagatgtggaggctctgctcagtcaggtcaatgaccaaaggct

SEQ ID NO: 236924 - DNA, 613 bp, Homo sapiens
caacagcgctgagagattacagcagcctcaccctgccatttggggctagagactgctcacatttattctgtggtcagcgtccattggaaagcaacgcagcacacaccacggctgtgtttgagctgatattcactaacactgaactaactgcattccaatccaaagacttcgcaagtgccctctttcttaactgggaatctggcagaatgttatatttaaatatcaaacgttgttaatcatgtcagcggtactttagtttggataaaatgtctttcctattgtagctaattgcttgaatatctgcagactgatatactctttktagacatttatgctgtcctctttttataactttatttcattttctcttcatttctggtgttgactcaaagggcctttatcacctcatgctgataatctgtgctttatggccgctggtgtgattgggagcagttgaagccgcgtgcaataatacacacatataaatatttgaacaggaaaaagaaggtctgtctgatgtagaccaaggaagaaatgcatttaaacaaataatgccactagagggaccttgactctgaaccacgaataggcagggtcagacttggaagggcac

SEQ ID NO: 236925 - DNA, 641 bp, Homo sapiens
gaagtgtggggggatgttaacgattatcagggttatgagtgatcactgaataattcattcaactttcttgtgtttgaaatgtttcataatatagtgccagggaaacatcattcaagataaatttacccccttccaatcctgagctaccctctcccacttggtgatcacagcccctgagtgttgacggccaaaagacttctcttccacacaaggctctttgaaggctattacataagtgaagggagaatttcatgaatattttggtgaaaggagaatttcatgaatattttggaagtatataataaaatgacatgtttggtttgcaccacagtcaagttttccatctgttttgaatgtgytgtgttactccctcaatctcgattgttgggagacccaatacagacagtgaggttcttccctaacatctgggcacgtagcatgttcacccctctgcttgcagtgatgagaatgcttagtggactatgttctatgtctgtgttccatgatctgaataaaacatggactatgttccatgttctgaattgaaacaatccttgttgttctaaatgagtggccaagaaactggctcattctacagtacaggctctatggaatgacctcaaagttgctcactgtttagc

SEQ ID NO: 236926 - DNA, 641 bp, Homo sapiens
gaagtgtggggggatgttaacgattatcagggttatgagtgatcactgaataattcattcaactttcttgtgtttgaaatgtttcataatatagtgccagggaaacatcattcaagataaatttacccccttccaatcctgagctaccctctcccacttggtgatcacagcccctgagtgttgacggccaaaagacttctcttccacacaaggctctttgaaggctattacataagtgaagggagaatttcatgaatattttggtgaaaggagaatttcatgaatattttggaagtatataataaaatgacatgtttggtttgcaccacagtcaagttttccatctgttttgaatgtgttgtgttactccctcaatctcrattgttgggagacccaatacagacagtgaggttcttccctaacatctgggcacgtagcatgttcacccctctgcttgcagtgatgagaatgcttagtggactatgttctatgtctgtgttccatgatctgaataaaacatggactatgttccatgttctgaattgaaacaatccttgttgttctaaatgagtggccaagaaactggctcattctacagtacaggctctatggaatgacctcaaagttgctcactgtttagc

SEQ ID NO: 236927 - DNA, 641 bp, Homo sapiens
gaagtgtggggggatgttaacgattatcagggttatgagtgatcactgaataattcattcaactttcttgtgtttgaaatgtttcataatatagtgccagggaaacatcattcaagataaatttacccccttccaatcctgagctaccctctcccacttggtgatcacagcccctgagtgttgacggccaaaagacttctcttccacacaaggctctttgaaggctattacataagtgaagggagaatttcatgaatattttggtgaaaggagaatttcatgaatattttggaagtatataataaaatgacatgtttggtttgcaccacagtcaagttttccatctgttttgaatgtgttgtgttactccctcaatctcgattgttgggagacccaatacagacagtgaggttcttccctaacatctgggcacgtagcrtgttcacccctctgcttgcagtgatgagaatgcttagtggactatgttctatgtctgtgttccatgatctgaataaaacatggactatgttccatgttctgaattgaaacaatccttgttgttctaaatgagtggccaagaaactggctcattctacagtacaggctctatggaatgacctcaaagttgctcactgtttagc

SEQ ID NO: 236928 - DNA, 516 bp, Homo sapiens
tcagaatccatatctccctttccaaaatgttctctggcagaagtcattctgtaggacaaactggaatcaaaagagttatgaaaattgtacaatgggatgaaggggcttcccytgttggggaatagatagctgacatgctggatggggccagggttcaaacaaaggcccctgttgagtgggagcaggtacaagacagatggtttgttaaacattgccagcatgcttgcgcagtgccgtgcggcggtcagagcctggataatggtcaccagggcattgtgtagcagcgcattggctaatttcagcccagctaaagctattgcttatctttgttggttttgcaaagattaaggcagtttctctgctttgaatgcaccacagctgcccagcaaagcattcctgaagttttgtctgaattcccactgctaagaggggccaagcaaaaggtggctcgtgcaaggacttgttttaagctcatatgtgaagttgcttctcctcaactaatctggaccactcttg

SEQ ID NO: 236929 - DNA, 551 bp, Homo sapiens
tcccctaccatctcatctagtgtgtgtggctcagttattgggctggccctgaccctttcatatcctcctgagcccacatgcatgtggaaacaccggctgccttggctggtctgacatccctgggagaaggagcaaaggcccaggtgcaggccttgcctgcctcgtggtgaggatgagcctgggggatgacatcggggtgcgtggcttccatgtttattgtgggctggacctcccctgagtgacccaccctctgtgccaggtgacagaggagctctggagagctcccagagccctactctttttctacagctgcctgccttaaaatcatccccaccttgcttargtgggagctcgggaggagagtgctttagggctgccagagtaccagctggttcaacaccgggggactgatgctttgctgaggtgatggggaagctcttattttcttgagggaagttcagggaaggaaaagcacataactccacaaccccagccagcctcccttttggtacctggccctcctgaccctaggctatcatttcccagattct

SEQ ID NO: 236930 - DNA, 413 bp, Homo sapiens
catgttcttcaccaccacactctaggacactggctaattgctcaatgcrgaccaccttcttcatcttctttcatcccactcggttcactgatttctttaaagcttagttcaaggctcagctctctggagagaagtgcttggcttttggcctctgagttgactcatgtccttattagtcttgcatttatcctacttctttcagttgaaaattccatcgtttataggatgcatctttgacttaacatcatctttgctgtaaaacaagcaaaaggcccactctggtaaatgtatacagtctcaatccatatctcactctatatatattaataccatatacatatgtacacaggatgactcctatgcaaataactaaaccctacattcagtctctactcacttgactatattggtcc

SEQ ID NO: 236931 - DNA, 612 bp, Homo sapiens
ccctgtatgttctgtcagctggaagttagacctgaggattgctgcagtccatatttgatttttgtcgaaaaatgttgtgtattttctaatgcatcacgtatgtacaagtttctcatggtctcttttttttgtgatgttcagatggatgtgtgggttcagagaccatctactcaatcaatccacagtaaattcccaatacttttactatgttgtcaagaaactttaagttcttactatcttacaaaccatctaatccattttgactagcagaaaattcaagactctacattaagtagatcaagacatacaaaataccaatgtcttaaatataaaaattatatcatttccatgatgaactatggtcaatttttcaaaaatggaagcaatgttcagaatgtggtctgtcaatgaaatggaaataataagtatggaatatctcaaacaarcaaacaaacaaacaaacaaaaaaacggatattcagccaggcatggcggcaagtgcctgtagtcccagctattcaggaggcccaagctggaggatggcttgagtctcagaattggaggctgcagtgagctatgatcacatgactgtacttcagcctgggtgacagag

SEQ ID NO: 236932 - DNA, 554 bp, Homo sapiens
gtgacgtgtgctccatagagagcagcaggggagcagatcaggatccccaccccttctcctgagagtactcgagcctcacttgagacaaattcttaagataatcataaaaatccatagcaactttgttgatgttggggtttgcactgagattccaaatcaagaggctgggcaagcgaaacaggttcggatttctttcacacagcaggtgaaagaatgtaagaactcctggtcaaagtcaagagcccggcactgcctgctctggtcacatctattctgccccacatttctataacaggaaattaggccaaaatgcatctccagcatcattcacttccaaaatgctctccataacaaactttttcacaatggtctgtgaaattgtttgttctgtttatcctccgatggaggagagaaactgagtccaataratgagttggcatttccaagcctttcacccatgtctggggccatgaggatgaaaatgcacccacacctcaagtaaatgctgtatcagtgtttcagcacaaaaaagaacaagatgcttttgagagtgt

SEQ ID NO: 236933 - DNA, 308 bp, Homo sapiens
gatacattgctgtttctaaattttgtactggacttagccaataaaaagtacttaatattggcatcaaaatgtctgaaaaaagtaaggctgccaaatagtgaataataatcactaatctcttataattgcgtgtgtgtgtttgtggcctatgtgtgtttggagtaagccattctyatgctgaaaaatgaacacacataaaaatcaatactcaaaatagtcaaacatttgtgcatttatattacttaaggctagatttgacagcaactaacagagatccacaatggatgaagtaaacaagacaaaagctt

SEQ ID NO: 236934 - DNA, 496 bp, Homo sapiens
atccattcagaagaggatgagatctcagaatggggccagaagaggactttgctctaccctaaagacamcgagatctccacagtacttaacgtgtccttcaagtgctccctgatcaagatagttgttttttaaaatgaaaagaaacatgacttgatgacaacttgaacagtgaattaaaatttcattttgaaagtatactgtcactgtgaaaaaattcctggattataacactacagaatgctatgagagacgtttatcatttattctgtcttacagtctatctcaaattgttataaaatgttttaaatgcagaaaactaagtgaaaaatctctaaacctaaattatcatttgactcataaagcattgcttttatcacaggggacatgcaagaaggtggctggccactcctctcatacatatccctgtttttcttgacttgaaaatgtctcaagtatatttattaaatatgtgttcattatttaacaatgagaacta

SEQ ID NO: 236935 - DNA, 563 bp, Homo sapiens
atatgtgaggggtgggagggggaggcttgcygtgggggctggggccagggcgtgctggggaccagctgtgggcggtgtatgcattccagctatgctgtcacctgggttgtcaggccaccaggtgcaggtcagggggaggtcagaggcaagagcctcttaggacattcctagcccttgctcccagaatccctcggtagggaataaggcagacaggctgtagctcagaaatgatttggctatgtgggttgttttaaacttatatgtcagcccttagtctctgcccctgacattttctctcttgtctggcattttctccttctaatcacaatgtaagagcctgcttgctgcctcctactttccagcactggctagctggccctggaagcatcagtggggagaaaagcgtggtccaggactgaatgaacttctgcccaacttcgagggaccatggccacataagaattctgactgttaccccagaagacagcatgagaatccagcctgatcccagacatcacccatcctcgtctcttctaggacagtccacggggtttgtgccatcc

SEQ ID NO: 236936 - DNA, 580 bp, Homo sapiens
gcatatatgtgaggggtgggagggggaggcttgccgygggggctggggccagggcgtgctggggaccagctgtgggcggtgtatgcattccagctatgctgtcacctgggttgtcaggccaccaggtgcaggtcagggggaggtcagaggcaagagcctcttaggacattcctagcccttgctcccagaatccctcggtagggaataaggcagacaggctgtagctcagaaatgatttggctatgtgggttgttttaaacttatatgtcagcccttagtctctgcccctgacattttctctcttgtctggcattttctccttctaatcacaatgtaagagcctgcttgctgcctcctactttccagcactggctagctggccctggaagcatcagtggggagaaaagcgtggtccaggactgaatgaacttctgcccaacttcgagggaccatggccacataagaattctgactgttaccccagaagacagcatgagaatccagcctgatcccagacatcacccatcctcgtctcttctaggacagtccacggggtttgtgccatccttccagggggtac

SEQ ID NO: 236937 - DNA, 561 bp, Homo sapiens
cacacagcctatcagcccagagagctctgctaatagtgacatttaagagtatttgggactacagttgcaccagacaagatcattactttatagccggacctctaccctctggccaccaaaggatgtggattttaggaaaactagattttgcagtgttccctgttgaaacagcagtgaggscattcagggtggcctctgtgtctgctgttgtttgtttgcctctgtcttgcttccctattgtctgtcattggaagaagatcccagtcagaacttgtgttgcttcacatggacgctattttaatgataaatggtaaaaggtaagtcctaagtttccatggtagccctgaataaccaggttcttgtatgagctgcttcatttcttatgtatactgtgagacacaggccataccatgcagtgtgaaccctggtattctaggaaatctccgcatgcatcctggcagtttaggactccctatgctgcatcctgcatcttcagtcttaacgtcattgtttttttaaacacagaattttcttttttgattttccggtgatttgcaacat

SEQ ID NO: 236938 - DNA, 561 bp, Homo sapiens
cacacagcctatcagcccagagagctctgctaatagtgacatttaagagtatttgggactacagttgcaccagacaagatcattactttatagccggacctctaccctctggccaccaaaggatgtggattttaggaaaactagattttgcagtgttccctgttgaaacagcagtgaggccattcagggtggcctctgtgtctgctgttgtttgtttgcctctgtcttgcttccctattgtctgtcattggaagaagatcccagtcagaacttgtgttgcttcacatggacgctattttaatgataaatggtaaaaggtaagtcctaagtttccatggtagccctgaataaccaggttcttgtatgagctgctkcatttcttatgtatactgtgagacacaggccataccatgcagtgtgaaccctggtattctaggaaatctccgcatgcatcctggcagtttaggactccctatgctgcatcctgcatcttcagtcttaacgtcattgtttttttaaacacagaattttcttttttgattttccggtgatttgcaacat

SEQ ID NO: 236939 - DNA, 649 bp, Homo sapiens
aaacagccattctatattgttcttcggtgctctcataatgttwaaccttgccttttacttaaaggattacaggaactggccttaggagatccaaaatatccaaccaaggttgcaagtatcccacctcaggaaggaatgctaaacaactgattcatacagccttgctgccactaaccagagcaccagatggcccattactcaagacaaccattgccagcagataagctgacccatgtcccctccccctcacgttctctaccctgcccagcccgcattccctaccttgacatcaatttccgcacattgcctaataaaagaaatccctatcagctcatttcagggagtcagccagagaatcctccctctcctgtgcttcctcccttgtgcctgggcatatgctccaataaagccttgctaggaaaactcttttggcctggtgagaatttctattgcatcaagagcctaagaacccatgatcggtaacactttgagcaaaggaaaaggtcccccttccctagggagatgcagctctgcatgcacccatatgtttggtgggtggagtgcaaactggcttcccgttgcatatgcctctctgtctaggagaacagaaagatgataattacatgcatattggtccaccaagcacagg

SEQ ID NO: 236940 - DNA, 649 bp, Homo sapiens
aaacagccattctatattgttcttcggtgctctcataatgttaaaccttgccttttacttaaaggattacaggaactggccttaggagatccaaaatatccaaccaaggttgcaagtatcccacctcaggaaggaatgctaaacaactgattcatacagccttgctgccactaaccagagcaccagatggcccattactcaagacaaccattgccagcagataagcygacccatgtcccctccccctcacgttctctaccctgcccagcccgcattccctaccttgacatcaatttccgcacattgcctaataaaagaaatccctatcagctcatttcagggagtcagccagagaatcctccctctcctgtgcttcctcccttgtgcctgggcatatgctccaataaagccttgctaggaaaactcttttggcctggtgagaatttctattgcatcaagagcctaagaacccatgatcggtaacactttgagcaaaggaaaaggtcccccttccctagggagatgcagctctgcatgcacccatatgtttggtgggtggagtgcaaactggcttcccgttgcatatgcctctctgtctaggagaacagaaagatgataattacatgcatattggtccaccaagcacagg

SEQ ID NO: 236941 - DNA, 649 bp, Homo sapiens
aaacagccattctatattgttcttcggtgctctcataatgttaaaccttgccttttacttaaaggattacaggaactggccttaggagatccaaaatatccaaccaaggttgcaagtatcccacctcaggaaggaatgctaaacaactgattcatacagccttgctgccactaaccagagcaccagatggcccattactcaagacaaccattgccagcagataagctgacccatgtcccctccccctcacgttctctaccctgcccagcccrcattccctaccttgacatcaatttccgcacattgcctaataaaagaaatccctatcagctcatttcagggagtcagccagagaatcctccctctcctgtgcttcctcccttgtgcctgggcatatgctccaataaagccttgctaggaaaactcttttggcctggtgagaatttctattgcatcaagagcctaagaacccatgatcggtaacactttgagcaaaggaaaaggtcccccttccctagggagatgcagctctgcatgcacccatatgtttggtgggtggagtgcaaactggcttcccgttgcatatgcctctctgtctaggagaacagaaagatgataattacatgcatattggtccaccaagcacagg

SEQ ID NO: 236942 - DNA, 649 bp, Homo sapiens
aaacagccattctatattgttcttcggtgctctcataatgttaaaccttgccttttacttaaaggattacaggaactggccttaggagatccaaaatatccaaccaaggttgcaagtatcccacctcaggaaggaatgctaaacaactgattcatacagccttgctgccactaaccagagcaccagatggcccattactcaagacaaccattgccagcagataagctgacccatgtcccctccccctcacgttctctaccctgcccagcccgcattccctaccttgacatcaatttccgcacattgcctaataaaagaaatccctatcagctcatttcagggagtcagccagagaatcctccctctcctgtgcttcctcccttgtgcctgggcatatgctccaataaagccttgctaggaaaactcttttggcctggtgagaatttctattgcatcaagagcctaagaacccatgatcggtaacactttgagcaaaggaaaaggtcccccttccctagggagatgcagctctgcatrcacccatatgtttggtgggtggagtgcaaactggcttcccgttgcatatgcctctctgtctaggagaacagaaagatgataattacatgcatattggtccaccaagcacagg

SEQ ID NO: 236943 - DNA, 571 bp, Homo sapiens
actgattttaactcgtttgagtatacacccagaagtagaatttctgggccatatagtaattatatatttttatttttgagaaacctcccttctgttttccataatggctgcactaatttacattcccaccaacattttacaagtgttctcttttcttcaaatcctcaccaacacttgtctttcattttttttgtaatagccattctaaaatgagtaaggtgaaatctcattttaatttgcattttcctaatcaatggtgatattgaacaccttttaatatctcttctggccrtttgtatgtcttctttggagaaatatctgtccaggtcttttgcccattttttaacagggttatttgttttattgttactgagttgaatttgttgtatattttgtgtattagctctttatcagacatatgatttgcaaatattttttctcagtccgtgagttgtcactcttcactctgttaattgttttctttgctgtatagaagctctttagtttgatgtaatctcatttgttgtatgtgcgtttttggtcatatctaagaaatcattgcccaaaccaa

SEQ ID NO: 236944 - DNA, 443 bp, Homo sapiens
tcctttgggtgctgaggaaataactgtaagtgaataaatacattattaataatattaactaacatatttatattactgataatatattagaacagtttttagttagcatctttaattccaggaaaagctacctatttcttcacatgttcatggccatttgatttcttctttcataaattatctgktcaagggttttggctatttatttaaatattagggttgtgcttgttactaatattaaaaagtacttgtcaattttaagcccaagctgtttggaatggctgagtgttcagacattataaaccataagacgaatataatttaacttcattttcattatgttttcctcaaatatgctcatcaaatgcatcacattaattgttttattaaaactcacttcaaagacgtatattggaaaatattttacactatgtctgtgtcct

SEQ ID NO: 236945 - DNA, 610 bp, Homo sapiens
tggagtcttgctctgtcacccaggctggagtgcagtggcatgatctcagctcactgcaacctctgcttcctaggttcaaacgattcccccgcctcagcctcctaagtagctgggattataggtgcacgccaccacgcttggctaattttctttttttcttttctttctttctttytttttttttttctgtagttttagtagagatggcatatcaccatgttggccaggccagtctcgaactcctgacctcaactgatcagcccacctcggcctcccaaagtgctgggaatataagtgtgagccactgtgccctgcccagaattgttaactcatacctccaccagaagtaactttgtggtttgaagtagaatactacgtaaagatgtttggctttagccttacagagccctctcattatcggcaccttacttttttccatcctcttcagcaaaattgtttcataggtttgcaatacatttaaattatcttgtcaaattctgtattccatctttggatcccaggacagcctaaatgattgtttttgtttacatacattaaggttcacattttgtgctataagtttcttttttgttcacaaaggcagggtgtc

SEQ ID NO: 236946 - DNA, 610 bp, Homo sapiens
tggagtcttgctctgtcacccaggctggagtgcagtggcatgatctcagctcactgcaacctctgcttcctaggttcaaacgattcccccgcctcagcctcctaagtagctgggattataggtgcacgccaccacgcttggctaattttctttttttcttttctttctttctttttttttttttttctgtagttttagtagagatggcatatcaccatgttggccaggccagtctcgaactcctgacctcaactgatcagcccacctcggcctcccaaagtgctgggaatataagtgtgagccactgtgccctgcccagaattgttaactcatacctccaccagaagtaactttgtggwttgaagtagaatactacgtaaagatgtttggctttagccttacagagccctctcattatcggcaccttacttttttccatcctcttcagcaaaattgtttcataggtttgcaatacatttaaattatcttgtcaaattctgtattccatctttggatcccaggacagcctaaatgattgtttttgtttacatacattaaggttcacattttgtgctataagtttcttttttgttcacaaaggcagggtgtc

SEQ ID NO: 236947 - DNA, 566 bp, Homo sapiens
acatgattatctcaatatatgcagaaaaagcatttgacaaagcccaacacccttttatgagaaaaaagtaaataaactaagaatggcaggaaattttctcaacctgataaggggcaagtaccaaaaaataaaaaaaagaaacaaaaacaaaacagggctaacgtcatactcaatggtgactgatcagttaccccataagatgaggacaaaggcaaaagtgtctgctgtcaccagctctgttcaacattgtattgcggttttagcttgagcaacctagcaagaaaataaataaataaataaataaataaataaataaataaataaatagtatccaaactggaaatgaagaagtaaaactatctctatgttcagatgacataatcttgtgtatagaaaattctaaggaatttacaaaaaaatcttatttgaactaagaatatagttcaagaggatggcaatacccatgatcaaggcacagaaacaatctgyatttctatacacagcaattcataattcaaaaatgagattgaaaacatgcttacccagtaggttagaaaaaaaaggaa

SEQ ID NO: 236948 - DNA, 517 bp, Homo sapiens
gaaaggcccctggcacggtgcatatctcagagtgtagcatgacaacaaggtacacacgtggccctcagtcaagagccatgtcttggatagcatgactcccgagtgaacagaggwgaagccatctgtcaacaactgaagagagagagagagagagagagactgtcccagatgaagatatagcacaggaaaaaacacacttagagaaaatgagtgtgccagccccaaatgccagtgattctcctaagtgagatggtggtaaataatgcattatatttgcattttcggcatttagaatcttttctcctatttgccttcctccacccaacaacaaggatgatctttctaaatgagtgatttttcaacatcccttggcgagtgtcatacctctgaggcctttgacttcctgatgcctctggtataatgggcctggggcatgagccaggcactgggacttgccatccttgattctcacatgccctgctgaggacccctgctgcaggccaattaggtgcagtgg

SEQ ID NO: 236949 - DNA, 629 bp, Homo sapiens
gtgcaatagcaccatctcggctcaccacaacctccgcctcccgggttcaagtgattttcctgcctcagcctcctgagtagctgggattaaaagcatgtgccaccacacacagctaattttgtttttttagtagagacagagtttctccatgttggccaggctggtctcaaactcctgacctcaggtgatccatccacctcagcctcccttaagtgctgggattacagccatgagccaccatgcccagactacatcttagtctttatggagattacatgtataaaaatatactgaactttacacataacgtgcactgtagctatgttctaccttgatatggtttggctgtgttcccacccaaatctcatcttgaaytgtagctcccataatccccatgtgtcatgggaaggaccccttgggaggtaatcgaatcatggggacagatttttctcacgataatctcatgatagtgaataagtctcacgagatctgatggttttataaaaggtggttccttttgcacacgctctcttgcctgctgccatgtaagatgtgcctctgctcctccttcgccttctgccatgattgtgaggcctccctagccatgtggaactgtgagtccattaaac

SEQ ID NO: 236950 - DNA, 567 bp, Homo sapiens
ctaagatctcatctcaaaaaaaaaaaaaaagagagagaatatagttactatgttatgagttaattaaaatataaaaaatagtggtatacccactttttgaatgtatatatgtgttcatgtmtatagtaaacatataaaacactggatggaaggataacttcaagataaccattatcactgcttacgaaaataagtaggttgaagttgaagtggtacttaccctatgtttatagaacaatatgtcatctatctaagacatcatataattaaaacatactgttattttttgtaccactcagaaaataaatgttacagttaaattaggacacagtgttttcttaccatacccttaaagatgcatcccaatcacaaaagtacatgtgaaaaaaaaatacagcacttttaattttaaatgtttttaaaagagatatgaaaccaatatgggtggtgggcacacaactgtctgttgcattctgcttgaacttttttcatttttaattattccagaagttgcaatgaatattaagaataattaaatgatagtgatatacacattataattcataa

SEQ ID NO: 236951 - DNA, 497 bp, Homo sapiens
gagtgcagtggcgccatcttggctcaccgcaaccgccttctcccaggttcaagcgattctcatgtctcascctccagagtagctgggattgccggcatgcaccaccgcacctagataatttttatatttttaatagagttggggttttgtcatgttggccaggatggtcttgaactcctaacctcaagtgatcagcccgacttggtctcccaaattgctgagattacacgcgtgagccaccgagcctggcctgttttactaacgtcttaaaaactttgtaagttgtaacattatttttcaaacttgtcttttacaatatagacatttaaggttgctatgcaaccttaaaggctgtaaattttcatcaagtgaaaattaccaccactttctttatgtctcaaatagggacagagaaaaagcaattttttattatgattctgttccagatattttaaaatggtcattgtatgtctttttgatttatagagaatagtaag

SEQ ID NO: 236952 - DNA, 558 bp, Homo sapiens
taaggaataagtattttatttcaacagcaatggaaaggatactgtgttsacacagtatgactatgtctgcatgtagaatgattactgtagcctcgtcattgacagaagagtgggggagggggataaaaacctgttagaggctgatgggttaacccagatgtagagatgctagtgtcctggatgaggggagaggcagtgaggaggcacagattgactggtggtgattatagcttaagtatctcgacacagtccactgggtaggagtttgtaggctcagtgttctgttaggcatgagagaggagagagaagtaggaaaatggcaaaggattagttttgtggtgaacaaatgacaaaacagaagagcaacagatggggatgggaaagagaagatgatggtttttttttttttaaacaggtggtgttagaggacagaaaaaaagagacagcccctgggtatacacagatgcagaatttgggagaggaacagagaggaggcttgggtagccatgagcatgtagacagcatttgaagctgagggtgtgagaatatttctcaaag

SEQ ID NO: 236953 - DNA, 335 bp, Homo sapiens
aaattttacagtcttttttgtataaygcccccaaaaggaaatcttgattttcacttaagatttgatttgaagtaagtcatgatttagaacagcagacaaaatgtattggggtaaagtattatgtaaacgtaagatgaagagatactggtttctacttcaggaggtagcttatatttgtttgctttaattaattaattaattcattcattcatttttgagatggagtctcgctctgttacccaggctggagtgcagtggcacaatcttggctcactgcaacctccgcctcccgggtttgagtgattctcctgccttagcctcccgagtagctggga

SEQ ID NO: 236954 - DNA, 335 bp, Homo sapiens
aaattttacagtcttttttgtataacgcccccaaaaggaaatcttgattttcacttaagatttgatttgaagtaagtcatgatttagaacagcagacaaaatgyattggggtaaagtattatgtaaacgtaagatgaagagatactggtttctacttcaggaggtagcttatatttgtttgctttaattaattaattaattcattcattcatttttgagatggagtctcgctctgttacccaggctggagtgcagtggcacaatcttggctcactgcaacctccgcctcccgggtttgagtgattctcctgccttagcctcccgagtagctggga

SEQ ID NO: 236955 - DNA, 335 bp, Homo sapiens
aaattttacagtcttttttgtataacgcccccaaaaggaaatcttgattttcacttaagatttgatttgaagtaagtcatgatttagaacagcagacaaaatgtattggggtaaagtattatgtaaasgtaagatgaagagatactggtttctacttcaggaggtagcttatatttgtttgctttaattaattaattaattcattcattcatttttgagatggagtctcgctctgttacccaggctggagtgcagtggcacaatcttggctcactgcaacctccgcctcccgggtttgagtgattctcctgccttagcctcccgagtagctggga

SEQ ID NO: 236956 - DNA, 335 bp, Homo sapiens
aaattttacagtcttttttgtataacgcccccaaaaggaaatcttgattttcacttaagatttgatttgaagtaagtcatgatttagaacagcagacaaaatgtattggggtaaagtattatgtaaacgtaagatgaagagatactggtttctacttcaggaggtagcttatatttgtttgctttaattaattaattaattcattcattcatttttgagatggagtctcgctctgttacccaggctggagtgcagtggcacaatcttggctcactgcaacctccgcctcccgggtttragtgattctcctgccttagcctcccgagtagctggga

SEQ ID NO: 236957 - DNA, 376 bp, Homo sapiens
atttttaatctttaataaatagaaggattaattaaatacactgtgacattggggaactcttttttattcctaaggtacatcttttttcttgccattacttaacctcttttcttcctgttttgttctcagctctcctttacagccatgagttaccaatgcccggtgccaccaggaagagggggtatctgtaggagtaagatgatgaatagcagtgataaggggagagcgaggagaagggagggggctctgaggaggctaaagggcaaacttttattcttgaaaatacacaaatatcccaagtcctgggtgtgtggaacgtccttattactgctggggatgttgcttgtstgtgggaattgggaatttcacacctagc

SEQ ID NO: 236958 - DNA, 516 bp, Homo sapiens
tgcaattgtctgttgtaacactaatcaatacatttaacaaatatatgatgtgttctgctatatgcttggccagtgtgtgaaatggaggagacataaycctcatctttgtgtagtttataggctagcaaagaagtcaggcagtaaacaaataaatgcatttataattaattacaatcctgaagttggattgtacttttgtgagtaatggtttaataaactagattttaagttccattaagataggggttacttctgtgttgtttgtcatggtgtcccaaatccttccttagcctactgcttggaatagagtaaatattaagttgagctttattgccattttgataggtcagaagcagtcgaatgtcaataatgtcacatagttcaacctaatagttgctcagtcaatatgtattgaatgttgaatgcatgttgtaatcaacgatcctatggtaggctgcatttaacacagttttctctagccaaagaaatgctagctatggtatttgaaaaggaatt

SEQ ID NO: 236959 - DNA, 516 bp, Homo sapiens
tgcaattgtctgttgtaacactaatcaatacatttaacaaatatatgatgtgttctgctatatgcttggccagtgtgtgaaatggaggagacataatcctcatctttgtgtagtttataggctagcaaagaagtcaggcagtaaacaaataaatgcatttataattaattacaatcctgaagttggattgtacttttgtragtaatggtttaataaactagattttaagttccattaagataggggttacttctgtgttgtttgtcatggtgtcccaaatccttccttagcctactgcttggaatagagtaaatattaagttgagctttattgccattttgataggtcagaagcagtcgaatgtcaataatgtcacatagttcaacctaatagttgctcagtcaatatgtattgaatgttgaatgcatgttgtaatcaacgatcctatggtaggctgcatttaacacagttttctctagccaaagaaatgctagctatggtatttgaaaaggaatt

SEQ ID NO: 236960 - DNA, 366 bp, Homo sapiens
catcctttcagggtacaaggaaggcacctgaatgacagatggtttgaggaatcttgagaaagcagaagtttaggcattaacatgcaggctgtcgctgacttacacagagccaaggacgtgacatacagcatggggccatttctaaatccccactgarggcaagggtcctggagggaatgggatttggaacaagatttgggctttgaacattcgctacaggctctgacaaagcagtgatggttcaaaagcctctgccccctggtggcaagccctgcccagatgctgttaaggggctctccaggcacgccctcctaattaggggcaagatcagagaagcctctttggaagaagacaaaaggcacaatg

SEQ ID NO: 236961 - DNA, 366 bp, Homo sapiens
catcctttcagggtacaaggaaggcacctgaatgacagatggtttgaggaatcttgagaaagcagaagtttaggcattaacatgcaggctgtcgctgacttacacagagccaaggacgtgacatacagcatggggccatttctaaatccccactgaagrcaagggtcctggagggaatgggatttggaacaagatttgggctttgaacattcgctacaggctctgacaaagcagtgatggttcaaaagcctctgccccctggtggcaagccctgcccagatgctgttaaggggctctccaggcacgccctcctaattaggggcaagatcagagaagcctctttggaagaagacaaaaggcacaatg

SEQ ID NO: 236962 - DNA, 366 bp, Homo sapiens
catcctttcagggtacaaggaaggcacctgaatgacagatggtttgaggaatcttgagaaagcagaagtttaggcattaacatgcaggctgtcgctgacttacacagagccaaggacgtgacatacagcatggggccatttctaaatccccactgaaggcaagggtcctggagggaatgggatttggaacaagatttgggctttgaacattcgctacaggctctgacaaagcagtgatggttcaaaagcctctgccccctggtggcaagccctgcccagatgctgttaaggggctctccaggcacgccctcctaattaggggcaaratcagagaagcctctttggaagaagacaaaaggcacaatg

SEQ ID NO: 236963 - DNA, 571 bp, Homo sapiens
tgaagctgtaccacagcacttcaatgtccatgagggaagaataggaggagacccatcatggaggccttagaagaaatgagcagtgagatgggagaaaacacaggaaagtgtggggtcccaaaagccaaggaaagcatttagaacagggcccggtacacagtaaattaaagttaattatgtagctattagtatttatccttttgaagccctatggtccccaagtagtcctttcttctctgacttcaactaggactgagatctgtgatagctttgaccagtggaatatggcaggagatattgtttataccggattccaagctcaaatattaagtgaccaagaaatagatttaaattgaggatttagaagagactattctatttggaaatgcgaaggtcattggttactytgagaaaaaagattttagtggagggagacacaaaattcttttttttttttttttgagatggagtctcactccgtaacccaggctggagtgcaatggcgcgatctcggctcactgcaacctctgcctcccgggtacaacaattctgaaggcagacaaaattctaa

SEQ ID NO: 236964 - DNA, 548 bp, Homo sapiens
tcttcctatatattctccatcccctctcccttttaaaggaagtgatttaaacaaaaattccagaaacttctaggctaggcttagaatttccacagtggccattgactggggagagaacaaaataatggtaaaaagaaaagtatctgtctttatctccctytttctcttattctctcccattctctctctctctctctctccctctcccccctccactccccaaatatatgctaaaattagaatgtataattagttttagaacatactagtttctcctttattatttatcaatataggcataacagcttaagggaggcattatcacagtgttttaaatcactgaatctgacagccctgggatcatttttgtaaggcgtgttctaacttccaagagttcaacacaagctacatagctaactgagttaagcactgaaaaaagacagcctcagtctctggagaatgtcttcagaagaacaaggtaactggggtactaggtcactgcaaatctacttccgaaaataagtaaaacagacagaggagaaaatagt

SEQ ID NO: 236965 - DNA, 548 bp, Homo sapiens
tcttcctatatattctccatcccctctcccttttaaaggaagtgatttaaacaaaaattccagaaacttctaggctaggcttagaatttccacagtggccattgactggggagagaacaaaataatggtaaaaagaaaagtatctgtctttatctccctttttctcttattctctcccattctctctctctctctctctccctctcccccctccactccccaaatatatgctaaaattagaatgtataattagttttagaacatactagtttctcctttattatttatcaatataggcataacagcttaagggaggcattatcacagtgttttaaatcactgaatctgacagccctgggatcatttttgtaaggcrtgttctaacttccaagagttcaacacaagctacatagctaactgagttaagcactgaaaaaagacagcctcagtctctggagaatgtcttcagaagaacaaggtaactggggtactaggtcactgcaaatctacttccgaaaataagtaaaacagacagaggagaaaatagt

SEQ ID NO: 236966 - DNA, 422 bp, Homo sapiens
ggatgagacgagtttttacatgaaggatttggaggaagtggtgcagctggctgtcagagcggaatatcatttgtgagcagcagggaagaatgcctgcatgctagaaagaaatgaaggatgacgaaatgagcccagtgcattaggctggaaggaaagccacagaggggctgcaaaaggatgcgccatggcagttaatacacagccacctcgggggacagcaggcctaacaataaccatgtcaaaactcaattccatatcaatgagaaagatgttgtgaggaattcaaatcaaataaaaataaaggccatcaaagcatacagagaataggatagtacaaaaagaatggtgccccatctctgcctcgtgractacatcatccttaaacttccctgctctagattctaaagtcattgtgaccaggg

SEQ ID NO: 236967 - DNA, 637 bp, Homo sapiens
tgtagcatttactttttacttgggtgtcatattgaaagtctggacttgtcatctaaaaaatccccaaatttttaacttccttaatagaagcaactcaggagataaaaacatgagacgcatatgatcaaaatccaccagagctgagtgctggcttccccattaggacagggcttgttacactcattgtctagtctgcttcacacttggtgtgcttccctcaagaagcactcatgtttgtgactctcagtgtaggctatttagtctttaatagttcaggtttgtccttggaagaattgtatgagagagagagagaaagagagagagagagagagagagagagwgtgtgtgtgtgtgtttgtgtgtgtgtgtgtgtgtgtgtgtgagagaaagagagagggaatgagccattaggtggacactcaaatgtgtcacattgaggcaatgtgtcacacttggtcatggacacccccaaggtgtgccaatggccactctgattctcctttttgagcaccatctccactagcatgctctctaactcagactcagtgaaatgtggttcttggactagagtgtcctattacattgtctgcacaggtaaaccaataagcccagagaggaatgagacaaccagactgac

SEQ ID NO: 236968 - DNA, 546 bp, Homo sapiens
atgatgagacccatgtgagtcttcttctcatcyttctttctccctctctctcccacttttcatgttctcatgcctcagcatgccttctcatcaccaagtaaggtaagctcacttatttgtttattcaacaaacatttattgagcacctaatgtgtgccaggctcaaaattagctccttattgcaaggacctctttatttagcaaagtaaagtgacatggaaaccgctgataaaacattgacttcagtactaaattagaggtttattaaaagcattgataatacatagaaaggagtaaacaattgtgcccgctggaggggggagatggcggaccagaggagagtaagaaagaagaagtattagagcaggtttgagagggaagcacgtttttgctaggcttgcgaggaatcacaggagtttgctaataaattaatgtatactctaagtgacataatggtttttctgcatgtctcatacaagtttgaaactgagctaactagcctgaaccacacactgacccatgcccaacctactctccttcttgatt

SEQ ID NO: 236969 - DNA, 636 bp, Homo sapiens
tattattcactgctattgaaattgaaagggaagtgtgagttcttgctgtcaggtgccctgggtgcctccccattcctgatgagctccttcaatactgttagcatattttattaaaacctttctagtgaaaatgtttggagcatgccatctgtttcctgtcagaaccttgatgaatacaatgtcccaatagtatatttatttccatgaaggaccacaaaaaggaatgctattccaaaggagaaaattgctaatggtgtatatttaggcttyggttaattgaggatgaataacttccctatactcctctaaagatatagatgtgtttgttttctacattgcatatgccaaaactatgctaatagtttattataaatagtttatgtataaatgtttattatacattatccttttaattctcacaataagaaccatgaggttttaattatttccatcttactggaaatcaaaactcagaacatttatgacctgcatcagcttacaaagccagaaggtgggagaaccaggactacagcatctacctgatgacaaaaatggcatccttagcccctctataggtctccggcattgtccctttgttcaggtgacactacaaatagatacacggtaatggggttt

SEQ ID NO: 236970 - DNA, 636 bp, Homo sapiens
tattattcactgctattgaaattgaaagggaagtgtgagttcttgctgtcaggtgccctgggtgcctccccattcctgatgagctccttcaatactgttagcatattttattaaaacctttctagtgaaaatgtttggagcatgccatctgtttcctgtcagaaccttgatgaatacaatgtcccaatagtatatttatttccatgaaggaccacaaaaaggaatgctattccaaaggagaaaattgctaatggtgtatatttaggcttcggttaattgaggatgaataacttccctayactcctctaaagatatagatgtgtttgttttctacattgcatatgccaaaactatgctaatagtttattataaatagtttatgtataaatgtttattatacattatccttttaattctcacaataagaaccatgaggttttaattatttccatcttactggaaatcaaaactcagaacatttatgacctgcatcagcttacaaagccagaaggtgggagaaccaggactacagcatctacctgatgacaaaaatggcatccttagcccctctataggtctccggcattgtccctttgttcaggtgacactacaaatagatacacggtaatggggttt

SEQ ID NO: 236971 - DNA, 585 bp, Homo sapiens
gctcgctaatttcattcacatttttatcccaaacactaaatcaatttaagttatattttgagactatttaataagaaaacacattagcttatgttacatttctctttccaaataattatggaagagaaaaatcaaacagaaaaatcaaaaggttaagttgaaacatgggcattctttgcataatcaacaaggtggttgcaaggtggaaaatatttcactctgtggtccataggtttatgtactcaaaacaagataataccatataacaaatacatctagggtagagaaaaattatttgatatttcaggtcactattagcagtttaggttactgcatggttgattggaaaatgtgattatcatttagaatgtcaaaacaactgttaatttgatgtcaaatgtgggtgtaaaatattaattattattatttacaatytaaagtgaaacacttagttacttcagtttacttcaattaacctttaaagagctaaatgttataggtgtgaggaccaattattgttttgttttgacagcttgaatttggctacatatttgggtaccaaggctaaataattgtttatattag

SEQ ID NO: 236972 - DNA, 584 bp, Homo sapiens
aaacctgaccttccaaaaggaaaagaagatgaagctttttccttgtagagatctggtatagacctggcatctccctgatgcttatccacctgtgctctagattggctgactgtgcattcttcttcactgcctattcatggctcccttgcagctgtgaaagaaggagagagcaataagttccagctcagggaacataggcagaaatctactgtggaaattctgaaaaaattttgttttcctgatcaaacctacagagaagttagtgatgtctttccacttattcttgcttrtcacaggtatatgatgtcaacagtagggaaaccagcttgcaaaaaaggtaacaagaatgagggatgctggtcctgatattgtcaagccattgatctgatgccaaccttgtctacatccagatattttaaacgtggagaaaaaaaaaccctaactctgattggcttctaagtcttggtaaattggggacttggtgcttgatcagacgtggactagagtgaagtttgtgtgattcttacactgctgtcaggagcagtggggtgaaagatgccatttactgatgtaacaaggaagtt

SEQ ID NO: 236973 - DNA, 584 bp, Homo sapiens
aaacctgaccttccaaaaggaaaagaagatgaagctttttccttgtagagatctggtatagacctggcatctccctgatgcttatccacctgtgctctagattggctgactgtgcattcttcttcactgcctattcatggctcccttgcagctgtgaaagaaggagagagcaataagttccagctcagggaacataggcagaaatctactgtggaaattctgaaaaaattttgttttcctgatcaaacctacagagaagttagtgatgtctttccacttattcttgcttatcacaggtatatgatgtcaacagtagggaaaccagcttgcaaaaaaggtaacaagaatgagggatgctggtcctgatattgtcaagccattsatctgatgccaaccttgtctacatccagatattttaaacgtggagaaaaaaaaaccctaactctgattggcttctaagtcttggtaaattggggacttggtgcttgatcagacgtggactagagtgaagtttgtgtgattcttacactgctgtcaggagcagtggggtgaaagatgccatttactgatgtaacaaggaagtt

SEQ ID NO: 236974 - DNA, 584 bp, Homo sapiens
aaacctgaccttccaaaaggaaaagaagatgaagctttttccttgtagagatctggtatagacctggcatctccctgatgcttatccacctgtgctctagattggctgactgtgcattcttcttcactgcctattcatggctcccttgcagctgtgaaagaaggagagagcaataagttccagctcagggaacataggcagaaatctactgtggaaattctgaaaaaattttgttttcctgatcaaacctacagagaagttagtgatgtctttccacttattcttgcttatcacaggtatatgatgtcaacagtagggaaaccagcttgcaaaaaaggtaacaagaatgagggatgctggtcctgatattgtcaagccattgatctgatgccaaccttgtctacatccagatattttaaacgtggagaaaaaaaaaccctaactctgattggcttctaagtcttggtaaattggggacttggtgcttgatcagacgtggactagagtgaagtttgtgkgattcttacactgctgtcaggagcagtggggtgaaagatgccatttactgatgtaacaaggaagtt

SEQ ID NO: 236975 - DNA, 483 bp, Homo sapiens
atgtcataagattattgcatctataatttagaattttattttttcctgagtttcctggctctaagaaaatttgatttaaggaaatccagtatctctcatcttgaaatcaaaagccttactagggaaaggcacagatgtcaacagaagcggcaaccattcaccagcaattctcccatgacttctatgacaaatttcctatagttgatctggaatctaygtgacagattgttggtgccaaaggctagcaaactccatctatgtgaagtatggtccttttgaaaaacaagtgaatccaattaaagaaaaaaacaagaaacaaacccagaaggaggaaaacaaggggttttgattcttcgtgtttactgtgttaacccaattgtaatgcaagaatcagaaactctaggtctagataggatagtaaaaagacacacatgtaaataagtctcaaagttttgctcctttattgacctccatgcccaatta

SEQ ID NO: 236976 - DNA, 565 bp, Homo sapiens
tcttgtttctctgacggtatgattaaatgaaatatgctaaatttaaaagggaataatttgccatccttccagggggaaggatacattcttccctcttcctgaaacactcacctctctttcacatctcttcctcatgtcctgaaatgagactcttattactcccgttgttttcattgcactttgcaatagtttttattttagcactcaccagagtctctgttgaaattcaaagtatttgtatacatgcttatactcttcaccagactgtgtccttggagcacagattctgctttttattttctcagcattgtgtccctctagttcctgtaaattgagccttgcagatagttgcccactaaatacttcctatttgcatttgaatacagacatactgaagataaaacttaatgcaaaggcactgtrtggggactggaagagagctaggctgacagatggggagggtcctttcagatccagctctcaacattacctacacattcaagaaagacctagtgcagggggtactttataggaactgcacaaggcagcacaaacaaacacagct

SEQ ID NO: 236977 - DNA, 529 bp, Homo sapiens
atttctgtcttgatgatctgtctagtgctgtcagtggagtattgaagtcccccactattattgtgttgccagctctctcatttcttaggtctagtaataattgatttataaatttatatatatatatatatatatatatatatatatatatatatatwtatttaggattgtgatattttccttttagattgttccttttatcattacataatgtccctctttgtatttttaaaattattgttgccttaaagtctgttttgtctgatacaagaacagctattcctaatcacttttggttttcatttgcatagaatatcattttctacttctttaccttaagtttatgtgagtccttatgcattaggtgagtctcttaaagacagcagatacttggttggtggatttttatccattctgccattctgtaacttttaagtggagcatttaggccatttacattcaacattagtattgagatgtgaggtactgttttattcatcatgctagttgttgcctgaataccttggtt

SEQ ID NO: 236978 - DNA, 554 bp, Homo sapiens
ctatgtggtaggtttattaagataactacctttaatcctctcaaatagccttgaacaaggtaaatatgacatttgagctacsagtactctaccagagttacaaagtcaaattttggaacccacagctctctgtccagaatccaaaatgcctttaagtggagcagttgcattctttaaacatatttaccatatgacctatcacatatttatagttgaggtctctgacttcagttttcattttgaataatgttgaagatcaccataagtcaagtcttttttgattctgctctatttagtgaaattgctatttttaaattaaaatttcaaattacttaaatgaaagcaagaaagtcatatatgtagatcttatgtcaagtgtttgtcacacctgatcatgaagatctaagcagacttttctagacaaattttactttaaacaatgtcctaccctgttgttatccctacatgtaaacagaaaccacatacacattgctaggctctctttatcctcttaccccctaaaccagttcccctgcttcccaggtactaggctg

SEQ ID NO: 236979 - DNA, 618 bp, Homo sapiens
gtccatttcactaaactaagcaacctataaataattgtgggaaaatgtttgcttcaagcagtgtaaacacaggccaaaattatagcccaaatgggaactttataatatcctttatatgtaccctttctctctctctttgtgtgtgtgtgtgttatatgttccttaaaaagtttattgtacattgaattattttaaagaagctaataaactataatgtttcatgaagttttcaataaaacttatttgatgtgaaaatttaccctcaatttagcttcattgtgttatattatakaatagaagaaaattacctatcacaatactcagtatagtgtaggcattcaacaaatatttgaattttaacaagtacaaatgaaattatttgtaacctaaaatatacctaaaacttgaatatcctttaagataaggaacatcaaatgtctggaaaacaaagacaagatacttcttccatgatgtctatgaattacttgtgctttatagtttatgccacaagcatgttaaagacctgatttttgttgttgttgttgttcagaggtggcttgttcaagggcgtgaatttaaagaacagtaaatgctttacttagtttactttggcttatc

SEQ ID NO: 236980 - DNA, 501 bp, Homo sapiens
aatctatctattgaatttctcaatgggtttaagaaggttatcagtgaagtgatggataaccaatagctactggattgtagaataagagttcagatatagcgggggggcggggaattctttgctatgaaggctaatgttgcaagtattggagggtggatatgtgtcatgacgggtcatgacagaggaaagctgtgatgccatttcacacacgaacaaaattatcgatgctgttgtcacaggtagaattgtttaaagtctatctctwgcatatcagatacatttgagatacatatcagatactcaatttctgctgcttcctaacatgtgaccttaggcaaattatttaatcttacgcagcttcattttcctaatctgtgaaataggaataattattatatctagtttctaggggtttttttgtgaaaataaaatgaaattgctcaaggattcccttgtggaaatgcatcttagttcttttgggctgctataacaaaatgccat

SEQ ID NO: 236981 - DNA, 501 bp, Homo sapiens
aatctatctattgaatttctcaatgggtttaagaaggttatcagtgaagtgatggataaccaatagctactggattgtagaataagagttcagatatagcgggggggcggggaattctttgctatgaaggctaatgttgcaagtattggagggtggatatgtgtcatgacgggtcatgacagaggaaagctgtgatgccatttcacacacgaacaaaattatcgatgctgttgtcacaggtagaattgtttaaagtctatctcttgcatatcagatacatttgagatacatatcagatactcaatttctgctgcttcctaacatgtgaccttaggcaaattatttaatcttacrcagcttcattttcctaatctgtgaaataggaataattattatatctagtttctaggggtttttttgtgaaaataaaatgaaattgctcaaggattcccttgtggaaatgcatcttagttcttttgggctgctataacaaaatgccat

SEQ ID NO: 236982 - DNA, 501 bp, Homo sapiens
aatctatctattgaatttctcaatgggtttaagaaggttatcagtgaagtgatggataaccaatagctactggattgtagaataagagttcagatatagcgggggggcggggaattctttgctatgaaggctaatgttgcaagtattggagggtggatatgtgtcatgacgggtcatgacagaggaaagctgtgatgccatttcacacacgaacaaaattatcgatgctgttgtcacaggtagaattgtttaaagtctatctcttgcatatcagatacatttgagatacatatcagatactcaatttctgctgcttcctaacatgtgaccttaggcaaattatttaatcttacgcagcttcattttyctaatctgtgaaataggaataattattatatctagtttctaggggtttttttgtgaaaataaaatgaaattgctcaaggattcccttgtggaaatgcatcttagttcttttgggctgctataacaaaatgccat

SEQ ID NO: 236983 - DNA, 534 bp, Homo sapiens
tacacagcatcacaatctggcacaaacgcttcaaacaacactgaacctacagggtcataaaagttgaataccatagtctagacctgttgagaattttctcttgctctagactcttaaaacagaagaaagttttgtttcccagaaaatgccttgaacatcaaatacaaatatagttcatattgctttcaaaatccaagtaaggccacctagcttcttgatatagagcacggttgatttttttcattttggaggagatattccaaaatgtccctggctactggaatgccacaaattccgctgagaaattatttcttaccttactgccaaggcatctagtgtactaaaaacacttgctttccaagacctattggcatgatgtcatcaaaatgctagactgagaaagccaaggttcatatggatttaactgaagtccaaaactagkaggttgacatgtccctgagttaaacatttgtcaaatgaaagcaaatttctgttgttccctgcttattggaacaaagtaaaaagaatagacaa

SEQ ID NO: 236984 - DNA, 615 bp, Homo sapiens
ttcaggtgagaatcagcacattcacagctatgttgagtacagggaaagattccttttgcttgagaaawccagagggaaaattaaagggcctttgtcttgcaccttaggaaccagctctaccacagggaggtacagtacaaagcaggcccttggggtccctgattccaggccttggttcttggataacatttctggacatgtcctggaccaaaggggagcccattgccttgaaaggtttgtcccagaccgggaagctttcatcccaacctgacttaagagcccttgagtcttaaggaaacagtggaggtggcttggcagtactccctatgtgcctgtggtgggctgtagccatggggtgaggctcctctagctttggaaaggggatgaaagagtgagaaggaccacatcttggggtttgtgtgccagctcagctacagtacaatagaacaccaggtaaatttctaaggttttttaatgtagtccctggctcctggatggcatctcaggacatgcccagagcctggggtaacttgccacctgaaaagaaggacacaagcttgtcaggcttcactatctgctggttgtggaaccccagagccttgagcaaacacaggt

SEQ ID NO: 236985 - DNA, 482 bp, Homo sapiens
tctagaatttacacagaagactgaaacagagaagcacttctgacatctaggaatgacttttcctgccaggcgcagtggctcacgcctgtcatcccagcactttgggaggctgaggcgggcggatcacctgaggtcaggagttcgaggctagcctggccaacacaccatttctactaaaaatacaaaattagctggacgtggtggcgcttgcctgtaatcccacctactagggaggctgaggcgggagaattgcttaaacctggaagcggtggttgcagtgagccragattttgccattgcactccagcctgggtgatgagagcaaaactctgtctcattaaaaagaaaaaaaaaaaagaatgacattttcctctaaggtagtaaagaaaatcacttgagtcattaaagcattaaaccaaaggcaagctgaaaatcagagcaagtttgatggtggtagttgtacagatgagtgatatctcttg

SEQ ID NO: 236986 - DNA, 511 bp, Homo sapiens
atctggagtagggtccagaaacaggatctataaagtactttagaccaaaattacagaatcttgtatataggtaaatcaaagtaaaactgtctacagataccaatgtacaaagttcaatttttattacagtctgcttggaagagtaaagyatcacaatttctttgcaattttataattttcaagatgaattatgaattatcataatgccgtttatcctgtctattaccctaatcaaggttgtgttgtgaaagttagagttttctgatctcacatatgttagaagatccccactattatatattttaaaaccttgcaaaatatgtaagactagatggaatccaggagatttttaataaacttataattcgagtatagatatttgtatgcaatatgttttcccccataacatagctttggttctaataaaaagccttgtacatcaatgtaacactcctttgtggcaccagaatactttacaggttctcatttcttgctttatttcagactataa

SEQ ID NO: 236987 - DNA, 511 bp, Homo sapiens
atctggagtagggtccagaaacaggatctataaagtactttagaccaaaattacagaatcttgtatataggtaaatcaaagtaaaactgtctacagataccaatgtacaaagttcaatttttattacagtctgcttggaagagtaaagcatcacaatttctttgcaattttataattttcaagatgaattatgaattatcataatgccgtttatcctgtctattaccctaatcaaggttgtgttrtgaaagttagagttttctgatctcacatatgttagaagatccccactattatatattttaaaaccttgcaaaatatgtaagactagatggaatccaggagatttttaataaacttataattcgagtatagatatttgtatgcaatatgttttcccccataacatagctttggttctaataaaaagccttgtacatcaatgtaacactcctttgtggcaccagaatactttacaggttctcatttcttgctttatttcagactataa

SEQ ID NO: 236988 - DNA, 656 bp, Homo sapiens
ttattttttttctcacacttgagaattcttgctaaagaattttatgtcaattatattttcatttctctgttggtaatttcttatccctctgaaagatttagaaggctatcttcatccttgtaattctgagatttgatgcatctggttgtggtctttcttcaactcctcctgttttgcagccagaaggcyctagcaatatgacttctctggtctttctttagtttaagaaaaatttcttccagtatttttttttgaatgaatgatcctcaccctacttttcatccctaccattaggcccatgcctaaggcatttagtacatgtttgtgtgagtgagagttgataagactggacatatagatttggctgtcaagagcataagaaaattgacaatgtgtatacattaagaagatgccagagaagaaaccaaaaagaatactttaatttaaggctgaggagagaaaaagcaaaggccaggtgtctgtggcatggcaacctgaaggcggaaagtacttctagtgaaattctatcccctaaacttcttcaatctcctcccaaatcatagagatctgtttaatttttcagaattatagaagttattctggtctgctaaaaagaggtttattaatgctgcataatttgaaactgcactgtaaac

SEQ ID NO: 236989 - DNA, 537 bp, Homo sapiens
gcaaagagcttcaactgtatgytgaattactcatcaaggggagagcttggtcctcctctctccttgctgcagccaagtccacaccctgcagcccctctgtggaccccttcaagattcggcagtctgcaatcagctccaccctcttccttcaaaggctcctgttctctagggacccgacctttgtgctcctcatcagacctgcagttttcagccaggtttctaaatgcacctggcccagctgtgctggggtgagaacagcatctgcacgtttagcaggcacccagggatgctgtgtgcaaaagccctgagggccaagggcaccctcacggcacttggaaatcactcccttcagataccacagcacccagtgcccccgatgaccaccatcctcaccccctaccagccacatgatatctgcagcactgtttggcccatacccaggcccctgccagcaatgagcctcatgccctctctcctggaacgcagcagggatcatgggacccctgtgagaacatcctccaagcagccactgcagct

SEQ ID NO: 236990 - DNA, 569 bp, Homo sapiens
aagcttggacctgccactcattcattctcttgctgggtactctctgtacctcagtttcccccactgctctttgaacccccaggamcctctctcctactggctggtagctcagcccctcaactgcttgcattgtattcaatcggctttgggggtgctgcttccggtactgtctcctcactatctcaagggctctattatcagaaaatcaaaatctgttccaaaagaaaaaaaacaaaatacacccatcttacagaaaagcgagctacctgaccacccctctgccagctggtgtccagatttcaaagagccacgagcatcacttaaaggcacatgccttgtgcaaggcttgctgggagatatcagggatctgatatgggtttgtaaccaagtagactaatcaggggcctccaggagtgggcaggaagtgcaaagaaatgtcaaatgggcctagaagtcaccagagaccaagaagcgtacacagaaacctcttggccgaggttccaaggcttataaggaggtgttgcgatgctactgtgacaacaggtatggggctctgcccacagggggac

SEQ ID NO: 236991 - DNA, 392 bp, Homo sapiens
ctcaacagcagcttcacactcccgggaccgtacaagcgccagcgaacgcaggctggaattcaccagcgccaagctgcccggctctccagccccrgcgcctgcctctttatctgtaccttcaaaaacagtaataagcaaacccaggcacctctgggaacagcctctggcctcctgccctgccctgtgtaaccagcctgtcctcacacccaccagggaggaggagtcggcactggttaaccctctggtctaccaggcccggttcccaggttgcagcagggagacaaactgttgctcaagaaaatccttcagaaaacccttggcaccaggaggcagctcggagcggctctgcacccggcgcggagccaggggcttccacaggcggccgcccactg

SEQ ID NO: 236992 - DNA, 582 bp, Homo sapiens
acagcactcttgaccaagtaaggactagaagttaggtgtcctgatactaatcaagaactctgttaagccactttgctactaaactaratggaaagtctctgatgaataaaatattctgtgctcatggaaggaaaatatagtttgatcatcttacagagacataatggtttaaaacaatgatttccaaactgtagcccatataatattccaggtagttctctcaggtctcattgacatgtccctatacatattttctcttttctgacacaagtatcaatatatgaatctactaacatgggagagtgttaaagaacatcttcaaaaaaagtaagaagagtgtctgaggtaataataattaaatttccaatagaaatttgcagaaaataaaccatatagtccatattaatatattgaagtgttaactgaaaatcatacatatcaatgaaatgagattatcatccaataaataattcaaccgtttttaataatagtatgtctttattaagaactatgaagagtctaagattttaccatatttgcacgctagcaagttagcctgccatcatttcataggtgctggca

SEQ ID NO: 236993 - DNA, 587 bp, Homo sapiens
gatgctgccattagtcctttcttatctgctcattatttcgtatagccttatgagacagaaactccccgtacaattaaatatgctgcaaattaatcttgaagtgcacctttccgtttcaaaaaggaaaagcaagttaaacacaataaacatcctaaatgatagaaaagtgtccagttccttttgtaaacacatcccttaacctttcttttctttaatctccttttaatccaacctggggtgcaaacccctaaatgacccattgctgtctgctgtctgatgtgggtgttatcatgttttcagagactctgagactcacctcatttaattctcagcactgcagcccgcagcagtcagggcatctatttcatgtctgcattactcctagatttggggggaaacatttaggagaaagaaaatgttactaagcccctcactctaacttccaaggagccagaatgaagacccagcagttkcccacatacctctcacatcagaagggcaaaagaagtaaccaaatgtaaaatatatcgtgtttccaactccttacgctttctctgaaagtagcaccaaaagaaaatttgtgggaa

SEQ ID NO: 236994 - DNA, 522 bp, Homo sapiens
accatgatcatcaggctcattctgcccacggattggaggctatggcccagctgggtgccctgagtgagctccaaggactccaggcccacaaggcaatgtgggggccgtccccatgcagaatgtatcagcatgtgttaatgatccttctctgatacacagccctgccacatcctccccactttgctatgcaggagtccagcagacatgcaaacaaaagcatgggctacactgacatggartgaaattagccaaagggactcaacttccctgaaaagacaactttaccaagcagttcgccgttgtaaatcatgacagtttcaaagggtgctaagttccctttcccccaaatggcacacggtcttgcacagggtaggtactcagtcattacctgctaagtgaagagatacaggaagtggctggcctgggaggagtaaaggtttagaagctagataacctctcagagaatgtgggaaggggtggtacagtggattctgcaggcagataggaggaccagccccccta

SEQ ID NO: 236995 - DNA, 532 bp, Homo sapiens
ttttggcaaacaatatatttaggtaattttattaagtagtttctattttacttggtaattttcagaaattactggatattttatcaaatgtctgcatttcatattgatgttaataaagtattttcttttttattcgttgatatactagattagagagacttttctgatttgaactactcattttccgaataaacctttttagtcatattatagtattattttgatayattgctggattccatgcactagtagctaatttgtcattgttacatgttaattcctgattaagatttgcctgtagctttctgtactatatctatcagattgggtatatctatgatgttagcttcataaaataaagtgggaattttttcactttttaaattaaaaaaatagttcaaataattttagatttatctcttttaagttagagagcattcactttagaacacatctggtcttggtgctttttcaaatagtagattttgcatatcttaccaatctctgtggcaattgatatatgcaagatttc

SEQ ID NO: 236996 - DNA, 620 bp, Homo sapiens
gtgggctgttgtgttctccatctccttgaattctttcagcctcaggagtagagacacctcattcagtggctcagtttctctttagcttttagaggactaaagacaccatactcatacattacctctaggcttatgattctggggccaaggttttctcagaatccctaacatttcaattcctggggacctctgaaccttctgtgcaggctctcacctggattcaccttgctaagacagcccccacagcccagaacttcacaaccgtgtagatgagaagagatacatggattacagttgagaatggaaggaaggttaggtacatttctattctttccacgataatgaatgaatacatgagatgaaatgaaggtaatctctttttaattcttagttktaatgaatatgtaatagttgtacatatttatggagtacaatcaaaattttgatataagcatagcttatgtaatgatcaaatcagagtaaatgggatagctatgacttcaagcatttatcacctctttgtgttaggaacatccaatgccactcctctaattattttgaaatgcacaatagattattgttaactacagatgttcattaattaaaatctacagagacaa

SEQ ID NO: 236997 - DNA, 592 bp, Homo sapiens
gtggatttttgtatgtaaaatagcttaaaaaattaccctaaatgagtctataatgcacaaactgaatgagatacatactacagactaccacttttcgaattctttttagagccatttagagaaggaagtaattatgttgtaaaagatgaaagtatgggttttaaaatcaggcagcaatgacctaaagcaagctacttaacttataaaaccatccctaaaataacaggtaattcttaggatagctgtgaagattaaatgatagaacacatacacattattaattaggattgcttacaattaaaaattgaataatagtttctctctcgccagtgctcgctcgctctctctctcacacacacacacttaaaatggaaacaatgttgtaaaaatcttgaaagcaggaagacctatggcttctgtatctatcttccaattgtatgataataacaaatkcagagtagatgttgaattaaactgaccactaaattcaaaccctctattataggtctcacttcctatttgtgggagggggcaggagaggaaataactaagatttattcaaatactagttttacacttttatacttatata

SEQ ID NO: 236998 - DNA, 577 bp, Homo sapiens
atctgtgatttctttgaggtttcacttattaaggaagaaagacaaacagcagggaaactaagtatagcagggctgggtcactctgmatcttaactcaccaacctggagcatccaggatctggtgtagaaatgttactcactcctagtgcaaaagatagagaccaaattaactggtatattcctattgtacctacatttatcttcaaaatctcagagcagaaagaacttgatagatctgatctttgcaaaacagtcaggttggcagattttgtctttccttcctctggcttcccctttccacatcatcttctccatgggagttcccccaggtctctctcccaggtgcctcagtgttctctccttcttgttctcctgcatcctctgtccataggccatcctctcaagcaacatcccttgccagtcatttttatcttagcgtgaatttgcacaaccacttccttccttgaatagggacaagagacaatctaggctttggggaaacaagttcgtaggtagagacttctagttgtcaccccaaattcattatttactaagaaataatgaacccatatcaata

SEQ ID NO: 236999 - DNA, 578 bp, Homo sapiens
gaatggaaatttgagttcaaggagaaaaagaactgatataaaagtttcacttgtgtgtgtgtgtgtgtatttaaactaaagatagtgagtrttaaattgctcaagtattctgaatcttttagacacatttaaaatgatagttttatttgaaaatgttaatatttatcatgtgttgaaaattctatccttgacagtttagtgagtaaaatggttgagggcaattatctccattatccttacagactgctagccaacctccagctgcatgcctacccccttcccataataaatcacacagcatcaaggaccattggtgccagccatctccaccaactgagtgacattaccgtgtgctgctatacctcttggtagacaggggcctcttaatacatcctggattgattgatcagtctagtgaaggacttcacagagatgaagtccttaattcaatgaacaactgaaattctcagtggctgcaggcaaaaatgatgccttagtctgctaaggagttcttgctttcactcactatagcaacctggcaagaggaagactcaagcaacatctaaagcatctaaaga

SEQ ID NO: 237000 - DNA, 578 bp, Homo sapiens
gaatggaaatttgagttcaaggagaaaaagaactgatataaaagtttcacttgtgtgtgtgtgtgtgtatttaaactaaagatagtgagtattaaattgctcaagtattctgaatcttttagacacatttaaaatgatagttttatttgaaaatgttaatatttatcatgtgttgaaaattctatccttgacagtttagtgagtaaaatggttgagggcaattatctccattatccttacagactgctagccaacctccagctgcatgcctacccccttcccataataaatcacacagcatcaaggaccattggtgccagccatctccaccaactgagtgacattacygtgtgctgctatacctcttggtagacaggggcctcttaatacatcctggattgattgatcagtctagtgaaggacttcacagagatgaagtccttaattcaatgaacaactgaaattctcagtggctgcaggcaaaaatgatgccttagtctgctaaggagttcttgctttcactcactatagcaacctggcaagaggaagactcaagcaacatctaaagcatctaaaga

SEQ ID NO: 237001 - DNA, 539 bp, Homo sapiens
gtgacaatgtggcaatttttaaaaacctgactagactcatcactagtcttcaacctgcaaaaagaagactgacagcataggattgctgtaacatagtagtgattcctctcattggaatctttacctttatactgtatstacacaaacagatggttttaagtacacaaacacaaattatggctgactgcaaaaatctgacccatcagtaattgactttttaaattcactgtcatttcttttccagattggcatgtttgtgcctctgacaatgtggtctttgacatacatgtctagcttttttattgaagtgtatctaccattgcatattcctggagctctcacaagcacacacctcagaggataaagacagttattattaacttctggtagacctttgggctgctttagaatatgaaccctttaagtccagaaaccacgacctgataaacatgatacttagtatcagaaactagaactgatgtgagggaacagatattctatctggtcaacttgggtagttcattattcattcattcaac

SEQ ID NO: 237002 - DNA, 539 bp, Homo sapiens
gtgacaatgtggcaatttttaaaaacctgactagactcatcactagtcttcaacctgcaaaaagaagactgacagcataggattgctgtaacatagtagtgattcctctcattggaatctttacctttatactgtatctacacaaacagatggttttaagtacacaaacacaaattatggctgactgcaaaaatctgacccatcagtaattgactttttaaattcactgtcatttcttttccagrttggcatgtttgtgcctctgacaatgtggtctttgacatacatgtctagcttttttattgaagtgtatctaccattgcatattcctggagctctcacaagcacacacctcagaggataaagacagttattattaacttctggtagacctttgggctgctttagaatatgaaccctttaagtccagaaaccacgacctgataaacatgatacttagtatcagaaactagaactgatgtgagggaacagatattctatctggtcaacttgggtagttcattattcattcattcaac

SEQ ID NO: 237003 - DNA, 593 bp, Homo sapiens
aagctttgtgtttcaacatgaatttctttttttttttttttttttgrgatggagtcttgctctgttgcccaggctggagtgcagtggcacaatctcagctcactgcaagctccacctccagggttcacaccattctcctgcctcagcctcccgagtagctgggactacaggcacccgcaaccacgcccagctaattttttgtatttttattagagacagggtttcaccatgttagccaggatggtctcaatctcctgacctcatgatccacctgcctcagcctcccaaagtgctgggattacaggcgtgagccaccatgcccggccaacatgaatttcaaaggcaaaaatgctttcacatatctcaattaggcagccttgaaaataaaacttaagaagaagctctcttttaaaatatatttatagctaaaggtttaaaataacatgggttaaaaagtggtactagccttccaggtgctcaggttgctaatctgaatttgtatatgctatgacaaagaaatggttcattttattgagcacatatcaattgaacatgagctatttaaggtggttagtattacaggtgcatcgtaa

SEQ ID NO: 237004 - DNA, 593 bp, Homo sapiens
aagctttgtgtttcaacatgaatttctttttttttttttttttttgagatggagtsttgctctgttgcccaggctggagtgcagtggcacaatctcagctcactgcaagctccacctccagggttcacaccattctcctgcctcagcctcccgagtagctgggactacaggcacccgcaaccacgcccagctaattttttgtatttttattagagacagggtttcaccatgttagccaggatggtctcaatctcctgacctcatgatccacctgcctcagcctcccaaagtgctgggattacaggcgtgagccaccatgcccggccaacatgaatttcaaaggcaaaaatgctttcacatatctcaattaggcagccttgaaaataaaacttaagaagaagctctcttttaaaatatatttatagctaaaggtttaaaataacatgggttaaaaagtggtactagccttccaggtgctcaggttgctaatctgaatttgtatatgctatgacaaagaaatggttcattttattgagcacatatcaattgaacatgagctatttaaggtggttagtattacaggtgcatcgtaa

SEQ ID NO: 237005 - DNA, 593 bp, Homo sapiens
aagctttgtgtttcaacatgaatttctttttttttttttttttttgagatggagtcttgctctgttgcccaggctggagtgcagtggcacaatctcagctcactgcaagctccacctccagggttcacaccattctcctgcctcagcctcccgagtagctgggactacrggcacccgcaaccacgcccagctaattttttgtatttttattagagacagggtttcaccatgttagccaggatggtctcaatctcctgacctcatgatccacctgcctcagcctcccaaagtgctgggattacaggcgtgagccaccatgcccggccaacatgaatttcaaaggcaaaaatgctttcacatatctcaattaggcagccttgaaaataaaacttaagaagaagctctcttttaaaatatatttatagctaaaggtttaaaataacatgggttaaaaagtggtactagccttccaggtgctcaggttgctaatctgaatttgtatatgctatgacaaagaaatggttcattttattgagcacatatcaattgaacatgagctatttaaggtggttagtattacaggtgcatcgtaa

SEQ ID NO: 237006 - DNA, 642 bp, Homo sapiens
tatgaatttttcctgtctggtaactgagtgcatgattttgttcttgaaaatctttttctcgatttggctcgatggactttgaatcctttgtatttgaaattcactctccattgagtataaatatagtttctttagtctcttgcatgttctctgcttacttattcttcttcccagtccgcctcaggatgattagagagagagaaaaagagaaaaagtgtgtgtttggtgggcgggactgagagaggggctggcaaattttatagttgtttccttcccagctcttcctctgtaacaccttctagctccttgatttcttgtcttgtttttaggggtcaatcttccttttctwtcctccaatactgcttcatattgtagtctcctaaaaaccattggagagaattgagcaccacattgtagaaagtaaaatatagcacttaaaagcctgtactctgaggccaaactgccaagacttgaatttccaatctactgcttactaggtgtatgaagttaagtgatttgttttagcgcttaattccttctactgcaaaatggaaataatatcagtgttcatcttataggtactgttattttaaactatggtacattaattaaatgctttagtacatgtaaagtgccaataac

SEQ ID NO: 237007 - DNA, 579 bp, Homo sapiens
gcacttctaaagcagatagtaacctctcagtaaaaattagctgttgttactaatgaaaacaaaatgtaaggggaataaataacagttgcttcatatcttatattacagtttttgtgtgtaaaaccattattactttgccattgagctgatccatatttttttatcttttctaatacawcttgttttctaatacatcttatgttctcactttttacttaaagctcttccctgagtcttcactcactaaattatcttcatatacttcagctatccctaagcttgatataaaatgggaatgaaaaatgtcaaatataattgacaatgggaagaagggagattccgatttaattaacatcttctttcgttatgatgcacgttctctaatactctgttgagccagtggtgtgtccttcttagccttttttgggccacagattcccttcacaaatatgatgaaaactacagattgtctcttgactccccaaaaatgtaactcacaattttacattgaaattctgagagttcatggacccccatgaatattttcagagagtccatagatccttgataatactgatt

SEQ ID NO: 237008 - DNA, 604 bp, Homo sapiens
ttcggtggcttcatattttcttggattagggattgatttctctgctcagacttcttcagaatacaaataactttgtaagggctaatctgttaaaaagtttgtgttagctctcttggcaagagctaggatagcagggtagaaggagaactgcgaaaacaaacaaacaaaggagagttaaaaatgaaagggcaaacactccctacttactttgctttgctttcattattttgcctaaactgttgtggttgacacacgtggacagtagattataactagattctgagccccagatgcccacagctaacacttatgtaatgctcattgtgtgtsatgggctaagtgctataaatgaatgtatatataatataaatgcattaactcatttaattctcatgacgatttgatgaggtgagctctatctcccagtttctagatgagggattgcccaactgtgggtaggggagcagaatcttaccccgggaagtgtggcttaagagttgacaattgtaactgctgaacagatttgttaaaaaataccttatttatttttcagtcctcccaccatgacttgtgccttcatcaaaaaagtttgaaagttttcagt

SEQ ID NO: 237009 - DNA, 619 bp, Homo sapiens
ttccctttgtgggtaatcagacctttctgggtgccctgaacatttttttcgtcgtttcaactctggatctgatgattatktgtcttagggttgctcttcttgaggagtatctttgtggtgttctctgtatttcctgaatttgaatgttggcctgtcttgctaggttagggaagttctcctggataatatcctgaagtgtattttccaacttggctccattctcctcatcgctttcaggtaccccaatcaatcgtaggtttggtcttttcacatagtcccatatttcttggaggatttgtttgttccttttcattcttttttctctaatcttgtcttcatgctttatttcattaagttgatattcaatctctgatatcctttcttctgcttgattgatttggctattgatacttgtgtatgcttcacgaagttctcgtgctgtgtttttcagctccatcaggtcatttatattcttctctaaactggtcattctagttagcagttcctgtaaccttttatcaaggtttttagcttccttgcgtggggttagaacatgctccttaagcttggaggagtttgttattacccaccttctgaagcctacttctttcaattcgtc

SEQ ID NO: 237010 - DNA, 619 bp, Homo sapiens
ttccctttgtgggtaatcagacctttctgggtgccctgaacatttttttcgtcgtttcaactctggatctgatgattatttgtcttagggttgctcttcttgaggagtatctttgtggtgttctctgtatttcctgaatttgaatgttggcctgtcttgctaggttagggaagttctcctggataatatcctgaagtgtattttcyaacttggctccattctcctcatcgctttcaggtaccccaatcaatcgtaggtttggtcttttcacatagtcccatatttcttggaggatttgtttgttccttttcattcttttttctctaatcttgtcttcatgctttatttcattaagttgatattcaatctctgatatcctttcttctgcttgattgatttggctattgatacttgtgtatgcttcacgaagttctcgtgctgtgtttttcagctccatcaggtcatttatattcttctctaaactggtcattctagttagcagttcctgtaaccttttatcaaggtttttagcttccttgcgtggggttagaacatgctccttaagcttggaggagtttgttattacccaccttctgaagcctacttctttcaattcgtc

SEQ ID NO: 237011 - DNA, 628 bp, Homo sapiens
tgagttcacttggttcaacacaataataatgagtgcttattatgtccccagccctaggcgaggcactgtaaatagagagaggaattaaaggcagccaaccctaatccttcctatcttagtctgttttgtgctgctataacagaatagctgagacagtgtaatttataaagaaaggaaattcacttcttattcttctagaggttgggaagtccaagagcatggcagcagcattggttggctactgctgagggccttcttgctgtatcataaccctggtggagggcatcacatgacaagagggcaagagtgtgcttgttagctcaggtctctctttctcttcttataagccaccagccccatcatggggggccctacccttataatcttatctaatcctaattatcttccaaagaaccctttgccaatcaacataggaatttgggaattaaatttccaacacatgaaaatttgggatacatatcaaaccatagtattmtgcctctgacccccaaattcatgtatttctcacacataaaatacattcatttcatccccacagactcaaagtcttaattcattccagcatcaactcaaaagtccaaagtccaaagtctcatctgtgagcttg

SEQ ID NO: 237012 - DNA, 598 bp, Homo sapiens
aaaggagagagcattgtgaagaaagagaaaagaacctgcatctaggtccatttttgagtgtcattaagaaaaaagaggataagggcattggctcatgcctgtaatcccagcactttgggaggccaagatgggaggattgattgagagcagcagtttgagaccagcctgggcagcatagtggaaccctgcctcagcaaaaaaaaaaaaaagaaaaaaacaaaaaaacaggtgtggtggcatgtgcctgtaatcccagctactcaggaggctgagtccaagttaggaacactgataaattgcaacgatctacttgtactgaatatttctgaataaggatattataatatcaatgaaaagtataatgaaagcttttcaatgtgtcttctttccaccacatttaatagtacacttggaaacaatttcttcaatggttttctattttaagcatatattctcagcagccccaacacaccttaaaatgacttttcctrttcacctgattcctttattccaccactttctcaaaaaaactgatcagccagttaacagaagactgctgtcaataataccaaatgcttcctggacataaaagaggctg

SEQ ID NO: 237013 - DNA, 428 bp, Homo sapiens
gtataaagggggaacagacatcactgtcttcctctcatttaacgatgaggaaatgagacccagagacacaattcacaggaaaagtgactgttcaacaggaatgttttcaggccaggcagccccaaaggagctgcttcacatgtgcagggttctaaggacrctactgagtgagagaggataccactacctacatgccaagtgtccagacctcccctcctggcctggaggaagtgcaaggagggtacttagtcacccgaatcagtgggttggtgtgacgagggggtttgtcagttgtttctgatggctggtgccagctacctgtgaccaccggacaagcccatctcctctatagaaataggcttgtgaaggagaccaattactcgaattgcctggtccataataaagtcaggatcctttcttgtggcctt

SEQ ID NO: 237014 - DNA, 638 bp, Homo sapiens
atgcaatgccattactagctattgagggaaaagggtctgtgtgaagcatcactttgcagggattactaatggtggggcagcaggtctgtgaattaagttatctcttgacctcaccctcatgtcaacacaaatgtaattcctaaacaagatgcattgccagtctcttagccctgtaagctgatcwtttgctacatggcagactataatgaaaacatttttatacttgggtttctagtcttcactagaaggccttggatgtatttttgcagttgaaagatttagaaagatttttacctgcttataacttggaagtttagagtgcaatgtaagaaaaaagatcaagaaatgtcatgttattagcatcagtccacctccaatattgccgatactttttttattctggctcagttttattttgcaccagtgcggccccaagttactgctggttgtatttagtttgtgaataggagcccataagtgttaatagactttgtaacattcactataagatgaattatacaggacatgggaaatctcattaagtcttaaagttaatttaaattaatttatctgttttctctaagaaatgtttatcataaaatatatatgtgtatttcccctttggttataaaatttgg

SEQ ID NO: 237015 - DNA, 602 bp, Homo sapiens
gttgctcaaatgtaatttctgtcatcctcaatttagaaaccagtatgttgccctttctaatcctctctctctctctctctctctctctctctcwcacacacacacacacacacacacacacacacacacacacacacacactttctgaattaatttggactgcctggaaaatggtaaatgtttctgtggctgcatagcaggcatgtttcttaacacaatataggatagtttattgtatttatagtgtattttgtttctaaaattactcaaaatttcttgaagatgtgggctatttctgaaggtcaagggtctccatttctacttaatttctgagctcctcagcatctgtagctatatccgcctgctccagtttgtaaaagttctttaaaacacaaactccaaccttggaggttttgcttacaccccaaatcacatggttggttttcttttgtcaagaagaaagaagaggctggacccacacctattaacgtaaggacaatgcccaaagtcaaagtccagggaaagactgtttcacacttgagaatcaaaccacatttctgtttgacttggtgcaaatagacatattgttgacctgtcctttc

SEQ ID NO: 237016 - DNA, 481 bp, Homo sapiens
tactgaatgccaagtcattaatagcaatattttatttttccattccacatcaattttctaggtattacaagttttatttatttattaaaccaagtcattggaaccttcaaacgtgaaaatttcctgattacactgtatactctttgctttagagccatttctgagctataatatattcatacacttctactcagatgacttagtgtggctgaaagatattaagaaattctgtgttgtggcatgcagtaaaactgcataatagttctgtatatctcgtataaacccaaatcatcttctgtcagaaactgctctgtcaaaagtacttctattcttyccatactctaaaaagagattcaatggctctaaaatctctttttcaaagcatgatctttttgttctttcaggggaatgtgtgagggtgccctatagttttcaaactaaatagcatttgcaatcactttgtgtggttctaaattatatc

SEQ ID NO: 237017 - DNA, 505 bp, Homo sapiens
aaaattacaggccaatatcctcaatgaacatagatgcaaaaatcctcgacaaaatactagcaaactaaattcaacaacacattaaagatttcacacaccatgatcaagggggatttatccctgggatgcaaggatagttcaacatatacaaataaataaatatgatacaccacactgacagagtgaaatacaaacaccatatgatgatcatctcagtatctgtggaaaaacgtttgacaaaattcaacatcctttcatgataaaaactctcaaaaggaatgttccgcaacacaataaaggccatatatcacaagcccacagctaacatcatactcaatggtgaaggctgaaagctgastgggcatggtggctcacacctgtaattccaacactttgggaagctgatgtgggaagatcacttgaggccaggagtttgagaccagcctggccaacacagtgagcagtgagatctgtctctaaaaaaatatgacaattagcgggctgt

SEQ ID NO: 237018 - DNA, 587 bp, Homo sapiens
gatctgggcgcactgcaacctscgccccccgggttcaagcgattcttctgcctcagcctccccagtagctgggattacaggtgtgcccacgtccctaccagctgttttgatagctaccactaaatacattttaaggtgtgggtatacatgtgtgcgtaaagacttaactacacagatgttcactggagggtgagttataataatgaatattggaaatagcctaaattctaaccacaggggactaagtaaattatagaacatccagacagtcttgtttatgaaagagcatgggccttgatgtcacacaagctgggtttgaatcccccctctcctaccagtttaaacagccattaaaaataaaaaacatagaaacagactctatgtttaaacaaccattaaaaataatttctagaaagatattatagacatcataataatgtctactaattatataaagcaagctatgcccccaaaaccccagcccactgcctgtttttgtatacccatttttacattttttatggttggaaaaaatcagaagaagaatatttcatgatatgtgaacattatataaaattcaaattcag

SEQ ID NO: 237019 - DNA, 425 bp, Homo sapiens
gaattccggaaatgcctatgtggacagtagcaacccaccctcaggctgagaatacttgctggctstttcttgagaagcaactcctgagtctatagggcaagacaatgcatttgagtaaatgtgagaaaagaattgagaaagtggaatttcattctcccagttttgatgcagaaaagggcaaactgcccatagttatccaccccctccccaattataacaatgagaaatacaagaaaaatttgtaaagtttattcacaatgcagttgttgaaaggaataaaacagttggcaatggcatctcgcttctgaatttgatttataaaaacattagggagctctttttttgtattttgctatttcactggggaatgatgaagagagagtctttttttatacttataaatttcagactttgatgtcatttat

SEQ ID NO: 237020 - DNA, 604 bp, Homo sapiens
aatattgtataaataaaaataatctgttataaattaactgttaattttaaaatatgaaaataataccctcactcaaaaagtgttttgaaaaaaaattcaagagtctatcacactcaagtgattacttcacaaagttttagcatgttgttttgcagatgctaaaaataacttggtagactttattccggctagcattgtaaaayatatacattttgtactaaaagcaattaggttaagatacagaaacatagtctatatgaaatactcattgtttcaaaaatgtgaattctttgcagttaaatttgaatggtatatatagccattgattcatatctcttgcaatccattcaataaattgagttattgctgttaaacaaagtcagattttaataactgaaaatttctggagactagccagattatgcaacctttgttttccagatgttgtggttagaggggtcactgctgcttcagattatcagcctctagtaagctgggcatctccatgtgttgaaacaaagtacataatgagggtcaaactgcaagtgtttaaatgatggttcttcagctgacacacagagagaaaggaataacgctgcaatga

SEQ ID NO: 237021 - DNA, 496 bp, Homo sapiens
atacataagggataacatgattgttgaggactagctatatttgttacacattaaaaggaaacgtgctctaatttaagtaaaaagattcytcagtgagatataagggagaactgttaatgttaaataacaaaaacattgttaaataatggaatggctcacttaagttggttatctctattctttttggagcagccaaatagtatatctgttcatgtgcttcaaatctgataaatattcatgctctatgaagaaggatatgtgtgtgtgtgtgtgtgtgtgtgtaagagagagagaaagtcagataagcatggacagaaacacacaatattggggagcaagccacagtgaggagtgtggcttgttaaataagatccttgacagttgtattgtgttcttggggcagatgagtagttttttttaaagtacttttgagagaacagtgttttctacttttacatttctgtatttcacaggataaagcttctgctatagaaga

SEQ ID NO: 237022 - DNA, 622 bp, Homo sapiens
aatcttactttaggtttctgcctttcatgaaattctcatctcctggcttctaagacaccactcttcttttttttyccctagcctctcaggcagcttctctgtctcaattattgactcttcttttgtctgcttttttaaaagctgaagtttcagccttcttacattagatacatacaagataatgtattccattttccaagctgaatgattcctaaactaaatcttctcacctaaatctgagttcccactgcctactgggcatttctacttgactttccacatagatatctcaaagtcaatacgtttcaccttcacaaacttctccccttaaattcctaccacagtaaatgacaggactttctaaatcacagaagtgaaaaaatatgtcatcctatactcttccatctcactccctacatacaaatcagtctctcgagtcttacaaatcctatttttaatctgtcaattccatcccactgtgactgtttaatccctgatttcttttatagatcactgccagaaactttttgccaatttctctgtatatagagttagtttgaatccatcttctacaataatgcaaaagggttcaatgaaaagaaaaattctcctcactcttcta

SEQ ID NO: 237023 - DNA, 410 bp, Homo sapiens
ttaggagttttaaaaaactcaaatgaaaaaaaggaaggaacacgaagctggtgaagaaggccagttatttatttttcctttgtttcaataattgctttagatagtgacttggacctaaaaagaagtttcacataggcttcctcaatttcagactctaaggctctgaagctttcaagctaagatgtttttctccaaaataaaagaaaagaaaagaaaaaaaggaaaaagcgatatttgtgattccttcacactcaggaagtacrtatctctctcaattaggccatgaccaattgaaatctactgggtgcaacagtttttccagagtaggatgacagaaaagccaataagtcaaaactattagggacaatctacctctcttaatgaagaaaatgagaaatattatctatagc

SEQ ID NO: 237024 - DNA, 410 bp, Homo sapiens
ttaggagttttaaaaaactcaaatgaaaaaaaggaaggaacacgaagctggtgaagaaggccagttatttatttttcctttgtttcaataattgctttagatagtgacttggacctaaaaagaagtttcacataggcttcctcaatttcagactctaaggctctgaagctttcaagctaagatgtttttctccaaaataaaagaaaagaaaagaaaaaaaggaaaaagcgatatttgtgattccttcacactcaggaagtacgtatctctctcaattaggccatgaccaattgaaatctactgggtgcaacagtttttccagagtaggatgacagaaaagccaataagtcaaaactattagggacaatctacctctcttaatgragaaaatgagaaatattatctatagc

SEQ ID NO: 237025 - DNA, 651 bp, Homo sapiens
tcattactaccttatggattatagctctagattttttttaatttttggtacatctgctcacataagttccaagcaaccatttacctgaaactcattacaaaaatatgcaaatagtcctataaactaccatttttaaaaggtttttattttagaaaggaaatcagtatattgaagggatatctgcactcccatgttcgctacaacactgttcacaatagcgaagatttgtgggttttttggtttttgagacggagtctcgttctgtggcccaggctagagtgcaatggcacaatctcagctcactgcaacctctgcctcccaggttcaagtgattctcctgcctcaacttaaaattttataagttaaattacagccaaatgacaaaagcaatgaaattatattttaaagtattaaattagtgtgacaatgtaagtaattatgtgtttgtttacttgtttaggtttaaagcaaatcagtaaggttagtttaatggaaaacacacacacatagatgctttggaacctgatggaccatcatttgagtctttgtcattgctaatgttacttatttttagacacttctctttacacactggtgaattattttgattaacsaataaatttaataaagcactacaagttacttttttat

SEQ ID NO: 237026 - DNA, 559 bp, Homo sapiens
tattcccctttttattgtgtgacccaggaaagtgtactatatcttagcttttcatctctaaaatgaacaaaatgattaaagtaatacctaccttataaggtgttgtaactattaaacaarttgccacatgcaaatagcttgcttaagagcaataactatgcgtgcattctcaccgaatcggaactctaagaaaaggagaatgtggtcggatttgtggaatttcaaaaagctttctattgctatggttgtttctgcgccaactaccactgcacaaatttgcataaatgttgaaatttagaaaggtatagctcttcttcaagccatgacctataaaatatctgcttcacatatttgagaatctccatcgctttcctctatcttctctcctactctttaaagtactatgctggttgtagaaacagtttttatagaccgctttaatcttggctgatagggaacaattttcaattgggtaactaaaataggctaccctgctgttctaagggagttttctatgttattaacaggtttttattgttaaatacttcctaacatcctg

SEQ ID NO: 237027 - DNA, 583 bp, Homo sapiens
tgttttgtattcaattagtcttatgcctcataaacaaaggatatttgataccattagtgtattagcctaagttttccagagaaacagaagtmataggatgtatttattggctcacaagataatggagtctgagaagtccaaaaatcagcagtcggaaagccagagatttaggagagctgatggtgtggttccagttcatgttcaaaggacggaaaacccggagagcacatagtgtaaattttagtctgaaaactggcaagctggaaacccaagaagagccaatgttttcagtttgattctgaaggcaagaaaagactaatatccctgctcaagacaatcaggcaaaagttgtttgcttttatgcaagaaagggtcgggctttttgtattattcatgcctttaaatgattgggtgagggccaccacattagaaggacaatctgctttactcagtcaactgattcaatggttaatctcattaaaaaacccccgcagacacaaccaggataatgtttaaccaaatatgggtactgtggggcccagtcaaattgagacataaaagtaaccatcaaaactgcaaaggt

SEQ ID NO: 237028 - DNA, 594 bp, Homo sapiens
actttctccaccccttcttcctgtggcaggaatgcagtgtagccattttgtaccattaaccagtcaagggttaaggaacctttttagaaaatggagcttcgtcatagctggttttgtgaaatacatggtagaaaaataatctattttatgtttatttcttattaaactgagactctttgagaaactttatttatttaagtagcatagctcagaattacagaattataatatgtttagaagtcaataagtaaatatctaaattaaattgaccaaaatatgtgacaaaattgaaaagttggctgggcacagtgataatcccagcattcaaggaggtygaggaaggaggatcccttcatgccaggaggtcaagaccagcctgcacaacatagcaagaccctacattacaagaaattaaaaaaaaaaaaagctgggtatggtggtggatacctctagtctcagctactcaagaggctgaggaaggagaattgcttgagctcaggagtttaaggctacagtgagctatgatcgcaccactgcattccagcctgggcaagaaagtgagaccacgtttctataaaacaaaacaaaacaaaa

SEQ ID NO: 237029 - DNA, 364 bp, Homo sapiens
tctcaaaaaaagacataaatcggaaaacagtcatatgaaaagatgctcatcctcactgattatcagagagatgcaaatcaaaactacaatgagatatcatcccactgcagttaaaacggcttttattcaaaagccagacaatagcaaatgctggtgaggatgttgagaaaagggaacacttatacaatattggtgggaatgtaaattaatacaaccactgtgaagaacagtatggaggttcctcagaaaactaaaaatagagatcccatacaatccagcaatcccattgcygggcatatatccaaaagaaaggaaatcagtatatcaaagagatatatctgcactcccatatttgttgcagcac

SEQ ID NO: 237030 - DNA, 551 bp, Homo sapiens
aataatgagagatgagagaccatgtgaagagaggccatagaagacatgaggccattgtgtagattccagctgtagctgagctctcagctgttaaaactggataacttaacctcagttacaccatatggagcagaactgcccaactgagccctgtcaactgacagagtcatgacaaataataagttaatgtggctttaagccaccctaaacaacaagaaacactgagacagtcctccaaaatcctgcctaaggaatgcgtaatttctaatatcattttttggcttcatctttccttttaaaatttagtagagataatacatatttctacagcttggggaaattcttatcacactgaatagaagaagcattttgaaatggctccagctatattggtccaaaaatgttctagaaaatgcctttcattttaaaggaaaasctaaaatcaaacaaataagtgtcagcagcaataatataaccaacgaagcaaggtattacgggattcactatgtatttctacattttccctagcagagcatataattgtttctgat

SEQ ID NO: 237031 - DNA, 488 bp, Homo sapiens
cagggcttcatgttccatggatccagctggagccaggagccaggatcaggatccacttgaaagcccaacccctttgaagttgtaggtttgggacctgccctctcgggtgcagctgcagccaccaagtctctgctgcaggcatgggcatctctgcactcttggaggcccaggtagccccccagctccytcaggctcagaatgcctgcatccactgcctggcctctccctgctcccagtgcctgctctgatttttaagcaaagttgtgacttagcccatgcactgtgacgacctggctaggtgtgtatgccctcgggacagcgccgacatgccagctccctgctaccgttcccctctggactttgggcaccaataagcatgggagggaggctgagggggaggggactaagggtggatctccaccggcctgcaggcacccttcagcatgaacagcctgagtgctgtggacaccgtggatagcaagttaatg

SEQ ID NO: 237032 - DNA, 488 bp, Homo sapiens
cagggcttcatgttccatggatccagctggagccaggagccaggatcaggatccacttgaaagcccaacccctttgaagttgtaggtttgggacctgccctctcgggtgcagctgcagccaccaagtctctgctgcaggcatgggcatctctgcactcttggaggcccaggtagccccccagctccctcaggctcagaatgcctgcatccactgcctggcctctccctgctcccagtgcctgctctgatttttaagcaaagttgtgacttagcccatgcactgtgacgacctggctaggtgtgtatgccctcgggacagcgccgacatgccagctccctgctaccgttcccctctggactttgggcaccaataagcatgggagggaggctgagggrgaggggactaagggtggatctccaccggcctgcaggcacccttcagcatgaacagcctgagtgctgtggacaccgtggatagcaagttaatg

SEQ ID NO: 237033 - DNA, 571 bp, Homo sapiens
tatagttataattaaatattaatgaggttacactttgactcacttgcttataatgggaaatcatgtaactagtgtattaggctgttcttgcattgctataaaggaatacctgagattgggtaatatataagaaaagaggtttaattggctcatgattctgcaggctgtatagaaagcatagcaccagcatctgctcagcttctgtggagaacctcaggaagtttgcaatcatggtggaaggtgaagtgggagcaggcatctcacatagcaggagcagaagcaagggagttgggsaaggtaccacaaacttaaatgaccagatctgtgaactcagagcaagagctcacttatcaccaaggggatggcccaagccattcatgagggattcgccaccatgatccaaacacctcccatcagggtagacctccacactggggattacatttcaacacgatatttgggtggggacaaatatccaaactgcatcaactacatactatttgtatccccattattcctataaatagaatctctgacattagaatcataggtctttgtttaagaattgctt

SEQ ID NO: 237034 - DNA, 499 bp, Homo sapiens
ctggacatgttttattgagtaatggaaactgaggaaactaggcctttaatatgrgtgcatatgttaaactggctaggaattgggttgtgtttattgtttgctcagctataggtgccagaggcttcacatttcctcttgtagccttgagttttgtgtcctatgtttactttgtgctttcctaagacttcagagaaagcctgtatcttatagctttttcagttataattcactgttataatactggagacctgctggtatggtgacaaggtttggaagattaaaggggagcagtctgtaatcttacaattaaatctgatcttttactcaacaaatgtctcagggctgggacctttacaagtctttctccagcaatataacacactctccgccccactccactttctactccttttcttcctttccctggcggaagcattcctagtctattgccttgaagcttttgtgactactgatgacatattatatatatgtaatatct

SEQ ID NO: 237035 - DNA, 634 bp, Homo sapiens
ttgccttgaagcttttgtgactactgatgacatattatatatatgtaatatctatctatctatctatctatctatctatctatctatctatctatcatctgtctacctatctatctacacaggaaggctacagggagctaaaactgatccagaaggggaaaataatctcttcccttggagagtagccctgggtgataatgaaaaggtcttgggatatttcacaagagacccttaccctccccctgctggcaaaggtgagaggactttttttctggaatattactgtatgaacttgattgggttctcagaggtgaaacacacaaaagtgtgccccactcccgaccccatcccaagattatatggtctttagkaatttctcattcacactaatccccacttggcttccaacagtttattaaaatcagcatttatgtgtttttaccatgtctaccagtttatgactccagcagcttctgctccaggtcagcagatcttaggtgtgactctgaatatacttttctcctcagtttgggaaaaagttttgggatgacagttcaccgtgtgaccttagttttttgatggcttaaaaaattgttggtattcagtatgttcaactttttcttgttttaaggta

SEQ ID NO: 237036 - DNA, 433 bp, Homo sapiens
atgtttctccatgaataagcctacgcgtgtaggattcattttttgttgttccccccaccaaacctgtgttatgtttaatacacaaggcatattgggttccttgcattcaaacaataatttaggcacctactccactttatgactttggacatgaagctatttatttcaagaaaatatctgtctcacatctttttaattcacatccataatcactaataggatatgacaagataataggagacaaaattgagacaatgtagattagcttgctactactctaaygtttcgtattattttattccactttcaatttctacttgaaatttcttgctatttagttatctctattatttttcataggccctaaagttaaaggagtttaatagaaatcttaggaattgatctctccaaatgactgtcagagttaaatgga

SEQ ID NO: 237037 - DNA, 490 bp, Homo sapiens
gatttttataatactttaacacttcataatttttttctatgtaatttattatataggtgacagtgcaactttgaggttgttaggcattattgatattaacttcaagttcaatagcattattggtccagcagtacttttacttgacctatgtcytattaaatgtaatggcatctgctactacccatcacttacatttttaattgcactcttggcagcaggccaagtgagctcaaacatcccctagaacccaatgcatcaaccaaactacaaaataacattgtatgtgacacatggtaagatgtctttcaatcatcctataatttttaaaaagatacgtgccctgaagtcagcattataaggtctaaatatgtttaaatcctcaaatgaatagaaggccttgatgaatacctaaaagtggcaagaaattgttggaaatgcagttttgatccctaagtactctctctccaacaatggacccaaaaaagatctg

SEQ ID NO: 237038 - DNA, 525 bp, Homo sapiens
aaactgtcaagagccagcaaaggctcactgggaaggcatcagttccaaccagatttcttttccttcttaaaatatttatgtatgtatgcatgcatgtattgatattacaggatcactagmagtatagatctagtagcacttaatttcaacaagatagttcatattttattctttagaggagatgaagaaatggtagtaggcctagatgaattcacagctgactgcacaagcttatctatactaagtttctatgtagaaattaagggagaaattctacattaatttaagatataaacagcagaaaactttcttagtaagaatgtgtacaccacccatttaatatataatctctcaagaaaagtctttaatgaaactaatctatgcttttaaactagtgtctaatcataatgattaatatcaagtaatcattaatatgaattgatctaatggtgtttcttaaatatagtaaacacaaacactagaaagcatatacttagaaataccagactcttttaccctaagagg

SEQ ID NO: 237039 - DNA, 525 bp, Homo sapiens
aaactgtcaagagccagcaaaggctcactgggaaggcatcagttccaaccagatttcttttccttcttaaaatatttatgtatgtatgcatgcatgtattgatattacaggatcactagaagtatagatctagtagcacttaatttcaacaagatagttcatattttattctttagaggagatgaagaaatggtagtaggcctagatgaattcacagctgactgcacaagcttatctatactaagtttctatgtagaaattaagggagaaattctacattaatttaagatataaacagcagaaaactttcttagtaagaatgtgtacaccacccatttaatatataatctctcaagaaaagtctttaatgaaactaatctatgcttttaaactagtgtctaatcataatgattaatatcaagtaatcattaatawgaattgatctaatggtgtttcttaaatatagtaaacacaaacactagaaagcatatacttagaaataccagactcttttaccctaagagg

SEQ ID NO: 237040 - DNA, 542 bp, Homo sapiens
ttatgagaaaaaaaatgcttcactgataggtgcagataattaagtastttcatgatgctaaatataatgtatttgatgtagtttttagattgttaaatgccttttcattttaaaaataaatatataattaccttgtatacttaaccttaattttccagctattctgtaaattctttattgaaatgcacagtgttcaatatattttttttagcttcatctcctcatcttaggattttctaaaaattaaccgaagccaaattttgttttcgagggattaaatggctatttcctgaaattgtttagtcaaatatttagaaagttgttctgaatcatttaagtttgcttccacttattttactgtacaaaaaagtctttttaagaaaatataattatttgtataaataataatgtttgatatagaacatctttacaggtgaggacatagagataattttatgagatgaaggcaagacattttactcataaactagacatcctctggaaatgctatgaaagtcaaggaagaattttgatctgattca

SEQ ID NO: 237041 - DNA, 542 bp, Homo sapiens
ttatgagaaaaaaaatgcttcactgataggtgcagataattaagtagtttcatgatgctaaatataatgtatttgatgtagtttttagattgttaaatgccttttcattttaaaaataaatmtataattaccttgtatacttaaccttaattttccagctattctgtaaattctttattgaaatgcacagtgttcaatatattttttttagcttcatctcctcatcttaggattttctaaaaattaaccgaagccaaattttgttttcgagggattaaatggctatttcctgaaattgtttagtcaaatatttagaaagttgttctgaatcatttaagtttgcttccacttattttactgtacaaaaaagtctttttaagaaaatataattatttgtataaataataatgtttgatatagaacatctttacaggtgaggacatagagataattttatgagatgaaggcaagacattttactcataaactagacatcctctggaaatgctatgaaagtcaaggaagaattttgatctgattca

SEQ ID NO: 237042 - DNA, 542 bp, Homo sapiens
ttatgagaaaaaaaatgcttcactgataggtgcagataattaagtagtttcatgatgctaaatataatgtatttgatgtagtttttagattgttaaatgccttttcattttaaaaataaatatataattaccttgtatacttaaccttaattttccagctattctgtaaattctttattgaaatgcacagtgttcaatatattttttttagcttcatctcctcatcttaggattttctaaaaattaaccraagccaaattttgttttcgagggattaaatggctatttcctgaaattgtttagtcaaatatttagaaagttgttctgaatcatttaagtttgcttccacttattttactgtacaaaaaagtctttttaagaaaatataattatttgtataaataataatgtttgatatagaacatctttacaggtgaggacatagagataattttatgagatgaaggcaagacattttactcataaactagacatcctctggaaatgctatgaaagtcaaggaagaattttgatctgattca

SEQ ID NO: 237043 - DNA, 542 bp, Homo sapiens
ttatgagaaaaaaaatgcttcactgataggtgcagataattaagtagtttcatgatgctaaatataatgtatttgatgtagtttttagattgttaaatgccttttcattttaaaaataaatatataattaccttgtatacttaaccttaattttccagctattctgtaaattctttattgaaatgcacagtgttcaatatattttttttagcttcatctcctcatcttaggattttctaaaaattaaccgaagccaaattttgtttwcgagggattaaatggctatttcctgaaattgtttagtcaaatatttagaaagttgttctgaatcatttaagtttgcttccacttattttactgtacaaaaaagtctttttaagaaaatataattatttgtataaataataatgtttgatatagaacatctttacaggtgaggacatagagataattttatgagatgaaggcaagacattttactcataaactagacatcctctggaaatgctatgaaagtcaaggaagaattttgatctgattca

SEQ ID NO: 237044 - DNA, 620 bp, Homo sapiens
ttttaaccaaaatgaaataaatgggagaactgagtttcatttgaaatcactttctcacagggagagtaaagtatctcaggctccacaattgatatgatggagcttgtctttggattccatggtgttaccgaacaccagaatgtaaggcagtgaatcaccaaataggactttgtattttctgggagaattacctcatagaaagtacttctagtaatgsaaagaaaggaaagctaaaaatatgtggatagattttttaacattggttaagagaacctaaaatgccatgtagggaaaagatgtgtttaatcctaacaacactataagatgttttacagacagggaaactaaagcatataaagataaagtgacttgtctgaggatgcaaagataataattaagggaactggaattaactcagtcattctggtacaaagccccacacatccaactgtgatgatatcttgcctctttaatagtctttctgtagttagtttctccatcggtaaaatgggaaataacacagactttactgtgttgtaaggatttaatgacttaattcctgtaaatcacagggcaggttcttaagatatttcaggtatcatttatgactataaaattga

SEQ ID NO: 237045 - DNA, 620 bp, Homo sapiens
ttttaaccaaaatgaaataaatgggagaactgagtttcatttgaaatcactttctcacagggagagtaaagtatctcaggctccacaattgatatgatggagcttgtctttggattccatggtgttaccgaacaccagaatgtaaggcagtgaatcaccaaataggactttgtattttctgggagaattacctcatagaaagtacttctagtaatgcaaagaaaggaaagctaaaaatatgtggatagattttttaacattggttaagagaacctaaaatgccatgtagggaaaagatgtgtttaatcctaacaacactataagatgttttacagacagggaaactaaagcatataaagataaagtgacttgtctgaggatgcaaagataataattaagggaactggaattaactcagtcattctggtacaaagccccacacatccaactgtgatgatatcttgcctctttaatagtctttctgtagttagtttctccatckgtaaaatgggaaataacacagactttactgtgttgtaaggatttaatgacttaattcctgtaaatcacagggcaggttcttaagatatttcaggtatcatttatgactataaaattga

SEQ ID NO: 237046 - DNA, 563 bp, Homo sapiens
ctttactcttcaatcttacaacaggggttccttgtaattttttctactccatgactctggcttttaatatattttaaaatttgaatttttcaacatcatcagtgttaaatcttaatgagacataaagctacttctgccagaaattttataagtgaattgaaattcatgttttgaatggtaatttgattagtaagaaaaggaaatgggctcctttttaactaaccataattacttacatattcaagtatattagccaaattcatatgcataattaggcacctaattatgttttaaattcaaatgcatgcatgaagagatgatcacatgtgtctaataaaatattttattttcctcattttgggcaaaaaattgtcttttgtttccataagaacttttaaatatagtagtttgtgtatctacagagatacataatatcaggaagcagctatcaatttcratctaaattataacgaccatttaaaaatgttttggttatggtacaagatcaacatttcattatctaacaattagtcatacagtgatgatgaatttgggaaaaataa

SEQ ID NO: 237047 - DNA, 593 bp, Homo sapiens
tgatgaatgctttaagagctatctatatgctcctgatgttaactgaagttcaaagcggaaacatcaactatgactacgggtggcagatggtgggtactgggaaaaccttgcaatagggtgttgcttggagtgactattattaaaggatgcacacgtactagttctagggatggaataaayagcataacattctggaaagtgaaaatgtcagagcctgcatttgcatatgagagagagagagtgacagaaagaaagagagagagaaagagagagaccttttcaccttttctctggtgagtgtagctgtttagtgagatacaaggattgttaacaagcagttgttatcatacaaaagcaatttttaaactacactgttagagatttatagattagggtaaaagacaaggattcgtgctaccctaaatggatactgtgactgatgcagcatgagctgattataaactgttcctagtaggtgagaaaggacaaaaaaggtcaaaagatactcacaaaataaattattactaaatttacttgctagattttcaaaacatatacctatgataggaatttatacatagcaattttgttta

SEQ ID NO: 237048 - DNA, 555 bp, Homo sapiens
gggattttaaaagtgccaatgcccctgacgactccaaccacactcaaccacaaagtacaccagcccaattcaatctctagaaataagaacatgtaagagtcactaaataaataaaattgagatggttgtccgtcccagaaaacaaagacatacctgcctctttgcaggaaagacaggaggctctaattacctctggtgctccttggacatttctggggaaatagtcttaagggaagaggacaggcatgctacccttgggcagggcagtaagcagctagctagaagactaacatttctttgaagactcaaggtctatttttttaaaaagccatgtaattttgtgttctactctataacatatcttttggagtttaattgcaaaactaaaattttaaacrattgatttctaacctggccaattctgagaatctcagccttgcctaaaaataccaatcacaaatgtggcttggaatcagtatttttacaactttggccaggtgattttctttaccaaagagatttcatcctaaaaattaattttcaaaaatttactct

SEQ ID NO: 237049 - DNA, 626 bp, Homo sapiens
gaaacaatcaacaaattgaagtgacagcccacagaataagggaaaatgtctgcaaatgattcaactgacaaaggattaataaccagaatatataaagaactcaaataactcaatgggaaaaatctaataatctgattaagaaatgggcaaaaaatctgaatagacatttctcaaaagaagacatacaaatggcaagtaggtatataaaaatggttaacatcactaatcatcagggaaatgcaaataaaagctacagtgaaatatcatgtcaccccaagttaaaatggcttttataaaaaagacagtgagtgctggtgagaatgtagagaaacaggaacactcatacactgttggtggtaatgcaaattctgacagccactgtgaaaaacagtacggactgaaaaaaactaaacatggaacaactctatgatccagcaatttcactattgggtatatatccaaaagggaggaaatctatatatttaagagatagcagcactcacatgttgactgcagcactattccaaatagccaaatacggaatcarcctaactgcccaccaatggataaatggataaagaaaatgtgatatgtatatatacacacacacagtgttaatactattc

SEQ ID NO: 237050 - DNA, 591 bp, Homo sapiens
ttttcaaaatgtttacattttgactgcacaatctcaaattcaaaagaaatattaactagggaaaatgcattatgtatacaaggctgcatcccaaatttccagttattttgatgtggtatgtactgtgtcttcagaacaatcaattagactcttccctcctgatgtgaatayctgaatacaaattaaaaatgagaagcatgtatacaacatcagaatatcgatcaaaaccattccccaggttagtttataatgttccatttaggacatgattttaatcagagaaaaaattacacgtactcatgataaaaatgacaaatacctgcatcacttaggaaaaacataatctatagattaggagatatgttggagatggctcagataaatgatatagtgtaatatttaaaggcacatattaaggaatctcatataatgtatgctattgtaatccacttctttgatcaatggagaagtacatatttcaaatagaaatataagactcagcagcccactgtacataaagcacctgacctcatgcccgtcatgcagtagtcataatagttaatttccttcttgtataacagatggagaaag

SEQ ID NO: 237051 - DNA, 591 bp, Homo sapiens
ttttcaaaatgtttacattttgactgcacaatctcaaattcaaaagaaatattaactagggaaaatgcattatgtatacaaggctgcatcccaaatttccagttattttgatgtggtatgtactgtgtcttcagaacaatcaattagactcttccctcctgatgtgaatacctgaatacaaattaaaaatgagaagcatgtatacaacatcagaatatmgatcaaaaccattccccaggttagtttataatgttccatttaggacatgattttaatcagagaaaaaattacacgtactcatgataaaaatgacaaatacctgcatcacttaggaaaaacataatctatagattaggagatatgttggagatggctcagataaatgatatagtgtaatatttaaaggcacatattaaggaatctcatataatgtatgctattgtaatccacttctttgatcaatggagaagtacatatttcaaatagaaatataagactcagcagcccactgtacataaagcacctgacctcatgcccgtcatgcagtagtcataatagttaatttccttcttgtataacagatggagaaag

SEQ ID NO: 237052 - DNA, 576 bp, Homo sapiens
aaactatggccctagcacatgccccaccgatttcatatttatccttgggaaagccacattatccgtctttgtgatattgcctgtgttagtaactggagttcataactattgtcagtgtatgtgtattaktaaagtaatttgtttgttgctgtgcgcaggcaagttcagctctttgggatgaatatgctgcaaagctgtgttctatggacaagtatttctattaatatacatttttccagtaatccaatatgaaaaaattaacactatttatttgtattcatgttcccaaacagacttgatttttgtaagtgatatggggtttaatcacaatgtaggagaaaaaccatcaagtctaatgtcagaagtctgaattcagcctcaattccaccaattagttctgtgaactttcatgaactgttaagcagtttgggcctcattttctttatatatagtaactaagtaatactgttaaccttcttatttctttattacatattggattttttaaatgtaatatggtatacaaaattttaggaattattattgccattgttgctttcgttggtaatagcagta

SEQ ID NO: 237053 - DNA, 609 bp, Homo sapiens
atgaaaatgtaactgaacttgaaattcaaagttaagggctctataccaagctatgccacttactagttatatgacctgactggataaggcatctctctaaactctaggttttttatttttaaaatgagaatataaaataactaattcttgtggtgttggtagtataaatttaggcaatatatgtaaaatacactttataaacattcaacattaaatcctaatgcctgtgtgatattatgattcatttccatctgtggttcctagttcgtaactttcataatcattgtcacaatcttggttataatgttggagaaatttagggctcagaagcaagcytgaggaaacaaaagctttctctctgaacttctgtcttccttttacccacccgagataggactatagtccaattataggtcataaaaccctcattctagagagggtcctgccccctactccagaggaaggaatgctgtacagagagatcaagaagaatctgaatggacaaggcttgctgagtttaggccacatcctttttgtccaatcacattttgacatagttgtccatgctttaatcattgacaaccaatgaattctccataaaaggcccaa

SEQ ID NO: 237054 - DNA, 603 bp, Homo sapiens
ccactggtacttgcatgttggtctgagtgtgtgttcatttaatattgtgacaccaatacaaatctccagaatgctaaatgtcaactgcattgttactcttttcaatttattatgcttctctgaagctgttattaattattgctaccatattttagtatggcttgactatcaggaaatgagataaatactttacattaatcaytttatttaaatctcctacagtgcaaaaagcaagtatgattctcatttcacagatgagacgacactgagaagttagtaacttgcccagacagctggaaagaggtagggtcagattcaaacctgtaaattttatgtcctgcatcctaacactataaagcaagaggatctcgatctctctctccccctccctccctctctctctgtctgtctgtctgtctgtcttttaaattgagacagggacttgctctgtcacccacggtggagtacagtggtgcaaggctcactgcagcctcaaattccagggctcaagcaatcctaccatttctgcccgtcaagtggctgggaccaaaggagcatgctaccatgcccacataatttttaaaaatttttttgtagagatgg

SEQ ID NO: 237055 - DNA, 603 bp, Homo sapiens
ccactggtacttgcatgttggtctgagtgtgtgttcatttaatattgtgacaccaatacaaatctccagaatgctaaatgtcaactgcattgttactcttttcaatttattatgcttctctgaagctgttattaattattgctaccatattttagtatggcttgactatcaggaaatgagataaatactttacattaatcactttatttaaatctcctacagtgcaaaaagcaagtatgattctcatttcacagatgagasgacactgagaagttagtaacttgcccagacagctggaaagaggtagggtcagattcaaacctgtaaattttatgtcctgcatcctaacactataaagcaagaggatctcgatctctctctccccctccctccctctctctctgtctgtctgtctgtctgtcttttaaattgagacagggacttgctctgtcacccacggtggagtacagtggtgcaaggctcactgcagcctcaaattccagggctcaagcaatcctaccatttctgcccgtcaagtggctgggaccaaaggagcatgctaccatgcccacataatttttaaaaatttttttgtagagatgg

SEQ ID NO: 237056 - DNA, 603 bp, Homo sapiens
ccactggtacttgcatgttggtctgagtgtgtgttcatttaatattgtgacaccaatacaaatctccagaatgctaaatgtcaactgcattgttactcttttcaatttattatgcttctctgaagctgttattaattattgctaccatattttagtatggcttgactatcaggaaatgagataaatactttacattaatcactttatttaaatctcctacagtgcaaaaagcaagtatgattctcatttcacagatgagacgacactgagaagttagtaacttgcccagacagctggaaagaggtagggtcagattcaaacctgtaaattttatgtcctgcatcctmacactataaagcaagaggatctcgatctctctctccccctccctccctctctctctgtctgtctgtctgtctgtcttttaaattgagacagggacttgctctgtcacccacggtggagtacagtggtgcaaggctcactgcagcctcaaattccagggctcaagcaatcctaccatttctgcccgtcaagtggctgggaccaaaggagcatgctaccatgcccacataatttttaaaaatttttttgtagagatgg

SEQ ID NO: 237057 - DNA, 469 bp, Homo sapiens
cagaaaaacgtcaaagatatctgaggattaaattcaacatatctktagacagccagctatagcctctgatctaattgatttttaacaagtgctgtaatcactgatgagttcttcctgtccactgcacagacaaaaccaatttactgagaccatggcatcataataaagaaagagtttaattgagatgtgggagatataaagttattactcaaattgatctccctgaaaatttggaggccagggttttttgaggctagtttggtgggcagaagccagggaaatgggtactgctgattggtaggggatgccatcatggtgtggggaaaatggccctcatacagtgagtttgcttccaactgggggccacaggactggttgagagtccaggtagggccatctgattgtcagaaatgcaaaagcctgagaaggcatctcaaaaggccaatcttaagttctacaatagtgaatt

SEQ ID NO: 237058 - DNA, 577 bp, Homo sapiens
tggtggcctttcattagttttataaaagtggtttagttttggggaagggctattatcatttaaagtataggctaaattttctcccacgttagcttggcccaagcccaggaatgaccaaaggcaatctggaggttaaaggcaagttgggggttggttagatcagatctctttcactgtaataatcttctcaattrtaatttttgtaaagatgttttcagtccaaggttctataactctcccactgccagaggcagataacttgacttctgtatttctcatgttgcattcttcaatattgttctcaaactcttcacacaatgcttgaacatcacataaagttaccagcctttggagcaatttcctacctgtttactccttcaatttttttctctcttgaaattattactgtcttttcttcttcactcacttatttttctacccagtaggattacgtgcttagagcttccttatattacaacataaaataggagtttgatgaaaatagtcaaagaattccaaaatgggtcaaagcaaattaaaagggaacaaaatgattaaatctaggattattaaatca

SEQ ID NO: 237059 - DNA, 599 bp, Homo sapiens
cccaccagtccagagtttccagatcctcccctctgcacccctcaccagcaccccgaaccaatgctgagctgctacctcggcttaaacatgagttcctcaggctagttaggtcctttggattgaaagggacagaaagtctcattcaggctgcattcagaaagggtccacctcgtgaatgaaagaatctagtcaatgatgcccagtagctgctaacatcacaaaaagagagatgaccagacatcatgcatctcatgatgacaccgttgcacatatcaccatttctgaaggagtcttgccagaaggcaaatgtgaatctcatcaagccttaacccaactaccaatttacaggaaatacaactgacagaggaacacagtaaaagacatcacagacatgcaattagcaagatccagaatatgggaaactctacagaacaaatggtctcatttcttcaacaaatagattggataaagagagagagagagatggaggaaggggaacrtatagataaaaaatgcttaaaatacatatcaaccaatcacaatatgtagagcttatttcgatcctggttctaaccaactgtaaaacaaaaaatcctaca

SEQ ID NO: 237060 - DNA, 607 bp, Homo sapiens
tgttaggcaaaacccttggtgccagcctaggtaggaaccagatgtccatttctgatccaaacagcccacaccaaaatcaaaaacaaaactcacaaacartgatgtgaccccagtttcctgagtagatagctatggaattggctatttcatctaaaaccaaaagttaagcacagcagacattagtatgccccatatagcccctattcctaccatccctaccatccatggatcataaaatgagccatatcatttctggaaatgcctctgctggacatggctccagcagttgaatctgagactgagagcatcacctgcgaaacaagagcgaacaaaagtgatggaaagtgtccccagccagtattggatagcaaagatgctaagagaggtctaagaagaaagaaaggaagaaaaaaaaaacttctaggctgagcatggtggctcacacctgcaatcctagcactttgagaggccaaggcgggaggactgcttgaggccaggagttcaagaccaacctgaccaacatagcgagatcccatctcataaaaagaaaaaaaaaaccatataattttttaaaaaacaaaacttcaaaaggagcagacctgagtct

SEQ ID NO: 237061 - DNA, 447 bp, Homo sapiens
ttgatgggctggatggagatacctcctccccttctcgtcacctgcctctgagacagggagatgagacaggtgtataatcgggcctcaagaatgctctttggatctggagtcctgcatttgctcttagatcatttgtcctttttctgctatgcctgattttatctccccaaggttgaatggtaaaaacctggtcatttttcctagagacagtttccgtgataatcactcacagttattattaattcctagcttcgtgctggccatggtacagaatcctgggtggcatgcactgtcaagcggtagtttgttcagactcaatgattttacaatcacttgggaggcagtgaagctgctagaagtggccagagacaaaggccagtctttcttgacctttcctatttttattgtggttgtgwccatgcccgagactgctaggttccagcaggg

SEQ ID NO: 237062 - DNA, 584 bp, Homo sapiens
cagatatgtgacctccatctcccaaagttgaacctstaaccctcaaatccaacgagctacaacctccagacaaccattaccccttaagactggtatatatcatgacattccttgtaacatatcaaaacatattgaatagaatgtgcactgcatttcacccttgaagaacactaggtgaatgatcctatactcaatattatttcacaaccacagagacgtattcagacacttcaacccacatagaaacatggaatcttagaaagggaagccactagagaagccagtgaatgccaccctggtattcgatgaattcaatgaatatctgaatttccttcagagcacccccaagtcagtggcttggccatcttctagaacacttgcaaacaatgggatcttcacaacctcacagggtagcctgtcttatactcagacagtcttaatatttgtaaagttattctattatcaaggtaaaataggcttccctaattgttcttcctattaaacatagttttttcctctggaaactcttagggctctgggtttgagagaaaagttctggcaattaaatccccaggtgctgctgt

SEQ ID NO: 237063 - DNA, 619 bp, Homo sapiens
aaagcttggattcgaatgtgagaatctggctcaggggctcacacccttaatgatgaatattgcctacgtgcatgtgcatatagatatgtatttatttattcttacagtgatcttctaatacagtcctcttgaaacggaacccccagacccttcatattatattacactaccttggaaaagacaatcagcctcgataggggtagatgtcttctggtggtcacctcatattagaaatctacttcctgcagtccacatctttcactaaacaggtgcattctagctttcagttctatcatcagagttctagaaagcactttcatctattttccttgagcctcagcacaatccttygaagcaaataacatgacctgtgcttcacagatgaacatctaggggctcagaaatgttaggtggcttccccacgtcactcagcatagctggaattcatacctggtactctgtccccaaggctggaggctcgccttctgttaggatcagaggataagttgattcaaagagaaacaagttgtccctttctggatgaaagcaaggtattactgacctggatggaggctgtcaaaggtttaactgggcaaggacagtggatcactatctcatg

SEQ ID NO: 237064 - DNA, 542 bp, Homo sapiens
gttgagtgagtttttattaggtctggttgttgtaaagggtggcctcttccccaccattctccagcttgctcctgccttcaccatgtgaaatgyctgtttccccttcaccttccgccatgattgaaagctccctgaggcttcaccagaagcccagcagatgccagcactatgctgcccgtaaagcctgcaggatcatgagcccattaaacctcatttctttataaattaccctgtctcaggtatttctttatagcaatgtgagaatggcttacttcagagaacaactcagtccttaactttttctgtgaccaagaccccatctcttactttttatgtttcaggattcttatctaaaaaataagaataataggccaggtgcagtggctcacgcctgtaatccccacactttgggaggccgaggcggccagatcacgaggtcaggagttcgagaccagcctaaccagtatggtgaaactctgtctctactaaaaatacaaaaattagctgggtgtggtggcagtgggccaagatcatgccattgc

SEQ ID NO: 237065 - DNA, 547 bp, Homo sapiens
taaccaacattcttatcttctggggactctacctcgtaaacactactaagagaagactgacagcattatgcttcgcttcactggatggaatggcttcaacttccagacttgtgctgtccaatatggtaccagtaaccacatgtggcatttgagcacttgaaaaatgactagtgtgattgagaaactaactttttcattgcatttgattttaatgactttaaatttagatttcaaacctagagcagtgtaaaatatttttatgataaacacaccgtttttgttttggcagggctatattttattttaaccgttggaaatttagcttctgaatttatttgtgctgcaagtataacgtacacgtctaattttgaagactaggakggaaaagaatgtaaaatatcttgacaatcttttatatggtctacagattgaaataatattttagatgtattggcttaaatgaagtatattactgacataagttttactagtttgcttttttcatgtggctattagaaaattaaaatttgcatataaggctcacatt

SEQ ID NO: 237066 - DNA, 544 bp, Homo sapiens
atgttgaagaataaatccctcagtgttagagagcatttgaaattcctcttcttaattagaaagtgctcacagatasggcaaattattaatatccatctagagacgttcccccgtaatttctgagccccatagtggccattgtccctcttcaatggtaagaatggggaattcaaatgattgttggtaatttttgacttgtatcaatacagtctcagctgttttccttaaaaactcacagaagacctgtagttcacctttctttggaggtgagggagagagagtagcaatgggaggaggatgacaattcgttttcgttattaagttttagtttattaaaatatgatatcaattgtttaataatctgtgaaagtgaatgccaggtgttacgcattgggtagagtcaggttagtatttgggagatgattggccagaattcagttcataggctcttctgttaaaaagtagataatgtcaagaggtacaatgaagtttgattaattcctgagtcctaagcagagcctgcctgttagcacatttttaaagt

SEQ ID NO: 237067 - DNA, 544 bp, Homo sapiens
atgttgaagaataaatccctcagtgttagagagcatttgaaattcctcttcttaattagaaagtgctcacagatacggcaaattattaatatccatctrgagacgttcccccgtaatttctgagccccatagtggccattgtccctcttcaatggtaagaatggggaattcaaatgattgttggtaatttttgacttgtatcaatacagtctcagctgttttccttaaaaactcacagaagacctgtagttcacctttctttggaggtgagggagagagagtagcaatgggaggaggatgacaattcgttttcgttattaagttttagtttattaaaatatgatatcaattgtttaataatctgtgaaagtgaatgccaggtgttacgcattgggtagagtcaggttagtatttgggagatgattggccagaattcagttcataggctcttctgttaaaaagtagataatgtcaagaggtacaatgaagtttgattaattcctgagtcctaagcagagcctgcctgttagcacatttttaaagt

SEQ ID NO: 237068 - DNA, 620 bp, Homo sapiens
tgttaccataactgtattagtcgtagattccatgacaaggaagtaagaatgccctcttttactcacaatatttagagtcctagtcttaattcaaacttccaaaacgagcacaaagaccacatggtatttttttttgtcttctctaacagatattttctttggggaaataaaattaatgcaattaagaatactttctacattttattgaagcattttgtcttctgctctttgactaaaaccatcatataatgtgtttagagttttcagaaattaataaagtctaggtactgacatttttgggagatcatttgctcacctgtaaagtagttcattaatgaactccccratatcttctaattctgagtcaatacttctaaagccatataaaatattgtgtcagctatatttggttaggctgcatataataagttaattaataaatagtagtagttttaaagagacacaagtttatttttctctcacataaaaataagtctggaagtaggttgacaatgctggttctatggcttcccaatcatcaacgtcccaagcctctatcttgctgctctttccatcttcagttgacaaatggtctaatatggctgccaagcaccagccat

SEQ ID NO: 237069 - DNA, 599 bp, Homo sapiens
  misc_feature (1)...(599): n = A,T,C or G
gagagatgaccactaaccagtgattctcacattgactattacacgaacaagagttgatcagcaattacagggaaaggggtggcaaatatggccccccacctatttttataaatagtttgttatatgtggctgattttgttctgtaacagcagagttgagtagtcacaacagagactgcacagccctcagtgatgaaaatatgtactatcttgtnctttaccaaaaaaagtttgtcaacacctggtctattatgctaaaaactgtaattcttagaataattggggsttacttgttgtagtaatgagcattacgctaactagtatacctccttaagtataagtattatacttagctgtatccatttactaatcgatgtgttctctcagcatgtatttactgaacatttaatatgttcttggtattgggaatattaaggtgaatgagacatggtccctgcttttaagaaacttagagttttgatagggagatcagtgtatctattgaaaattaaaatagtggcacaatggtagtaaatattagatgctaataacacatgcaggaagggtacttatcccagacttgggaaaggtaggtgctgc

SEQ ID NO: 237070 - DNA, 574 bp, Homo sapiens
catatatttaatatatatatattagaatgtggatggttatatacatacattcagttatacacatactgagtctcactctgtcattcaggctagagaggagtggcatgatctcggctcactgcagcctccacctaccaggttcaagcaattctcctgcctcagcctcccgagtagctgggattacagacacctatcaccacacccagytaatttttgtatttttagtacagacaggggtttcaccatattggccaggctggtctcgaactcctgacctcaagtgatccacccacctcagcctcccacagtgctgggattacaggcatgagccacaaggcccagctaaaaattcttattttcttaaaattgtaaaggactgtttatttcaaagttaatgtcagggaaaattagtgtataaataacataaacatacaagtaataactagaaataattgagatagggatttgattacaacattaaaattttaatatccctctaactagtcattatgtaaatagactattagctgtgtggtttgttactgtaactgttattagtcgtagattccatgac

SEQ ID NO: 237071 - DNA, 485 bp, Homo sapiens
ttggaattttcatataggagacatggacagaaatatctggagctagttcaacagcagggtgtaggaagaaccggaggaaagcaagactgtgggcaaagagagaagttaggtggctagttccaggagttcaatgagctattgaaaggcctagccctgaaaggtaatgaaaagaaaggaatagatggaaaagacratgtaataagaaacagacaaaatttagtgactaagactacaatgaaagggtaatgtatgtggtatgtgggaaggcaacacaggtttcaaggttttgaatctagaaatctggaagtacactgaggtcagtcatagaaaaagaagatgccaaggaaaatgatggttggactctagagaagtcagatttggggtgataatgccacacccaagaatatgtgtttgggaaacagctgaaaaagtaaagtagatcaccaaatatttggattggagatagtgacttgaatatcacatac

SEQ ID NO: 237072 - DNA, 479 bp, Homo sapiens
gttgcagtgagctgagatcgcatcactgcattccagcctgggtgacagagcgagactccatctcaaaaaaaaaaaaaaaaaaaaaaaaaaagcttgaaaagtggctttggatgttgcatcacttgccacctgtttcagcctagtcccctaaaacaaaaaaaaagcattcaagggtgaggaaraaattactccctgtttcaggataaagagtaacttacaaactaatacacacgagaagacaatatatgtggaataaaaaattgcaggtttgggccgggcacggtggctcatgcctgtaatctcagcactttgggaggccgaggtgggcagatcacctgaggtcaggagttcgagaccagattggccaacatggcaaaacctgcctctactaaaaatacaaaaattagccaggagtggtcacaggtgcctgtaatcccagctactcaggaggatgaggcaggagaatcgcttgagcctgg

SEQ ID NO: 237073 - DNA, 479 bp, Homo sapiens
gttgcagtgagctgagatcgcatcactgcattccagcctgggtgacagagcgagactccatctcaaaaaaaaaaaaaaaaaaaaaaaaaaagcttgaaaagtggctttggatgttgcatcacttgccacctgtttcagcctagtcccctaaaacaaaaaaaaagcattcaagggtgaggaagaaattactccctgtttcaggataaagagtaacttacaaactaatacacacgagaagacaatatatgtggaataaaaaattgcaggtttgggccgggcacggtggctcatgcctgtaatctcagcactttgggaggccgaggtgggcaratcacctgaggtcaggagttcgagaccagattggccaacatggcaaaacctgcctctactaaaaatacaaaaattagccaggagtggtcacaggtgcctgtaatcccagctactcaggaggatgaggcaggagaatcgcttgagcctgg

SEQ ID NO: 237074 - DNA, 503 bp, Homo sapiens
ggtctcttgctccctcctgccttgtgctccatctggcttccacacagtagtcagcgtgatcttttaagaaactcacataaatgaaccacatcacttccctgtttaaagtcttcaatggcttcctgttacactcagagtaaacccaaacttcttgccatagcccaaaggccctgtgtgatttgactcctgcagatttccgctgccgcctctcctgttgcctcctttctggctcactacactgtcrtcacatgtgatttctgaccattcctgcagcccatcaggctctttcctgctacagggactttgtacatgctgttccttctctttggaccaaacttcctccttcacttcacatggctaactctcatccttccaacctggcagaaatgttgctgtgtcttagatcaaaatatagactggatggcttcaacaacagagatttagtttctcagttcgtaaggacagaagcctaagatcaagctgccaccacggtcaggttctgg

SEQ ID NO: 237075 - DNA, 502 bp, Homo sapiens
tgctccctcctgccttgtgctccatctggcttccacacagtagtcagcgtgatcttttaagaaactcacataaatgaaccacatcacttccctgtttaaagtcttcaatggcttcctgttacactcagagtaaacccaaacttcttgccatagcccaaaggccctgtgtgatttgactcctgcagatttccgctgccgcctctcctgttgcctcctttctggctcactacactgtcatcacatgtgatttctgaccattcctgcagcccatcaggctctttcctgctacagggactttgtacatgctgttccttctctttggaccaamcttcctccttcacttcacatggctaactctcatccttccaacctggcagaaatgttgctgtgtcttagatcaaaatatagactggatggcttcaacaacagagatttagtttctcagttcgtaaggacagaagcctaagatcaagctgccaccacggtcaggttctggtgaggg

SEQ ID NO: 237076 - DNA, 502 bp, Homo sapiens
tgctccctcctgccttgtgctccatctggcttccacacagtagtcagcgtgatcttttaagaaactcacataaatgaaccacatcacttccctgtttaaagtcttcaatggcttcctgttacactcagagtaaacccaaacttcttgccatagcccaaaggccctgtgtgatttgactcctgcagatttccgctgccgcctctcctgttgcctcctttctggctcactacactgtcatcacatgtgatttctgaccattcctgcagcccatcaggctctttcctgctacagggactttgtacatgctgttccttctctttggaccaaacttcctccttcacttcacatggctaactctcatccttccaacctggcagaaatgttgctgtgtcttagatcaaaatatagactggatggcttcaacaacagagatttagtttctcagttcgtaaggacagaagccyaagatcaagctgccaccacggtcaggttctggtgaggg

SEQ ID NO: 237077 - DNA, 554 bp, Homo sapiens
ggcacatccttttttaagcattagggtgaattgggtgttacagttctctcgggcaagctgaagtgcacctggtcagtacttcgctcactatgaccttacagaaaccttgggatgttgctgcaatatagtattatgtttccttatcccactttgtaagttaagtcccttagaatcagacacgatttagcaatttcctctaggagcaaaggcaaacattctaagtatatacatataattgttgttaagatgacacatcctagccaagtggtcaagatgtattttaccctcattagtagatgtaagactagttcagacmagtgtaaaacacttgccagctttttatttttaggccagatatttctattttctgtcttcttggtgaatattcagtccattagtacacggtattacttaaagaattgttggtgaagggcattcattaggggcttctggaccataagtattttcaacctaccaataattgtttatgttttaaagtaggatgatagtaagtaaaagccacactcccctttttaaagttagggctgataaag

SEQ ID NO: 237078 - DNA, 541 bp, Homo sapiens
taaacaagttccctagaggggagattcttacaaaaccaggatgctcctcaggccttgtctctttgcatgtgtccacttcccctttgaccttctttgccctgttgtgatgcagcctagaagccctcagtggaaggcagggccaggcccttgaatttcccagcctgtggaactgtgasctaaataaacccgattattcagtctcaggtattctgttgcagcaacacgaaacagaccaggacacttggtctagggagttatctgcaaccccactgacatcaagtgatgaccagatcaataattcaattcagtaaacttcattaatatctactatatgcctagtattatgtcttcaaattttttgcaaaaaatgtaaatgttatataaaattatcctacaggactcagaaatggatttcagttcattttggcaatggggatgccttctctttatacagaatttcagagctcactgggccagtcatcattaaacagctatgtggtaattatgaaaaggagcatttgatcatgagcatttccctacc

SEQ ID NO: 237079 - DNA, 541 bp, Homo sapiens
taaacaagttccctagaggggagattcttacaaaaccaggatgctcctcaggccttgtctctttgcatgtgtccacttcccctttgaccttctttgccctgttgtgatgcagcctagaagccctcagtggaaggcagggccaggcccttgaatttcccagcctgtggaactgtgagctaaataaacccgattaytcagtctcaggtattctgttgcagcaacacgaaacagaccaggacacttggtctagggagttatctgcaaccccactgacatcaagtgatgaccagatcaataattcaattcagtaaacttcattaatatctactatatgcctagtattatgtcttcaaattttttgcaaaaaatgtaaatgttatataaaattatcctacaggactcagaaatggatttcagttcattttggcaatggggatgccttctctttatacagaatttcagagctcactgggccagtcatcattaaacagctatgtggtaattatgaaaaggagcatttgatcatgagcatttccctacc

SEQ ID NO: 237080 - DNA, 540 bp, Homo sapiens
gtagatcaagagctgcacagtgaatagttaaacatttactgaatgtctgttgtaagtagttttagtccaaatgtgtgtccatattttaccacctgtagaaaagaaagatgtaaactcaacytaatattccgtaatgatcgctctaatatggtagcatttgggatgtttgtaaatatcacagaaacagatagaagagccagaattcatgttcagaaactcgtatttcatgcctgtagactccagatttgtcactctacggcaaaggcacaacggagaaaaaaatttctcaaagatgtttaatgaaatgaagtatacctgcgtcatgtgtactgccttctgtagaacactgtgtggaaatgtaataaaaataaactcaaggagtttattatttaagcaggggatgaaagctcttttgctagttgtgttatagtgccttaatatgtgtttgcacacacacatagaagctcaataaaggttgacagaatgagtatcaatttcctattttaaaaagagctgaacagaatttaccaaaaaattgta

SEQ ID NO: 237081 - DNA, 580 bp, Homo sapiens
atttcatgcctgtagactccagatttgtcactctacggcaaaggcacaacggagaaaaaaatttctcaaagatgtttaatgaaatgaagtatacctgcgtcatgtgtactgccttctgtagaacactgtgtggaaatgtaataaaaataaactcaaggagtttattatttaagcaggggatgaaagctcttttgctagttgtgttatagtgccttaatatgtgtttgcacacacacatagaagctcaataaaggttgacagaatgagtatcaatttcctattttaaaaagagctgaayagaatttaccaaaaaattgtacattttatatatacaggaagttttacagaatattgtcagcagtgtatccccccccatccacttttcccatcatgactggaaatacatcaaattccagagaagaactttcttactcattcatgaatctcctctaaaatacttatctggcctatttgtatagtgacatagaggactgaggtttcccaggctatctcaaacctcagacacattcacagcactcacacgcaaatacctccaaaattatgcactgtctctgaattc

SEQ ID NO: 237082 - DNA, 603 bp, Homo sapiens
tgaattctcagactgaagtaaaaacatgttattatcttcattaacactaaatttcactgtccttttctccatcttgtgcaatggagaacaggcaatccttgttattaagcrgccaacaacttgggtgaattgtgttcatattattagtgttttgtggaagttgggacttgtgagcaatgaagttggctatttagctgaggatatttctcagctaagtactgaaggcacggctttgttcctcctgactgtttagtaaaatgtgagaagagagaaatgatgtgaagagggacttatcaaacaacaagaaactagaacttatgagcttggaaaattctcagccaatccatattgcacaaaatgagaaagcatgtttaaaagagaacactaagagtattaccaagccaccatttgataaggagattagtatggtgtgaagcatggactgaattagctacctcagcaggaaaactgccagtttgaactgaatgggaaggaatgaagaaatgttgtcagattttttggattttacagggaagaccataaaacttttcagctgcaaacatgatctattcttaaagacaagggaagaatgactacaaaaaa

SEQ ID NO: 237083 - DNA, 618 bp, Homo sapiens
aacactaaatttcactgtccttttctccatcttgtgcaatggagaacaggcaatccttgttattaagcggcmaacaacttgggtgaattgtgttcatattattagtgttttgtggaagttgggacttgtgagcaatgaagttggctatttagctgaggatatttctcagctaagtactgaaggcacggctttgttcctcctgactgtttagtaaaatgtgagaagagagaaatgatgtgaagagggacttatcaaacaacaagaaactagaacttatgagcttggaaaattctcagccaatccatattgcacaaaatgagaaagcatgtttaaaagagaacactaagagtattaccaagccaccatttgataaggagattagtatggtgtgaagcatggactgaattagctacctcagcaggaaaactgccagtttgaactgaatgggaaggaatgaagaaatgttgtcagattttttggattttacagggaagaccataaaacttttcagctgcaaacatgatctattcttaaagacaagggaagaatgactacaaaaaaatgattcagagatcatcagggcttcatcctatgttgcaaagggtggaggaagaattg

SEQ ID NO: 237084 - DNA, 618 bp, Homo sapiens
aacactaaatttcactgtccttttctccatcttgtgcaatggagaacaggcaatccttgttattaagcggccaacaacttgggtgaattgtgttcatattattagtgttttgtggaagttgggacttgtgagcaatgaagttggctatttagctgaggatatttctcagctaagtactgaaggcacggctttgttcctcctgactgtttagtaaaatgtgagaagagagaaatgatgtgaagagggacttatcaaacaacaagaaactagaacttatgagcttggaaaattctcagccaatccatattgcacaaaatgagaaagcatgtttaaaagagaacactaagagtattaccaagccaccatttgataaggagattagtatggtgtgaagcatggactgaattagctacctcagcaggaaaactgccagtttgaactgaatgggaaggaatgaagaaatgttgtcagattttttggattttacagggaagaccataaaacttttcagctgcaaacatgatctattcttmaagacaagggaagaatgactacaaaaaaatgattcagagatcatcagggcttcatcctatgttgcaaagggtggaggaagaattg

SEQ ID NO: 237085 - DNA, 618 bp, Homo sapiens
aacactaaatttcactgtccttttctccatcttgtgcaatggagaacaggcaatccttgttattaagcggccaacaacttgggtgaattgtgttcatattattagtgttttgtggaagttgggacttgtgagcaatgaagttggctatttagctgaggatatttctcagctaagtactgaaggcacggctttgttcctcctgactgtttagtaaaatgtgagaagagagaaatgatgtgaagagggacttatcaaacaacaagaaactagaacttatgagcttggaaaattctcagccaatccatattgcacaaaatgagaaagcatgtttaaaagagaacactaagagtattaccaagccaccatttgataaggagattagtatggtgtgaagcatggactgaattagctacctcagcaggaaaactgccagtttgaactgaatgggaaggaatgaagaaatgttgtcagattttttggattttacagggaagaccataaaacttttcagctgcaaacatgatctattcttaaagacaagggaagaatgacyacaaaaaaatgattcagagatcatcagggcttcatcctatgttgcaaagggtggaggaagaattg

SEQ ID NO: 237086 - DNA, 520 bp, Homo sapiens
gagatagtaaactcagacccataggtagagcccacaataggtcccagagagagcaatcctgagttcctgtggccactagtcttcatggtaattacctctttgcaaaatgcatcctctggggcctgctactcaaagtgtggtccttggattggcagctttggtctccacctaaagtgtggtagaaatgcagaatctcaggtctcatctactcaatcagaacctgccttttaacaaggtcccttggtgatccatatgaactaagagaaatattaaagtttaagaaatattctccaggaggcccattgccttgtgtctgggagagggtgtgaggccatttgttgcaatgccccaggtatttgttgttygcttgtttgtggttggttggtttgtgtttcctgatgtctgatgattagaaagtcttacaacctcccaggcttccaggatgggtgcatttgagggtcctaaggtaaaattttaggccaagccatcattcttaagcctttccatttcatccatctca

SEQ ID NO: 237087 - DNA, 442 bp, Homo sapiens
ggttagccagcatgagccaacttcagcagaccactgcgtcacatcagatattatagagaaggactaaactgagctatggggggtcagagcttttctgatgaagtgaaatttaaagtgagccttgagggatcatcagtaatttgctagggaaggagtgagagcaaaagacttttcatgcgtaaggaataacttgtacaatgcataaggaataacgtgcataaggaataacttgtacaataacttgtacaaaagaggtaagaaggaacatggtgttttatgtaatgggagaagatcagtgtggggaagcttagtgtgcctycaaaccagatgaaatagatactattataattatcctcatttgtaaggaaactgagctgcagacagcctgaataaccaagtaactagctcaaggtcatacaactgcaaagtggtagggtgtgga

SEQ ID NO: 237088 - DNA, 528 bp, Homo sapiens
catagtggctcatgcctgtaatcccagcactttgaggggccaaggtgggtggatcatatgaagtcgggagtacaagaccagcctggccaacatggtgaaaccccgtgtctactaaaaatacaaaaattagttgggtgtgatggcaaatgcctgtagtcccagctactcgggaggctgaggcaggagaattgcttgarctcaggagacaaggttgcagtgagctgagatcatgccactgcactccagcctgggcaacagagcaagactccgtctccaaaaaaaaaaaaaaaaagtgagtgatctttggtgagtgataaacttctacattgaaagctaagaggtggcactctattttcaataggaattggcagaaagggagaggagtgctgtgtgtgtttggaaatcagcgtctagaggaggaatcagatcaggcagccaggtcagcaggaagttcgtatgaggatttagaaacccaaagtctaaattatagctgagtatagattgtaatgggagcagtcaagatattca

SEQ ID NO: 237089 - DNA, 479 bp, Homo sapiens
tggaagccaaagtttaatgaaatactggtgaaaccttctcagaaaaggctggcttaatcaagttagttgactctcttgttaaagtaaatttgctacaacagcagcagctgccatttatctgagcaacttatatgtgggacagtcaggattaaaattcagatctgtctgatgtcaaagctcatgttctttccaaaatgcaatatagtagtctcctcttatcttcagggaatatgttccaaaacccccagtggatgcctgaaaccacagacagtagaaaaccctgtatatattatgttttcccaatacatacatatctttcataaagtttaaattataaattaggcacagtttgagattaacagcaataactaatamtaaaatagaataattataataaactgtaatgaaagtgatgtgaatgtggtctctctctctccctcaaaatactttattgtactgctctcacatttcttgttatg

SEQ ID NO: 237090 - DNA, 432 bp, Homo sapiens
ggggtcatatccaaaaaatccttgcccagacatggagccagtcataaaaccagtgtcatgaagcttttcccctatattttcttctagcagctttaaaatttcaagtcgtatatttaagtttctaattcattttgagtttatttttgtacatgatgtgagataaagtctattttcattcttctatatgtggatatmcagttttcccaataccatttattgaagagactgtcctttactcactgtgtgttttgggcacgttcgttgaaaataaattgaccatagatatgtgggtttatttctgggttcactctctattttcttggtcaatgtgtctatttccatgccagtgccatgctgttttcattactataacacattttaaaatcatgtagtgtgatgcccccagctgttctttttgctcaaggttgtttt

SEQ ID NO: 237091 - DNA, 432 bp, Homo sapiens
ggggtcatatccaaaaaatccttgcccagacatggagccagtcataaaaccagtgtcatgaagcttttcccctatattttcttctagcagctttaaaatttcaagtcgtatatttaagtttctaattcattttgagtttatttttgtacatgatgtgagataaagtctattttcattcttctatatgtggatatccagttttcccaataccatttattgaagagactgtcctttactcactgtgtgttttgggcacgttcgttgaaaataaattgaccatagatatgtgggtttatttctgggttcactctctattttcttggtcaatgtgtctatttccatgccagtgccatgctgttttcattactataacacattttaaaatcaygtagtgtgatgcccccagctgttctttttgctcaaggttgtttt

SEQ ID NO: 237092 - DNA, 555 bp, Homo sapiens
ataaaaatacaaaaaaattagacaggtgtagtggcatatgcctgtagtcccagctactcgagaagctgaggcaggagaattgyttgaacccaggaggcagaggttgcagtgagccgagattatgccattgcactccagcctgggcaacaagagtgaaattccatctcaaaacagaagaaaagaaagaaaagaaaaaagaaaagaaaagaaaagaaaaagaaaagagaagagaagagaagagaaaagaaaaaagaaaagaaaagaaataatctactttgagtacctagcccacctagtccaggggcccctcctctgtgttcccatagctcatgctgcttatcttattgagatatggtgactcatctcaccattaggcaactggttttattcacctctgtatcacttatgcctaacgcaatgtcattgcatagtattcatgcatatatatatccatcataatactggcttgaactaaattaaatacccgctagctggaaccctgtatgcaaaaggctctattctttgtcattacttataaggggactgaagagtaaa

SEQ ID NO: 237093 - DNA, 529 bp, Homo sapiens
  misc_feature (1)...(529): n = A,T,C or G
agatgctgcctatttggccactgaancaatcaaagctaataaatgcttaaagaaaaatatctgacaataaaaaggtttaaatcaaatgtgttgagtttatttcagttaagtttagagctaacaaataccttttctaaaatttcctttccctgacaaagtaaatagagtcctaagatggccaggcgtggtggctcatgcctgtaatcccagcactttgggaggctgaggtggacagctcacttgaggttaggagtttgacaccagcctggccaacatggagaaaccctgtctctaccaaaaatacaaaaagtagccaagtgaggtggcgggcacccataatcccagctacttgggagactgaggcaggagaatcgctagaacccaggaggcggagcttgcagtgagccaagatcgtcccactgcactccagcctgggcaacagagcaagaatctgtctttttaaaaaaaaraaaagagtcctaaggggaagtcttttcaaacattgtgtcatttgcttcatcacttttaa

SEQ ID NO: 237094 - DNA, 610 bp, Homo sapiens
tttatatgtgtgtatattacatatgtatttcaatttttcaaaatatctttatgtgtatgtgtttgtatttatcaacagaattattaaagcagtgaaactgtaggatttttctctttgttatcagagtatcttctagttaactagygataaaaatatttttaattggagcattttcatagtcaaactttatagaaactttataccatcatttatcaaattttgggttgcttttcaaaataccatttatattcatgtttcaagtgaagctatggaccaagaattagcaggcaaaatgctgtttctaaagaattttccagcttcgtgttaatagtagaccaaatgttagccttcactagttttgttacaaaaacataaaataaactgttaaagcaaagttggaaaatgcagagcttcatgcaaacagggagggtggacataactgaaataaactaagcaaaaagctaaaagcaaaagaaataaagaaaagaaagaaccttatgcatttctccatgaagatctcctacctcttctctagtgtctatggcagagccaggggtggtggcagcagtgcttactgtggtactaggggcagtgcctgatgaagtcactg

SEQ ID NO: 237095 - DNA, 610 bp, Homo sapiens
tttatatgtgtgtatattacatatgtatttcaatttttcaaaatatctttatgtgtatgtgtttgtatttatcaacagaattattaaagcagtgaaactgtaggatttttctctttgttatcagagtatcttctagttaactagtgataaaaatayttttaattggagcattttcatagtcaaactttatagaaactttataccatcatttatcaaattttgggttgcttttcaaaataccatttatattcatgtttcaagtgaagctatggaccaagaattagcaggcaaaatgctgtttctaaagaattttccagcttcgtgttaatagtagaccaaatgttagccttcactagttttgttacaaaaacataaaataaactgttaaagcaaagttggaaaatgcagagcttcatgcaaacagggagggtggacataactgaaataaactaagcaaaaagctaaaagcaaaagaaataaagaaaagaaagaaccttatgcatttctccatgaagatctcctacctcttctctagtgtctatggcagagccaggggtggtggcagcagtgcttactgtggtactaggggcagtgcctgatgaagtcactg

SEQ ID NO: 237096 - DNA, 610 bp, Homo sapiens
tttatatgtgtgtatattacatatgtatttcaatttttcaaaatatctttatgtgtatgtgtttgtatttatcaacagaattattaaagcagtgaaactgtaggatttttctctttgttatcagagtatcttctagttaactagtgataaaaatatttttaattggagcattttcatagtcaaactttatagaaactttataccatcatttatcaaattttgggttgcttttcaaaataccatttatattcatgtttcaagtgaagctatggaccaagaattagcaggcaaaatgctgtttctaaagaattttccagcttcgtgttaatagtagaccaaatgttagccttcactagttttgttacaaaaacataaaataaactgttaaagcaaagttggaaaatgcagagcttcatgcaaacagggagggtggacataactraaataaactaagcaaaaagctaaaagcaaaagaaataaagaaaagaaagaaccttatgcatttctccatgaagatctcctacctcttctctagtgtctatggcagagccaggggtggtggcagcagtgcttactgtggtactaggggcagtgcctgatgaagtcactg

SEQ ID NO: 237097 - DNA, 484 bp, Homo sapiens
tctgtacaatgaagtttctaatatttgtggaaaacagtataaattaattagaaaaaacatggacaacagcaatctccacatgtgatatagtaaaatatgtattaaaatgagcaattcttaacgtatatacaacatatattgttgatttgaaaacctaatagatattttcacatttaattccattttattacaaaatatggataagaaaatagtgctgaaggaacaaaacagaagggttcagttctctagcattagtcctagtctttatgttttcccaagtgtcagaaccactgactcaatttcaacaattctgtagaaataagtatgcattayttaagaaaaaatggtgagataacatgagaaatgtactttaagtcataaagtttataattttcctatgtaaattatctcagtcataacacttttttttcactgaagggttgtatactggaaaaaataattgtacatttgggtatattggaag

SEQ ID NO: 237098 - DNA, 495 bp, Homo sapiens
taagtttttgtactgagtgttggtattaccccagttgagatgcatgggcaaaaccaggggtcaccaacctctgtaaagagccagagggtgaaggttttagtmtttgagggacatagggtctctgccacaattcctcaactctgcctttgcagagtgaaagcagccataaataatgagcaaattatgcatgtggacatagccgtgttgtaacaaaacttttacaaaacaagtgacaggttggatttggcctatgggctgaagtttgccaagccctaggccaaatcatgaaaggcaaagctaacgaagcatggtagaaaaaggtcaaaacttgagtctagctgtgggtttcaaaatgaactccttatattgtcagtactatatccagagcctgaaagaaaacagaaaataaggccctagaaggcaaaaaggtttaaagaccactgggagaggtgacggtaatatacagggaatacgattacatgttttatcataaag

SEQ ID NO: 237099 - DNA, 495 bp, Homo sapiens
taagtttttgtactgagtgttggtattaccccagttgagatgcatgggcaaaaccaggggtcaccaacctctgtaaagagccagagggtgaaggttttagtctttgagggacatagggtctctgccacaattcctcaactctgcctttgcagagtgaaagcagccataaataatgagcaaattatgcatgtggacatagccgtgttgtaacaaaacttttacaaaacaagtgacaggttggatttggcctatgggctgaagtttgccaagccctaggccaaatcatgaaaggcaaagctaaygaagcatggtagaaaaaggtcaaaacttgagtctagctgtgggtttcaaaatgaactccttatattgtcagtactatatccagagcctgaaagaaaacagaaaataaggccctagaaggcaaaaaggtttaaagaccactgggagaggtgacggtaatatacagggaatacgattacatgttttatcataaag

SEQ ID NO: 237100 - DNA, 495 bp, Homo sapiens
taagtttttgtactgagtgttggtattaccccagttgagatgcatgggcaaaaccaggggtcaccaacctctgtaaagagccagagggtgaaggttttagtctttgagggacatagggtctctgccacaattcctcaactctgcctttgcagagtgaaagcagccataaataatgagcaaattatgcatgtggacatagccgtgttgtaacaaaacttttacaaaacaagtgacaggttggatttggcctatgggctgaagtttgccaagccctaggccaaatcatgaaaggcaaagctaacgaagcatggtagaaaaaggtcaaaacttgagtctagcygtgggtttcaaaatgaactccttatattgtcagtactatatccagagcctgaaagaaaacagaaaataaggccctagaaggcaaaaaggtttaaagaccactgggagaggtgacggtaatatacagggaatacgattacatgttttatcataaag

SEQ ID NO: 237101 - DNA, 435 bp, Homo sapiens
tctgggcctggagaggctgccrggaggtaggagctgggccaaaagatgtaagcacatttgcatttattaggcactttatttccattattacactgtaatatataataaaataattatagaactcaccataatgtagaatcagtgggcgtgttaagcttgttttcctgcaactggatggtcccacctgagcgtgatgggagaaagtgacagatcaataggtattagattctcataaggacagcgcaacctagatccctcacatgcacagttcacaacagggtgcgttctcctatgagaatctaatgctgctgctgatctgagaaggtggagctcaggcgggaatgtgagcaaaggggagtggctgtaaatacagacgaagcttccctcactccctcactcgacaccactcacctcctgctgtgtggctccttgcgg

SEQ ID NO: 237102 - DNA, 435 bp, Homo sapiens
tctgggcctggagaggctgccaggaggtaggagctgggccaaaagatgtaagcacatttgcatttattaggcactttatttccattattacactgtaatatataataaaataattatagaactcaccataatgtagaatyagtgggcgtgttaagcttgttttcctgcaactggatggtcccacctgagcgtgatgggagaaagtgacagatcaataggtattagattctcataaggacagcgcaacctagatccctcacatgcacagttcacaacagggtgcgttctcctatgagaatctaatgctgctgctgatctgagaaggtggagctcaggcgggaatgtgagcaaaggggagtggctgtaaatacagacgaagcttccctcactccctcactcgacaccactcacctcctgctgtgtggctccttgcgg

SEQ ID NO: 237103 - DNA, 448 bp, Homo sapiens
ttgttttcctgcaactggatggtcccacctgagcgtgatgggagaaagtgacagatcaataggtattagattctcataaggacagcgcaacctagatcyctcacatgcacagttcacaacagggtgcgttctcctatgagaatctaatgctgctgctgatctgagaaggtggagctcaggcgggaatgtgagcaaaggggagtggctgtaaatacagacgaagcttccctcactccctcactcgacaccactcacctcctgctgtgtggctccttgcggctccatggctcaggggttggggacccctgctcaagtgcatccgaaacgacccttcccacaccagtcttcacagtggtcaagtgcagcaaccacttagctcccaaggcatgtgcctcagctggcatttcgtcacaatcaacagtaagtggtagcttgagtcactgtgagg

SEQ ID NO: 237104 - DNA, 435 bp, Homo sapiens
tctgggcctggagaggctgccaggaggtaggagctgggccaaaagatgtaagcacatttgcatttattaggcactttatttccattattacactgtaatatataataaaataattatagaactcaccataatgtagaatcagtgggcgtgttaagcttgttttcctgcaactggatggtcccacctgagcgtgatgggagaaagtgacagatcaataggtattagattctcataaggacagcgcaacctagatccctcacatgcacrgttcacaacagggtgcgttctcctatgagaatctaatgctgctgctgatctgagaaggtggagctcaggcgggaatgtgagcaaaggggagtggctgtaaatacagacgaagcttccctcactccctcactcgacaccactcacctcctgctgtgtggctccttgcgg

SEQ ID NO: 237105 - DNA, 435 bp, Homo sapiens
tctgggcctggagaggctgccaggaggtaggagctgggccaaaagatgtaagcacatttgcatttattaggcactttatttccattattacactgtaatatataataaaataattatagaactcaccataatgtagaatcagtgggcgtgttaagcttgttttcctgcaactggatggtcccacctgagcgtgatgggagaaagtgacagatcaataggtattagattctcataaggacagcgcaacctagatccctcacatgcacagttcacaacagggtgcgttctcctatgagaatctaatgctgctgctsatctgagaaggtggagctcaggcgggaatgtgagcaaaggggagtggctgtaaatacagacgaagcttccctcactccctcactcgacaccactcacctcctgctgtgtggctccttgcgg

SEQ ID NO: 237106 - DNA, 448 bp, Homo sapiens
ttgttttcctgcaactggatggtcccacctgagcgtgatgggagaaagtgacagatcaataggtattagattctcataaggacagcgcaacctagatccctcacatgcacagttcacaacagggtgcgttctcctatgagaatctaatgctgctgctgatctgagaaggtggagctcaggcgggaatgtgagcaaaggggagtggctgtaaatacagacgaagcttccctcactccctcactcgacaccactcacctcctgctgtgtggytccttgcggctccatggctcaggggttggggacccctgctcaagtgcatccgaaacgacccttcccacaccagtcttcacagtggtcaagtgcagcaaccacttagctcccaaggcatgtgcctcagctggcatttcgtcacaatcaacagtaagtggtagcttgagtcactgtgagg

SEQ ID NO: 237107 - DNA, 448 bp, Homo sapiens
ttgttttcctgcaactggatggtcccacctgagcgtgatgggagaaagtgacagatcaataggtattagattctcataaggacagcgcaacctagatccctcacatgcacagttcacaacagggtgcgttctcctatgagaatctaatgctgctgctgatctgagaaggtggagctcaggcgggaatgtgagcaaaggggagtggctgtaaatacagacgaagcttccctcactccctcactcgacaccactcacctcctgctgtgtggctccttgcggctccatggctcaggggttggggacccctgctcaagtgcatccraaacgacccttcccacaccagtcttcacagtggtcaagtgcagcaaccacttagctcccaaggcatgtgcctcagctggcatttcgtcacaatcaacagtaagtggtagcttgagtcactgtgagg

SEQ ID NO: 237108 - DNA, 417 bp, Homo sapiens
ttaaatgctacaaagacaatctcacaggaagatgggatgtagaatgataaggctctcagaatagtaagagaaactattgcttcttacgatgtttgtctttctttgtatcagtgctgagtctgcagtgcttcagaggcagctttcattttataaaaatctatgatttctccttccagttgttttttctcttcctcgagcctccttatctcctcctgttgaatcattttaagatgctcgaayttgtcctgcaactgtgaaaccaatgtgcagttgtgacaccaaagcagtgtggctgaacacccaaaagaatatgcttttttctgattatcaaacaaacctaaatcatcacagtagagcacgatcttaataacaatctcaaaaactcaggagtaaacactcagatatggaatttttctt

SEQ ID NO: 237109 - DNA, 417 bp, Homo sapiens
ttaaatgctacaaagacaatctcacaggaagatgggatgtagaatgataaggctctcagaatagtaagagaaactattgcttcttacgatgtttgtctttctttgtatcagtgctgagtctgcagtgcttcagaggcagctttcattttataaaaatctatgatttctccttccagttgttttttctcttcctcgagcctccttatctcctcctgttgaatcattttaagatgctcgaatttgtcctgcarctgtgaaaccaatgtgcagttgtgacaccaaagcagtgtggctgaacacccaaaagaatatgcttttttctgattatcaaacaaacctaaatcatcacagtagagcacgatcttaataacaatctcaaaaactcaggagtaaacactcagatatggaatttttctt

SEQ ID NO: 237110 - DNA, 452 bp, Homo sapiens
acattttacaaatgcaatttacttggtatcctaacatgccatgtcataataattattgaggcttttcttctctgctgcattggtctaatgaatgtggctagaaaaatatgggtgcccatgtagcctcctggaagcacctgtatgacttttctagaagcgaggttcctggataaagatgaatttttaaaagctggaatgaatgagcagcaatagcagraggagaaaagtgagtgagggctctccaagaagccatctggcaggctaagggttctgagggaagctctggtttcagaagcaactcaggaattacttctgtcatattaggatgggatggtaggagattgggaactctagggactagaggtcatttaatttcctgtctacaatccttagaagaggttttgagacttgcaacctaggaccttaactaatcatcttccctcagaattgat

SEQ ID NO: 237111 - DNA, 533 bp, Homo sapiens
atttttaaaagctggaatgaatgagcagcaatagcaggaggagaaaagtgagtgagggctctccaagaagccatctggcaggctaagggttctgagrgaagctctggtttcagaagcaactcaggaattacttctgtcatattaggatgggatggtaggagattgggaactctagggactagaggtcatttaatttcctgtctacaatccttagaagaggttttgagacttgcaacctaggaccttaactaatcatcttccctcagaattgatagaattctttattatacatgttaatatcagattagtcaggatgggctagattatgctgtgttaacagccattctctaaatctctgtggctcaacagggagctctgcctgtcatggtcacttgggacccaggctttgggtataaggctacagcacatggaaaacgtatgaatgtctctcagattcttaaagcttctgctggaagtgacatgtcattctgctcacagttcattggctaaatgagtcacgtggctctctctaa

SEQ ID NO: 237112 - DNA, 526 bp, Homo sapiens
gaatttttaaaagctggaatgaatgagcagcaatagcaggaggagaaaagtgagtgagggctctccaagaagccatctggcaggctaagggttctgagggaagctctggtttcagaagcaactcaggaattacttctgtcatattaggatgggatggtaggagattgggaactctagggactagargtcatttaatttcctgtctacaatccttagaagaggttttgagacttgcaacctaggaccttaactaatcatcttccctcagaattgatagaattctttattatacatgttaatatcagattagtcaggatgggctagattatgctgtgttaacagccattctctaaatctctgtggctcaacagggagctctgcctgtcatggtcacttgggacccaggctttgggtataaggctacagcacatggaaaacgtatgaatgtctctcagattcttaaagcttctgctggaagtgacatgtcattctgctcacagttcattggctaaatgagtcacgtggc

SEQ ID NO: 237113 - DNA, 558 bp, Homo sapiens
gaatttttaaaagctggaatgaatgagcagcaatagcaggaggagaaaagtgagtgagggctctccaagaagccatctggcaggctaagggttctgagggaagctctggtttcagaagcaactcaggaattacttctgtcatattaggatgggatggtaggagattgggaactctagggactagaggtcatttaatttcctgtctacaatccttagaagaggttttgagacttgcaacctaggaccttaactaatcatcttccctcagmattgatagaattctttattatacatgttaatatcagattagtcaggatgggctagattatgctgtgttaacagccattctctaaatctctgtggctcaacagggagctctgcctgtcatggtcacttgggacccaggctttgggtataaggctacagcacatggaaaacgtatgaatgtctctcagattcttaaagcttctgctggaagtgacatgtcattctgctcacagttcattggctaaatgagtcacgtggctctctctaacttcaaggatggtatgaaattgc

SEQ ID NO: 237114 - DNA, 561 bp, Homo sapiens
aatttttaaaagctggaatgaatgagcagcaatagcaggaggagaaaagtgagtgagggctctccaagaagccatctggcaggctaagggttctgagggaagctctggtttcagaagcaactcaggaattacttctgtcatattaggatgggatggtaggagattgggaactctagggactagaggtcatttaatttcctgtctacaatccttagaagaggttttgagacttgcaacctaggaccttaactaatcatcttccctcagaattgatagaattctttattatacatgttaatatcagattagtcaggatgggctrgattatgctgtgttaacagccattctctaaatctctgtggctcaacagggagctctgcctgtcatggtcacttgggacccaggctttgggtataaggctacagcacatggaaaacgtatgaatgtctctcagattcttaaagcttctgctggaagtgacatgtcattctgctcacagttcattggctaaatgagtcacgtggctctctctaacttcaaggatggtatgaaattgcaatc

SEQ ID NO: 237115 - DNA, 521 bp, Homo sapiens
aatttttaaaagctggaatgaatgagcagcaatagcaggaggagaaaagtgagtgagggctctccaagaagccatctggcaggctaagggttctgagggaagctctggtttcagaagcaactcaggaattacttctgtcatattaggatgggatggtaggagattgggaactctagggactagaggtcatttaatttcctgtctacaatccttagaagaggttttgagacttgcaacctaggaccttaactaatcatcttccctcagaattgatagaattctttattatacatgttaatatcagattagtcaggatgggctagattatgctgtgttaacagccattctctaaatctctgtggctcaacakggagctctgcctgtcatggtcacttgggacccaggctttgggtataaggctacagcacatggaaaacgtatgaatgtctctcagattcttaaagcttctgctggaagtgacatgtcattctgctcacagttcattggctaaatgagtcacg

SEQ ID NO: 237116 - DNA, 477 bp, Homo sapiens
gccatctggcaggctaagggttctgagggaagctctggtttcagaagcaactcaggaattacttctgtcatattaggatgggatggtaggagattgggaactctagggactagaggtcatttaatttcctgtctacaatccttagaagaggttttgagacttgcaacctaggaccttaactaatcatcttccctcagaattgatagaattctttattatacatgttaatatcagattagtcaggatgggctagattatgctgtgttaacagccattctctaaatctctgtggctcaacagggagctctgcctgtcatggtcacttgggacccaggctttgggtataaggctacagcacatggaaaacgtatgaatgtctctcagattcttaaagcttctgctggaagtgacatgtcattctgctcacagttcattggctaaatgagtcacrtggctctctctaacttcaaggatggt

SEQ ID NO: 237117 - DNA, 582 bp, Homo sapiens
ctctgggcgtcctgtggtggctaccagaggctttggtgagtcattgtcaacccagtggctagagaagtgctggaatgcccctcttaaatacagaaccacgtttgtccttcagaatggctgcttgaacgaatttattgctcaacttgaaaggccattttttataacccactgcagttgtgcttcatgkgtttctccacctatcctgtgaagtgtattgggaaattaattttgtagatttcctcacactgcagtgactagggaaatcacccattcgttattatctaatgaggagaaagtggaaacatctagaagcactgctcccatcctcctccccagcccacacagacacctacctcaggccctccctgtcccaggtgagcagagggccccaccttcagaggttgcctcccttccaccttcaccaatcctatgaccagattatccccaaggaaatgtcaatttccaggcagcaagggaatcatataaagataagatcattgagagatttttttcctccgtgattggcagtttatattttcttgggtctacaaatctgacagcatttattaaattttctagttt

SEQ ID NO: 237118 - DNA, 582 bp, Homo sapiens
ctctgggcgtcctgtggtggctaccagaggctttggtgagtcattgtcaacccagtggctagagaagtgctggaatgcccctcttaaatacagaaccacgtttgtccttcagaatggctgcttgaacgaatttattgctcaacttgaaaggccattttttataacccactgcagttgtgcttcatgggtttctccacctatcctgtgaagtgtattgkgaaattaattttgtagatttcctcacactgcagtgactagggaaatcacccattcgttattatctaatgaggagaaagtggaaacatctagaagcactgctcccatcctcctccccagcccacacagacacctacctcaggccctccctgtcccaggtgagcagagggccccaccttcagaggttgcctcccttccaccttcaccaatcctatgaccagattatccccaaggaaatgtcaatttccaggcagcaagggaatcatataaagataagatcattgagagatttttttcctccgtgattggcagtttatattttcttgggtctacaaatctgacagcatttattaaattttctagttt

SEQ ID NO: 237119 - DNA, 582 bp, Homo sapiens
ctctgggcgtcctgtggtggctaccagaggctttggtgagtcattgtcaacccagtggctagagaagtgctggaatgcccctcttaaatacagaaccacgtttgtccttcagaatggctgcttgaacgaatttattgctcaacttgaaaggccattttttataacccactgcagttgtgcttcatgggtttctccacctatcctgtgaagtgtattgggaaattaattttgtagatttcctcacactgcagtgactagggaaatcacccattcrttattatctaatgaggagaaagtggaaacatctagaagcactgctcccatcctcctccccagcccacacagacacctacctcaggccctccctgtcccaggtgagcagagggccccaccttcagaggttgcctcccttccaccttcaccaatcctatgaccagattatccccaaggaaatgtcaatttccaggcagcaagggaatcatataaagataagatcattgagagatttttttcctccgtgattggcagtttatattttcttgggtctacaaatctgacagcatttattaaattttctagttt

SEQ ID NO: 237120 - DNA, 281 bp, Homo sapiens
gagaattctgttgggcagttttatgtagagaactacatctaaagaggtcagaagtgaacttcaataaaattgaggtgaccaatgatcatcagttttaaagaggacatattttctttttctgttaaagggaacacacctatgagtcagaaagccagrcttttattttttctcgccaaagttattgtacaacctacagaagagagtgtaaacactggtctttaagatgaattgtaaagctctaaagagaataagaaaaattgtgtttcatgatttatgatgga

SEQ ID NO: 237121 - DNA, 281 bp, Homo sapiens
gagaattctgttgggcagttttatgtagagaactacatctaaagaggtcagaagtgaacttcaataaaattgaggtgaccaatgatcatcagttttaaagaggacatattttctttttctgttaaagggaacacacctatgagtcagaaagccaggcwtttattttttctcgccaaagttattgtacaacctacagaagagagtgtaaacactggtctttaagatgaattgtaaagctctaaagagaataagaaaaattgtgtttcatgatttatgatgga

SEQ ID NO: 237122 - DNA, 281 bp, Homo sapiens
gagaattctgttgggcagttttatgtagagaactacatctaaagaggtcagaagtgaacttcaataaaattgaggtgaccaatgatcatcagttttaaagaggacatattttctttttctgttaaagggaacacacctatgagtcagaaagccaggcttttattttttctcgccaaagttattgtacaacctacrgaagagagtgtaaacactggtctttaagatgaattgtaaagctctaaagagaataagaaaaattgtgtttcatgatttatgatgga

SEQ ID NO: 237123 - DNA, 611 bp, Homo sapiens
ctaagtgagtctcagtgtctgttgcagtaatattgtacatactgtaggtcttaatcataggaaattacatgcccattgccctgtgcgcggaccggagcrcacttatggggggcccgtagtcctcctttcagacatcttttgtttctctgcccaaacaagtggccttcccatagaagactgcccagagaaccctatggcaaccctaccctcttattccactttatttttcttcaaagtgtttattactccctgttgttatgttagactctatatttctgtatttgctgtcctccaacttgaaaagaacctctgagaggggagggactttcctggtcacattcacttgtcccagcacctacgatggtgcctgacatatctcaggggctccttaaatatgtattgcttgacaatgggtatcatggctcagcctcctctggggttaggaggctggaggaaagaaactttagcatgagtgcagtgagagtaaaagaatccagcagctctaatcagggaatgaatctggtgtgtaataggatctcaaggcttgactcctagtctaagaccatttctggagtttgctgacttgatccccatgcttcatcattagcact

SEQ ID NO: 237124 - DNA, 611 bp, Homo sapiens
ctaagtgagtctcagtgtctgttgcagtaatattgtacatactgtaggtcttaatcataggaaattacatgcccattgccctgtgcgcggaccggagcacacttatggggggcccgtagtcctcctttcagacatcttttgtttctctgcccaaacaagtggccttcccatagaagactgcccagagaaccctatggcaaccctaccctcttattccactttatttttcttcaaagtgtttattactccctgttgttatgttagactctatatttctgtatttgctgtcctccaacttgaaaagaacctctgagaggggagggactttcctggtcacattcacttgtcccagcacctacgatggtgcctgacatatctcaggggctccttaaatatgtattgcttgacaatgggtatcatggctcagcctcctctggggttaggaggctggaggaaagaaactttagcatgagtgcagtgagagtaaaagaatycagcagctctaatcagggaatgaatctggtgtgtaataggatctcaaggcttgactcctagtctaagaccatttctggagtttgctgacttgatccccatgcttcatcattagcact

SEQ ID NO: 237125 - DNA, 520 bp, Homo sapiens
tctcccaggatgaagacccagccaggctgtctgaagaaggggtgttcttgagtaggagggaaggtctgctccaatacgaaaaatctaacaatagcatagtccttaagagcttgagctttgaagagggagaacagacccatttaaggcacgaaaaataaaggaaactcttgagtccctccaaggaaaattccagccacctggctagcctcaagaagtagatgagcaccctgataagtaagaaggtaataatagcttaaaacaatagtcaagaaaattagagccacraactaatcttaaatgacgagttaatgggtgcagcacaccaacatggtacatgtatacatacgtaacagacctgcacgttgtgcacatgtacctaaaacttaaagtataattaaaaaaaaagaaaattagagccacaaaatgtttgtttccctatagaaactagagataacatcttaacatatgtccctgagttgttttgtagaaatccagaccccgctaaatggaaaataccacc

SEQ ID NO: 237126 - DNA, 521 bp, Homo sapiens
ctctcccaggatgaagacccagccaggctgtctgaagaaggggtgttcttgagtaggagggaaggtctgctccaatacgaaaaatctaacaatagcatagtccttaagagcttgagctttgaagagggagaacagacccatttaaggcacgaaaaataaaggaaactcttgagtccctccaaggaaaattccagccacctggctagcctcaagaagtagatgagcaccctgataagtaagaaggtaataatagcttaaaacaatagtcaagaaaattagagccacgaactaatcttaaatgacgagttaatgggtgcagcacaccaacatggtacatgtatacatacgtaacagacctgcacgttgtgcacatgtacctaaaacttaaagtataattaaaaaaaaagaaaattagagccacaaaatgtttgtttccctatagaaactagagataacatcttaacatatgtccctgagttgttttgtagaaayccagaccccgctaaatggaaaataccacc

SEQ ID NO: 237127 - DNA, 420 bp, Homo sapiens
atttaatcaaataacatcctaacaatattttaagaaataccactcagaaggcacttattctaaattattagctctttatacttaattcagtagtaaatttaccttgyagctgcttttctactcttttcagttcctgtaagatagaagaaatctcctgcagggaaagcaataacaaaaattagcctacttttagctaaatgttatcactttacaagcaatgaatttcactctcactttatttggaacacttaatattatctacatggtacttactacattaatagcaacatgatatgaaataattatgatatctagcaaacaagattcaaattaaaatatttaaactaaaatgaaatacaataactttttcagtgagatgattgtagcagatgaaaagtttaacatttactactatttaag

SEQ ID NO: 237128 - DNA, 459 bp, Homo sapiens
atataactgtctaaacaacggtttaaggtctacacaagattgtgaagtgaacctgcaggattaggagggtaaggattcccacctaggtgggctcacttgctctgccatacctgggtaggatcccagcctgcttctgtgattgtcaggaggcaccaaaaaggctaccctaggttttctgtcattcggcccaaacatttcctctgctgggcaaatgtggaagaggcattaagctggtgctcycacaactgaaaggaaagcaattctctttctgttgtggttccttcctctttggactcttttcttccattccagcctatccccttcttggaaaagctattctaccaatagcagggaagaaacagccctgtgtacctgatatgctaccctgggcacaggcgatcggaccagggatagacacctgaactgatctgggcagatgccctcttctggccattgaga

SEQ ID NO: 237129 - DNA, 551 bp, Homo sapiens
gatggagagatcttcctgggttayccagatgggcccagtctaatcacatgaattcttaaaaatggagaacctttcttagctgagtccagagagagatgtgacaatgaaagaatggtcagagaaatgtgacattgccagctttaaaaagagagaggagaggcaatgagaaaaggaatgctgatgttctctagaagatagaaaaggccaggatatggattctaccctagccgccataaagaaacatgcctgtcgacaacttgattttagttcactaaaattcatgcctgatttctgacttgtgtacactgtaagatgacaagtttgtgttattttaggtcacttagtttgtagaaatttgttacagcagtaatagaacaagcggttatccatatgaggcaaattagattggatacctatctccaatagaaatcaattcaaggtgaattccaggaaaatacttaaaacatttagattaaaaataaatgagaatttttgttacttttggtaggtcatagaaccaagaaaaacaaacattaaggagtaaaaatgaa

SEQ ID NO: 237130 - DNA, 551 bp, Homo sapiens
gatggagagatcttcctgggttatccagatgggcccagtctaatcacatgarttcttaaaaatggagaacctttcttagctgagtccagagagagatgtgacaatgaaagaatggtcagagaaatgtgacattgccagctttaaaaagagagaggagaggcaatgagaaaaggaatgctgatgttctctagaagatagaaaaggccaggatatggattctaccctagccgccataaagaaacatgcctgtcgacaacttgattttagttcactaaaattcatgcctgatttctgacttgtgtacactgtaagatgacaagtttgtgttattttaggtcacttagtttgtagaaatttgttacagcagtaatagaacaagcggttatccatatgaggcaaattagattggatacctatctccaatagaaatcaattcaaggtgaattccaggaaaatacttaaaacatttagattaaaaataaatgagaatttttgttacttttggtaggtcatagaaccaagaaaaacaaacattaaggagtaaaaatgaa

SEQ ID NO: 237131 - DNA, 575 bp, Homo sapiens
gagagatcttcctgggttatccagatgggcccagtctaatcacatgaattcttaaaaatggagaacctttcttagctgagtccagagagagatgtgacaatgaaagaatggtcagagaaatgtgacattgccagctttaaaaagagagaggagaggcaatgagaaaaggaatgctgatgttctctagaagatagaaaaggccaggatatggattctaccctagccgccataaagaaacatgcctgtcgacaacttgattttagttcactaaaattcatgcctgatttctgacttgtgtacactgtaagatgacaagtttgtgttattttaggtcacttagtttgtagaaatttgttacagcagtaatagaacaagyggttatccatatgaggcaaattagattggatacctatctccaatagaaatcaattcaaggtgaattccaggaaaatacttaaaacatttagattaaaaataaatgagaatttttgttacttttggtaggtcatagaaccaagaaaaacaaacattaaggagtaaaaatgaacatatgactacatcaaaatataaagctt

SEQ ID NO: 237132 - DNA, 575 bp, Homo sapiens
gagagatcttcctgggttatccagatgggcccagtctaatcacatgaattcttaaaaatggagaacctttcttagctgagtccagagagagatgtgacaatgaaagaatggtcagagaaatgtgacattgccagctttaaaaagagagaggagaggcaatgagaaaaggaatgctgatgttctctagaagatagaaaaggccaggatatggattctaccctagccgccataaagaaacatgcctgtcgacaacttgattttagttcactaaaattcatgcctgatttctgacttgtgtacactgtaagatgacaagtttgtgttattttaggtcacttagtttgtagaaatttgttacagcagtaatagaacaagcggttatccatatgaggcaaattagattggatacctatctccaatagaaatcaattcaaggtgaattccaggaaaatacttaaaacatttagattaaaaataaatgagaatttttgttacttttggtaggtcatagaaccaagaaaaacaaacattaaggagkaaaaatgaacatatgactacatcaaaatataaagctt

SEQ ID NO: 237133 - DNA, 527 bp, Homo sapiens
tagctatttataaattgtcatgcattgttaatgtataagagatgtagatttcatttatctttggtggagcgagatgaagcagtgaatcattgargactgaaagaaagaaaaaggtcttttcccttttctttaagaagcatcattagttaaaaacatgttagttgataccagagaactatatttaaagggacagcaataagcaaattgattactctggcgattattggagtgacattgccttttagttgtactttcacaaaaattcacaatatttgccaaagtcaagttatccattacactattaatttgtcattcttttgtttatataggcaatatctcttatctcaattggatctatctcaactgcttctaaacaagccaccatagtctctcccatttcaacaatctcttccaagtaccatttcatttcttcttttcatatttttgaaaacttttgaaaaactacctattttcctcctccatttcttgttcattccattctagtggacatggaatctgttcctcct

SEQ ID NO: 237134 - DNA, 527 bp, Homo sapiens
tagctatttataaattgtcatgcattgttaatgtataagagatgtagatttcatttatctttggtggagcgagatgaagcagtgaatcattgaggactgaaagaaagaaaaaggtcttttcccttttctttaagaagcatcattagttaaaaacatgttagttgataccagagaactatatttaaagggacagcaataagcaaattgattactctggygattattggagtgacattgccttttagttgtactttcacaaaaattcacaatatttgccaaagtcaagttatccattacactattaatttgtcattcttttgtttatataggcaatatctcttatctcaattggatctatctcaactgcttctaaacaagccaccatagtctctcccatttcaacaatctcttccaagtaccatttcatttcttcttttcatatttttgaaaacttttgaaaaactacctattttcctcctccatttcttgttcattccattctagtggacatggaatctgttcctcct

SEQ ID NO: 237135 - DNA, 417 bp, Homo sapiens
ttcagccataaaattgtgcttttcctcaaagattaatctgcctctcctctcactctatactatctctgttagctaattttatttgtgcacattkcttatactgggcattatatacacatatgcatgtgtgtacatgtgcacacacacactgtatgtggacatgtatatatatatgtgtgtgtgtgtgtatatatatagtatatatataaattacaataacataaaggtggcattttaaattagtggaaattaccctgatttgatcactacacattctatacatgtaaagaaatatcactctgtatcccaagaatatgtacaattatggtttgccaaatgaaaaagttcatacattgaaaaattttagataaatatcaaactttctctgaaactgtaactgtaaaatgtaaaaaacag

SEQ ID NO: 237136 - DNA, 218 bp, Homo sapiens
ttcccaccatgctcatttctttctttctttttgaaacaaggtcttgctttatygcccaggctggagtacactggtgcaatcacagctcacagcaacttcaacctcccaggcttaaacaatcctcccgcctcagccaccctaggaactgagactacagctgcatgccacaacacatggctttttttttttttttttttttgagacggagtctcggtcgc

SEQ ID NO: 237137 - DNA, 334 bp, Homo sapiens
gtgaaatggattgcaaatagaaagagtaataccatgtcacttaagaatacaatcatggacgakgctgccacctgctgttgggggccactgcagaagaaattccagaacactggactggagagcacctcactttccttacagctctaagtttctgactcagtgacctgattcagtaccatatacacaaagacccacttacacaaatgactgttcttcacactaggcccatggagacagggataaaattctgactttgttcagataccttctccgctactgacatctaggcattacacaattcatctcttcatacttaacctttgaagtttgctac

SEQ ID NO: 237138 - DNA, 334 bp, Homo sapiens
gtgaaatggattgcaaatagaaagagtaataccatgtcacttaagaatacaatcatggacgaggctgccacctgctgttgggggccactgcagaagaaattccagaacactggactggagagcacctcactttccttacagctctaagtttctgactcagtgacctgattcagtaccatatacacaaagacccacttacacaaatgactgttcttcacactaggcccatggagacagggataaaattctgamtttgttcagataccttctccgctactgacatctaggcattacacaattcatctcttcatacttaacctttgaagtttgctac

SEQ ID NO: 237139 - DNA, 441 bp, Homo sapiens
tgccttatattttcttcttttccttactatattttctacaataaacatgtgtttttaacaagaaaagtcttttctggtgtgctttttaattttctttgtttaagtgagagtgaggctacataactacatggctaggtagacttttagaaaacttggctgctctagaaaattgacatatcctgatttcttccatagcttggatcttgacctggagggaaatataaaaatgttgacttgaacctgaggggtgccattttcactgctgaagtagtttcatggatcatgaattggagaaatgacttcagcaacacgggtgttaaaaacagaaagcacaagtgaccyacaacagatgatggagaacaaagagcaagctgggagaagcagtggcctttaatacagaaaagaagaagtatagccacaataaatattaggcagacagca

SEQ ID NO: 237140 - DNA, 441 bp, Homo sapiens
actagaagataaatctgtcaatgacatgtcctttaagactacttagattttgttgaatttgtggatcattccttacttgagcaaatggtaaattaactttctcttttctctctctctctagctggcacactttttccagtagccattctacttggtatgcttacttatcagctgtcctccaggggcctcacattagatgtttctcttgactaaccaaacatgacacacagctgaagtcagaaaaaccagattgataatttcactcaaactattttccttcattctaacaatttactggartacacaattgtgactatttttagccataggaactcatagaaagaccaacttcattagacctacaaaatcgaattgtgtaacagtatatgcagtatgtgtaggaataaaaagcatttctcaaatatgcagtactggattttg

SEQ ID NO: 237141 - DNA, 455 bp, Homo sapiens
catactctcagttataagtgggagctaaatgatgagaactmatgaacacaaagaataaaacagacactggggtctacttgagggtggagggtgagaaaaggaagagaagcagaaaagataactattgggtactaggtttaatacctgggtgatgaaataatctgtacaataaccccctgtgacaccagtttacctatgtaacaaatgcccctaaacttaaaataaaagttaaaaaaaaaaagaaaattaaaatctccttatcctctacctggtaatatgaaaaacacatatctttcattcattcctttcaactgatgaggaaactgaggcaacgggagttagtaaaagtccacattgagatatgagacccaccactggctggacgcagtggctcacacctgtaatcccagcactttgggaggccgatgctggtggatcacctaaggtcaggagtt

SEQ ID NO: 237142 - DNA, 455 bp, Homo sapiens
catactctcagttataagtgggagctaaatgatgagaactcatgaacacaaagaataaaacagacactggggtctacttgagggtggagggtgagaaaaggaagagaagcagaaaagataactattgggtactaggtttaatacctgggtgatgaaataatctgtacaataaccccctgtgacaccagtttacctatgtaacaaatgcccctaaacttaaaataaaagttaaaaaaaaaaagaaaattaaaatctccttatcmtctacctggtaatatgaaaaacacatatctttcattcattcctttcaactgatgaggaaactgaggcaacgggagttagtaaaagtccacattgagatatgagacccaccactggctggacgcagtggctcacacctgtaatcccagcactttgggaggccgatgctggtggatcacctaaggtcaggagtt

SEQ ID NO: 237143 - DNA, 455 bp, Homo sapiens
catactctcagttataagtgggagctaaatgatgagaactcatgaacacaaagaataaaacagacactggggtctacttgagggtggagggtgagaaaaggaagagaagcagaaaagataactattgggtactaggtttaatacctgggtgatgaaataatctgtacaataaccccctgtgacaccagtttacctatgtaacaaatgcccctaaacttaaaataaaagttaaaaaaaaaaagaaaattaaaatctccttatcctctacctggtaatatgaaaaacacawatctttcattcattcctttcaactgatgaggaaactgaggcaacgggagttagtaaaagtccacattgagatatgagacccaccactggctggacgcagtggctcacacctgtaatcccagcactttgggaggccgatgctggtggatcacctaaggtcaggagtt

SEQ ID NO: 237144 - DNA, 382 bp, Homo sapiens
cagatctcctaaaactgctatatagttctgcctcactcttacaaagattcatctcttgagagttttgtgctctacccccagatgtggtctttctggttctgaagcttttgcttcagtcaccctgaattttgccagccctatgcatgctataccttggattgccaacttgccctcactgaagccagtttctctggttagaatagttgcccmaacccatgcccagtactctagtaaacaaggttctacctgggcttaggttaacttttgctcctttggccctgtgttctaccagcattccatttatctgaaactctccctcatcttaagaacttatctgttctttaatgatttactgctgcttcctgggtttgaaagaacccag

SEQ ID NO: 237145 - DNA, 382 bp, Homo sapiens
cagatctcctaaaactgctatatagttctgcctcactcttacaaagattcatctcttgagagttttgtgctctacccccagatgtggtctttctggttctgaagcttttgcttcagtcaccctgaattttgccagccctatgcatgctataccttggattgccaacttgccctcactgaagccagtttctctggttagaatagttgccccaacccatgccyagtactctagtaaacaaggttctacctgggcttaggttaacttttgctcctttggccctgtgttctaccagcattccatttatctgaaactctccctcatcttaagaacttatctgttctttaatgatttactgctgcttcctgggtttgaaagaacccag

SEQ ID NO: 237146 - DNA, 382 bp, Homo sapiens
cagatctcctaaaactgctatatagttctgcctcactcttacaaagattcatctcttgagagttttgtgctctacccccagatgtggtctttctggttctgaagcttttgcttcagtcaccctgaattttgccagccctatgcatgctataccttggattgccaacttgccctcactgaagccagtttctctggttagaatagttgccccaacccatgcccartactctagtaaacaaggttctacctgggcttaggttaacttttgctcctttggccctgtgttctaccagcattccatttatctgaaactctccctcatcttaagaacttatctgttctttaatgatttactgctgcttcctgggtttgaaagaacccag

SEQ ID NO: 237147 - DNA, 382 bp, Homo sapiens
cagatctcctaaaactgctatatagttctgcctcactcttacaaagattcatctcttgagagttttgtgctctacccccagatgtggtctttctggttctgaagcttttgcttcagtcaccctgaattttgccagccctatgcatgctataccttggattgccaacttgccctcactgaagccagtttctctggttagaatagttgccccaacccatgcccagtactctagtaaacaaggttctacctgggcttaggttaacttttgctcctttggccctgtgttctaccagcattccatttatctgaaactctccctcaycttaagaacttatctgttctttaatgatttactgctgcttcctgggtttgaaagaacccag

SEQ ID NO: 237148 - DNA, 407 bp, Homo sapiens
attgacaaaggaggcatatttctcccctggtaacccaaagatttaggtcattttcccagagactccatttccactgtgagggttcttggaaaactaagcagaggatgaggaaaagtctgtgaacaagcttgctggtctctccctgtcctacaaaagagcatacctcttctgtaaccagaaggcccttttgattagtcaaggctggacagastgagattgggggtgtgtgtgtgtgtgtgtgtgtgtgtgtgtttgtgtgtgtcttgagacagggtctcactctgtcacccaggctggagtgcagtggtgagatcagagctcactgcagcttccacttcctgggctcaagcgatcctcctatttcatcctccagagtagctgggactatacgaatgttttaccgcacc

SEQ ID NO: 237149 - DNA, 545 bp, Homo sapiens
ttctcctccccctttgctttttgctctcttgttagtatattaatagttttcactctctgaatcttttttccccatttctttggcagacatttttacttgtcttggaagattaagtgaagatctgtttttaagactctttgaaaaggtacagtatgggtgacagtcttggctaatggtaacatccatggatctggggtcagcgtgagctggaatcagttcaaattagcaaatcactggcactcagtggcaggaatacaagtgactgcaaagtgttaaacacatctggaaagggatactgacatcatcctcataatctgtggggagttcacatagccagttaagacccattcytctttgaccctgtaaagattctttaaagactaatacccttagtggttttctagccagcttgcctgctcatttatctttgaggacgacatgccttgtggagctccacaggccccagaggggtatggattctgcatttgaaagtgctgaagctgagagactgggtcttggtggaccccaagaggtctgtttctcct

SEQ ID NO: 237150 - DNA, 545 bp, Homo sapiens
ttctcctccccctttgctttttgctctcttgttagtatattaatagttttcactctctgaatcttttttccccatttctttggcagacatttttacttgtcttggaagattaagtgaagatctgtttttaagactctttgaaaaggtacagtatgggtgacagtcttggctaatggtaacatccatggatctggggtcagcgtgagctggaatcagttcaaattagcaaatcactggcactcagtggcaggaatacaagtgactgcaaagtgttaaacacatctggaaagggatactgacatcatcctcataatctgtggggagttcacatagccagttaagacccattcctctttgaccctgtaaagattctttaaagactaatacccttagtggttttctagccagcttgcctgctcatttatctttgaggacgacatgccttgtggagctccacaggccccagaggggtatggattctgcatttraaagtgctgaagctgagagactgggtcttggtggaccccaagaggtctgtttctcct

SEQ ID NO: 237151 - DNA, 562 bp, Homo sapiens
taccctggactcatacctgaaagcagtgttcaaccttagcaaaatctccaaccagcgcatgaacaattttctacatcacaacgacctggttttcaaattcagctctcaaggccaaatcttttctaaatttaaccaagaacttcatcagttcacaggttagtcctgggatttacatggccagagtccactatgagacatctcattgtctgagacattgactctggttatggctgcttctactatggacatatggcatggtcatcattcagaaatgctaatttgtacctcttaaatgaatgtgctacataaatgctatgtagagggtattatattattgactatatatagctgyattttaatgtttggagttagaactaatacaataagcaaaacatctgtctattttgcttcatttcttatggagcagcttcagatgtgaagaaaagtaaaagtgaaaggaagtacatttctgtaggaagacagagcaggacatctgagcaagtactgaacatgagtgggtactgcctactatgcacagttcatcaaacaacacagcacacca

SEQ ID NO: 237152 - DNA, 562 bp, Homo sapiens
taccctggactcatacctgaaagcagtgttcaaccttagcaaaatctccaaccagcgcatgaacaattttctacatcacaacgacctggttttcaaattcagctctcaaggccaaatcttttctaaatttaaccaagaacttcatcagttcacaggttagtcctgggatttacatggccagagtccactatgagacatctcattgtctgagacattgactctggttatggctgcttctactatggacatatggcatggtcatcattcagaaatgctaatttgtacctcttaaatgaatgtgctacataaatgctatgtagagggtattatattattgactatatatagctgcattttaatgtttggwgttagaactaatacaataagcaaaacatctgtctattttgcttcatttcttatggagcagcttcagatgtgaagaaaagtaaaagtgaaaggaagtacatttctgtaggaagacagagcaggacatctgagcaagtactgaacatgagtgggtactgcctactatgcacagttcatcaaacaacacagcacacca

SEQ ID NO: 237153 - DNA, 492 bp, Homo sapiens
tcatggggatctttgcaatcatctagtatctaaagaagtttcctctttttaattcagtgttatttttcacatagtatttattgtaatatttattacctacataatattgcatctatgcacataatgttccacgcacctagttgttcaaacaagacagctcagagtcaacttttactaccttttcccttaaccttgcatttcaataatacttaaatcctgtcaataatctctggtttttttcaatatcaataaaatgatgatttattgctgccttccaacacaagaaaattattttctctgcttccattctagatcacctaagccctgtaatccagagtcttaaaatccccckacccatacaaaagctacatgttgaaaatgtgagaatcagcatgccttctaatttttcccattcaggtcctttctgtttcatgttcctttcactttcctgatcttgtggcttttgcggctgctgcgggtaactttctgggc

SEQ ID NO: 237154 - DNA, 574 bp, Homo sapiens
gtaagtgcctgcagttcccgctactcaggaagctactcgggaggataacttgagctcaagagttagatgttacggtgagctatgatggtgccactgcacggcagcctaggtgacaaagcaagatcctgcctctaaaataaacaaataaataaacagaagagttgaaagcatgatctcaaaaagttatttgcacacccatgttcatggcagcatcattcacaatatctaagaggtggaagtaacccgaatatccactgacagatgaatgaataaacaaaatgtggcatatgcatacaatggaatgttattcagtctttaaaatgaaggaaatcctgttacatgctgcaacatggatgaatcctgagggcactatgctaagtgaaataaaccagtcacaaaaagacaaatacagtatgawttcacttatatgaaatatctaaagtaaccaaattcatagaaacagaaagtagaaaggtggttgcccgcagcctggggaagaaggaaatgaggagtggttaatgggaatagagtttcagttttgcaaggtgaaaaagttctggagatcctgtcactc

SEQ ID NO: 237155 - DNA, 610 bp, Homo sapiens
aataggcttcatttctggaatgcaaggttgattcaatatatgcaaatcaatgaatgtgattcactatataaacagaattagaaacaaaaatcaaatgatcatatcaatagacacagagaaagctttcgataaaatccagcatcccttcatgataaaaaccctctacaaactaggcattgaagaaacatacctcaaaacaataagagccatctatgacaaacccacaaacaacatcatactgaatggactaaaacttgaacaatttcccttgagaactggaagaagacaataatgtccactcttaccactcttgtttaccataatactggaagtcatagataatgcaataacacaagaagaataaataaaatgtgtcaaataggaaaagaagtcaaattacggctctttgctcatgatattattctacctctagaaaaaccctaaaaactcctccaaaaggctcctggaacagataaatgacttcagtaaaatttcaggacacaaaatcaatatacactatcagtagcaattttatactccaataaaaattcagatggaagccaaattaaaaatgcartcccatttacaatagccatacacacaaaaagac

SEQ ID NO: 237156 - DNA, 408 bp, Homo sapiens
gaattcttttggctttcctggtatgtttctgcagtagttcctggagtaaaagttcacgaygtgagtctccacatactgctttgtccacctgagtgggagctgcaagttagtcctgccacctatccgccattttctttttgcatggagattttttattaggtgcttaactttatgaaaattgcatgttttttattatttctataaaaaatgtcaagcttcgttttggcaagcaataattgcagatgagtttgactcttttgagttctgctttaaaagcatttctaaagaaagcctggagaagcctccactccagtgatattttagttgtactgggaaggtatgatccacttggagtctcttctcaattccaggtgatcagagaggattctctcctctggctgactagtg

SEQ ID NO: 237157 - DNA, 603 bp, Homo sapiens
actaatacatcagtgtgactggcccagcaattgagtttccatggtttctgatgtttagctgttcccatcattagcttactgtaataatttgaagaataaaaagacttgcaaaatccaacactgggatgcactgaactgcatcatcttaaggatttaaaatgtaatttctgaggaataaaaaaggatataattgcagccctgaaacaactaagcagagtgttctatgcaaatattagagatccagtcaatgaaatattttgtcattcaaaggtttcatacayaaaccattaggacagaattatatgaatcattgttttatgaggaatttttataaattccttcttttcatgtgtttgaattagtagcatcaaaatattaaaagattattatccaaagagtgctgcatccctatctcaatagacaaaattacaaagcctagggctaaacttacatattgtatattaaagaaaatcattcacaaaagaatctaaatggagtgtgagtgcactaagaacacccagggaagatatatacatacatggaagtaaatatatatgtgtatgtatgatatgtacatacataatcacacatatatgactatac

SEQ ID NO: 237158 - DNA, 650 bp, Homo sapiens
tcgatatagatatatcgatatatatatatatctgattttatggtcataattttcttctaaaaatatgtaacagattcttctctcaaaagataaagagaggtgttaagttggactgaaattttgcagagatagattggagcagtttttagaatagaggtcatgaatccagagagcagagttgygaatatatgcactgtatataccctgttctagaaaggtagcccacagacctgtgaaggtccatagacttccttccgcaaatctttgagttactaccaaccatgtaattccatgcctcgaaaaacagcacagaatttgagcacaagatgaaatagcagtagtgatgttttgtgagaatgactctcacacacttttcaatgcaatggcactaagtaaagatcttacaacttaattcattattgttctcttcaacaaatattcagttaatatctacatggtctcaacatctaaaaactcttcagcttaatatttctactttattcataactttctattttctcagatacaactgtgtcctgaggttgtattaaaatatgattttaagactagaaacaaattatttttactgaagcaagatagaaattttaaagttcacttggcagcagtagtactctccagaaggttttgtt

SEQ ID NO: 237159 - DNA, 414 bp, Homo sapiens
atttaaactttacttctttctgcctttactgactgtcccatctggtatgggagcctcatatttttccttgtctatatctcagtacttattaccataaacagttcctgtttaattatttatgtctacaccagtctataaatcctttccagccagacatcttgkctatgtattccatgtctaggacaatgcttagtcaatgctcattgatttgattggatggattaatggaaacaccagtttcagaggttagcggactccataattgataagcattttccagaaaaatctcatctagtcagtaagcaattgtttctctcctgctgcataatagaaaataatgaacatttttgaaagctatggtgtgttcaattctgtgctgttcattctttaggttagtgttagtctcatttacag

SEQ ID NO: 237160 - DNA, 617 bp, Homo sapiens
taagtttaatcagtggtcttacaatatgcagtaaaccatcctgtaaacagatgtgctatcatccaggttttgttcttccatttacagtgcaaggcatggtagatttagcataattcttaagggccctaggattttcaaaatggtaaatgaccattggcttcaacttaatttcaccacctgtattggaccctagcaagattgtcagcttatcctttgaagctttgaagccaggcatttgcatcttcttccagtaaatggctattttkcatacatggaaaattgtttagtgcagccacattcatcaatcatctcagttagatcttctgggtaacttgctgcagcttctacatcagcccttgctgctttaccttgcatttttatgttatagaaagagcttctttcatcaaaactcaagactcaacctctgccagcttcaaatttttcttctgcagcttcttcacctctcttagccttcatagaactaacgaaaattaggatgtttcttggaattaggctttggattaaggcaatgttgtggctggtttgatcttctatccagaccactactactttctccattatcagcaataaggctgtctttctttcttatcactcac

SEQ ID NO: 237161 - DNA, 573 bp, Homo sapiens
agatctacagcaatgagaactttactttgttcataaaatagaaatataaaaattgaatagatagcatttctccacaaatttatgtcaattattttgtggaaattgacaagctrtgtctaaaatttatatagaaatgcatttagttaaatcaaccaaggcaaacttggaaaagtaaagacatgcttagctattggaaaacaactgggaaaatatataaaaggtatatagattgagaagaaataaataacactgtctttgttcgcagacattattgtctacgtaggaaacccaaaaggataggcagaaaacctcctggaactaagcagcagttacagcagggttgcagaatacaagcttaagacaaagcagtaaattgctttcctatagagcagtgatgaagaagtatatttgaaattaaatatcagtactctttacaaaataatgccccaaataaaatacttaagtataaatattacaaaatatgtacgaggttctatataagggaaactataaaatgttgataaaaaaatcaaggaaccaaataaatggggagatactttatgttcatggata

SEQ ID NO: 237162 - DNA, 560 bp, Homo sapiens
tatgagaccaactattcacctttttataaatttctaattccacagatagrgggttgccaaataaaacagaatgcccagttaaattcaaatttcagggaaagagtaaatacttttgtataggcaaatcttaaacagtacaaaaagcatacacatgctaaaaaaattcattatttttccgaaattcaaatttagctgaatatcctgtatttttaagttaagcaactctacattgattgtcccatgttttttgttgctatcctccctctttaaacacacctggtcaatcaccaaatactgctgtgttcactttgtaaattattacccagtctactctgtatttctaaacagctctattgccactacatttgttataaacactccaatctctgtcttgattacttaattaaaatttgtctcttttctccaaagtgctgccaagattagctcagacttgatcatgttacttccttgaataataccttcatatggtttctagttatgcctagatcccaagtgaaatccctacactgggcttataacgcctccatgatatatggtgt

SEQ ID NO: 237163 - DNA, 560 bp, Homo sapiens
tatgagaccaactattcacctttttataaatttctaattccacagatagagggttgccaaataaaacagaatgcccagttaaattcaaatttcagggaaagagtaaatacttttgtataggcaaatcttaaacagtacaaaaagcatacacatgctaaaaaaattcattatttttccgaaattcaaatttagctgaatatcctgtatttttaagttaagcaactctacattgattgtcccatgttttttgttgctatcctccctctttaaacacacctggtcaatcaccaaatactgctgtgttcactttgtaaattattacccagtctactctgtatttctaaacagctctattgccactrcatttgttataaacactccaatctctgtcttgattacttaattaaaatttgtctcttttctccaaagtgctgccaagattagctcagacttgatcatgttacttccttgaataataccttcatatggtttctagttatgcctagatcccaagtgaaatccctacactgggcttataacgcctccatgatatatggtgt

SEQ ID NO: 237164 - DNA, 612 bp, Homo sapiens
gaagtggactaaatttgtttttctaagaacatcatggatctcatgagaatttgaaaagtataagtgttactacttagaaaaattttaccacaatttgctgtatctagataagaaattgtgtgtgtgtgtgtgtgtgtgtgtgtgtgtgtgtgtagaagagaaattcaatgactataaatwacgtatttggaacaattgggtagttttgatatggactatagcatattagataaaagtaatgtactcatattatatttcttgaatagttggataactatagttgtgtagaaaatatgttcttaggggataggtgctgaagtatttagggtatgtagtatggtatctacaactttcaaatgtgtctgtgtgtgtaatggggggatgacaaacttaattggtggatctggtaaaaggtatatgaatgttcttttcacttatttgacaaactctgcaggcatctcaaagtgtacatatctaccaggtttcctagatcaagaaataatgaaatctgtcactcctttgtcaaattgaaaaacactgctttctctttcaatacacatatttaatcagtgctcaattgctgcagatttttagctcttaaatgtgttcaaa

SEQ ID NO: 237165 - DNA, 612 bp, Homo sapiens
gaagtggactaaatttgtttttctaagaacatcatggatctcatgagaatttgaaaagtataagtgttactacttagaaaaattttaccacaatttgctgtatctagataagaaattgtgtgtgtgtgtgtgtgtgtgtgtgtgtgtgtgtgtagaagagaaattcaatgactataaattacgtatttggaacaattgggtagttttgatatggactatagcatattagataaaagtaatgtactcatattatatttcttgaatagttggataactatagttgtgtagaaaatatgttcttaggggataggtgctgaagtatttagggtatgtagtatggtatctacaactttcaaatgtgtstgtgtgtgtaatggggggatgacaaacttaattggtggatctggtaaaaggtatatgaatgttcttttcacttatttgacaaactctgcaggcatctcaaagtgtacatatctaccaggtttcctagatcaagaaataatgaaatctgtcactcctttgtcaaattgaaaaacactgctttctctttcaatacacatatttaatcagtgctcaattgctgcagatttttagctcttaaatgtgttcaaa

SEQ ID NO: 237166 - DNA, 539 bp, Homo sapiens
cttttggacttcgtttagcatttcttccttttaattttgagatgggacctttccttattagttgttggttttaatttatttgaatacaagtatttaaatttacaaattttgctgagtactgctttatatattttccataatttttactatatttatcatttatttttatatataaacawtttccttatggtgttttcttataactatgcttatttggatgaaccttttaaaatttctaagcttatttaaagtttttattgatttctttcttaattttcataagagaacatgataccaactctttgacatgtttgatattatctttctagcttaaaatgtttgccattttcataaatgttttatgtatattaaaaaacatggactctctcattgtagatacaaaatcttctgtacttcatcacattaaaactattgtggttttaacaccttctatatttgtattagtatttttacttgctgtgtctatcatttaataagaagtgctgaaagtatgaatttgtacatgtagtttattgaca

SEQ ID NO: 237167 - DNA, 533 bp, Homo sapiens
cagtgggttctgaatgggaacaagagcctatgtttctaataaattattgtgtgatgttaatgctattcttcctcagactacacattgaagaccatggatatggggcaataaaaaagaacaaacaattgctatattcaacaaattgaatggatatcatatacataatgtataaagaaggcaggcatagaaaagtaaatactgtgtgactccatttatataagatttaaacataggcaaaactaatcgccagtggtagcaatcaaaagtggtaacatttgcaagggtgataataattggcaggaaaaatgaagaggcttctggagaactagtaatgttcaatttcttgattctggtaattatgtacatgtatttagacttcmtgttaatacaatgagctgtacagttttgactgttaaactatatatatatatatatatatatatatatatatatatgcatgcacatatataatatatatacatagcatctatataaagtttacaaagtaaatgtctctgtttgtgcttaatctg

SEQ ID NO: 237168 - DNA, 568 bp, Homo sapiens
aaaactttcttaaaacctcaaatgaaggaaaaccttttttttttctcagtttttcacaaactgattatgactcattgtccttgggagtaccagaatttttttctgttatgatgcaagcaattgcatttggctgtcttgtgaagccttgctctagggcatctcctgcagatcacctggcttaaaaaaatctgagtaaaacaaacaaattgcattttttcacagtgctggagagacaagatttctcttttcagtttgctgcttttcatatctgtgagttcaccttgatttctggctttctttcttagctcctatgagttgtgtgggctttggtagcaaggaggcatgccagcacattgagagggtctctgctccctgccatcttrggacggctcaatgacaccagcgcctacactacagcagtttgcaaagaagcatgtgagacctcaaaggctgtcagatcgtcttcctttacatctgtcagacgtggcactgtttctcacgtggaaagggccggcttctcaaaatggaaggattcccaaatgtcaccttcttgtgtcttcctggaact

SEQ ID NO: 237169 - DNA, 607 bp, Homo sapiens
catgatgacagaattgatcaaatccatstataacaatactaaccttaaatgcaaatgagctaaatgccccaattaaaagacacaaagtggcaatctggataaagaaccaaggcccattggtatgctgtcttcaagagacccatctcacatgcaataacacacatgggctcaaaataaaagggatgggattctgggaaagatggcaaataggagacagtgctgatctgaagctcccactaggagagacagaacagtgcatggagactcacatcatggacttttccttgaggaaacactacaggagtataccaagaaaatggaaagaaataacagattctttgaaagaactggcaggctgctgcaaattccacgagacaggcaaaaactctggtgctctctcagaagtgccacctcctggacagggaccaaccaacttaggacattacagcagctcatgacagaacaactctgctccaaggaagaagaatactatagccaattccactgcctgcaacatcttggataaccagtggtcctgtgtctgtctacatgaaaacttcactgctagcataatcagcattcaagaaagtcagcacactaaatactg

SEQ ID NO: 237170 - DNA, 607 bp, Homo sapiens
catgatgacagaattgatcaaatccatgtataacaatactaaccttaaatgcaaatgagctaaatgccccaattaaaagacacaaagtggcaatctggataaagaaccaaggcccattggtatgctgtcttcaagagacccatctcacatgcaataacacacatgggctcaaaataaaagggatgggattctgggaaagatggcaaataggagacagtgctgatctgaagctcccactaggagagacagaacagtgcatggagactcacatcatggacttttccttgaggaaacactacaggagtataccaagaaaayggaaagaaataacagattctttgaaagaactggcaggctgctgcaaattccacgagacaggcaaaaactctggtgctctctcagaagtgccacctcctggacagggaccaaccaacttaggacattacagcagctcatgacagaacaactctgctccaaggaagaagaatactatagccaattccactgcctgcaacatcttggataaccagtggtcctgtgtctgtctacatgaaaacttcactgctagcataatcagcattcaagaaagtcagcacactaaatactg

SEQ ID NO: 237171 - DNA, 612 bp, Homo sapiens
aactctataaaagcacactttacctcttaatcgtgaaaggtttctcagagactmaaaaggggtgctcgtatttcacatttgagaataatgagattcaattcacaacagcagaagactcccagttttttaagaatattctgagactccattcactaactctaataagaaaaatgtgttatattctgttctattgctaacactgtggtaggcaatttgtaatagaactaagggacagttcttattcctcaaatttgtgcaaatagtttaagaaaaaagatctgttgaaaataaaatatttggggcacaataaaggaattttgtcaaaatgagaactgtatttataatttcaatggctgaaagtttaattggacagcatgtatgttagaatcaaaattgaaaccaatctagcacaactgagcaagtttcataggatagataggaattgacatagatcttggtgaaaaatgatttcaatatgaaaaaataaaaatgtgtctataataacacagaaaggatttaagatatttaaaatagagaaaaggaactgagcactaactcttccaaggcactgagatgcaattcgcaattagatactcaagcaaaaatagtagc

SEQ ID NO: 237172 - DNA, 589 bp, Homo sapiens
tcttacattatttatggagtagaaattctaccttcctacatttccaacacaacgttgttgtaacttcttatggcacattcacttaaacttggtatctctaaattaaattgactctttaaaatgcatttattctcttgtcaaatgtgttgacaatataatatattgcaatgactraaagaatgactgtaggggaaaatcttgattcaagaccttcctaaatgtgcaaacttaaatgttcctttacatttctgacattctgttttattatcttttaaacttcttataagatgaactgcttcataggattgttattatttttggatgagctttatagaacaaaacatgctgtattagtgctaataagttaatatctttgtctttctttaaccatcttcaaatgatagggtggcaattgctgaggtcaaagaggggcttaattgatgctgtcttcattctctctaaatgatgataagcctgaaaagagttctgtaagtatctgtgatcaaaacattttaccactatttaaaatggcatctggatttctattttatatctcttctttcttttctttcttgaaatactctcaata

SEQ ID NO: 237173 - DNA, 612 bp, Homo sapiens
aactctataaaagcacactttacctcttaatcgtgaaaggtttctcagagactcaaaaggggtgctcgtatttcacatttgagaataatgagattcaattcacaacagcagaagactcccagttttttaagaatattctgagactccattcactaactctaataagaaaaatgtgttatattctgttctattgctaacactgtggtaggcaatttgtaatagaactaagggacagttcttattcctcaaatttgtgcaaatagtttaagaaaaaagatctgttgaaaataaaatatttggggcacaataaaggaattttgtcaaaatgagaactgtatttataatttcaatggctgaaagtttaattggacagcatgtatgttagaatcaaaattgaaaccaatctagcacaactgagcaagtttcataggatagataggaattgacatagatcttggtgaaaaatgatttcaatatgawaaaataaaaatgtgtctataataacacagaaaggatttaagatatttaaaatagagaaaaggaactgagcactaactcttccaaggcactgagatgcaattcgcaattagatactcaagcaaaaatagtagc

SEQ ID NO: 237174 - DNA, 589 bp, Homo sapiens
tcttacattatttatggagtagaaattctaccttcctacatttccaacacaacgttgttgtaacttcttatggcacattcacttaaacttggtatctctaaattaaattgactctttaaaatgcatttattctcttgtcaaatgtgttgacaatataatatattgcaatgactaaaagaatgactgtaggggaaaatcttgattcaagaccttcctaaatgtgcaaacttaaatgttcctttacatttctgacattctgttttattatcttttaaacttcttataagatgaactgcttcataggattgttattatttttggatgagctttatagaacaaaacatgctgtattagtgctaataagttaatatctttgtctttctttaaccatcttcaaatgatagggtggcaattgctgaggtcaaagaggggcttaaytgatgctgtcttcattctctctaaatgatgataagcctgaaaagagttctgtaagtatctgtgatcaaaacattttaccactatttaaaatggcatctggatttctattttatatctcttctttcttttctttcttgaaatactctcaata

SEQ ID NO: 237175 - DNA, 520 bp, Homo sapiens
ctgctaaacatgctatgcacaggatgaccctccccagcaaagagttatctggttccaaatgtcaaaagtgctgagactgagaaacccttgcctagggggtagaagaaacatctaggatggtaaatttgttaatacaaaaaggaatattaagtaacgatcattggaaaatatacagataaagcacaatcaacacataatacatctaatttatgagaggaaaacaagttagttatttgcttcttccaggcgcctaatgatatcaccaataaaaagtgctaggcaaaaataacaygaattggttgtgagtaattagtcttaaagcttccaagtctttttcatgctttcaaaggaaactaaagaaatcgaatagatttaaacactgttagccatacaaggtagaatacctaatgatgacaactacaagctcactttgcttcattgtgctttgttttattgcactttgcagatactgcttattttatttttattttttgcaaatggaaggtttgtggcaaccctg

SEQ ID NO: 237176 - DNA, 612 bp, Homo sapiens
gctttaaccactttatatgtattattatatttaatattcacagcaattatatgcaaatgagattcatattatacctattttttttttgatgacactggggcatcatctgaaaggagatgataagtatagagaggataagtacgttgctcaatattgttgctttgtgtgtgaaaatgtaggtgattgaggcagaagtcaatttgagcctagatcttctagtgctctttaatttgccaatttaaagacacaaagktctgtcttttttgtctccattatctgtcttcctcatttttcaacttctctgaaatttgtttaaagtccttgtacttttcttctacattgttatagaacatcttaaatttttctttacataacaaattcaatattctgaatgttacaccgtttaattttctttgatgaattcatgtttttccttactttaacaattctactcattttaaattacttcatcaagagtggaaagcccatattttctcacacttttttctctgaatcatcatcatcattgttgtcgttgtcattgtcatcattaccctgttcctttggtactatacctagtccattatcctctgtggagaatttgctatatgt

SEQ ID NO: 237177 - DNA, 636 bp, Homo sapiens
ttattctattattacgctgactttcatactaatgtaaatgaacttaataagatgaagctcaaatgtgacgttaaaacagaaacagaacagaaattgtaacccaaatgagtacactccaaagcaaagaggttttttggctggcttctgtggaggagttttcatttcctttaatccatatcacagacttgtcacagtcccaaaaggggagatgaaaattctaataaaatcttttttgcatttaaatgataactcatgttctgcattcatttgcctttgaaattgactgttcagaaaacatgggcactatagggttaaaaatacarttgtgaacctcacttgctcacacacagtcctgcactctcccccacactgctttcatttcacagagatttttctaactcttcattattatttatcagttaaagacaaaatgatctttgtttaattttaatttttggaaattataagtagtactcaattagcttttgtcattaagtctaatctgcatcgattatctgagatatgacaaaaattaaatgtgcctatgtaactcttaaatcctagataaaaatttgttgatgtgtcattattctaattagaaatggtgagaatataaaatgacacttttgagaccca

SEQ ID NO: 237178 - DNA, 604 bp, Homo sapiens
ttttttctttcatttcacccttggtgcatctgacaattgtgttttggggtcgctcttctccaggagtatctttgcggtgttctctgtatttcctgaatttgaatgttggcctgccttgctaggttggggaatttctcctggataatatcctaaagagygttttctaagttggtttcattctccccgtctctttcaggtacaccagtcaaaggtagatttgatcttttcacttattcccatatttctcagaggctgtctttgtttctttttactgttttgcctctaattttgtcttcttgccttatttcattaattcgatcttcaatgatgtcttttcttctacttgattgaataagctattgaagcttgtgcatgcatcacgaagttctcatgctatggttttcagctccatcaggtcatttgaagtcttctctacactgtttcttctacttagccatttgtctaatcttttatcaaggttttaacttccttgcaatgggttagaacatgctccttcaccttggagaagtttgttattactgaccttctgaagcctacttctgtcaactcatcaaactcattctctgtccagttttgtcccctt

SEQ ID NO: 237179 - DNA, 604 bp, Homo sapiens
ttttttctttcatttcacccttggtgcatctgacaattgtgttttggggtcgctcttctccaggagtatctttgcggtgttctctgtatttcctgaatttgaatgttggcctgccttgctaggttggggaatttctcctggataatatcctaaagagcgttttctaagttggtttcattctccccgtctctttcaggtacaccagtcaaaggtagatttgatcttttcacttattcccatatttctcagaggctgtctttgtttctttttactsttttgcctctaattttgtcttcttgccttatttcattaattcgatcttcaatgatgtcttttcttctacttgattgaataagctattgaagcttgtgcatgcatcacgaagttctcatgctatggttttcagctccatcaggtcatttgaagtcttctctacactgtttcttctacttagccatttgtctaatcttttatcaaggttttaacttccttgcaatgggttagaacatgctccttcaccttggagaagtttgttattactgaccttctgaagcctacttctgtcaactcatcaaactcattctctgtccagttttgtcccctt

SEQ ID NO: 237180 - DNA, 604 bp, Homo sapiens
ttttttctttcatttcacccttggtgcatctgacaattgtgttttggggtcgctcttctccaggagtatctttgcggtgttctctgtatttcctgaatttgaatgttggcctgccttgctaggttggggaatttctcctggataatatcctaaagagcgttttctaagttggtttcattctccccgtctctttcaggtacaccagtcaaaggtagatttgatcttttcacttattcccatatttctcagaggctgtctttgtttctttttactgttttgcctctaattttgtcttcttgccttatttcattaattcgatcttcaatgatgtcttttcttctacttgatygaataagctattgaagcttgtgcatgcatcacgaagttctcatgctatggttttcagctccatcaggtcatttgaagtcttctctacactgtttcttctacttagccatttgtctaatcttttatcaaggttttaacttccttgcaatgggttagaacatgctccttcaccttggagaagtttgttattactgaccttctgaagcctacttctgtcaactcatcaaactcattctctgtccagttttgtcccctt

SEQ ID NO: 237181 - DNA, 512 bp, Homo sapiens
attatcttagcaatgttcttttatttttttttgagacagagtgtctctctgtagtccaagctggagtgcagtggcaagatcttggctcaatgcaacctttgtctcctgggctcaagtgatgatcctgctaccccagcctcccaagtagctgggaccacaggagcacaccaccacacctggctaatttttgtatttttagtagagatggagttttgctatgttggcctaactcctgacctcaagatatctgctggcctcagcctcccaaagtgttggggtcacaggcataagccaatgtgcccagcctattttttcttttttaataaataaaaattgtacatatttatcatgtatatcatgatgtctcaaaatgtgtataaatgtggaatggttaaataaagctatataacataagcattatctcacaacttawcaatttttgtggtaaggacacttaaaacatactctcagagcagctttcaataatacattgttttaactatagtcactat

SEQ ID NO: 237182 - DNA, 579 bp, Homo sapiens
caggccgccccagggagccccctgaaacccactgccctgaggactacagtgatggggctgggccacgcctcctgctgttgcaggaacagcactatcgggcagagaggggcccagggcagtgctgggcccaggttggtgctgggcttgcatatggagcatggggaccgggcctggggtgcgaagttggggccacgctttgggagccaggacggaaagtgggagcrggcctgcttcgagaacctggccagtggtgcagccaccactcccactctgcagaggatgctgggtttttcacctcaggaggaggctctgtatggggctgcaccagtgcatgtccctggggtctgccttgcatcagcgtgaccactgagcctgacactcccgacggctgggcccagggtccacaatccacttccagaggtgtgccccctagacagggccacaagccaggtgaaggggagccctgggctgcccctgaaggttgcggccatcggggagctctcaatgatgttgctcctgccccgaacactggcctaggcccagcaaggacctggagcccccaccccaggctgcatgggt

SEQ ID NO: 237183 - DNA, 570 bp, Homo sapiens
ctgggttttgtctgacttgctaatttttgccaatctgacggttacagttttttgttttgttttttaatagaaggggtcttgctatagcttgcccaggctggactcaactcctgggctcaagtgatcctaccacctcagcctctcaagtagttggggctacaggcgtgcaccactgtgcctggcctacagctgtgttttaatgtgcatttcccgaattgrggtggaatgtttttatatgtttgctggatatttgtttcttttgtaaatagccttcttgtgttgtaactcatttctgaacttggctatttgtttttttttcttactgatctataggagttctttatgtattctggatactaattcttggttggttttgcaaatatcttctctgtgtggcttatttttttgctttatttatgctctcccactaggaatgaattcgtaatctgaataatattgtttgctttgttagcattagatttcttcaaatattttgaaatttctgtctgcaggttcatttttgtttttcatttgtttgctttgttttccttttttctccttgttgaccca

SEQ ID NO: 237184 - DNA, 608 bp, Homo sapiens
tagtgacttacatggtgcaacatatgtatgaaaacaactttagatctgggatttgactgtgttatgtaaatgaactaatattgttaaagtgacagtagaactcccataatcttgtctgaaggtaacagactgccatgtatcaaatattgtcattgtttttcttcaactctttttgttatataggtaagacatgttcattgtagcaaaaaaaaaaaaatgggttttgtgccattactcataccttttgctttagttagttaaacattttcagtggatactactaggcatctctgtggctgtatccactcattagtccattttaaaacaatttaataagtgcccattctaccacaagctatgtagcgaatgggtatctgaagagtaagcaagtagtgatagtttatgagtttttgactgttggtatgcttccaaaagaaggcaccaaaagacatttgtgatgcccacattacttagaaatgtagggaaatcttagtatttgaaactcttatgtcctagaatcttaagaaacctctggattgagatggtgatgttaggcagctcttgcagttgacttcaaygctagctaggctactttctccaagcagtga

SEQ ID NO: 237185 - DNA, 700 bp, Homo sapiens
ggtagctgctctggattggatgtttgttccttccaaatctcacgttgaaatttgatccccaatgttggagatagggcctaatgggaggtttggatagtagggggtaaatcccatgaatagattaatgccctccctccaaggtgagcgaattttccctctattagttcctctgaaagctggttgttaaaaacagcctgacacctctcccggtggcttgcttcttctcttaccatgtgatctgtgcacaygcaggctcccttttaccttccacctcaggcagtggaagctgcctgagaccctcacgagatgcagatgcccaatcttgatgtcccagccatcaggactatgagccaaataaacctttttcctttataaatgacccagcctcaggtattccttcacagcaacacaaaatggactgagacagtagctaacttaacaaaagttgctccactacaagatatgctaaaatctaacaagtatatttatgctcaaatttattaaataatctagtagaaataaaaaagaaatggatggcataaggtggtaatagggtgaaataggcaggaaatatcagtaaacatggtagtgactttcagttcagcctcaattatttccttcattaattagatatgtttattatttttataatgctttaaaatatgattggaaatttaactatacaaaacaataccacatt

SEQ ID NO: 237186 - DNA, 574 bp, Homo sapiens
cttggcctccaggacataattatctctcagtttttcctcttacctctctggtggctcctcttcaacctcctttgctgccttcttctccttaccttttatcaagatgtagcttcatctttggtcctctttacttctctatctataccttctccttggtaatctcaaccagtctcccggctttaaataccatttatgtgctgataactctaagctgtcayactaatttttttcatcagtctaattggaaaactaacaaacaggttaagtttataaatgtccaaaacgttaactcctgattgtccattcattctgactctagccacagttttcctcatttcagtttacgtaaattctatccttctgataatcaggctaagaactttggagtaatacttggtatctttttctcatactctacattcaatctagcagaaaatcttgtttatttgaccttcaaccgttaatatatattttaaaatatatttgtatacttctttcattattaccacccaggtccaagccatcatctcactgggttattccaacagactcctgattaggctccctgttgctg

SEQ ID NO: 237187 - DNA, 552 bp, Homo sapiens
tgtagaaaatagtttggagttttttcaaaggacttaaaacagaactaccatttgaaccttaaatcccattactgctatatatccaaaagaaaacaaacctttctaccaaaaagatacatgcacttgcctgttcattgcagcactatacaaaatagcaaagacatggaatcaacccaggcgcccatcagtggtgaactggataaaaaaaatgtggtacatatacaccatggaataccatgctgcaataaaaaagaatgaaatcatggtctctgcaacaacatgaatggagatggaggccattatcctaagcaaattaacgcagaacagaaaaccaaataccacatgttcttacttataagtgggaactaaataatggctactcatggacaataatatctattgatggcaacaacagacactggggactactagagtgggagaaagggaagggagcaagggttgaaaaactaactattgggtattaygctcagtacctgggtaatgggatcaattgtaccccaaacctcagcatcacacaatatacccaggtaa

SEQ ID NO: 237188 - DNA, 546 bp, Homo sapiens
catataatctaactatagcattagaaggcattattataaagtcactttagtccctaatttacaaggcaaggtctcctgaaactgtaggtgtcatcacagacataatttcaattttgcatggcaggagagaagatagtttggggtgacaaagttgtacttataccaatataacaagaccaataagtttgtatrcctgctgtacagtaacagaccaatacatggagacagcatagtttacggcagagaaagagtttaatgattgcaggacggctgaccgaggacatgggaggaaccctcaaattcatcttcaaatggagttcttggatgcaatttttaagggtattacaaggggctggaaaattggggttattgcttggttatgataagggggataaaatcatcaggatatagaaactgaattccttggtaagtcagttccttttgggatccttcagaccggctggtgtcagtggtttcacctgtatgcaagacctgaaagaatatctcaaatgaaaaaacagtttcaaaatgtttaagatgttatct

SEQ ID NO: 237189 - DNA, 546 bp, Homo sapiens
catataatctaactatagcattagaaggcattattataaagtcactttagtccctaatttacaaggcaaggtctcctgaaactgtaggtgtcatcacagacataatttcaattttgcatggcaggagagaagatagtttggggtgacaaagttgtacttataccaatataacaagaccaataagtttgtatacctgctgtacagtaacagaccaatacatggagacagcatagtttayggcagagaaagagtttaatgattgcaggacggctgaccgaggacatgggaggaaccctcaaattcatcttcaaatggagttcttggatgcaatttttaagggtattacaaggggctggaaaattggggttattgcttggttatgataagggggataaaatcatcaggatatagaaactgaattccttggtaagtcagttccttttgggatccttcagaccggctggtgtcagtggtttcacctgtatgcaagacctgaaagaatatctcaaatgaaaaaacagtttcaaaatgtttaagatgttatct

SEQ ID NO: 237190 - DNA, 546 bp, Homo sapiens
catataatctaactatagcattagaaggcattattataaagtcactttagtccctaatttacaaggcaaggtctcctgaaactgtaggtgtcatcacagacataatttcaattttgcatggcaggagagaagatagtttggggtgacaaagttgtacttataccaatataacaagaccaataagtttgtatacctgctgtacagtaacagaccaatacatggagacagcatagtttacggcagagaaagagtttaatgattgcaggacggctgaccgaggacatgggaggaaccctcaaattcatcttcaaatggagttcttggatgcaatttttaagggtattacaaggsgctggaaaattggggttattgcttggttatgataagggggataaaatcatcaggatatagaaactgaattccttggtaagtcagttccttttgggatccttcagaccggctggtgtcagtggtttcacctgtatgcaagacctgaaagaatatctcaaatgaaaaaacagtttcaaaatgtttaagatgttatct

SEQ ID NO: 237191 - DNA, 596 bp, Homo sapiens
tatgttctgaacaaatgtttagcacagcatgagatatttagacctgactccagattgcttctgaaaagtgcagtgtctggcattttttaaaaggaagttttctagattttataaaatacaggatgatgtattaatctcatatgattgatatgtgctaaggtatatgagtctattagaatattccaataaaccattttcatgtaaggcacacaatgaaaatgttttgtgtttgtgtttgtgtgttgtgcatatgtgtgtgtgtgtgtgtaatatcctactgtgggatccacatatatttatatgagacccttagtcactgttttcttctaagggaactgttcacaagtgaaccctcaattctattcttaaattgaataagggtaaaaaaaatttcctgttttatttcctttttagcagtaaagaatttgtttattcatcaatttttaaaatattttamaattcaaatttaaatttttaaataggacaaagaatgggtgtgtttttgttcactgataggcaaattcctctatgaacaaagcagattataaataaacaagctgagattacaaatagacacatagacacaaaagatgttt

SEQ ID NO: 237192 - DNA, 598 bp, Homo sapiens
aaatttaatatacagattttgcaattgtctttagattttcacatttataaggaatgtctttcttgtacatcttttatgatatcattatttgatatattaagtagctcctgaaatcccatttttatctgaagactatctaggataatttttaaataaaattttccctgtctactcccctctaacacacaatagtctatagttgtgtatagataagaaatgatatgcttatctatttaatatttcttgttgaattacagcctatagctaggaaacaaaatatcacagcaaaagagttcattggaaataatgacaaattatgaaacataatttttatactttcatgaattagagctataatttctaaaactattaaagttttaatacaaacttctaactttccttcatttgtcttaataacttagcactagaaaattgattcgaytgcttatgaagacaaaagggaacagaagatgacatctaaacttctttcccaataagaaatggatagcataggataaaaaattccagccataaataataaatgttatcaaataaaataaaatgggaaaggttttaattggagtctcaaattatagca

SEQ ID NO: 237193 - DNA, 398 bp, Homo sapiens
ttatgatcacacttattataaggtatcttacagatatcatcaycctttcatcagatcacatgcccaactctacctcttctctagctgtttcaaaaataaaaaggcaaacacatcctttattcttagtcatattatctaaaacatcttacctgtaataagtggaagagaaaataatttctatgcctctctgaaataccaataattactcaagtttgagatgaaaacaacttgcatttattttttacaagcttcctcttttaaaattatttaatgtgccactgaaataatagccatggagtctgggggacttgtcgtcttctggctgatgtgttcattgacaatgttgagggtaccggaatgcttcagggaaataaatactttcaaaacagcctctcttt

SEQ ID NO: 237194 - DNA, 582 bp, Homo sapiens
gtttcatatgtacagaaagatgcatgcacacataagtataactcacagctacctatagaaaggctaactagagaagggacagggtattgtcaggggactcagaaataaatgcacaacactcaagaataataaagtaatagctaacatttattaacgcatactgtgtcccagggatggaaatacatttttatatgaatcatctcaatattttgttgaatagataatatatattccataactgcctttgactttccatgactgaataaattgatcagaaattcaaatagtataccatgcaataatccggaagcaaatagcagaacccagactttaaatcttcatttctcatgacatattggaaaagtttttatttttaatttcaactaaagaatctctgcatggaatttgttaagaatatatcccagccsctgctttttctattcagtgtgaccccaaacaaggaatgtttcacatggttttaggtttctgagtggaagtttagcacagctgtgatatcaaatgaagtaccacctggcctaatcaccgtaacaatatgtcctctgtcctgcacagctagcagat

SEQ ID NO: 237195 - DNA, 622 bp, Homo sapiens
cttagtaagacacatatcaattgtttcatgttgctgtgattcygttgtgtaggaaaggcaaaggtataattcttatttagacgagttgactgggggattgagaaaagtcctgttcactcttaggtgaccctttcagacttaaagagagtacacagaggctataaagaaaaatcaaagagatgacaactaaggctgaagttacacaatggaataagaagaatgaaaatgatgagaaggactgagaaaaagaatttctagatctgaaaacagtattccacagcaagaataagatgtgttgtactgtaaatgccttggtgtgaagcaccttgcagtgctgtgaacttaagtctaatgtcaagatctttgcatgtgggaactctcaggaattggagaatttttttttttttttgcgaatttctgctacactatagattctatctaggattattatattttatcatttcaacctgaggaaaaggattgattaaagattctctgctattctcttgtatatatagactacacgtatagtaggaccacaatacaccaaacgccagcagactatggcagttaattgtcagactctggagccaaaacatgtttgtttgaatttcagttctag

SEQ ID NO: 237196 - DNA, 622 bp, Homo sapiens
cttagtaagacacatatcaattgtttcatgttgctgtgattctgttgtgtaggaaaggcaaaggtataattcttatttagacgagttgactgggggattgagaaaagtcctgttcactcttaggtgaccctttcagacttaaagagagtacacagaggctataaagaaaaatcaaagagatgacaactaaggctgaagttacacaatggaataagaagaatgaaaatgatgagaaggactgagaaaaagaatttctagatctgaaaacagtattccacagcaagaataagatgtgttgtactgtaaatgccttgktgtgaagcaccttgcagtgctgtgaacttaagtctaatgtcaagatctttgcatgtgggaactctcaggaattggagaatttttttttttttttgcgaatttctgctacactatagattctatctaggattattatattttatcatttcaacctgaggaaaaggattgattaaagattctctgctattctcttgtatatatagactacacgtatagtaggaccacaatacaccaaacgccagcagactatggcagttaattgtcagactctggagccaaaacatgtttgtttgaatttcagttctag

SEQ ID NO: 237197 - DNA, 432 bp, Homo sapiens
gaaacttagtataataaactaaacttgaaatgcctgaaaataggtcaaagcaaacttcagtagtattaatatgtctgacaacatattaatgagaaggattcatataaatctttcctatgtgtccttaaatttgttgccaaaaatattaaaatatttttagtttttattaaatatttgtatttayccttattaagtcagaaaaagcaaatgtcacatagaaaaggtaaacagatgaagatgtataatcaaatatgcatacagatttgtataaagatttaatatgtttctttttaaagccaaaatttctataatttcactagaaccctttgttggctttcatcccagttgctacacagcatacatcacatcattattctctgccttttttctcattaactttctatgtttttggtttgcatatacatggaattc

SEQ ID NO: 237198 - DNA, 454 bp, Homo sapiens
tgtacagtttctaatccaaatttttaaaaaatataaataataactttagcaaagagctttaagtttttcagtgggcaggttctacctgaaaacacawttacttttgtcaaggatgtggaatattatgacaggttcaatttggattaagtgcctacatcttgattaatcaactatacaactagtggtctgcagttgcatggcaactgtaaatcagattttaagattacgatcaaggagtatttcccataaagattagggtgctaattcccttattagacagacagattaatgagtttctactctaagatttgggttgatttaactgaatgttatagagaaatgtatgttacctctcttcaaaattcctgaggtaagcctgtacattttggtgacttacaggctgcagttagttgtacttctcatcaaaataccatcattctcttaatcgggcacc

SEQ ID NO: 237199 - DNA, 633 bp, Homo sapiens
tgggtccccagtggcctaggcagccttgtccccatggctctgctgggtgcaacacacatagcagctctcataggttagtgttgagtgcttgcagctctccaagcctggtgtcacatgctggtggccctacaattctggaatcttgggggcttctctgcccccttccctgttagacattgtccttgtggctctctgcagcagctctgctcctgcagcaagtcactgcctgccctaaggctgtctgagataccctctgaaatctaggtaaaggtagccatgcccccatagctcattcactctgcaagcctgcagaattagcaccatatggacaaaccagcaaggctcactgcttgtgtccttcagagctgtggcccaagccatacctgagcccacttgagcctcagctggtgtggctggggagtgctgtaccagaatttggggagaagagacttgagacagccccaggcaatgagcccccaggtcccatgggtgtccttggaacctccctggaaaccattctgccttccaggccctggcactctgggcctgtaattggtgtggcagcttctaagatcygtgaaatgtctgtgggtcattctcccattgtcttgatgaataacaccttggtccttc

SEQ ID NO: 237200 - DNA, 454 bp, Homo sapiens
tgtacagtttctaatccaaatttttaaaaaatataaataataactttagcaaagagctttaagtttttcagtgggcaggttctacctgaaaacacaattacttttgtcaaggatgtggaatattatgacaggttcaatttggattaagtgcctacatcttgattaatcaactatacaactagtggtctgcagttgcatggcaactgtaaatcagattttaagattacgatcaaggagtatttcccataaagattagggtgctaattcccttattagacagacagattaatgagtttctactctaagatttgggttgatttaactgaatgttatagagaaatgtatgttacctctcttcaaaattcctgaggtaagcctgtacattttggtgacttacaggctgcagtyagttgtacttctcatcaaaataccatcattctcttaatcgggcacc

SEQ ID NO: 237201 - DNA, 636 bp, Homo sapiens
taaaattatgcattataagctatatttcatcttgtgagttttatctacctgtctttattttctattaaatggtgattattagtcacagctattaccatagtcttctatatgagatagaatgtaatcagtatagatagggtccataaactagaaaggaaatcatacggttgtaacaaccgcaaacatcaagactactgatattgctgctggtacaattgaggcaccagtaagagtagaactagctatctttggagttctcctgttttggtgattccatctgattgtgtgcttagtcatgacaaattacactaataattccatatttgtttgtttcttgggagcaaggcattgctcttggttcagaaatatgtattagaataccatacctttaaatcagtttrcataattgctattaatttgattggtgtaatctgccatttcatgacgaattctttttgataagaagtagttataaagtttaaaacccctttaaagaaaactttgccttttgccttcctctgtgggagaatatattgcgccatttctctctatgtcctttttccttacaaagcataaaatcattagatgagagacatctgaatgtattctctgaaatttggcttttaagtataccat

SEQ ID NO: 237202 - DNA, 636 bp, Homo sapiens
taaaattatgcattataagctatatttcatcttgtgagttttatctacctgtctttattttctattaaatggtgattattagtcacagctattaccatagtcttctatatgagatagaatgtaatcagtatagatagggtccataaactagaaaggaaatcatacggttgtaacaaccgcaaacatcaagactactgatattgctgctggtacaattgaggcaccagtaagagtagaactagctatctttggagttctcctgttttggtgattccatctgattgtgtgcttagtcatgacaaattacactaataattccatatttgtttgtttcttgggagcaaggcattgctcttggttcagaaatatgtattagaataccatacctttaaatcagtttacataattgctattaatttgattggtgtaatctgccatttcatgacgaattctttttgataagaagtagttataaagtttaaaacccctttaaagaaaactttgccttttgccttcctctgtgggagaatatattgcgccatttctctctatgtcctttttccttacaaagcataaaatcattagatgagagacatctgaatgtatkctctgaaatttggcttttaagtataccat

SEQ ID NO: 237203 - DNA, 539 bp, Homo sapiens
tttgtatctttaggaaagaaagaaattaagcctttctaatattcaacaggaaaattagcagtggtccatgtatttactgtatttacaatttagagacatatattggtgttgtgggaagtcagggaccctgaatggagggaccagctgaagccatggcagaagaacatggattgtgaagatttcatggacatttattagttccccaaattaatacttttataatttcttatgcctgtctttactgcaatctctgaacataaattgtgaagatttcatggacgctwatcacttccccaatcaatacccttgtgatttcctatgcctgtctttactttaatctcttaatcctgtcatctcgtaagctgaggaggatgtatgtcgcctcaggaccctgtgatgattgtgttaactgcacaaattgtttgtagagcatgtgtgtttgaataatatgaaaattgggccccttgaaaaagaacagattacagcaatgttcagggaacaagagagataaccttaaactctgccaccaatgagctagg

SEQ ID NO: 237204 - DNA, 604 bp, Homo sapiens
gaacacatttcatgtagtttcacagagcatttccagaaaatgagtagcaatttaagacagagatttaatctattgagagtatgtctccaaattattttcctattctttaagattcctgtgacatttatgcatccttggcatctaccccctttatttttcccctctccatccacttactacgttatgtcaccttatttttttcctacaaattaatggcttcttaatggagaagaagttaacatactggccttaaggggaaatgcaagaggatagaattcaaagaaagctaatgagaatgataaacagtttgaggactgtagatttttatcattatcataaaattactctaattgtaatggcaagcctattaaaatgatctgtcattaaaattgcagtgytgtggcaagtaattttgtctatcaaataattttaatattgtcctaaaatgatactgtttcaatgctctcagtccagttagaatatataaatcatttataacaatgacatttttgtttctgttacactcttcttaataaagttgtatggatttggcttcacaaaattttgactttaaactcttttaagaaagggaaatgaattcatc

SEQ ID NO: 237205 - DNA, 563 bp, Homo sapiens
gatagaggactgtatgtatggataggcaaactgcccagaaacgaggaggaaaagcagaagggaaatagtcacgaaagcccaggttgaaaagggaaatgaaacaattgaactaatactatccaaataagacaagagaactggaaacatttggcagggaaggtatcctgcttgccttttaagcacaggtgttcaatacaatgtttrtaagaattgattgctcctttttctctgttccagaaacaatttgcttatatttctgtaagtgtcatttaatttagtctatgccatttttcagtaacatcagctcagacctgaactaatttaactcccttacctaatcctgaactgtcttttatccttctgcagtacaaagccctaaacctaaaatataaagagcgtaccacttggattcagatgtcagccaggttctcagcagagaaccgatggtacacacaaagagataattgagaagtgtttaaataactgactagttacaagatgtggacaggtaagggaaaaccactaaggaatggtaagcagaccagggctcccaatggcaggaa

SEQ ID NO: 237206 - DNA, 585 bp, Homo sapiens
tacctttgggcctggaatccgactcatgagatgaacacaagaataaatggggcatatttctctattaccttccacagttcacatcatactttttctcccacctccaccctaacccctgccaatgctctcttttatttatttatttatttacttacttacttacttacttacttacttacttacttacttacttacttacttaaagacagggcctcactctgtctcccaggctgcagggcagtggcttaatcacagctcactgcagctttgaactcctgggctcaagcaatcctcctgtctcagcctttcgagtagttgggactacaggcacatgccaccacgcctggctaatttcaaaaattttttttatggagacagggtctcactatgttgtccaggctggcctcaaattttggcctcaagtgatcctccygcctcagcttccccaaggtgttgcgattataggcataagccaccacgcctggccacagtgctctttaaacaaggtatatacagaggtctgcatcattatctttagaaactttaatcatcaaaaaggttatgccccccccacctcaatatgtc

SEQ ID NO: 237207 - DNA, 585 bp, Homo sapiens
tacctttgggcctggaatccgactcatgagatgaacacaagaataaatggggcatatttctctattaccttccacagttcacatcatactttttctcccacctccaccctaacccctgccaatgctctcttttatttatttatttatttacttacttacttacttacttacttacttacttacttacttacttacttacttaaagacagggcctcactctgtctcccaggctgcagggcagtggcttaatcacagctcactgcagctttgaactcctgggctcaagcaatcctcctgtctcagcctttcgagtagttgggactacaggcacatgccaccacgcctggctaatttcaaaaattttttttatggagacagggtctcactatgttgtccaggctggcctcaaattttggcctcaagtgatcctcccgcctcagcttccccaaggtgttgcgattataggcataagccaccacgcctggccacagtgctctttaaacaaggtatatacagaggtctgcatcattatctttagaaactttaaycatcaaaaaggttatgccccccccacctcaatatgtc

SEQ ID NO: 237208 - DNA, 668 bp, Homo sapiens
gaaactcttaaactattcagtatctcagtaaccacactatagtatatactgtatactggctgaataattagcaactcaatctaggtctctgttatgaggggtcattgcttctcttccactgaayggaacaatccagaagatgcacagtgctgtaaaggcagcactaagcaagggctcactctctagagggaagacttctcatatatttgaatctctacaggtatgttgatgaggcatttgggttagcccaatgcagctatgttttaaggcaactgtaaatgagctaatgagactcataagcaattcgctggtcattcttgctaagctcctcacaagcattagacagtcatacatcctgtatcttgaaaactcactttgggacaagtttttcaaggtagacagaagaacacaccattcaagcttcaaacgatcttctcatgttgaccagacacagattttcaatacataaatcacttttcttctgcatggacattcctgaaacataactgaccccttagctgaactcaaactttaagacagatgtgtgtgtgtgtgtgtgtatgtgtgtgtatgtatcttttttaagagatgggatctcgctatgttgaccaggttgctctcaaactcctggcctcaagtaagtgatccacctgcctccacctcccaaa

SEQ ID NO: 237209 - DNA, 523 bp, Homo sapiens
gtagacatctcataacgtgaacggcatactcactgctaaaggagacttgtggctgtcagacaaccgtgaggaaagtaactaaaatcgtaaatccccatggccctcccttatcatatttttctctttactgttctcttaccccctttcactctcactgcaccccctccatgctgctgtacaaccagcagctccccttaccaagagtttctatgaagaatgcggcttcccagaaatattgatgccccatcaaataggagtttacctaaaggaaactccaccttcactgcccacacccatatgccccacaactgctataactctgccactctttgcatgcatgcaaatactcattattggacagggaaaatgattaatcctagttgtcctggaagacttggagccactgtctgtcggacttacttcacccatactggtatgtctgaggggggtggagttcaagatcaggcaagagaaaaacatgtaaaggaagtaayctcccaactgacccgggtacatagcaccc

SEQ ID NO: 237210 - DNA, 549 bp, Homo sapiens
tattactgaaagagagatacaagtaaagtatcattttctccacactccaacccctacccagcaatttaaagtgattagtgttctcatggaacagtgtgtccattaattcaattggctttttgatgcaaggctgtgcaaaatactcaggatactaaggtacatcagaaataatttctgccttcagggaactcacattccagtgtgggagagaactgacaagcaaacaaaggaccgcagcagtccctcacaggctgtaattaaaytacatacaactgccatcagaatctagcttcaagaataactagcagcaacatgtaagataaaccttagaagttaaatgaatataacaggtagacaaggaaggaaagggcttttaagccagggctgtaaccaaggggttcatggttccaattcaaggatttgaagatttggttgggaaaatagtttcatctttattttcagtaacctccagttcgaaatttagcatttccttccattataaattcaggccacaaactggagtagtattggcaatatttgtaacttgtc

SEQ ID NO: 237211 - DNA, 533 bp, Homo sapiens
cccttttcagtgggggtgcccttgatgaaacgtagagtcatcaaaatcaagatgtttcaaactccttctgagtagaaatcttaaacatcttggatgattgcaaatgggaaagaggaaaactgcaaaaattatgtgtttattttagacacataacatgaaagagtggattacataaatgctatttcaagaaatctcttaagatgtacatacatttgtgtctatatgtttgatgatcactttacaaattcagcataggatcataacatagaaactgaggtatatccagacactcctatatacagcatagaagaatttaactaatgacaaaaattcaggggacaaaaaagtttacaaaatttgtgtctggcttctttgtagtcataatgtgtctgttgacttaataaaatagcatattgctttctttacrggtttgaatcatagtgtcttgtggccaaaattcctaaattctgctcacggttcagccatttcctgggtgtgttaccttaggtaaagcattttacctctttggagct

SEQ ID NO: 237212 - DNA, 558 bp, Homo sapiens
attaaaaatataatttgaaaagtctttgatttattatttacatgcaaatagaaatagctataataaactacttcttaatccagtttacagaagcaatgttttatgaaatgttgaaaagagcggactaggtttaaattccagattggccacttaatagctgcaatataagcaaattacttatcttctctgagcctcagtgttctgatttgcgagctaaaaagagtaacgtttaggatgatccacatgaaattgctgatattcaacagttttttacctacagagaaggcaagttcatgtggtttaatcaaataattaactcttatatgtatggcgagggaattacagagataatctgtgaagagcctccagcatgcttctgggaatatagtcaacacacaataatgttcccttatatttctctcaattctccacggatgatgctgaccattaggataatctggattcaattttctgtgttagtgaakatacccacaggatgggaaaccaaatgctgcaagtgatagtcatatattgtcacagctgaatataggtaataat

SEQ ID NO: 237213 - DNA, 459 bp, Homo sapiens
agtccttgaaacatgtacatttcctttactctttgtttattttgcttacttcttggtaatatgcttttctcacccagtattcatcctctattctctatcactgactactgctttcctggyctccatagcacattgtaactaaatttataatctcttttgtacataagatgaggttattaatatataaattggaaattccaatttagtgatcaatgtgtagtttctctttggaaaattttaatattcccatcacaattagtaataacaaatggcattatggtctttcctgttgtaatctattttgctttctcataactcttttattaagaatatttcaaagagtaagaaatgtctctcaggtaacctcggcatctaattttctgctttggctcccgtgcttggcatatacacagacattcacactactagagtctaaatgagacaaatatgtttgttgtt

SEQ ID NO: 237214 - DNA, 460 bp, Homo sapiens
ttttctataagtctctaagtccttgaaacatgtacatttcctttactctttgtttattttgcttacttcttggtaatatgcttttctcacccagtattcatcctctattctctatcactgactactgctttcctggtctccatagcacattgtaactaaatttataatctcttttgtacataagatgaggttattaatatataaattggaaattccaatttagtgatcaatgtgtagtttctctttkgaaaattttaatattcccatcacaattagtaataacaaatggcattatggtctttcctgttgtaatctattttgctttctcataactcttttattaagaatatttcaaagagtaagaaatgtctctcaggtaacctcggcatctaattttctgctttggctcccgtgcttggcatatacacagacattcacactactagagtctaaatgagac

SEQ ID NO: 237215 - DNA, 485 bp, Homo sapiens
tctcctgccaccttatgaagaaggtgcttgcttctccttcgcctttcaccatgactgtaagattcctgaggtctccccagccatgtggaactgtgagtcaactaaaaacctcttttgtttataaactgcccagactcatgtattatctttataacaatgtgaaaatgaactaatacagataattggtaccagcagaatgggatactactaaaagatagcgtgaaaatgtggaagcaactttgaaacaggcagaggttgaaacagtttggaaggctcagaayaagacaggaagatgtgggaaagtttgaaacttcctggagacttgttgaatagttttggccaaaatgcgggtagtgatgtggacgatgaagttcaggctgaggtgctctcagatgaagatgaggaacttgttaggaattggagcaaaagttactgctgctgtgctttagcaaagagactggtggcattttgcccctgtcctagag

SEQ ID NO: 237216 - DNA, 569 bp, Homo sapiens
aaactagcaaatgataagacagttttagaggaatctgtaacactcaatgtcgctcatgctatgatctcatattctgcctctttaggaaaaagaatgttcaaaaaaccaaaatacgaagaaatttgggcataaattattgaaggctttagagtttgctgcacccattcaaacatcattgtttttatatatgcacaattattttctttgagcttaaaaaatgggtggaaaatttaacttctccattttaatttgagatttctcccataaaagttcactgaagaaatttctcctacttctgggtagcaatcaaggaataccccagtcaagtttttaaagagtgggtttacctctccaattgcattccaatctatattcattcctggycaaaataaaagtataaataagactctttcaatctaaccacaagttagatttgcagtaaattcctccgtcttagatcactttcttttttacagttcccagacaaactgactttgatttagctagtaatttaatgaaattcatcagttgattgtaagaagtccgcttacatacaccagtcattctct

SEQ ID NO: 237217 - DNA, 570 bp, Homo sapiens
tcagcatgactggtttcttctgaggcttctctcttggctagtagatggccacctttaccctgcrtctctacatggtcttctctctgaagatatatgtgtcataagctcctctacttaaaaggacactggtcatattcaattagggcccaccccaactttctcattttaatttaattacctatccaaagactctatctccaaatacagtcacattctgggtactaggggttgggacttcaatatatgaatgttggaggaaacaattcagcatataacaactaggtcaaatactttgagtcaagatctgtcttaatgacttatgtatttccagtttctagcaaaacctccaatacataacttcagtgagagctctcaacccatttcccctaaaaataaacagagatggaagttgaaggtaggtccaaatccgtaaggaggagaggtcagagagaggtcgtgagaatagcattaattcacaggattcagtcaatgacctaggtcacttatttaccacgctgctgaccaggcaaaaagtatcaaaaaaggtgaaggtgaaaaaggtaaaacagc

SEQ ID NO: 237218 - DNA, 549 bp, Homo sapiens
acatgagcaacctttatcagggcctttcagaaggcctcggtgtgccattacctgggccatgtcaccagagtctgatcattgccccttgagtgaagatgaaaatgaaaacataacactagggcaacttttcagcatagatcaaaatgatgaggatgtgttaccctggaaataagagtcagaataagtggggaatggctataatgaatgtggaattcctcagaaaattcaagaataggacaaccagagggcaactcttctttgaagtggttttaatgacagagtttkaaaacaagtaaagagcatcctttttatccatattttgtctgttttcctttgcatttttacctaacacagaatggctgaggggacttgtgagtatatccaccaccttagtgaccttcataattataaatttttatatcttttatactaaaaaataaatatccatccaaagtaacatagtgctcattcacaatgcaatttggattctagacatttaagtactttatcttggcctcagtgatttcttctgcacctagtgaaatgttt

SEQ ID NO: 237219 - DNA, 570 bp, Homo sapiens
tcagcatgactggtttcttctgaggcttctctcttggctagtagatggccacctttaccctgcgtctctacatggtcttctctctgaagatatatgtgtcataagctcctctacttaaaaggacactggtcatattcaattagggcccaccccaactttctcattttaatttaattamctatccaaagactctatctccaaatacagtcacattctgggtactaggggttgggacttcaatatatgaatgttggaggaaacaattcagcatataacaactaggtcaaatactttgagtcaagatctgtcttaatgacttatgtatttccagtttctagcaaaacctccaatacataacttcagtgagagctctcaacccatttcccctaaaaataaacagagatggaagttgaaggtaggtccaaatccgtaaggaggagaggtcagagagaggtcgtgagaatagcattaattcacaggattcagtcaatgacctaggtcacttatttaccacgctgctgaccaggcaaaaagtatcaaaaaaggtgaaggtgaaaaaggtaaaacagc

SEQ ID NO: 237220 - DNA, 570 bp, Homo sapiens
tcagcatgactggtttcttctgaggcttctctcttggctagtagatggccacctttaccctgcgtctctacatggtcttctctctgaagatatatgtgtcataagctcctctacttaaaaggacactggtcatattcaattagggcccaccccaactttctcattttaatttaattacctatcyaaagactctatctccaaatacagtcacattctgggtactaggggttgggacttcaatatatgaatgttggaggaaacaattcagcatataacaactaggtcaaatactttgagtcaagatctgtcttaatgacttatgtatttccagtttctagcaaaacctccaatacataacttcagtgagagctctcaacccatttcccctaaaaataaacagagatggaagttgaaggtaggtccaaatccgtaaggaggagaggtcagagagaggtcgtgagaatagcattaattcacaggattcagtcaatgacctaggtcacttatttaccacgctgctgaccaggcaaaaagtatcaaaaaaggtgaaggtgaaaaaggtaaaacagc

SEQ ID NO: 237221 - DNA, 539 bp, Homo sapiens
actaaacatggtgccatcttcaattatctgaattcctgcccttgactccaagtgtcttagtgcctaggtttggctccacatgctatctatttaaatgtctaagtctccatttctgctgcttakattttgatcttcagcttctggatcttgagttctgcctgacttccttctcagattcattcctctctcatcttagatctgtgttcctttatgctgcatagcttattatgtcattggtaactgtcttttgtgccagtccctagcttctgctcaaccccacatgttttgcttggccttctcttaagtggtatccaatccttccctgagccctggaatagctgttgacaggcagggagcagcagtagtgctatagaagtacttacgcatatgtttcttgctaacttaagcctgttcgagcagtacactagaatcttgcttctgacaagagaatcctgcaatggcaacatgaatactatttaaaaactcacacacacacacacacacacacacacacacacacccctaacaaaacattaaaa

SEQ ID NO: 237222 - DNA, 512 bp, Homo sapiens
agttgtccttctggaacgaawcaacttttatacaaaagaggggaacactattgtgaagatttcttgatggtgttgatgtgaacaccaaacatataatcaaaatatgtatatactcagccagagggctgcctgtctaagtcaatagatttcatttttaaaatggtattttttttgttatcagagtcattcccagggactaatgtgaaaaacaaaacaaaacaaaacaaaacaacgacgacaacaacagaaacatgaactatgcttaacaaccaccgagtagcctgaggatctgaagacccttccactcactcttcatttctactttgaaagattgttttaggagggtcgagtgatataaaatgcgcaaaatacctaatagagtatctgcatataacagttattcagtaaaaatgtttttcttcttctatattcaaagaggcaaaaagacccagaaaaaaaattaataattacagttatctattttatcttttctcctcgctcgttagatttta

SEQ ID NO: 237223 - DNA, 580 bp, Homo sapiens
atatattgtgatatatttaaattcttctattgtttaagaaagactatttccattctttgctatttgaaaaatgctaagataaataaccttgtatgcaaatattggactaaaaattgatttttatttcctcagaatatatcccatgaatgagatttattggtcaataggaattaacatccttagggttcttcatatacagctcccagttgcttttccaaaaggttatcctaatttgcacttctattggtagggtttgagggtcctggtcaaactattccctattcagcattgaaaaatacctttaagtaatctttgctaatctgatacataaaacagtacataactaacaaattaatttgaaaatctttgcttacagcaagttttttagtagttaataactcatcatgatgtatttcttctgtgaattgttgaattgtctgtatacattttttagccatcattttttattatagtatttgtgttttattatggtatcrttttattacatagacctttgttatgttttggaaacttttttttctcacaattgctattcatctttcattttggtttacattga

SEQ ID NO: 237224 - DNA, 384 bp, Homo sapiens
agctctatcagcctcttgcatacctgcttacttgttcctttactcagtgtcaaagcttttgctgcatccattcattcaacaatattaaagtgagcacatattatgtggcaggcatttggaaaacagaattctaagacttagcttctgatattaaggattgtgtaatccarttaaagagaaaagatatgtacatattaaagtaccaattgtatggtacagaaaatatatacaatagttgtttaaatgagattattgcgggcttaagtttttccagaagagataggattctggctggtgcctgaaaacattgtgtggtagaaagaagggggaaatgtatcattggtggaagactcagcacaagaaaaggaatttaggcataaatta

SEQ ID NO: 237225 - DNA, 561 bp, Homo sapiens
aaaaactagtagagacattagatttaataaatactgtagaacaattagtcatactactgttgactagcactctgttgtaccagtttaattatattttaacaagtatattttattatataatttctataattatattgcataaaacatggaaaattgagagagtaagacatcactcacaagagcaacttcacacaactgctgatagtatttcagcgtattccatttcgtgtttttccaaaatgcatcttttttcccaaatttttactgtaactgtatacaatgttatcctacatttttcactttgtattaaagttttaaagacagcaaggcatatttatttttgaacaattgaattttcttgcartcaactcatgtatcacaggccaattcaaatttatgatagactgatttttactggctttgtttgctcttttcctagacctttaaaatctaaatttctctgagaattgtcaactctgctctctgcatgcccagcattcccctggcttctactaacactccttttgcgttattcctgaggagagttctgtcctgtcttct

SEQ ID NO: 237226 - DNA, 561 bp, Homo sapiens
aaaaactagtagagacattagatttaataaatactgtagaacaattagtcatactactgttgactagcactctgttgtaccagtttaattatattttaacaagtatattttattatataatttctataattatattgcataaaacatggaaaattgagagagtaagacatcactcacaagagcaacttcacacaactgctgatagtatttcagcgtattccatttcgtgtttttccaaaatgcatcttttttcccaaatttttactgtaactgtatacaatgttatcctacatttttcactttgtattaaagttttaaagacagcaaggcatatttatttttgaacaattgaattttcttgcaatcaactcatgtatcacaggccaattcaaatttatgatagactgatttttactggctttgtttgctcttttcctagacctttaaaatctaaatttctytgagaattgtcaactctgctctctgcatgcccagcattcccctggcttctactaacactccttttgcgttattcctgaggagagttctgtcctgtcttct

SEQ ID NO: 237227 - DNA, 634 bp, Homo sapiens
tctctttttcttctttacccacatctattgagaggtggccatattgtgatcattacatcttttcgctaagcattcaaattcctaattccagtctttattaataatcttccactttgtgtattgagacacagtacaacactgtgcttaaggtgatgggctctggagccagacctctgggagtaaaacctcagctttgttatgtatgcattagctgtgtgacctgtggcaggattcttaatgtctctccttgtctctgttgtgtaagatgagtaatactatagtacttaaccaacatggttatggkgaagattacagagtgtcttctagctattttgaaacatactataaattcttaattatagtcaccctgccacgctattgaacactagaacttatttcttctatctaactgtatttttgtatcaattaaccaacctctctttatcccccctcctccctacacttcccagcctttggtagccaccattctatttgttactcccaaaatatcacatgtatgccataaacatatacaactattatgtatcaatacaaaaatattagtagtatcaggaaaaataaaagtatcaaatattaaaaagtttacagaagatctaccgtctacaggcactca

SEQ ID NO: 237228 - DNA, 634 bp, Homo sapiens
tctctttttcttctttacccacatctattgagaggtggccatattgtgatcattacatcttttcgctaagcattcaaattcctaattccagtctttattaataatcttccactttgtgtattgagacacagtacaacactgtgcttaaggtgatgggctctggagccagacctctgggagtaaaacctcagctttgttatgtatgcattagctgtgtgacctgtggcaggattcttaatgtctctccttgtctctgttgtgtaagatgagtaatactatagtacttaaccaacatggttatggtgaagattacagagtgtcttctagctattttgaaacatactataaattcttaattatagtcaccctgccacgctattgaacactagaacttatttcttctatctaactgtatttttgtatcaattaaccaacctctctttatcccccctcctccctacacttcccagcctttggtagccaccattctatttgttactcccaaaatatcacatgtaygccataaacatatacaactattatgtatcaatacaaaaatattagtagtatcaggaaaaataaaagtatcaaatattaaaaagtttacagaagatctaccgtctacaggcactca

SEQ ID NO: 237229 - DNA, 447 bp, Homo sapiens
aacaaaaatgaatggattttgtcagtcagttgccaacacagaagataaggcctaaggctttggtcatttaacatttgtgatataattttaaaaatcttagtaggattaaagaatatcacattctattatttctaattcgatttttagaagacctatggaaatgttgatttaaaaaactatattgaaataaaaaatggttcttgcagttacgtaaggaaattattaacattattaaacaatatagaatccttaactttgacaaagaaccaagtttgaatgaaaatacatatattagtttaaaaaatatgtaatgagaatctataaaatcatagagyttaaaagcaaaggacatcttaaggctttgttcagtagccttgtttcctctcctaaggaacgttaagtgttgaagtaattagtgttagtctgcaggtgggtgacagggggtta

SEQ ID NO: 237230 - DNA, 662 bp, Homo sapiens
taacatcttttctctcagtggcaacctggaaaagttcttggtaaggagccataaagaggtctctggcctataagaaggaagaaaaatgtaacagacttcctgaaaaaaatggagagggtttttttctttttttctgttttctttttttccaattatagcagcactttatttttccttacacaatgacgtgttgctggggcctaatgttctcacataacagtagaaagccaaaatttgttgtcatttcttaaagaattgagaatagtgtgcaaaaatatcttacataaattaaaaggatgaataaatttacaggtattaatgcagacaactttcaactcctggcaagtaacagcccacggtgttctggcaggaaaacaccaggtaagaaaggaaactgggtcctaacgcttggacttctctaacctttgtagaccagcaagacagaaacaactggttcaggagctcttgccagcctttagagaaatcctggaacactgagctctgacacattaatacctgcacagatcgacagactgctggkcacacagactcaccaaaccacggacttttcttccacaatcatgttctcacctcagccactgagtgaccgagttacatgtactaagggtttaaatccaagatacatacagggtattaaacaa

SEQ ID NO: 237231 - DNA, 608 bp, Homo sapiens
atattatttcaggtaagaaagatctatattcaaatcctgactttgtcacttaccctgacccttaagtcacaactctctgatcctaaattcccttctctattaaaataaagaawagggtaataatgagaatcataatattccctttcatgagtaagagagaaaccatagaggttgggcatgtcagtaagccttaacagagaaagtgatatttcaactgttctttgattcacaggtgggtcacaaagagataaaagtgttacagtccagttgggttcttcttgcccactacctagaaaaagccaatgccctgaaacagtagggaattgcagcagagaaagtttaataatcacagagcagctgtgaaatgaggatgggagataattctcaaacccacctccttgagatattggaggcgagggtttttaaggacaatttgatgggcagcaggctaaggaatagatattgctaattggctgggtcagggatgaaataatatgcttgtcaaaactatcttcaggcactgagtcacactgagtcagttcctgggtgggggccacaggacaagctgagtcagtttccaggtatgggtcactagtccaggtgccatc

SEQ ID NO: 237232 - DNA, 488 bp, Homo sapiens
tatttatataatcatatgattggacacaaaatttatatattaatgaaatacttgcaacatatatttagtcatatatatggaattctaacaaaaatgatgtttytggttgatgagccattttgaagcatgagaatgaaaggaaagaagtgggttttattgacagcaacaaaaagattggcaagaagtcacagatatagcctgagagaaaggaacagacacactgtgtttcttccaaacacagaaacacacatcaatttaaaatacaagcattagaactaaagtccatagcttggactttgggtagaagcatatggctagaaagtcctttataatctcaaggagctctaagttttagaaaaacaattatcatacaagaaagattacatcatccatttagtaatgaaaagaagactagttcattacattatcgttcatgggatatttgaacactattaaaagataaaaagaaagcagagaatatactggaa

SEQ ID NO: 237233 - DNA, 548 bp, Homo sapiens
gctaatcatttcaaattttaagggttaccattatgtttgcttctgtatcttcctttatgtttgttttccatgtgtttaaagtgctaatgacattcactgcttttgcgatttatcagattagcactgctgtaacagtttatgatgttacattttacaagattcacttaatataactttaattatcactgaaaaatggcttctagtcataaaagtactttaaaaattacaagctaaacctaccctaaattaaaagtcagggttcatgctgttaacaattttataaaacaaaaacatcccatggtacagtaactcaaaattaaaatatccatattttaaataataaawacacatttagaattataaaactgccaaataaaatggattctttctgatactttatagcattgtagaaaatcactggcgtgacaattatggggtattaccaatgtgtgttatttcaggaaacgaggtttagtttggaatcttggcatttaaccaccatatggtagctctaaaatataatgtgatggtaaaaacagtggaagaac

SEQ ID NO: 237234 - DNA, 608 bp, Homo sapiens
tatttccttcaccttaactttggataacctgatgacaatgtgcaatgaatttcccaggtgttctttgtgtttcttgtatcgcatgtctaggtctctagcaaggccggggaagttttcttcgattattctcccaaatatgttttccaagcttttagaattgtctttttcctcagggatgttgattattcttaggtttggttatttgacataatctcagacttcttggaggctttgttcatattttcttattcttttttctttgtctttgttggattgggttaattcgaagaccttgtcttcaagctctgaatttctttcttctacttgttcaattctattgctgagactttccagagcattttgcatttctaaaaatgtgtccaaagtttccttaattttttattgttttttctttaagctatctatttccttgaatatttctcccttcacttcctatatcattttttggatttcctggcattgggcttcgcttttctctggtccctccytaattagcttaataactaacctctggaattctttttcaggtaaatcagggatttcttcttggtttggatccattgctggtgaactaatgtgatttttag

SEQ ID NO: 237235 - DNA, 373 bp, Homo sapiens
tgcatatggtgtgaaggcagctgtggtctctctrccctggttagctgttctttcctgccctgctggtacacagggggccttctcttctcacattgggggtacccacacagtcattcctcttctgatctactgggtatctcccaaagaaaccaaaagatgggaaatgggacaaacatgcagtgcagacagaaaccatagtcacccagctctcctgccaggccatctttccaagctcctggggtgttgtcaaactgtatgaaggtctctggtaaagatcaagtgatggaaagtacacaacacatgtaagctaataaatgcaaggcattcttcagtctgcagagctcttatcacatagtagggttggtggtgtagt

SEQ ID NO: 237236 - DNA, 517 bp, Homo sapiens
atgattctctctacttttctgtattaagtttttccaaattagaagaaaaagagctttgttccattatcaggcagaaggcaggacaaatgcagtgaacataatgtctcctaaaaatgtcaaaaggtcctcagcctccatcaatrttagagaaatgcaaattaaccatcccaagatctatagttcgcctatatgattgggaaaaaacaaagtttgatgcacactctattggaggaactgtgggtagcccacacccagctgctccgaggtctctccagagacacactgctgacctagtacacagaatgagggcagagcgatgccaaagcagctgggtgggaaccagtcttcccaagtggaatcctcctccttatcctcatgacagcagccaccctctcttgagcatgatgtgaagctctctctttgcaggcatgatctcatttcaccctcccagtggctctgtgaggctcagcaaggttagaccctggtccaaagtcacacagccagcaagcatagatgc

SEQ ID NO: 237237 - DNA, 583 bp, Homo sapiens
tgttaactgacttaagagccatcagttcagttatacgacctatgggagcattacagccaggattgccttctcctgctataattccaaaaaattggcctttaatagtcatagatttaaaagactgtttttttactatccctttagctgagcaagactktgaatggtttgcatttacaattcctgcagtaaacaacctgcagcctgctaagtgttttcactgttttacagataggcctagtaatggtaaaaattactatgcccattttagagctgggaaaactaaggccactgaaaagtaatgtaacagcccaaagccaccatctgggaagtggtggagcctggatttgaacccagcagtctggttccataatccacactcttaaccccacactgtatggcatgggaaagctgctgccccttctgtcttatgtaggaatcaaatgtatgtgtgagtctttttgtgctgagtgaaaggctttgcaagctcagaagttccattgtgcttttagaaccacccagtgtcctgaagtctcatgcctttccatgaggagttgagtgaaggggctgaaggaccctcagcctc

SEQ ID NO: 237238 - DNA, 583 bp, Homo sapiens
tgttaactgacttaagagccatcagttcagttatacgacctatgggagcattacagccaggattgccttctcctgctataattccaaaaaattggcctttaatagtcatagatttaaaagactgtttttttactatccctttagctgagcaagactttgaatggtttgcatttacaattcctgcagtaaacaacctgcagcctgctaagtgttttcactgttttacagataggcctagtaatggtaaaaattactatgcccattttagagctgggaaaactaaggccactgaaaagtaatgtaacagcccaaagccaccatctgggaagtggtggagcctggatttgaacccagcagtctggttccataatccacactcttaaccccacactgtatggcatgggaaagctgctgccccttctgtcttatgtaggaatcaaatgtatgtgtgagtctttttgtgctgagtgaaaggctttgcaagctcagaagttccattgtgcttttagaaccacccagtgtcctgaagtctcatgcctttccatgaggagttgagygaaggggctgaaggaccctcagcctc

SEQ ID NO: 237239 - DNA, 576 bp, Homo sapiens
tgtagagttttccagtctgtacctgattacatcccctttgtgtcatttgacatgtccttctgtcttctgtgtattctgtaaattaatcattagatagtttaatcaaatgtaggtgggagtgtgttctatcaggagatatagaatgtctagctctctctttctgttatgctaatagcaactaatgagcttgcttacatccattttgtcatcagaagtcacaaaatgatagtattctaattttattattattttcaatttataataaaataatgaataaagaggaactataaagaaaagatttatttttgtcaactgcttggttaccrtaaatatagaatactatagggtaagaaaggcagaaaaaaagtttggttatcttcttttatttaatgttgcagcattaaatcacccagcaccctcccaagacagtgctaggtgatttaatgctgcatcattaaataaaataacataattaaattaccttaacatcctccataggtgatgaatggtggtttcttaacttatgagctacttgtaggtttaaacatatatgttccatttggagccaatgtagtt

SEQ ID NO: 237240 - DNA, 594 bp, Homo sapiens
ccctgtccaccctcatgtaggccccaagagaaacatttattttccttcttaaagtagcccagcaacaggtgtccaggactggtgggagctatgtgtggttttcttccatgtgtggttttcacctttgggtctagttctctgcactcgctcatcagaaggaaggatgtaaatgaccagggaagcacatgcccaatctttaccatggaaagacccaggagtaagacactccttctccccaaaacctccacagccatcccttgctgcaagggaggcttgagaacacagccaagcaatacaattctgttgcttataaagacagagagagtgactactggagacagctagtcatctgacacattgtgtcacaggatctttcaggtgtcactttgtcagccagaaacctctgtggctggtggcacctctgcttgagttttgctcatgcctgctgggcttgttccacccacttggcccagcaggctgcacttggctcatactactggctyagatcccacagtgagccaggtgccaagccaggtgcagagcagcaaggggtgtgtgagcaagtgagcgcggggtcaggccactgcacacagc

SEQ ID NO: 237241 - DNA, 497 bp, Homo sapiens
attctaatgtaaataattatttaaaaatgattataattatttattcatagtgtgaaatacatgtgacaactttaaaactttcttcaaatgtcttaatgcgtataaatatgttatataaaaayatggagcaaaatacaaaaagtacaaatttaagcttatagaaaattctttaaacgcttgcacagtgcaaagctagcctgtcatcatttctgcacattctttaacttttattactagactttattatatccattctcatggaattgtagaagtggaaactggtatggatgctaaattcaatgagccattaaataggtgacaataatcatgatattttctcttaatattaattagaataaagtcactcattttgaaattatcacctatgttgcccaaagagaatactttcataaaatctaaattacaaccaggaagaaaaaagacatttttattaattaacaaccacattgagtaattgaatagctgaatgaaatttt

SEQ ID NO: 237242 - DNA, 530 bp, Homo sapiens
aaaaaaaaaaacccttaggaatagtaaacctgtaaatttacaaaggaactagaattattgcatttttttgtttagattagttatataattgaacgcaatattattatgtgttgactgtatgccagaaattagttaaatttactgatttctaggtatttattatccattaaattatttatatacaggaaaaaatcactttaaaaataatamagttaggttaaggactataatagcctttctttaggaaaggagagaagagttgccaaatttggggaaattcaaatgcagaattaccagaaaattaacttaaattgactactgattgacaatttggaattgactaaaagatggagctttaaggagaagaagaattttacttatcaaaagaagaatgccttaaggcaaaataacgtgtctgagggtgaaggcagagcttataccagagagggccataagtgctacaaaggaattaggtgtcactgatggctctgaagtaaaaaagtagcagtaaaatctgagatttagattgc

SEQ ID NO: 237243 - DNA, 577 bp, Homo sapiens
attagaaacacatttttactttcagcactgttgtatttcattgattcattgagctaatagctgtagaacacctacatcattaaatgtttccacatattttgcaagtcagtaattaacccaaatactttctagctcattgttttctatcctacatctactctaataagttataaagcagaagaagcagggatatgccaacatttatcctgtttttaactttttctccaaggcaagatttacattttaaacattctttatcttcactgtttaaacctcaccaccacaaaatagatacttcaaaaaatattttcccacaataactaaagaatcatttaattgaaaagaatkgttgagaatatatgatattcttctctccaggtatgagcaaatagtctctttgcctttgtgatattaacaattaattcattaatgaaatatgcaaatatagttttataagtagaatgtgacagcatatgtgactcttcatagagatcatcttaattaagaaaaactaaagtggttatgtaggctgtgtacaacatgcttgggaactcacaagtttaagatatattaattt

SEQ ID NO: 237244 - DNA, 630 bp, Homo sapiens
gacattccatttccttttgcaaaaggggcaagggctctcagactgaacagagttgaatcccagcttctccatttcctggttgtgtgattgcattctgtcacttagatccaaagtctgttttctcatatgcraaaagctgtcaggttctaacaattatttgcagcattttggggaggattggtgataatatctggaaagtggctgcatatagcatatgttcattaagtaattgattttattttcatctacaactggggaagatggctatcaaagcatgagctaacgatactcctctgcctagaagtagaaggtggccatatggaagtctttttactctagctcaggagtctatgctaataagtaagtgttatctgtttcccagcctgggaaggctccaggctagaaaagaggagacttagattctagttttggatctgctattgaataaatctgtgacctagaacaagttccttaacctcagtcctttatccataaaatgagaggttgggttggatgccttaaaattaggtcgatctgtgaattctttcaagtttttgcatatgtatgggtcctgttccctaccccaccctctctaaccccatcagggtgaatcttgtggtttcctaataa

SEQ ID NO: 237245 - DNA, 327 bp, Homo sapiens
acatgtgtttggggcatcagcagagctcaaaaaacaagagagtaagtaaatgawtgaatgcagatcagattccatgaaccatttcaggctatggtaactagaacatttaaaaacaaatgacaactaatgagtttaaggtaattttgaaaaataaagatttatcttatatagattggcagaggaggatggaagggcagtgacggggatcaggatatgccaccctaaaatgtcccacttggcacaaggattattttgagctgaaggcagttgagggtcaacagggacatcaagagttttctgccttcagcttatctgcctaaaggcaga

SEQ ID NO: 237246 - DNA, 554 bp, Homo sapiens
ttgaaataacaataggcatttctggttttgcgaagccatggcgatggtgcagaataagtgaatcatctgattttcagtctcttactggatttggacctgggaggagcaatggaaggcaaaatgcctgctttggaaataagttgctttcactgtgaagggcgccttaaggtgccgtgttgatcagggatagyagatgtcattgagatggacaggcaggattgactggatctgtgtgacattgtggctcagccctgaagaccctgcctcttgtggtatctttcttctccaggagtgacataggaagaggagcgtgctgattccctaggttcatacaccagccatttcctctgatcactacaggatgaacctcaagtcactaactcagagttgccctcaatacacactctcttactagacgcggcccttggaaaatccagacatccttacatctcaggcatgtgaatagctcctcctttcccaatgttccacgactgtgttactcccttgaacctgatgcccagctccttccaccaggttctgaaagccccttgttc

SEQ ID NO: 237247 - DNA, 554 bp, Homo sapiens
ttgaaataacaataggcatttctggttttgcgaagccatggcgatggtgcagaataagtgaatcatctgattttcagtctcttactggatttggacctgggaggagcaatggaaggcaaaatgcctgctttggaaataagttgctttcactgtgaagggcgccttaaggtgccgtgttgatcagggatagtagatgtcattgagatggacaggcaggattgactggatctgtgtgacattgtggctcagccctgaagaccctgcctcttgtggtatctttcttctccaggagtgacataggaagaggagmgtgctgattccctaggttcatacaccagccatttcctctgatcactacaggatgaacctcaagtcactaactcagagttgccctcaatacacactctcttactagacgcggcccttggaaaatccagacatccttacatctcaggcatgtgaatagctcctcctttcccaatgttccacgactgtgttactcccttgaacctgatgcccagctccttccaccaggttctgaaagccccttgttc

SEQ ID NO: 237248 - DNA, 554 bp, Homo sapiens
ttgaaataacaataggcatttctggttttgcgaagccatggcgatggtgcagaataagtgaatcatctgattttcagtctcttactggatttggacctgggaggagcaatggaaggcaaaatgcctgctttggaaataagttgctttcactgtgaagggcgccttaaggtgccgtgttgatcagggatagtagatgtcattgagatggacaggcaggattgactggatctgtgtgacattgtggctcagccctgaagaccctgcctcttgtggtatctttcttctccaggagtgacataggaagaggagcgtgctgattccctaggttcatacaccagccatttcctctgatcactacaggatgaacctcaagtcactaactcagagttgccctcaatacacactctcttactagaygcggcccttggaaaatccagacatccttacatctcaggcatgtgaatagctcctcctttcccaatgttccacgactgtgttactcccttgaacctgatgcccagctccttccaccaggttctgaaagccccttgttc

SEQ ID NO: 237249 - DNA, 608 bp, Homo sapiens
cctgtgtgggagtgtgggaagtgaaatatgtgtttgtgggtatggtgtgagtgttcaagtccttggctccatgtrttgggggcatcagaaaaggaagatgagtgcagaacagatcactaggctggactatgcacaagcactgtttctttggaataatttttaaaaaggaatcaactaaacaaagatgatgatggcttgaagcgggcaccatctacactcacatgtgactcactgcaagtcattaagatataaacattaaggtaaaagaaaaaagccttgctctagctctgcctacccaaagtaacagattgggttggtggccctgaacatactcccacttccagcccaggagtgtcctgtgtgtacagcagccatacacattcacacacattctcagtgtcaggatcggccaccttctgactacagacctcacaaccagccttcacagtgttagttcctacttcacgctgagaaggcaacagaggttgaatcaaccagtgacgcacagccagatgtggagttaaaagttatttattgaaggaagactagggatggttcacttgatccttccccaaatccatcctcaaatgcacccgagcaacaagaag

SEQ ID NO: 237250 - DNA, 608 bp, Homo sapiens
cctgtgtgggagtgtgggaagtgaaatatgtgtttgtgggtatggtgtgagtgttcaagtccttggctccatgtattgggggcatcagaaaaggaagatgagtgcagaacagatcactaggctggactatgcacaagcactgtttctttggaataatttttaaaaaggaatcaactaaacaaagatgatgatggcttgaagcgggcaccatctacactcacatgtgactcactgcaagtcattaagatataaacattaaggtaaaagaaaaaagccttgctctagctctgcctacccaaagtaacagattgggttggtggccctgaacatactcccacttccagcccaggagtgtcctgtgtgtacagcagccatacacattcacacacattctcagtgtcaggatcggccaccttctgactacagacctcacaaccagccttcacagtgttagttcctacttcacgctgagaaggcaacagaggttgaatcaaccagtgacgcacagccagatgtggagttaaaagttatttattgarggaagactagggatggttcacttgatccttccccaaatccatcctcaaatgcacccgagcaacaagaag

SEQ ID NO: 237251 - DNA, 384 bp, Homo sapiens
ttatggatctcagagagcctttagttcacactcctcaagggatgattggggaatctgaggccaccagaggtgaaataactcaccaaggtcaaaaaaacaaaccctaggaagaaaagaattttacacagaaatcctgtgttctcctttgttttaattccttgtgactccctaatgtctatggaggaaattaagcccaggcagaaaattgattagaggtggaaaggggagcccttcctgactgagagctgggtcacttgtagttctggaaagttttaggagtgrcagcgtgaggacacagaaagagccttgccttgtgggtaagccttaatcggtgctaagataaatccctttaagtagaaataaagatgcttaatatttgagtgg

SEQ ID NO: 237252 - DNA, 357 bp, Homo sapiens
agcctaactttacaacttaagatactagaaaaggaacaaactaaacacagagctagcagaaggaaagaaataataaygattagagcagagataagcaaaacagagataaacgataaagaaaatcaataaaaacaatagttatttgaaaagattaacaacattgacaaacttttagttaaatggaataggaaaaaagataagagactcaaaccactaaaatgagaaatgaaaatggggaccttatagttattctccataaatgaaaggattataagggagtgttatgaacaattgtacacccacaaattgggtaacctagatgaaatggataaattcctagaaatacaaaacctactg

SEQ ID NO: 237253 - DNA, 540 bp, Homo sapiens
gtagttatagactttacaataaactataaaacattgttgaaataaattaaagaagacataaaataaatggaaagacatctgtgttcatgacctggaagacttaacattgttaagatgtcaatgctacccaaagcgatctacagattcagtgtaatctctatcaaaatcccaatgatgtttattgtagaaatatgaaaacccatcctaaaatccatctggaatctcaagggatcctgaatagccaaaagaatcttgaaaaakaagagcaaagcagaaagagtcacacctgttaatttcaaaacttactatgaatctctaataatcaaaagtgtggtattggcatgaatacagacatttaaaccagtagaatacaactgagagcccagaaataaactatcaaatacatgatacagttatttttgaaaggacagccttttcaacaaatggtgctgggaaaactggatatccacatgcaaaagaataaggttggactcttgcctaagaccgcatataaaaattaaactcaaggtggattcatga

SEQ ID NO: 237254 - DNA, 466 bp, Homo sapiens
aacttctggtggtagctggctggtcctgggctcaagttcatgagaggtgacacagctgtgcagccagcagttgctctacaaacatttagatgagtgaaaataatgagrgagggaccatccgacacctggatttgaaggatagtttggattttccaaaaaccacacttgcaacaggttgtgtactgcaggtagacctggattagtgacctaagtttcatcttatcttgaggagagtgaactttgatataagggctcagggaatcccagctcctttgttccttcccatgttggctgcagagaagggattccccatgatagccagggtcttcagggcctactgtcacaatgtacagaataaatggatggactaaaagggccaggttgctccagagcttccgaacgtgaccattcttcccagagtttcattgctccgaactctccttcacagactgaggtcagcctgccc

SEQ ID NO: 237255 - DNA, 466 bp, Homo sapiens
aacttctggtggtagctggctggtcctgggctcaagttcatgagaggtgacacagctgtgcagccagcagttgctctacaaacatttagatgagtgaaaataatgagggagggaccatccgacacctggatttgaaggatagtttggattttccaaaaaccacacttgcaacaggttgtgtactgcaggtagacctggattagtgacctaagtttcatcttrtcttgaggagagtgaactttgatataagggctcagggaatcccagctcctttgttccttcccatgttggctgcagagaagggattccccatgatagccagggtcttcagggcctactgtcacaatgtacagaataaatggatggactaaaagggccaggttgctccagagcttccgaacgtgaccattcttcccagagtttcattgctccgaactctccttcacagactgaggtcagcctgccc

SEQ ID NO: 237256 - DNA, 620 bp, Homo sapiens
cagccttttccactgccacctgtaattctacctgcaaggtcccctccaatgcttagagacatggacccgaagtgcccagtaccttacacacctccayggagctcaccttgccagtgtcaggacttgttcattcagcatccacctatggagtgcccgactctgaaaagcccacctccccaaactgtctgccgcacagtattcacccagcagtacccaccacccaccgccacagtgccagccagtgggaaggcggttctgtctgcctagcagccctccaaaacgcaagaaaatcctcaaaacttgcaggaccaaaacacaacacacagaaatggtgctttcctttgggcgagttccaaatgaacacattttcttcaaagcctgttatggcttgaggtgacatcatccttaggttacgatagttggatttttatatcttcctctgcatccaatctgttgcattatgttattttggctgaagtatacaaagaaaatctggtctcataaagatgtagtttgcaaaatggattaataactttttacataattatggatattctttgacaccatgccaaattcagcaagtagtacatactttcttaaagattagttgcaacatggaa

SEQ ID NO: 237257 - DNA, 482 bp, Homo sapiens
actttatgtgtgtttcccatttgataacaaataatttctaaagggtgaagatttttttaatgacttttattcaaacaggaagattgaacagggcaagtgatctgcacagtgagggtctctatggttctcagattcaatatttttttgaagctgccatgcctatttgaggatatgagcttttttgtaaatatcagatttctgcattcaaaaatgacagacaaataaccggttcttaatatctgtgaggacagggcatgcaagtagataataagatgaacttttttctctttgtaatttggtcttatttctcaaatcctcagtagtcattttagccctccttcsaactaatccttctctagagtaatacagcctggcaggatactttattgagacagtaattgtatagtttctaggtgttccccatctcaagattttgtatgttaccttgcctcagggtccagtgtggctgggccaacaatggg

SEQ ID NO: 237258 - DNA, 474 bp, Homo sapiens
agactgtttctttcacataggtgggaaccatggaagtgagaactgtaaaacccaccctcacccctctccctgtagtatcaacatgtttcaagtcaaattaaacaagatagagttatcaacagtgtattcatatatatatgcatatatttttatattgatggaaaaataggttrctcttgtatgtaactgggagacaaagcaagttgttctgcagtagcataaaagagattctttttcttaggatgcaaaatgaaataataaaaaaattacatgccattggtataactcaagaaattgtgatatttttgatcacggcatttttacttgattgcattatttaaaaatacaaagcctatatgaaaaatatttgccctaaatgttgtattgccctaaggtttttttgtttaattagtaggtaaaatctaccatcatatccaaattaagtgcctctagcacctaaccaattaaccaagc

SEQ ID NO: 237259 - DNA, 474 bp, Homo sapiens
agactgtttctttcacataggtgggaaccatggaagtgagaactgtaaaacccaccctcacccctctccctgtagtatcaacatgtttcaagtcaaattaaacaagatagagttatcaacagtgtattcatatatatatgcatatatttttatattgatggaaaaataggttgctyttgtatgtaactgggagacaaagcaagttgttctgcagtagcataaaagagattctttttcttaggatgcaaaatgaaataataaaaaaattacatgccattggtataactcaagaaattgtgatatttttgatcacggcatttttacttgattgcattatttaaaaatacaaagcctatatgaaaaatatttgccctaaatgttgtattgccctaaggtttttttgtttaattagtaggtaaaatctaccatcatatccaaattaagtgcctctagcacctaaccaattaaccaagc

SEQ ID NO: 237260 - DNA, 474 bp, Homo sapiens
agactgtttctttcacataggtgggaaccatggaagtgagaactgtaaaacccaccctcacccctctccctgtagtatcaacatgtttcaagtcaaattaaacaagatagagttatcaacagtgtattcatatatatatgcatatatttttatattgatggaaaaataggttgctcttgtatgtaactgggagacaaagcaagttgttctgcagtagcataaaagagattctttttcttaggatgcaaaatgaaataataaaaaaattacatgccattggtataactcaagaaattgtgatatttttgatcacggcatttttacttgattgcattatttaaaaatacaaagcctatatgaaaaatatttgccctaaatkttgtattgccctaaggtttttttgtttaattagtaggtaaaatctaccatcatatccaaattaagtgcctctagcacctaaccaattaaccaagc

SEQ ID NO: 237261 - DNA, 620 bp, Homo sapiens
cagccttttccactgccacctgtaattctacctgcaaggtcccctccaatgcttagagacatggacccgaagtgcccagtaccttacacacctccacggagctcaccttgccagtgtcaggacttgttcattcagcatccacctatggagtgcccgactctgaaaagcccacctccccaaactgtctgccgcacagtattcacccagcagtacccaccacccaccgccacagtgccagccagtgggaaggcgsttctgtctgcctagcagccctccaaaacgcaagaaaatcctcaaaacttgcaggaccaaaacacaacacacagaaatggtgctttcctttgggcgagttccaaatgaacacattttcttcaaagcctgttatggcttgaggtgacatcatccttaggttacgatagttggatttttatatcttcctctgcatccaatctgttgcattatgttattttggctgaagtatacaaagaaaatctggtctcataaagatgtagtttgcaaaatggattaataactttttacataattatggatattctttgacaccatgccaaattcagcaagtagtacatactttcttaaagattagttgcaacatggaa

SEQ ID NO: 237262 - DNA, 620 bp, Homo sapiens
cagccttttccactgccacctgtaattctacctgcaaggtcccctccaatgcttagagacatggacccgaagtgcccagtaccttacacacctccacggagctcaccttgccagtgtcaggacttgttcattcagcatccacctatggagtgcccgactctgaaaagcccacctccccaaactgtctgccgcacagtattcacccagcagtacccaccacccaccgccacagtgccagccagtgggaaggcggttctgtctgcctagcagccctccaaaacgcaagaaaakcctcaaaacttgcaggaccaaaacacaacacacagaaatggtgctttcctttgggcgagttccaaatgaacacattttcttcaaagcctgttatggcttgaggtgacatcatccttaggttacgatagttggatttttatatcttcctctgcatccaatctgttgcattatgttattttggctgaagtatacaaagaaaatctggtctcataaagatgtagtttgcaaaatggattaataactttttacataattatggatattctttgacaccatgccaaattcagcaagtagtacatactttcttaaagattagttgcaacatggaa

SEQ ID NO: 237263 - DNA, 578 bp, Homo sapiens
tactggacagtcctgcgtgcctcaacatgtgcttccttcaccccacccaagcctgcttgggctccagactctggaactttctcttggtctctgacattcttctctctgtgtatttgaagcttccacagtgacttgtgttaatcgttaatcttccctcagaagaaactttgtttctctgccactggggttgggttagctattgaatcaggccccacaaactcccacataaagacaaggggaaactgggtggcttcygacagtaagaacagcaccccagatttctcagccttgcagaaaagccccacctaggacacaggagctgctgctcttctgacatcgaaaactggctctcatttgtccctggaacttccattgactctgagcagtgcctcaggttcatcagtcatttccagagcaaggaagattgatggccctaagtctaatcagtgatcaggcttttcccagcatagattactctctcccccacacttccctaaagcccagaccctgcaaagaaggtcatgcagaatttgaactccaggccttttcctgtggggattgcatatttaaagcatggt

SEQ ID NO: 237264 - DNA, 620 bp, Homo sapiens
cagccttttccactgccacctgtaattctacctgcaaggtcccctccaatgcttagagacatggacccgaagtgcccagtaccttacacacctccacggagctcaccttgccagtgtcaggacttgttcattcagcatccacctatggagtgcccgactctgaaaagcccacctccccaaactgtctgccgcacagtattcacccagcagtacccaccacccaccgccacagtgccagccagtgggaaggcggttctgtctgcctagcagccctccaaaacgcaagaaaatcctcaaaacttgcaggaccaaaacacaacacacagaaatggtgctttcctttgggcgagttccaaatgaacacattttcttcaaagcctgttatggcttgaggtgacatcatccttaggttacgatagttggatttttatatcttcctctgcatccaatctgttgcattatgttattttggctgaagtatacaaagaaaatctggtctcataaagatgtagtttgcaaaatggattaataactttttacataattatggatattctttgacaccatgccaaattcagcaagtagtacwtactttcttaaagattagttgcaacatggaa

SEQ ID NO: 237265 - DNA, 573 bp, Homo sapiens
aacttctatatcttcccatttctcttaaaatccataggctacaagaccctgcatgctctggcctgctgtgccttttcaggctcatcaaatacttcactcacactgaaagccacactgcctgcctcctcatgtttagaataaacactttcatgcctcagggctttttctttgcctaaaacactccttttgcaggtcatggagttaccaattctcttgtggtcccagcaaaactgtcacctcctcaggcagcctttgctatcatccttgtcatctcaaacatayatcctgggctactgagtccatctcagcccgctctctctcctcagagctgtgtttatggcttgtggttgctttcagtgcatgggctgaatctctcactcaaatgtaagctccacgaaggcagaaatctggtctaccattttcatctctgtatccttagctcttggcacactataaatacttaacatgtttattaattgaataagtgaacaaaactagatataaatggctcagataactgtatactattcattattaggtattattttgggcattatgatggacgtaagaaaa

SEQ ID NO: 237266 - DNA, 676 bp, Homo sapiens
atgttacctctcacatcactgcaaaacacaggaaaatattgagtatctcaccagagtaatgccaagactaaaacaaacaaacaaacaaaaatagctcctaagtcagcctctctggtcaatggagcataatataatcatcttattaggaatggacagctctttagattcagctcttgcttattcataatccccggtgatatgctctactggctgcttataaataggtctgctcttgtgttttggccctcagtgatgacaacttcaccctagctggagctctccttttttcctttgaattcgcgggccctctgaaatgccacaaggctaacggcaggatgtgccttctttaaggaagccctacttcctggagcttctctggcaagctgtcctaggcagctcttcactgcaagcctctgatcagctgaatgaaaatgaagtgggcatttgtatttccccactgattgagttggctcaacttgacgtaggttcaaattcacaaaagcgtgtgcagrcttgcttccaggcttgcaatggagctggaggagggcaggctgtgtgcccggctttcttgcaaagcatggccttggatatgtgtcactggtaccctcaaaaaccaagtctccagaatcccccacccccacctacaagtcatgggatgatttgtgcaaggtgccct

SEQ ID NO: 237267 - DNA, 514 bp, Homo sapiens
tgctcacttcactgagctgattctggtgatccatatctgtataaaagcataggtgagtctccattgcctgggtgccttggagacatcagggatttaaaaggtcctgaggattaggaagggccttcaagacagactgttgagagtagggacttttaattctcatgtgttttgtcaccctagcttctcccaagagactgctggtagggtaggataggataatgtgtataaattatcctttacatagtagcagttaaatagatgctttcttcctgtttctcttttcatccttgagcttttaagtccctattcagttttgcaaccaaaaggtaaagtytgggggggaatacagaaactctgtttttaatgatgttgaagagaggaatctaaaaaagaaccttgtaataatcaaggagccctgacttccaccttcactgctcttcacatttactagatcattagactgttttgttgaaacatagaagctaacatttaaaacagaactggagaaggaaga

SEQ ID NO: 237268 - DNA, 583 bp, Homo sapiens
aataacttccatgccctttatttcatctggggatgagggaaaggagaaggatgctaagcaaacttgaaagctcctcaggagatccttaggaaccccgtactgctgggcccctttctcctgcttcccttccagggctcaagcatccttgggcaatgcttcttcaaattttgtgtgtgcagaaaacatgtaccaatcttgtttaatatatattctgatgcagaaggtcaggggtggggtttgtgattctgcatttctaacaggcttataggggaggctgatgctattggttcatactttgggtagcaagctgacaggcttgccatttttcaaatattagggcagatcctgaattcctgttttatcctgacttatggagctactacttttcctataagtagcctggcttaacctatcttataaatacaaatacctacacacacctacataagcacatgcatgaatgctatgacttagaatgtttagtgcttcgaggaagagaaaactctaactcaaactgccttaggtaaggaggacatktattattttatacaacagaaagagcagagggagtcaaaagcaagct

SEQ ID NO: 237269 - DNA, 507 bp, Homo sapiens
gaaataataaatggggcaaatgaagtggaaagaggcactgtccgagacaaacttactcttagttgatcatttcactaaccaatgccctttgcttccgtcactgattgctaacctgggctttcttcttagcacacaaaagtacctgaataaacaatatattttgtgtccctgtcatagttttccctttataagggctaattcctagatttccgtttctgataaattgttgagcratctggagaaaaaatttctggtatatatcaccaaacagtgcttgataagtgttttaaagatacagttgagctggagaaaagtaaggtcagaaaaagtgaatgccagaacagacaagaaagtgggaaacaagagagataaaggagttctttgccttgaaagtggctttggtccttaatgcttcaactgggagaccagagaccaagtgggaggatggtccagaaaccactttttccatctgggacatgaaaaatgatatcctcaaggagtaattag

SEQ ID NO: 237270 - DNA, 578 bp, Homo sapiens
ttggtgttttgctggaagacatatccggacagtcagtttccttccactgggtgttttttttttctttctgtaaacaaactttatttgcattctcttattaacattaaaggtttactgagtttagtaagaataaaaactctctgtaaatgtaattacttttagaatttatttccttttaaaagtgttcctaaaggaattcctgaaacacatcaaatttttcagatcgttacctctgaggaaaggcagaagtgatgagaattttggaggagaacatgggagaagagcttcgactctacctataatattttatttccaaatctaaatacatattaaaattcaataaagctgggtggtaggcatacatataatatattcaactctgtaagcttctgcctttgcaattttttatgataaaagtatttccaaaaatcctaaactaattatggtctttaaatataatttgggggagttaaraaaagaatctgaatttaagttctgccatgcagtgtggctgcatgaacttggccacgttcctttaactccttgagcttccattctcttataaattgagagggttg

SEQ ID NO: 237271 - DNA, 585 bp, Homo sapiens
tacagtcttcctgtgtatccagatggagaaagtggtgtgataagcatgtaccactgtctctgacacaattttatttatttttcttcctaatattttggctagcatccataaaatagtattaaatattaaataacggtgatgataaagaacaattgtcttattttttatttttattcttgataatgaaaatgttttcattatgtttccatttaaaaaatggcctatttggggtcaagatatgtattttcaccatcctggggaagttttatatctctttctttgttaagatttatttatttcatgagtgatttaagttgaaatttatcaaatctctttttggcaactatgaagacaattatatgcttctttttaaaagcttaatattgtaaattatattagtagactgtyaatgttgaattattttttcttacttttagagtaaagtctaatataatatacaatgttcttgaaaagctctattatgttggctgtcatttatttcaatttttgtatcaatattcataagtaagattgagctatattctatttttaattatttttgtcatgttttataattcataagtt

SEQ ID NO: 237272 - DNA, 453 bp, Homo sapiens
gatgagcagtgagaaacagaatttagagaagaaacaggaagtcctagctacatgcaggtcctggttcatatggtttctgagttgagmcttccttggattccatgaaccagtttgccagttatttacctattatctctcagcttcaatcagcccttctgtattctgcaaactgcatttcccaggcccctctgctagctggcttcccatgagcttataagaggcactaaaggacataagaatgcccaagggaaagagcctgtcctttctgttttctgtttttggcagcatctttgcactagtggcagttggctgcagcttccagtgtcttggcccctgagtagcagccttagcacaggcccccagaggcgccaacagcagctggaagggagctgcctcttcctcagcaatcttagtccacagagcacctcccctgaaatccatggccctgggaac

SEQ ID NO: 237273 - DNA, 587 bp, Homo sapiens
tctgctacgaaaacaattttgaagattcttgttatagagaagactgttcaagctacscaaactacttcctttatatatatatttttaattttcttttaccaagattcctaaagaaacagatattttcatactttttttgacatttaaaaagttgggccatgaaatctttagaggcaggccactggtattaaaatattgatggtagaaaaaagagatagaaattggtggtgacaaaggaggcactacatgaggaatagaagttatgctcttactgcacatccttggagaaaacacgagccatgttcctgaacctctaaatgtcattgctgtcaaggaagaagctgctgcaatggttgggacagagattgatgaaatcttagagcaggggtccgcaacccccaggccgtggactggtaccagtccatggcctgttaggaaatgggccacacagcaggaggtgagcatgggcgagagaacattaccacctgagttctacctcctgtcagatcagtggcagcattagattctcacaggagcgcgaaccctattgtgaactgtgcatgcgaaggatctaggttacgtgctcc

SEQ ID NO: 237274 - DNA, 587 bp, Homo sapiens
tctgctacgaaaacaattttgaagattcttgttatagagaagactgttcaagctacccaaactacttcctttatatatatatttttaattttcttttaccaagattcctaaagaaacagatattttcatactttttttgacatttaaaaagttgggccatgaaatctttagaggcaggccactggtattaaaatattgayggtagaaaaaagagatagaaattggtggtgacaaaggaggcactacatgaggaatagaagttatgctcttactgcacatccttggagaaaacacgagccatgttcctgaacctctaaatgtcattgctgtcaaggaagaagctgctgcaatggttgggacagagattgatgaaatcttagagcaggggtccgcaacccccaggccgtggactggtaccagtccatggcctgttaggaaatgggccacacagcaggaggtgagcatgggcgagagaacattaccacctgagttctacctcctgtcagatcagtggcagcattagattctcacaggagcgcgaaccctattgtgaactgtgcatgcgaaggatctaggttacgtgctcc

SEQ ID NO: 237275 - DNA, 587 bp, Homo sapiens
tctgctacgaaaacaattttgaagattcttgttatagagaagactgttcaagctacccaaactacttcctttatatatatatttttaattttcttttaccaagattcctaaagaaacagatattttcatactttttttgacatttaaaaagttgggccatgaaatctttagaggcaggccactggtattaaaatattgatggtagaaaaaagagatagaaattggtggtgacaaaggaggcactacatgaggaatagaagttatgctcttactgcacatccttggagaaaacacgagccatgttcctgaacctctaaatgtcattgctgtcaaggaagaagctgctgcaatggttgggacagagattgatgaaatcttagagcaggggtccgcaacccccaggccgtggactggtaccagtccatggcctgttaggaaatgggccacacagcwggaggtgagcatgggcgagagaacattaccacctgagttctacctcctgtcagatcagtggcagcattagattctcacaggagcgcgaaccctattgtgaactgtgcatgcgaaggatctaggttacgtgctcc

SEQ ID NO: 237276 - DNA, 553 bp, Homo sapiens
agaataagctctcaactgtaaaatgaatgtccatgagtgaagtaagttagaaaaagccttggtgaataaaataagaaaaacatcaggattagaggggaaactcagagaatgtacaattcaactctggtgcaaatgttkaattccgtctaaagcagccttgctaaaagtattcctttagcagtacagacagtccctgacttaatgatggtttggcctacaatgttttgagcatgtttaaggtatgctaggctaagctatgatgatcagtagattaggcatattaaatgcactttcagcttatgacattttcaatttagaatgagtttattaggatgtaactctgtcttgagaggtgtctgtatttcccaatggagcgctttccattttcagacagttcttacattagctagagcaatgctagtgtttataaaagataaagtgttcaaatctagttaaatagcatccaaaatatgttgcctaattaatgacaggctcccctccacatattgattctgggcctaggctccttccgtctttggcacatagcttcaaa

SEQ ID NO: 237277 - DNA, 612 bp, Homo sapiens
ttggtgaataaaataagaaaaacatcaggattagaggggaaactcagagaatgtacaattcaactctggtgcaaatgtttaattccgtctaaagcagccttgctamaagtattcctttagcagtacagacagtccctgacttaatgatggtttggcctacaatgttttgagcatgtttaaggtatgctaggctaagctatgatgatcagtagattaggcatattaaatgcactttcagcttatgacattttcaatttagaatgagtttattaggatgtaactctgtcttgagaggtgtctgtatttcccaatggagcgctttccattttcagacagttcttacattagctagagcaatgctagtgtttataaaagataaagtgttcaaatctagttaaatagcatccaaaatatgttgcctaattaatgacaggctcccctccacatattgattctgggcctaggctccttccgtctttggcacatagcttcaaaggcttccaagttcatcagcatcaagccagtggaagaagaaagagcatagcggactgtgcaaagaaggtgttcatgggccaggcctgaaaacagcccacgtcacacacccttggtcag

SEQ ID NO: 237278 - DNA, 553 bp, Homo sapiens
agaataagctctcaactgtaaaatgaatgtccatgagtgaagtaagttagaaaaagccttggtgaataaaataagaaaaacatcaggattagaggggaaactcagagaatgtacaattcaactctggtgcaaatgtttaattccgtctaaagcagccttgctaaaagtattcctttagcagtacagacagtccctgacttaatgatggtttggcctacaatgttttgagcatgtttaaggtatgctaggctaagctatgatgatcagtagattaggcatattaaawgcactttcagcttatgacattttcaatttagaatgagtttattaggatgtaactctgtcttgagaggtgtctgtatttcccaatggagcgctttccattttcagacagttcttacattagctagagcaatgctagtgtttataaaagataaagtgttcaaatctagttaaatagcatccaaaatatgttgcctaattaatgacaggctcccctccacatattgattctgggcctaggctccttccgtctttggcacatagcttcaaa

SEQ ID NO: 237279 - DNA, 612 bp, Homo sapiens
ttggtgaataaaataagaaaaacatcaggattagaggggaaactcagagaatgtacaattcaactctggtgcaaatgtttaattccgtctaaagcagccttgctaaaagtattcctttagcagtacagacagtccctgacttaatgatggtttggcctacaatgttttgagcatgtttaaggtatgctaggctaagctatgatgatcagtagattaggcatattaaatgcactttcagcttatgacattttcaatttagaatgagtttattaggatgtaactctgtcttgagaggtgtctgtatttcccaatggagcgcttyccattttcagacagttcttacattagctagagcaatgctagtgtttataaaagataaagtgttcaaatctagttaaatagcatccaaaatatgttgcctaattaatgacaggctcccctccacatattgattctgggcctaggctccttccgtctttggcacatagcttcaaaggcttccaagttcatcagcatcaagccagtggaagaagaaagagcatagcggactgtgcaaagaaggtgttcatgggccaggcctgaaaacagcccacgtcacacacccttggtcag

SEQ ID NO: 237280 - DNA, 612 bp, Homo sapiens
ttggtgaataaaataagaaaaacatcaggattagaggggaaactcagagaatgtacaattcaactctggtgcaaatgtttaattccgtctaaagcagccttgctaaaagtattcctttagcagtacagacagtccctgacttaatgatggtttggcctacaatgttttgagcatgtttaaggtatgctaggctaagctatgatgatcagtagattaggcatattaaatgcactttcagcttatgacattttcaatttagaatgagtttattaggatgtaactctgtcttgagaggtgtctgtatttcccaatggagcgctttccattttcagacagttyttacattagctagagcaatgctagtgtttataaaagataaagtgttcaaatctagttaaatagcatccaaaatatgttgcctaattaatgacaggctcccctccacatattgattctgggcctaggctccttccgtctttggcacatagcttcaaaggcttccaagttcatcagcatcaagccagtggaagaagaaagagcatagcggactgtgcaaagaaggtgttcatgggccaggcctgaaaacagcccacgtcacacacccttggtcag

SEQ ID NO: 237281 - DNA, 482 bp, Homo sapiens
cacatttttaaaatgacatgcaatgagatggtagaatggaaattgtttgccctatgttagtatcaactaaagcacccatatagatatcaggacaccaagatgagccaaagacagagtgcccaaatctatatgctccccatatgyagatttataaagaaaatgatcctgagaaactagtccaagtctcttagatccttcagccagatgaaagattaaaaatggggtcagaaagaaaaaatagaaaaggagatgtctttgaggagtgcatttgtctcactgtgagtctctacctgacccaactttggagcagaagtaaagtggcaatcttttcacatctagtctagtgaggcgatcttcaaagggaccacttggagaaaatgtatgtgttctctgcaagtgagagatgccaagaatattgatatctaagaaagcaagaactgaggtctcactaaagggtgataaagagactgactggttaaagg

SEQ ID NO: 237282 - DNA, 577 bp, Homo sapiens
tcagtgttgcatagagaattggatgctctttcttttcacttcttgccttgcaaaccatggcactaaagtatcttctttgaaggttgtaacgttttttgatgctcatgaatgattctcctggtaatatggtctattgtgccatccaagaatgtcagttcaaagctctgtgataagcttatccaggctgcctaaaccaaaatgagaactgcaacaaagacttgtgctggagctgaattagcactattgctctgggtttgccaaatttatctaatgaacaatgttatcttagcactggtatgaattagtatgaattatactatggatacagttgtctttcaccagatcttttgcaagagaaattggacaggtgttcccactggcttaaatagctaaatgaaattaacatttatttctacccatagctcctacttaaatgtttttaagccttattatcttaatagttcggtgaccttagaaaggcaaataggagyttaaccaaaaatcaatttgctatcagttgccttccaacttagttgacagtctttttggcaatatacattcatgtttctggtattgc

SEQ ID NO: 237283 - DNA, 570 bp, Homo sapiens
aattctcagtagcttgaacatagtaggtcaagcatgtcagtaaatggaaacatgggaggaaggctgtgggctccatgatgagagaaactatgacaaaactgatgcttgtatcacacccccacccaacaactaccaccctctactcctctcctggtacctagctcaagaccaggtactggataggtttctattaagcctttctgaatgaacaaacaaatgaatgaataacaagtaacatgcacttccctcacaaagaacactggcattttaagaccagccttgatgccttaaaccaaacaaagyagaatgtcaggccctgggtgaggtacatacactgtggagctattttgagaaaatataatccctattctgtcatttcatgtagggaaacaataatctcccaaccctgactgtattccctaccctacccctacatacacacacacacacacacacacacacacacacacacacacacacacacacacgcagacatgtcagctggttctgggtgccaagaattatggaccattcttactggattcctatactttctatactaacagatct

SEQ ID NO: 237284 - DNA, 502 bp, Homo sapiens
tcagcagggaggatgggctaagtcaatgagcagcttcatttatatctgcaaactctgcttttcaatccccagttgatcctggacccacagcacagaaaatcaggtgtttattttcattctggtctctctgcctaatgctttccttcaaaaagaataaaacttcctgaatcctagaagaaaaattaagccaaaccatcaatcttgcctgttttttcaaacaatgcccctgttctagaaggatatgaaaagaaaaaaaatgctwgacacacctaactctataagctgagtcataatacagacacatttgctattacaaagtgctgattggcatgaccttaatccatctcctttgggggacaaaagtgtgttttcttatgtttgtgctgaaatatgcacacacattaaggggtcattaatatgatttgaacactgattatgtattaggctgtgagtaaaatgtggtctcatggtaccctaggctatcttgatcagggcacttaca

SEQ ID NO: 237285 - DNA, 530 bp, Homo sapiens
tgatgttttggattggttgtgaataatagcagcagaggtctagccagctgactagaactgaagtggctcagtgactctcctgcctggagtttacttggcaaggaggtttctgaatcttccatccagatccttctcaattctaagatgcagattcagattattaagatgcaaaaatattattctgtttagggcaacactctaccatcaggtcagtagtaaaagtattttgagtttccccagaataagcaaaacctacrgtgccccattcgttggactaggccattttgtgcatccaaagagactgaggcagagccaatctggttcactttaagcaggaagcagttgcattattcctcatccatggccttagcaatttgctctcagttggccactataagatcatttcctatcacctggatatttgtatttacagggagtttattttttcccaaatttgccagccattctggccaaagaaatttttataatacagcactgagtagttcttgatgagctaccacaggctgatg

SEQ ID NO: 237286 - DNA, 561 bp, Homo sapiens
gagatgtctcttcctctgggaaaccttccctaatccctcaactctgggggaggcctcccctctgtgtgcctgccctgccgcaaggctcattcccttgggttcagattcctggttacttgtctgtttctcagaccaggctgggacccccaagaaagcaggggcctggccaccattgctctcctggtatcctcagtgctggcccaagccctctgcacatggatgctcaaaaatattggtggaatgagtaaagagatgaatgagkgaatgaatgaatgaacaaatgactggccagaggctgggaggtacagagcagaaaaaaaaaaaaaaacaaaaaccctaggctggagcagatggacctatttgagagagagggagggagggcagccctcttcagacctggtagtagcactaacctggctccaccacaggcaggagcccaaggtgtggcttccaacccatacggctgcggtgaggatggagccgcactgaggagcctcttaagctgccagccattcagctcgtggccaggcttgggtttcattagagtgagacatctgttct

SEQ ID NO: 237287 - DNA, 460 bp, Homo sapiens
tcctgccttctctcctctttcccaactgtggtgcctcggctcccaggatagggagggggccagggtcacctgtgctgatggtcctctgtggcctccagccccagaaaggtgctgcactccccactcaccaggcaataaaggcaggacaccttctggagaaaaagtggaattcttctaggaaacatggggagggcagagagagctggacttgtcctttttccttggggaagagattgctttgcgaggggacagcaatgatgtcctctctgtgggctgccagggccctgaaggcactgcaacctttcagtgactgccacgccacggsagcacattcccccaaacaccatgggcctcgctcctccctctccatagtccagacccctcccaggaccctcaaagtcctccagaccaggccttgctagagtcgtttaagggagggcaaaggaaggagctggctcca

SEQ ID NO: 237288 - DNA, 684 bp, Homo sapiens
atgaagaaccaaatggaaattttagaattccagaatacaataagcaaaataaaaactcaatagatgaactcaataacagcacagaagaaacagaggaaagaatctttgagctagaaggtagaccaatggaaattattcaatcttaacaacagagaaaatagaatttttaaagaaataaatagagccttgggggcctgtgaggctgtaacaaaagatctaatctgtcattgaagtcctaaaaagaaaagagaaagagggcaggtctaaagaaagtactctaagaaataatggccaaaaacttccctaatttgggaagagacataaacctatgggttcttggaaggccaaacagaataaatccaaccaaatcaatatcaaaacacatcataattaaacttccaaatataaagacaaagaagaaaatcttgaacatagtcagagaaaaactacacctgagcaatagggggaaaacaattctaagaaaatagatttttgattagaaagcatggagactagaaaaaagtggcacaatgttttttaaatgttgaaagaaaataactgttaatacmcagtgaaaatatccttcaggaatgaaggaggaataatgacattctcagataaagtaaaaccaagagaaactattgccagcagatataccctaaaaggaaggctaaccaaagtttt

SEQ ID NO: 237289 - DNA, 585 bp, Homo sapiens
ggaagaagcctctcaatggacacacactacaatataaatgaatctccaaagtatgctaagagaaagaagccagacccaaaagtctacatactatgtgaatccattcatatgatagtctggaaaagacaaaatyacaagaagagaaaatagatcagtggttttctgaggttgggtatggagggaaacagttggctacaaaagaccacaagggaaatttttgttgtgatggaagtatcctgtatcttaattgagatggtggttacatgacggtatatacgtgtcccaattaataaaactgtacaactggaattggaaaactctactgcatataaattatatatgaatatgcatgactttaaaaaggtcgttctttaaaggtcaggtctttcaatagatgattagagggtacaaatatatagttagaagaaataaggtctagtgtttgatagatcagcaaggtgagtatagttaacaatataatacatatcaaagtagctagaagggaattattcaaacattcctagcataaaaaaacaggtaaatatttaaggtgatggatatgtcagttaccctgatttgatcttt

SEQ ID NO: 237290 - DNA, 565 bp, Homo sapiens
gatggggattgcaatggcctgaatttttatgtcccctcgaaattcgtatgttgaaatcctaatcccaaaggtgatggtattaggacctagagcctttgggaggtgattaggtcatgagggtggagcccagagagatcccttgtcccttccaccatgtgagaacacaccaagaaaactgctatctatgaaccaagaagcagcccctcaccagacactgaatctgccagcactttgatcttggacttcccggcccccagaactgtgggaaagaaacatctgttgtttataagccacccagtttakggtattttattttagcatcctgataagataaaatttctgggttcagaaacaatacagccaaccctagggaatgggctaccagataaatgtctggtcactagaataaggacacaatgcagaaatcttgccattaagaaaatggggaagaggatagagaatttgttttctggagaaataattacggggcagagattcagccacagcaaggtttagaaacaatgtaagaacccaataacttggaagagcgttgctgaaatttgag

SEQ ID NO: 237291 - DNA, 578 bp, Homo sapiens
gaatgaatctaaatggcttaatgttataggaattgggatgattaagcctgaaaatgagaagactttaagggcataagaccactcttcaaataaattagaaggctagtgaacaactgccaatacattttatagtcagatttatatcgacaccactgaactagatggttcccaaaatcttttctagatatgagattctgtgttcttctccaccacgggctattccaaccttctccttcagagcacctccaccrgtctagaaatgtacaaatactaacaactggtttggaatgccccaatataaaattttcaatgtcaaagatggttctggctttcacatcaactttttgatagttttgttttgttttctcagactcttctaaaaggtctgcctgactacacagaagttattttctataagactaaaacatataaagaaattcatgcctaaacttgaagcatctcatcaatttgtaatcaagtctcttttgcatagacatgttgctcaagtcttttaaaaaacatccacaagcaatttcttctctcctttcaggatttttaaccactggaatgagcagcaa

SEQ ID NO: 237292 - DNA, 512 bp, Homo sapiens
tgagccagctcttcttcctccacccamcatgccagcttccttcctccttcctacttgcagactgtgaggagggaagagagagaggaactgggaatgcagtgtttacaagaatttatcttctcccttttttttcatggggtggataagcactcattaagattggaactctaggagagggaggctgtttttttgtttcctgggtgatgtatgctgtgattagagcccatagacctatcctggaagtcttgggagtgccgctgagcatggggctgacttaagttggggcatgaacttggagtcaggtgcctgcatttcacctgcagatcactaaaggtggggatcttgatgaaattagctatatcaatgcaagagaaggtactatgaagctgtgcatgggaagaaaaggtgtcttttcatccttcccaaagcttttggaggatctcagtgatccaatggattcacaatgaaggggcatgattttaacaagattaataacaaaaaaatgtatcatg

SEQ ID NO: 237293 - DNA, 652 bp, Homo sapiens
aattcataccactcaatgtggaatatacactgagcaagataatctatagtttggattttacgagccaaaaaacaaacagtgggggttgctaaaggaatgcatttcagggctgcctagtgcagtccaggagggtaagagaaggcttcctgggaggcaataatgtctaaggtgagacttgaagtaggaaaaggagttggccatgtaaagcaggctgggacaggaagaatatttcatcagaggcaacaagatatgggacgtctctgagataagagtgatcgtggtgatccgtatactgaaggacaattaatatggctagcgagtaggatatgatggggaaatgtggtggcagtaagaaggattctgatggcagagggtactggatgtaggtggatgcacttaggcattattctgaaggcaacaagaagcaattaaaggrtttcaagcaagggaatgtgaaataattatctttgcgtttgacaaaaacgtaaaacaaatgaagtctttcttttttctgtgtggaaactgaagttatctggctgaaaggtgatggttgtttctatttttaaatcttaacattcagccataaaggacagcagcacataggtttgagatatctgggaaaaataattgaggaattgaagggggaaatgag

SEQ ID NO: 237294 - DNA, 563 bp, Homo sapiens
atgacacaatcatggaaacagcaataagatccagcacatgaatgggaagtatagtaaaacctgaatataaagattaattagaggtgattacagttccagtcctggcaggattcatcacctgctgactaaagagcccttgggctctgagtaatcagcagtggtagccaggcagtactcactgcaggccctaagtgaaaaatcaaagctctgctgtcttcggttatgacccagcacattcctagctatggtggctatggggagaaactccttatgcttgagcaaacaagagtgaaaagcaaaggasactttgtcttgcagcttaggtaccagctgagccacagtggggtagagcaccaagtggattcctggcatccccagtttcaggctttggctactggacagcatttctggatctttcctgggccagaagggggcccacatccctgaagggagagacccatgcttgacagcattcaccacaaactgactgaagagcccttgggtgaacattggcagtagcctggtggtactcgctgtcggcctgagccagtggtggccgcagg

SEQ ID NO: 237295 - DNA, 496 bp, Homo sapiens
agtgagttttgtttaaaatattaatagtcattacgtggaccaaaaaaaagcccagtgtcaaataattcgggaaatactggattaaataaaattaaacaggtttcttaagtgcaggacttctcaaagccttacctatgctaatgagcataatgaatctgagagacagagttataatgagtacaattccaaaacttaagaaatactktccctcagaaggaaaaggtttgcatttctgaagaaaaataaatgcatttgcaagacctagacatttaaaatagtgaacatggttcaaacatgcatcaaaggattgattttaatacttttaggtatcttttaggtattaagtccatctaaacggtttgaatccatctgtcaaatagcagaatctacactattctaaacatttaccatttgtaaatatctggatacttggctttctttaaataaaaaagcttagctggtgggccgaacttttcactgtagtcacaggcacaat

SEQ ID NO: 237296 - DNA, 580 bp, Homo sapiens
tggaataatatgaataagcagattgaacttggtcaaagtgttgtgtcaagagagatttgttttcttttgtgagtgttataggcaatacttgaaagagttgaagtgggatttggtcatggaaacagttatttgaagggcacattgcttctttgtctcaacagaacatctcccaaggttaattttcactggccctaaggggaggtggtggaggaccactgagtcaaaagtgatccaaaagctcataccaggagaagatttttcaattcagaasttgcaactgatgaccggtgtaaaagtttggtgaggcaaaaggtacctccttgttcctgaacatgaactatctgtttataaaatgcagtctattattgcctttgactatatgaaacattaatcatagcttctagctgggtcaaaatcagattgttactaaattataagaaggaatcagagcacatttccatgtagtaagcatttattctgatctagacactgcacttgactctagggatacaagtattcatttattcattcattcactcatccagcaaatactttctgggtgcatattatatgccaggca

SEQ ID NO: 237297 - DNA, 576 bp, Homo sapiens
actgcacttgactctagggatacaagtattcatttattcattcattcactcatccagcaaatactttctgggtgcatattatatgccaggcaccattttgrgcactggataaaacaacgaacccaacgaagtctctcttctggtggagtttgctttctagaaggagagtcaaacaataaagaagtaaacaaggaaagttataatacagcttgagggagttattagagatctgaagaaaaacaaaatgaggataacatgctgcatacacctttgttcatttgctcatttacccaacaaaattttatggaggccctccatgtgccaggaaggcagtcaggagccaatgaagactcaacttgtcctgattgctatgaagaaaacaaagggctgatattgacaagaacaaatggctgggatggaggcctgtgtgggcccagaagtactgaaggctgtgggtcaggaaagtcttctctgaagacctaaagtacgagaaggaagtggcagtgggaatggttgtgttggttgtctttgtgtgtgtgtgtgtgtgtgttggtggcttgggactataggagaggc

SEQ ID NO: 237298 - DNA, 576 bp, Homo sapiens
actgcacttgactctagggatacaagtattcatttattcattcattcactcatccagcaaatactttctgggtgcatattatatgccaggcaccattttgagcactggataaaacaacgaacccaacgaagtctctcttctggtggagtttgctttctagaaggagagtcaaacaataaagaagtaaacaaggaaagttataatacagcttgagggagttattagagatctgaagaaaaacaaaakgaggataacatgctgcatacacctttgttcatttgctcatttacccaacaaaattttatggaggccctccatgtgccaggaaggcagtcaggagccaatgaagactcaacttgtcctgattgctatgaagaaaacaaagggctgatattgacaagaacaaatggctgggatggaggcctgtgtgggcccagaagtactgaaggctgtgggtcaggaaagtcttctctgaagacctaaagtacgagaaggaagtggcagtgggaatggttgtgttggttgtctttgtgtgtgtgtgtgtgtgtgttggtggcttgggactataggagaggc

SEQ ID NO: 237299 - DNA, 576 bp, Homo sapiens
actgcacttgactctagggatacaagtattcatttattcattcattcactcatccagcaaatactttctgggtgcatattatatgccaggcaccattttgagcactggataaaacaacgaacccaacgaagtctctcttctggtggagtttgctttctagaaggagagtcaaacaataaagaagtaaacaaggaaagttataatacagcttgagggagttattagagatctgaagaaaaacaaaatgaggataacatgctgcatacacctttgttcatttgctcatttacccaacaaaattttatggaggccctccatgtgccaggaaggcagtcaggagccaatgaagactcaacttgtcctgattgctatgaagaaaacaaagggctgatattgacaagaacaaatggctgggatggaggcctgtgtgggcccagaagtactgaaggctgtgggtcaggaaagkcttctctgaagacctaaagtacgagaaggaagtggcagtgggaatggttgtgttggttgtctttgtgtgtgtgtgtgtgtgtgttggtggcttgggactataggagaggc

SEQ ID NO: 237300 - DNA, 508 bp, Homo sapiens
cgtaagaacccaatgaagtaggtatggctattaygtgtattttacagacaaggaagcaggcttagggagataaggtcatttgctcaaggtagaagaattagcatgcaggtaaagattaaatcatgctctttaccccctaaatcacactttttctgcagcaggaaatgtaagtgccaagccatgggagggtaagacgttattttcttcttgttttggtcaaattaatttagagcaaaagtgatctttgagatcaaccccaatcctaccttctttatagatgaaggagacaagatttgtgatgctgagtaatttgctcaaggtcgagctactggcagtggtagcgccataaagaacaaaggtgacctgtgctctttccggcacagtatgctgggcagggcaagaatctgaaattacagaggagtgagatggtgctgactaagagttaagagagctaaaggtttttgtcctaaattaaaatgagattacactttcttgaaatacaaatata

SEQ ID NO: 237301 - DNA, 512 bp, Homo sapiens
aatgaagtaggtatggctattatgtgtattttacagacaaggaagcaggcttagggagataaggtcatttgctcaaggtagaagaattagcatgcaggtaaagattaaatcatgctctttaccccctaaatcacactttttctgcagcaggaaatgtaagtgccaagccatgggagggtaagacgttattttcttcttgttttggtcaaattaatttagagcaaaagtgatctttgagatcaaccccaatcctaccttctttatagatgaaggagacaagatttgtgatgctgagtaatttgctcaaggtcgagctactggcagtggtagcrccataaagaacaaaggtgacctgtgctctttccggcacagtatgctgggcagggcaagaatctgaaattacagaggagtgagatggtgctgactaagagttaagagagctaaaggtttttgtcctaaattaaaatgagattacactttcttgaaatacaaatataaattaaaggatccta

SEQ ID NO: 237302 - DNA, 636 bp, Homo sapiens
aatatagaatttgatatcaaaagtgatgtgatagcatcaaagtcaaaatatgtgacactgacttagcatttggtttcctggcaatgggcagtagggtaattgatattggaatctggaaagataaagactcatcctatttggtggcaatgcatttggtaaagccattatcctatgagagctcggaaaacagacaaagtgaagacaaagyatacagctctaggaaaataaattggaaaatggaatattattagagtgtgttaattattgattagttattcaaagaaagatatgagctgcggcaagaactggctggttaacaagcagaaattttaaaaaaaatgtaggaacaaaatgtgggggcttaagacattgtaaaggccaattgcttctagacccggtgtctagaaatttgagagaaataggcatggtgaggagagggagggtggcaacaagtcagaaagataaagcaggtttcagaattatatctagcaaaaacaaatttgggtgtttactggcacacgaacttgtctggaacaaatagatacaaaatctactaagggccaggcacagtggctcatgcttgttatcctagcactttgggaggccaaggtgggaggatcacttcagcccaggagt

SEQ ID NO: 237303 - DNA, 526 bp, Homo sapiens
cagttccaggaattgcccacccttttccaagaaactcatgaataatccaccccttgtttagcatataatcaagaaataactatatgtrtccttagttgagcagcccatgacactgctctgcctatggcatagccattctttattcctttactttcttagtaaacttgctttcactttactgtatggactcaccccaacttcttttttgcatgagatccaagaaccctctcttgaagtctgaatcgggacccctttctgataacaaaactatacaaaacagtactttgtaagaatcaaaataagaaaatgtatgtgaaaacattttgtaaattagaatgcattatataaatacattctattattcaaaactatttttataatgcatattatatgctggcactatgttgtgaaataagaacaaatcaatcattggagcttatagtctggtatggaagatgaacattaaacagatcattatttaattatcaatgtaaacaatgttatttgtcaataatgaatatgtttg

SEQ ID NO: 237304 - DNA, 526 bp, Homo sapiens
cagttccaggaattgcccacccttttccaagaaactcatgaataatccaccccttgtttagcatataatcaagaaataactatatgtgtccttagttgagcagcccatgacactgctctgcctatggcatagccattctttattcctttactttcttagtaaacttgctttcactttactgtatggactcaccccaacttcttttttgcatgagatccaagaaccctctcttgaagtctgaatcgggacccctttctgataacaaaactatacaaaacagtactttgtaagaatcaaaataagaaaatgtatgtgaaaacattttgtaaattagaatgcattatataaatacattctattattcaaaactatttttataatgcatattatatgctggcactatgttgtgaaataagaacaaatcaatcattggagcttatagtctggtatggaagatgaacattaaacagatcwttatttaattatcaatgtaaacaatgttatttgtcaataatgaatatgtttg

SEQ ID NO: 237305 - DNA, 449 bp, Homo sapiens
atagtccatttagccaccaactctttctacttttctttgtatttactttgttgttcctagtcccctttcctctctccaccctggttctaggaatttaattatgtatcttgaagtttgagacaccctaggggattccccacacccagttctccatatattttcatgcctagaatcactctcattagacttccctcatatgtgtatccttcatttgtgttggaaactgccttcaaaatgaagaccctccaggtctgctcccataggtaagtgatgaggacaggtggagacagatcaagaagacagctgtgggggactgggttggggggggtggggctgcagattgaaractatgataggctggactccctggggaattcagactctgactcagaggtttgtgtgaaggaagcttaatggttagaatgctcaggatcgacatttataggaga

SEQ ID NO: 237306 - DNA, 431 bp, Homo sapiens
accagcctgtgcaacatggtaaaaccctatctctacaaaaaaatacaaaaaattagacaagcatgggggcatatgcctgtaaggccgaggtgggaggatcacatgaggccaaaaagtcaaggctgcagtgagccgagatcatgtcacygcactccagcttgggtgacagaacgagaccctgtctcaaaaacaaacaaacaaacaacaacaacaaaccaagaaaagaggctgacaggttaagctaaaatacaaaaataaagctatattctatttataaaaaacactttaaaaaataataaagaatggttgacaataaagcaaaaggcaaaaaaattcaggcaaatatcaagaaaaagaaaatagaagtggcaagaaaaatgtcacacaagtagaatttaaagataggaatattaaacagaatgaataagaac

SEQ ID NO: 237307 - DNA, 431 bp, Homo sapiens
accagcctgtgcaacatggtaaaaccctatctctacaaaaaaatacaaaaaattagacaagcatgggggcatatgcctgtaaggccgaggtgggaggatcacatgaggccaaaaagtcaaggctgcagtgagccgagatcatgtcactgcactccagcttgggtgacagaacgagaccctgtctcaaaaacaaacaaacaaacaacaacaacaaaccaagaaaagaggctgacaggttaagctaaaatacaaaaataaagctatattctatttataaaaaacactttaaaaaataataaagaatggttgacaataaagcaaaaggcaaaaaaattcaggcaaatatcaagaaaaagaaaatagaagtrgcaagaaaaatgtcacacaagtagaatttaaagataggaatattaaacagaatgaataagaac

SEQ ID NO: 237308 - DNA, 473 bp, Homo sapiens
ataaagcaaaaggcaaaaaaattcaggcaaatatcaagaaaaagaaaatagaagtggcaagaaaaatgtcacacaagtagaatttaaagataggaatattaaacagaatgaataagaacattatgtaaataaaggcacaacttgacgaagaagataaaatagtgataaaactatacacatcacaaaatataagttaaatatgtaaagcatataaaaatagaaataaaagaagaattcatctaaaatacaattagaagaagctattttaatacacttattacagaatttgttatatatagtaaacaataagtcaaaggcaaattaaataatacttgattttcagatagaaaaaaaatttacatcccttaaatagcaaatacatatttctttcatatattgaaggaacgtttacaaaagcaagttatgtacttggccacaaaagaaaaytcacaggctaaatgtattataaattt

SEQ ID NO: 237309 - DNA, 594 bp, Homo sapiens
tcacttttaaatataaatgcaaaatatctaaataaaatagaactctagcaatccagccaatgaatagtatactatgagyaaggaagatattccagaaaaacaagagtagttcactattggcaataactgtaacccctccgtaaatgccatttcatatctcccactctctgaccaccacctcctgtcgttccagataattctccttggtatccaacttttatcattttccctcaacaggatctccaatccattgatcatacaactttttcaccaggcctcacccctctcccagctttactccatgagtgatcataatcatgtccttgcatacaccttcaacaattcttgtcctctctagtattgtcctttcttgggaaaccacaaccctgactaaatccacttcaactttcataccttcaaccaagtatctgaatttgactaaagaaaaacacacagctacaccgactggtcttaccttaagtctgcttgttgttgaaccccaggtggccccttaacgctaatcagaaattgcatttccgtagtgccttcactttcccacttcagcgcttctctctccttaagcctcacccatcc

SEQ ID NO: 237310 - DNA, 594 bp, Homo sapiens
tcacttttaaatataaatgcaaaatatctaaataaaatagaactctagcaatccagccaatgaatagtatactatgagtaaggaagatattccagaaaaacaagagtagttcactattggcaataactgtaacccctccgtaaatgccatttcatatctcccactctctgaccaccacctcctgtcgttccagataattctccttggtatccaacttttatcattttccctcaacaggatctccaatccattgatcatacaactttttcaccaggcctcacccctctcccagctttactccatgagtgatcataatcatgtccttgcatacaccttcaacaattcttgtcctctctagtattgtcctttcttgggaaaccacaaccctgactaaatccacttcaactttcataccttcaaccaagtatctgaatttgactaaagaaaaacacacagctacaccgactggtcttaccttaagtctgyttgttgttgaaccccaggtggccccttaacgctaatcagaaattgcatttccgtagtgccttcactttcccacttcagcgcttctctctccttaagcctcacccatcc

SEQ ID NO: 237311 - DNA, 595 bp, Homo sapiens
aaaatgctattctatttgtaataatgttacaaactccatttgtgacaatgtttcaacaacgcaaattcagtgattcctcataaaaagaaaatacaaaagcaatagaagaacatcctcttgctcacatcctatatgtgatcctgtttctcttcccagctctctagctggagaataataacaatagcaacatytactacttactctgatcaagttcagttcaggacactttttgcctgcgtaatttaatcatcacataatctcgtgatctaaatattatactcatcttatttaaacatggcggtaagttccaaaatacttaacttgtcctctgccacttaatcagtaggcaactgagagagaaatatctgattctcaagctatgttttaacctgctatatgccaccaaagttccagtattctgcccccagaacactgggtcacgtaccatctggcccaagtccaaattcaagaaatgccaggctcctggacctttaccaccacaccgtgcatttcacaaccaccaaccagaaaagaatatgtgagcctctgggccacacatctctgctcctgagaacattccttggaataaaatgga

SEQ ID NO: 237312 - DNA, 595 bp, Homo sapiens
aaaatgctattctatttgtaataatgttacaaactccatttgtgacaatgtttcaacaacgcaaattcagtgattcctcataaaaagaaaatacaaaagcaatagaagaacatcctcttgctcacatcctatatgtgatcctgtttctcttcccagctctctagctggagaataataacaatagcaacatttactacttactctgatmaagttcagttcaggacactttttgcctgcgtaatttaatcatcacataatctcgtgatctaaatattatactcatcttatttaaacatggcggtaagttccaaaatacttaacttgtcctctgccacttaatcagtaggcaactgagagagaaatatctgattctcaagctatgttttaacctgctatatgccaccaaagttccagtattctgcccccagaacactgggtcacgtaccatctggcccaagtccaaattcaagaaatgccaggctcctggacctttaccaccacaccgtgcatttcacaaccaccaaccagaaaagaatatgtgagcctctgggccacacatctctgctcctgagaacattccttggaataaaatgga

SEQ ID NO: 237313 - DNA, 595 bp, Homo sapiens
aaaatgctattctatttgtaataatgttacaaactccatttgtgacaatgtttcaacaacgcaaattcagtgattcctcataaaaagaaaatacaaaagcaatagaagaacatcctcttgctcacatcctatatgtgatcctgtttctcttcccagctctctagctggagaataataacaatagcaacatttactacttactctgatcaagttcagttcaggacactttttgcmtgcgtaatttaatcatcacataatctcgtgatctaaatattatactcatcttatttaaacatggcggtaagttccaaaatacttaacttgtcctctgccacttaatcagtaggcaactgagagagaaatatctgattctcaagctatgttttaacctgctatatgccaccaaagttccagtattctgcccccagaacactgggtcacgtaccatctggcccaagtccaaattcaagaaatgccaggctcctggacctttaccaccacaccgtgcatttcacaaccaccaaccagaaaagaatatgtgagcctctgggccacacatctctgctcctgagaacattccttggaataaaatgga

SEQ ID NO: 237314 - DNA, 595 bp, Homo sapiens
aaaatgctattctatttgtaataatgttacaaactccatttgtgacaatgtttcaacaacgcaaattcagtgattcctcataaaaagaaaatacaaaagcaatagaagaacatcctcttgctcacatcctatatgtgatcctgtttctcttcccagctctctagctggagaataataacaatagcaacatttactacttactctgatcaagttcagttcaggacactttttgcctgcgtaatttaatcatcacataatctcgtgatctaaatattatactcatcttatttaaacatggcggtaagttccaaaatacttaacttgtcctctgccacttaaycagtaggcaactgagagagaaatatctgattctcaagctatgttttaacctgctatatgccaccaaagttccagtattctgcccccagaacactgggtcacgtaccatctggcccaagtccaaattcaagaaatgccaggctcctggacctttaccaccacaccgtgcatttcacaaccaccaaccagaaaagaatatgtgagcctctgggccacacatctctgctcctgagaacattccttggaataaaatgga

SEQ ID NO: 237315 - DNA, 670 bp, Homo sapiens
tgtcttttccactttctgccctgactcaattcattaattttttggcgcctcagcctccttctcagtaaaatgagagcaatgatgtctaactggttattgtgaggattaaatgatttcatattaaatgatttcatattatgaggattaaatgatttcatacatatatatatggttagtaaaattgtttttcttccttctactcaatactttgattacagaaccatgccctggcctccatgtttataataatttacctttctttttctttttcttttctttctttctttttttttttttttttttttwaatagagacaaagtctctctccatcacccaggctggagtgcactggcaccatgatggctcactgcagccccagactcctgggctcaagctatcctcccacctccacctcccaagtagctaggactacaggtgcatcccaccatacccagctaatgtttaaatgtttttttctttttttgtagaaatgatgtctcactatgttgccaggctggtgtcaaactcctggccttgagtgatcctcctgcctcagcctcccaaaatgctgtgattatgtgtgtttgtcaccatgcccagccacttgccattttcacaatcacaaaaaataaagcagcattttgaaaggtcatgtccattctcagtggct

SEQ ID NO: 237316 - DNA, 670 bp, Homo sapiens
tgtcttttccactttctgccctgactcaattcattaattttttggcgcctcagcctccttctcagtaaaatgagagcaatgatgtctaactggttattgtgaggattaaatgatttcatattaaatgatttcatattatgaggattaaatgatttcatacatatatatatggttagtaaaattgtttttcttccttctactcaatactttgattacagaaccatgccctggcctccatgtttataataatttacctttctttttctttttcttttctttctttcttttttttttttttttttttttaatagagacaaagtctctctccatcacccaggctggagtgcactggcaccatgatggctcactgcagccccagactcctgggctcaagctatcctcccacctccacctcccaagtagctaggactacaggtgcatcccaccatacccagctaatgtttaaatgtttttttctttttttgtagaaatgatgtctcrctatgttgccaggctggtgtcaaactcctggccttgagtgatcctcctgcctcagcctcccaaaatgctgtgattatgtgtgtttgtcaccatgcccagccacttgccattttcacaatcacaaaaaataaagcagcattttgaaaggtcatgtccattctcagtggct

SEQ ID NO: 237317 - DNA, 649 bp, Homo sapiens
tcaatgcaaaataaacacaaatgaaataattagaaggctacagcaaaatctattgcccacactaaatacaaagtgaatgcaaagaaaagtgaacactgtgatgtttagaatgagaacataatatatggatcaacaacctccgaagccagagaacagagaggacaaaatggaatgactaccgyaagtatgtacttagagctgaagagggatgggggtgacgaagaacaaagagaagttccatagataagggaggaagtcagaaatcttttaactgttggtctgggtgatacaactttgatcaatagcagccatcctcactaaagtgtacttctgtttttaggtcattatcagcaactgatactacaaaaaggttgaagaaggaagttcagtctgagaagaggcctgggtatggaaagagggaagtgaatatggaaaagcttcccttctttgtttctactgtcctgtaaagtgtatttatattttattatcctccatttcacagggtgacaatcagcagtgggataagcaggcactgttcccatgattcagacgttaatgctaaataattattcactgggacttgaaagaactcctctcccaccattcaaaaagggaagggcttggccagtcaaatgtttggctattgtac

SEQ ID NO: 237318 - DNA, 649 bp, Homo sapiens
tcaatgcaaaataaacacaaatgaaataattagaaggctacagcaaaatctattgcccacactaaatacaaagtgaatgcaaagaaaagtgaacactgtgatgtttagaatgagaacataatatatggatcaacaacctccgaagccagagaacagagaggacaaaatggaatgactaccgtaagtatgtacttagagctgaagagggatgggggtgacgaagaacaaagagaagttccatagataagggaggaagtcagaaatcttttaactgttggtctgggtgatacaactttgatcaatagcagccatcctcactaaagtgtactyctgtttttaggtcattatcagcaactgatactacaaaaaggttgaagaaggaagttcagtctgagaagaggcctgggtatggaaagagggaagtgaatatggaaaagcttcccttctttgtttctactgtcctgtaaagtgtatttatattttattatcctccatttcacagggtgacaatcagcagtgggataagcaggcactgttcccatgattcagacgttaatgctaaataattattcactgggacttgaaagaactcctctcccaccattcaaaaagggaagggcttggccagtcaaatgtttggctattgtac

SEQ ID NO: 237319 - DNA, 519 bp, Homo sapiens
attagttctttaaatgtttggaaaattcaatagtgatgccatcagattcttggctcttcttggatgggagactatttattactgattaaatctccttgctcattatttgttcaaattttgtatttcttcatgattcagtcktggtatgttgtatatgtctataaatttatatattttttagattatccatttttgtcatctaattgtttatagtggtctcttcatatttctgtatcagttgtaatgtttctcttttattttttttttatttatttgtcttctctttattagcctagctgtcatttttatctttttgaaaaactccatttcacagatcttttctattgtttttctagtctgtattttatttctgaactgatatttttatttgtttccttctactaaccttgggcttagtttgttcttctttttcaagttttttgaggtaaaatgtcaggttgtttatttaggattttagttatttttttatgtagtcaggcatttattgcaataaaagtc

SEQ ID NO: 237320 - DNA, 519 bp, Homo sapiens
attagttctttaaatgtttggaaaattcaatagtgatgccatcagattcttggctcttcttggatgggagactatttattactgattaaatctccttgctcattatttgttcaaattttgtatttcttcatgattcagtcgtggtatgttgtatatgtctataaatttatatattttttagattatccatttttgtcatctaattgtttatagtggtctcttcatatttctgtatcagttgtaatgtttctcttttatttttwttttatttatttgtcttctctttattagcctagctgtcatttttatctttttgaaaaactccatttcacagatcttttctattgtttttctagtctgtattttatttctgaactgatatttttatttgtttccttctactaaccttgggcttagtttgttcttctttttcaagttttttgaggtaaaatgtcaggttgtttatttaggattttagttatttttttatgtagtcaggcatttattgcaataaaagtc

SEQ ID NO: 237321 - DNA, 519 bp, Homo sapiens
attagttctttaaatgtttggaaaattcaatagtgatgccatcagattcttggctcttcttggatgggagactatttattactgattaaatctccttgctcattatttgttcaaattttgtatttcttcatgattcagtcgtggtatgttgtatatgtctataaatttatatattttttagattatccatttttgtcatctaattgtttatagtggtctcttcatatttctgtatcagttgtaatgtttctcttttattttttttttatttatttgtcttctctttattagcctagctgtcatttttatctttttgaaaaactccatttcacrgatcttttctattgtttttctagtctgtattttatttctgaactgatatttttatttgtttccttctactaaccttgggcttagtttgttcttctttttcaagttttttgaggtaaaatgtcaggttgtttatttaggattttagttatttttttatgtagtcaggcatttattgcaataaaagtc

SEQ ID NO: 237322 - DNA, 519 bp, Homo sapiens
attagttctttaaatgtttggaaaattcaatagtgatgccatcagattcttggctcttcttggatgggagactatttattactgattaaatctccttgctcattatttgttcaaattttgtatttcttcatgattcagtcgtggtatgttgtatatgtctataaatttatatattttttagattatccatttttgtcatctaattgtttatagtggtctcttcatatttctgtatcagttgtaatgtttctcttttattttttttttatttatttgtcttctctttattagcctagctgtcatttttatctttttgaaaaactccatttcacagatcttttctattgtttttctagtctgtattttatttctgaactgatatttttatttgtttccttctactaaccttgggcttagtttgttcttctttttcaagttttttgaggtaaaatgtcaggttgtttatttaggattttagttwtttttttatgtagtcaggcatttattgcaataaaagtc

SEQ ID NO: 237323 - DNA, 562 bp, Homo sapiens
acatgtataatccggagattagaacaacataaaagaaaaaaaaaagaaagcaaaacaagacatacaatgagaccataagagagttgtttagatactttaaataatttcatggtgccaattctacccaatttattttccagggattttaaggaatctgaataaaaagcttatggaaagatgacatgccagaagactagaagcattcatatgtgctctggtctttcaatgccagcaaaggatcagttttgtaaattgctgaaaagggcttgattaaagctcctgcccaaattctccattgaccttcacatgtgtacaagattagaaaaacaaaagtataattgtcaaagatggcctgaagtcctctcctttacgagttcaaaattgacctgaagccccacagaataaaatgaggctactgagcgattttatgcttctatttatgaggtgtctctcaattctacacagggttgaaattgcattttccttaacttcttgtgatkcagagttgtttctggagaaaatggtgtggaaaaggagaagagatgctataatatgccaagcc

SEQ ID NO: 237324 - DNA, 490 bp, Homo sapiens
attgttcacaatagtttctgatgatcttctgtatttctgtggtatgagttgtaatatctcctttttcattttaaattgtgtttatttggattatctcttttctttcacatttcttgytctcctggtacctagcacggtgtctagcattagaatgacagaatcaaagttgtctgtgatcattaataagaaccttaaattaagaattaaacatccagtgcacattagactttgtaagagctcacatagtctatgtgaggtaagagctcgcatagtctaatgacataaggaggttcaagaggaaaatcttataaatggtctcagagaccctctaaatattttcagttctggaacctattggtttgcagcatcaaacagatatcaaaattcaatgtcaactatttagacttggatggatataaatgtgtaggtaatgcaaatatatattatcttttaaattatggcatcagacagtaattcctaataagttctt

SEQ ID NO: 237325 - DNA, 570 bp, Homo sapiens
ctgtatgaagggatagtatttctctgaatatctaaaacagagcaagtacaaacttccatccttaggaatggaaagtgaaattgtgaatccttaagagtctcactccaaataatagaaacagaaaaaataatcacataagttatttcttaaaggtgctcctgtgttatcccatcagttgaatgctgagaattgtgaaatcacagtttggaagcaccattaaaaaataatctaataaaaatacctccctgttacaataagaaaagcaggcaaactcctttccaaatgaggaagactggttcagagatggtaccatccctttggttctatcaagcccaagcttagggggtggagcaggttgtcattgttgtcaagacagcctttacttaagaatatgagttccaaaaaagaagccaaaagatgaataccaaagtaaaaatatcatgaaataatcataaacataaggtggagaaaatccttaccaaggagccaggaaatcaaaaggagaagagcagcagagcacgcaacttaaaagtcatcctrtggaattctaggttcctcacattttccttt

SEQ ID NO: 237326 - DNA, 483 bp, Homo sapiens
atggtgtcaatagggtgtataaactaagtgcagtttggcacaagatactagaggcattttttcatattatataattcaaggtgacgttatagaattaataccaaatactcaaagaaagaaaaaagaaaactatgactgaaagcctaggtatttagctacatttttagcatgatttttatataaaaaaaagaatatccaggcaagcacactaagcacattgagtaagtaaggttaaaataaatgaagtatgtaaataatttatttttctgtgaaatactgtgcagtgttatacaatttacagagtacagggcatcacatataagtgtttgaaatctcattaaaacataatatgggtctactgatagatcagctaaaatctgaattctagaaaatatctctaattttgaataatgaagaaatrgacattaacatctattaccttatggcttacctgttccttgtggcccatgagtttatactgta

SEQ ID NO: 237327 - DNA, 494 bp, Homo sapiens
ggtgacgttatagaattaataccaaatactcaaagaaagaaaaaagaaaactatgactgaaagcctaggtatttagctacatttttagcatgatttttatataaaaaaaagaatatccaggcaagcacactaagcacattgagtaagtaaggttaaaataaatgaagtatgtaaataatttatttttctgtgaaatactgtgcagtgttatacaatttacagagtacagggcatcacatataagtgtttgaaatctcattaaaacataatatgggtctactgatagatcagctaaaatctgaattctagaaaatatctctaattttgaataatgaagaaatggacattaacatctattaccttatggcttacctgttccwtgtggcccatgagtttatactgtattaggaccttcctaccaagagggaaaataaaatagaacctcccaagagacttgaaatttttctagcctattccagtttaaatgttatgta

SEQ ID NO: 237328 - DNA, 521 bp, Homo sapiens
gaaaggaactttctaactgccttcttctaatgctggcattgagcaagtctttaaattcctctgaaaacatgaaattacaacttctagtataactcatatcaccatttcttaaatcgcattctctttgacacatttattattttatggttgcattgctagatatctccattactgcactaattatctcaagtctagcagaactttttaatctaaagaaaggtgtgcttgctgtctcacagatgatttcatggaggccagaacaaggaaytgtatttgctggaagtatgctagttagtcatttatttagcttaaaggatgatgtagctttagaaataaaagcaattcctgcactcatttctcagcattcactggtgccagaaaataggtgggaaacttggctgttaggatagctggtattttcctggacaatttccaaaatttggatgagttgttattaaaagcaaagtctgtctggtttacatagacataaaagttgtggttatacatctagcacaagaatt

SEQ ID NO: 237329 - DNA, 428 bp, Homo sapiens
aacttctagtataactcatatcaccatttcttaaatcgcattctctttgacacatttattattttatggttgcattgctagatatctccattactgcactaattatctcaagtctagcagaactttttaatctaaagaaaggtgtgcttgctgtctcacagatgatttcatggaggccagaacaaggaattgtatttgctggaagtatgctagttagtcatttatttagcttaaaggatgatgtagctttagaaataaaagcaattcctgcactcatttctcagcattcactggtgccagaaaataggtgggaaacttggctgttaggatagctggtattttcctggacaatttccaaaatttggatgagttgttattaaaagcaaagtctgtctrgtttacatagacataaaagttgtggttataca

SEQ ID NO: 237330 - DNA, 458 bp, Homo sapiens
tgaactgtccttttttttatgtctccccaccaaaatcctattcagcttcagcaaacacctgttctagatacagccttctctggctccttcataaagccagtgtattcctgtggttcagaggattttttattttttattttttttactttttggattcattgggataagakatatataatataaaatttactatgttcaacattttccaactgtacagttcagtggcattaagtatattcacgttgttgtacagccattaaccattgttcatctccagaaaatgtttatcaccccaaacaaaaactctgtacctattaaaaaaatagctccccattactcctccctccaaatcctggtaaatactattctactttacgtctctatgaatttgaccattttaagtagttcagataggtggaatcatacaatacttgtccttttgttactggcttagcata

SEQ ID NO: 237331 - DNA, 458 bp, Homo sapiens
tgaactgtccttttttttatgtctccccaccaaaatcctattcagcttcagcaaacacctgttctagatacagccttctctggctccttcataaagccagtgtattcctgtggttcagaggattttttattttttattttttttactttttggattcattgggataagagatatataatataaaatttactatgttcaacattktccaactgtacagttcagtggcattaagtatattcacgttgttgtacagccattaaccattgttcatctccagaaaatgtttatcaccccaaacaaaaactctgtacctattaaaaaaatagctccccattactcctccctccaaatcctggtaaatactattctactttacgtctctatgaatttgaccattttaagtagttcagataggtggaatcatacaatacttgtccttttgttactggcttagcata

SEQ ID NO: 237332 - DNA, 335 bp, Homo sapiens
gggcttttgcagattttagacccctagctctaaatacttggtatggtttcaatttatttttcaaggtraatttctggctataaaatatctgccaacataattcaggacaactgtgcagaaaccagataggcatctcactttggtttgtaaccctataggttttaaagatacagaaaccagggatccctggttagtttacttttcggtaagactgactggttaactaagtgtgagaaattactagcaactaggaaccaatacaacaactgcaaagagaacagagaaccatttttaaaaggacacattgtataatcagtcaacaaaaaaaggaacaa

SEQ ID NO: 237333 - DNA, 335 bp, Homo sapiens
gggcttttgcagattttagacccctagctctaaatacttggtatggtttcaatttatttttcaaggtaaatttctrgctataaaatatctgccaacataattcaggacaactgtgcagaaaccagataggcatctcactttggtttgtaaccctataggttttaaagatacagaaaccagggatccctggttagtttacttttcggtaagactgactggttaactaagtgtgagaaattactagcaactaggaaccaatacaacaactgcaaagagaacagagaaccatttttaaaaggacacattgtataatcagtcaacaaaaaaaggaacaa

SEQ ID NO: 237334 - DNA, 335 bp, Homo sapiens
gggcttttgcagattttagacccctagctctaaatacttggtatggtttcaatttatttttcaaggtaaatttctggstataaaatatctgccaacataattcaggacaactgtgcagaaaccagataggcatctcactttggtttgtaaccctataggttttaaagatacagaaaccagggatccctggttagtttacttttcggtaagactgactggttaactaagtgtgagaaattactagcaactaggaaccaatacaacaactgcaaagagaacagagaaccatttttaaaaggacacattgtataatcagtcaacaaaaaaaggaacaa

SEQ ID NO: 237335 - DNA, 335 bp, Homo sapiens
gggcttttgcagattttagacccctagctctaaatacttggtatggtttcaatttatttttcaaggtaaatttctggctataaaatatctgccaacataattcaggacaactgtgcagaaaccagataggcatctcactttggtttgtaaccctataggttttaaagatacagaaaccagggatccctggttagtttacttttcrgtaagactgactggttaactaagtgtgagaaattactagcaactaggaaccaatacaacaactgcaaagagaacagagaaccatttttaaaaggacacattgtataatcagtcaacaaaaaaaggaacaa

SEQ ID NO: 237336 - DNA, 547 bp, Homo sapiens
gtttcttaccagcaggagtagaagtctgaacatttctcttggtatcatttctcttggcctcttggtatcagagtcgccaaggaaaatacaacgcagtcaagcactggacggaaaaacaacacattattcacacagagaggagacacagccgggtgtgggctccgcttcagtagtgggcgttggtcccccatggccatcyggtccctccatttggcctgcacacacagcctcttgagaagcagaagaaagggcccctccccctcccctcagcggggagcagatacagcagctggccaggtgccagttgatgcacatgtttaagtggaacaaaggggtacacagtctgatcgggggaaagatactcccacacaaggaggtgagtccagcacaggctgtgaggactccttatctcttgggaaggaagtgctccaggcccaaggcccattcctacccggcagagtggaggtggaaagacccctggcacgagattgcctttccccacactttcctgttggcatacaaacttggcgacgagctgggagacaag

SEQ ID NO: 237337 - DNA, 585 bp, Homo sapiens
ttgtatgggggatcccttggctcttgatagtcccctttccttccctatggttgcatgagcctgaagcacccggaaaccatacttagagtcagtaaacacattgactcttgagggttttttttttcttttttgaaacggagtcttsctctgtcgcccaggctggagtgcagtggcatgatcttggctcactgcaaactctgcctctcagtttcaagtgattctcgtgccccaccctcccgtgtagctgggattacaggtgcccaccaccatacccggataatttttgtatttttagtagagacagggtttcgccatgttggccaggctggtctcgaactcccaacatcagatgatccacccacctcggcctgccaaagtgctgggattacaggcgtgagccatccaacccaggcttaagtcttttcacagttggaaggtcctgattagagcagctaattctgctttttgagcagaattctgagaaggtaaacccttggcctcaatgacttcttgttagctaaccttcctttcttactccctcatgaataaagctatttccatctctaaaccactcaacactggggt

SEQ ID NO: 237338 - DNA, 585 bp, Homo sapiens
ttgtatgggggatcccttggctcttgatagtcccctttccttccctatggttgcatgagcctgaagcacccggaaaccatacttagagtcagtaaacacattgactcttgagggttttttttttcttttttgaaacggagtcttgctctgtcgcccaggctggagtgcagtggcatgatcttggctcactgcaaactctgcctctcagtttcaagtgattctcgtgccccaccctcccgtgtagctgggattacaggtgcccaccaccatacccggataatttttgtatttttagtagagacagggtttcgccatgttggccaggctggtctcgaactcccaacatcagatgatccacccacctcggcctgccaaagtgctgggattacagkcgtgagccatccaacccaggcttaagtcttttcacagttggaaggtcctgattagagcagctaattctgctttttgagcagaattctgagaaggtaaacccttggcctcaatgacttcttgttagctaaccttcctttcttactccctcatgaataaagctatttccatctctaaaccactcaacactggggt

SEQ ID NO: 237339 - DNA, 280 bp, Homo sapiens
cttccatggtttccacccaggagtcaatgagttggggatctgtttcttgggatgtgaggtccagcaacagagtagcagggtttaaaaatcagcatactttaagggtaacatctggggtgtcaagcagaagagcctgatatttaagtaactggccccctattagccatkggtatacttttgcctctaggaccctctgtactgtacttcatggggtggtggggggcgggggtggtatggcatctacttgttgtcccaaggtaaacttactggcttcttccac

SEQ ID NO: 237340 - DNA, 546 bp, Homo sapiens
tctaacagtcccattggagtatactgtttttacttgttggtccttcagaaatctcaagggtgggaatttggcctatacaggaagatttttccagatgatgagtaaacagcaaactttcaagatcattctttggcagagattctactgaggyaggaaagtggcaggacttatttgcggttgtggcccagttgatcagagcaggatctggtccaaacagggtgcagtaaagaagctgaccaaaaccagcagatggagacaaaagctacctctagttgctctcactgctcattagcataaagacactcctttccagtgccatgacagtttataaatgccatgtcaacatgccatggcaatggccaggaagttaccttatatgcttctggaaactcctcatcccttttccaaaaagttctgaatagcccacttcctaattagcatctaattaaaagcatctaaataaatacagctagctagcaacccacacactgcccatgggttagccttcctccacgagaagcagtaccagtttaacaaaagttgctt

SEQ ID NO: 237341 - DNA, 546 bp, Homo sapiens
tctaacagtcccattggagtatactgtttttacttgttggtccttcagaaatctcaagggtgggaatttggcctatacaggaagatttttccagatgatgagtaaacagcaaactttcaagatcattctttggcagagattctactgaggtaggaaagtggcaggacttatttgcggttgtggcccagttgatcagagcaggatctggtccaaacagggtgcagtaaagaagctgaccaaaaccagcagatggagacaaaagctacctctagttgcyctcactgctcattagcataaagacactcctttccagtgccatgacagtttataaatgccatgtcaacatgccatggcaatggccaggaagttaccttatatgcttctggaaactcctcatcccttttccaaaaagttctgaatagcccacttcctaattagcatctaattaaaagcatctaaataaatacagctagctagcaacccacacactgcccatgggttagccttcctccacgagaagcagtaccagtttaacaaaagttgctt

SEQ ID NO: 237342 - DNA, 546 bp, Homo sapiens
tctaacagtcccattggagtatactgtttttacttgttggtccttcagaaatctcaagggtgggaatttggcctatacaggaagatttttccagatgatgagtaaacagcaaactttcaagatcattctttggcagagattctactgaggtaggaaagtggcaggacttatttgcggttgtggcccagttgatcagagcaggatctggtccaaacagggtgcagtaaagaagctgaccaaaaccagcagatggagacaaaagctacctctagttgctctcactgctcattagcataaagacactcctttccagtgccatgacagtttataaatgccatgtcaacatgccatggcaatggccaggaagttaccttatatgcttctggaaactcctcatcccttttccaaaaagttctgaatarcccacttcctaattagcatctaattaaaagcatctaaataaatacagctagctagcaacccacacactgcccatgggttagccttcctccacgagaagcagtaccagtttaacaaaagttgctt

SEQ ID NO: 237343 - DNA, 551 bp, Homo sapiens
agtcacattgttcagtggcccctaacttggcctttggggttcaccattgcctcccctgcagtttcagcattcagtgtggggaccatcactggctgatacttgggtactctgggtttttggcatttcgttgtggtgagagttccactgtcactgttggcctctccctggatgctctggggttttcagcattgacattccctataggattgtggattagagctccttcsctggaggagtgtggatgtcatcttctccgcccttaaattaaaagattacgattttccataacagccagttgtgggccccctcctacgtgactttgctcaagcccatattgaactcttggtcacagggaccagggattcctggacccctggcccaagtgacaactacccatagtggcagacaagcagcagccatccaaacattttgcccaaataattttcctcagtctctgtggctgctgggtagattttctggcacctcagtctggacaacgctgttcatgctttcccttcctcccttccatgatcaccttgtttcttttaacc

SEQ ID NO: 237344 - DNA, 551 bp, Homo sapiens
agtcacattgttcagtggcccctaacttggcctttggggttcaccattgcctcccctgcagtttcagcattcagtgtggggaccatcactggctgatacttgggtactctgggtttttggcatttcgttgtggtgagagttccactgtcactgttggcctctccctggatgctctggggttttcagcattgacattccctataggattgtggattagagctccttcgctggaggagtgtggatgtcatcttctccgcccttaaattaaaagattacrattttccataacagccagttgtgggccccctcctacgtgactttgctcaagcccatattgaactcttggtcacagggaccagggattcctggacccctggcccaagtgacaactacccatagtggcagacaagcagcagccatccaaacattttgcccaaataattttcctcagtctctgtggctgctgggtagattttctggcacctcagtctggacaacgctgttcatgctttcccttcctcccttccatgatcaccttgtttcttttaacc

SEQ ID NO: 237345 - DNA, 551 bp, Homo sapiens
agtcacattgttcagtggcccctaacttggcctttggggttcaccattgcctcccctgcagtttcagcattcagtgtggggaccatcactggctgatacttgggtactctgggtttttggcatttcgttgtggtgagagttccactgtcactgttggcctctccctggatgctctggggttttcagcattgacattccctataggattgtggattagagctccttcgctggaggagtgtggatgtcatcttctccgcccttaaattaaaagattacgattttccataacagccagttgtgggccccctcctacgtgactttgctcaagcccatattgaactcttggtcacagggaccagggrttcctggacccctggcccaagtgacaactacccatagtggcagacaagcagcagccatccaaacattttgcccaaataattttcctcagtctctgtggctgctgggtagattttctggcacctcagtctggacaacgctgttcatgctttcccttcctcccttccatgatcaccttgtttcttttaacc

SEQ ID NO: 237346 - DNA, 505 bp, Homo sapiens
ggatggatgccccttggagccaaaggtctaaaaggatactggatttttctttttttttttttttgagtcagagtcttgctctgttatccaggctggagtgcggyggcgcaaggctcactgctacctctgccttccgggttcaagcaattctcctgccacagccttctgagtagttgggattacagatgtacaccaccatacctagctaatttttgtgtttttagtagagatggggttttgccttgttggccaggctggtctcaaactcctagcttccagtgatatgcccaccttggcctccgaaagtgcagagattaaaagcatgggccaccacacttaaaaggatatttttttccccatagataattaacactgggtttcaaaataacctggactgggagaacatttgcagttcttccaggaactaccatgtcacaagcagacgggtctacttgagaagtaatatttgatggaaggaatgacttttctttatctgtgttaagac

SEQ ID NO: 237347 - DNA, 505 bp, Homo sapiens
ggatggatgccccttggagccaaaggtctaaaaggatactggatttttctttttttttttttttgagtcagagtcttgctctgttatccaggctggagtgcggtggygcaaggctcactgctacctctgccttccgggttcaagcaattctcctgccacagccttctgagtagttgggattacagatgtacaccaccatacctagctaatttttgtgtttttagtagagatggggttttgccttgttggccaggctggtctcaaactcctagcttccagtgatatgcccaccttggcctccgaaagtgcagagattaaaagcatgggccaccacacttaaaaggatatttttttccccatagataattaacactgggtttcaaaataacctggactgggagaacatttgcagttcttccaggaactaccatgtcacaagcagacgggtctacttgagaagtaatatttgatggaaggaatgacttttctttatctgtgttaagac

SEQ ID NO: 237348 - DNA, 505 bp, Homo sapiens
ggatggatgccccttggagccaaaggtctaaaaggatactggatttttctttttttttttttttgagtcagagtcttgctctgttatccaggctggagtgcggtggcgcaaggctcactgctacctctgccttccgggttcaagcaattctcctgccacagccttctgagtagttgggattrcagatgtacaccaccatacctagctaatttttgtgtttttagtagagatggggttttgccttgttggccaggctggtctcaaactcctagcttccagtgatatgcccaccttggcctccgaaagtgcagagattaaaagcatgggccaccacacttaaaaggatatttttttccccatagataattaacactgggtttcaaaataacctggactgggagaacatttgcagttcttccaggaactaccatgtcacaagcagacgggtctacttgagaagtaatatttgatggaaggaatgacttttctttatctgtgttaagac

SEQ ID NO: 237349 - DNA, 505 bp, Homo sapiens
ggatggatgccccttggagccaaaggtctaaaaggatactggatttttctttttttttttttttgagtcagagtcttgctctgttatccaggctggagtgcggtggcgcaaggctcactgctacctctgccttccgggttcaagcaattctcctgccacagccttctgagtagttgggattacagatgtacaccaccatacctagctaatttttgtgtttttagtagagatggggttttgccttgttggccaggctggtctcaaactcctagcttccagtgatatgcccaccttggcctccgaaagtgcagagattaaaagcatgggccaccacacttaaaaggatatttttttycccatagataattaacactgggtttcaaaataacctggactgggagaacatttgcagttcttccaggaactaccatgtcacaagcagacgggtctacttgagaagtaatatttgatggaaggaatgacttttctttatctgtgttaagac

SEQ ID NO: 237350 - DNA, 614 bp, Homo sapiens
aaaaaaaaaaaaaaaaaaaaaaaagatgaatttacagtgtcatttgagaaggggtattaaggaatttgccagggtactgacgcgtgtcagktgcaaactgcaggttgagagagagctaagtattttctgtccatgaaggtgataagcgagggcctgaagaaagaggaaggggggaggacactggcgccagaaataggaaagggctgcttgggggtgggaaggatgggtcggggtgctatctagaaagctgcctggcaatggctgtgggatgcggaagcgagacatcaaacaagaagctgtcgcttaaataaagtctgaagaaagactagatatgtaaacggcaggagatagtagggaaactggacccgtctcctcataaaacttcccgccttatatttcagggaggatcgcagcgcatttcggccaagacaggtgagactgcggttttgacctgcgggcctcgatgaattgcgttaggacacctgggctccgggagagccgttccactccgcaaagtaagcgtgttatgtctacaacccaacggggacgcgctaagagccctaaaggccctgctttcatcccaaagaacagcccccgcctgcgtagtttgtagc

SEQ ID NO: 237351 - DNA, 523 bp, Homo sapiens
atagtaataatagattgaaaagaaagtctcctgaaatgaactagctggcctgtggtgtaggacacaggaccccagccaccttatgrttctaaaagccttgctcaaagccgctgcagatgagttagctaggtctctaccacctccataatactcctctggagagaaataaaggtctttcacacctcccaggaagtgatttgcttagcctcaaatgtgcacattcagaaatagcttgtcataagaaagagaggatagtttgcagagaaataacccttctaagtccacatcctattccttttaaataagagagtggtgccaagggaagagccctagaatgtcaaagccaacagggtgctcagataccacccaagtacagttccatctttggccataaggagacaatggtgtcaagaggctaaggccatatgatctgtaggtgaaaaacctgggctgagaatcaaggcctcaaaccttttccactacatcacagatttaggagcagttagagggaaggcttcaatct

SEQ ID NO: 237352 - DNA, 523 bp, Homo sapiens
atagtaataatagattgaaaagaaagtctcctgaaatgaactagctggcctgtggtgtaggacacaggaccccagccaccttatggttctaaaagccttgctcaaagccgctgcagatgagttagctaggtctctaccacctccataatactcctctggagagaaataaaggtctttcacacctcccaggaagtgatttgcttagcctcaaatgtgcacattcagaaatagcttgtcataagaaagagaggatagtttgcagagaaataaccctyctaagtccacatcctattccttttaaataagagagtggtgccaagggaagagccctagaatgtcaaagccaacagggtgctcagataccacccaagtacagttccatctttggccataaggagacaatggtgtcaagaggctaaggccatatgatctgtaggtgaaaaacctgggctgagaatcaaggcctcaaaccttttccactacatcacagatttaggagcagttagagggaaggcttcaatct

SEQ ID NO: 237353 - DNA, 605 bp, Homo sapiens
ccacagtgtgatacacagcttgtaaagtggcaaatgttatgttgctaaggatgaagaaattcaggtgtaaactagaaactagaaacttttattctctggtgaagaatcttcccaaggtaaattacatagaactttagaaaaagaattaagcttccaatttatcatgaaaataaatggaatcttgaaactatggcagtaaaagacctgctacttgataccatcctycatattaccaagggacttccatacaatcattaaaaactggtgaatgtttgctatcaacatctttgtacttccaaactaatgttttctcttggcagggttctctccagtaaggccgtgaaatagttatcatagaatgcataaatggcacattatccaaaatatagggctccagattgttttcttggagtctaaggggcttcacaaaagtagctccatggctgttgtagttggagaagtgctgggacaatgttgagcagatgggactccagtctaaaccagtggttctgccaaaatggctgttctcttacctgattacatgagtgatgtttacatagactttgaaaaacgaattcaaagatgtattgtaactgggatggggg

SEQ ID NO: 237354 - DNA, 502 bp, Homo sapiens
tctaaacaaacacagcacaagctgttatataaaccactgaccatgcctagattaaccttagggtggtatatgcatagtacagatctaaaaaacatatcactgagtgtgaaaactgaacttgacattataaccacagcacacagayggtgagatcagagttggatcctaaatctaactgggtttacagacagcaaacacacacacatacacacattaacattctttgcgagttttaataggacctagagctccacaacatgatatgaaatatctagaacataatccaaaagaagggggagaatctcaccaatttgaaggggaaaaacataaacagatgccaaaaccagaaattatcaaagacttaaaaagcagtcattataatcattctttatgagataaagatggattcctgaaatttttggaaataaatatgttttgctgagtggtgtgtgtgtctgtgtgtgtgtgtgtgaaagagagaaagagagacaaaaaagtaaac

SEQ ID NO: 237355 - DNA, 616 bp, Homo sapiens
aaaaaagggaggtgtagaaaggcaagtgaataaagtgaatagcttctcttcctgaatgatatatttaaacacaggctgagctctcaggcgccgtgtccctttcatatgcttctccaggtgaagacctggtgaagtttggagaaactagctcctgtgcacctgcagaattccatgcctagaatgaggtcttctttgaacttagtcctatataattcaagggataactatttatcttcactgtaattctatctatatgcactattaaaaacaacaactgttatcactgcaaaaaaaaaacttcttgggaataagttctagtgttttataacattgtagggtgactacagttaacaacagtttattgtatattcaaatagctagaagaggggattttgagtgttaccaacacaaaaaaatgataaatgtttgargtgatagatttgctaattactctgatttgatcattacgttgtacatatgtaacaaaatattacactatgccccataaatatgtatcaattaaactaataatatacgtaagtaaattttaaaaataaaacccctgagagaagtatatttaaatcattatctcatatcatactattcacctgttaaa

SEQ ID NO: 237356 - DNA, 583 bp, Homo sapiens
gcacctaggtaaatgtcaatgttgccaggaaaatcttttttattttcttcaaattcttctttgtctgattgaaatgtttcattaccacaacataagactgtgctgaagccataagacctgcaggtgattatcagaggtccatatgactgcaaaaatagtgttcccagcgtttcaaacagcactcacacatgtagtaaagcaatgattcatgaaggtggggaaaaccaggttgtattatcacattatggtgtagtctgcattttcttttcttttttgatggaaagaagttaaagaaagggtgaagaaaggcatgagctgatgtgttttaaaaaactatttgctaatgctaaattataaacatcaccaaaaggtataagcagataaatgaaacatcatttgcataataaaaacagatttgtcacagcacaaaaattttcaagggaggtttttaaaacaggtatctatcatcytgaattttaaataccttttaattcccccaaaatagctttatgtatacattttttaaattcacctatttacaagcttagaaatttgaaaaatgacttttttaaacatagagacc

SEQ ID NO: 237357 - DNA, 553 bp, Homo sapiens
atgtctttatcagcagcatgaaaatggactaatacatagggactaccatgaattcatgctacctgaaatcaataggctctcaatgctttttgycaaatattttatgcatctctttcctatcatagttcttgtaaaattgtcccaaatattctttgcttgtcaatagattttagttctactcccaaaaaccataccatttggagatcaaatatgatgtatgaatggaaaaaaaatcaaggcccttagacaaatattccaattcattccttagcacaaacatacaaaatactcattttctttatgtttatttgcttctcttgtagcagatagataggcctactctttgtgaggtgaatactttcacatgcaacttatttataattcttctcttctaaaactctgattcataattttcttctgtcagtacatcctccaggttctacctatcagctgcatcctcccctcttatcagaaaacaagcccaaatctcagccataatgaatatacatagacaaaaatcaatcacaaccaaaataaacaaataattttttcc

SEQ ID NO: 237358 - DNA, 553 bp, Homo sapiens
atgtctttatcagcagcatgaaaatggactaatacatagggactaccatgaattcatgctacctgaaatcaataggctctcaatgctttttgccaaatattttatgcatctctttcctatcatagttcttgtaaaattgtcccaaatattctttgcttgtcaatagattttagttctactcccaaaaaccataccatttggagatcaaatatgatgtatgaatggaaaaaaaatcaaggccmttagacaaatattccaattcattccttagcacaaacatacaaaatactcattttctttatgtttatttgcttctcttgtagcagatagataggcctactctttgtgaggtgaatactttcacatgcaacttatttataattcttctcttctaaaactctgattcataattttcttctgtcagtacatcctccaggttctacctatcagctgcatcctcccctcttatcagaaaacaagcccaaatctcagccataatgaatatacatagacaaaaatcaatcacaaccaaaataaacaaataattttttcc

SEQ ID NO: 237359 - DNA, 377 bp, Homo sapiens
cactatcaacagaaaaacccaggtttgggcttaagatccaatttcttcagttgaatacagagccaaagagcccaattggtaaatttttgatttgtataaggtatctgtttactgagctctcaaggctgggcctagggtgaggcaaacaaggcacttgctttcaatacaaaatttgagaagaggttaaaaaaattgaataatcaagataaagaagattttaaagtaatattctaaataataaaattaatgcaaaattaataawgaacaaaatattacagatttagactcttaatctcttttaactttgacagcaacataagagatacaacaagatattagatacctagctgccaaataactgatataaaaaataaata

SEQ ID NO: 237360 - DNA, 377 bp, Homo sapiens
cactatcaacagaaaaacccaggtttgggcttaagatccaatttcttcagttgaatacagagccaaagagcccaattggtaaatttttgatttgtataaggtatctgtttactgagctctcaaggctgggcctagggtgaggcaaacaaggcacttgctttcaatacaaaatttgagaagaggttaaaaaaattgaataatcaagataaagaagattttaaagtaatattctaaataataaaattaatgcaaaattaataaagaacaaaatattacagwtttagactcttaatctcttttaactttgacagcaacataagagatacaacaagatattagatacctagctgccaaataactgatataaaaaataaata

SEQ ID NO: 237361 - DNA, 396 bp, Homo sapiens
accatatcacactatgctgtctccatgcctttagttccagaaggtagaagaggactggtggcagaagaaatccacccctgtatttttttagaaatctgtattttttagaaatacggggtagatttcaaggaaaaacacaacaatcagaactgctagccaggcacagtggtgtgcacctgggaggctgaggcaggaggatcacttgagcccaggagttagagctgtttggagctgcaatgagctakgatcacgccactgcattccagcctgggtgacagagtgggaccctgtctcaaaacaaaaacaacaacaaaagcaagaactgcttaggaacagagtttctctgccttgtaatgttactggaaatggtcaagtaggctgttataaaaggaattc

SEQ ID NO: 237362 - DNA, 409 bp, Homo sapiens
ggaattcaatctttggcattctgactccagagccacccctgaaaccatatcacactatgctgtctccatgcctttagttccagaaggtagaagaggactggtggcagaagaaatccacccctgtatttttttagaaatctgtattttttagaaatacggggtagatttcaaggaaaaacacaacaatcagaactgctagccaggcacagtggtgtgcacctgggaggctgaggcaggaggatcacttgagcccaggagttagagctgtttggagctgcaatgagctatgatcacgccactgcattccagcctgggtgacagagtgggaccctgtctcaraacaaaaacaacaacaaaagcaagaactgcttaggaacagagtttctctgccttgtaatgttactggaaa

SEQ ID NO: 237363 - DNA, 596 bp, Homo sapiens
gagtgggaccctgtctcaaaacaaaaacaacaacaaaagcaagaactgcttaggaacagagtttctctgccttgtaatgttactggaaatggtcaagtaggctgttataaaaggaattcccaaactggctggagatgagaccaaaaggcaatagagactccactgattttgaaattctgatttgggaacatattttttttccattacatatataagaagstagggaacaacctttgtgacattttatgtaataaagatccattgtgaaaggtagcttttcaactaattttccagattttattgattagtaactatttataatatacctggtgtgctagatgtgtgcccacccctttctaaggtacccttgctgctcctcccataaagaagtatggtctgttttctcctccttgaatccgggctggtctttggacttgctttgaccaataatgtgttctgtgaactctggagcctggtccttaagggatgttgcacctcttgcctctgttcttttggaaccctgaaaccccactgctgtgaaaaagccaagtctagcctaccagaggaggagccctggcctgggggagaagggaggt

SEQ ID NO: 237364 - DNA, 567 bp, Homo sapiens
gtttcttctaccttgttgccatgccattctcagcaygtggcttcacctcccagtctactccagctcctgccataactcctaccttccagctcatgggaagggaagaaaggtgagagtggacacattcttttgctaaaggaatgacctagaaagtacacgtaccacttctgctcacatctcactggccaagacttagttatgtgtccatcttgtgctgcaaaagaggctggaaatgtggtctttagctgggtagtcatgtgcccagggaaaggaatggagggaaagggaaggaaaaatgactatggggagtgggcaatgaattgtgtctgctataggactaatacatattttgggatcgtaatggaatttttattcctaatgatttctgaaaacgtctgataaagttgcaccatcttgtttttgaccaacattcaaaaaaaccaaactacataaagaattggaagctggaactttcctacaatgaccccactactacctgaggaccaaagccttatcaatgctgatgaccaaaaaagacttgaattgtccaattcctccctaggaaaa

SEQ ID NO: 237365 - DNA, 537 bp, Homo sapiens
gagagtggacacattcttttgctaaaggaatgacctagaaagtacacgtaccacttctgctcacatctcactggccaagacttagttatgtgtccatcttgtgctgcaaaagaggctggaaatgtggtctttagctgggtagtcatgtgcccagggaaaggaatggagggaaagggaaggaaaaatgactatggggartgggcaatgaattgtgtctgctataggactaatacatattttgggatcgtaatggaatttttattcctaatgatttctgaaaacgtctgataaagttgcaccatcttgtttttgaccaacattcaaaaaaaccaaactacataaagaattggaagctggaactttcctacaatgaccccactactacctgaggaccaaagccttatcaatgctgatgaccaaaaaagacttgaattgtccaattcctccctaggaaaatattttggagacaaattaagatgaattaagtcaaatgactattaaaaaaaactttcttcctcttgattaatgattccatcc

SEQ ID NO: 237366 - DNA, 634 bp, Homo sapiens
tagcaggcagtcccttctaactgccctgatatcatgacacagaagtagttatgtgctggacttcctcatgtggctgaatttacttatttgccatcacagatggaaagagatttgatatttcataaataatcctgcaataattcctgaaaagttgtaaatcactgacartgagcttggagtgttatctctctcagggacatttgtattttaataggagtctcataatgctacaaaaactttaatcaaagcaattaataactaatgacatgatttcagacgtaatacaagctaatgagtattatttctgaatggaagtcactatatatttatatatgtatgtatatgtatagagagagagtcccttgctcaaggtaatattttggaaaacctatatcagtaaatagataggagtggtttcagtaaacatatcaatccttttttaattgaaaaaaaatagaaatagggtgtcactctattgcccaggttggagtgcaatagagtgagcaaaactcactgcagctttgaactccttggctcaagcaatcctcccacctcagcctcctgagtagctgggactacacacacacacaccacaactcctggctatttttttattttttgtaaagatggaggt

SEQ ID NO: 237367 - DNA, 634 bp, Homo sapiens
tagcaggcagtcccttctaactgccctgatatcatgacacagaagtagttatgtgctggacttcctcatgtggctgaatttacttatttgccatcacagatggaaagagatttgatatttcataaataatcctgcaataattcctgaaaagttgtaaatcactgacaatgagcttggagtgttatctctctcagggacatttgtattttaataggagtctcataatgctacaaaaactttaatcaaagcaattaataactaatgacatgatttcagacgtaatacaagctaatgagtattatttctgaatggaagtcactatatatttatatatgtatgyatatgtatagagagagagtcccttgctcaaggtaatattttggaaaacctatatcagtaaatagataggagtggtttcagtaaacatatcaatccttttttaattgaaaaaaaatagaaatagggtgtcactctattgcccaggttggagtgcaatagagtgagcaaaactcactgcagctttgaactccttggctcaagcaatcctcccacctcagcctcctgagtagctgggactacacacacacacaccacaactcctggctatttttttattttttgtaaagatggaggt

SEQ ID NO: 237368 - DNA, 558 bp, Homo sapiens
tatcagttagtttttgctgtgtaacaaaccaccccaaaatgtaggaacttaagttttttattattattcccaagtctatgggttcactgggcagttttgcagtcagccattgggttggctgggtgctcttggtctgagattggttaccaaatgtctagtagttgatgctggctgcccattgctctccagggtgcctgggccacaagtctctcaccatccaaacaccaagggctttgtaaaggttttgctttctttcagccaaagtattcaatgtttgcatgcaagggaaaaaatatcacttaaatcccaagcacacacattgttttatgccagctgatctgatggagagggagcaaaggtctcttctgtttccttaggccatggatttaaaataaatcaggcaatacagaatgctcctttgtacttggtaaattatttataatggcaattgactagaaaatatagccacagacttggaaataataatttwaaaagagtcttatgtgactctgttagggaaatggtgtgctaatccaggttttgttatcatttcagcct

SEQ ID NO: 237369 - DNA, 465 bp, Homo sapiens
tttttaatggagcaggctgccaatagaactttatttatgggtttatattttaagattgttgaggatttgcttgccttgggatatttgggtggatctggccccaagcaagctgagcctcagcacctccctgtggactaagcgagcacttccctgaggtctggcaaatgccctagggctgccttctcttctttagaggactgggtaggagcccagggcctcagaccaacccattcattcccactacgaaaacagtactyccactggggccagcactggatgccagagaggaggcccttcctctcccttcccacactcctggctgtggtgtgtgaacctggtcttctaagaacagaaataacatcctgtgtttgctcccacttggcagccaggcgggtccggcgggccacttggctgtcagcctgaggaaggaagtctccaggtattggtgagaaagttggaggcagg

SEQ ID NO: 237370 - DNA, 465 bp, Homo sapiens
tttttaatggagcaggctgccaatagaactttatttatgggtttatattttaagattgttgaggatttgcttgccttgggatatttgggtggatctggccccaagcaagctgagcctcagcacctccctgtggactaagcgagcacttccctgaggtctggcaaatgccctagggctgccttctcttctttagaggactgggtaggagcccagggcctcagaccaacccattcattcccactacgaaaacagtacttccactggggccagcactggatgccagagaggaggcccttcctctcccttcccacactcctggctgtggtgtgtgaacctggtcttctaagaacagaaataacatcctgtgtttgctcccacttggcagccaggcgggtccggcgggccacttggckgtcagcctgaggaaggaagtctccaggtattggtgagaaagttggaggcagg

SEQ ID NO: 237371 - DNA, 476 bp, Homo sapiens
ggagcttcttgatgcttttcttctccttcctatggatattcttccaactcgatctccctgatctccaatcctgtttctcacttccagcactcagtctttcctttcccttttcaggtttgttttataataaataattttccctccaatggcatgctcttaacaagccaatggtgattcatttagccggatttctccagcaccttctatgcatygagcactatgtgggaatcaaagatgaggcaatagtggtccagggctaggcagtccatccaggcgcaggggacacaggctgtgtaagtggcctgggatccaggttggaagctcccttactcctacctgaaacaggtgaatgcaagcacaaaccaaagctgagctagcattggaccagacttcccgagaacccctcaggtggctggggcaaatcatcctgtcttagtaggggaatcctcagtccagcaccctgcaacgggtgtttg

SEQ ID NO: 237372 - DNA, 575 bp, Homo sapiens
acaggcacattctgctgcggttctgagaggcatctggccagtgttatagacttttcatgtgtcctgttggttgtgatcctcacagcagcccttggagatgggctgaacatgagagacaaggaacaagagtacaaggagataagaagctcaaaaaacaacaaacaaaacccaaagctagcagaaggaaaggaacagtaatgattagagcagagataaacaaaaagagaattttaaacaacagagaaaaycagttaaaccaagagttggctgtttgagaagactaacaaaattgacagacctttaacttaaataaaaagagagaaaagatctaaataactaaaaccagaaatggacgagaaaacatcacgtcctacagaacaacacatcttgcagaaataaaaaggccaagagaatattatgaacaattatgccaacaaattgtctaacctagatgaaatggacaaattcctagaaagacacaacctactgagactgaacagacctacaactagtaaagagactgaagcagcagtcaaaaatctcccccaaaagaaaagcccactctctctccggtc

SEQ ID NO: 237373 - DNA, 534 bp, Homo sapiens
ggctggaaggttggaatactattttgctaaagtgtgggtgaggggaaacaatattcccaggrgaaagctgatttccatctttttctctcccctaagtctgctcataaggctaggtcacttgctgaaacttcttactgattttattagtctgcctgtagactaccttgagttttttctctttaatctcagttttcagttcctttttaattcttatacctctaattgctttgtcttgtcttatttcgttgtctacgacacccaatataagcctgactagaagtaatgatagcagaattctttgtcttgatccccatctaagtagaaataattctaaaatcttatcattacatatgtttactataggttttttctatatatgctttagtaggttaaggtagttccttttgattcctagtttgctataaaaaaaattttatcatgaataaattttggatcttgccaaatctgcagctgttaatgaaagtcctatgttttgtcaagaacagtgaagggtgtgagattttttttttaatt

SEQ ID NO: 237374 - DNA, 534 bp, Homo sapiens
ggctggaaggttggaatactattttgctaaagtgtgggtgaggggaaacaatattcccaggggaaagctgatttccatctttttctctcccctaagtctgctcataaggctaggtcacttgctgaaacttcttactgattttattagtctgcctgtagactaccttgagttttttctctttaatctcagttttcagttcctttttaattcttatacctctaattgctttgtcttgtcttatttcgttgtctacgacacccaatataagcctgactagaagtaatgatagcagaattctttgtcttgatccccatctaagtagaaataattctaaaatcttatcattacatatgtttactataggttttttctatatatgctttagtaggttaaggtagttccttttgattcctagtttgctataaaaaaaattttatcatgaataaattttggatcttgccaaatctgcagctgttaatgaaagtcctatgttttgtcaagaacagtgaaggktgtgagattttttttttaatt

SEQ ID NO: 237375 - DNA, 622 bp, Homo sapiens
ggttcaattttaaacaagggttttctttattcaatggaatcaccctggcatgttttgacctttctttttccctttatattaatacagtatagttatttctaacacttttccatagttgtcagcaaaagaagtaatgtacagtatttgcaaaactttccaaagataagtttgcggtatttcatttacacatttaactttttcccaaaaataaagaaaatmtaatgataattttgtcacttgccatgtttgggatgaagtttttgaaagaaaatagaatataatttagaaatataatgaatacatatatacgtgatttatacaatatttcctgaatcctctccaagaaattcctagaagatttccaggtcatacctagtatccatagtcacatcagaaatgctggacaaagtctcttgcatattgttcaactgagatgtctaattaatagaaagtataataaagtgcacacatcaagagtaagagaacaaatcatatagaaaggttcataaataatgaaacagcatagcccgcaagttcattcaactcacctgcaaatgcccatgcttttactcctcccttcacataacgttcatagggtacaagctgtccttgcctccaagat

SEQ ID NO: 237376 - DNA, 621 bp, Homo sapiens
gcataaattctcagatagattttgaggcttctgttcctaattcagctactatggaagaataataataactatcattacagccaccatttcttaagtacttactatgttccaagccctgggcttacatatattcccttacttgacccataaggaacactcctrtatggaagaaattatgattcccattttatgaacatggaaactgagcctcagagcagaaaaataacttgcccacgctagtgcatggccaaaatcatgcattaaaattagtactacttgattccaaaacatatgctcttaaccccttgctccagagtctcatattcaaaataattggaaggtaaaaattttaagtctcttagaatgcaaagaaatgcagtcaccaatacaatttttaaaaaaacttttccaaaatccaatgatagaactaaatctcactaatttaaactaaaatgcaaagcaaaataatgtggtttgtgaattttacattatacttttagcatcattaatgttggcaagcacaaattgactagctacctttcagagaagacctccaaacaaatgcagattttgtatataaatcataaagcatacctaatggaaacacaaagtaagttatta

SEQ ID NO: 237377 - DNA, 476 bp, Homo sapiens
ccattcaattccattcgactctattccgttccattcaattccattccwttcgattccatttttttcgagaaccttccattacactcccttccattccagtgcattccattccagtctcttcagttcgattccattccattcgtttcgattcctttccattccagcccattccattccattccattcctttcctttccgtttcattagattccattgcattccattccattcaattcaattccgtgctattcaatttgattcatttccatttaattccattccattagattccattccgtacgattccattccttttgaatccattccattggagtccattcacttccagaacattccattccagtcgaatccattcgagtacattccattaaagttcattacattctaatacattccattccattgcattccattccattccattcgatgccattcgattccattccatgccaaat

SEQ ID NO: 237378 - DNA, 476 bp, Homo sapiens
ccattcaattccattcgactctattccgttccattcaattccattccattcgattccatttttttcgagaaccttccattacaytcccttccattccagtgcattccattccagtctcttcagttcgattccattccattcgtttcgattcctttccattccagcccattccattccattccattcctttcctttccgtttcattagattccattgcattccattccattcaattcaattccgtgctattcaatttgattcatttccatttaattccattccattagattccattccgtacgattccattccttttgaatccattccattggagtccattcacttccagaacattccattccagtcgaatccattcgagtacattccattaaagttcattacattctaatacattccattccattgcattccattccattccattcgatgccattcgattccattccatgccaaat

SEQ ID NO: 237379 - DNA, 476 bp, Homo sapiens
ccattcaattccattcgactctattccgttccattcaattccattccattcgattccatttttttcgagaaccttccattacactcccttccattccagtgcattccattccagtctcttcagttcgattccattccattcgtttcgattccwttccattccagcccattccattccattccattcctttcctttccgtttcattagattccattgcattccattccattcaattcaattccgtgctattcaatttgattcatttccatttaattccattccattagattccattccgtacgattccattccttttgaatccattccattggagtccattcacttccagaacattccattccagtcgaatccattcgagtacattccattaaagttcattacattctaatacattccattccattgcattccattccattccattcgatgccattcgattccattccatgccaaat

SEQ ID NO: 237380 - DNA, 601 bp, Homo sapiens
tccgtggctgtccattccattccgtttgatgccattccatacgattccattcaattcgagaccattctattcctgtccattccttgtggttcgattccatttcactctagtccattccattccattcaattccattcgactctattccgttccattcaattccattccattcgattccatttttttcgagaaccttccattacactcccttccattccagtgcattccattccagtctcttcagttcgattccattccattcgtttcgattcctttccattccagcccattccattccattscattcctttcctttccgtttcattagattccattgcattccattccattcaattcaattccgtgctattcaatttgattcatttccatttaattccattccattagattccattccgtacgattccattccttttgaatccattccattggagtccattcacttccagaacattccattccagtcgaatccattcgagtacattccattaaagttcattacattctaatacattccattccattgcattccattccattccattcgatgccattcgattccattccatgccaaatcatt

SEQ ID NO: 237381 - DNA, 601 bp, Homo sapiens
tccgtggctgtccattccattccgtttgatgccattccatacgattccattcaattcgagaccattctattcctgtccattccttgtggttcgattccatttcactctagtccattccattccattcaattccattcgactctattccgttccattcaattccattccattcgattccatttttttcgagaaccttccattacactcccttccattccagtgcattccattccagtctcttcagttcgattccattccattcgtttcgattcctttccattccagcccattccattccattccattcctttcctttccgtttcattagattccattkcattccattccattcaattcaattccgtgctattcaatttgattcatttccatttaattccattccattagattccattccgtacgattccattccttttgaatccattccattggagtccattcacttccagaacattccattccagtcgaatccattcgagtacattccattaaagttcattacattctaatacattccattccattgcattccattccattccattcgatgccattcgattccattccatgccaaatcatt

SEQ ID NO: 237382 - DNA, 527 bp, Homo sapiens
tgctattcaatttgattcatttccatttaattccattccattagattccattcygtacgattccattccttttgaatccattccattggagtccattcacttccagaacattccattccagtcgaatccattcgagtacattccattaaagttcattacattctaatacattccattccattgcattccattccattccattcgatgccattcgattccattccatgccaaatcattgcattcctttccattccgttcctatcaattccattccattcgatttagttcgattctattcacttccattccattcgattccattccattggagtcaattcctttcgacacccagcctttccagtcaatgattttggattccatttttttgcattccattacattctatgacattcgattccgtttcattgcattccattccatacatttttattccattcgagaccgtagcattccactttattccaggcctgtccattacactacattcccttgcattccaatgaatt

SEQ ID NO: 237383 - DNA, 527 bp, Homo sapiens
tgctattcaatttgattcatttccatttaattccattccattagattccattccgtacgattccattccttttgaatccattccattggagtccattcacttccasaacattccattccagtcgaatccattcgagtacattccattaaagttcattacattctaatacattccattccattgcattccattccattccattcgatgccattcgattccattccatgccaaatcattgcattcctttccattccgttcctatcaattccattccattcgatttagttcgattctattcacttccattccattcgattccattccattggagtcaattcctttcgacacccagcctttccagtcaatgattttggattccatttttttgcattccattacattctatgacattcgattccgtttcattgcattccattccatacatttttattccattcgagaccgtagcattccactttattccaggcctgtccattacactacattcccttgcattccaatgaatt

SEQ ID NO: 237384 - DNA, 601 bp, Homo sapiens
tccgtggctgtccattccattccgtttgatgccattccatacgattccattcaattcgagaccattctattcctgtccattccttgtggttcgattccatttcactctagtccattccattccattcaattccattcgactctattccgttccattcaattccattccattcgattccatttttttcgagaaccttccattacactcccttccattccagtgcattccattccagtctcttcagttcgattccattccattcgtttcgattcctttccattccagcccattccattccattccattcctttcctttccgtttcattagattccattgcattccattccattcaattcaattccgtgctattcaatttgattcatttccatttaattccattccattagattccattccgtacgattccattccttttgaatccattccattggagtccattcacttccagaacattccattccagtcgaatccattcgagtacattccattaaagttcattayattctaatacattccattccattgcattccattccattccattcgatgccattcgattccattccatgccaaatcatt

SEQ ID NO: 237385 - DNA, 527 bp, Homo sapiens
tgctattcaatttgattcatttccatttaattccattccattagattccattccgtacgattccattccttttgaatccattccattggagtccattcacttccagaacattccattccagtcgaatccattcgagtacattccattaaagttcattacattctaatacattccattccattgcattccattccattccattcgatgccattcgattscattccatgccaaatcattgcattcctttccattccgttcctatcaattccattccattcgatttagttcgattctattcacttccattccattcgattccattccattggagtcaattcctttcgacacccagcctttccagtcaatgattttggattccatttttttgcattccattacattctatgacattcgattccgtttcattgcattccattccatacatttttattccattcgagaccgtagcattccactttattccaggcctgtccattacactacattcccttgcattccaatgaatt

SEQ ID NO: 237386 - DNA, 341 bp, Homo sapiens
attacattctaatacattccattccattgcattccattccattccattcgatgccattcgattccattccatgccaaatcattgcattcctttccattccgttcctatcaattccattccattckatttagttcgattctattcacttccattccattcgattccattccattggagtcaattcctttcgacacccagcctttccagtcaatgattttggattccatttttttgcattccattacattctatgacattcgattccgtttcattgcattccattccatacatttttattccattcgagaccgtagcattccactttattccaggcctgtcca

SEQ ID NO: 237387 - DNA, 341 bp, Homo sapiens
attacattctaatacattccattccattgcattccattccattccattcgatgccattcgattccattccatgccaaatcattgcattcctttccattccgttcctatcaattccattccattcgatttagttcgattctattcacttccattccattcgattccattccattggagtcaattcctttcgacacccagcctttccagtcaatgattttggattccatttttttgcattccattacattctatgacattcgattccgtttcattgcattccattccatayatttttattccattcgagaccgtagcattccactttattccaggcctgtcca

SEQ ID NO: 237388 - DNA, 555 bp, Homo sapiens
gcattccaatgaattccattccattccaatccattcctttcctttcgcttgcattccattctattctcttctactgcatacaatttcactccattcgtttccattctattcaattccawtccattcaattccattccatttgtttccattctcttcgattccatttctttatattccatgccattcgattccattctattggattgcattacattcgtgttcattccattccagaccattccatttgactccattcctttcgagccctttcaatttgagtccattcctttccagtccatttcactccaggccattactatccattccataccattccatcccattccattccattccattccattccattccattccattccattgcattccattccattccattccattgcactgcactccattccattacattctactctatctgagtcgattttattgcattagattctattccattggattactttccattcgattacattccattcatgtacattccattccagtcaattacattcgagttcattacatt

SEQ ID NO: 237389 - DNA, 566 bp, Homo sapiens
gaattccattccattccaatccattcctttcctttcgcttgcattccattctattctcttctactgcatacaatttcactccattcgtttccattctattcaattccattccattcaattccattccatttgtttccattctcttcgattccwtttctttatattccatgccattcgattccattctattggattgcattacattcgtgttcattccattccagaccattccatttgactccattcctttcgagccctttcaatttgagtccattcctttccagtccatttcactccaggccattactatccattccataccattccatcccattccattccattccattccattccattccattccattccattgcattccattccattccattccattgcactgcactccattccattacattctactctatctgagtcgattttattgcattagattctattccattggattactttccattcgattacattccattcatgtacattccattccagtcaattacattcgagttcattacattacattgcagtatattccattg

SEQ ID NO: 237390 - DNA, 558 bp, Homo sapiens
gaattccattccattccaatccattcctttcctttcgcttgcattccattctattctcttctactgcatacaatttcactccattcgtttccattctattcaattccattccattcaattccattccatttgtttccattctcttcgattccatttctttatattccatgccattcgattccattctattrgattgcattacattcgtgttcattccattccagaccattccatttgactccattcctttcgagccctttcaatttgagtccattcctttccagtccatttcactccaggccattactatccattccataccattccatcccattccattccattccattccattccattccattccattccattgcattccattccattccattccattgcactgcactccattccattacattctactctatctgagtcgattttattgcattagattctattccattggattactttccattcgattacattccattcatgtacattccattccagtcaattacattcgagttcattacattacattgcagtata

SEQ ID NO: 237391 - DNA, 571 bp, Homo sapiens
cccttgcattccaatgaattccattccattccaatccattcctttcctttcgcttgcattccattctattctcttctactgcatacaatttcactccattcgtttccattctattcaattccattccattcaattccattccatttgtttccattctcttcgattccatttctttatattccatgccattcgattccattctattggrttgcattacattcgtgttcattccattccagaccattccatttgactccattcctttcgagccctttcaatttgagtccattcctttccagtccatttcactccaggccattactatccattccataccattccatcccattccattccattccattccattccattccattccattccattgcattccattccattccattccattgcactgcactccattccattacattctactctatctgagtcgattttattgcattagattctattccattggattactttccattcgattacattccattcatgtacattccattccagtcaattacattcgagttcattacattacattgcagta

SEQ ID NO: 237392 - DNA, 550 bp, Homo sapiens
ccaatgaattccattccattccaatccattcctttcctttcgcttgcattccattctattctcttctactgcatacaatttcactccattcgtttccattctattcaattccattccattcaattccattccatttgtttccattctcttcgattccatttctttatattccatgccattcgattccattctattggattgcattacattcgtsttcattccattccagaccattccatttgactccattcctttcgagccctttcaatttgagtccattcctttccagtccatttcactccaggccattactatccattccataccattccatcccattccattccattccattccattccattccattccattccattgcattccattccattccattccattgcactgcactccattccattacattctactctatctgagtcgattttattgcattagattctattccattggattactttccattcgattacattccattcatgtacattccattccagtcaattacattcgagttcattacatt

SEQ ID NO: 237393 - DNA, 519 bp, Homo sapiens
cttgcattccattctattctcttctactgcatacaatttcactccattcgtttccattctattcaattccattccattcaattccattccatttgtttccattctcttcgattccatttctttatattccatgccattcgattccattctattggattgcattacattcgtgttcattccattccagaccattccatttgactccattcctttcgagccctttcaatttgartccattcctttccagtccatttcactccaggccattactatccattccataccattccatcccattccattccattccattccattccattccattccattccattgcattccattccattccattccattgcactgcactccattccattacattctactctatctgagtcgattttattgcattagattctattccattggattactttccattcgattacattccattcatgtacattccattccagtcaattacattcgagttcattacattacattgcagta

SEQ ID NO: 237394 - DNA, 452 bp, Homo sapiens
gaattccattccattccaatccattcctttcctttcgcttgcattccattctattctcttctactgcatacaatttcactccattcgtttccattctattcaattccattccattcaattccattccatttgtttccattctcttcgattccatttctttatattccatgccattcgattccattctattggattgcattacattcgtgttcattccattccagaccattccatttgactccattcctttcgagccctttcaatttgagtccattcctttccagtccatttcactccaggccattactatccattccayaccattccatcccattccattccattccattccattccattccattccattccattgcattccattccattccattccattgcactgcactccattccattacattctactctatctgagtcgattttattgc

SEQ ID NO: 237395 - DNA, 509 bp, Homo sapiens
cttgcattccattctattctcttctactgcatacaatttcactccattcgtttccattctattcaattccattccattcaattccattccatttgtttccattctcttcgattccatttctttatattccatgccattcgattccattctattggattgcattacattcgtgttcattccattccagaccattccatttgactccattcctttcgagccctttcaatttgagtccattcctttccagtccatttcactccaggccattactatccattccatrccattccatcccattccattccattccattccattccattccattccattccattgcattccattccattccattccattgcactgcactccattccattacattctactctatctgagtcgattttattgcattagattctattccattggattactttccattcgattacattccattcatgtacattccattccagtcaattacattcgagttcattacatta

SEQ ID NO: 237396 - DNA, 509 bp, Homo sapiens
cttgcattccattctattctcttctactgcatacaatttcactccattcgtttccattctattcaattccattccattcaattccattccatttgtttccattctcttcgattccatttctttatattccatgccattcgattccattctattggattgcattacattcgtgttcattccattccagaccattccatttgactccattcctttcgagccctttcaatttgagtccattcctttccagtccatttcactccaggccattactatccattccataccattccatcccattscattccattccattccattccattccattccattccattgcattccattccattccattccattgcactgcactccattccattacattctactctatctgagtcgattttattgcattagattctattccattggattactttccattcgattacattccattcatgtacattccattccagtcaattacattcgagttcattacatta

SEQ ID NO: 237397 - DNA, 571 bp, Homo sapiens
cccttgcattccaatgaattccattccattccaatccattcctttcctttcgcttgcattccattctattctcttctactgcatacaatttcactccattcgtttccattctattcaattccattccattcaattccattccatttgtttccattctcttcgattccatttctttatattccatgccattcgattccattctattggattgcattacattcgtgttcattccattccagaccattccatttgactccattcctttcgagccctttcaatttgagtccattcctttccagtccatttcactccaggccattactatccattccataccattccatcccattccattccatyccattccattccattccattccattccattgcattccattccattccattccattgcactgcactccattccattacattctactctatctgagtcgattttattgcattagattctattccattggattactttccattcgattacattccattcatgtacattccattccagtcaattacattcgagttcattacattacattgcagta

SEQ ID NO: 237398 - DNA, 562 bp, Homo sapiens
gaattccattccattccaatccattcctttcctttcgcttgcattccattctattctcttctactgcatacaatttcactccattcgtttccattctattcaattccattccattcaattccattccatttgtttccattctcttcgattccatttctttatattccatgccattcgattccattctattggattgcattacattcgtgttcattccattccagaccattccatttgactccattcctttcgagccctttcaatttgagtccattcctttccagtccatttcactccaggccattactatccattccataccattccatcccattccattccattccattccattscattccattccattccattgcattccattccattccattccattgcactgcactccattccattacattctactctatctgagtcgattttattgcattagattctattccattggattactttccattcgattacattccattcatgtacattccattccagtcaattacattcgagttcattacattacattgcagtatattcc

SEQ ID NO: 237399 - DNA, 504 bp, Homo sapiens
gaattccattccattccaatccattcctttcctttcgcttgcattccattctattctcttctactgcatacaatttcactccattcgtttccattctattcaattccattccattcaattccattccatttgtttccattctcttcgattccatttctttatattccatgccattcgattccattctattggattgcattacattcgtgttcattccattccagaccattccatttgactccattcctttcgagccctttcaatttgagtccattcctttccagtccatttcactccaggccattactatccattccataccattccatcccattccattccattccattccattccattccattccattccattgcattccattccattccattmcattgcactgcactccattccattacattctactctatctgagtcgattttattgcattagattctattccattggattactttccattcgattacattccattcatg

SEQ ID NO: 237400 - DNA, 509 bp, Homo sapiens
cttgcattccattctattctcttctactgcatacaatttcactccattcgtttccattctattcaattccattccattcaattccattccatttgtttccattctcttcgattccatttctttatattccatgccattcgattccattctattggattgcattacattcgtgttcattccattccagaccattccatttgactccattcctttcgagccctttcaatttgagtccattcctttccagtccatttcactccaggccattactatccattccataccattccatcccattccattccattccattccattccattccattccattccattgcattccattccattccattccattrcactgcactccattccattacattctactctatctgagtcgattttattgcattagattctattccattggattactttccattcgattacattccattcatgtacattccattccagtcaattacattcgagttcattacatta

SEQ ID NO: 237401 - DNA, 545 bp, Homo sapiens
atgaattccattccattccaatccattcctttcctttcgcttgcattccattctattctcttctactgcatacaatttcactccattcgtttccattctattcaattccattccattcaattccattccatttgtttccattctcttcgattccatttctttatattccatgccattcgattccattctattggattgcattacattcgtgttcattccattccagaccattccatttgactccattcctttcgagccctttcaatttgagtccattcctttccagtccatttcactccaggccattactatccattccataccattccatcccattccattccattccattccattccattccattccattccattgcattccattccattccattccattgcactgcactccattccwttacattctactctatctgagtcgattttattgcattagattctattccattggattactttccattcgattacattccattcatgtacattccattccagtcaattacattcgagttcattaca

SEQ ID NO: 237402 - DNA, 602 bp, Homo sapiens
ttccatttgtttccattctcttcgattccatttctttatattccatgccattcgattccattctattggattgcattacattcgtgttcattccattccagaccattccatttgactccattcctttcgagccctttcaatttgagtccattcctttccagtccatttcactccaggccattactatccattccataccattccatcccattccattccattccattccattccattccattccattccattgcattccattccattccattccattgcactgcactccattccaytacattctactctatctgagtcgattttattgcattagattctattccattggattactttccattcgattacattccattcatgtacattccattccagtcaattacattcgagttcattacattacattgcagtatattccattgaattcgatcccattcctttcaattccatttcattcgactccattatattcgattccattccactcgaatccattccattagaggacattccattccaatgcattccattccattccatagcattccattgcattcgattccattccatttgatgccatt

SEQ ID NO: 237403 - DNA, 566 bp, Homo sapiens
gaattccattccattccaatccattcctttcctttcgcttgcattccattctattctcttctactgcatacaatttcactccattcgtttccattctattcaattccattccattcaattccattccatttgtttccattctcttcgattccatttctttatattccatgccattcgattccattctattggattgcattacattcgtgttcattccattccagaccattccatttgactccattcctttcgagccctttcaatttgagtccattcctttccagtccatttcactccaggccattactatccattccataccattccatcccattccattccattccattccattccattccattccattccattgcattccattccattccattccattgcactgcactccattccattacattctactctatctgagtcrattttattgcattagattctattccattggattactttccattcgattacattccattcatgtacattccattccagtcaattacattcgagttcattacattacattgcagtatattccattg

SEQ ID NO: 237404 - DNA, 602 bp, Homo sapiens
ttccatttgtttccattctcttcgattccatttctttatattccatgccattcgattccattctattggattgcattacattcgtgttcattccattccagaccattccatttgactccattcctttcgagccctttcaatttgagtccattcctttccagtccatttcactccaggccattactatccattccataccattccatcccattccattccattccattccattccattccattccattccattgcattccattccattccattccattgcactgcactccattccattacattctactctatctgagtcgrttttattgcattagattctattccattggattactttccattcgattacattccattcatgtacattccattccagtcaattacattcgagttcattacattacattgcagtatattccattgaattcgatcccattcctttcaattccatttcattcgactccattatattcgattccattccactcgaatccattccattagaggacattccattccaatgcattccattccattccatagcattccattgcattcgattccattccatttgatgccatt

SEQ ID NO: 237405 - DNA, 530 bp, Homo sapiens
gaattccattccattccaatccattcctttcctttcgcttgcattccattctattctcttctactgcatacaatttcactccattcgtttccattctattcaattccattccattcaattccattccatttgtttccattctcttcgattccatttctttatattccatgccattcgattccattctattggattgcattacattcgtgttcattccattccagaccattccatttgactccattcctttcgagccctttcaatttgagtccattcctttccagtccatttcactccaggccattactatccattccataccattccatcccattccattccattccattccattccattccattccattccattgcattccattccattccattccattgcactgcactccattccattacattctactctatctgagtcgattttattgcattagattctattccattkgattactttccattcgattacattccattcatgtacattccattccagtcaattacatt

SEQ ID NO: 237406 - DNA, 532 bp, Homo sapiens
ccaatgaattccattccattccaatccattcctttcctttcgcttgcattccattctattctcttctactgcatacaatttcactccattcgtttccattctattcaattccattccattcaattccattccatttgtttccattctcttcgattccatttctttatattccatgccattcgattccattctattggattgcattacattcgtgttcattccattccagaccattccatttgactccattcctttcgagccctttcaatttgagtccattcctttccagtccatttcactccaggccattactatccattccataccattccatcccattccattccattccattccattccattccattccattccattgcattccattccattccattccattgcactgcactccattccattacattctactctatctgagtcgattttattgcattagattctattccattggattamtttccattcgattacattccattcatgtacattccattccagtcaattac

SEQ ID NO: 237407 - DNA, 537 bp, Homo sapiens
tcctttcctttcgcttgcattccattctattctcttctactgcatacaatttcactccattcgtttccattctattcaattccattccattcaattccattccatttgtttccattctcttcgattccatttctttatattccatgccattcgattccattctattggattgcattacattcgtgttcattccattccagaccattccatttgactccattcctttcgagccctttcaatttgagtccattcctttccagtccatttcactccaggccattactatccattccataccattccatcccattccattccattccattccattccattccattccattccattgcattccattccattccattccattgcactgcactccattccattacattctactctatctgagtcgattttattgcattagattctattccattggattactttccattcgrttacattccattcatgtacattccattccagtcaattacattcgagttcattacattacattgcagtatattc

SEQ ID NO: 237408 - DNA, 537 bp, Homo sapiens
tcctttcctttcgcttgcattccattctattctcttctactgcatacaatttcactccattcgtttccattctattcaattccattccattcaattccattccatttgtttccattctcttcgattccatttctttatattccatgccattcgattccattctattggattgcattacattcgtgttcattccattccagaccattccatttgactccattcctttcgagccctttcaatttgagtccattcctttccagtccatttcactccaggccattactatccattccataccattccatcccattccattccattccattccattccattccattccattccattgcattccattccattccattccattgcactgcactccattccattacattctactctatctgagtcgattttattgcattagattctattccattggattactttccattcgattacattccattcatgtacattccattccagtcaattacattcgagttcattacrttacattgcagtatattc

SEQ ID NO: 237409 - DNA, 602 bp, Homo sapiens
ttccatttgtttccattctcttcgattccatttctttatattccatgccattcgattccattctattggattgcattacattcgtgttcattccattccagaccattccatttgactccattcctttcgagccctttcaatttgagtccattcctttccagtccatttcactccaggccattactatccattccataccattccatcccattccattccattccattccattccattccattccattccattgcattccattccattccattccattgcactgcactccattccattacattctactctatctgagtcgattttattgcattagattctattccattggattactttccattcgattacattccattcatgtacattccattccagtcaattacattcgagttcattacattacattgcagtatattccattgaattcgatcccattcctttcaattccatttcattcgactccattatattcgattccattccactcgaatccattccattwgaggacattccattccaatgcattccattccattccatagcattccattgcattcgattccattccatttgatgccatt

SEQ ID NO: 237410 - DNA, 608 bp, Homo sapiens
acattccattccaatgcattccattccattccatagcattccattgcattcgattccattccatttgatgccattccatttgatgccattccatgacattccattccattcgagtccattccgttccaattcattccattccgtttcatgaaattcgagtcctttccagtacatttcattccaatcccatccaatccaatctactccattcaattcctttccattccatttgattwgattccattgatttgattccattcagtttgattccattccgtgaaatttcgttccattctattccattgcattactttccattcaattccattccatttcatttcagtccattcgcttcctttcctttcgattcaattccatttgattcccccccaatatatgcgatttcattccaatcgattcaattccattcgatgacattcctttcgtttccattccattcgagtccattcaatttcagcattcgtgtccattctattcgagtccattccattaccgtctattctattcccttccattcctgttgattcaatttcattcccttccattcgattcctttccattcgattccattcgtttccattccattc

SEQ ID NO: 237411 - DNA, 608 bp, Homo sapiens
acattccattccaatgcattccattccattccatagcattccattgcattcgattccattccatttgatgccattccatttgatgccattccatgacattccattccattcgagtccattccgttccaattcattccattccgtttcatgaaattcgagtcctttccagtacatttcattccaatcccatccaatccaatctactccattcaattcctttccattccatttgatttgattccattgatttgattccattcagtttgattccattccgtgaaatttcgttccattctattccattgcattactttccmttcaattccattccatttcatttcagtccattcgcttcctttcctttcgattcaattccatttgattcccccccaatatatgcgatttcattccaatcgattcaattccattcgatgacattcctttcgtttccattccattcgagtccattcaatttcagcattcgtgtccattctattcgagtccattccattaccgtctattctattcccttccattcctgttgattcaatttcattcccttccattcgattcctttccattcgattccattcgtttccattccattc

SEQ ID NO: 237412 - DNA, 475 bp, Homo sapiens
tcagtttgattccattccgtgaaatttcgttccattctattccattgcattactttccattcaattccattccatttcatttcagtccattcgcttcctttcctttcgattcaattccatttgattcccccccaatatatgcgatttcattccaatcsattcaattccattcgatgacattcctttcgtttccattccattcgagtccattcaatttcagcattcgtgtccattctattcgagtccattccattaccgtctattctattcccttccattcctgttgattcaatttcattcccttccattcgattcctttccattcgattccattcgtttccattccattccattggttcccattccatgtgatttcattccattccagtccattatattagagtccactccactccattctatgacattcgattccttttgagtccgttccataacactccattcatttcgattg

SEQ ID NO: 237413 - DNA, 608 bp, Homo sapiens
acattccattccaatgcattccattccattccatagcattccattgcattcgattccattccatttgatgccattccatttgatgccattccatgacattccattccattcgagtccattccgttccaattcattccattccgtttcatgaaattcgagtcctttccagtacatttcattccaatcccatccaatccaatctactccattcaattcctttccattccatttgatttgattccattgatttgattccattcagtttgattccattccgtgaaatttcgttccattctattccattgcattactttccattcaattccattccatttcatttcagtccattcgcttcctttcctttcgattcaattccatttgattcccccccaatatatgcgatttcattccaatcgattcaattccattcgatgacattcctttcgtttccattccattsgagtccattcaatttcagcattcgtgtccattctattcgagtccattccattaccgtctattctattcccttccattcctgttgattcaatttcattcccttccattcgattcctttccattcgattccattcgtttccattccattc

SEQ ID NO: 237414 - DNA, 475 bp, Homo sapiens
tcagtttgattccattccgtgaaatttcgttccattctattccattgcattactttccattcaattccattccatttcatttcagtccattcgcttcctttcctttcgattcaattccatttgattcccccccaatatatgcgatttcattccaatcgattcaattccattcgatgacattcctttcgtttccattccattcgagtccattcaatttcagcattcgtgtccattctattcgagtccattccattaccgtctattctattcccttccattcctgttgattcaatttcattcccttccattcgattcctttccattcgattccattcgtttccattccattccattggttcccattccatgtgatttcattccattccagtccattatattagagtccactccactccattctatkacattcgattccttttgagtccgttccataacactccattcatttcgattg

SEQ ID NO: 237415 - DNA, 540 bp, Homo sapiens
tgtaacacctcaagaccaacttgtaacaagcagagctaagccaatttatcactgaattatgcgtcatttaataaagacgggtgtgactcaacctgccatgcgggaatgctaaaagcttaaggaaatggccaccaaaactcccccttttccttttccaaagctcatctttaacccttcagtaaatgatggactgattgaagcaaaagtctaaactttataaactatcactaaaaaaatcttagggtagtctgaccagggttcttggggttatttacttgaaaattactactcttgcaggattaactcctgtttctatagctcaatggagtgtgaatgaagtgaaaatggaggggttctcttttttgaaccaccatcagcatcctgaaattgtagttcaaagtatgctttcagaagccaaaagccaagtgatgattttaccagtgtcatttacagtcrtcatcaaaacatattttaatttaaataaaaattaatcctaggggcttttaggttctaccaatagttttacatttccgaggggaa

SEQ ID NO: 237416 - DNA, 612 bp, Homo sapiens
ctgctttggaaaccaaatattccacaggggcatagtcagcaatgatgggggctgaaagtgacatgtgatctattctctgtgactaagaagtagatctataggttacatccacaaattatgccatgtgtcatttttggtgaaaagtaggtataagtgatataagaacctgacgcaggcttaggagtggatcaggactgctcttcccatggagactgattgagttccttcatcagatagcaaagaggcagcaattggagtagaaatcggctgcagctttgtcccatgtccagaattcctggggtccctagaactactaaatacagggtagtgctctgctttcgctggactggggttggtctggkaagcccatgtgaaaacactccccaaggagtgcttgcctcagctcgttcctgtcattccacacatactctctgactcagacagtctttgggtcctgccctgctccatggcgtgagaacacatgtcctgcctacagttgtgccctggggttaggtatagaaaacctgttgcaggcaatgataggcaaaggaaagggaactaatcattacagcatgctctaacagacccaaactgagattcactcaaatttcg

SEQ ID NO: 237417 - DNA, 391 bp, Homo sapiens
agatatatatattcattctgtatgtaatatttccatggaaataatgaacataggtaagttcaatattttgctttgtccatgaatatagatttttcacaatgtgtggtttttaaaatgctttactattttggagaattctgttcaagaaataactgctttctctgcctttctgtgatcaaaaatagatgttgatataaagagactttgaaaggccttggtctaaatgagaatacaaatacattgtgytcgtgttggaatcctgactcttttgctttaatgtggcctctagaactataaaataggcttaatgtcagaagtcaattgagaacacgtgttctctgttaattgcatgtttatgaatagactctaaattaaatgttagaaggttttt

SEQ ID NO: 237418 - DNA, 608 bp, Homo sapiens
gtttgtatttaaatggtttccctccctagcttttcaataaacagaaatgcctactcctaagtctatacttagattgcttacattattaaataggaaagtggattttccgattgtgtttgtaaacatagagattttttttcckccatagccattcatggttttagaagcacttagcaaataggtaaccaaacacagttttaacttaatacatgcatatgcaaaatgtaacacttttaggaaagacattgtagtcaatgtacatggtatgaaaagtgatcttaaagaataaggaaacagttttaagaaatcaattagcgtgcttccaagattctttcatcttaaagaataaggaaacagttttaagaaatcaattaacatgcttccaaaaaaaactggtgcaattatcctagacgagtaaaacagcctttttattttccatttatgcagaataagatcttttctttttctattgtggtagaatatacgtaagtttaccatttcgaatttaaagtgtacaattcagttgttttaaggatgttcacagtgttatgcagctatctggttccagaatttcttcatctcctaaatggaaactctgtacttattaa

SEQ ID NO: 237419 - DNA, 357 bp, Homo sapiens
tggggactgctgctgtatagtgtttatatatagagttgttccttttttaaggccctcactagaggagaggaggcctggaataattaacttagtccagtctcatcctaacatttaaaatttatgcaaacacatacacatgcacattggtatttgttcyacacacaaatgtacacagtatggcaaggacctattgatcttgcttattgataataattggtagtacctagcatattatctgacatatagtaggaattcctaacatatgcatattatgtgagtggactattaagggaaaacaagtaaaccaaatctatacaaatatagaatgaagagcaagtactaatctttatcctaagg

SEQ ID NO: 237420 - DNA, 570 bp, Homo sapiens
ggaggggttcccctcaagatctgatatatttgggaattattttcttattgtattattttagaatatctttcaaattcagcttcagtgtaaaaaaagtacatcttacttaaaccaaatcagatagtgcacatatgaatgtttaaatcagataagataggaattgatcttttacttgatgtaagattcactaaggaatgttcttggcaagattgagaaagtgatttcagttacccatatctactttttcccctttcagaaccatactttcctctggccatcctgcaagttgtacctgcactgtgcttctgtcctatggtccttattctcaactacttctcagctaattccatttgaattatttgtatttatttctgaactcttctgccctatgacagaagagaaactttagagaatagtgtgtgatactaggcactatgtaggctaacaacaaatatttgttgagtaactgaattttctagttcccattatttgtagtagttaattctcacccacactaatttgaccttgaggtttttgtaaatrtaacatttttatggccaataatatgat

SEQ ID NO: 237421 - DNA, 607 bp, Homo sapiens
gtatgtgtatatttgctgtatatttctgactatatttgtttttaactattatatttttcttgctgcttttgagagtaagattcttcacccaatttgttttctttttttctcttttctgtttttaagggaaggtggggttgatatatagtaaagtgacaaaaatatatttatcttatattcagtcattctactgtactttcatattatgtcttaagtcttttcagtctatttcaaatatttatttacgattggcttaatgatcttaaaaatattattagtttgcaatataaccataagatgtggcttataatactactggttcttggaatttattgactttttccttgaacayataagatagagatcaaatataacatggctacttaaaaggatttgttctttttgtgttggttacattgaagctttctttttttttcaagttttattttatttttaattgacataataattgtgcatatatatagggcatcatatgaaattttaatacatttatacattgtgtaatgatcaaattaggataattggcatatctagcacctcaaacatttattgtttctttttgctgagactattcagaggcctctct

SEQ ID NO: 237422 - DNA, 595 bp, Homo sapiens
ttggaatttattgactttttccttgaacatataagatasagatcaaatataacatggctacttaaaaggatttgttctttttgtgttggttacattgaagctttctttttttttcaagttttattttatttttaattgacataataattgtgcatatatatagggcatcatatgaaattttaatacatttatacattgtgtaatgatcaaattaggataattggcatatctagcacctcaaacatttattgtttctttttgctgagactattcagaggcctctcttctagccattttgaaatataccatacattgttgataactatggtcaccctactgtgcaatagatcaccagcattagtccatcctatctaactgtaatcttgtactcatcaatcagtatttcctcatcctctcttcctcttaacctacccaagctctggttattactatcctgctctctacttctgttatatcatagttttttttagatttcatcaatgagtgagataatgcatcattttttctttctgtgttgtgcttatttcacttaacataatgtcctctaggtttatgcatgttattgcaaatgata

SEQ ID NO: 237423 - DNA, 621 bp, Homo sapiens
ataatgtagatacttttctgtgtcgcagtctaagcatctttcattcagtattgttctaggtatttcacatttaaaaaacagattataacattgtttctaattgttgctgttacataaaaatacatttgactttggcatattatctytgttttagcaactttgctatatacgttaatttaaaagaaatgtgtctttagattactttgaacattttgtgtttgcattgtctttaaataatgaacatcatagtttctcttttcttgttgttaaatcttttaatttatttttattgctttattgcagtggctcagaactccagtaaaatgttgaagtaaatgatagccatgaatgaagtgtatgtcttactctttatctcagagggaaagttttaactttcaccacttggtatgatgtttgctataggtttttggtagaaagcctgtatcacattaaaaaaggtcccttctagtcttagtttgctgagattttttaaaagcataaatagtggttaaattttatgaaacacctttttttctcttttattctgttcatttggtgaattatgctgcattattttttaatattaaaccatatttgtatattagttgatttgagttgata

SEQ ID NO: 237424 - DNA, 545 bp, Homo sapiens
tcagtttggtggccatactggtactgccagatcaagagaatcttggacattccagcctaaggatcatctatgtttttgaaaacagcttttagtaagctgagatatctggatctaatactccatttgtctgacttcttgtttttcctttttttaaatatatttttgagacagggyctcactctgttgcccagggtagagtgcagtggcatgcagctttgacctcttgggctcaagcaatccttctgcatcagtccccttagtagttgagactacaggtacatgccacaatacgcggctaacttttgtatttttttgagatagaatttgccatgttgcccaggctggtctcgaactctggagctcaagcaatctgcccacctcagcctcccaaaattctgggattacaggtgtgcacttatctgcctggcctagtctgacttattactgagtcaccagggtggcttacttctttgtccacaggttatctaataatgtccagatatcattcatgtgcagttgcattgtgatagggtaacagtgaccta

SEQ ID NO: 237425 - DNA, 587 bp, Homo sapiens
tgtttatttttaatatatatgatgaagtcactggaatgtcatcaatttcttagcagtacccatatccggagaagtgttgtcagcattgctatatttgtyaagataagtcgatttcattttaattggaatttctagttcatctcagaaatacatttagaagatattttttcccaatagtgtctttcccagtggtttatttaacatcttggcactaattaaatggaaatattatttttaaatttttttctgaaaatactttaagaatatgaatggaatagacactcagaaatttagaacaatgaaactgagtaatggaaaaatagtgttataaaaacggtaaaattaatttaaataaaatgatgattttggatttttacttatcaatttattttttgatacaactgttattctggcaacatcctttgaagtaaaaaagatccaagatctgaattactcagtagttgtgtgactactactaatgcaatcacttaacctcttttccccacactgtcctcatctgtgaagtgaatataataacagtacataatttctaatgatgtggtgattaaattagataactgcttagc

SEQ ID NO: 237426 - DNA, 596 bp, Homo sapiens
aactgttttgaggaagctaaaaaaaaaaaaatccaagataacatagagaaggaatacagaattctgtcagataaacttaaaaaacaggttgaaataattagaaagaataaagcagaaattctasagctgaaaaatgccattgacatgatgaagaatgcatcagtttcttactagcagaactgatcaagcagaagaaagaattagaaagctcaaatggtgctgagaaaacttgatatccatatgcagaagaataaaactagactcctatctctcaccatgtagaaaaatcaaatcaaaatgtattaaaaacttaaatctaagacctcaaactatgaaactactaaaagggcacattagagaaactctccagaacataggactggaaaaagatttgagtaatacctcacaagcacaagcaaccaaagcaaaaatgagcaaacgggatctgaagttaaaaagcttcagcacagcaaaggaaatcatcaacaaagtgaagagataacccacagaatgggagaaaatatttgcaaactatgcgtctgaaaggtattaatagcaagactgtatatggagcacaaacaactctatagggaaaa

SEQ ID NO: 237427 - DNA, 596 bp, Homo sapiens
aactgttttgaggaagctaaaaaaaaaaaaatccaagataacatagagaaggaatacagaattctgtcagataaacttaaaaaacaggttgaaataattagaaagaataaagcagaaattctagagytgaaaaatgccattgacatgatgaagaatgcatcagtttcttactagcagaactgatcaagcagaagaaagaattagaaagctcaaatggtgctgagaaaacttgatatccatatgcagaagaataaaactagactcctatctctcaccatgtagaaaaatcaaatcaaaatgtattaaaaacttaaatctaagacctcaaactatgaaactactaaaagggcacattagagaaactctccagaacataggactggaaaaagatttgagtaatacctcacaagcacaagcaaccaaagcaaaaatgagcaaacgggatctgaagttaaaaagcttcagcacagcaaaggaaatcatcaacaaagtgaagagataacccacagaatgggagaaaatatttgcaaactatgcgtctgaaaggtattaatagcaagactgtatatggagcacaaacaactctatagggaaaa

SEQ ID NO: 237428 - DNA, 469 bp, Homo sapiens
agtatgaggggattacagaatatcaagcagatttaacctaaagaagactacttcaagacatttaatagtcaaattcccaaatattaaggataaagaaatgattctaaaagcagcaagagaaaagaaacaacagacaaaggagctccaacacgtttggtagcaggtttttcagcagaaaccatacatgccaggagagagtggtatgacatatttaaagttctgatggaaaaaaargacaattttatccttccgatggagttcagatatatgtcttcaccaaaatctcatgctaaatctcgtgtaatccccaatgttggaattggggcctgatgggaagtgattagatcgtaggggcagattttcctgttggtgctgttcttgtgatagtgaattctcatgatatatggttgtttaaaaatgtataaaagctcccccaccccacttaatttcttcctcctgctctgaccat

SEQ ID NO: 237429 - DNA, 469 bp, Homo sapiens
agtatgaggggattacagaatatcaagcagatttaacctaaagaagactacttcaagacatttaatagtcaaattcccaaatattaaggataaagaaatgattctaaaagcagcaagagaaaagaaacaacagacaaaggagctccaacacgtttggtagcaggtttttcagcagaaaccatacatgccaggagagagtggtatgacatatttaaagttctgatggaaaaaaaagacaattttatccttccgatggagttcagatatatgtcttcaccaaaatctcatgctaaatctcrtgtaatccccaatgttggaattggggcctgatgggaagtgattagatcgtaggggcagattttcctgttggtgctgttcttgtgatagtgaattctcatgatatatggttgtttaaaaatgtataaaagctcccccaccccacttaatttcttcctcctgctctgaccat

SEQ ID NO: 237430 - DNA, 580 bp, Homo sapiens
gcatatcattttaggttgacggtgattttcttttgacatgttaaaggtgtacagtttaacagcttccatttcttctgctgacagtagtcgtttttggctgatctgttgttattaagtgtagtttataagatattatctttaaaagttttttttttttttaacattttactatttatcctgctaggggttcacaacagttcttgaatctctgatctatttttttctgttcattttgaaaaatttacattcactgtctcttcaaataatatcttcctcaaaacacacacacactctctctctttctgtgtgtgtgtatatgtctcagaattctatctacatgtgtgtcaggccttctcactgtgcctcgtatatactttattccttttatatactttccattattttactttctacacatcagtctgaatattttctagtgacgtatctttcagttcactaattcttatttttcggctgtgtcttatcaactgtaataaatcawtacattgatttttaattttctgccaatgcctttataagttttaggttttctactttattctgctttatgtttttcagt

SEQ ID NO: 237431 - DNA, 577 bp, Homo sapiens
tgctacaaacattttctctttattaaaatccatctcctattacatktcatttatcattcttttatgaatcttagttatagctaaaaattatgaggaatagaaactgatacttaacatgtacctcatagattttacaaacttaccagtttatactgcagacctcttttacctattttctttctttttatgatccctttactgtcccagggccatcatatgcagacacaaagaatattaacaatgtctttatacctttcatatttctcaaattcttttaacattgtgagtgtagacttaattctatgtttactatattcaaggaatcagaaaatcagactttaaaatgagacattctctttccagctaatgttagccttatgtttgtcagaagagatcatattcttttaagccagctttcttacaaaaaaaaagagatagatcatcttcattgacaaatacatcctgttaaaatgtgtgcctgacataattatgtaggaaacagtgaagaagagggtaatgtggttgtcagcctgcttagagtacaaaaaaaaaaaaaaaaaaagaatgttccataagc

SEQ ID NO: 237432 - DNA, 577 bp, Homo sapiens
tgctacaaacattttctctttattaaaatccatctcctattacatgtcatttatcattcttttatgaatcttagttatagctaaaaattatgaggaatagaaactgatacttaacatgtacctcatagattttacaaacttaccagtttatactgcagacctcttttacctattttctttctttttatgatccctttactgtcccagggccatcrtatgcagacacaaagaatattaacaatgtctttatacctttcatatttctcaaattcttttaacattgtgagtgtagacttaattctatgtttactatattcaaggaatcagaaaatcagactttaaaatgagacattctctttccagctaatgttagccttatgtttgtcagaagagatcatattcttttaagccagctttcttacaaaaaaaaagagatagatcatcttcattgacaaatacatcctgttaaaatgtgtgcctgacataattatgtaggaaacagtgaagaagagggtaatgtggttgtcagcctgcttagagtacaaaaaaaaaaaaaaaaaaagaatgttccataagc

SEQ ID NO: 237433 - DNA, 660 bp, Homo sapiens
actgtgggagtgtgattttccaactaacatgtcaccgagaatgctaggggatgactggggagagaggaggattcacatacttcttgatcctttatcagttaaagaaaatgcacagcgaaagatgaaagtagttcaacacctataatcccttgagaagaagactgaggacttggctgtcaacttaaataccactcaagagcacacaaaataaatgaaaagacgtagctacttcctgtgaaagtcagtgtccctgggattcaaaaggtacatcagacttgttgtccttgaagcatgacacmaaagctggcattgagaaaggtcaactcacatgacagctgaaataaggtttgagacccctggagcatcagagcagacttaaaatatctgaatttccagaattattgactgtgaagttttaatggctccttctgtctgcagtgtcctttcctgctctttctttgtaagggaaaacgtaaagttcaagccctacaggctctttttcagcacaaaacagtagattataatcatgaaatgtgaagtaagacagagttgggttcaagttccacctctgccacttgctagcttaatgaattacatcaatacgcttaactattctgaatctcagtttctttatgtatgagttcctaccatgtaggaata

SEQ ID NO: 237434 - DNA, 634 bp, Homo sapiens
  misc_feature (1)...(634): n = A,T,C or G
cccttcatgatcagggcactctgcctgtcctccacacttacttccctgtgcactaatatgtatgttggactcccatgagactcagagattatttcaaccactgagctcatgcttgcctccctatctggaatgcccattcctgtttcctcattcaccagtctgtttattctttcaggctgcagatcatgtcttattgtagctgtgaatttcctcaaargtgttcaaataaactgatgactcttttattcttcagtaatatttacctgccttcattctcatagtcancttttaataattctccaattagcttgtaagctttcgttttacctatctaaaataaacggaaagctctatgattgttaatgttgttctttggatcttgtgacagttcttggcacagaggtggatacaaaccatgcagtcaaacacttattggctgaacaagacacttatatgtcaaggtcatgcctagggcaggagatgtctgatgaaacgagttcaggaggtgggatagaaatgttgtaaacagtatagtgttctctaaggcagacattggaaaaatgtctggaaagtcagaggcctgggaattgataaggaggaattcatagtaaaaaacgtcttttaaatggtaact

SEQ ID NO: 237435 - DNA, 634 bp, Homo sapiens
  misc_feature (1)...(634): n = A,T,C or G
cccttcatgatcagggcactctgcctgtcctccacacttacttccctgtgcactaatatgtatgttggactcccatgagactcagagattatttcaaccactgagctcatgcttgcctccctatctggaatgcccattcctgtttcctcattcaccagtctgtttattctttcaggctgcagatcatgtcttattgtagctgtgaatttcctcaaaggtgttcaaataaactgatgactcttttattcttcagtaatatttacctgccttcattctcatagtcancttttaataattctccaattagcttgtaagctttcgttttacctatctaaaataaacggaaagctctatgattgttaatgttgttctttggatcttgtgacagttcttggcacagaggtggatacaaaccatgcagtcaaacacttattggctgaacaagacacttatatgtcaaggtcatgcctagggcaggagatgtctgatgaaaygagttcaggaggtgggatagaaatgttgtaaacagtatagtgttctctaaggcagacattggaaaaatgtctggaaagtcagaggcctgggaattgataaggaggaattcatagtaaaaaacgtcttttaaatggtaact

SEQ ID NO: 237436 - DNA, 613 bp, Homo sapiens
tctagacaataatggaaatgaattacaggctgcctaaggtgcttcctgctgtaaagtattatatttctagcacaagttcacagaaagaccactggctattagttttctgttgcttctataaaaatttaagttttagacattttttgagtcattccgcctaccacaatccaccctctggatctgtcccacatacaaaacacattcaccccatcacaatgtttccacaggtctcgttctattatatatcaactaaaagtactaaatctcataagttctaaagtctcaaatctcactatgtacaaaattcaaagaagttatgggtgagtcttgggtataatccatcctgggtcacaatttycctctacttgtagatctataaaactaggaaactagttatctcctccaaaatgcaacgatgggacagtcatcagttaattgttatagacatactgatttgagaggggagaaattagaagaaaaaaagtcacctctctcaaacaatttttaaatacaaccagacaaactttattagatttcaaggcctcagagtaattctcctttgttcctggttctagtttctgagcttaaagctttgttctttggttcatccttt

SEQ ID NO: 237437 - DNA, 599 bp, Homo sapiens
acctaaccatatcattacactcttggcccctcccaaatctcatatcctcacatttcaaaacacaatcatgccttctcaacagttccccaaagtcttaactcattccagcattaactcaaaagtccaagtccaaagtctcacctgagacaaggcaactcctgcctatcagtctgtaaaataaaaaacaagttagttacttcctagatacaatgggggtacaggcattgggtaaatacaactgttccaaatgggagaaattggccaaaacaaaggggctacaggccccatgcaagtctgaaatccaataaagcagtaattaaatcttaaagctctgaaataatctcctttgrctctatatctcacattcaggtcatgcttatgcaagaggtgggctcccatagccttgggcagcttcacccctgtggctttgtagggtacagccccctcctggcgccttcacagctggcattgagtgtctgtggcttttccaggtgcacggggcaagctatcagtggatccaccattctggcgactggaggacagtggccctcttctcagaactccactaggcagtgccccactgaagactgtgtgtgagg

SEQ ID NO: 237438 - DNA, 597 bp, Homo sapiens
ttaaatacacggactcaacaaatatcattgccagctcctaatatgttaggccttgctgatacattggttgactagaaagagtttcctgtcccaatggagctgatattgcagaaaaaagtaaattgtacaattaattacaaatgtgttgaatgctttgaagaagtatagatcattttgagagcctccataatggaaaatttaacctagcttagtcaaacaacacagaaaaaggcatttaatctaaggcttcaagcatgggtagacttcagcttttcaatgtgggcaaaccgatatagagaattcaggcagtgacaaaaaaaaaaaaaaagtagccttaatgtctcactcacaargctaaatttatggttgaaaatgttaatctatcttctctcatccagaaccaaataaggattgaaaatgtatattttcagaaggattatgttaatgaatatttattgcatgctcttcctgtgccaccaaaacgctaaactctttatattcaacacattatttaatccaagcagtagcctatgtggaatgtgctatcattccttccattttacacatgaggaaactaaacatcaaagcatttacact

SEQ ID NO: 237439 - DNA, 665 bp, Homo sapiens
acagaaaaaggcatttaatctaaggcttcaagcatgggtagacttcagcttttcaatgtgggcaaaccgatatagagaattcaggcagtgacaaaaaaaaaaaaaaagtagccttaatgtctcactcacaaagctaaatttatggttgaaaatgttaatctatcttctctcatccagaaccaaataaggattgaaaatgtatattttcagaaggattatgttaatgaatatttattgcatgctcttcctgtgccaccaaaacgctaaactctttatattcaacacattatttaatccaagcagtagcctatgtggaatgtgctatcattccttccattttacacatgaggaaactaaacatcaaagcatttacactgtatatatatgataaatccaggaattcaaataaaggtctccctagcacacataccaaactccttccacaatgcttttccacatttattagaagaaaacaggaacaaaaaaagcagtactcaataaaagcwaaataagttaccctggtgaaaaggaatgctgggaggaatgcttttggctatttataatcatacctacatcctcaaaaatccattgccagagtctatttccctgtttaacaatttgtgaggatccttagagaatcaacagcaggaggcaccactgttcag

SEQ ID NO: 237440 - DNA, 588 bp, Homo sapiens
tgcgatatatcgatgtctggatgaccatattgtgcaagacaattctcttcaggcccaaagttcttttcatatttacaataaaggaatgctatacagaaaaattttcacaaagatcaaaacaattcaaatagattatgccacacaatttcagtgaaaagaaagcttcaacatttacccaaagcatcatcagaaaaccacacttgctagaagacttaatgtctctcatatcacccacagagacatgagtgagtgatcattcccagaacgtgctattcaaagaaaatccattcatcttgttactagttgtcaacttcatgttttaaatctcatttcaatcacacaagaataagacattttctacacctcttagtcaatgaaagagaaatcaatacaygctttttaaaccaaaaatttatatcttcattactgagagaagtcaaaaacagaattatcttaacagtaatagtggtatataacacctctcctttttatttgtttgtgattcttttgttttcttacatagcatataaacagcttagtttatttttccttctactaagtcttcataatcatctcccttagactgag

SEQ ID NO: 237441 - DNA, 477 bp, Homo sapiens
agagtggctaagtcagaataaggtatatctttctttctaaagtactgctttgattatattattttctgctcctcaatccacagtagcacctattagcagttctgcctttggcaattgacatatgttatctcctgytgctatttatcaatttactgtcagttatgttctctctctccaattggactgtaggtttttggcaagatgcaatctggaagtaagctctatcaaaagtagttattgaatagatatttgtaaaagattacgatgaaaacatttctaactctccaaatctaactccaccttatctttagtcttaaacacaacgtgaaaattaaactaaaaacattgaacaaattaatcttgacactgtaatatattgcaatggctaaaataattttgaatcctaaatattaattttgttatacatcttttttatatatatttccctgtatggaacatgttatgaataaatacttg

SEQ ID NO: 237442 - DNA, 590 bp, Homo sapiens
tggacctctcactcaactacaatgtcagtggctctgggagctatttgtctgtgtctgagtgataaaatctttctcagttccctttgagataattttcctctcattttctactgccaaatggacaatctttggatttctccctgaagtggtctttattctcaagtgaccttcaaatggtttacctctgagatattcccacagcacacccaaagtgaagatatagccccttcaaagttggcaacaatacatctagaagttttctcatggtggtaaaatagacaataatttcattttttctaaatagactcactcaagtcaatatccacacagcttcccacacacaataacccattccttttgtatacccttggtgccttagtctaggtcttttttctgaccatagcatccttcattatcttttcagatctcacttctttyaacatcaagccttcttatgtccagtgataagatttatgtctttttgtaagaattttatgtatttattaaaaacatcatttaattgacttaatcagtttcattgggattacttttaaatctttattaaagatccttcagagcaagggccattt

SEQ ID NO: 237443 - DNA, 630 bp, Homo sapiens
gggtaagaacagcaacgaggaagatgctagtacaactctcaatttggtaatggcaaggtaagggagccctcttttgatagcttctattttattttttattaagcataaatatattatctgcaagatgaagagaggttttagaagagaagagaaatttctttactcattagtcgattggcacttgggttgattccacatctttgcaattgtgaattgtgctgctataaacatatgtgtgcaagggtccttttcatataatgacttgttttcattgggatatatacccagtattgggattgctggattgaatggtagatstacttttagctctttaaggaattttgatactgtcctacatacaggttgtactaagttccattcccatcagcagtgcaagctgctttttccctacatccaccccaacatatattgtttttcgacttttcaataacggctattcttgcaggagtaaggtgctcattgtggttttaatttgcatttccctgaagattagtgatgttaagcatttattcatatgtttgattgctgtttgtgtatcttcttttgcaaaatttctattcatgttctttgcttactttttaatggaattatttggggttttttccttgg

SEQ ID NO: 237444 - DNA, 364 bp, Homo sapiens
tcttttttatcatatctagcaatttatcattcagattataaattattttctaatttcccaattgtttatctgtgttatcttgtatctggctgagttcttcaatattattattttgaattcctttttagatattttatagatttttcttttttgtgatttcctactagagaattattattttccttcggtggcattatgtttccttgctttttcatgtttcttgcatctttaaattgacatatcagcacatcctgggtgacagtcacttacttcagttrcatggattggcttttacgtggaaacactttttttcaattgctgagcagttctgctttttaaagcagcaactgagctgtaaagcaga

SEQ ID NO: 237445 - DNA, 613 bp, Homo sapiens
aagctttcttcattctttttaagtccttttttcttcttttgtctatgacatttcaaaagacctgtcttcaagtcagaaattctttattctgcttgatgaagtctattgctgaagattttgattgtatttttatatcactgattgaattcttcacttcaggatttctgtttgtcttttttatcatatctagcaatttatcattcagattataaattattttctaatttcccaattgtttatctgtgttatcttgtatctggctgagttcttcaatattattattttgaattcctttttagatattttatagatttttcttttttgtgatttcctactagagaattattattttccttcggtggcattatgtttccttgctttttcatgtttcttgcatctttaaattgacatatcagcacatcctgggtgacagtcacttacttcagttacatggatkggcttttacgtggaaacactttttttcaattgctgagcagttctgctttttaaagcagcaactgagctgtaaagcagacccatccttagacaggaaactgaatctacgtgggaggaagacacagtggtgggcaatctggaagctagaaggaaggac

SEQ ID NO: 237446 - DNA, 356 bp, Homo sapiens
ttagtaaaatagaattagaagcaatagaatctatctttatctatctgtctgtctaatctctctcttaatagtttaacagaaattattattaaaaaaaaaactgacttacaattatgtaggctggtaagtccccagatttcagttcacaagctagagacccagaacggccattgtaagttccagctcaagtctgagtttgaaggtaggagaagaccaatgtcccagcaaaaaaattgtcagatatagaaggataattcttactcagctttttgatgctattcagcccttcaatggattgaaagaggcccatccacaatggggaagacratctaatttattttatctacctattccaa

SEQ ID NO: 237447 - DNA, 615 bp, Homo sapiens
aagctttcctggacatttttctgctacagccttggccaactttctcaaaatattatcataataagcagatgttatcattctttggccttccagaaagtcaacaggcaaaatgccttgagcatcccaggaaactgttgccatgatttttgttcttgactgttccacttttgctttgagtggaccattttcacctcttggtaaccattgttttgattgtgctttatcttcaggatcatacctgtaaagtcatgtttcatcatgtgttacaattctttgaagaaatgcttcaggatcttgatcccactgttaaaaatttccattgaaggttctgctcttgtctgcagycaacctgagtacagcagttttggtacccattgaatggaatgtttgttcaagtttaatgtcttagaattgtgtaagctgagccaacagagatgactatggtatgggctgttatttctgctgaatcattggtcctcttcgatgaacgtacacacaacatttattttttcttgcaaatgtatgtgaatggtctactgctgtgagctctatcttcaacactgttcagtcccttcttaagataagttatctacttgtaaactgatgatttatttg

SEQ ID NO: 237448 - DNA, 600 bp, Homo sapiens
cattggccaacgtgccagtgataaggaacattgtgttatagtttaactgacagtttttttttctttctcagtagtaaataatggtgctttttagaaacaatagatttgatgtcataagtaataggattattcgcaaagttcactgttcactgagacaactccacccatactacctgtgtatttgcagcatttacctttccaggcacttctcatgcccttttgtctttccatgcacaggatacctccactcaataaaaagtcattttctaacttctccactcaatataytcatttatttttttaagatcaattcaaaaggtatttccttggtgaagtgtttctctactatcacagaattatagcattctgcctatactatagtctagcctcttgtccatatactatgattttctgcatatatttttatatgattttattttctagttaattgtaatcttcctaagggcaaaggccaggttccagttaatgctgacaacccagaaagcagcatcatgtgcaaaattttttgtactatcagtaaatgatacctgctatgcatgtggtaagcctcagtaactattctttgaaataataaagaaa

SEQ ID NO: 237449 - DNA, 600 bp, Homo sapiens
cattggccaacgtgccagtgataaggaacattgtgttatagtttaactgacagtttttttttctttctcagtagtaaataatggtgctttttagaaacaatagatttgatgtcataagtaataggattattcgcaaagttcactgttcactgagacaactccacccatactacctgtgtatttgcagcatttacctttccaggcacttctcatgcccttttgtctttccatgcacaggatacctccactcaataaaaagtcattttctaacttctccactcaatatattcatttatttttttaagatcaattcaaaaggtatttccttggtgaagtgtttctctactatcacagaattatagcattctgcctatactatagtctagcctcttgtccatatactatgattttctgcatatatttttatatgattttattttctagttaattgtaatcttcctaagggcaaaggccaggttccagttaatgctgwcaacccagaaagcagcatcatgtgcaaaattttttgtactatcagtaaatgatacctgctatgcatgtggtaagcctcagtaactattctttgaaataataaagaaa

SEQ ID NO: 237450 - DNA, 600 bp, Homo sapiens
cattggccaacgtgccagtgataaggaacattgtgttatagtttaactgacagtttttttttctttctcagtagtaaataatggtgctttttagaaacaatagatttgatgtcataagtaataggattattcgcaaagttcactgttcactgagacaactccacccatactacctgtgtatttgcagcatttacctttccaggcacttctcatgcccttttgtctttccatgcacaggatacctccactcaataaaaagtcattttctaacttctccactcaatatattcatttatttttttaagatcaattcaaaaggtatttccttggtgaagtgtttctctactatcacagaattatagcattctgcctatactatagtctagcctcttgtccatatactatgattttctgcatatatttttatatgattttattttctagttaattgtaatcttcctaagggcaaaggccaggttccagttaatgctgacaacccasaaagcagcatcatgtgcaaaattttttgtactatcagtaaatgatacctgctatgcatgtggtaagcctcagtaactattctttgaaataataaagaaa

SEQ ID NO: 237451 - DNA, 571 bp, Homo sapiens
cttaattttgtgatatttaagtgttataattttattctgttaagtgtgtatgattgtaaaagcatcraagttgaaaatctgtgaaattggaggaaaatacaatttcaccttttgttcagaaatttccaaaactacaaagtaaataaattcaaatataagtagaaacattagttctttattttattccttgccatagatgaaggactttatagaatgactatgtttagggtaaagtgactattttcctgtatgagttgtatctacaaagtatgaagtcttgttttaaacaaaatgaagacattgtcattcaaccatttccctgaaattagttgcctaggaaaacaaatttaataacgaagtcaaaataaagttttagtttactatttatatatatatttttacttcaaagggagattttctgcatagttatattcttatttataaggctttgctctagttaacttttctctattttttaaacacaattgccattataaaaaattatttaccctttcttgaagatatgcattatttaaatacagtaactcagatggaagtaacatttatttaa

SEQ ID NO: 237452 - DNA, 571 bp, Homo sapiens
cttaattttgtgatatttaagtgttataattttattctgttaagtgtgtatgattgtaaaagcatcaaagttgaaaatctgtgaaattggaggaaaatacaatttcaccttttgttcagaaatttccaaaactacaaagtaaataaattcaaatataagtagaaacattagttctttattttattccttgccatagatgaaggactttatagaatgactatgtttagggtaaagtgactattttcctrtatgagttgtatctacaaagtatgaagtcttgttttaaacaaaatgaagacattgtcattcaaccatttccctgaaattagttgcctaggaaaacaaatttaataacgaagtcaaaataaagttttagtttactatttatatatatatttttacttcaaagggagattttctgcatagttatattcttatttataaggctttgctctagttaacttttctctattttttaaacacaattgccattataaaaaattatttaccctttcttgaagatatgcattatttaaatacagtaactcagatggaagtaacatttatttaa

SEQ ID NO: 237453 - DNA, 571 bp, Homo sapiens
cttaattttgtgatatttaagtgttataattttattctgttaagtgtgtatgattgtaaaagcatcaaagttgaaaatctgtgaaattggaggaaaatacaatttcaccttttgttcagaaatttccaaaactacaaagtaaataaattcaaatataagtagaaacattagttctttattttattccttgccatagatgaaggactttatagaatgactatgtttagggtaaagtgactattttcctgtatgagttgtatctacaaagtatgaagtcttgttttaaacaaaatgaagacattgtcattcaaccatttccctgaaattagttgcctaggaaaacaaatttaataaygaagtcaaaataaagttttagtttactatttatatatatatttttacttcaaagggagattttctgcatagttatattcttatttataaggctttgctctagttaacttttctctattttttaaacacaattgccattataaaaaattatttaccctttcttgaagatatgcattatttaaatacagtaactcagatggaagtaacatttatttaa

SEQ ID NO: 237454 - DNA, 526 bp, Homo sapiens
tgtacaatttctgttttcattactttagttatgtaattctgaaccagacacagtttattattgatttaatttttaaaataagttatccaaaaagctaggagaacaacatactcactaaggtcctattgcagctatgccatgaaattctagctagtcctcatgttctcaggcatagctatctttctcagggtgagttttatatttagaaacaaagaaagaaactacaggacaccaactttcttaaataattttttttatttctaactctaataaatgtagattcctgtttttcaaaaaaatatttttgataaaatttaagagtgatattcatgtagaaaatatacacattcatatattaataccaamcacatataactttgtacttttcacagacatcactacagaaacatagtcaaaattacataataaactttacaatattgccatttatttttaagttcttcttttacaatgggatatcattttgctaactctttgcaaactatttggcttctttcatttatcc

SEQ ID NO: 237455 - DNA, 586 bp, Homo sapiens
attgtaattttttaatattaatagtttcaattcagtatcacaaaatccatatggcaatagaaacagcatttgcctaatcaaattcatttaggaaataataagaaaaaaggacatattaaagrattttctatgaattaccaacagaaatggaagataaatgacaatagaattttagaaaattccattataaatattgttgaatttttttaagccataaataggagataaagaacatgattaaatttcacaggaggaagtaagaaatccacttagcctgttgctaatctcttaaaattctttcagtgaacactgataaagatataaaatctgggattatctgatattctttcttctactcttcttaattcttcccactgatttaagccctacaagcattggaatgcctagaaacacagctagagaataattacattacagttcatgtaaccctgaacacctttgacattaaaaagcaataccacttgttgtcataacatactctcgagttgccacatggaaagcaaactattcctaataaatatactaatacagaatttaaaagagaaagtaatccacttgaaacacc

SEQ ID NO: 237456 - DNA, 361 bp, Homo sapiens
ttgaggatgggaattgatgaagtttgaagctttcttatattctttttagatctatctctttttcakgctttgtcttgcagactcacttgaagaataacaaaccactaccaacttaacactcctttataaacaatggggacctagagtctaaagaactttgaagaaatgatcaaaattaaggatttaaaagaccctatgtaatattatccaattgttgtttgtttgttagatggtagttgacttaaaagtataaagactgggatactactatttttaaccaattattcactgtgtaaatcattctgggtgatgatcaaactcatagaaaacatattttaaactccaaataagataattttat

SEQ ID NO: 237457 - DNA, 544 bp, Homo sapiens
ctaatggaataagttaaaagttttccacgttggcagcactaataattcacttgccattggtttcagtgaacatatgccccagagtgagtttgagatgcgagagggcaatctgccttttcctagctgtctctggggctgaagatcctgtattatgaggatcttactatgctgaaagtgattgattctgatatttgaagatctgtactttaggtagacatgaactacccaggtaaaccaactagatcaaatgatgggctaccaaagaatcagcatttcttccctccctgaaggttgtggtaggcttattgagagtctccaaagtggcatgtcarcctgggcatcaggttctactttatgggtgatactaaagcattttcaagagtaattatggtcatatacaatttttactctagcttttacctttagaaaataagctttgtgtaaggcatgactgtattttaaaatgtgaatctctaatctctgtgaaataggcacagctgaaagttaattcctcatctgaggtcatgtagcaccaggattagtt

SEQ ID NO: 237458 - DNA, 547 bp, Homo sapiens
tatcggactaaatagatttcaagacaaaaactataaaaagagaaaaagtcagccaggtgsggtggctcacgcctgtaatcccagcactttgggaggctgaggtgggtgggtcatgaggtcaggagttcaagaccatcctggctaacatggtgaaaccctgtctctactgaaaatacaaaaaactagctaggtatggtggcatgtgcctgtactcccagctactcaggaggctgaggcaggagaatcatttgaacctgggaggtggaggttgcagtgagctgagatcacaccactatactccagcctgggcaacagagcgagactccatctcaaaaaaaaaaaaaatagagagagagagacagaaagtcattaatgatgataaatgagtcaaatgataagagtcgatttagccagaggatataacaattgtaaatacatatgcacccaatggtagtgcacccatatatgtaaagcaaatattattagtgctaaagagagagggagattcctggggctgggcacggtggcttatgcctgtaatcccagc

SEQ ID NO: 237459 - DNA, 584 bp, Homo sapiens
tggctgggactctccaaagcccaaaggctgaaatggctaagtcacccaaacagcaaagatggcagccttcccctcccgctgtgagctctgtctcagggaggtgcagtgctgctggcggctggctggaattccaagccagtgggtcttatcctgtgaggtgccatgaaagtggggcctgtagactgtcactgctcagccccctggattcagcttctttcctacgggtatgtacatttgtctcatctcctgctttgccagagttgcagctacttttgctgggaggccaggaaagcccaagtatctaaagctcctgggtctccacacatccctgagcagctatgtgagctgagactccacatagctctatctgtcagactgaaggccctaatggagtgggttcatgaggggatctcctgacctgagggttgcaaagatccatgggagaakcatgggttcccatgattgcacattccctgggttggggaggctcccctggctccatgtcgctcctgggtgtgccatcatcctgccttgcttttcttcattctccatgggtcaagttgtttccttggttagtcccactg

SEQ ID NO: 237460 - DNA, 655 bp, Homo sapiens
cttttgcttcttgggagacctcaggaagcttccaatcatgtcagaaggcaaaggggaaacaaacacataacatggccagagcagaaagaatacagagcaagggggaaggtgctgcacacttttaaacaaccagatctcatgggaactccttcactatcacaagaacaacaccaagtggatggtgctaaaccactcatgagaaatccacctccaaggtcccacctccaacagtggggactagaatttgacatgagatttgatggggacacagatccaaaccatattattccactcctggccccctaaatctcatgttcttctcacattgcaaaatacaatcatccctcctcaacagtccctcwaagtcttaactcttttctgcattaactcaaaagtccaaagtctcatctgacacaaggctactctcttccacatatgagcctacaaaatcaaaaacaagttagttactttaaacatacaatgggggtataggcattgggtaggtactcccattccaaaagggagaaatcaaccaaaagaaaggggctacaagtcccatgcaagtccaaaacccagcagggcagtcattaaatcttaaagctccaaaataatttcctttcactccatgtcccatatctagggcatacttatgcaa

SEQ ID NO: 237461 - DNA, 551 bp, Homo sapiens
aacagacatctcagtcatttatgtgctggagataaaacttactgatgcaggactgttccttccaygtgccctcactgcctctccacttcccagcacgcccagaaagatcaaagagtgtctgtgctttgccatcacagtttctaggtcttttatgatgcagaattgggagaataagtaagaatagtaagaacagggtatgggagaggaggaaatgagatctaaattaagacctgaaggattaccctttctgagggtcagtgtgggggatggggagagttacaggctaagtaaatagaaggccaagaagaggtgtagcttaatctaagagttggaggaggcatgggtagagatgtgtttgaagaggttaagtgggtgattacgttagaccttgttagcctggtagagattccctctatctaagagcaacagaaggccactgaaggatttgaaagagagaagatataggattacatttacattttagaaataacatttcagctgcaaagtagagaatatgttggaatgggctaagcctggagacagggagacca

SEQ ID NO: 237462 - DNA, 448 bp, Homo sapiens
tttgttaaaactgtgttggttctaccttctctagcagagctgtacctaaacaacttyatgcactcacaaaaacgtgattgtctcttttgagaacattctgtctctacatagattaatatctgtagaattcataaggaaacacaaaacaatatgtatctttcatttatatacacacagatacagataaatagaccattccagaaaaagaaattaactttggtgaactatttgtaattcatcccccaaaaaattaaaggttatttgaaatctggaattcatattagactgtgaagttagactctgggtaaacttttttgatgaagggaatttaacataccagaaagaacaactttcaaatctcaaggtcaaacatggggctatgaacttatggccactggggtgatcaaatggctgaaattcattgcagtataattcaggtagtaaaacc

SEQ ID NO: 237463 - DNA, 448 bp, Homo sapiens
tttgttaaaactgtgttggttctaccttctctagcagagctgtacctaaacaacttcatgcactcacaaaaacgtgattgtctcttttgagaacattctgtctctacatagattaatatctgtagaattcataaggaaacacaaaacaataygtatctttcatttatatacacacagatacagataaatagaccattccagaaaaagaaattaactttggtgaactatttgtaattcatcccccaaaaaattaaaggttatttgaaatctggaattcatattagactgtgaagttagactctgggtaaacttttttgatgaagggaatttaacataccagaaagaacaactttcaaatctcaaggtcaaacatggggctatgaacttatggccactggggtgatcaaatggctgaaattcattgcagtataattcaggtagtaaaacc

SEQ ID NO: 237464 - DNA, 546 bp, Homo sapiens
agcccggtttgaatgactgtgttcgtacttgagatgagttgaactgaattgccttaaaaattcaaatctgtaatgaattcataaggagttttcatcccaaagttcaaattggtagggcctagtaataactttagacatttatgtggtgacgagcttttaatcttccttaaggtttttaaaactctgcatgtactgtccttcttctatgttctcttgtccttttagttggttttggtagaaattttataaggcaaattaatgaaagttatctcctgagtggcagtttacaacaaaaacagatgtaaaggagaaaaaaatgaratgaaaatttggattaaagaagaaaaaagtctcatgttagtaacagatataacaaaaagagtgaactctacgtggctataagttccttgacagcaaggactttgcctttcttaggtggaatctattgacatgtagagaaggaatgttttacttaggaggttgtcaaggaatgtctgtcaagtaggggtagaaggaaggaattaacagggctttgagaacattctc

SEQ ID NO: 237465 - DNA, 474 bp, Homo sapiens
gaattctttctaaaaattaagcttgagtattactttagaaatttttaccatgtcttaaaactaaaacacatatttaaattgttttattattgaatgcaaagttatatttactttytgtaatttttcctttaaactaattgaaagccttcatatataatattatagtttttctagatgacaaaaatctagtgagttgtcattgagcctctgtattttataaaaacaactacagtgaaacttaaaatgttctgtgaaccaaattcttatgtcatttggttcagagtctaggtccagaatctgacatttgtgtcctgaggttagcaattccccggtagattagacacaaatagcaaaatcaataccaacacacaaagtgaataccttacaaaatgagtgtattaccatgtattcaaatttcatatttttcctgaaattcttaggactaaaggctttgtattgtagcagcagttaaac

SEQ ID NO: 237466 - DNA, 474 bp, Homo sapiens
gaattctttctaaaaattaagcttgagtattactttagaaatttttaccatgtcttaaaactaaaacacatatttaaattgttttattattgaatgcaaagttatatttactttctgtaatttttcctttaaactaattgaaagccttcatatataatattatagtttttctagatgacaaaaatctagtgagttgtcattgagcctctgtattttataaaaacaactacagtgaaacttaaaatgttctgtgaaccaaattcttatgtcatttggttcagagtctaggtccagaatctgacatttgtgtcctgaggttagcaattccccggtagattagacacaaatagcaaaatcaataccaacacacaaagtgaataccttacaaaatgagtgtattaccatgtattcaaatttcayatttttcctgaaattcttaggactaaaggctttgtattgtagcagcagttaaac

SEQ ID NO: 237467 - DNA, 475 bp, Homo sapiens
tatatctttgtttatcttctgcctacttattttctccattattaaaagtgagattttgaaacctccaactattatagttaaatcgtctgtttctcccttccattctgtcagttattgcttcatatattttagggctctgtccattgaggtctatttttctcctacagtgtagagcctggagtgtcccttctcagagggtgcaactttgggcatgcatattcaccttgactccctcctcccatcccagggataacagtgsttttacctgacctctctgacagtgtctttcgctgatgtcccttatctcattgtgagtttctggctggtatctctctattggtatcacacctagacattaacctttaccaactgctagctgattgccctcttgttttcaacaatgtcatggatcttaaaattgtcccaaaatatgatcaaataatgcatgaaccctttgcagggatagtttttaagg

SEQ ID NO: 237468 - DNA, 629 bp, Homo sapiens
gaacaactggacaattttacagcatttcaggcatgaaatgaagggcatgtgaactaaggaaattgaaaccaagttggagagaactgtgtacattcaggagatattcagaagatagaatatacacactcgagaaatcatatggagtggtaggaaaggaatacgaggagttcagaggaawaactaggtttctatttgtataaataaaatatacaacaacggaggagatattttgggagaaggaaagatgagtttaattttaaacatactgagagttgtctgttgccttgatgacatgtaacttaagatgtgtgataagtagcagaccctaatacatatggggtctagagttcagcagagagtccaacgttatagatatatatatgtatagcaactaatatatatgtattatatataatgcatttatgtgtgtatatacaactaatatatttgtattttatatgtattatatgtgtgtgtgtgtgtgtgtgtgtgctgttttcaaatagatggagttgaaactgaatttagacggggttgtcgaggtagaaataaggtgaaaagagaacaaaggacggaatcctgaaaatgcaccaatatgaaagaggcttttcaaccaataatgtttctat

SEQ ID NO: 237469 - DNA, 629 bp, Homo sapiens
gaacaactggacaattttacagcatttcaggcatgaaatgaagggcatgtgaactaaggaaattgaaaccaagttggagagaactgtgtacattcaggagatattcagaagatagaatatacacactcgagaaatcatatggagtggtaggaaaggaatacgaggagttcagaggaataactaggtttctatttrtataaataaaatatacaacaacggaggagatattttgggagaaggaaagatgagtttaattttaaacatactgagagttgtctgttgccttgatgacatgtaacttaagatgtgtgataagtagcagaccctaatacatatggggtctagagttcagcagagagtccaacgttatagatatatatatgtatagcaactaatatatatgtattatatataatgcatttatgtgtgtatatacaactaatatatttgtattttatatgtattatatgtgtgtgtgtgtgtgtgtgtgtgctgttttcaaatagatggagttgaaactgaatttagacggggttgtcgaggtagaaataaggtgaaaagagaacaaaggacggaatcctgaaaatgcaccaatatgaaagaggcttttcaaccaataatgtttctat

SEQ ID NO: 237470 - DNA, 629 bp, Homo sapiens
gaacaactggacaattttacagcatttcaggcatgaaatgaagggcatgtgaactaaggaaattgaaaccaagttggagagaactgtgtacattcaggagatattcagaagatagaatatacacactcgagaaatcatatggagtggtaggaaaggaatacgaggagttcagaggaataactaggtttctatttgtataaataaaatatacaacaacggaggagatattttgggagaaggaaagatgagtttaattttaaacatactgagagttgtctgttgccttgatgacatgtaayttaagatgtgtgataagtagcagaccctaatacatatggggtctagagttcagcagagagtccaacgttatagatatatatatgtatagcaactaatatatatgtattatatataatgcatttatgtgtgtatatacaactaatatatttgtattttatatgtattatatgtgtgtgtgtgtgtgtgtgtgtgctgttttcaaatagatggagttgaaactgaatttagacggggttgtcgaggtagaaataaggtgaaaagagaacaaaggacggaatcctgaaaatgcaccaatatgaaagaggcttttcaaccaataatgtttctat

SEQ ID NO: 237471 - DNA, 549 bp, Homo sapiens
tatgtatccaattgtgtattcggtctataggcatgcctagagcaatgaggatgtattcactctgtgaaaaactgagcaggcatcacctggttccatctcccccgcttctatcttcctagcactcctcactcttctgcccacctgaactcattcatgctaatattgttgracccacagttcgctagtaactggactatgtttttccaccgttttatacatacacattgtatctacacatacactccatttgttctaacaatatttaaataacatctgatttagattttatggtagtagtgaatttatatcatttacatcttcatctactcactatcaactacatgctgtagtgctgttctataaatatttaatgaacgaattaatctctaatatgcattttcctaaatacagaaaatacacaattttattagtgattcttattgacatcaagaaggttgtgttctagtttagatgagatgagttgggagcttgcggagatatgctcattcatatccttcaaaaagcaaatgccaagatgggattaattgt

SEQ ID NO: 237472 - DNA, 609 bp, Homo sapiens
acaaattagccaggcgtagtggtccaygtctgtagtcccaactattcaggaggctgaggtgggagaatcacttgaacccggaaggcagaggttgcagtaagccaagattgtgctactgcactcaagcctgggtgacatagagagaccctatctcagaaaaaaaaataataaaataaaaataaatgaatcataaaaattacagaaacaaaaaatcacaggaaaatccaaaataaaacaacatagtgttttagtgatttataattaaaatacatacataatgtgtactctttagaatcaagtgtaaaacagagatatgtgttcttatataaaaataaaaaagctataacgaggacacacccatgtttatagctcccaagataatatttcatacctacacatggacacacaatcatgggcaaaattagaaaataattgaaatgtaaatcttgagttgttttgtccttagacataaggaaataaaatcactgagaagcatttttagacacaggacttattaatttggcattttatttctagtgtagggtgtacttacttttatagatgttgcagttacatatttcttaattaaaaaaattttattagttttta

SEQ ID NO: 237473 - DNA, 609 bp, Homo sapiens
acaaattagccaggcgtagtggtccacgtctgtagtcccaactattcaggaggctgaggtgggagaatcacttgaacccggaaggcagaggttgcagtaagccaagattgtgctactgcactcaagcctgggtgacatagagagaccctatctcagaaaaaaaaataataaaataaaaataaatgaatcataaaaattacagaaacaaaaaatcacaggaaaatccaaaataaaacaacatagtgttttagtgatttataattaaaatacatacataatgtgtactctttagaatcaagtgtaaaacagagatatgtgttcttatataaaaataaaaaagctataacgaggacacacccatgtttatagctcccaagataatatttcatacctacacatggacacacaatcatgggcaaaattmgaaaataattgaaatgtaaatcttgagttgttttgtccttagacataaggaaataaaatcactgagaagcatttttagacacaggacttattaatttggcattttatttctagtgtagggtgtacttacttttatagatgttgcagttacatatttcttaattaaaaaaattttattagttttta

SEQ ID NO: 237474 - DNA, 566 bp, Homo sapiens
actgaaattcagtaaatttgtgtgcagatccaggtttctatcttaggtcagtttcctttggtttgaaaattttcttgaacacgtgtagcagcatggatttgctggtgaaaaattctttttgcatttgtgcatctaaaaatgtatttttatttttgaaagatatttttgcttgtaaagarttctatgttgacagttttttttttgttttcttttaattcaatactttgaagatgtttctccacttttttctagcttgcattatttctgacaagaaatcagctgtcatccttatcttttttctctgtaaataacatttttttcctccatctgcttttaagatataatattttcttttcatcacaggttttaagaaattgtttaatgatgtgtcttggtgtagctttctccctatgatttttccatgggctgtgttgagcctcttgggtcttgagtttatatttttcttccaatttggaaattttttaaccattattcctgcaaatgtcttgcctcaattccttcaagattccaatacatatattgctggccacttgtagctgccccac

SEQ ID NO: 237475 - DNA, 567 bp, Homo sapiens
gatattgccatcattttttttacatcctcaaaggaacattatttttttttctctgtatatttaagctactttaacctaaatttcaacttctgttcttttcccttttctgcattttctctttcacttttttcattgtctcctccacatttgaattctcatttcctcagttgttattgttaccttaatgattatcaatattctctccagagtggggccatgtacagttctgtcatttgtagtaaggcctagcactgccaagcattctgctaagtatttttacatttgctctttctaacaacctgcaggacagttttctgattagcctgctcccttttctcacttgtagttctcaagaacagctgtagatcgtgctgtatagtatattgtgctgggaatgcaacaacctgaggtgaggagggactgacaggaacagactggatcagttctaatcctcccctaaaaacagatgtccatcagcatttctgtccaacatgtcagtgaccccagggaatataaatcccaggcrtgcctgctttccagggttcctgagctgtggtgcaagtgagg

SEQ ID NO: 237476 - DNA, 648 bp, Homo sapiens
caggtctttgcaaaagcctattctcccagcttttgttctcatcttctacagcttattccagacatagttgacaaatagatttttttttttttttgagacagagtctcactctgttgcccaggctagagtgtagtggtgtgatctcagctcactgcaacctctgcctcccaggttcatgccattctcctgcctcagcctgctgagtagctrggaccacaggcgcccgccaccacgcccggctaatgacaaatagatttttataaaatcgaaataagatcatttcactaagtactcgaactgttccaatgactcccataataaaatcaaagaataggtattccataataaaatcaagtaaaaataatgatatcccagagaaaaatcaaagtcctgaaaatgtcctctcaggctttacttgaatccccagtcccttacttgactaacattctgaccacatagctttggactgctctgccctagacctactggttactttgctagtactcaaacactccaaatagccttctacctcaggacctatgcatttgcactgcctctgccgagaacactctttctacagatagccacgtgtttcatttgttctcttctgctatatctccgctaagttgtcatctaatctaaaaagcc

SEQ ID NO: 237477 - DNA, 648 bp, Homo sapiens
caggtctttgcaaaagcctattctcccagcttttgttctcatcttctacagcttattccagacatagttgacaaatagatttttttttttttttgagacagagtctcactctgttgcccaggctagagtgtagtggtgtgatctcagctcactgcaacctctgcctcccaggttcatgccattctcctgcctcagcctgctgagtagctaggaccacaggcgccygccaccacgcccggctaatgacaaatagatttttataaaatcgaaataagatcatttcactaagtactcgaactgttccaatgactcccataataaaatcaaagaataggtattccataataaaatcaagtaaaaataatgatatcccagagaaaaatcaaagtcctgaaaatgtcctctcaggctttacttgaatccccagtcccttacttgactaacattctgaccacatagctttggactgctctgccctagacctactggttactttgctagtactcaaacactccaaatagccttctacctcaggacctatgcatttgcactgcctctgccgagaacactctttctacagatagccacgtgtttcatttgttctcttctgctatatctccgctaagttgtcatctaatctaaaaagcc

SEQ ID NO: 237478 - DNA, 561 bp, Homo sapiens
gcttccaccaacaatcaactctttctggtttaactgactgttggagcctacagtgaagattccaccctttggctagccttagccctccctccagtctccatcctccatagcagctccaccagttactttttgttagacttttagaagtgtccagaatttaatatattttacttctcttccttccaatatacctgcaaggtaagtattctttcttagcttctatttacccatgagaaatgtgagcattaaggagatttgctcacttgcccaaagttaaacgtacaatatacaaaaatctaaactcaagactctagttcaagagaaaaaataacaacaacaaaagcagtgctaattattttgccccttgttttagagaaataaaagccataacacagagctatgaacaccaagtaaaatagatggtaccccaaaaagsactattccttgagacatgagatctatttctcttttttttaaaatttattttgctattttttttgtatctgtttatggattgatgccctacctccactcatttcaaaaatcttactgtgcattcaa

SEQ ID NO: 237479 - DNA, 599 bp, Homo sapiens
ctaactcaaaagacccttcaaaaattttaaggccacacattttcagcatggagtatccatggtgcctgttccacccactttctgtaatcatcctgtctctcactttaactcttatgtcagatgtttgaaagaacttaagcatctgaccttagaaaagtacactatattccccacaagttcacagattccatggaaactaaacatggtgcatttaaaaactatataaacagtaaattagctataaaaaaaactctccattttattttatattaagcttggccaattttgtacagctgygttctcagtaaatgagtttggaaatttccactgcaagacttttcacttaggactcatagaagaaagaggtcagtattcttatcatcttatctctgctacttactcactgggtggttttgcccaaactaagataaaaatttgtaataagcaaatttttgtggataagcaaaaaaaatttgtcttagttcttagcacagtgccctgacacatgctagtagctcaataaatgtttgttcagtgagtaaatgaatgaatgaatcgatgtatgaacaagagtttttgttgatagatagttagacctt

SEQ ID NO: 237480 - DNA, 426 bp, Homo sapiens
tgttatgagctcagagataatcaaatatgaagccagtatattctggaccatggtgtgctaaggcttagttggartaagaataagaaggaagaaaactagttccaaagtatcagtatttctttgggagggaagagaggttgtggtatcaatagttcccagctatttaccagaatctacctaaagaggtagcatctcaccagccttttgattaagcattagtgtgatggttaatttttggtgtcattttgactggattaagaaataacctagatagatgaaaaaccattatttctgggtgtatttgtgagggtgtttccgaggagattggcatgtgcctcagtggactgattggaaagattcaccctcaaggtgatcagaaacatccagtaggctgggggtccctgtggaacaaaaaggcaaataaaa

SEQ ID NO: 237481 - DNA, 426 bp, Homo sapiens
tgttatgagctcagagataatcaaatatgaagccagtatattctggaccatggtgtgctaaggcttagttggaataagaataagaaggaagaaaactagttccaaagtatcagtatttctttgggagggaagagaggttgtggtatcaatagttcccagctatytaccagaatctacctaaagaggtagcatctcaccagccttttgattaagcattagtgtgatggttaatttttggtgtcattttgactggattaagaaataacctagatagatgaaaaaccattatttctgggtgtatttgtgagggtgtttccgaggagattggcatgtgcctcagtggactgattggaaagattcaccctcaaggtgatcagaaacatccagtaggctgggggtccctgtggaacaaaaaggcaaataaaa

SEQ ID NO: 237482 - DNA, 444 bp, Homo sapiens
  misc_feature (1)...(444): n = A,T,C or G
cgcccaatggctttaacctttctcagtgtctgttatatcatctacgaagcagggaaaacaatacactcagttcatggagttgctatagttataagtgagattaagtgaaaatatatatgtaaagtgcttatcatcatagtggctcttacaggcttttatgtaaataagaatcgccaagaanaacatttcagtgtttgagaatcaaatagagtttcctcaggtgttatgtttgtttgcttacttgctattaaagctttatgagatgtaattcaaataccttaaaatttacytgttgaagtgtacaagtcaatagttttaatatattcacaaaattttgcaaccatcaccactacataattttaaaatattttcattgtccatgcaaaaaccacatgccctaatctacgttttcttgtttgcatgtatatctattttgatcattac

SEQ ID NO: 237483 - DNA, 616 bp, Homo sapiens
ctcatcatttcattgtctttggtaagatggacagatcatttggtggttgttgcacatgtcttttcccataaactgtacttgttgtcacgtaactggaawtagagttacaatgataaccatttgttacaatgataaacatttgttacaatcataaccatttgcaagaaccgtgaatccttttattcaacaaaagttagttctggtatctttttcatatacattgcctgaggctcagaattgcaatgtattctagttaggtctttgtgtttaggctcccaagtacccgtattaatcagaacatctaaaaagcattcccataagtacaatggactgagattgccaggtgtctgatgtagtgcaaagattattgctgtttaaaagattttgacctcagagcttcattcttcccatcgtcataattttctgagcgctgaggcattgcagatcttgtctttctgtttattcagctatactttttgccagcaaagaggcctgaacaagtaggtaatgagactgtctacacagaggttctgcgagcccacagctgcccactggcaagacccgtttaggattaatatttcagatcatctattctgcttgctctgagattgatgcg

SEQ ID NO: 237484 - DNA, 601 bp, Homo sapiens
aaggtcataggagttaaatttgtctcacattttcctttcagtgggttgcattgtttgatagtttatgataatcaaacaaagtrgtaacttatctgtattggtgatggacttctttcagaagggctttgctttttgattacacacactaattatccttatgaaaatatacatgcattccataaacgagctgttttgttatccaagccttgattctttcgtccattcttagctactgttgactacctagtgttgttaaccattgttgtagatattggggagacagcagttaacaacacagataaaaaatttctgcctttatagagttcgcattctagaggggggagatagataatacactaagataaatcaaatattaagcttttctgtgtattttatatcaaaaaggtatactgaacttggacactaaggtgtagtaaggatttcctcctttgtatggtaaaagaagagtccttggtaatctttctttttacaataataatagttcttttttctcctagagtctcccgttttcttaaagaactttacccacacaagcaaggttgccctaggacagtggttcccaacctttctggcaccagga

SEQ ID NO: 237485 - DNA, 407 bp, Homo sapiens
atttggtactcatcagttagtcaatatctgctgaatgagtaaattttaaaaagtgtccttgatttctcctccagaccattagttgttcttttcctgttcaaatagtcggaaagcaaaggcaaggaaaaaaaatctcagaggctcrcacaaaaaaagctacaaggaaaaacaagttcagttagttgttttccgtggtatctatgaaacttttttctaaacaaataatgtgttctgtccaaaacactttagcctaccaacatagcaactctacgtgcaataacggcatgactgcactgattctgtgtcttgattttaactttcaacaagtaaaacaaacacaatttgcaaagcagaattccaacactgctgtcattacggctttagataaagcaccactgacaaggccc

SEQ ID NO: 237486 - DNA, 576 bp, Homo sapiens
tcttttgcacaccatgaaaacaagttttcaactactcaaccaaaagtctcgggtagaaaactgcccctttatctcatgrtggtatgaacaggagatgagtagacaaaacttttagacctttaccggctgttcctaccccaaatgccagccactcacatgttttctcgccctccaaattgctcagttttcatgatgctgcatttaaaacctatgtctgaaattggtagtttgctttttttttttttttctgggggaggggtgtttttacaagggagatttgggggaaatgtgggtatggagaaattttctttccattttccactggctggcactagaagaatccagtcagtttttctctgttctttttctccctctgtcctcttggtaccaaagcagtcaccatcacaaattccctttctttctattagtggatatggaattatctagcattattaagaataaggtgaaactgtctcagacccaggcttaaattgcaaaatgacaaaatatattaaaatactagagtacaaaagaaaagatacagaaaaattctacaaaggtatatatgaatggcca

SEQ ID NO: 237487 - DNA, 576 bp, Homo sapiens
tcttttgcacaccatgaaaacaagttttcaactactcaaccaaaagtctcgggtagaaaactgcccctttatctcatgatggtatgaacaggagatgagtagacaaaacttttagacctttaccggctgttcctaccccaaatgccagccactcacatgttttctcgccctccaaattgctcagttttcatgatgctgcatttaaaacctatgtctgaaattggtagtttgctttttttttttttttctgggggaggggtgtttttacaagggagatttgggggaaatgtgggtatggagaaattttctttccattttccactggctggcactagaagaatccagtcagtttttctctgttctttttctccctctgtcctsttggtaccaaagcagtcaccatcacaaattccctttctttctattagtggatatggaattatctagcattattaagaataaggtgaaactgtctcagacccaggcttaaattgcaaaatgacaaaatatattaaaatactagagtacaaaagaaaagatacagaaaaattctacaaaggtatatatgaatggcca

SEQ ID NO: 237488 - DNA, 611 bp, Homo sapiens
tagtgtttttcatttattttcaagtgttaactcccttccagtttctgtctgcttttggccactctctagtaccttcagttagtttttttaaatgtcgaatccagagcttatagttgttatatttggtatgttatatatgggaggagctgccttattattaccagaagttttattatggttgttgcttctagtgtatgttcacagtttgttttttttttttaattttttttggcaaaccaataaaaaaggaagataatttttttttatttgcaaaacatgctttactaggaattagcctaaggattctcaaaagtactggtcaaagtcratgctttggagctgcagactgcttattaatttagtttgatcttatctagatatccttctggtgctactgacctgggccaggggtgtctaatcttttggcttccctgggccacactggaaggagacaaattgtcttgagccatacataaaatacactaacatgaatgatagctgatgagctaaaagaacaaaaatcacacaaaaaaacttatgttttaagaaagtttgcaagtttgcgtttggccacattcaaagccatgctgggccacaggttggacaagctt

SEQ ID NO: 237489 - DNA, 611 bp, Homo sapiens
tagtgtttttcatttattttcaagtgttaactcccttccagtttctgtctgcttttggccactctctagtaccttcagttagtttttttaaatgtcgaatccagagcttatagttgttatatttggtatgttatatatgggaggagctgccttattattaccagaagttttattatggttgttgcttctagtgtatgttcacagtttgttttttttttttaattttttttggcaaaccaataaaaaaggaagataatttttttttatttgcaaaacatgctttactaggaattagcctaaggattctcaaaagtactggtcaaagtcaatgctttggagctgcagactgcttattaatttagtttgatcttatctagatatccttctggtgctactgacctgggccaggggtgtctaatcttttggcttccctgggccacactggaaggagacaaattgtcttgagccatacakaaaatacactaacatgaatgatagctgatgagctaaaagaacaaaaatcacacaaaaaaacttatgttttaagaaagtttgcaagtttgcgtttggccacattcaaagccatgctgggccacaggttggacaagctt

SEQ ID NO: 237490 - DNA, 410 bp, Homo sapiens
attgattcagcattgtctgcattgccagggcctcctctcaccctaatgtagagtgggaagtggacatttttacttaaaaatgtgtgaatttttcttacccaaatattactttattgtctcattgtaaaaatttcatatatctatataacagatatatatatctgtaagtaactttaataatcagacaagccaccttctccactccccgacctytattcacttttaccatttgcatctaagctcaccttaaaaacctgtgactggtacatggtggcctcttcagctgcacacaatcttgcctgggagttttcctggcctgaggctataaggtggaagattgtttcgacgacttttaacccttcacctctcctcacccctgaaagcatcagcaaacctccctctttctgtcc

SEQ ID NO: 237491 - DNA, 609 bp, Homo sapiens
gtaagggatacatctgtagatttaaacacgcacataaacacataagtccactaaaatggtcagatttyctactcctcattcaattaaaaaagaaactatataaagaaagcaccaaaagacaaaataccaaacccgtctctacttcagttctctgttccattcacaattctcacccaggaaagagaaattcaaagaaaagacagagctggaacttcatttcctatatatagttagccagcattcttcagtgttgtctacacattcacccacatccaaatgtactgccaacagaccaacacagagaagtgctgagttaggtttcagtgtgtttctaatatatcccattttattcaagacagaataaaattttgtttcaatgtgactcctctgggtttaaaaaaaaatccaaaatcttagacttaactatatagtcaatcaactagtacataaacaaatgacttcagtacactaatgctgatagccaaaatagtaaaaaataggtctaaggcatgtcacttacttgctctttctggctcatttattttaactgctcccactagcattctgtctggttttgttttttttttctagattaattcaattctcttc

SEQ ID NO: 237492 - DNA, 609 bp, Homo sapiens
gtaagggatacatctgtagatttaaacacgcacataaacacataagtccactaaaatggtcagattttctactcctcattcaattaaaaaagaaactatataaagaaagcaccaaaagacaaaataccaaacccgtctctacttcagttctctgttccattcacaattctcacccaggaaagagaaattcaaagaaaagacagagctggaacttcatttcctatatatagttagccagcattcttcagtgttgtctacacattcacccacatccaaatgtactgccaacagaccaacacagagaagtgctgagttaggtttcagtgtgtttctaatatatcccattttattcaagacagaatmaaattttgtttcaatgtgactcctctgggtttaaaaaaaaatccaaaatcttagacttaactatatagtcaatcaactagtacataaacaaatgacttcagtacactaatgctgatagccaaaatagtaaaaaataggtctaaggcatgtcacttacttgctctttctggctcatttattttaactgctcccactagcattctgtctggttttgttttttttttctagattaattcaattctcttc

SEQ ID NO: 237493 - DNA, 616 bp, Homo sapiens
tactgccaacagaccaacacagagaagtgctgagttaggtttcagtgtgtttctaatatatcccattttattcaagacagaataaaattttgtttcaatgtgactcctctgggtttaaaaaaaaatccaaaatcttagacttaactatatagtcaatcaactagtacataaacaaatgacttcagtacactaatgctgatagccaaaatagtaaaaaataggtctaaggcatgtcacttacttgctctttctggctcatttattttaactgctcccactagcattctgtctggttttgttttttttttctagattaattcaattctcttccctttggatgagatagaaaacagaacmaaaaaaatgaaaaaaaatgctttgcttcacaatcagtcagtatttattgaatgtctttattgtcacacagtatttattgaaatactatcatttgccaggcatagaagaagacgagataaataagatggccccttatcgtctaagacttaagtaaaatacataggatatatatacataatagatataaaacaaagctgactgtttcatgaaagcagaaaggagagagacaatcttttcagttggagaatcaggaaaagtt

SEQ ID NO: 237494 - DNA, 583 bp, Homo sapiens
gacgggggtctcactatgttttccaggatggattagaactcttgggcaaaaatgatcctcctgccttagcctgccaagtagctgggattacaggggcatgccaccacacctggctcctaagattcttgtagtttgccttattccttccagtgaaagcagaaactcttcttaggattatagtaaaagagttgagaacaataactwacaggtgaattaacataacaaatgacaatacccccttactcactgtgtaaccttgggacagtcacttaacctcattgaacatccattgcttcatttagccaatgaaaggaaaccgagattttatctaataaatgccaggcactgtgtagacacttccttctatgagatctcttgcctaggacaatcagacaaaatactgtctgagaaggcactttgtatgtgggaataggctgtaacaaatgtaaaatggtgttaccgttagtatcatatctgtctgcagtttctttcttttactgccccttagcaggaaagaagcttccttagttccatcatattgtagaggaagaatgtcattgtccaggactctagactatagagc

SEQ ID NO: 237495 - DNA, 375 bp, Homo sapiens
gtctcaaaaaaagatttttttttccagctggccatggtgacgtgtgcctatagttccagctatttgggaagctgtggtgggaggactggttgagctcaggaggtcgaggctatagtgagccatgattgcaccactgcatttcagcctgagtgacagaragagatgtccaagatcacccagcaagtcagttgccaagtagcaacggaatccaggctgatctgatcctaaagtccctgcctttccctatattccttgtttcctggactctggtaacaacactccagcaaggggagagagggtttacagcaagcttgtcaaacctgtagcccatgggccacgtgcggcccaggatggcttttgaatgcagcccaacac

SEQ ID NO: 237496 - DNA, 612 bp, Homo sapiens
tgaccacaggagtgcttagcccttaccacattacataaaatctgcagtttacctggtttctctcacaccagyctgtgagtttccagaaaaaactcacagcctgtgagtacaggatccagctccatgtttgacatttcatgggctcaacaggggttttctgagcagggggagacattgtgatgtgctgcccagatcccccatcactgaggacttaggacagacaccagctgctaggagtgctgttagcacaaagcctttaatgtcagcttctccacagacagggccatcttggcccttgttgccccacttgccaggtggccccacatccaaggactgataaaggcaggatgacctggccatcttagctcatctgatgggctactctagctctagagtccctgtcgagtcagctaaaactgtcttggggcctgcatggagctcactactttccccctgtgccactcctgttccctcccatccttcccacgcctgttgatcccaagggtgctccctcataaacatcctgcactccaatctccatctcagaatctgcttccaggaacctaacctgcaacaggcccacggtcctctcttcttctcccagccatcact

SEQ ID NO: 237497 - DNA, 612 bp, Homo sapiens
tgaccacaggagtgcttagcccttaccacattacataaaatctgcagtttacctggtttctctcacaccagtctgtgagtttccagaaaaaactcacagcctgtgagtacaggatccagcyccatgtttgacatttcatgggctcaacaggggttttctgagcagggggagacattgtgatgtgctgcccagatcccccatcactgaggacttaggacagacaccagctgctaggagtgctgttagcacaaagcctttaatgtcagcttctccacagacagggccatcttggcccttgttgccccacttgccaggtggccccacatccaaggactgataaaggcaggatgacctggccatcttagctcatctgatgggctactctagctctagagtccctgtcgagtcagctaaaactgtcttggggcctgcatggagctcactactttccccctgtgccactcctgttccctcccatccttcccacgcctgttgatcccaagggtgctccctcataaacatcctgcactccaatctccatctcagaatctgcttccaggaacctaacctgcaacaggcccacggtcctctcttcttctcccagccatcact

SEQ ID NO: 237498 - DNA, 538 bp, Homo sapiens
ggagctgttggggggcagggaggggctttatgaggcctaggatgtgtaggtcagcaaaagcagcatgtacattccctttctccaactgttggggaaattctaccaggtcttcagggccttgctcagtgtgcggtctcccccacatctctctggctcggagtcctcaaagcttgtttttgttcttgcagaggctgttgtgctcaaagggtggtctcagaccagcatcatcagcatcacctggaatttgttagaaatgcaaattctggggacttactcctgacctactgagtcagacactggggtaggaggccagcattctgtgttttaacaagccctccacacagctgattctgatgcagcctcgagtttgagaaccactgccttaggccgcggatgaccactttagygtttggaatgcacacagcatctcccccttctgactgctagcagcctaaaggcaagggcattatcagattctttcctgaaacctcccagtctcccttgaaagtgttcagagaaaagttggatttttctgatg

SEQ ID NO: 237499 - DNA, 645 bp, Homo sapiens
tgtgggagctatgccatccatctccctagaaacctggggcagggctggtccagctaatgctgcctgttctccatcctcaccagggctgtccctttctctcagtttccagagcctagatctgggatcccacagcaggccccatggaagccatgaccatactgaacatactytttgacttctcctgtcctatatcccgccattccaagtcttcttaagtgaggagacgtctccagccttgcttcaatacatgctttccaacttctgcacctgttccgcggttccgtccgcctgaaggctctctcactctcctccagaaagacttccatctccctgcaggtagggttcgtcctccctttctctgaaaccccatggccccacagcatcacacaccactgtgattgtcttgtttgtctcaagtcctagactaggcacctagtaattttacacaaacccctccaaatgcacagcaacacactcagaagtatgcaaccacacagatgtataacaaagctctcttcatctagatacacccagacaccccaagggccaattacacaaaggcacaggcacatacacatgaccctctaaccaggacacccagatacatgctaatggtgacacaagcaacaagttgacatctgggag

SEQ ID NO: 237500 - DNA, 645 bp, Homo sapiens
tgtgggagctatgccatccatctccctagaaacctggggcagggctggtccagctaatgctgcctgttctccatcctcaccagggctgtccctttctctcagtttccagagcctagatctgggatcccacagcaggccccatggaagccatgaccatactgaacatactctttgacttctcctgtcctatatcccgccattccargtcttcttaagtgaggagacgtctccagccttgcttcaatacatgctttccaacttctgcacctgttccgcggttccgtccgcctgaaggctctctcactctcctccagaaagacttccatctccctgcaggtagggttcgtcctccctttctctgaaaccccatggccccacagcatcacacaccactgtgattgtcttgtttgtctcaagtcctagactaggcacctagtaattttacacaaacccctccaaatgcacagcaacacactcagaagtatgcaaccacacagatgtataacaaagctctcttcatctagatacacccagacaccccaagggccaattacacaaaggcacaggcacatacacatgaccctctaaccaggacacccagatacatgctaatggtgacacaagcaacaagttgacatctgggag

SEQ ID NO: 237501 - DNA, 645 bp, Homo sapiens
tgtgggagctatgccatccatctccctagaaacctggggcagggctggtccagctaatgctgcctgttctccatcctcaccagggctgtccctttctctcagtttccagagcctagatctgggatcccacagcaggccccatggaagccatgaccatactgaacatactctttgacttctcctgtcctatatcccgccattccaagtcttcttaagtgaggagacgtctccagccttgcttcaatacatgctttccaacttctgcacctgttccrcggttccgtccgcctgaaggctctctcactctcctccagaaagacttccatctccctgcaggtagggttcgtcctccctttctctgaaaccccatggccccacagcatcacacaccactgtgattgtcttgtttgtctcaagtcctagactaggcacctagtaattttacacaaacccctccaaatgcacagcaacacactcagaagtatgcaaccacacagatgtataacaaagctctcttcatctagatacacccagacaccccaagggccaattacacaaaggcacaggcacatacacatgaccctctaaccaggacacccagatacatgctaatggtgacacaagcaacaagttgacatctgggag

SEQ ID NO: 237502 - DNA, 645 bp, Homo sapiens
tgtgggagctatgccatccatctccctagaaacctggggcagggctggtccagctaatgctgcctgttctccatcctcaccagggctgtccctttctctcagtttccagagcctagatctgggatcccacagcaggccccatggaagccatgaccatactgaacatactctttgacttctcctgtcctatatcccgccattccaagtcttcttaagtgaggagacgtctccagccttgcttcaatacatgctttccaacttctgcacctgttccgcggttccgtccgcctgaaggctctctcactctcctccagaaagacttccatctccctgcaggtagggttcgtcctccctttctctgaaacyccatggccccacagcatcacacaccactgtgattgtcttgtttgtctcaagtcctagactaggcacctagtaattttacacaaacccctccaaatgcacagcaacacactcagaagtatgcaaccacacagatgtataacaaagctctcttcatctagatacacccagacaccccaagggccaattacacaaaggcacaggcacatacacatgaccctctaaccaggacacccagatacatgctaatggtgacacaagcaacaagttgacatctgggag

SEQ ID NO: 237503 - DNA, 614 bp, Homo sapiens
cttagtgttgtaactcaagcaatgccattaagtttttaaaaggagggagggtttaaaagtgatcttagggagtctctctgggcctactctggctcaagaggctgataaaaaataaataaatgaataaacttgatctttagagtcaacgatttagaattttcaagcatgaaggtgcagcagataagaaatttaatttatrgaagtccaggtttcttaatatgtgtgccaatttttaaaattgtaggaaagtatatgtttgttagctaccaaagaacatagatttttcctattagtctaaaagtcgtcccaacaagttgaatcaacttttcacaaaaagcaaaagactatagttttgaatgatagtttttcattttaacagtaagaaaagggcccaaatattccagtttggttatagccagaaataagatagttttatgtttcatatattttatctcaagataataattcctaaagttctagccttaaccctaaatctcagtggttcttctttaaagctagaacatagtgtgttttcatcttgatcagtatttgaaagatgagactgatgtttactaattacaattgcagtaacaaagcttgatctattaatatat

SEQ ID NO: 237504 - DNA, 562 bp, Homo sapiens
tgttggtgtgtaaacaagcaagagctgccttaaggcccagtgtggtggctcacgcctgtaattccagcactttgggaggccacagcaggtggatcacctgaggtcagragttcgagaccagcctaaccaacatggtgaaaccccatctctactaaaaatacaaaattaccatggtagcaggcgcctgtaatctcagctacttgggaggcgaaggcaggagaattgcttgaacttgggaggtggaggttgcagtgagccaagatcatgccattgcactccagcctgggtgacaagaccaaagctccatctcaaaaaataaaaaagagctggcttagtttattccaggacctgcccccaactgatacgttgtccctcccacccttactgggtgacagatgtcttcataacttctaatttagatctcataacttttcatcccctcttagttatgagaattctgtcatgccaatgtttaagattttgttcagtccatttaagcttcattctcacatatgatacaaacttctccttacttgactatgggattgtcctttcgatgcgc

SEQ ID NO: 237505 - DNA, 562 bp, Homo sapiens
tgttggtgtgtaaacaagcaagagctgccttaaggcccagtgtggtggctcacgcctgtaattccagcactttgggaggccacagcaggtggatcacctgaggtcagaagttcgagaccagcctaaccaacatggtgaaaccccrtctctactaaaaatacaaaattaccatggtagcaggcgcctgtaatctcagctacttgggaggcgaaggcaggagaattgcttgaacttgggaggtggaggttgcagtgagccaagatcatgccattgcactccagcctgggtgacaagaccaaagctccatctcaaaaaataaaaaagagctggcttagtttattccaggacctgcccccaactgatacgttgtccctcccacccttactgggtgacagatgtcttcataacttctaatttagatctcataacttttcatcccctcttagttatgagaattctgtcatgccaatgtttaagattttgttcagtccatttaagcttcattctcacatatgatacaaacttctccttacttgactatgggattgtcctttcgatgcgc

SEQ ID NO: 237506 - DNA, 575 bp, Homo sapiens
ttaaatattggctgtgaattmtaacagtagacctatgcaccatggaatactatgcagccacaacaaaagttaaatattggctgtgaattctaacggtagacctgattctatgcatgaaaagttgcttgggttttagacagttattttcagacataccaagcttaatttagaaaactctatcttctactgctataaatggccctggcagcctaagaaatttcagctccttccaaaggtgaacatttctcatctccttgttagttaactcagcgtgtttatatagtatgaatacagttaggcataaccaattggctcaggcccatagtttacccagctgatcttgtccctggcatgacgttactaggatccacaggggtccatgttctaatggaagtcaggtccaagcacaagtttaaacaaaatatttgagatccaggacagatgcacagaatgatggtgctacattttcattctctgtatttagcaggtatatgcaaactacccacctggctgggtggtgcccaggtacgctgggtcattccctagtattgctgattggaaagcttttgggatcc

SEQ ID NO: 237507 - DNA, 419 bp, Homo sapiens
aaagtgtatagcatctctttccacccactcctcgtgctccagccatgtaagtcctgcctgcttcccccttgccttccaccatgagtaaaaatttcctgaggcctccctagaagccgttatgcattctgtacaagctgcagaatcatgagccaatcaaacctcttttctttataaattacctagtctcagatatttctttaaagcagagcaagaacatactaatgcatagggcctttgagaagtgactagatcatgagctggaagccctcataaatgggattaaaagaggctcaagggagctcatttgttccttctaccatgtgatgacacatctatgaaccaggcaycaagccctcaccagacaccgaatctgctggtgccttaatcttggacttcccagcctccagtgaggaataatt

SEQ ID NO: 237508 - DNA, 457 bp, Homo sapiens
gagcagagtccctcaacaccaggctctgggactgtgttacaaaagcagccaggcagagagcagaacaaaggagggtgggacaggtgctggctttcagcttggactgcttcaccayggtccctacctacactccctccccagggagcctccctgttcttcctcaaccatgccttcactaggtgagaacattgttggtggcactggcgccacagctgactggccagttatctccccatcccaaagcaaaacttggtgggctatgcacgcctcagaaagtctgggtcaacccgctacaaatgttaagcacagtgctggggcacccctgaattaatgaggcatttcttaatgacctaaaaatatatatttcttttgtcaacctgcatctttaatggttaattcaagcagaatcagcgaggtgaattctattccaattggcagctcctccccactttaatgt

SEQ ID NO: 237509 - DNA, 465 bp, Homo sapiens
agaaatcccagaagcggactccatcaatccaagaaagagttgctttgtggaaggtgaaggaagacccacagagtgctcaggatgatgctattgctggagagcgaaagatggaacagccttgtccaggcagaacagtcataagccaggaaatgaaacaaaggaaaacaggtgcctgaatttcctggggaaacatggcttgtttaaggacttggagttatggatggaatttatgggacccacgtgagcagacctgaggaaggctcgatttcttttgtttcttggtccactctgtcactctgctctggtcaagccccatttggtctacagcccatgagaaggaatgaggctggttctgcactctcagcatgcagtccgaaagcatgtgggagtggggagggaaagtgagatgaattaagacaaagaacaggtgccayagaagtagatttctaggaatgaagtggggca

SEQ ID NO: 237510 - DNA, 463 bp, Homo sapiens
gacaagagttcttcctcctgcctcccagttcgatttggcctatttatctctcttacygccacagcaaataaggccatggaaatgaaataactttcggtgtacgtggagaggagatgccaataagagacaatcttttcttttaatgatctcaaaaattaagagtttaatgaattggaatttgagcttaatctcagtaaaatgtcagttccttgagggagggaattttttttgtcttcttgtcttcttgctacatcttcagcacccagaaaagtgctcagtgcatagcaggcattcaacaaatatttactgaatgaatgaataaatgaaagagtaaatgaatgaatatacaataagttccaaatactgaattagaaacaaagctgcttagtctcgtctacttctaaagccttatggagaaacacagactacaaatagattttctattcctacttctcaggaattc

SEQ ID NO: 237511 - DNA, 491 bp, Homo sapiens
gaggtggggggtggggaggggatggggcctccctggagcctcgggccattagtaatctgctttgtgaatggagttaaaggaggagggggctgcacatacttggaattccttcatttttgtgggctccttctctccaaactttcaggatgtgggaaatataagatgaaagaagctgcatttccagcctatcaggttacagcgtggaaaatggagagggaaagaagtagggggtggagagkggggcgggagaaggcctcccccagaggggccagggaaacccagtttgagaactggctggggagagtgagaaagaaagagtgctggggcggtcagatcacgtttcacatcacatcagagctgtggaatttcctctcttctagggggagccctgtgaagatgaagttggtttaaggttagtcggtgatgaataatagcccaaaggcgactgatggagggtgttactaagtgactggtgtttacaagcaaagctt

SEQ ID NO: 237512 - DNA, 529 bp, Homo sapiens
caaaataattctgaataaaaagactgacactgatggacttacacatttgatttcaaaatttactataaagccacaggaattgagaaagtgtgatattggcacaggaattggcacagatcaatgaaagagacttgagagttcagatataaayctttacatttatgatcaattgatttaattaacttggacctcataaagatgagatgtgccttctgcgtctgtcccagaaaggttagccttcaatacgtaacagcccaaatgggagccagagatcagcttgtgttggacagaccagagctagatgggtaggccttgtttaagaaaaagaacatgaaattatgaatgcaaaattagctatgaaaatgaggaaatcgcaaaatacaacgttttttaaaaagcacatgaatagcacaaacatcacaaaatccagaaaaataagttattaattaactgcctttcacctctgtaacaattgttttgtacatttttgggttgtacactttgattatctcctcatatgaaaaatttt

SEQ ID NO: 237513 - DNA, 496 bp, Homo sapiens
ctttagtgtgtgtatgtgtgtgtgtgtgtcactgtgtgtgtgtgtgtgtgtgtgtgtgtgtggagagagacaggataagagagaaaaagaaaaaagatgactctctttcttcgatttcactcaaaatcattttccctctccatatcaygtcccccacaatgccctttttaacactaaaattttatatgtcccattgctatataaccaatttcagtatatagccactcctctgggaactcagtaagcacataaaattttagaaacttgtgtcaagaaaaactccaaacatgtgtagcaaattgacttactatggtttgcttatttgtatctaacaaaaatactaccaatagaattgtttaataagatatggaataacttgtgaaacatttaattttttttttcttttttagggacagggtctcaccatgttgagaccctggcctcaagtgatccctggtctcaaacccctggcctcaagtgatcctcccacctcaac

SEQ ID NO: 237514 - DNA, 575 bp, Homo sapiens
aacagtgggatggataggagtcctctgaccatccaggtaggaggtgatgtccccatcargtggatacggcattattccatttcttcttccattcaacaaaggactctaagaatgacaagggtctcatttctgtggaaagaaatgacaagatccaaatagggaatcagggcccagtcaagcagtctggctcacggcaggctctagaccagtgctgagcaacacaaatacaatgtgagccacaagtgcaattaaataaagagaagcagatgaaattcattttaattatatattttatttaacccagtatttccaaaatgcaagtattttgtcattatggttaatatgaaaacatttttttcatgagctatcttacattcttttttcctaagtctttaaattcccgtatgtattttatacttttagcccatctcaacaactcagactagctatatttcaagtgttcaacagccatgcatggctagcagctcctgtatttgacaacacagctccagatataaaaagaagtaggggagagggatcctaagccctgggacaatctgcagcgggggtagggg

SEQ ID NO: 237515 - DNA, 592 bp, Homo sapiens
gttgttagtagttgttacagagaaagtatgacctgcaaagccaaaaatatttactatctgtaaatattttggctacattatgctacttctgtgaacctccacagacttctaattctamgactcagttattctaagactttagttggaggagagtgacacagcacaagctaggtcttgaaaacctactttcttctatactaacaagaaatgagggcagctctagtgctacttagctaaagcagatttcaaaaagtcctagggagagctgggtgtggtgtcatgtgactgtagtgcagctacttgggaggctgaggcaggaggatcacttgaacccaggattttgtctcaaaaaaataaaaataaaaataaaaaagcctggaaagaaagaaggatgaatcagcttaaaagatagtccttaaaaataataataaaaatactgtggatcttccaattcagaaatctgcagcgtttgtgaatgaatgaatattggtatgtacaaaggaaaagtctggaaggatacagacattcagtgggtggttacctttggcggaaggaaaggtatttaactctttgtttcttctatattgtttgt

SEQ ID NO: 237516 - DNA, 581 bp, Homo sapiens
ttaaacatttgaatatatatttaatatatttaatatctaagtgttcgtattataaattcaaatatttaaataaattaaatatttaaatttaaaattttaatttaaacatttaaattaaaaatactttaaaacttataaatgtagaattattttatattttgttttatacaaaatgtgtataacaatgttagcgtttacataaatgataatcattatttaggtgacatttaatgagattatttacttcttcaaagtctgtaatacatagttcagcctaaatctgttttccatgaaagtccagctgcttgattagtttgcttagtggaaaaggagtatgattatctctttgcttagacacagaaaccctttgaarttacatttttaattaagccatacagaagacttctaaaggcttttaatgtttttatcagtcttgaagggttctgagtttttaaaatattatttagctcaaatatcagaaatattaacatgatttatgttgtaaagtatcaatttgtttaaggaattattatttatatttaaatgttttacattttatttacctgttgtaatctgaagtt

SEQ ID NO: 237517 - DNA, 547 bp, Homo sapiens
tggtcttcctttttttttttttttttgaggtggagttccactcttgttgcccaggctggagtgcaatggcatgatcctggcccactgcaatctctgcctcccaggttcaagcsattcttctgcctcaggctcccgagtagctgggattacaggtgccttccatcacgcccagctaatttttgtatttttagtagagatggggtttcaccatgttggccaggctgttctcaaactcctgacctcaggtgatccgcctgccttggcctcccaaagtgctgggattacaggcgtgagccaccacacccagccagggaagcatatgttgatagggtctcaaaatcaacatggtgaaacaccgtctctactaaaaatacaaaagtaaattatctatactggtaatgtgtatatataattatacatacgagcaatgaacaattagaagttactaagaataagccaggcatcgtggctcatgcctataatcccagcactctgagaggccaagatgggtgaattgcttgagctcaggagtttgagaccagcatga

SEQ ID NO: 237518 - DNA, 423 bp, Homo sapiens
gcaacaatattttacaacctgctactttgtggcttaaagcaattcagggtagaatttggcttagaactatatgcacagataaacaygtgacaaagcatttcaaagacaaagaaaacccaacatcttttgctgttctttctgacagagtctgttacccttaggctttagaactggtcatcccagagatatcataatttttattagtcatttagacaggccgaggcagtagtgcaagaagacataaaaagtttaccataaagcactaaatgaattatttagatatgggaagatgtactttaaatataatggtcaaacttatttttcatttttgcttgactgcagcatcatgagagaaggtcaaacttatttttaataaatttccagtttttttgttcattttctaggtgggtgatttttttcaac

SEQ ID NO: 237519 - DNA, 583 bp, Homo sapiens
tgatcagtaatagttacgtggataaataacattgataaataacagtacttacattaataagtgacagttctccaagaaaaaaaaaaacaaagcttttttcttcaacaatgaaagctcagtttatatttgagtgcctgtttttggtgattaagatcaccaaaargctgaaaggggtctgttatcttataaatttatctcaagaagctttgacgtcagatttatgattaagatgaaatgaccagaccagaaccacttactatttgaaaacatattcaacacatagtattttttaaattagttaatatcacttcagttcaggtctttcaaagattctaatatttgaattaaattttaagaatcaactatcttgtctatattttcctcttccaaatcatctcgtattcaaaataaaaatccatattctttcagatctgtcttatatttcttagtttttgtgtacacttgccatattattttgtgttttgcttgaaagtatatagtagagaggtgaatagcaaattttttggagtcagatgatctaggtgttaatcctggcacttatgagacacaatctacctactat

SEQ ID NO: 237520 - DNA, 583 bp, Homo sapiens
tgatcagtaatagttacgtggataaataacattgataaataacagtacttacattaataagtgacagttctccaagaaaaaaaaaaacaaagcttttttcttcaacaatgaaagctcagtttatatttgagtgcctgtttttggtgattaagatcaccaaaaagctgaaaggggtctgttatcttataaatttatctcaagaagctttgacgtcagatttatgattaagatgaaatgaccagaccagaaccrcttactatttgaaaacatattcaacacatagtattttttaaattagttaatatcacttcagttcaggtctttcaaagattctaatatttgaattaaattttaagaatcaactatcttgtctatattttcctcttccaaatcatctcgtattcaaaataaaaatccatattctttcagatctgtcttatatttcttagtttttgtgtacacttgccatattattttgtgttttgcttgaaagtatatagtagagaggtgaatagcaaattttttggagtcagatgatctaggtgttaatcctggcacttatgagacacaatctacctactat

SEQ ID NO: 237521 - DNA, 618 bp, Homo sapiens
ttattttccagaaaactccagttgccatttatgcttgggtatcctttagaaatcatggctctgtctctctaacatctgatatttatttcaatttattcaatgtttagaaataataaatccaaatcttacagagcttaaatggccartctatagctatgatgaaatgaagacacaaccctacattttatatttttaaatccaattatcttgccattatataacagcaaaacaaatagctggtccagtgaattttggcaatgtgcttctcaaaccgatgaaaaactactaatacagacatttgattaaattgtttagtatttggactgtgatacattagtcaatgttcccatgaatatacagcctcaaaatactaggttgggcatttttcatctgaaatatcctcactataattagccctgtcagcttgtattatttcaagtatctttgctcgtgtatatctcaaggacacctaaatgtaccatgcaattaactaaattattgaggtatgtaataatttgtattacagctccattggatatatatgcatatccagaatatatacatatgtgtgtgtatatatatatatgtgtgtgtgtatttagacaagttttaagtgaa

SEQ ID NO: 237522 - DNA, 618 bp, Homo sapiens
ttattttccagaaaactccagttgccatttatgcttgggtatcctttagaaatcatggctctgtctctctaacatctgatatttatttcaatttattcaatgtttagaaataataaatccaaatcttacagagcttaaatggccaatctatagctatgatgaaatgaagacacaaccytacattttatatttttaaatccaattatcttgccattatataacagcaaaacaaatagctggtccagtgaattttggcaatgtgcttctcaaaccgatgaaaaactactaatacagacatttgattaaattgtttagtatttggactgtgatacattagtcaatgttcccatgaatatacagcctcaaaatactaggttgggcatttttcatctgaaatatcctcactataattagccctgtcagcttgtattatttcaagtatctttgctcgtgtatatctcaaggacacctaaatgtaccatgcaattaactaaattattgaggtatgtaataatttgtattacagctccattggatatatatgcatatccagaatatatacatatgtgtgtgtatatatatatatgtgtgtgtgtatttagacaagttttaagtgaa

SEQ ID NO: 237523 - DNA, 556 bp, Homo sapiens
ctaggttgggcatttttcatctgaaatatcctcactataattagccctgtcagcttgtattatttcaagtatctttgctcgtgtatatctcaaggacacctaaatgtaccatgcaattaactaaattattgaggtatgtaataatttgtattacagctccattggatatatatgcatatccagaatatatacatatgtgtgtgtatatatatatatgtgtgtgtgtatttaracaagttttaagtgaaaatgatatcaaaatatttgaaggcattttgaaaatatttttcttctcaaccactggcttcagtttgagtcatcaatggaggaacatacatcagagaatgggattagtctggaaaacagagtatattgcctggaatacagaactccatcaaatgggaattcctgctgcaaagttgtgtccaatcaagaattaagtccctaagtacacacactcctcatgttatctcctaacaacacagggattctttccattttcagttgtttattctgtgcaattactgccattcaatcacccaagcaggatgaatca

SEQ ID NO: 237524 - DNA, 563 bp, Homo sapiens
atgtgcactcacacatatatatacctatatgtacagatatacatatatccacatgtgcatacatgtattacacattccacaatatttgtaattctttgaacctttggaatttattgagactcatttttagggtgaaataaattatccatttttaagttgttttatatgtgctggtaaataatctccactctttttttgggagagtatagtatacagtattagtttaatgcatgcattttcaagtttattaaggtatttacatatttgatatttctgaaaatagaatactattggtttattttttagrctattttgttaggttcatataatttgttgatattgtgttctcattttatttattctttatgacatctttttgagatcaacttgcattcatttttttgtaattcaaaaataattgacataaaatttatgtattattgtttacagcctaacattttgaagtacagatgcattgtggagtgactacatttagttaattaacatatgatatgcattacctcacataattatcattttcatggtggaaacactgtataccc

SEQ ID NO: 237525 - DNA, 563 bp, Homo sapiens
atgtgcactcacacatatatatacctatatgtacagatatacatatatccacatgtgcatacatgtattacacattccacaatatttgtaattctttgaacctttggaatttattgagactcatttttagggtgaaataaattatccatttttaagttgttttatatgtgctggtaaataatctccactctttttttgggagagtatagtatacagtattagtttaatgcatgcattttcaagtttattaaggtatttacatatttgatatttctgaaaatagaatactattggtttattttttaggctattttgttaggttcatataatttgttgatattgtgttctcattttatttattctttatgacatctttttgagatcaacttgcattcatttttttgtaattcaaaaataattgacataaaatttatgtattattgtttacagcctaacattttgaagtayagatgcattgtggagtgactacatttagttaattaacatatgatatgcattacctcacataattatcattttcatggtggaaacactgtataccc

SEQ ID NO: 237526 - DNA, 599 bp, Homo sapiens
cagtgtaaaggaggaaaaaaatattttccttcttcccatcttaggttcagtgggtggaatcctgcaatttagactcaccaaagacatataagcaacaaaaaaacagaagtttattgacaagtgcgttgcacatacacacgggagaattcagggatgagtaattcaaagaattggttagaacttggtcttatatagtattttaacaaaaatacaataaatttgtagagaagcgacaagacaaaggaaggggttctcaggggtatgaattgtgggaaggtagatatatggggagattagtggaatataarggttatttaagcaaggtctgttgagtatattcctctgttgccttctctaggatgataagaccctagagttgtctttggtgattaaaaatcatccaatccttcctggtagaaagggggcggccagagagtttttcttgtgtctctctattttttgtctttcacaattgtcttcagttcaaaataatccagtgccagaggagcacattttatggtggcatactctgtacttcttcattacccagtcaagcaaagctgcagatttattacctttttataaaatgagaaagatgc

SEQ ID NO: 237527 - DNA, 599 bp, Homo sapiens
cagtgtaaaggaggaaaaaaatattttccttcttcccatcttaggttcagtgggtggaatcctgcaatttagactcaccaaagacatataagcaacaaaaaaacagaagtttattgacaagtgcgttgcacatacacacgggagaattcagggatgagtaattcaaagaattggttagaacttggtcttatatagtattttaacaaaaatacaataaatttgtagagaagcgacaagacaaaggaaggggttctcaggggtatgaattgtgggaaggtagatatatggggagattagtggaatataagggttatttaagcaaggtctgttgagtatattcctctgttgccttctctaggatgataagaccctagagttgtctttggtgattaaaaatcatccaatccttcctggtagaaagggggcrgccagagagtttttcttgtgtctctctattttttgtctttcacaattgtcttcagttcaaaataatccagtgccagaggagcacattttatggtggcatactctgtacttcttcattacccagtcaagcaaagctgcagatttattacctttttataaaatgagaaagatgc

SEQ ID NO: 237528 - DNA, 613 bp, Homo sapiens
aggctttcaaatatcccccaggccagtttcaggttgggcagcctactaccccatgacatccaatattatattgacatactgatttcatttctcttggatgtatacccaatagtgattgctggatcgtacagtagttctatttttaattttttgagtaaacgtcatactgttttccataagggctatactaatctacattcccaccgatagtgaagaaagattctttttcctccataccctcatcaaacttttttatcttttgacttttttcatagccactcagacaagtgtgaggtgcatctcacggtggttttaattggcatttcccttatgaataacgattttgagcattttttcatatctgttggcaatttgaatgtcttcttgtgagaaatgtctattcaagtactttgctctttttaaaaattgkgttatttggcagttttttgctactgagttatttgaactccttatatactttgaatattaactccttatcagatgtatgatttgcaaatattttctcccattttgtaggtcatctcttcattctgttggttgttacctttgctgtaaaagacttttagtttaatttactagcgcttgttaattt

SEQ ID NO: 237529 - DNA, 509 bp, Homo sapiens
ttcagggtccaagggctctttagttagcaagtgatgaatcctgccaggactgggtaatttccttcaaggcagcaggtttccttctggcctagggtgtgtctagaattgtcattttggaactagggcctggaaagggggcctcacggctttgactgatggcctatcttactgtgactgaggtggtatccaagatgtaagacagagttctctttactctcttcaatcctcaagcagaaggaagcagtctgttttggagccatgagctgtgcagcctaaggttgcgggggtgatgtaagcactcccttggccaccccagatgatgtctcagtatgtcatatgccctccamgttccctggttctgagcccagttcagcactaggacccacctaggagttgcagtctttgcagtctatactgccttacaagtttttataggatcccagagcactttagcctaccatagcgacatttgccagaactcaagttccaacagctggcatgtgttattc

SEQ ID NO: 237530 - DNA, 623 bp, Homo sapiens
aagttccaacagctggcatgtgttattcccttctagctagggctgatttatctgcttcctttgtggaaaggtgttagctgagttcagtccagttttgctttctgctgtggcaggacagcactgagttcaatacaacgtctcacagttgctgtgctatccttcttacagcacacagattctctcttcacaccacatggccactgccaagggactggagagaggtratatcagggatttaagactttctttcctaccttcttcagtgtctcttttattaatgtgaggttaaaaccaggtattgtgagtgctcacttgattttggttcttataaaggtggtttgttttgtgtagatgtgaaactggtagaggcaggggagaaaattagtagagccctttatttggccatcttattcttccccctcagtttctagtttagatggcatgcatggaactgctttttggtaatgtatttgagcagagactaaaacacatataagtagagattgtcctccccccgcagaaaaaacttacattttatccaattgtggatttttatgactaaaataatcttagtatagatcagtatacttttaaaaacactggtaactattcattgtagtcaa

SEQ ID NO: 237531 - DNA, 573 bp, Homo sapiens
tgcttcctttgtggaaaggtgttagctgagttcagtccagttttgctttctgctgtggcaggacagcactgagttcaatacaacgtctcacagttgctgtgctatccttcttacagcacacagattctctcttcacaccacatggccactgccaagggactggagagaggtgatatcarggatttaagactttctttcctaccttcttcagtgtctcttttattaatgtgaggttaaaaccaggtattgtgagtgctcacttgattttggttcttataaaggtggtttgttttgtgtagatgtgaaactggtagaggcaggggagaaaattagtagagccctttatttggccatcttattcttccccctcagtttctagtttagatggcatgcatggaactgctttttggtaatgtatttgagcagagactaaaacacatataagtagagattgtcctccccccgcagaaaaaacttacattttatccaattgtggatttttatgactaaaataatcttagtatagatcagtatacttttaaaaacactggtaactattcattgtagtcaata

SEQ ID NO: 237532 - DNA, 623 bp, Homo sapiens
aagttccaacagctggcatgtgttattcccttctagctagggctgatttatctgcttcctttgtggaaaggtgttagctgagttcagtccagttttgctttctgctgtggcaggacagcactgagttcaatacaacgtctcacagttgctgtgctatccttcttacagcacacagattctctcttcacaccacatggccactgccaagggactggagagaggtgatatcagggatttaagactttctttcctaccttcttcagtgtctcttttattaatgtgaggttaaaaccaggtattgtgagtgctcacttgattttggttcttataaaggtggtttgttttgtgtagatgtgaaactggtagaggcaggggagaaaattagtagagccctttatttggccatcttattcttccccctcagtttctagtttagatggcatgcatggaactgctttttggtaatgtatttgagcagagactawaacacatataagtagagattgtcctccccccgcagaaaaaacttacattttatccaattgtggatttttatgactaaaataatcttagtatagatcagtatacttttaaaaacactggtaactattcattgtagtcaa

SEQ ID NO: 237533 - DNA, 573 bp, Homo sapiens
tgcttcctttgtggaaaggtgttagctgagttcagtccagttttgctttctgctgtggcaggacagcactgagttcaatacaacgtctcacagttgctgtgctatccttcttacagcacacagattctctcttcacaccacatggccactgccaagggactggagagaggtgatatcagggatttaagactttctttcctaccttcttcagtgtctcttttattaatgtgaggttaaaaccaggtattgtgagtgctcacttgattttggttcttataaaggtggtttgttttgtgtagatgtgaaactggtagaggcaggggagaaaattagtagagccctttatttggccatcttattcttccccctcagtttctagtttagatggcatgcatggaactgctttttggtaatgtatttgagcagagactaaaacacatataagtagagattgtcctccccccgcagaaaaaacttacattttatccmattgtggatttttatgactaaaataatcttagtatagatcagtatacttttaaaaacactggtaactattcattgtagtcaata

SEQ ID NO: 237534 - DNA, 620 bp, Homo sapiens
  misc_feature (1)...(620): n = A,T,C or G
acagttaataaacattacttcatgagtgaaaagaattttgaggtaaagttttgaattgacagtattacrgacaatattattttttatacattttcctttctttttctttcagttatctggattagagatctgattttcaaaagttgtcatgtttttgtaaaccttcaaccaaaaggcttaaaaggagaaggtataattttaactttaccaggagtatatgctgtatttacttgcataaagacagaaaacagccctggtttctctgtgtcacttgttgtcatttataagctttggctggaggggagcaatgtcaaggtgcatggcannnnnnnnnnnnnnnnnnnnnnnnnnnnnnnnnnnnnnnnnnnnnnnnnnnnnnnnnnnnnnnnnnnnnnnnnnnnnnnnnnnnnnnnnnnnnnnnnnnnctcagaacttgatgaaagtttggaatacccagaaactgagctcaccatctgccagagatatgtctaccttatctctgagttttatgccccttcaacatgtctaaaactctttgatatcagagaggccaatggaatcaatatgtaattcctcactgttatttatggactactgaggacagccacaagcttttctag

SEQ ID NO: 237535 - DNA, 620 bp, Homo sapiens
  misc_feature (1)...(620): n = A,T,C or G
acagttaataaacattacttcatgagtgaaaagaattttgaggtaaagttttgaattgacagtattacagacaatattattttttatacattttcctttctttttctttcagttatctggattagagatctgattttcaaaagttgtcatgtttttgtaaaccttcaaccaaaaggcttaaaaggagaaggtataattttaactttaccaggagtatatgctgtatttacttgcataaagacagaaaacagccctggtttctctgtgtcacttgttgtcatttataagctttggctggaggggagcaatgtcaaggtgcatggcannnnnnnnnnnnnnnnnnnnnnnnnnnnnnnnnnnnnnnnnnnnnnnnnnnnnnnnnnnnnnnnnnnnnnnnnnnnnnnnnnnnnnnnnnnnnnnnnnnnctcagaacttgatgaaagtttggaatacccagaaactgagctcaccatctgccagagatatgtctaccttatctctgagttttatgccccttcaacatstctaaaactctttgatatcagagaggccaatggaatcaatatgtaattcctcactgttatttatggactactgaggacagccacaagcttttctag

SEQ ID NO: 237536 - DNA, 620 bp, Homo sapiens
  misc_feature (1)...(620): n = A,T,C or G
acagttaataaacattacttcatgagtgaaaagaattttgaggtaaagttttgaattgacagtattacagacaatattattttttatacattttcctttctttttctttcagttatctggattagagatctgattttcaaaagttgtcatgtttttgtaaaccttcaaccaaaaggcttaaaaggagaaggtataattttaactttaccaggagtatatgctgtatttacttgcataaagacagaaaacagccctggtttctctgtgtcacttgttgtcatttataagctttggctggaggggagcaatgtcaaggtgcatggcannnnnnnnnnnnnnnnnnnnnnnnnnnnnnnnnnnnnnnnnnnnnnnnnnnnnnnnnnnnnnnnnnnnnnnnnnnnnnnnnnnnnnnnnnnnnnnnnnnnctcagaacttgatgaaagtttggaatacccagaaactgagctcaccatctgccagagatatgtctaccttatctctgagttttatgccccttcaacatgtctaaaactctttgmtatcagagaggccaatggaatcaatatgtaattcctcactgttatttatggactactgaggacagccacaagcttttctag

SEQ ID NO: 237537 - DNA, 608 bp, Homo sapiens
ttctagcatctcatactcatttactgtaggcctcctttaagtccggatttcaattagtcaacatagaagactatgaatgctctttccagacacttaaaccaacatattaagttataaatccttcaggagtatacccatgktaatgaatattaccatatttagtcttatattacatcttcttttgtctaaaagccatagaatgtacatccatagttgttcctcggacttatgccaagaaaaatgtcaagacctacagctctcttagtacatgagccatattcctcagtgcatgttctctacttctccttctctgcgaagctggatctcaatctcctatgctttagaggaagtgaaagatgctggcaaacatgcgaataacttacccagttgaagcaaacgaaaagacttacgtatagagttgctgattgtctcaaatcagggtggggggtatgaaattcttacacccaaaagtaatgttcagtgttttcagtttcaaagttgccactcttgtctttgtttatataactgtctgcaacccatttctcaggatcacactcctcccaatccatgtctttcctgtagcacaagagaacttggatggtcacata

SEQ ID NO: 237538 - DNA, 609 bp, Homo sapiens
agaagttacaggcagacataaatcaatacatgtaaagtgtacactggttcggccctgaaaggtgagacatctagaaggtagggtgtgagagagggcttttcaggtcctgggtgaattcaaagatttccaaagattggcaatgggttgaaaaagttaagttttgcctgagaagagttgaagtcagcataaagaaatgcttgagtcaagatgaggggggtagtggaagccaaggttcttgttatgtccgtgaagcctgtaagtaacaggcttcagagagaatggatggtaaatgtatcttatcagatcttaaaaaaatctgggaaagacctggtaagtgaaggagattccctacagaatacaaattcctcttacragagagggctttgcagggacatttcaaaatatgtcaaagagaatatattttgggacaaaatactttgatttccttcaaggcctgctctctatcatgtgatcccataccagagtcaggtcggagttgggtatctcactgctacaaagaatctgttttgtcagccttatgatctctagtttagtgttaatgctggtcccttgtgcctaaactccacagggatgagggtatgtgtgacc

SEQ ID NO: 237539 - DNA, 497 bp, Homo sapiens
agatctggttgtttaaaagtgtatagcccctccccgctctctctctgttgctcctgctsccaacatgtgagatgcctcgctccctctttgatttctgccctgattggaagcttcctgaggcctccccaggagcctggaagataccagaatcacacttcctgcacagcccatagaaccttaggacaattaaacttcttttctttataaattacactgtccaggtatttttttatagcaatgtaagaatggactaatacaggcttcatcatggaagcgatcacctctttatatagtcattggactgctgtgattagaaaattcacagcaatgagttggtctcattttgtatatattttattgagtgtttgccatatttaggttacctctgggatggggtgcaattctcatatacaatatacagaccgtttacttattagaaggatgtctgtgtttgtatcaggagtgggaggacagtggtgaactcattaatgtgattc

SEQ ID NO: 237540 - DNA, 497 bp, Homo sapiens
agatctggttgtttaaaagtgtatagcccctccccgctctctctctgttgctcctgctgccaacatgtgagatgcctcgctccctctttgatttctgccctgattggaagcttcctgaggcctccccaggagcctggaagataccagaatcacacttcctgcacagcccatagaaccttaggacaattaaacttcttttctttataaattacactgtccaggtatttttttatagcaatgtaagaatggactaatacaggcttcatyatggaagcgatcacctctttatatagtcattggactgctgtgattagaaaattcacagcaatgagttggtctcattttgtatatattttattgagtgtttgccatatttaggttacctctgggatggggtgcaattctcatatacaatatacagaccgtttacttattagaaggatgtctgtgtttgtatcaggagtgggaggacagtggtgaactcattaatgtgattc

SEQ ID NO: 237541 - DNA, 527 bp, Homo sapiens
tgcacagcccatagaaccttaggacaattaaacttcttttctttataaattacactgtccaggtatttttttatagcaatgtaagaatggactaatacaggcttcatcatggaagcgatcacctctttatatagtcattggactgctgtgattagaaaattcacagcaatgagttggtctcattttgtatatattttattgagtgtttgccatatttaggttacctctgggatggggtgcaattctcatayacaatatacagaccgtttacttattagaaggatgtctgtgtttgtatcaggagtgggaggacagtggtgaactcattaatgtgattcagtagaacatcaaaatgagatcttcattgtggctttggaatacatttttgacacttttaaaattaaaattattttaattcatattatgaaatatattgtacacaataaaatccatctaattaatatttacaaatttaaaataaaataacctgtaattactacacatagaagaaatatatatcaacaatt

SEQ ID NO: 237542 - DNA, 527 bp, Homo sapiens
tgcacagcccatagaaccttaggacaattaaacttcttttctttataaattacactgtccaggtatttttttatagcaatgtaagaatggactaatacaggcttcatcatggaagcgatcacctctttatatagtcattggactgctgtgattagaaaattcacagcaatgagttggtctcattttgtatatattttattgagtgtttgccatatttaggttacctctgggatggggtgcaattctcatatacaatatacagaccgtttacttattagaaggatgtctgtgtttgtatcaggagtgggaggacagtggtgaactcattaatgtgattcagtagaacatcaaaatgagatcttcattgtggctttggaatacatttttgacacttttaaaattaaaattattttarttcatattatgaaatatattgtacacaataaaatccatctaattaatatttacaaatttaaaataaaataacctgtaattactacacatagaagaaatatatatcaacaatt

SEQ ID NO: 237543 - DNA, 512 bp, Homo sapiens
tatgatttgcaaatattttctcccattttgtaggtcatctcttcattctgttggttgttacctttgctgtaaaagacttttagtttaatttactagcgcttgttaattttagttttgtcaattgtgggagtcatatctaaaagattatcatgcataccaatgtcatagagctttccccctgtgctttcttctattagttttatagtttctggtcttctgtttatgtgtttaatatattttgwgttgatttttgtatatggtgtcagataagggtccaattccattcatctccatatggatattcagttgttctaaaaccacttattgaagagatggtccattccatattgtgtgtccctaccacctttgtcaaagatcaattgaccatgaatgtatcaatttatttctatgtgtctatttttatgccagtaccatgccatttttgattactgtatctttttattgcattttaaaatttaattggcataaaataatcatacacacttatggag

SEQ ID NO: 237544 - DNA, 422 bp, Homo sapiens
aaagaatttccccaagcatgatacctgtagtcctctaaatggtcaggcagaaagggcttttgttatatagggagagtgaggaaggctagaaaggacagggagtgagggagtagaatgagcagatagcatgattgaacagataaacaggaaatgtctttccttaagtttcagaaggtttgtaaaataggaattgttccatagtccaatgcatttctttggtttttgtttcttttcagatgccttttatcagtttaagaggttaccttcaataccaggttactgaggatttttgtcacaaatttcttcaaatctttcaaatcagttttctgataatgaggtaagtgtatctattcacttttcgtctttagtccaytattatggaaattaatccttaaatctagagagacaggtgaatatagaga

SEQ ID NO: 237545 - DNA, 608 bp, Homo sapiens
caaaaataaacaaatgggatcacatcaaactaaaaaagcttgtgcaaaacaaaggaaacaaaagagtgaaaagacagcctacagaaaaagagaaaatatttacaaaccatttatctgaaagataattaatatccagagtatacaaggaatgcaatcacctcaaatagcaaaataacaaacaatcttattttaaaatggtcaaatatatctgtattatatttttagatcaggtagcatgatacctgcagctttggcaggtttgttttcatttttttgttgtttgttttcttcttttattatttatttatttgctcaagattgctttggctatttgcagtcttttgtggttccatacaagtttttggatttttwcctatttctatgaaaaacaacattggaattatggtaagaaatgcactgaatacataaatgctttcggcgctatgcacattttaacagtattaatttttaaaacccatgaacatgagatatctttccatttatttgtttcttctcaatttccttcagtgttttatagttcagtgtacagatgactttttattcatctattaggggttctttatgcttcatggatctgtatgttcatt

SEQ ID NO: 237546 - DNA, 579 bp, Homo sapiens
gataatccaggatatctccccatccctgaatccttaacttaatcacgtctgcagcatcccttttgtcttataaaatacctgctgtggtttgaatgtgtccccccaaaactcatgtgttggaaactttattcctaataaaacagcgctgagaggtagacctttaagaggtaattaggtcatgagggctctgacttcatgactggattaatgctttcatatyagaataaattagttattgcaggagtgggtttctgataaaaggatgagttcggcccctttcccctccctctttcacactctcttccctttcttccttccaccatgggatgacacagcaagaaagctacaagataatgcagcaagaagaccagatgctggtaccttcatataccagcctccagaactttcaaagcataaatttattttctttataagttacccagtctgtggtattcatttatagcaatataaaacgaactaagacagaaattttcatagcttccagacattaggacatgaatatctttggaggccattagcctactgcagtacaccctcatctacatcaggaaatatcat

SEQ ID NO: 237547 - DNA, 579 bp, Homo sapiens
gataatccaggatatctccccatccctgaatccttaacttaatcacgtctgcagcatcccttttgtcttataaaatacctgctgtggtttgaatgtgtccccccaaaactcatgtgttggaaactttattcctaataaaacagcgctgagaggtagacctttaagaggtaattaggtcatgagggctctgacttcatgactggattaatgctttcatattagaataaattagttatygcaggagtgggtttctgataaaaggatgagttcggcccctttcccctccctctttcacactctcttccctttcttccttccaccatgggatgacacagcaagaaagctacaagataatgcagcaagaagaccagatgctggtaccttcatataccagcctccagaactttcaaagcataaatttattttctttataagttacccagtctgtggtattcatttatagcaatataaaacgaactaagacagaaattttcatagcttccagacattaggacatgaatatctttggaggccattagcctactgcagtacaccctcatctacatcaggaaatatcat

SEQ ID NO: 237548 - DNA, 486 bp, Homo sapiens
actctcttccctttcttccttccaccatgggatgacacagcaagaaagctacaagataatgcagcaagaagaccagatgctggtaccttcatataccagcctccagaactttcaaagmataaatttattttctttataagttacccagtctgtggtattcatttatagcaatataaaacgaactaagacagaaattttcatagcttccagacattaggacatgaatatctttggaggccattagcctactgcagtacaccctcatctacatcaggaaatatcattattcttttattttggactcatttgatgggagggacataaaacaccaatgacaagagaatttgcattttattattttagacaactaaatgttctcttttgtgacttgtctactcatctatatgcctgttgggatattaatatcatgcttgccaaatcaagcatcagttttatgtatcaagagcatcaacctttagtttgttg

SEQ ID NO: 237549 - DNA, 430 bp, Homo sapiens
gaggatgtagagctattgcttggtggtaggaccaaggggatctagggaccaacccaagcctagacccctagaaacagcaggcataatttggaaacatgcaagtctcaactgtaacctataatatcaggacccgaaatggaggaaactcatccatgcccaagactgaggaagcaacacaacttttcctcattgggactccagacccatgatgacatggggacaccagagctgagtgtaacaccaacaagagaggccccagttcttctgattccacagcctgtagccttgcagtgatggtcaaagggaccttggactgtcagaggcrtttcaacaacagcaactccatcttgagtagggactaggtaaaatgacgctgagacctgctgggttgcattctcaggaggttaaggcattcttagtcacaggatga

SEQ ID NO: 237550 - DNA, 553 bp, Homo sapiens
gatgcaatggccacattttttagcttgtgcaattggtacaggacccttgctctcagatcctgctactgatatgaggaacctgtagcagagaaagacacaaaagtgagccctcttcccatgagattccagcctaggagggaagacgtgaactaaaagtgacaagtgtggtgtatggtactgagtggtgaggaagaggcccctaaggtgggttagggcatctggctaagttcttggaaggttctaactagtgcagggtctctagggacaccaaagaacccagataggagggaggtttgagacagggggagaaaagcaggacttggagctattctttcacagttggcagggtcgctgagtgggcattgctgactgaaggctgaagcactttactcagacagtggaggagttgggttgcaggtttggacatgctgagtcaggttcctgggagactatgtgctgatgtccagtgagtggtgggttgycagatagataaatgtggtgttcatcagaggactcatggctgcatattcaggtttggatcctttaatatatc

SEQ ID NO: 237551 - DNA, 537 bp, Homo sapiens
gacacaagccatccctactgagctgttcacattgttgagcaacaaaatggttgttgtttaagtcattaaattttggagtggtgtgtcacccaggtacggatagccacarcagcctgtaccctcgacagtgagatattagggttgcctgggtgcaaatgagaatatcataattaaaaagagggctaaagatgcagaatagagtgggtgtggagtctagagtacatgaaggggcatggcctgagacggtgcaagcactgagaagatggttagagattctggtaagattgtagatttggtggtgtgaagactaggcagtttcatgctaacggtgtgggttttcttggtgacatttgagatgagattataagccgaatgggaattggtggatgtattttgaggactgagaaggagctagaaagtggtcatcttgtatcatgggaaggtagcccttggagtaacatggttcgactcccgagcagtgttgaatgttcatttgtggtaggtaagcatgaaattgacttgaagctggcctgttaa

SEQ ID NO: 237552 - DNA, 611 bp, Homo sapiens
taagcacttattgtggaataccagtgaggttttagggttcttgttatatagtgttattttggctctatatggcttatttgatggccattgcccagattaatcagaaacgcaaagaggacaaagggcaaaggcagaatgatgtcaaataggattgacaaatgccatcatcagagaagcaacatgcacactcaggacaggtggactgggggttgagagatcaagcgcaaatgagtggactaccctccaagctggaggcaggtgaggcagagggagaactctaaggaattttcccataagtggcttgggctgtctgtctggagcttgttctcattggtgcctgcatgtagatggctcagcatcactgcatcactctcccagcaggtagaacattcaaggttgaggtggctgcttgctgggaaacaggagagctgggtcctagttgaagattttctgcacagtcyctcagtgagccaaggctggccactgctcctaagtctcaggttcctccttaataaaggaaggttttgcacaaattcctgtatcattcaggatgggcttaggatgggcttaggttatatagcaatagcaatcccccatccccaaatttccgt

SEQ ID NO: 237553 - DNA, 561 bp, Homo sapiens
gggcagctgtcatttccactgcacagagttcatccgaactccttttccactacaggttcatccaaggaagagtgggaggtagcccaacttttggctatggaaattggggagatatttctttttccatgcctcctggcaactaaatatgggttcacaacataaacatggccaatcagacattcacacccaggattttgaacataaaaggaatgacacaaaggactatgatctgttgaaggtttctcagtgtgactggagtggaatagaggatgccaggcagggtatggtggagatgcctgctgtggaaggaacagagtgtttcaggtgactgggtcctcatggtcagacagtgcctgtggctgcacctttcactctctggatyccccatgtcttctgtaaactgcccaaaacccttctgataaatcccactcagacttaagttaatcagaagcagtttttgttgcttccagccaacagttcttactcatacagtctctcaaatgctatcgtctgtagatgaagcaaacctaatacttaaaatatgaactgtttcttaagtgt

SEQ ID NO: 237554 - DNA, 256 bp, Homo sapiens
atggtctgaatattggtcggatgatataaaagtatactatagcagaaagatgcagattgtgaattgaaaaaaagcacattaaaatcaccacgatctcatttactacatrtatgtataaaagtatacacacagagaaagatctggaaggatatgcaccaatgtgttgcgaaatggggtcccctgggaagtgggaacatcttaataatgtaaatgcttgattatacatatttataattttgtacaatttacatgtcct

SEQ ID NO: 237555 - DNA, 345 bp, Homo sapiens
acacaaaaagcttcccactctatgaaggtaccaacagttmtttcaaggtttttcaacctcggaactgttgacatttaggactggataattttttgttgaaggaggctgtcctgtgtattgtaggatgtttcacagcatccctgacctttacccataagatgcctgtagcactcccttcaccccagttgtggcaaccaaaaatgtctccagacactgctgaatgcctcctgaggggaaaaatcacacacacactcacatctgacaaccactgctttgtcatttccctacagatggatacttaagttgctatgcattctccctatcacaaacaattccatgatataa

SEQ ID NO: 237556 - DNA, 345 bp, Homo sapiens
acacaaaaagcttcccactctatgaaggtaccaacagttctttcaaggtttttcaacctcggaactgttgacatttaggactggataattttttgttgaaggaggctgtcctgtgtattgtaggatgtttyacagcatccctgacctttacccataagatgcctgtagcactcccttcaccccagttgtggcaaccaaaaatgtctccagacactgctgaatgcctcctgaggggaaaaatcacacacacactcacatctgacaaccactgctttgtcatttccctacagatggatacttaagttgctatgcattctccctatcacaaacaattccatgatataa

SEQ ID NO: 237557 - DNA, 586 bp, Homo sapiens
gctattgaatttgctttgctagtattttgttgagattttttttgtacctatgcttatcaggggtattagcctgtagttttcttcttttgtagtgtacttctctgactttgggtatcatacaagtggccaacagatatatttttaaaatgttcatcagggaaatacaaattaaagccacaatgaaatatggcctcacacctgctagaatgactattatcaaaaggcaaatgataacaagttggcaaggatatggagaaaagacaattaatgcaggcattttggaaaatagtttggcagttcttcaatataaatatagaactaccatatgatccagtaatcccacttctggttatatatataaaggaattgaaattggtacatcaaggagatatctgcwctcccatgttcatttcagcattattcacaatagccaagatatggaagcaacctaagtgcccatcagtgaatgaatggataaagcaaatgtatatatacacaatggaacactatacagcctttaaaaagaaagacattatgtcacttaagacaacatggaggccaggagcagtggctcacgcctgtaatc

SEQ ID NO: 237558 - DNA, 532 bp, Homo sapiens
agtctctagaattgttctaagggcatacacaagatggagaaatactcattcaagaaagtctactaaatttcagcaaggatggcaagagtctgtggtatttcggccatgaagacagaggcttcgttttcccccagtttccagcctagggctacactttcacccttgagaggggcagggctccagtgtttctcatgcccttccagccctatgttgcagaagctctattctgagtakgtatggataaaaggtctgaggacccctgcgcctactgaacccctatcatatggtggaagccctagcctagatgtagcaggctgagcatactgaggctccaatcatctcggccccagctcattcatcaaatagaggtttcatgcttgtagagaaaggctgagaagaggttaccactccttccaatacttgcttgcagaggaagggagaaacagtccactgccccaactccaggtcctgtgcagttgtgcagatattcttcccaggggaagtgataggtcataaggatgaagaactctac

SEQ ID NO: 237559 - DNA, 594 bp, Homo sapiens
ataatataattcggaaatttggatctacataaagaaaggaagaatattagagaggaaataagtaaaagcaaaacaaaacttttatttttcttagtcttaattgatcgaacagataacagtttgctctaaataataacagtaataatggatttgattatgtataagtgaaacaaatgacagcaatgtcacaaggratgggaggaaggaattgggataattttgttataaagtatttgtaattctcataaagtggtatcatgacatttgaaagagaattggattagttgtaaatgtatatggaaaactctaggataacaacttaaaaatgtaaaagaagaaataagtttaaaaaaagaagtataacatattctttttttttccataggttattcgtgtttggttacatgagtaagtcctttagtggtgatttgtgagattttggtgcacccgtcacccaagcactatacactgcaccctatttgtagacttttatccctcacccccctcccactctttcccccaagtccacaaagtcaattgtctgacattgttttaaaaagaaagaaaacagaattataaaatgttcaattaaaa

SEQ ID NO: 237560 - DNA, 623 bp, Homo sapiens
gattgaactttccattactcatgtggatgattcactaacccctcaacccactcccctcacactttaatttcctcatctgtaaaatggaggcagagtaactgactttctcagattgtgttgcctgttcttatgtgacctcagggcgttgtctgtcctcaatccttcaggtttcctgtcttgcagcagaaacccccttgcccctaccgccacttgatcccatgggactccaagaggatgtgtgatttcatcacagcccaagcaccccggctccrtggccattctggagaaggggggatcagaggagcttggtatttagtgggtgtgagtgtgggaacagtttacataaatttagaaaaagcaaaacacaaacttctcccctgggaaagagtaagaaggcaacactcagctccacttgaaagaaaagtttttgaagcaggaacgtttatttagagaataactaagcccctgaatcaacaaattgggagccttatctctgagtgtgtgggtcattccgactctccctgctctgctggccacccttggccaggctggacctcagggcagaggcctcgggccaaaggtggcggaggaggctggagaacaaggccctagggaccgagctg

SEQ ID NO: 237561 - DNA, 623 bp, Homo sapiens
gattgaactttccattactcatgtggatgattcactaacccctcaacccactcccctcacactttaatttcctcatctgtaaaatggaggcagagtaactgactttctcagattgtgttgcctgttcttatgtgacctcagggcgttgtctgtcctcaatccttcaggtttcctgtcttgcagcagaaacccccttgcccctaccgccacttgatcccatgggactccaagaggatgtgtgatttcatcacagcccaagcaccccggctccatggccattctggagaaggggggatcagaggagcttggtatttagtgggtgtgagtgtgggaacagtttacataaatttagaaaaarcaaaacacaaacttctcccctgggaaagagtaagaaggcaacactcagctccacttgaaagaaaagtttttgaagcaggaacgtttatttagagaataactaagcccctgaatcaacaaattgggagccttatctctgagtgtgtgggtcattccgactctccctgctctgctggccacccttggccaggctggacctcagggcagaggcctcgggccaaaggtggcggaggaggctggagaacaaggccctagggaccgagctg

SEQ ID NO: 237562 - DNA, 491 bp, Homo sapiens
atcccatttctcctcactgggtgtgatctcccaaatggggtctccagccacctcctacaggtgcatttgggcctgtgataagtctatgcctccctgggatggagcttccagagggatggycaggcaaacatctttgatatttcgctaggtactagaaaatccaaagcgactagaaacttgaggggtcccccagcataccacagcagctctatgggaaactggctagactattacctgggtgcctgttcccatatcttctcaccaggcagatcatctaggcttgggcctccagccaccccctgctggggttattaagccaatagcagctttgcaactccattgacagagcccctagggacaacttaaagcccttctgccactgcctttgctggggaactgcccttgctacccttggactaatgaagaagtaaagaccccaagtgtcttatccatacctccaacaagttgcagttgacccaaggagaggaggc

SEQ ID NO: 237563 - DNA, 411 bp, Homo sapiens
acccagcaatctaattactgggtatatacccaaaagaatataaatcattctaccataaagacayatgcatgcaaatgttcattgcagcattatttacaatagccaggacatggaatcaacctaaatgcccatgaatgacagattggacaaagaaaatgtggtacataaccaccatggaattctatacagccacaagaaaaggacaagattatgtctttgtgggaacatagttgagctggaggccattattcttagcaaactaacacaggaacagaaaaacaaataccacatgttctcacttaaaagtgggagctaaataatgagaactcatgaacacaaagaaagtaacaacggaaactggggtctacttgaggatgaaaggtgagaggagggagaggagcagaaaaaata

SEQ ID NO: 237564 - DNA, 492 bp, Homo sapiens
agacttccccaattttacacagtgagtacaagtagggctgctgatatggtttggatctgactctccacccaaatctcttgttcaatggtaatccccagtattggaggtggggccttgagggargttgctgcggtttgccatggttactacgggactgaacgaagggggacaaatgcacaaatgagaacttaagacaaaagtaactattttaaaggaaggggccaaggaagaagaagagggctcccagcttctactgagcaagggcagctgccctgagcttctatagccctttgtatttattgggtagaaagagcagggtagaggaggcaacgattggtcagctgcttaattgatcacaggttcacattattgctaacaggcttcagatatgcctaatcacaaaaaacactgcacttggggcgtgactgccctcagcattccttctgggtggcagacgcagtttgtcagtttgccaacaacctgttttcatga

SEQ ID NO: 237565 - DNA, 492 bp, Homo sapiens
agacttccccaattttacacagtgagtacaagtagggctgctgatatggtttggatctgactctccacccaaatctcttgttcaatggtaatccccagtattggaggtggggccttgagggaggttgctgcggtttgccatggttactacgggactgaacgaagggggacaaatgcacaaatgagaacttaagacaaaagtaactattttaaaggaaggggccaaggaagaagaagagggctcccagcttctactgagcaarggcagctgccctgagcttctatagccctttgtatttattgggtagaaagagcagggtagaggaggcaacgattggtcagctgcttaattgatcacaggttcacattattgctaacaggcttcagatatgcctaatcacaaaaaacactgcacttggggcgtgactgccctcagcattccttctgggtggcagacgcagtttgtcagtttgccaacaacctgttttcatga

SEQ ID NO: 237566 - DNA, 492 bp, Homo sapiens
agacttccccaattttacacagtgagtacaagtagggctgctgatatggtttggatctgactctccacccaaatctcttgttcaatggtaatccccagtattggaggtggggccttgagggaggttgctgcggtttgccatggttactacgggactgaacgaagggggacaaatgcacaaatgagaacttaagacaaaagtaactattttaaaggaaggggccaaggaagaagaagagggctcccagcttctactgagcaagggcagctgccctgagcttctatagccctttgtatttattgggtagaaagagcagggtagaggaggcaacgattggtcagctgcttaattgatcacaggttcacattattgctaacargcttcagatatgcctaatcacaaaaaacactgcacttggggcgtgactgccctcagcattccttctgggtggcagacgcagtttgtcagtttgccaacaacctgttttcatga

SEQ ID NO: 237567 - DNA, 561 bp, Homo sapiens
aggcttctgggaggaaaaacagtaagtcttgttccttctcctagctctatcagcattttagtccctatattaccttaaccaaaatatgtactttcctgacactttatttataaagtaaaagggtaaattcttatcattttatgaatcatgttctactttgaaaatatgagaaaagctatgaatattctacctagaaaaaaaaatggacattcatatttacacacattttacctatattttcaagtggttcacagaagtccatctatagttcgtggatgttagtttaagaaatagtcacactrgactagaaagattatctaagttcttttctaactcttaacacctatttttttatccacgctgtgatagttaatattaagtgtcaattaagtgggtttatttgtgtgtttctgggtgttgccagaagaaattaacatttgagtcagcggactcggagaggaagacccaccatcaggaagaccaacccacagtgtgggtgggcactatccaatcagctgtcagtgtggctagaaaaagcaggcagaagttggaagaagctga

SEQ ID NO: 237568 - DNA, 516 bp, Homo sapiens
tgtaatcccagcacttcaggaggctgaaatgggaggatcacttgagctcaggagtttgagaccagcctggacaacctagtgagactccatctctacaaatcataattttaaaaaatagctgggcatggtggtacatgcctgtagtcccagttacttggtaggctgaggtgggatgattgcttgagccagggagattgaggctgccgtgagctatgattgcatcactgcactccagcctgggcaacagagtgagatcytgtttcaaaacaaacaaacaaataaataattggcatggaatccttgtgcaaaagccattcatgttgagaaacagtatagtatagcacttatgaatacaaattctggagtcatactgccttggatggaaggctggccacgccacttgctacctgagtatcctcgcaaaattacttcacttctttgtatctcatttcttcatttgtaaaatgggcaacactttcatcccttcttccaaaggtttattgtgagaattaaatg

SEQ ID NO: 237569 - DNA, 516 bp, Homo sapiens
tgtaatcccagcacttcaggaggctgaaatgggaggatcacttgagctcaggagtttgagaccagcctggacaacctagtgagactccatctctacaaatcataattttaaaaaatagctgggcatggtggtacatgcctgtagtcccagttacttggtaggctgaggtgggatgattgcttgagccagggagattgaggctgccgtgagctatgattgcatcactgcactccagcctgggcaacagagtgagatcctgtttcaaaacaaacaaacaaataaataattggcatggaatccttgtgcaaaagccattcatgttgagaaacagtatagtatagcacttatgaatacaaattctggagtcatactgccttggatggaaggctggccacgccacttgctacytgagtatcctcgcaaaattacttcacttctttgtatctcatttcttcatttgtaaaatgggcaacactttcatcccttcttccaaaggtttattgtgagaattaaatg

SEQ ID NO: 237570 - DNA, 528 bp, Homo sapiens
catgggctaaaggtaaggaaagaaaaaaaaaaagatgaggaggagaaagaaagagagagaaactacacaatggaggagagggattccattgaactaaaagacctggcatcattttctggaacaacttccaaataagggtttttgtaccaaattcactatcactctaatagctgaagctactcttgtatctccaaagattagactccaaatgcagcatgatgagaggaaagaacaatggtgttggaatcagaccacagtttgaaccatttgctggtagtgttactctaagcaagtcagttatcccaggagctccatttctgcaaatgagaataatgatacctgtaacatatggctattatgaatcttattaacaacatatataaaggttctaataatgtacttggaacatagtaggaccaagtaatctagtctgayttctataatatatcatttggcacctaatctacctatcagtggaaagatggacttctggtggaaccatctaaatttagcatctgtaaatgtact

SEQ ID NO: 237571 - DNA, 378 bp, Homo sapiens
ggggcccagttgacaaagcagcctctatctggaactttgccaactttctggccaaaggaaaaacacatggcaaattacacatagctcttagagctttttctttcacagagctcacatttcactgaccaatgaagttatatggccaaatctgatgtcaacaggcactgaatacgggtgaccagaagtccaatctaccctcataaatatatgcaactatgacatagctctcagtgaacccgttttatgtgagctggggctgtcacttgagttctctgggcctcagtctcctcatttagctagcggtaatcataatacttaccctaccttccttacagggccattgtgaaaaygaaacatgacagtcgatatggaaaatca

SEQ ID NO: 237572 - DNA, 570 bp, Homo sapiens
taatacagagtctttatttcatcaatgtgtttcgctttagtaattcccttgtttttatttcaccaagtaaaaaatcaaaatagttaccaccactctcaggaagtgaaacttgtaccggaatcactgagttgtctatattccttttcgttactggcctcccgcccatcctcccaaaaggagaaatagtaagaactaataataacaaagtcctaaattctgcccacaagaatgcagggaacaaggcsgttgagtgagattgagtggcagatgtcagtgatttaatttcactttcttaacttgcttttttgaaaaacatcttcatgtgcgacttggaggagaagaaaggcacaatgaaaacagacagcaacaaaggaccagctgtgagtttttttaaatacatacatacatggttggcagtaagaaacttccaggtttaacagtgaagaggaaaattcagtggcatttgacatgatcagtctcaatgcctagagcaggcaggcatctggtccctggttttctcattagtcgggttttctggaaagctgaaatgatgggagaagcatagaattc

SEQ ID NO: 237573 - DNA, 486 bp, Homo sapiens
  misc_feature (1)...(486): n = A,T,C or G
caagactccgtggctatttagtagccagaactcaaacctacggagacctgtgatgaacagtctcactactacagctgtgaagcaatgaatatatttctgtatcataacaactacagaggaaaccatagacgaaaatccagaacctctgccaacgaaagacagcatgcaacacccaagtcaagtgatcagagatgtttttgtacgttatctgagaccagaaatccaaaaggagaagtcaaatctaaacagctgagtggttaaaaaaaaaaaaaaaaaaaaaaaaagttcaccactctctacttctgccgtgaagcataacctgcatttactgattcagcaagcacatttcaagtgcttgctttatgctgggttctgctagagactgmggataaagcagtaaacaaggccaacgagctccgtgtcatcatggagctgacagcttacagggcgagacaggcgccatgcagaggtaccaaaagaagnaaa

SEQ ID NO: 237574 - DNA, 511 bp, Homo sapiens
gaaacaacacgtacgtagcaagacaaaattttaatgtaactaacacaagggcaaaatgaaagggccaggctatgagctggttgggttgagacgggaagagatttcagttggtggcaagaaccggcaggagccaggcctttgtctgaagaatgaaggkcagggctttccaggccagaggagggcacaaataaagtttctaaagtaaaagtgtcaaagccttgggaatgggggtgagcagtctataggcgcagagggaggaggagatggagagtggggatagttggccaaagccaaattatccagactctcaaagagtaggtccaagcttcctactagaggggaacaggggatcctgttagggttttgagcagaaagctggcatgaatcaagggtaattttaggaagatttctttggcagcatgtgtgaaactggaggggacaggattagaaatgattaggtagttgtcctacactcataaagtaccagtcaaggtggcaaggtggcaaggtg

SEQ ID NO: 237575 - DNA, 592 bp, Homo sapiens
taaatatccaggaatagagctgccagatgtaggagggtgggggaggacactgctcaatttgaattgtatggtacacacttacactcacaaaccatttgttatgtatctgaaatttctaatttaacctggtgtttgyattttatttggcattcctaaggagggagctataatctacaactgttctcaagcatttttttttttatcacaaaaccccttttaatggtacatgcataggacagatattccacacattaggccacactttagcaaacactggtatagtggcaaatccatttacacccgagtcaggcagaaggggatcaaataaaatcccaaccctgactctggctgtgtgaccctggctaagtcacataatcttcctgggtctcagttccctattctgtaaaatgaagataataataatgacttctcagggtcactgggaagtttaaatgagatgatgtaaataaaagttcagaccagtactgggaacatgcacttcttttccataagtgctggtgagcacatgatgccaccgtgctatgggtaaggcatcagtaggtggcatgtgggaatacggcttataaaagct

SEQ ID NO: 237576 - DNA, 592 bp, Homo sapiens
taaatatccaggaatagagctgccagatgtaggagggtgggggaggacactgctcaatttgaattgtatggtacacacttacactcacaaaccatttgttatgtatctgaaatttctaatttaacctggtgtttgtattttatttggcattcctaaggagggagctataatctacaactgttctcaagcatttttttttttatcacaaaaccccttttaatggtacakgcataggacagatattccacacattaggccacactttagcaaacactggtatagtggcaaatccatttacacccgagtcaggcagaaggggatcaaataaaatcccaaccctgactctggctgtgtgaccctggctaagtcacataatcttcctgggtctcagttccctattctgtaaaatgaagataataataatgacttctcagggtcactgggaagtttaaatgagatgatgtaaataaaagttcagaccagtactgggaacatgcacttcttttccataagtgctggtgagcacatgatgccaccgtgctatgggtaaggcatcagtaggtggcatgtgggaatacggcttataaaagct

SEQ ID NO: 237577 - DNA, 592 bp, Homo sapiens
taaatatccaggaatagagctgccagatgtaggagggtgggggaggacactgctcaatttgaattgtatggtacacacttacactcacaaaccatttgttatgtatctgaaatttctaatttaacctggtgtttgtattttatttggcattcctaaggagggagctataatctacaactgttctcaagcatttttttttttatcacaaaaccccttttaatggtacatgcataggacagatattccacacattaggccacactttagcaaacactggtatagtggcaaatccatttacacccgagtcaggcagaaggggatcaaataaaatcccaaccctgactctggctgtgtgaccctggctaagtcacataatcttcctgggtctcagttccctattctgtaaaatgaagataataataatgacttctcasggtcactgggaagtttaaatgagatgatgtaaataaaagttcagaccagtactgggaacatgcacttcttttccataagtgctggtgagcacatgatgccaccgtgctatgggtaaggcatcagtaggtggcatgtgggaatacggcttataaaagct

SEQ ID NO: 237578 - DNA, 609 bp, Homo sapiens
caacaatagttcacgaatcctgaaagtgcagagtttgatcctttctcctcagtaagactgagatgaggaaatcatattcattgtcagagtcagctgtgaaatcctcagacggcagagggaggaaggggctctgcaggagggcgagccccctggtgtgagatgaaaaaggagcaggaaaggacaggcactcacccaaactcctcaccaagagactcctggaactttccttctgcacattcaaaatgtctcttttcctttcaaatacaggtmtgtatttctgagctgtgagcattctgagaccattctgaagtgacctggcacaaagttgtagctctgggctctggttcttatcccatcaccagttcactgtgtgcctttcgacaagttacttaacctctctgagcctggtttccttaatctacaaaaggtgtactggacttatggatgaaggcactttccagctttggccttcgttgatgtttatgtctaggaggtagcttttctctccaccggtggtgtgaaattgctgttcacattgacaaggtcagccagagctgggttcaggtctcagcataatctcctaaccagccaagggacttggggcatgtc

SEQ ID NO: 237579 - DNA, 609 bp, Homo sapiens
caacaatagttcacgaatcctgaaagtgcagagtttgatcctttctcctcagtaagactgagatgaggaaatcatattcattgtcagagtcagctgtgaaatcctcagacggcagagggaggaaggggctctgcaggagggcgagccccctggtgtgagatgaaaaaggagcaggaaaggacaggcactcacccaaactcctcaccaagagactcctggaactttccttctgcacattcaaaatgtctcttttcctttcaaatacaggtatgtatttctgagctgtgagcattctgagaccattctgaagtgacctggcacaaagttgtagctctgggctctggttcttatcccatcaccagttcactgtgtgcctttcgacaagttacttaacctctctgagcctggtttccttaatctacaaaaggtgtactggacttatggatgaaggcactttccagctttggccttcgttgatgtttatgtctaggaggtagcttttctctccaccggtggtgtgaaattgctgttcacattgacaaggtcagccagagctgggttcaggtctcarcataatctcctaaccagccaagggacttggggcatgtc

SEQ ID NO: 237580 - DNA, 438 bp, Homo sapiens
ttggcaagcccatcaaaagcccatgaaaccagccacaggcattgtggcctatccaacagtgttctggtgcagtacttggggcacctacctttttggaattacggcacstgggttcaaaccccctccccttccctcatccttaacttcacaatggagctgataatagcacctacctcaaagggttatttgaagaatgagtaacacatataaaacgtgtaggacagcatctggcaccaagtaagtgtttaataaacatcagttgctaccatttgctctgaggcaatataaagaaaatagaggatgactgggtgcccatcttgggatgagatccaccagcaccacatctcatgtctctttcttcccacatacctttgtgttaagctttttactggctgtgtgaaaaaagtcaaatcaactttgcccaagacttaacttatc

SEQ ID NO: 237581 - DNA, 330 bp, Homo sapiens
gaaccctggaaaggagggaggaaggaagactgggtaggaagcctcaggcagttggccagctcaaaaaagggttggccaggctgacagggaggcctcaagccaaagttgcctattgaagagtcttagatcattcagaaatgagcctctgcgtgtccccacactcagtcactgactgggagcagctcacaggaaccayggcctcagcacaaacttggtggtgggtctggagagacagcagctggagcaccagtcgcttatgctcctcgcagcaggagatcagagtagtgcaggttcatggtcaccacaactgcctatcctctagctggcccc

SEQ ID NO: 237582 - DNA, 378 bp, Homo sapiens
ggggcccagttgacaaagcagcctctatctggaactttgccaactttctggccaaaggaaaaacacatggcaaattacacatagctcttagagctttttctttcacagagctcacatttcactgrccaatgaagttatatggccaaatctgatgtcaacaggcactgaatacgggtgaccagaagtccaatctaccctcataaatatatgcaactatgacatagctctcagtgaacccgttttatgtgagctggggctgtcacttgagttctctgggcctcagtctcctcatttagctagcggtaatcataatacttaccctaccttccttacagggccattgtgaaaatgaaacatgacagtcgatatggaaaatca

SEQ ID NO: 237583 - DNA, 572 bp, Homo sapiens
agacagcgcaaaacagtgagactaggtaaatacaaaggtaaaaatttgagctataaactacctgtactaatggcagtcattgctgttatgacactgactctagatatgaaaaaccatttgaagcccaatatgatttcattttaaatgatattaaaataagagtaattggacctagattaagtcatcttatgcacattcaatcatgtttccacaaatttctctaacttttatttctgggtgtctgactattgtggggtatttttatgcctactctacagtgataattattttcatcacaaagagtagcacttttatcaakaactttgcaacagactcggtgctacaattccttcattaaaactgttaagtgaaattgccaatacttgctttattgacaaggatcgtaaatctgttatctttcacttctgaaaggtttcttgttataaaaaaaaatcaacacctgctcagaatttaaaaatatgtatatattaatacattgaaataattttgttataattgctatttcaaaatactgttctagggtccccgaaaaagtctagaaaagtaggatt

SEQ ID NO: 237584 - DNA, 177 bp, Homo sapiens
ctgttgggaagacatccatgaatttcatcacgtttgtaaaggctatatgcttyagttattactgctcaatttagtggaataaaaatgttttgtaatgcttgtggattctgtggatcaggaattttggcaggacatagcactatgactcctgtctgtttcatttgtctgaggcttcag

SEQ ID NO: 237585 - DNA, 636 bp, Homo sapiens
gcataataataaacaagtatgaactctagaaggccttcttggttttgtcttacaastaaggaaatcttcatgaactactgagtgtgtttaggggaaactgaaagtttggatgtttccaagtctcattctaagatatcctcactccagttgcattatcatgggttaatatgcccgttctgtaacatgaactagaatatcactgtcttttactctatcaccacattattggatcatttacatgctcctggccacctgatctgagcaatcattctctggaaacaatttttgcatgcgaagaattgatctcaagtaacaataataaaatgcctaatgtaagcataaggagctttttggaattatgtaaattatatcacgtaatttgagtgggaaataatctattcttaaagaggagatgagctttatgcagaatttagtgcagtctttttagtatacgactgtagatatagactattcactttttcagtcctgtgtaccttaccttaatttgaaaggatagagcatctatttagcctagctttgtcagatgcacaaaatttggcagagttttctgacaagctgattaatgttgcaataaggaatatatccagcgaaagtatgactgttctcaaaccaaga

SEQ ID NO: 237586 - DNA, 636 bp, Homo sapiens
gcataataataaacaagtatgaactctagaaggccttcttggttttgtcttacaagtaaggaaatcttcatgaactactgagtgtgtttaggggaaactgaaagtttggatgtttccaagtctcattctaagatatcctcactccagttgcattatcrtgggttaatatgcccgttctgtaacatgaactagaatatcactgtcttttactctatcaccacattattggatcatttacatgctcctggccacctgatctgagcaatcattctctggaaacaatttttgcatgcgaagaattgatctcaagtaacaataataaaatgcctaatgtaagcataaggagctttttggaattatgtaaattatatcacgtaatttgagtgggaaataatctattcttaaagaggagatgagctttatgcagaatttagtgcagtctttttagtatacgactgtagatatagactattcactttttcagtcctgtgtaccttaccttaatttgaaaggatagagcatctatttagcctagctttgtcagatgcacaaaatttggcagagttttctgacaagctgattaatgttgcaataaggaatatatccagcgaaagtatgactgttctcaaaccaaga

SEQ ID NO: 237587 - DNA, 636 bp, Homo sapiens
gcataataataaacaagtatgaactctagaaggccttcttggttttgtcttacaagtaaggaaatcttcatgaactactgagtgtgtttaggggaaactgaaagtttggatgtttccaagtctcattctaagatatcctcactccagttgcattatcatgggttaatatgcccgttctgtaacatgaactagaatatcactgtcttttactctatcaccacattattggatcatttacatgctcctggccacctgatctgagcaatcattctctggaaacaatttttgcatgcgaagaattgatctcaagtaacaataataaaatgcctaatgtaagcataaggagctttttggaattatgtaaattatatcacgtaatttgagtgggaaataatctattcttaaagaggagatgagctttatgcagaatttagtgcagtctttttagtatacgactgtagatatagactattcactktttcagtcctgtgtaccttaccttaatttgaaaggatagagcatctatttagcctagctttgtcagatgcacaaaatttggcagagttttctgacaagctgattaatgttgcaataaggaatatatccagcgaaagtatgactgttctcaaaccaaga

SEQ ID NO: 237588 - DNA, 528 bp, Homo sapiens
actataatttattatcataaacaggttaataatatttacatatgcatacactgtatagcaaggttattttcagcatggaatgagatgatataaatgagtgggagttgttaaataatatacattattcagtatatcctttggtcttcagaatgtatactgcaaaatatctgacttggtttagaattggttcaaataaactcaaacgtgaatatatgtcttcctattaaaatacttattttatcctaaaaggyattttctattaataaataaattcctcagtaggaatttataaatgttataatgttaaaatcttataaattttataatattttatatcttagtgtgtcttatcaaggataaattattctttctattgttgtcatgtggaaaaataagagaaaaggtgaaatttcttctttctagagtaaattcacagatgatagtcattcaagtttttctagaaacctgattcatataaatggtggaagtgggcagactgtttatccaaaaccaatgtatagtgatttt

SEQ ID NO: 237589 - DNA, 528 bp, Homo sapiens
actataatttattatcataaacaggttaataatatttacatatgcatacactgtatagcaaggttattttcagcatggaatgagatgatataaatgagtgggagttgttaaataatatacattattcagtatatcctttggtcttcagaatgtatactgcaaaatatctgacttggtttagaattggttcaaataaactcaaacgtgaatatatgtcttcctattaaaatacttattttatcctaaaaggcaytttctattaataaataaattcctcagtaggaatttataaatgttataatgttaaaatcttataaattttataatattttatatcttagtgtgtcttatcaaggataaattattctttctattgttgtcatgtggaaaaataagagaaaaggtgaaatttcttctttctagagtaaattcacagatgatagtcattcaagtttttctagaaacctgattcatataaatggtggaagtgggcagactgtttatccaaaaccaatgtatagtgatttt

SEQ ID NO: 237590 - DNA, 528 bp, Homo sapiens
actataatttattatcataaacaggttaataatatttacatatgcatacactgtatagcaaggttattttcagcatggaatgagatgatataaatgagtgggagttgttaaataatatacattattcagtatatcctttggtcttcagaatgtatactgcaaaatatctgacttggtttagaattggttcaaataaactcaaacgtgaatatatgtcttcctattaaaatacttattttatcctaaaaggcattttctattaataaataaattyctcagtaggaatttataaatgttataatgttaaaatcttataaattttataatattttatatcttagtgtgtcttatcaaggataaattattctttctattgttgtcatgtggaaaaataagagaaaaggtgaaatttcttctttctagagtaaattcacagatgatagtcattcaagtttttctagaaacctgattcatataaatggtggaagtgggcagactgtttatccaaaaccaatgtatagtgatttt

SEQ ID NO: 237591 - DNA, 552 bp, Homo sapiens
atggtattcattttgcagagaacaaaccgagatactgacaagtctttctcctcctatgatctaacagcttgtcgaatgttaaacaagattggaatttccagccaagtgcaaaatgagcacaaagagggagcccatcctctttgatcatttacaacacttggctgactagagattctcatcacagaaaagctagggcagggtgggacaccagtccaggccaggccatactgatacaggagggtcagagctgcctctcaaagcaaagcatgactctcttccctgtgccctcctcccctctgtacctgccaggtcccgagtgctctgagcatcttgacagaaattttatttaatggatgagtgtgttctatagggtccaaaaawcccagttccaatcccagatgtcttactgattaaggacagaaccttagcaagttagcaactccaagccttttacattttaaggaattgccaatatctattttgtagagatgttttgagaaataggtaagatataatagtatacattacaaagtgctcataactgtatctggc

SEQ ID NO: 237592 - DNA, 397 bp, Homo sapiens
tttgttttaatggattgaattgagatgctccctaccccctatcaggagctcttcatgattatagtgcagaattaggatattgctctcctatagctaaaaagggagtgctttaaaaaaaattctatgtgataagccatacgtatgggcattattcctcacctcagtgataaatgagatctgtataaatcagctatgttttkatcattacagtgacgtcatagttcaatggctcatgtccactaaattgtccttctttcccagtatcttacttgtatgacttgatcggtagctgatccctctcactaaccaacctcaactaatacaagtcaaactgatgaaaattcaatcatcaacagagaccctcataatcctaactctttaactgcctgacaaacac

SEQ ID NO: 237593 - DNA, 593 bp, Homo sapiens
ccagctggatcatctgccagaatccagcacagggccagctaccttgaattgtagatgcagtagtgcctgctggagtgtccagcactgattacttccatagatctgctaaatggcataagccacccatgccagggataacaaaagggtttgcaaaattttkgggggctggtaagagtgccaggaaagagtagaaagagattggctggacaaatatacccaatggctttagggaaaccaaatgaaaatatagaaattgaaagtgagatagacacttgagatgtcatgctggttgaattaaagacaagtggtcagttcactggctctaagctcactacatgagtcttcaggagtgacagggagccagaggtggacaaagatacaatttctgttaactagcaagctatgcctagcagaagagagtgaaaccattctctgtacactgtcattagctggatttacaaattctgaaagctaatacctcatggtgttcagtcttaccatcagtaaaatgggaaatagtgcattgacgtcatcaacttggagataaaaatggacaacttggaccacagatactctgtgaaataattgttact

SEQ ID NO: 237594 - DNA, 590 bp, Homo sapiens
gattaagaagaaaccaacgtgaaatgatatcaatagctgttggtagaactgcctcccgaaaacacccaggctgtgtttctacacaaaatccatggacattcacccgctttgtccttccctattgctcccaatttccctctctcagcctctacctctttccccacctcctccaccctggagacctggttccaattgcaaggccattcctgcaacaatctctggcaactggagtgaaaggtgccgacaaagaggccctctccacagctcccttttcacaagaagcatgtatccaattaaaggattttaattaaaatgctttctgtagcatcctgtttttactcattgttataaattaaacttgacatgctctgatttaacaggtgggtgagattattctgaaagctgccagatgagaggaaatagaagctgagctgaaagaagctgtgtgcctgggagtgtgagagagacagagggagagagagagagagwgtgtgtgtgtgtgtgtgtgtgtgtgtcttcatgcaccacacaagtgcacaattatatgtgcatgtgtttgtctttaaattggttttaaattattgttttaa

SEQ ID NO: 237595 - DNA, 569 bp, Homo sapiens
attaaaccacagcccttgatttttgataaacacgtatcaacacttccttggaaaacagtttggaaaacacttccctgaaatgtaagaaactctatgtgcttctcctctcagaatttcaaagaaatccttccaagagaagcatataatcatctgaagggtggataataccctctgcaaattatccacattgttcataacgatatttttttattaaaaatcagacaacatgatctgacccattgatctgacatggcctaaaaatgagacaagatctttgaaatcaggasagacctaaacaaatctaagacatctatatgtggtcctgcctacattcctttcatggtagacctcaggccagattttttcaacccctcagagggagctcttaccactaatatgtccaggcttatctctgaaatcctcctgggacagtaaagtgatactgttattccaccagccttgcctgctctaccatgcagcagtcagccactaaaagcctgagtgctcaggcacaaaggcaggccaccttccatggggtcatttggtagagaccaccttccatagggtca

SEQ ID NO: 237596 - DNA, 601 bp, Homo sapiens
aagttacttgacctttctgtgtccaattttctttgtaaaataagatttctgtaaaaattaaatattagaaagagatagtaaaatgataaaggctcagactctgtaatgaacctgcctaactttgagtcttagctctgttaaatattacctgtgtgactgtgggaaagttacctaacctytctgtgctttagtttcttcatttgtaaaattgataacctacatcaattgtcagtacaatttaatgaagagtttgctgtttcctcatagattaaaaaaccttttattatatattaaattcttaaggtaggtagatttggggactttttagtgcagtcattgatttgtcattccttctctatcactgaatttgcatattttgttgttttagttctatatgacataattttaaatacataaaaattcaattctcccttcatcattcactctttctctctctctgtgtgtgtatgtgtgtacttatatataaacacaggggtttttttagcttatttagtctttatcatgaacttaaaatcattttgtaaacacaaaataaaattccattgaattttgttaggaattgtattaaccaacaaattaa

SEQ ID NO: 237597 - DNA, 601 bp, Homo sapiens
aagttacttgacctttctgtgtccaattttctttgtaaaataagatttctgtaaaaattaaatattagaaagagatagtaaaatgataaaggctcagactctgtaatgaacctgcctaactttgagtcttagctctgttaaatattacctgtgtgactgtgggaaagttacctaacctttctstgctttagtttcttcatttgtaaaattgataacctacatcaattgtcagtacaatttaatgaagagtttgctgtttcctcatagattaaaaaaccttttattatatattaaattcttaaggtaggtagatttggggactttttagtgcagtcattgatttgtcattccttctctatcactgaatttgcatattttgttgttttagttctatatgacataattttaaatacataaaaattcaattctcccttcatcattcactctttctctctctctgtgtgtgtatgtgtgtacttatatataaacacaggggtttttttagcttatttagtctttatcatgaacttaaaatcattttgtaaacacaaaataaaattccattgaattttgttaggaattgtattaaccaacaaattaa

SEQ ID NO: 237598 - DNA, 601 bp, Homo sapiens
aagttacttgacctttctgtgtccaattttctttgtaaaataagatttctgtaaaaattaaatattagaaagagatagtaaaatgataaaggctcagactctgtaatgaacctgcctaactttgagtcttagctctgttaaatattacctgtgtgactgtgggaaagttacctaacctttctgtgctttagtttcttcatttgtaaaattgataacctacatcaattgtcagtacaatttaatgaagagtttgctgtttcctcatagattaaaaaaccttttattatatattaaattcttaaggtaggtagatttggggactttttagtgcagtcattgatttgtcattccttctctatcactgaatttgcatattttgttgttttagttctatatgacataattttaaatacataaaaattcaattctcccttcatcattcactctttctctctctctgtgtgtgtatgtgtgtacttatatataaacacaggggtttttttagcttatttagtctttatcatgaacttaaaatcattttgtaaacacaaaataaaattccattgaattttgwtaggaattgtattaaccaacaaattaa

SEQ ID NO: 237599 - DNA, 573 bp, Homo sapiens
tcagaaagactttcctgaacattcctgcttgactaagaacccacttctgtctttcataaaccataatcttttgtaaacttttccataaccttggttaattttatggaawttatttttctaactcactggcctgtatttattatctttgtatgttcagtgcctagaaaagtacttgccacacataggtactcaacaaacatgtattgaactaactacaaaggtaacttttatatttaaagtctactaaactaagtattatttgaagatatataaattaaaataagcattttagagtctataaactataaaaaccttgaaaccatttttctcttctttgaggggattatatgattaaattttagaaatgccataagcagataccattttttttctatagcaggggagatagtaaatactttcagatgtctgaatttccagatggtctggccagacagtctgtatcatagctattcaactctgctgttatagcataaatcagccatagacaacacataaatgaatgagcatggctggattccaataaaactttattttggacattgaatttgaatt

SEQ ID NO: 237600 - DNA, 651 bp, Homo sapiens
ttttttttagattggcaaatatgcataagggaaatatttacatatatttccatgaatgttaactatgatcaagcttgtcaacaaatctgaagctgaaaaatcagttaatagaataatagaggaagcagcttttgttatagcaaaagccagcaatgtccccattcattcggaaactcaccattttatttaagaatacaagtacgctcagcayacatatgtggaaaaatcatggagcaagttattatagggttaaaactgagtatgtgggcagctaaagtatatgccacttttgagaataaaaatagtgtgtaccttattaaaagccgcctgacagggtcagcagcctagtcacagaatacctaccaagaacaatttcaattttaataggttttactatgtatttcataagcatgcccattgaaattgagtcatcaaagcctcccagttcctccaagacagattttagcctgagagcttggagtaattatcccactggatgttagcctgtgtagctatttcagcctcgttcatcatttcaaacagctacatactctgcctgctaatttcttccgatggattagctgctctcacttgtctatctttttttatttctggggggtgaaatattgccttcttcccatgttttaataa

SEQ ID NO: 237601 - DNA, 584 bp, Homo sapiens
ctttccttaaaacaattatgcctaggcatgtagatagtggaatctactcaattctaattcatttagaagtgtgaggattattttggattacagtgggatatattccacatgaatagcctaattatggtcatggaataacacaataaccaccagtgggaaaaacaaagttttttttagattggcaaatatgcataagggaaatatttacatatatttccatgaatgttaactatgatcaagcttgtcaacaaatctgaagctgaaaaatcagttaatagaataatagaggaagcagcttttgttatagcaaaagccagcaatgtccccattcattcggaaactcaccattttatttaagaatacaagtacgctcagcatacataygtggaaaaatcatggagcaagttattatagggttaaaactgagtatgtgggcagctaaagtatatgccacttttgagaataaaaatagtgtgtaccttattaaaagccgcctgacagggtcagcagcctagtcacagaatacctaccaagaacaatttcaattttaataggttttactatgtatttcataagcatgccca

SEQ ID NO: 237602 - DNA, 570 bp, Homo sapiens
gaatttcctctctcagaggaagcactgaactctacagaaaaaaattaccaaataaaagtattttcttcaatcatgtgccaaatagctgtcatctttctgttctaacactcttagcatttgccctaaaattcaaacatatctatatgtttagtgagtattatcttcctagctgaaaggtttctgcctcctttttcttgtctttctgcacccacattctgacctacccaggtttgtacggctgttagtttacttgtttattataaagcattatatgaatggtctatgattattcacagtgttttacagaatacagatttttcattaaaatatatatgcctattataagaaatccagttacaaagatgaaagtaataattgcttaaaaatgtcaacactcagatataatttcatttatactaagtgatcatcattccagatgaccacatgcaactatacattttaaagcaaaagtgaattgatatattgayggataatatttataaggtggaatcacattagcaatggcggttaaaaataaaaggtctttaaattttttgacagcagcaagag

SEQ ID NO: 237603 - DNA, 536 bp, Homo sapiens
ggcactgtaaagaataaaaacatgatattaggtttagaatttccacatttttttgtcttcaagatctttgccaacattaattaattagtatgcatggtgccttgggaggttactattatcatctcaattttaaatattttcgagaataaagattaagtggtttccctcaggctacaaagggattagattttattttttacaaggaaaatgaaaatgagtatttaaccacaatgttaaataagatagtggatgtaaaagtccctatatacaacatctgacacatagtaggtttgcaataaatatgtgttaaatattttaatcataataccagttaaatatatctacttctctttttatgaattatatatacatgcacacagtcatgatttgtatatatagttaatgattagaaaaactagaacaattttaatgcatgatcttgtttattcttttctctttaaaagaaagctgctttccttgagatacgaagacagtcrttatatttttaagcatcatcatggaatgaaattatcgat

SEQ ID NO: 237604 - DNA, 380 bp, Homo sapiens
aagctgcaagacattgaaaaataacagcactgagatctactggggtggcgggaagggatgtagaaaggtgagaattgtgactttccaayagagagctcaatcatgttgtttccttaggtagctgtctcattggcttactctgtttacttagagatctatttgtaaaggtattgttctagatgtcaaccaaaagatccttcaggagcattgaacctgataatcagtgtctgcagccctcaaaacacaaaacttgaaacaaatagaaaagtggagtttcataattcaagctaaccaaaaacattttcaagcttcaacttttcaagttttattatattgttgttcatccttcactcctaccagcataacattataatattctt

SEQ ID NO: 237605 - DNA, 380 bp, Homo sapiens
aagctgcaagacattgaaaaataacagcactgagatctactggggtggcgggaagggatgtagaaaggtgagaattgtgactttccaacagagagctcaatcatgttgtttccttaggtagctgtctcattggcttactctgtttacttagagatctatttgtaaaggtattgttctagatgtcaaccaaaagatccttcaggagcattgaacctgataatcagtgtcygcagccctcaaaacacaaaacttgaaacaaatagaaaagtggagtttcataattcaagctaaccaaaaacattttcaagcttcaacttttcaagttttattatattgttgttcatccttcactcctaccagcataacattataatattctt

SEQ ID NO: 237606 - DNA, 592 bp, Homo sapiens
caaaataaatgcaatggaaaataaattttctccggtagatcaataggaactgagggagacttttaagaaaataatcaaatgtttagtctaatgtccaaaaacagtaagcaacgttgtgactcaacattgggccaaatatctcgcttgagtcttgtgcacttgatagtgagcctctgacttttatattaatttccatcaatgacaatgcagayaacatgttttaaatcttcatgcagccccaaaagaaagtgaatactagctctttgagtcacctagtctttctctgtggaatcatttctaattgaatgttaagagcaaagtttaagtttataagaaagaaaaacaagtgcagataaatagttattatctgacatccttatgaaaattcatgacctgcagttttatcagaggccttataagaattctaattgtgaagtatgcagagctattaaatgtctagtacgcttcagtctcttgataagaagtgagttaaataattgtcctgtttaacttgtgcttgttaacctttaaggtcaactagtttgaacatacgtttaatgaaatcctggagccagaatttatgatactgctg

SEQ ID NO: 237607 - DNA, 562 bp, Homo sapiens
taaaacaaaaaccacttaattatattgcatggattttaggggtcaggaattcatgcagctctcagccaggcaattcttctagtccgcattgcattgatgaaggtcattcagtgggacttagatggtggatggggctcatctggagtcagcaatagcttcatgcacatacctagtgccttggtacgggtagctggatggctgggcaccactgcaattgccaaccagagcaccccatgtggtgtctctagcatgacaatcttgaggtgttcagacaaggcagctggattctcccagagccagtttcttaagagaaccactgaatgtatttatcrcttatactgtggccagttttacagaattactggctatgctgtaatatgtgcctgattttgccacaaggatggatggctttgtaatttggtcttctgatctaatttttgctgtaaatttcaatggttttgtaccaaaataacaagggcattattttgaagttggtctggaaaatttcaatttgtttaccagagagaccactgggttttggggaagggaggaagatgggagg

SEQ ID NO: 237608 - DNA, 606 bp, Homo sapiens
attcaagccacatattaattttgaattttctagtacctgcatttaaaaaagtacaaagaaactggtaaaattaattttaataatagatcttattcaatccaatagctcaatcatttcaaaatgtaatcaatgtaaacattattaatgagatattttacatccttttaaaaatactaagccttaaatctggtgtttatttgactcttgcagcacatctcaatttgaactagggatattgtaagtgctcagtagctacacgcagttagtggctactatattgaacagtgcagatctagaggacttactagcaatcataaattcatcattaaattcaaaagtgtctgtgtgttttatgtaagtgttctggatttcctatattttccaactcaggttagagaactgactcctcaatgatcccatgctacaccatttaaaaagtaagtcatagttaagaatgggmcgcttcttatttcttttacttctctcctgtgtcatttcttttctctacaaccatatccttcaaattctgttttgcagagagcctatcactctgtgttgggcacaggcaaccctagatcagggaaaatggatgagatgctgagatcc

SEQ ID NO: 237609 - DNA, 606 bp, Homo sapiens
attcaagccacatattaattttgaattttctagtacctgcatttaaaaaagtacaaagaaactggtaaaattaattttaataatagatcttattcaatccaatagctcaatcatttcaaaatgtaatcaatgtaaacattattaatgagatattttacatccttttaaaaatactaagccttaaatctggtgtttatttgactcttgcagcacatctcaatttgaactagggatattgtaagtgctcagtagctacacgcagttagtggctactatattgaacagtgcagatctagaggacttactagcaatcataaattcatcattaaattcaaaagtgtctgtgtgttttatgtaagtgttctggatttcctatattttccaactcaggttagagaactgactcctcaatgatcccatgctacaccatttaaaaagtaagtcatagttaagaatgggaygcttcttatttcttttacttctctcctgtgtcatttcttttctctacaaccatatccttcaaattctgttttgcagagagcctatcactctgtgttgggcacaggcaaccctagatcagggaaaatggatgagatgctgagatcc

SEQ ID NO: 237610 - DNA, 539 bp, Homo sapiens
taaaaatatatcaatgtaattcactatattaatagacgaatgtgcaaactctgtgattatctcaacaggtacagaaaagatgtgtgaaaaaatttaaactgcaacagccrtgtgtgacataaacatcagcacactagttataaaaagaaacttcttcaacctgataaaaggttgtctataaaacccatagctaataacataatggtgaaagattcaatgctttcctcctatcaggaaggaataaaggatgtccagttccatgacttttatttaccattatactggaggtcctggccagtgtaataaagcaagagaaagatttttaaaatcatgtaaattggaaagggaagaagtaaaagagttttgattcatagatgacatgatcatgtgaatcaatatcatatgaaatctgcaaaacagatcctagaactaataagtagatgtggcaagtttgcagaatgtaagatcactaagcaaaaatcaattgcagagtagcttcaaaacataaaatatatagggataaatttaataagttgtgt

SEQ ID NO: 237611 - DNA, 539 bp, Homo sapiens
taaaaatatatcaatgtaattcactatattaatagacgaatgtgcaaactctgtgattatctcaacaggtacagaaaagatgtgtgaaaaaatttaaactgcaacagccatgtgtgacataaacatcagcacactagttataaaaagaaacttcttcaacctgataaaaggttgtctataaaacccatagctaataacataatggtgaaagattcaatrctttcctcctatcaggaaggaataaaggatgtccagttccatgacttttatttaccattatactggaggtcctggccagtgtaataaagcaagagaaagatttttaaaatcatgtaaattggaaagggaagaagtaaaagagttttgattcatagatgacatgatcatgtgaatcaatatcatatgaaatctgcaaaacagatcctagaactaataagtagatgtggcaagtttgcagaatgtaagatcactaagcaaaaatcaattgcagagtagcttcaaaacataaaatatatagggataaatttaataagttgtgt

SEQ ID NO: 237612 - DNA, 606 bp, Homo sapiens
ggttgcagtgagctgagattgcgccactgcaatccagcctgagtgacagagtgagactctgtcacaaaaaaaagaaaaaagaaaaaaggaaaaaggaaaagaaaaagargaagatttggacacacagacacagacactgacactcccagaaggaagatggccctgtgaatatggaggcagaaataggagtgatgcagccagctacaagccaaaaaatgccaataattgacagcagccaccagatgctagaaaacagcagaaaggatttttttcttggagcctttagagaggcatggtcttgctgacaccttgatttgggacttgtaggttctacaactatgagataattaatacatttctgttgtttgaagccactcagtttgtcatactttgttatggtaaacctggaaactaatatacatggcaaataaacaaaagcaataggaatgatattgactatttgagtaacacaactaacaggaactatttagtacatttagaaagtgcattaatctagtagagaatacattctgtgacatacatgtcacatttgtaaaaattaaccatacctataccatgagtcaagtcccaatgcaatttcaaaga

SEQ ID NO: 237613 - DNA, 606 bp, Homo sapiens
ggttgcagtgagctgagattgcgccactgcaatccagcctgagtgacagagtgagactctgtcacaaaaaaaagaaaaaagaaaaaaggaaaaaggaaaagaaaaagaagaagatttggacacacagacacagacactgacactcccagaaggaagatggccctgtgaatatggaggcagaaataggagtgatgcagccagctacaagccaaaaaatgccaataattgacagcagccaccagatgctagaaaacagcagaaaggatttttttcttggagcctttagagaggcatggtcttgctgacaccttgatttgggacttgtaggttctacaactatgagataattaatacatttctgttgtttgaagccactcagtttgtsatactttgttatggtaaacctggaaactaatatacatggcaaataaacaaaagcaataggaatgatattgactatttgagtaacacaactaacaggaactatttagtacatttagaaagtgcattaatctagtagagaatacattctgtgacatacatgtcacatttgtaaaaattaaccatacctataccatgagtcaagtcccaatgcaatttcaaaga

SEQ ID NO: 237614 - DNA, 606 bp, Homo sapiens
ggttgcagtgagctgagattgcgccactgcaatccagcctgagtgacagagtgagactctgtcacaaaaaaaagaaaaaagaaaaaaggaaaaaggaaaagaaaaagaagaagatttggacacacagacacagacactgacactcccagaaggaagatggccctgtgaatatggaggcagaaataggagtgatgcagccagctacaagccaaaaaatgccaataattgacagcagccaccagatgctagaaaacagcagaaaggatttttttcttggagcctttagagaggcatggtcttgctgacaccttgatttgggacttgtaggttctacaactatgagataattaatacatttctgttgtttgaagccactcagtttgtcatactttgttatggtaaacctggaaactaatatacatggcaaataaacaaaagcaataggaatgatattgactatttgagtaacacaaytaacaggaactatttagtacatttagaaagtgcattaatctagtagagaatacattctgtgacatacatgtcacatttgtaaaaattaaccatacctataccatgagtcaagtcccaatgcaatttcaaaga

SEQ ID NO: 237615 - DNA, 422 bp, Homo sapiens
gaattctgtcaccataatttagttttgcctgttttagaacattacatataaatgcartcatgcagtgggcatgcttcttttgtctatcacattgtttttgaggtttatgcaagttcttgcatatatttattgcttctttttattgctgtgcagtgttctgttgtgtgaatatatcacaattgtttatccattcacctgttgatggacatttgggctgttttcagtggtttactgttttaaataaagctacaaacattgttttacaactcttttttggaacatatgttttcattactgttgagtaaatacctaagagtggaattactaggtcattataatacaagtacatttaacttgaggagaaaccgccaatattcttacttttgatgtagttgttactgagccagtatctactcctttcg

SEQ ID NO: 237616 - DNA, 556 bp, Homo sapiens
gactggggctaggtcagcctattctctttgaaaagagtgagagggagtgctggcttccttaagccagctttaagctctttttctttaaagcccattaagttaggacctccaccttctgaagcyttccaaaaacaagacaaaaaaaacaatgaaaaagcatattatcagcagctctgcctctgtagttcctgccccttggctcttcctggtccacctagggccacggagactgaaagattctccagcctcctgggagcaggtaacccagttcttggctctgtatatgaatattggaatacatttctcaatgagaataacagaactatgctttaaaagttaaaaaagaaaagaaagggagcaagcatgtgggtgaggtttaagggacacccatgacacccacgctagtaagtgcctgaactggatcaagtcttgtggatgcaaatctggcgaggtttttcactttgtcagtgctgccttactattgatagactgattgattggctataccacaatgaaaatagctctactggttttttttcctaattataagacccat

SEQ ID NO: 237617 - DNA, 441 bp, Homo sapiens
tttgcaacttgcttttttaatacaaaagtatggatgtaaatcttccatgtaaacaagtccagattgagagtattctattgtatgagtatattataattttacaaaatcaatttccgttgatgaatatctatttttttgctttcatacgcattgttgagatggatgccctttcatatatcccttggggcatatttactattatttcttatcataaagacatggaaatggaatttctgggtcaaagggtatgcgcactctagaagttttgatacatgttatcaaaataccatatggaaacgtgtattaatttctactcactgcaacgtaatgttcaagtgggaggtagaatagaagaatgatttcagggactgggctttggagtgagattatctgggcgtaaatctcaggtycagctgtgtgactttggacaagttaaattac

SEQ ID NO: 237618 - DNA, 553 bp, Homo sapiens
tagctttattccaaagtgaccccaagtaaatcagatctgctgttcaaaagtaaagaaagaaaatacacttacccagaacaactccaaaagagtggagttgaaaaggaagaacaaacaaacaaacaaacaaacaaaaaccaaacccatagctgctgaagtttcagcctcagtgttatatgcattaatgtacaggagaggtatgtgtcccttgatgtccctggctctttaacaggcacgcatttcaaccatgggattcaccataagagtaaattttgacacattttgacccaggaagtaagatacraaatttgacacgtctttggcatttagaaaaaacgtacaaactagaattccagcttttagttttctgggttgtttaggaagtcaattaaaggaaaatgacattcttcatgtgttttataaatgctatggaaattccctacctaaaagtgaatttaactgagcaatagccttttactaaggaaggtcaaattttcttctctttgaagcctttcaggctcctaaccagtttgcatattgagcttcccagaac

SEQ ID NO: 237619 - DNA, 584 bp, Homo sapiens
tcttcatgtgttttataaatgctatggaaattccctacctaaaagtgaatttaactgagcaatagccttttactaaggaaggtcaaattttcttctctttgaagcctttcaggctcctaaccagtttgcatattgagcttcccagaactattttcaactacctggggcagttgagcatgaagaacaccattctcsatgtctttagctacaaattggtacgcaaatgggctccggaggcctggtgaggaggggcacaccccttaaacccgtctgtttattactgaggaagttctgatcaagtttatggtgttaaagactccaacatatcaactccattgaaaagcaggacaagccattgtaaatatgaaccatcaaagcattagccatttcaatgaaatgaagcaaatcaattgtttttcagaaaggtgcctttcagatctcctttctcaggttctgagtttctgtattaagttcacattaaaacaacttgtgctaagaggattttaactcaggattttggaaggtcagtgagttggccagtaaaccatgatttccctaatctgtggcaaaacaacaaacatgct

SEQ ID NO: 237620 - DNA, 363 bp, Homo sapiens
aaacaaacatgtgctcaataaatgcttacagaggaaggactaaaaattgctgtctgaatcaatgacyagtattcttactactcagagaggtggtacaacaccccatgggcaggcctggctttgcacagtgtgcagggctgtgacaggggctgtgcaagctaaaatccagcaagaccatctaataatcaatgggaaaattacatttgttctgtgatatccaaaaacgtttgttgaaacattaaaaactcacttattgttggttacgaatgaataacaattttttaaagtacaactaatatttaatatacaatttaaaacatcagagattcaacttcttcctggtttagactgggagggtgtatg

SEQ ID NO: 237621 - DNA, 369 bp, Homo sapiens
  misc_feature (1)...(369): n = A,T,C or G
aaacaaacatgtgctcaataaatgcttacagaggaaggactaaaaattgctgtctgaatcaatgactagtattcttactactcagagaggtggtacaacaccccatgggcaggcctggctttgcacagtgtgcagggctrtgacaggggctgtgcaagctaaaatccagcaagaccatctaataatcaatgggaaaattacatttgttctgtgatatccaaaaacgtttgttgaaacattaaaaactcacttattgttggttacgaatgaataacaattttttaaagtacaactaatatttaatatacaatttaaaacatcagagattcaacttcttcctggtttagactgggagggtgtatgtgnnnn

SEQ ID NO: 237622 - DNA, 648 bp, Homo sapiens
tagatgtgtacaggggctttcacgtgtacatacacacaaacatatactcagtgaacattccaaaagttcaatattgtttttatatgtgcagttttataaatgcagtgtattctcacagtaagagctgcttttcccatggcttctgcatccaaattggrtcaattcatccatttgattcttcccaaaggagacaaaatgaccaaacaatacaggtgcatataatcatgtgtattctctagcaatgtgtggaaaacaggagaaaactctgaagtatttattacgtcagcattttcccaatactgcaaatgcaattcacaaagtgggaaatatctaggagggattggatatgtttaaagaaaatccagagagagttatttcttattggtgattatcagttatctttctctgttgaaaactcagattattttttaatacccactaaatttacacattttgactctgaatttagttgctactttcaaaacaattacttttgtaggggagacaaaaatgttcaactttctgatcccctttgccaccccaccccactcagctgtcatcaccactgataaatgaagctagaaagtgcagatgttttaaaagtgtcccatcttttgacaaagtaaagtaaaatattacatgattatg

SEQ ID NO: 237623 - DNA, 648 bp, Homo sapiens
tagatgtgtacaggggctttcacgtgtacatacacacaaacatatactcagtgaacattccaaaagttcaatattgtttttatatgtgcagttttataaatgcagtgtattctcacagtaagagctgcttttcccatggcttctgcatccaaattggatcaattcatccatttgattcttcccaaaggagacaaaatgaccaaacaatacaggtgcatataatcatgtgtattctctagcaatgtgtggaaaacaggagaaaactctgaagtatttattacrtcagcattttcccaatactgcaaatgcaattcacaaagtgggaaatatctaggagggattggatatgtttaaagaaaatccagagagagttatttcttattggtgattatcagttatctttctctgttgaaaactcagattattttttaatacccactaaatttacacattttgactctgaatttagttgctactttcaaaacaattacttttgtaggggagacaaaaatgttcaactttctgatcccctttgccaccccaccccactcagctgtcatcaccactgataaatgaagctagaaagtgcagatgttttaaaagtgtcccatcttttgacaaagtaaagtaaaatattacatgattatg

SEQ ID NO: 237624 - DNA, 469 bp, Homo sapiens
ggtgaagtaaccctccactgagtagatatttgaaaaatactggcaatcagtagcatacttacacctggttaaagggattggcttttgccctgggtctcactcttgaatgtcttatttatacttgtaaaaccaggagcctgtgaggccacctggagcttggctccctcacattccagacaatgctctaygtattaaaaactctaaaatttcctgcgtaattggtcctgagcctacttggatctgcaagggcctcttgctcaggtctatcctccttgagatggtttttgtcaactttacacctactactagatcaaaagttggtcaggaagggaacagagcctagaaatgtggactcggggatacacatggatatatgtgaggcccctcttgatgcagctggagcaactgtgggaagaaaaggggttgtgcgttgagccatgagttcaggactaggaaggcaggagctggg

SEQ ID NO: 237625 - DNA, 384 bp, Homo sapiens
gaattcattgtccatatcactgtcagcattttagtcaataccattcaacaagtctctaggaagttccaaactttcccacatcttcctgtcttcttctgagccctccaaagtgtttcaaccactctstgttacccagttccaaactcacatccacatttttaggttatctttatagcagtatccaacttctggtaccaattatctgtattagtccatttcacactgctataatgttacctgaaactaggaaatttataaacaaaaaatgtttaattgactcacagttccacatggctagggaggcttcatcaaacttacaatcatggcggaaggagaaggggaagcaggcaccttcttcacaaggtggcaggagagagaacatgc

SEQ ID NO: 237626 - DNA, 416 bp, Homo sapiens
gatgccaattatagctatacattgagacaaccaaaaatgtctctggacattaccaagtgtcccatataagcaaaattgcccctttggagaagcagtcccctagatgtatcttatcttataagaacttttacaatagctgtgaatggcttcttgttatcctcccagatatcaccattaattagactttttgtctgtttccaaattgctccacaccttccccgaagtatcaggtactytgtgtatcattaaagatattattcttataattaaataccaagaacttatattgaattggtttaataaagactactagagttctctgcttgttacaatctctttttcctaaaggtttccaaaattctggtttatcttagcctgacaataagttagcatttaactgctcagctgttgggcat

SEQ ID NO: 237627 - DNA, 657 bp, Homo sapiens
tgcttgctcaagcttatcaaaatgcatattttaaaaatattcaacaattcactttgaaaaatgctctggaacctaaacccagcatcagtgagctgtagcaggtgcactcggtggtgacttgtaaaggtttgtagaagacgtggaagtaattcaaagaaaagagagactttccttttttagtggagggaatgaagaataaattttagaaagatataccatttatgttgaatttgaaaggaaaaacatttagtgttcatgcccaggcttgggctaagccccagaaaccagactggactaatggcaatccaagcaccataattaggctgagacaaaaataaaagaagaatatcctttttttctttttcctttttccaggtgacctgagacactgtgtatgcttgaattcccccattgatctcaatagcatgtatgtctttttgttttcagctactgagtggaatagcctgacaacactccaagttgtttctcacatttccactgggtattttcccaaaaactctgcatgtatttattcgtcaratatatttaacacgatagagtgtttttccatctaaacatactctagtgagtccttttgataaccaagagtaattcatatatgtatgctttagataaaaattttttagtgtagagttg

SEQ ID NO: 237628 - DNA, 368 bp, Homo sapiens
ttgatgaagataagcatttcatgtaggaacatttaaacaagttgaattgcagtccatgtaaaaattatacttgtttgcttcatgaatacttaataattacttaattataaaaaacaagccccaatgtcttttattatgttaaggtagagaaactagcagattttagacygtatgcttaagggttataatcattcttattgttctttcactcttttccactatagtctatcacctgtcaaattctatttggaatacagggattttttcattgttgttgagaagaaattaaaaacagatttgtttagcttactattctacttccagtgactaaaattggtatcactgtatttgacaatgatgatgtgatt

SEQ ID NO: 237629 - DNA, 590 bp, Homo sapiens
ccacataataaaatattaatttaccttttgggattttttgatatctgtggtatataatagttttctaaaagtctgcaaatttgttttaattccttttcatattctaaataaatattcacttccatatctacttttttttttttttttagacaaagtctcactctgtcccctaggctggagtgcagtggygcaattttggctcactgcaacctctacatccctggttcaagcgattctcatgcctcagcctcctgagtagctgagattacaggtgcatgccaccacgcctggttaatttttgtatttttactagagacagggttttgccatattggccaagttggtctcgaattcctgacctcaagtgatccacccacctgggcctcccaaactgctgggattacaggcatgagccactgctcccagccccatattatattttgtagttggaatttcatttttgtttctgaaggagggctccttaaaagcatgaacttcaggttcacaaattctagggctgcctctgctcctaacccagtcttagcatgggaagattttcaggcttgactcttttccatcctccctgtttc

SEQ ID NO: 237630 - DNA, 590 bp, Homo sapiens
ccacataataaaatattaatttaccttttgggattttttgatatctgtggtatataatagttttctaaaagtctgcaaatttgttttaattccttttcatattctaaataaatattcacttccatatctacttttttttttttttttagacaaagtctcactctgtcccctaggctggagtgcagtggcgcaattttggctcactgcaacctctacatccctggttsaagcgattctcatgcctcagcctcctgagtagctgagattacaggtgcatgccaccacgcctggttaatttttgtatttttactagagacagggttttgccatattggccaagttggtctcgaattcctgacctcaagtgatccacccacctgggcctcccaaactgctgggattacaggcatgagccactgctcccagccccatattatattttgtagttggaatttcatttttgtttctgaaggagggctccttaaaagcatgaacttcaggttcacaaattctagggctgcctctgctcctaacccagtcttagcatgggaagattttcaggcttgactcttttccatcctccctgtttc

SEQ ID NO: 237631 - DNA, 527 bp, Homo sapiens
gcaatgagaacaagactggctataaaacccaccactgccaaaaccatcttcccaaagcacacttctgaccttgcaamgtccctgtttaaaaccctcagattctccctgccacagaccaaacacactctaaaagtcttagctgctactcaaaggcctcctgtgatccaagctaatccctgggtataatttcatttctccagctcctccactttcaacccccttatgcatcatccaaatattattgaatgttccctataaacgagtgatgatttcccacctcgatgccttttatagactatttgtgtctcccccacacccctgacaacaaattcatatgttgaatccctaaccactattatggctatatttggagttggggcctctaaggaagtaattaaggctgaatgaggccatagggcgggggcctgatccaataggtttactatccttttaagaagagaaccagagagctttctctttcatttccatgtggagatacagcaagacggtggctgtctgcaagccag

SEQ ID NO: 237632 - DNA, 527 bp, Homo sapiens
gcaatgagaacaagactggctataaaacccaccactgccaaaaccatcttcccaaagcacacttctgaccttgcaaagtccctgtttaaaaccctcagattctccctgccacagaccaaacacactctaaaagtcttagctgctactcaaaggcctcctgtgatccaagctaatccctgggtataatttcatttctccagctcctccactttcaacccccttatgcatcatccaaatattattgaatgttccctataaacgagtgatgatttcccacctcgatgccttttatagactatttgtgtctcccccacacccctgacaacaaattcatatgttgaatccctaaccactattatggctatatttggagttggggcctctaaggaagtaattaaggctgaatgaggccatagggcgggggcctgatccaataggtttactatccttttaagaagagaaccagagagctttctctttcatttccatgtggagatacagcaaracggtggctgtctgcaagccag

SEQ ID NO: 237633 - DNA, 646 bp, Homo sapiens
caacttttaacaaaaggcattcatgccaggtatttcttaccaccttgcatgtttactttgtggttgttatcactgaaacctcagaacattagttgtttcttaaacaatgtactgtcttatttatttaagctgttgccatgttactgttgtccatggtgccctgtgcatggaggctgacagcctctgacaggccctgcccttctgctgacccccaggctcgtgaagggaggcagaagggcactgcttataaagcataaaagtgggacatgccttcgagcccagttttctaacctttgtcctcacaagattgcacaaatcacttggttccatgcctgaaacacatgcttcatgcacagggagagtctgtcatacttttgagggagtgttacccatctaggagcagagctgctgatcagcgcattttcctaggtacgcatcacaattcatgcacaaatagattctcaacacttggggctgagtattggaaggtagctggrgaatgggacttcattttggcaacaataaattccattttttctagagttttctaaagaaattcatagaatcatcagaggcttgaatggtaagaggttaaaagatgaagtgacattgcacttaggctgtgtcagtgaatgactggctgagg

SEQ ID NO: 237634 - DNA, 500 bp, Homo sapiens
cctttcagttcacacaattatgctaaaaagaatgtaaacttaaagagttaaatctaatatttgctttargaaattttaagtaatttaggaattacatgttatagtcaatcaattttccctgttgctggtactgccaggaagtaccaacacttctttttcctactacttctgtttttgctcaataccagccataggctaatttctagtgagataaacacttagccaaatttagaaataatgtcagatgggtccatgatgatgatcatggtgatgacccactttgcctgtcacaggttgcatggatgcttctgccatgagaaaaaaaaaatacatctagtcctcactttaaaaaagtctgtggccaggagctgtggctcacgtctgtaatcccagcactctgggaggttgaggcgggtggatcacttgaggttaggagtttgagaccagcctggccaacatggcaaaaccccatctctactaaaaattcaaaaattagccag

SEQ ID NO: 237635 - DNA, 500 bp, Homo sapiens
cctttcagttcacacaattatgctaaaaagaatgtaaacttaaagagttaaatctaatatttgctttaggaaattttaagtaatttargaattacatgttatagtcaatcaattttccctgttgctggtactgccaggaagtaccaacacttctttttcctactacttctgtttttgctcaataccagccataggctaatttctagtgagataaacacttagccaaatttagaaataatgtcagatgggtccatgatgatgatcatggtgatgacccactttgcctgtcacaggttgcatggatgcttctgccatgagaaaaaaaaaatacatctagtcctcactttaaaaaagtctgtggccaggagctgtggctcacgtctgtaatcccagcactctgggaggttgaggcgggtggatcacttgaggttaggagtttgagaccagcctggccaacatggcaaaaccccatctctactaaaaattcaaaaattagccag

SEQ ID NO: 237636 - DNA, 500 bp, Homo sapiens
cctttcagttcacacaattatgctaaaaagaatgtaaacttaaagagttaaatctaatatttgctttaggaaattttaagtaatttaggaattacatgttatagtcaatcaattttccctgttgctggtactgccaggaagtaccaacacttctttttcctactacttctgtttttgctcaataccagccataggctaatttctagtgagataaacacttagccaaatttagaaataatgtcagatgggtccatgatgatgatcatggtgatgacccactttgcctgtcacargttgcatggatgcttctgccatgagaaaaaaaaaatacatctagtcctcactttaaaaaagtctgtggccaggagctgtggctcacgtctgtaatcccagcactctgggaggttgaggcgggtggatcacttgaggttaggagtttgagaccagcctggccaacatggcaaaaccccatctctactaaaaattcaaaaattagccag

SEQ ID NO: 237637 - DNA, 609 bp, Homo sapiens
ttccttcatcacactcccattctcctggagttctgctgcgcagagttgctggtcctgggttgatgaatataacccttccattgagatgcccctgtcctcctggggctcacctggatgagcctcctggagttcagagtatatctcatcaggcaggaggtagcctctgtcttctgactggacagaggccaagctggtctcttcacccttaatggtatagactgacacaaaatcatactcatgggtattcagctgagtggcatataaatcattttctggccttaagtactcatggacatcatcataatggggactttcattttcttctggctggtctggaacctcatacgtcctctcattttggattgtgtcatagatggtgctgtagtcttcgtcattcatgcttattgatccgagagatcygtttacagggagacctgagtagatctgaaatgaatgaagggacagaggatgctgcaccaccttgcagaggaatcaacgagctcttaaaaggcagcaactagcaactgctatcaatgacaggtctctaacaattatttactggagagttttataagcaaaccacaagtccattggacagaagataaagct

SEQ ID NO: 237638 - DNA, 608 bp, Homo sapiens
gaattctgtctctttgcattgatatgctcagtttcccagagaacctgcccctccttgctctccttcctgagtcagtggcactgggaattggggactaggcccctgtgacctcacagcactggggagatggggkttctggaatctatgggtggaaggctttggaaagcgaatacaggttctgcatttcttctgtttgcttccttccagagtaaccatggggatgctgggtgggggttacaggtgggctgcttgcctccctccacaatctggaaggatacccaagcaaagcaccacacggagctcttaacatgctctagttccctgaccctcccccccaccacctctcctttcttcttcatccccaactcccctgtgctaggaagggtgggcttttcttttagttttcccaggtcaaatggcccaccaatcattgagcagaaagcctcgcggccttgctgcatagccagtacaactgtttctactctgtgagtcgaggcctccaggcagggtttttgatgggtaaaaattgagaaataaaagagtttagaacatcttagacaataggttgggtaaaagtctactgtcttgttgaaaatgctattttgaag

SEQ ID NO: 237639 - DNA, 608 bp, Homo sapiens
gaattctgtctctttgcattgatatgctcagtttcccagagaacctgcccctccttgctctccttcctgagtcagtggcactgggaattggggactaggcccctgtgacctcacagcactggggagatggggtttctggaatctatgggtggaaggctttggaaagcgaatacaggttctgcatttcttctgtttgcttccttccagagtaaccatggggatgctgggtgggggttacaggtgggctgcttgcctccctccacaatctggaaggatacccaagcaaagcaccacacggagctcttaacatgctctagttccctgaccctcccccccaccacctctcctttcttcttcatccccaactcccctgtgctaggaagggtgggcttttcttttagttttcccaggtcaaatggcccaccaatcattgagcagaaagcctcgcggccttgctgcatagccagtacaactgtttctactctgtgagtcgaggcctccaggcagggtttttgatgggtaaaawttgagaaataaaagagtttagaacatcttagacaataggttgggtaaaagtctactgtcttgttgaaaatgctattttgaag

SEQ ID NO: 237640 - DNA, 402 bp, Homo sapiens
gatctgcccacatatcaaaagaataaattatttcctttcagggctttgtcttttgcaagaaagtggtgtttaaactatatagttgatttataataaatatttgtaayaaatatttattttaaataaacagattgggtgattatttttatttcacccttgaataacaaggattatagtaactttttcattctttatttttgactttgtggccttttggattttgcatgctttttcctatgactccacttcaggtgtttatagtgaaacataaacctctttttatcaaattccagtgcaagctttaatgacaagcatattgtaattattcttgctacattcaaattgtaatgaatcaaaatggtatgtggctttttttgaaagatgatcttttagttgctattt

SEQ ID NO: 237641 - DNA, 402 bp, Homo sapiens
gatctgcccacatatcaaaagaataaattatttcctttcagggctttgtcttttgcaagaaagtggtgtttaaactatatagttgatttataataaatatttgtaataaatatttattttaaataaacagattgggtgattatttttatttcacccttgaataacaaggattatagtaactttttcattctttatttttgactttgtggccttttggattttgcatgctttttcctatgactccacttcaggtgtttatagtgaaacataaacctctttttatcaaattccagtgcaagctttaatgacaagcwtattgtaattattcttgctacattcaaattgtaatgaatcaaaatggtatgtggctttttttgaaagatgatcttttagttgctattt

SEQ ID NO: 237642 - DNA, 551 bp, Homo sapiens
tgatgtctagaatggcatttcctaggttttcttctaggaattttatagttttaggtctaacagttaagtctttaatccatcttgagttaatttttgtatgtggtgaaaggtaggggttgagtttcaatcttctgcatatggccagcctgttatcccagcactgtttattgaacagggagtcctttctccattgcttgttattgtcaaccttgctgaagatctggccttaggcatggggctttatttctgggttctttatcctgtttcactggtctatgtgtctgtttttatgccagtaccatgctgtttcaggtagcaaataaaggcaggaacataaaaccaaatactgcatgttcttacttataagtgggaactaaacattgaatacacatggccataaagatgggaayaatagacactagggactactagagggggtagagtgggagtggggtgagcattggaaaactacctattgtgtactatgctcactacctgggtgacggtgatcatttatataccaaacctcagcgacatggaatttacccatg

SEQ ID NO: 237643 - DNA, 607 bp, Homo sapiens
agcactacaaaaacacagcatcattcaatcacatttctaaccctgacaaactttcacataacagaggtactgaccactttcacctttcctttttaaataaaactgtaaactaaggagaaggtaaaaacaagggccactagagtgggaacagatttgctaacaactgtgattggttagtgtacacttactatgtgcccagtactatgtgttgggcccaaatacaygaattctttctatagcaagccctgcggaaatcattcagcctctgttaaaatacatccgttcatgggaagctcaccacctttctcaagataccccattgctctgttggggaagttttattttaagaaagttctttgatgtgttaagctaaagttggcttctccacttaaaatcttaaaatcagccctcagcttttttcttgagattgacataaataagttgaattatttctccatgtggttcactaaaggcagggctcatggtcagcagatatccccaccaagaccacatcttcagtgaaggctgaccagatgggaattcaacaggctgagggtaaggataacagttaactgtcttacatgttgttgctcaggtagtgaatgac

SEQ ID NO: 237644 - DNA, 484 bp, Homo sapiens
tccattgtgggagacagaacaaacacataagcaaacaaatagatgtacaatattaaattatgatcaaagctaacaaaggaatctgggtagagaatcacagtgaagggggtgaggaagcctcctgcacagagttccactrggaaggcctctctgaagtgatgacatttaagcccagacctgaaagatgaaaaggagctgttcatttgaagactgaagggaagagagatgggaacagcatgtatgatggcccttaggtgggacaaagcattttatgctggaggagctgaagtacaagcttgaattcccccattatatccctatggggtctacactgtgggatcacattttcaccttttcctatgtaattatattattcaacctttgtagtttcaatacatcgttggagaaaatctgcccagaagttttcattcagtgaaagagttccagcataaccaataatgatggctccactgaatatatgttg

SEQ ID NO: 237645 - DNA, 500 bp, Homo sapiens
tccatttggtcaagagtgttgtctgacactgaagtttctttgttgattttctgtctggacgatctgcacattgctgaaagtggagtgttgaagtcccctactattattgtgttacagtctatctctccctttaaatctattaatatttgctttatatacataggtcctctgctagtgggcacatatatgtttataattgtatctgcttgctgcattgacccctgctattattatataatggccttgtctctttttacagtttttaacttaaagtctattttgttcatataattacagctacttctgttctttttggggttccatttccatgaaatagcttttcccatccayttactttcaatctatgcatgtcattttatacgtaaagtaagtctcctgtaggcagcatagtttggtcatatttttctatccgttcagcctctcttttaactgaataatttcaaccatttacattcaaggtagttattgataggtaaggg

SEQ ID NO: 237646 - DNA, 500 bp, Homo sapiens
tccatttggtcaagagtgttgtctgacactgaagtttctttgttgattttctgtctggacgatctgcacattgctgaaagtggagtgttgaagtcccctactattattgtgttacagtctatctctccctttaaatctattaatatttgctttatatacataggtcctctgctagtgggcacatatatgtttataattgtatctgcttgctgcattgacccctgctattattatataatggccttgtctctttttacagtttttaacttaaagtctattttgttcatataattacagctacttctgttctttttggggttccatttccatgaaatagcttttcccatccacttactttcaatctatgcatgtyattttatacgtaaagtaagtctcctgtaggcagcatagtttggtcatatttttctatccgttcagcctctcttttaactgaataatttcaaccatttacattcaaggtagttattgataggtaaggg

SEQ ID NO: 237647 - DNA, 500 bp, Homo sapiens
tccatttggtcaagagtgttgtctgacactgaagtttctttgttgattttctgtctggacgatctgcacattgctgaaagtggagtgttgaagtcccctactattattgtgttacagtctatctctccctttaaatctattaatatttgctttatatacataggtcctctgctagtgggcacatatatgtttataattgtatctgcttgctgcattgacccctgctattattatataatggccttgtctctttttacagtttttaacttaaagtctattttgttcatataattacagctacttctgttctttttggggttccatttccatgaaatagcttttcccatccacttactttcaatctatgcatgtcrttttatacgtaaagtaagtctcctgtaggcagcatagtttggtcatatttttctatccgttcagcctctcttttaactgaataatttcaaccatttacattcaaggtagttattgataggtaaggg

SEQ ID NO: 237648 - DNA, 572 bp, Homo sapiens
ttatataaatggaaaggtagcccatgttcatggattgggataattagtattgttaaaatgcccatgctaccaaaagtaatatactaagtcaatgcaatttctgacaaaatgccaatggcatttttcactgaaagagaaaaagcaattttaaaattcatatggaaattaatgagcaagaataaaactgaaggcatcaaactatttgatctcaaaatatactacaaacctatattaaacaaaacagcatagtgccaacataaagaaaaagaaacatcaaccaaaggaacagaatatagagcccagcaataaactcaagcactgacaatctactgatttttgacaaaagtgtcaagaacacacaatggagaaaagatagtctcttgaataaattatgcagggaaaactagatrttcacatgcaaaataatgagattagacccttattcaatacacaaaactcaactcaaaatgcactaaagacttaaaggtaagtcccaaaactgtagaagaaaacaagggaaatgctacatgacattgatctgggcaaaaatttcttggttttcccaaaagcac

SEQ ID NO: 237649 - DNA, 572 bp, Homo sapiens
ttatataaatggaaaggtagcccatgttcatggattgggataattagtattgttaaaatgcccatgctaccaaaagtaatatactaagtcaatgcaatttctgacaaaatgccaatggcatttttcactgaaagagaaaaagcaattttaaaattcatatggaaattaatgagcaagaataaaactgaaggcatcaaactatttgatctcaaaatatactacaaacctatattaaacaaaacagcatagtgccaacataaagaaaaagaaacatcaaccaaaggaacagaatatagagcccagcaataaactcaagcactgacaatctactgatttttgacaaaagtgtcaagaacacacaatggagaaaagatagtctcttgaataaattatgcagggaaaactagatgttcacatgcaaaataatgagattagamccttattcaatacacaaaactcaactcaaaatgcactaaagacttaaaggtaagtcccaaaactgtagaagaaaacaagggaaatgctacatgacattgatctgggcaaaaatttcttggttttcccaaaagcac

SEQ ID NO: 237650 - DNA, 585 bp, Homo sapiens
aaaggctgtaatgccccagacctacagacatttttctgtctatatggactccagcatctgccacaaatatgcccaaccacattcttggccaggcattcaagcatgattttctctcttcttatatttaatagagttgaaaatactagatcagtatgaagtatcttgtgtatggtaatgatcaatcctaatgtcaatcaggctaaaaatacaaagctgagatctagaacaaaattagtaggagtattaatcaattcaagtgtctaataagaataccaatgaatgaatgtgcactactataaagaaagaaaatttagactyctacacaaaatgtttccttttaaagctgcttagaatgaaagtactccagaaaccaactgcacaattttccacttaactaggagatatatttctcctcagaatttcaaaaatcatgatggtgtgtttggttatgaatggaaaatttacctggcacttaaacatgtaacttaatgctgaaatatgctctgaacttcttagctaagtagggtacaggatataaaactttaaaatttaaaacatgtctctagtttatccataaatgtacat

SEQ ID NO: 237651 - DNA, 501 bp, Homo sapiens
  misc_feature (1)...(501): n = A,T,C or G
agatctcgcgcaagaaagaattsagggcgagtccgcagtgcaaagcaaaagcaagtttattaagaaagtgaagtggtgaaaggacagctacaccatagacagagcaggacgttcctgaaagtaagaggaggaacgcatccaccccaggtacaatgcttgtatatgtggggagatgtgctctgctacaagggtttgtgataaaggattacttttcttaattactatattttgcaataatcaatattatgcaaaattaggaatgcctttgttttccagatattgngatatctggacacatccaagtctgggtctgtttagtaaacattattaatttgttcccttaaccataagcatggagaggctaggaagccctaattttctgggaatgcagcccagcaagtctcagccttattttcctagccctcactcaaaatggagttgctctggttcaaatggctcagacatatctccccctccctttgcaagaaaaccttgaatcct

SEQ ID NO: 237652 - DNA, 581 bp, Homo sapiens
ataataataatagtatctccctcatagagttgttatgaagattaaatgagttaattattataaagcacttacagcagggcctgatgtactgcaagccctatataaacacctgttaaataaaatgatcgaatatatttttccagttttgtaggttctttggagacactgatggaatgtgagaattgtgtcctgcaatggaaagaacatgaatttaccaaatctttacagaatgtccgatattgttctaggcattgggaagcaacatgggagatgcyccaggaatctttcagattctccaggattaaaaacacaactgctcagcttccacagtctcttgtagtgatactgcattctggcactgtcctgggtgtttatatgccactccaatccttacaacaaccttgtaacgcaaagactattgtttgttcgtttgtttgttttgagaaagggtctcactctgtcacccaggctggactgcagtggcgcagtcatggcttattgcagtcttgacctcctgggttcaagtgatcctcccacttcaccctctgcggtagctgggactacagatgtgtatcaccaca

SEQ ID NO: 237653 - DNA, 601 bp, Homo sapiens
tttttgttttaaacattcccccaaaatatttatcgtttgggggttgaaaaaaatgcagcccattgaattgtgagttttaaactggaaaggtcacagattaatggcatacaattaaacctgtttttttgtttgtttttcttctcaaaatgttagccctaaacactgaattattttcaaatttagacacccaggtgctttttaacttttgtactttacagttactaacaagcaggtttgcataaggcatttttgagagccggactagcaggccataggtaattccgtgttgtcaayacgactttccacaccaggagaggaaactcccagggcccaaaggctaaagtggaatggtcaagtcatttgccattgagtcatagccagaccatccctatctagcaagccatgcctgcttcctggtttgtgcatgttgccctgtgtgctcctccttagaactagagagcagcaatgccagtgccttcaccagcaaatcaagggatggtaggaagggatagggctttagagatcatcacttactgccctcatttcacaagaggaaaaatgcccagtgaacttaaggaatttcctccaggtcacctaaact

SEQ ID NO: 237654 - DNA, 515 bp, Homo sapiens
gtagatgtttgtattttagtctgtgcycttcttaatgttcagaagtttaccatttttctgtggtcaggtctgttatcatttcccatgggatttcttacatgacaaactcacagtgctcttcaacagcagtgattaaataaatattcagctatttttggcatgtatacagttttatttctttgcctatgtgtgtgtgtgtgcacgtgtggtgtgtgtgtgtgcatgtgcgtgtacttgtgtatgtgcatttatgtgcacatgtacttgagtctcatccactgataatttaatttgtcatttggcaggaggggagggttttcttttgctaaaggtactgaccaattgtcttaccatgatttgtagattttttgtttcccaatgatctcaggtgtctcttttcacagactttgagaaggcacagtaccttcttctgcttccatgcttctccccactcactcccctggctctgtgtgcctctgttcagcagcaacttcactgaagttgaactctgagca

SEQ ID NO: 237655 - DNA, 598 bp, Homo sapiens
gcagttattctttcctcagcctcatggaaatttagcctaccatgcacagattagtattcagccaaggagtattagtatttgggcctaaggggatcgttggatccctttccttgtgtaatttcttcctctctggcactctgccatacacatagcagaaatctcagtctctgctatcttctttatctgtctcctctatttaaagagatcaccaggctttctttccccttcctgtggtctgraaattgtctccacacagaaagctgtaacaatcagagtcacctggtttgtttctcttctcccagaggatcacaatccagctgggcctgctgtctaaatattcgaaaaacattgtttcacatattttgtctatattcctagttgtttatagaaaagcacaattcccataacaattcttccctcatgggcaggtgaggaagaatgttgtgtatttgtttaaaaaactattttttaaaaagcttgatctgaactatttttaatcaatttaataaatagtcatgaattcccactgtgagtcaagtctattgcggataccagtgaaaacaaaagcaaacaacattccctgttctccttgtcctta

SEQ ID NO: 237656 - DNA, 584 bp, Homo sapiens
tatgtttttctgctgacttcttggactctcactgttttgcttctcgccctgccccttgcttttattttttacttcctttgttttctagaactggtgaatattcagggagatttgaatggagacttagaaagcctgagaaagttagagctgggattcaatgtctttggacackgttatcctttccacttggataacccatcgcaagcagttctaacaaaaaccatgcacatgtgacatgaagtctataccttttcttgcttagatacagcaatgcttcaccagcccattgggaaatactaactgactttctaccagcactctgttagtaaacaggactaataatttcattctggtgatgtgaaccaggtgctaaacttcagttgtttcactcacaatagacctaatatgggggaagatatttgtaaagtttgtggtttgaaagtcttcgtcacttaattgcaagaaattaatcataggcctgttagttacaatagtctgttctcgcattgctataaagaaatatctgagactgggtaacttataaggaaaagagatttagttggctcacagatctgcaggttgta

SEQ ID NO: 237657 - DNA, 437 bp, Homo sapiens
tgctcaacaatcagtaatagaaggaataaaaatctgatgaaatggggaaaaatatatcatatgtcttatatatgcatgtgtgtgtatgtgtgtgtgtgtgtgtgtgtgtgtgtgtgtgtgtgtgtatctctatatatcaaatatatatatakagagagagttgggtcaatcgtagcaaatgtgagtgtcagccatactcttgagtacatgcctgaggtccaggccatttcccccactaagatatagcaaatcaggcaagaagtgaaagatttcacagcgacttcctggagggccatatcatgataaccatccagacccttgctagactggccttctgccaaaggaaaggaaagcaggagattcctgaaggccaaagaacgcccgccaggaactgggcttttgagaagccgagaggtcagatcagcctatcctcacat

SEQ ID NO: 237658 - DNA, 447 bp, Homo sapiens
acctgaattgaaaagagaaatggaaacagaaaatctttagcaaattgaactaaaaatctcccagtgagttacaaattaatccagtgaaatgttccggatgttttggatgagggaattctatttcatacaggtcacactcccttaccaacctcaggcctggctgaaggaagattcttctaatccaaaacatcctgcaattttaatttaattatgaaacagcatgttgtgctagmtaagttagacttcaagatgacttagcagaaatcccctggtttgataataaatacagatgccatccagtgcaataaaaatgactgcatcaggccagaggcaggtacaaaaaagctgaaagaggcttttatttattgtgatgccagaggcaataaaattgtgtatcatttggggtgaaacttttaattccatatcttgtaggtattaaactacact

SEQ ID NO: 237659 - DNA, 588 bp, Homo sapiens
aagcttgaaggcattaaatgaaacaagccaatcacaaaaacataagtgctgcataaagccactcacatgagatgtataaagtaattaaactcagaaacagaaaagtagagtggcggtctccaggggccagagggagaggaaaaagggaagttgttcaatgggcatagagtttcagtcatgcaagatgaagaagttctagagatctgttttacaacagtatgcttatagttaacaatactgaaaacttaaaattgttaagaagataaatttatattgtgttctttactgcaattccaaaaaagcaacagaggctcatactacaacacggatgaaacttgatgacattatgttaagtgaaataagccagtcacaaaaggacaratactggatgattctactcacatgaggtacctaagagtaatcaaattcatagagacagaaagtagaagggtggttgccagggactagcagaaagggataatggggagttatttatgcagggaagggggaatggggagttaacaggtacagagtttcagtttgggaagatgaaaaagttctggagagggatgcagtggtggttgcata

SEQ ID NO: 237660 - DNA, 588 bp, Homo sapiens
aagcttgaaggcattaaatgaaacaagccaatcacaaaaacataagtgctgcataaagccactcacatgagatgtataaagtaattaaactcagaaacagaaaagtagagtggcggtctccaggggccagagggagaggaaaaagggaagttgttcaatgggcatagagtttcagtcatgcaagatgaagaagttctagagatctgttttacaacagtatgcttatagttaacaatactgaaaacttaaaattgttaagaagataaatttatattgtgttctttactgcaattccaaaaaagcaacagaggctcatactacaacacggatgaaacttgatgacattatgttaagtgaaataagccagtcacaaaaggacagatackggatgattctactcacatgaggtacctaagagtaatcaaattcatagagacagaaagtagaagggtggttgccagggactagcagaaagggataatggggagttatttatgcagggaagggggaatggggagttaacaggtacagagtttcagtttgggaagatgaaaaagttctggagagggatgcagtggtggttgcata

SEQ ID NO: 237661 - DNA, 593 bp, Homo sapiens
gaagcattgtgaagttctggaattgaactctaggttgaaagatacctgaaggaactcttggagatcygttctcttaatttatggatgaggcacagaagatgtcattgctgaagtcaaggtctcacagcaagtcataaaggagccagaatgcaaggctcagtctgctgagtcataatccactgacctccctttgggttgcctgcgctcatttcctcactcgctcctcaattcagcacactccatccttcctccaggaatacaattttgccctcatcgcgaaccatctgtagtctcactcattatttggttaattcagtcattttgcagctatatatccggaacccagcatgtgccaggggcacgacaggaacatgacagatccagcccctgtcccaaggtgatcaggatttccttcaatccctcactgcagccatgcttcttggattcagtcttccccctcagaaagaactgcttttctccctacgatgagagatgctttactttcatagtgaaagcattcctattaacgtagatatgacagaaaaacaaaacacaacaaaacgagacctagcttatggtagacttagtgtcta

SEQ ID NO: 237662 - DNA, 557 bp, Homo sapiens
gatgtccagtactatgttgaacaggagtgctgagagtggtcacccttgtcttgttctgtttctcaagggcaatgcttccagcatttgcccattcagtatgatgttggctgtgggtttgtcatagatggctcttgttattttgatgtatgtttcttcaatgccttgcttgttgaggatttttaacatgaaacgatgctgaattttattgaaagccgtttctgcatctgttgagatgttcatgtggtttattttagttctgtttatgagatgaatcatatttattggttttgtatasgttgaactaatcttgcatcccaggaataaagcctacctgattgctgtggattagctttttgatgtgctgctggatttgatttgctagtatttttgttgaggattttagcatctatgttcatcagggatattggcccaacattttctttttttgttgcatctcagccagattttagtattaggatgatgctggcctcatacaatgcgttagggagagtccctcctcctcaactttttggagtagttttagtagaagtggtact

SEQ ID NO: 237663 - DNA, 557 bp, Homo sapiens
gatgtccagtactatgttgaacaggagtgctgagagtggtcacccttgtcttgttctgtttctcaagggcaatgcttccagcatttgcccattcagtatgatgttggctgtgggtttgtcatagatggctcttgttattttgatgtatgtttcttcaatgccttgcttgttgaggatttttaacatgaaacgatgctgaattttattgaaagccgtttctgcatctgttgagatgttcatgtggtttattttagttctgtttatgagatgaatcatatttattggttttgtatacgttgaactaatcttgcatcccaggaataaagcctacctgattgctgtggattagctttttgatgtgctgctggatttgatttgctagtatttttgttgaggattttagcatctatgttcatcagggatattggcccaacattttctttttttgttgcatctmagccagattttagtattaggatgatgctggcctcatacaatgcgttagggagagtccctcctcctcaactttttggagtagttttagtagaagtggtact

SEQ ID NO: 237664 - DNA, 304 bp, Homo sapiens
ctgtcagtgtcatgttgtagtatcccactattattgtgtggttatctacatctttttgtaggtgtttcagaacttgctttatgcatctgggtactcctacattgggtgggtatatatttacaatagttaggtcttctcattgaattgaactctttrttattatgcaatgcccttctgtgtctgttttgatgatcactggtttaaagtctgttttgttggaaataagaataggagtccctgcttttttctgttttgtgtttgcttggtagatttttcttcatccctttactttgagtctgtgggt

SEQ ID NO: 237665 - DNA, 470 bp, Homo sapiens
agattgaggaggaggatgcaatgctagattacatagaacaatattgtttagagtttaaaaatatgaactttgttctatgtgtaatgagaagccaataaaagttttgaacatgaaaatgactactgtggttagtttgcagatgatggaatacaatgtgtaataatgtaaacaggaagaccaattagagaactattgcamgggctaaagttaaattagaaacaaaaaacaatgatgactgggcaaggatatcagacgatgctagatggtaaatttaggatgctaaatttcagatttactgggttttaacaaagtttaaaattattcaaatttttaatgtgagcaacagtgagaaatagtattttcatttcctaagatgagaaagaatagaaggacatgtttgatgggagggtaagcaggaatcagaaaaaaggctttgttttggatttctttagttagaaatatagattttg

SEQ ID NO: 237666 - DNA, 464 bp, Homo sapiens
aacaaattggcatcagtaatataatgtttggaaactttaatgttgaggtgatgtttaaagacttaggacccrataagattattactgagggagtatgcaaaagaagaagtctgaagactcagctaggatgcttcaactttcagaagttcagaagaaggtagaatagaataatcagtgttacaggctgaatgttgttctcccaaaatatatgttgaaatctgaagcttcagtacctgtgcatgtgatcttctttagaaataagatcttttaaatgtaatcaaattcaaaggaggtcattagaatagggatccaatatgactggtgtccttataagaagaagggatagaaacacacagaagagaatgccatgtgaagacatggatgcatgaggtgagaatgacatgatattggaggcagagattgaagtgctgctgctacaagtagaggaatgacaaagattgctg

SEQ ID NO: 237667 - DNA, 464 bp, Homo sapiens
aacaaattggcatcagtaatataatgtttggaaactttaatgttgaggtgatgtttaaagacttaggacccaataagattattactgagggagtatgcaaaagaagaagtctgaagactcagctaggatgcttcaactttcagaagttcagaagaaggtagaatagaataatcagtgttacaggctgaatgttgttctcccaaaatatatgttgaaatctgaagcttcagtacctgtgcatgtgatcttctttagaaataagatcttttaaatgtaatcaaattcaaaggagrtcattagaatagggatccaatatgactggtgtccttataagaagaagggatagaaacacacagaagagaatgccatgtgaagacatggatgcatgaggtgagaatgacatgatattggaggcagagattgaagtgctgctgctacaagtagaggaatgacaaagattgctg

SEQ ID NO: 237668 - DNA, 476 bp, Homo sapiens
tggaattcaggaaacaaattggcatcagtaatataatgtttggaaactttaatgttgaggtgatgtttaaagacttaggacccaataagattattactgagggagtatgcaaaagaagaagtctgaagactcagctaggatgcttcaactttcagaagttcagaagaaggtagaatagaataatcagtgttacaggctgaatgttgttctcccaaaatatatgttgaaatctgaagcttcagtacctgtgcatgtgatcttctttagaaataagatcttttaaatgtaatcaaattcaaaggaggtcattagaatagggatccaatatgactggtgwccttataagaagaagggatagaaacacacagaagagaatgccatgtgaagacatggatgcatgaggtgagaatgacatgatattggaggcagagattgaagtgctgctgctacaagtagaggaatgacaaagattgctg

SEQ ID NO: 237669 - DNA, 509 bp, Homo sapiens
aacattcagaatccctagacagtaaaatccttaacacagagagtgtgccggggacatggctacctatagttcagcagtgctgacaagctgaatgacactggataaatcatttaattttgatgtcccttagttaccttgccttgaaatgggaatgctaaaagtttcactacttcctttgcaaggtactgtgaatgtaaaatwgaataactagaaagctaaaatatatatgtaatttatgtatctgtaagtaatgtgtggaacttttaagccttgtatgggaataaaacaaatatacactgtactattctatgaacaaatctgttggccaacattctgatattgaatatttatacacgatataatgtcttcatttattttctggacagaatatatgagatttctcaacagaggatttcccgttctcttatttaagtattctcctcggtgtttgggaggctgtatattaaactagagaaaaggtatttgtttgtagtcaaacataagctttt

SEQ ID NO: 237670 - DNA, 419 bp, Homo sapiens
ttttctgaaatatttgacgaaagaatctacttttgcagaataaaaaatagtagcttagtttaggacactctaaatatggcttttggaataaacaagaccatagcagagccatgttttatgatcacattgttttgtggcccattgccagttcctacctagaaaacttcaagacctacaagacaggtattatcaagctgcactktggcagtctacatgaacatttacaaagaaaaacctcaatgaaatgcattgagttgctataaagatagcattaaagttgctgctcaaacatcactcaatagagacacagaatagatttttttatttaggtactcatgccaggaataatgtgtacctcccgaataatttgtttgttttctatcatgttaacaccatgatttaactggtcaatgttggca

SEQ ID NO: 237671 - DNA, 419 bp, Homo sapiens
ttttctgaaatatttgacgaaagaatctacttttgcagaataaaaaatagtagcttagtttaggacactctaaatatggcttttggaataaacaagaccatagcagagccatgttttatgatcacattgttttgtggcccattgccagttcctacctagaaaacttcaagacctacaagacaggtattatcaagctgcactgtggcagtctacatgaacatttacaaagaaaaacctcaatgaaatgcattgagttgctataaagatagcattaaagttgctgctcaaacatcactcaatagagacacagaatagatttttttatttaggtactcatgccaggaataatgtgtacctccygaataatttgtttgttttctatcatgttaacaccatgatttaactggtcaatgttggca

SEQ ID NO: 237672 - DNA, 560 bp, Homo sapiens
aaaagtatactcttttgctctgtgctctgtcacttctattgtagtttagtttgtgctgcctttccctacamaggcataccttgcagaagctgcaaatttggatccagatcaccgcaatagagcaaatatcacaataaagcaggtcacatgattcttttgattttccagtgcatataaaagttatgtttatgctatactatagtctattaattatgtaatagtattatttctaaaaaataacctgcataccttaatgaaaatgttttattaagaaatgttaatgatcactttcgctttcaagccagtcttcatctgtttgctgatggaggaccttgccttgacaatgatagctactgactgatcagggtggtggttgctgaaggatggggtggctgtggcaatttctaaaataagacaacaatgaagtctgccacatctactgactcttcctttcatgaaagatttctccatagcaggtgatgctgtttgatagcattttacctacagtagaacctctttcaaaattcgagtcaaatttttcaaattctgatgctgctgat

SEQ ID NO: 237673 - DNA, 560 bp, Homo sapiens
aaaagtatactcttttgctctgtgctctgtcacttctattgtagtttagtttgtgctgcctttccctacacaggcataccttgcagaagctgcaaatttggatccagatcaccgcaatagagcaaatatcacaataaagcasgtcacatgattcttttgattttccagtgcatataaaagttatgtttatgctatactatagtctattaattatgtaatagtattatttctaaaaaataacctgcataccttaatgaaaatgttttattaagaaatgttaatgatcactttcgctttcaagccagtcttcatctgtttgctgatggaggaccttgccttgacaatgatagctactgactgatcagggtggtggttgctgaaggatggggtggctgtggcaatttctaaaataagacaacaatgaagtctgccacatctactgactcttcctttcatgaaagatttctccatagcaggtgatgctgtttgatagcattttacctacagtagaacctctttcaaaattcgagtcaaatttttcaaattctgatgctgctgat

SEQ ID NO: 237674 - DNA, 560 bp, Homo sapiens
aaaagtatactcttttgctctgtgctctgtcacttctattgtagtttagtttgtgctgcctttccctacacaggcataccttgcagaagctgcaaatttggatccagatcaccgcaatagagcaaatatcacaataaagcaggtcacatgattcttttgattttccagtgcatataaaagttatgtttatgctatactatagtctattaattatgtaatagtattrtttctaaaaaataacctgcataccttaatgaaaatgttttattaagaaatgttaatgatcactttcgctttcaagccagtcttcatctgtttgctgatggaggaccttgccttgacaatgatagctactgactgatcagggtggtggttgctgaaggatggggtggctgtggcaatttctaaaataagacaacaatgaagtctgccacatctactgactcttcctttcatgaaagatttctccatagcaggtgatgctgtttgatagcattttacctacagtagaacctctttcaaaattcgagtcaaatttttcaaattctgatgctgctgat

SEQ ID NO: 237675 - DNA, 560 bp, Homo sapiens
aaaagtatactcttttgctctgtgctctgtcacttctattgtagtttagtttgtgctgcctttccctacacaggcataccttgcagaagctgcaaatttggatccagatcaccgcaatagagcaaatatcacaataaagcaggtcacatgattcttttgattttccagtgcatataaaagttatgtttatgctatactatagtctattaattatgtaatagtattatttctaaaaaataacctgcataccttaatgaaaatgttttattaagaaatgttaatgatcactttcgctttcaagccagtcttcatctgtttgctgatggaggaccttgccttgacaatgatagctactgactgatcagggtggtggttgctgaaggatgrggtggctgtggcaatttctaaaataagacaacaatgaagtctgccacatctactgactcttcctttcatgaaagatttctccatagcaggtgatgctgtttgatagcattttacctacagtagaacctctttcaaaattcgagtcaaatttttcaaattctgatgctgctgat

SEQ ID NO: 237676 - DNA, 512 bp, Homo sapiens
gcatcttcaccaggaatagattccatttcaataaacttatttctttgctcatccataagaagcaactccttatttgctaaagttttatcatgagactgtagtgattcagtcacatcttcaggctttacttctttttttttttttttaattttactttaagttcctggatacaygcgcagaaagtgcaggattgtttacataagtatacatgtgccatgatggtttcctgcacctattaacctgtcatctaggttttaagccccacatgcattaggtattggtcctaatactctccctcctattacttcccatcccctaacaggctccggtgcgtgtccttcccctcccaggcaggctttacttctaattctagttctcctgctgtttccacaacatctgcagggattttctccactgaaatctaaaacccctcaaagtaatctatgagggttggaattaacttcttccagatttctgttaatgttgatttttgacctgttctcatgaatcac

SEQ ID NO: 237677 - DNA, 512 bp, Homo sapiens
gcatcttcaccaggaatagattccatttcaataaacttatttctttgctcatccataagaagcaactccttatttgctaaagttttatcatgagactgtagtgattcagtcacatcttcaggctttacttctttttttttttttttaattttactttaagttcctggatacacgcgcagaaagtgcaggattgtttacataagtatacatgtgccatgatggtttcctgcacctattaacctgtcatctaggttttaagccccacatgcattaggtattggtcctaatactctccctcctattacttcccatcccctaacaggctccggtgcgtgtccttcccctcccaggcaggctttacttctaattctagttctcctgctgtttccacaacatctgcagggaytttctccactgaaatctaaaacccctcaaagtaatctatgagggttggaattaacttcttccagatttctgttaatgttgatttttgacctgttctcatgaatcac

SEQ ID NO: 237678 - DNA, 615 bp, Homo sapiens
ttaattgacctagtttccatattgttgtgtcttagggagtagggtggcctgaggaggggaaggaagatggggaatggccagtctttggagtagtcagaacatacacatttatcaattaagtttgccatcttatatgggcatgagttgtgatgcctcaaagcaattaccatactaacatggaaaatcactgaycacagaacaccataacagatataataataatttaaaagtttgaaatactgtgagaattaccaaatgtgacacagagacagaaagtgagcacaggcttttgggaaaatggtgctgatggacttgcttgatgcaagcttgccacaaaacttcaatttctaaaaaaattctgtgaagtgcaataaagcaaagcataaaacaaagtatgcctgtattagcaattaaagtttgtgtatagtcaactatgttaatcttgtttcatagtttcttaattttctatatgcttaagagatttcctcctaagatatatatgtattattctacattttcttcaaatttgtttataatttttctttaacacattttcccattttttttctaattatactggcaattttataacacctttaattttaggaatgagat

SEQ ID NO: 237679 - DNA, 405 bp, Homo sapiens
aagcataaaacaaagtatgcctgtattagcaattaaagtttgtgtatagtcaactatgttaatcttgtttcatagtttcttaattttctatatgcttaagagmtttcctcctaagatatatatgtattattctacattttcttcaaatttgtttataatttttctttaacacattttcccattttttttctaattatactggcaattttataacacctttaattttaggaatgagatgtggaaatgaataaatgatagcaatgaacctttagacatttcttacaatgtgccaggtgctgttctaaggcctttacttgtactaactgatttaaggtttataacaaccctaagaggtaggtgctataatttgcctcatttcacagatgaggaaactggtgtatagga

SEQ ID NO: 237680 - DNA, 502 bp, Homo sapiens
ccaaactgtcagtaaagtgctaattgcagaaactttattacttgaggtgatactgaaccagagagaacacagcttgatttttcataatctaaactttgcaatgtgagcaattagaaaaaaaaaaaaactttcctttttgtttcaatttctaagctaagcaaaattaaaatggatgkcattgacagtaaaatagaaacttaaaaatgttgtccttctaggtgactttataacttagtataaaatcccattaacccctttttataaaaatgcataatttgaagcctaacagcacttgcaattctatgacacatttggctacctgtaattggagaaagacagaactttattttctgcttctgtcatttttgtattttctgtagaggaaatatacttcaaagatatgctttatatatactctctaaatttatatatttcctatgggatctgaaatatttaaagcacctttaaacactatttcagaaaatgggtttgcaggtagcac

SEQ ID NO: 237681 - DNA, 502 bp, Homo sapiens
ccaaactgtcagtaaagtgctaattgcagaaactttattacttgaggtgatactgaaccagagagaacacagcttgatttttcataatctaaactttgcaatgtgagcaattagaaaaaaaaaaaaactttcctttttgtttcaatttctaagctaagcaaaattaaaatggatgtcattgacagtaaaatagaarcttaaaaatgttgtccttctaggtgactttataacttagtataaaatcccattaacccctttttataaaaatgcataatttgaagcctaacagcacttgcaattctatgacacatttggctacctgtaattggagaaagacagaactttattttctgcttctgtcatttttgtattttctgtagaggaaatatacttcaaagatatgctttatatatactctctaaatttatatatttcctatgggatctgaaatatttaaagcacctttaaacactatttcagaaaatgggtttgcaggtagcac

SEQ ID NO: 237682 - DNA, 502 bp, Homo sapiens
ccaaactgtcagtaaagtgctaattgcagaaactttattacttgaggtgatactgaaccagagagaacacagcttgatttttcataatctaaactttgcaatgtgagcaattagaaaaaaaaaaaaactttcctttttgtttcaatttctaagctaagcaaaattaaaatggatgtcattgacagtaaaatagaaacttaaaaatgttgtccttctaggtgactttataacttagtataaaatcccattaacccctttttataaaaatgcataatttgaagcytaacagcacttgcaattctatgacacatttggctacctgtaattggagaaagacagaactttattttctgcttctgtcatttttgtattttctgtagaggaaatatacttcaaagatatgctttatatatactctctaaatttatatatttcctatgggatctgaaatatttaaagcacctttaaacactatttcagaaaatgggtttgcaggtagcac

SEQ ID NO: 237683 - DNA, 502 bp, Homo sapiens
ccaaactgtcagtaaagtgctaattgcagaaactttattacttgaggtgatactgaaccagagagaacacagcttgatttttcataatctaaactttgcaatgtgagcaattagaaaaaaaaaaaaactttcctttttgtttcaatttctaagctaagcaaaattaaaatggatgtcattgacagtaaaatagaaacttaaaaatgttgtccttctaggtgactttataacttagtataaaatcccattaacccctttttataaaaatgcataatttgaagcctaacagcacttgcaattctatgacacatttggctacctgtaattggagaaagacagaactttattttctgcttctgtcatttttgtattttytgtagaggaaatatacttcaaagatatgctttatatatactctctaaatttatatatttcctatgggatctgaaatatttaaagcacctttaaacactatttcagaaaatgggtttgcaggtagcac

SEQ ID NO: 237684 - DNA, 480 bp, Homo sapiens
aattagcagccagacaatcaaattgagtaagtaagcaccaatgcagaaaaagtttacgaataaatggaaaatatgagcaaaataatatgagctatggaagagagatctgggatacctaatgtatgaawaacataattattaggggacaaaacagaacagaggataaataatgtacaatgaaataatggaataccagttcactgaactgaagacaaacttaaagtttcaaaaaaggccattgagttccaaacataattaataagacacacatacatattgtggtaaagctttgtaaactaaaaagttacaggaaaaaagagtacaatgtcttctaacttctagaagcccagtgcaagtagaaagataatggaatatcaatatcaatatcaatgatatcaatatgaatatcaatataacaatagcaataaaaattaacatataattgtgaatccaacaaaactatctctccttaagtaacga

SEQ ID NO: 237685 - DNA, 553 bp, Homo sapiens
gcagggttctccagagaaacagaaactagatagatagatagatagatagagatatagatatagatagatagatagagatatagatagatagatatagatatagatagaatacagatataatatatatagtttctatataaccatatagatatatatcttttttgtttcattttattttttaaggaaatggtttgcatatatctttatgtgtgtgtctgtttttaaaggaattcttcacgtgattatggaggctggcaactccaaaatctgtagatcaggctggacagctggaaatttgagtaggaataatgctgcagtcttgaggcagaatttcttttccaggaaacctcaatgtttgctgttaaggctttcractgattggatgaggcccaccaaacttactgagtgtaatctcctttaattaaagttaactgattgtagatagtaaacatatctacaaaatacagtattttctcccttatctgtggatttgcttccctcagtttcagctacccatggttcaaaactataaaatgaaaaactgcagaaataa

SEQ ID NO: 237686 - DNA, 600 bp, Homo sapiens
cactgatgaattgggcagtaattccaccccagggtctagtttcatcagctgtcataggttaaacagaatggaactggccacagtcaataaggctggcaaacaccctcaaggtcctaactaaaatgytgttattgattctgtaggtggctcatctttctacggttcaatatctttaactagcattccagtttaatagttttagataacacatcttttcttggctattttactctaggtaaaaggacaacctattaacattataatttaatatggatgcattggtacaatcctgaaacaattagatgtaaaaggaaatatcctaatggtttgcatatgtgctgtatgcttgtttgattcctttcctcttttttattcccttatagtgtgactataactggcatgattgttttctttttgttgagttgaccatttgatggaattctccttctctttgaattttggctgtacttatgatctctaacataaatggaattctagagaaggtaggaaatttttagttcacttagtctgcaactccacaccctaagcaagaattccctctataacattttggaaaatgttatttgggctctatttaat

SEQ ID NO: 237687 - DNA, 600 bp, Homo sapiens
cactgatgaattgggcagtaattccaccccagggtctagtttcatcagctgtcataggttaaacagaatggaactggccacagtcaataaggctggcaaacaccctcaaggtcctaactaaaatgttgttattgattctgtaggtggctcatctttctacggttcaatatctttaactagcattccagtttaatagttttagataacacatcttttcttggctattttactctaggtaaaaggacaacctattaacrttataatttaatatggatgcattggtacaatcctgaaacaattagatgtaaaaggaaatatcctaatggtttgcatatgtgctgtatgcttgtttgattcctttcctcttttttattcccttatagtgtgactataactggcatgattgttttctttttgttgagttgaccatttgatggaattctccttctctttgaattttggctgtacttatgatctctaacataaatggaattctagagaaggtaggaaatttttagttcacttagtctgcaactccacaccctaagcaagaattccctctataacattttggaaaatgttatttgggctctatttaat

SEQ ID NO: 237688 - DNA, 584 bp, Homo sapiens
tctgtggtgtgaatcaagtggccaggtcacaatgctttgagtgaggaaaaatggggaggagtctgttctaggcccagagaattgcttctgtaatacaacatcaaatattctttttatatattttattgacctcataatattatttctctattatatcatttaagcagacacttgttactgagtatttacttggcttcaagtttttcttcattataaacagtactgtaataaacatctttttacatataactttgagcattgtttgatggttttttgagcataagttcctacaagtggaaaatctaggttaatggctacraaacattttaaagcctgtggtaatgaaatgaatgggatgaagtgagtttttcttccttctaggtgccctttcacttcttatcttgaacagggatctgagttgttcagagaggcgagagaaagtgaagtaggtaaaattatattcataaatattttaaaggggacttttggaaaatgggagtcttcttgctgcatcatttcttatgttcctctagagaagctttcaggtgaggcaagagtgaattctactgaggaattttgataca

SEQ ID NO: 237689 - DNA, 549 bp, Homo sapiens
atttttgacaagtagaacaatctaaagagcactattacttcttttgcaaactgtaattcttttgttccttggtgactgataataatatcatgaattagagtgaaatattagtattaaaatagtagagagtaccagtggaagtcagtcagaataakgtgtatttgagtgtctcagctctcctgcttttctgttgtattaccactggaaaatcatttaatctgttaaatctgtaaattttagttttctaatctgtaaaataattcctgtttcctgccattggtttgaggagtaaatgattttatgcatatgacaatgatttgtgaactatgaaacatgtatttctattaacaaattggcaagatcaatagtctgttagcagtattttcatcacattatgacttgtgagcataatattttgaaagtagcaaatgcattcattagcagtgggtcctttttcataagaaaaatttttctaatagcctgccctttgtttgtaaccatggtccagagttggccaaatcgcagagagtatagaaactgatattgaac

SEQ ID NO: 237690 - DNA, 560 bp, Homo sapiens
ggtgattttaaatccctcatccaagaagaagaattagtcattaagaggtatgtcccagaatattctcagcatccagttaaatacaatcatatgatttcaaggactccaggttaaatcatttcataattgctggctttctaatactatcattgttgaacaaaagtaatttatctaaacaagttcttcttacagaatgtatgggatttctatatcaggctatctgatgaaagaatggattacatgaggagtcagtccatgacaaagaatcacaagaactagtggctgtagagaataagactagatggggtgaatattagtgagatcatcttgaaggtctggaacatcagagaagagagaagagagtaggtaattggaggagggatgaggaagcagtcacactgagaagctagatggtacatagcagtatcaagcagttgcagtagcagaaatgtctcagtgttttcaaaggtgtaagtcctggattraacattagatttagaaacagattatttaataatattggttagtgaagatgccctgaagtttcaagaagtgatgtt

SEQ ID NO: 237691 - DNA, 601 bp, Homo sapiens
tcctcgttggtgaacataatatctacaaagtagcagattttggacttgccagagtttttaaggtggatttagttttgttttaattagtttttgtaataggtcaaaagtctaacagttagtagaccaatagatatactgttattctttaaaacaatgtttctccaagttctgtagtccataaactacttcagtagtccaaagccttacaaactacctgcaccttcctatttcttaatcaaggagaaacaaaataaagaaaacaatgaccaaccagattggaaagtatgtacttaagtttatagttgaattaatgatctatttttcagttagtaccagtcacctctgtttgcctctatttcctttacaaaagcagtacactttgtgcagtgttaacctaaaccactattactcactgtatgccagattaatttgcatgctgccagaattcttcagcaatcattggctttttgatttccccatttttacctcagtctgaaagatactatataggagatataatattaggtgyttttctcttaaattaattttacatttccacattgtaccctaaaaatatggacatagggcataaaacaacaaa

SEQ ID NO: 237692 - DNA, 582 bp, Homo sapiens
tttttttcctaccagtagactatcaaaggcagaactctacattttaaataggtcagatgaacaccataagcctcaaaaggaatgggaaatttgtctcaatcaaaatgtgggaaaggaaaattgcttattaaawatatttactattaaaattttagcccatggaaaatagtgatggaaaagtgtagtgaccctcaacaaatgtcatatttttctcttaaacttccattttttctcattccctagataagggcatttaaaaatagttgcttcttgatttcttgttcatatctaatcacactttggctagagttcttgtctattccttcagtgttaactctcatgtatacatagatttaaaaaccacaagtattcattgagtgctgtgctggtcattctctgcttgctgcaaatccttctttgccgtgctttgtgccatgggcggatgacttctacagctgtatcactcatctcccttgttctctggtattgggttagacttggacaatagaaggatggggggaaagtgagttggggtgattatttctcctctcatctcctcactgttgaactgagatcctggtt

SEQ ID NO: 237693 - DNA, 581 bp, Homo sapiens
gagtacagacctgcatttgagaaattttcctgtgaaagaaagaaaataaattaagaagttagcagagtccagtggaatttaaggtggatgtaaagggaaagggaagtattctgaggatagcctatgaatgatatgaatagagagggaaagtggaggtgttgtggaaagcaggactaactgagggaacatgcaaccagcaaacgttgaagggatgaaatcaaaggtataagaagaaggatctcctcctctgggaaagagatttattctggcagaaaaagaagatcaattatttggataaaaatggaaaacatacttatcaaatttgtatatgccaccaatctgtgaggagcagctaatatgattgatartagagtcaagattcaagaagtcatgttggaatgtgagaatgatgaattgaaacaaacaaaaatgaagtttagtggtaatacatgcaaaatttctcctttataccaaaatcaatcatttaaagtaaagaatggaggagaaataacttcattctatttcatgtggaaaagagtagcattttcttgtaaaagcttgcatattaatgatgccagcag

SEQ ID NO: 237694 - DNA, 485 bp, Homo sapiens
gaggcaggataattgcttgaacctgggaggcagatgttgcagtgagcagagatcatgccactgcactccagcctggatgacaggacgaggctccaaataaataaataaataaataaatttacaaacttttcctagactaagagggaacaaagtggccaaaattcatgggggtgtagaggaagagtttttcttatctgcaaatccagggaaagtgcttcattaaggagaagccattaatattatggaaagatctctttcagcctcagagagaccactaggagagccctgagtacataagaggcttaaatgcacagttggatcttatataaatgttctgaatgtgttcttggaaaacaacaggagtatttgaaaatgttaatatagtttgaaccctgaatgtaaaacaggttcctyccgcctttgacaaagtaaactctcttttctcctaggggcatttgtttccttcttttaaaaccaggaattga

SEQ ID NO: 237695 - DNA, 533 bp, Homo sapiens
gtgttcaagtgattctcctgcctcagcctcctgaggagctaggactacaggtatgtgccaccacagccagctaatttttgtattttttgtagagatggggtttcactgtgttggccaggctgatctcaaactcctgacctcaggtggtytgcctacctcagcctcccaaagtgctgggattacaggcgtgagccaccatgcccgacctctcaaccaattttctaaaaatcaaaataatatcaagtatcctctcaggccacaatggaataaaataagaaatcaataccaagaggaactttgaaaactgtacaaacacatggagattaagcaataagctcctgaatgatgagtgggtcaatgaagaaatcaggaaggaaataaacaaatttcttaaaataagtgaaaatggagttacaacatactcaaacctgcaggatacagcaaaagcaaaagctgcactaagaggggactttttttttttttttttttttttttgaggtagagtctggctctatcacccaggctgaagtaca

SEQ ID NO: 237696 - DNA, 450 bp, Homo sapiens
tttggtcaagggattggtgactccacttgatggcagcagcctccttgttaggtttcctaccctcagtctcagtattagttggttttcayactgctgataaagacatacccaagactgggaaatttacaaaagaaagacatttaactggacttacagttccatgtggctggggaaacctcacagtcatagtggaaggcaaggaggagcaagtcatgtcttacatggatggcaggaggcaaagagggagagagcttgtgcaggggaactcctatttttaaaaccaccagatctcatgagacttattcattatcacaagaacagcacaggaaagacttgccctcatgattcaattacctcccaccagatccctcccacaacacatgtgaattcaagatgagatttgggtggagacacagccaaaccatatcaccacctttccaactcattctc

SEQ ID NO: 237697 - DNA, 497 bp, Homo sapiens
ttccctgtgggggaacacttctaccagggaacacaaaaaagtcccattgaattttataccttggctattgcctgggagctttgggtttctcctgctgagggattaaatgtragttaatgaataaccatcttggcagtggtaattgactttgatcatcataagaatgttgtagcactgttacacaatggggcaggcaggaatatgtttggcacacagatcatccacgccactaaaaccaacagaactattacctgaggatgaaaggactctagaatgaataatggagaagagagataataagtattagttgtaccaaaatcagctgtaggaagtgaggctataatttgttccatttatctttccattctagattttccccagactgaaaggcccacatgaactacaggaaaagctgtccaccaaacatctgtgaaaaaatgaatctgattgcgatacaagggatgaactatggtagatccaaacgcatcccccataca

SEQ ID NO: 237698 - DNA, 614 bp, Homo sapiens
taccaagtcttcctgtatgaattcttgttcaaccaatccattaaatattaatttattgctagcattcactagagttatgttctatagtgggtccaactgattgaggcccgtataagtttaatatgacagasggtaagaaaataacatattcctgatgcaagacattcaacatttacacttgtccacttaaagtgaatgccaactgattttcagttaaatgcctttgggagatcagtgcctgtatatcaactaatcaagactgtgataacctactttatgaaagataacacaatataatcatcagcttgaagtctccagttgtctttcattctatgtcccctagctgaagaattatcccttaaagtctgaagactctaaacctgcaaagcccagagagaaagtaagtacgattccacaaatgggtcccctgagagtgatattaaatgcaggcaactgtacttgtacaccttgatcctgaactcaagtattctactacaagggacattgtaccatatggtgtttgctcattttgaggttatactgtgtctaagaggatgatgcccccattttcacaggatatagtctccaagttgtgcctttgaaaatctgtttta

SEQ ID NO: 237699 - DNA, 552 bp, Homo sapiens
ctgccacttttactttgcatgaagcacagtgattgtgtccatcttgattccaatgataaagtattctctttcccttctcacctttccctgtcttatttcttcaattgccttgtgtcagttctaacttatagaatgaaagcattgttgaacttcttcatcatgctcgtgcccttctcatcagtgtattgatttttactgtaatcagtagtgcctcttctgggactacctactgaccacagtcctctgctatttgaatttatgtaatatatctgctctgcaaaaccacttctctatgccttttgatctcttctattctccgctccagcagttctaaaacttctgaattcacatagaatgtgccctagcttttgttatcttcctaagaactatcctagaagcatgttttctctctctcccaacatccttttcaggttgttaagtgctatatctggggtgagtgctcccakagcaatacactcttctttatagtctacttctgtgtattcagcactctcagaatctagtcccgtatgtaatttcccatctcttgct

SEQ ID NO: 237700 - DNA, 573 bp, Homo sapiens
tattttgtccaatagactcaacagaattgatgctacatgactactgttttctctgctgggacactcattttggaggactgagttatcacttaagatgtctgattgccctgtaaggtcacatggatgaactatgtaaaagaactctgaacaccagtctcagttggaaacattttttattcatctcaacacaggcactaracatatgggtgaaatgcctcttgatgatcatagcctcctccacttcttgagtcactccctgccaagtcttcagagaattgtagcattgataagataggcctcctctgtttgacagttcctggccagcagagtccatgagccagtgtaataaaatggttgttttatccaactaaattttgttgtgattagttacacaggagtagttactacaacataatttggcaactgaaatatatggctttatctttgggaccaaatgctggtgggatgctagaagttatgaggtgactgagagcctggacgaaactgttgctgagggcttatagtgaagagagtgattaaaagctggaggaaaggaaactcttgctatgttat

SEQ ID NO: 237701 - DNA, 573 bp, Homo sapiens
tattttgtccaatagactcaacagaattgatgctacatgactactgttttctctgctgggacactcattttggaggactgagttatcacttaagatgtctgattgccctgtaaggtcacatggatgaactatgtaaaagaactctgaacaccagtctcagttggaaacattttttattcatctcaacacaggcactaaacatatgggtgaaatgcctcttgatgatcatagcctcctccacttcttgagtcactccctgccaagtcttcagagaattgtagcattgataagatargcctcctctgtttgacagttcctggccagcagagtccatgagccagtgtaataaaatggttgttttatccaactaaattttgttgtgattagttacacaggagtagttactacaacataatttggcaactgaaatatatggctttatctttgggaccaaatgctggtgggatgctagaagttatgaggtgactgagagcctggacgaaactgttgctgagggcttatagtgaagagagtgattaaaagctggaggaaaggaaactcttgctatgttat

SEQ ID NO: 237702 - DNA, 540 bp, Homo sapiens
tatggatgctcatgcttcaatcctcccatgagcagaaacaggctaagttttaataggtcttccatttatttagccttggctggtgtttatgcrtcaaaagataagtctaaaaaatattaaatagcttgtgtgcttcctttttaagttacaattatttaaattttagtttaacttagttttgtttttaatgatttgtttgttttgggattcagagaagatgacaggaataggaaggaatgtagtgcagacaagtagtttggagtttaataaaactaaattgcacctatatatttgacttcacctttaatttgctgtgtgatcttgagtacaagggcctgttacaataaggtaggaactgactgatgcagagatgtcaactcgcagggtgaaataatttgtttaaattttatttagtgacagaagatatagaaacctccgtcaaccgagacagctacaagaagaaacattgtggcatactcccaatcatgggagcctaccaaattcccaaagccctcaaggaggtacacagctccagataat

SEQ ID NO: 237703 - DNA, 540 bp, Homo sapiens
tatggatgctcatgcttcaatcctcccatgagcagaaacaggctaagttttaataggtcttccatttatttagccttggctggtgtttatgcgtcaaaagataagtctaaaaaatattaaatagcttgtgtgcttcctttttaagttacaattatttaaattttagtttaacttagttttgtttttaatgatttgtttgttttgggattcagagaagatgacaggaataggaaggaatgtagtgyagacaagtagtttggagtttaataaaactaaattgcacctatatatttgacttcacctttaatttgctgtgtgatcttgagtacaagggcctgttacaataaggtaggaactgactgatgcagagatgtcaactcgcagggtgaaataatttgtttaaattttatttagtgacagaagatatagaaacctccgtcaaccgagacagctacaagaagaaacattgtggcatactcccaatcatgggagcctaccaaattcccaaagccctcaaggaggtacacagctccagataat

SEQ ID NO: 237704 - DNA, 540 bp, Homo sapiens
tatggatgctcatgcttcaatcctcccatgagcagaaacaggctaagttttaataggtcttccatttatttagccttggctggtgtttatgcgtcaaaagataagtctaaaaaatattaaatagcttgtgtgcttcctttttaagttacaattatttaaattttagtttaacttagttttgtttttaatgatttgtttgttttgggattcagagaagatgacaggaataggaaggaatgtagtgcagacaagtagtttggagtttaataaaactaaattgcacctatatatttgacttcacctttaatttgctgtgtgatcttgagtrcaagggcctgttacaataaggtaggaactgactgatgcagagatgtcaactcgcagggtgaaataatttgtttaaattttatttagtgacagaagatatagaaacctccgtcaaccgagacagctacaagaagaaacattgtggcatactcccaatcatgggagcctaccaaattcccaaagccctcaaggaggtacacagctccagataat

SEQ ID NO: 237705 - DNA, 607 bp, Homo sapiens
cttccctccactaaggtactatttaaccactgaacttgtaatacattaaatggaaccagagtggctctaaggaattaaggctgtttcctaacttacttcaaggctcattaagagaagagtttccaaaaagtgtgtttccagtttatttctagtttaaacttctcttatactacttgtttgaattaatagggcttcacaaatatcttttcgggcattggtgagatacttaagaacaatagcattttatataaatatactaaactgaggtggtastttggtcatcacatggtttagctgcttccctacccaagtctcatcttgaattgtagctcccataatccccatgtgtcatgggagggacccagtgggaggtaatttaatcatggaggcggttaccctcatgctgttgtcatgacaatgagtgagttctcatgagatctgatggttttataaagggctttcccctcttttgcttggcacgtcttgcagctgccatgtgaggaaggacctgttttcttccccttctgtcatgactctaagtttcctgaggcctccccaccatgctgaattgtgagtcaatgaaacctctttcctttataaattatcc

SEQ ID NO: 237706 - DNA, 607 bp, Homo sapiens
cttccctccactaaggtactatttaaccactgaacttgtaatacattaaatggaaccagagtggctctaaggaattaaggctgtttcctaacttacttcaaggctcattaagagaagagtttccaaaaagtgtgtttccagtttatttctagtttaaacttctcttatactacttgtttgaattaatagggcttcacaaatatcttttcgggcattggtgagatacttaagaacaatagcattttatataaatatactaaactgaggtggtagtttggtcatcacatggtttagctgcttccctacccaagtctcatcttgaattgtagctcccataatccccatgtgtcatgggagggacccagtgggaggtaatttaatcatggaggcggttaccctcatgctgttgtcatgacaatgagtgagttctcatgagatctgatggttttataaagggctttcccctcttttgcttggcacgtcttgcagctgccatgtgaggaaggacctgttttcttccccttctgtcatgactctaagtttcctgaggcctcccmaccatgctgaattgtgagtcaatgaaacctctttcctttataaattatcc

SEQ ID NO: 237707 - DNA, 583 bp, Homo sapiens
acattcttgtattttctcagataaatttccacatagttcctggtgaatatgaatgggcttggagctgtgagacatcacggagagccagaggacttcctcatgatgaatttcacagccaaacagtctgagcctgcttcagactgccttccacgtgtgcatggcaacaatgtggagacatgaataggctgagtcagttcttctcttacttctggaaaattagctttgggaaagccaagcagcatctaatgcacacacatttcttggcatacaaaagcaattggtctttagggagataacatttttcctttaaatcaaggtgaaataaagatctgaaattagccattttaatggcacatgcctcaaaatgtaattgcattaaaaatttctagattggcaatatatgaaaaaagtctcatacaaatcattgaaaaaaaaagaaacaaagacaaatatttttccttctatagattctagcayaagtgtagaagtaagtgagaaaacatgtggtatcttttgctatttttttcccttttggaaattactatcactgtagagttttaaggcaaggtaaaaaatacatttt

SEQ ID NO: 237708 - DNA, 596 bp, Homo sapiens
tgttcttaatcaggaaaggctctacttactcaggaaagttcgataattgcctaggataaatgcaagtaatttggagggagaggtggaatagcatggacaaaggtacagagattaaagaaagaggaaccaggacaacaaaacaagcaagtttgtcaagtcagatagattgtatatmagggaagaaatatattactatttgaatttgaaggagggaggtggaagagagacgttgaagaaatcttgaaatcccttaccaaggatttgccctctttaccatttcaaggcaccttatgtgcttgtggtgcactatttgtaaatgttataatcacccttagatagatgccaatggaaagatctactggcaagaaagggaggaaagaacagctatttttaaatcattatttctattctgaaaatttggttgacctttcttcctgctatgaatgcttacatagttttatataaccattgtatttgtagcaaaatggaatgataaaacatagcttatgatttgttataataaaaagagctgtgagtcctactgtttatgtaggacaagtgctgtggcagggacactgcctgctgtggcagtgaca

SEQ ID NO: 237709 - DNA, 499 bp, Homo sapiens
  misc_feature (1)...(499): n = A,T,C or G
accctctttanaaatttatctaatgtctaagaaggaaataatatcaattctatagaacttttcctagcaaatataagaaaaaagaatcttaccactcattttatgaagccagcattgcattgatgcaacaactagacaaaacttaacagggaaaaaaatatacaccaacccyatttctcaacataaatgcaaaatcccctaacacaatattaacaaattgaatctggcaatacataaaaagaatgatacatcatgatgaagtggaatttacttcaggaatgcaagtttagtttactacctaaaaacaattaatcaaataaccatattcagagggtagattaaaaaaagaaaagccatactatcatctcaataaaggcattcaacaaaatttagcacttattcttgataaaaacgaaataggagaaacttttctcaacctgatgaagtaaagttgtaaaaaaatcttgtgctaacatcatatgtatggtgaaagattcaa

SEQ ID NO: 237710 - DNA, 503 bp, Homo sapiens
agttatgtatacagaatctataaataaatcttgtaaatttacaggaaaccaaacaacctcattgaaaaataaacaaacaatttgaacagagaatttactaaagaagatatgctgatraccaatgagcacataaaaagacatataatatcattaatcactggaaaacacaaattgacactataatgatatactgttacacatactcttagaaagggtaaaattagaaagactgactataccaagtgttggtgaaaaagtagagtaattttaactcatgcactgtcagtgagaatgtaaaatattacaaacacttggtaaaacattttggaaatttcttatacagttacaatatatttgtcatataaccagtagtttcactgtcgggtatttattaaagaggaataaaaacaaaaaaaaaagtccccaaatatttaaggctgcttaatgcatagtagcttcacactggaaagaaacttaatagtcgccaatttgtgaaaattgtg

SEQ ID NO: 237711 - DNA, 580 bp, Homo sapiens
catgactattgtgaaaaaatatgtgtatgtctacatatacatataaacagacatatatgaacatatgtgtgcatgtctacattttcaatagaccttttttaaagaagttttagattcacggcaaaaaagagcagaagtaaagagtamcacatatggcctgaccctccacccccatccacgtccactgtcaacatccctcaacagagtggtaggtttattacaatcaattaatctacattgacaaattatctgcccaagtccacagtttacattagtggtgtttactcttggtgttataaattctatgggtttggacatatttatccctacatgtatctactactacagtatcccacaaaatagtttcaccaccctacaattcactgtgctttacctatatttccctccccactaactcctgacaaccatggatctttttaccatctccatagttttgccttttccagaatgtcacatagttaagattctacagtatgtagccttttcagattggtttctttcgcttagtaatactcatttaaggttgttctatgtcttttcatgacttgatagctcattt

SEQ ID NO: 237712 - DNA, 523 bp, Homo sapiens
gtgtaggtttttgtataaacataatttttcaaacactttggataagtagcaatgagytcaattgttgaatcatatggttagagtatatttagatttgtaagaaactgccaaactgtctggtaaggtgactgtactattttgtattcccaccagcaatgaatgagagtttctattgctacacatccttgtcagcatttggtgttgtcagtgttgcagattttggtcattgtaatagatgtgtagtggtatctcattgctctaacttggatttcccggatgatatgtgatctggaatatcttttcacatgcttatttgccatctgtatatcttctttggtgaggtatctgttaaggtcgttggctcattttgaaataattttttaaaattattattattgttgaattttcatggttcttggtatattttggataacagttctttatcagttatgtttgttgtaaatatgtcatcctagtctgtgtcgtatcttctcatttcctgacaatgcattttgcagaacag

SEQ ID NO: 237713 - DNA, 611 bp, Homo sapiens
cttgtcagcatttggtgttgtcagtgttgcagattttggtcattgtaatagatgtgtagtggtatctcattgctctaacttggatttcccggatgatatgtgatctggaatatcttttcacatgcttatttgccatctgtatatcttctttggtgaggtatctgttaaggtcgttggctcattttgaaataattttttaaaattattattattgttgaattttcatggttcttkgtatattttggataacagttctttatcagttatgtttgttgtaaatatgtcatcctagtctgtgtcgtatcttctcatttcctgacaatgcattttgcagaacagaagtttagaagtttttaattttaatgatgttcagctcctttattttttcataaatcatgcctttggtgttgtatttaagaaatcatagacatccccaaagtcatcttgattttctcgtatattatcttctaggaatttcacagttttgcattttacatttaggtctgtgatggtactgctaaagtcaactaccatttgagataggtactaagaagggtataaattctgtgtctagatactttaattttcttcaggtggatgtctagttgttc

SEQ ID NO: 237714 - DNA, 607 bp, Homo sapiens
ttgtttttatttttaatttgttaaagtatgtttcctggctaaaaatgtgatctgtcttggtaaatgttccatttgagctaaagaatgtgtattctgctatcgctggatggtgtattctataaatgtcagttaagtcaagtatattgatggtgttattcacgtcaactttatctttgctgacattctgtctgcttggtgaataaattactggcagagagatgttgaagtttccaattataacaaagaatttgtccatttttccttgaaattctgttagttttttttgcccatgtattttgagacactactgttaaattcatatatatttagagctgttatgtatttttaaaaaactgcaacttttattattgtgttacattcctgtttatccctgataattttctttgtttcaaagtctgccttgtctgaaattaatacagttacttcagcttttctttaggtagcattaatatagcatatatttcgccatctctttttttaaactgtctttatatttaaaatacrtttcttgtagccaacatatagtttgggttttgaaatcaattctgacaatctgtcttttaattgatgtctttaggccattcat

SEQ ID NO: 237715 - DNA, 538 bp, Homo sapiens
gttcttgtatttcttttgattttttcttagagttcccttctctattcttgcattaaccatatgtatttcatgttgcctactttttttcccttagagcacttaacatgttaatcatagctgttttaaatttyagtaattacaacatctgtgtcatacctgaatcagattctaatcttttcattgtctctccaaactgctttttcttgtattttggtgtcttctaactttttgtttaaagactaatgcggtatctgtattagaaattgatgtgcctaagcctttattgtgaagatttacattaacgtgcataggagctaggctctatttaatgtttgttgtatccacaggtaccaggggtttcaaattcctctagtgtccttatttttgtctccatgcttaattcttgtcatccctatgtattcctcctctcagagaatttgagtcttgtaactctgttagctataattatgctgaagttttgattgtatgctagtcaagtatggagcattcaataattttccaattaaatcttagtttt

SEQ ID NO: 237716 - DNA, 496 bp, Homo sapiens
atttctttcaaatttttcattgatctatgcctatatttatggcagtaccatgctgacttaattagtgaggatttataatgtcttataatcacgtaggacaccaaaacctcagcaacaaaccttcacatgtactccctgaatctaaaagttgaaaaaacaaaacaaaaaacaaaacagatagtacatgttatctgattttgttttcttgttaaaatacgttatgatttctacataaatttctaaattatttgtaattcttaaaaagcttagtgggatttttattaggatgatattaaatttgtacactaacttggggagaacattttagctgtattagttttyggtggtatatctattttttggtgtatcaatttttttagaccttattttctctcagtgatatttggtaattttcattgtatagatatttatatattttaatgaagtttttctaagcatttattttgatgtattgtgaatgaaattgtttttaaac

SEQ ID NO: 237717 - DNA, 534 bp, Homo sapiens
caggtctgaatatttctgagaaacaagagcttcccttattaatctggccaagccacagctgaccctctaggggcttaaagtttatttgcttcacttacagagtctgaaggtttatagaagcatatccctagagttttactatcctcgtcttctgcgttacacatgatatattagacatcagtgtgttccttgtaccactttgtctataatgtttccagttttcttaggaaagttacatggggttttggaagcttagaaaatataayttctcttccatgcttctgtccatagaggcatagcaaatttataaaatatgaaacacgtcatttctaaaatattcctaacctgcttcctggtgtctttgactgatgagatggttcaactgaagctgcaaacacttgacatatttttatgccaaatttataataaaatgatatttttctaagaattaatgtatctccgctggtagaattgattagtattcataagcattttcattggcactgctaacaaagataattaatatgctttcaa

SEQ ID NO: 237718 - DNA, 572 bp, Homo sapiens
aaaactggggagataggcagaatattgataaacttaactccccaagcaaatagtataagtgcatgggtacactttttaaataatttttatatgcttacacatctgaaaatcttcaagtgtgtgagatacaattcagacctttgctttgccaattccttctgttaagatttttcaagttttccttcttatgagaaggaataggccatgattcacctggatggtttttgatagtatatactaaagtcaatattaaatcttatttgagccccatggatggatgattctatttatccacaagcaccacttcagattggtttggatgctaaatgaatggttcatttctacttgctaaactttcatgagtcagtgaatgccccattaactcytgagaacattattactcattcttcctagaatcaaaactggaatagtccatagctgcttttcatttactgtgtgatgttcattcaattatgactgttatgttgtctactgtaattgttgaaaaaaaatgactcattttctttatcaatactatcattgtgcatccattccagccattgtgttcactc

SEQ ID NO: 237719 - DNA, 572 bp, Homo sapiens
aaaactggggagataggcagaatattgataaacttaactccccaagcaaatagtataagtgcatgggtacactttttaaataatttttatatgcttacacatctgaaaatcttcaagtgtgtgagatacaattcagacctttgctttgccaattccttctgttaagatttttcaagttttccttcttatgagaaggaataggccatgattcacctggatggtttttgatagtatatactaaagtcaatattaaatcttatttgagccccatggatggatgattctatttatccacaagcaccacttcagattggtttggatgctaaatgaatggttcatttctacttgctaaactttcatgagtcagtgaatgccccattaactcctgagaacattattactcattcttcytagaatcaaaactggaatagtccatagctgcttttcatttactgtgtgatgttcattcaattatgactgttatgttgtctactgtaattgttgaaaaaaaatgactcattttctttatcaatactatcattgtgcatccattccagccattgtgttcactc

SEQ ID NO: 237720 - DNA, 566 bp, Homo sapiens
tacattggctatgaaacaactaagaacaatgatctatgggagatataaaacaaaatatataggctctatgactgtcccagcttactgcctggataaaattttcagaccctagagcaacgagggggatgacagacagtgctctgaagtcccctgggacaagtagacagagctgagataaagcrgagattaaggtggctagagttccccgagaaccagaaaatagagtgctacatagggagagcatttcagagatcatgagtcctagtttcgtattccactgagtactgatgagccagctcatgcatatgaagaaactacctgagttgggaaagagaaccactcaaagtaattaaaggggaaaaatccccagaactcacacaaataggtagagataaaaattacattttctgcgactgaaaaaatcacttatagaattaccaaaacattaattattgctgaatagagagtagtcaacttacagagacgggaataaaatctgctcaaaatgaaacacattaagaaaaaatgactaaaatattgacagagcaacagtgaactgtgggaca

SEQ ID NO: 237721 - DNA, 620 bp, Homo sapiens
cttaaataccaaaagaaatgaatgtctaccatgaattttaaatcttgattttaattgagcaaataaacacgaaaactagtagaagcgttcaaaagttgtgtgtgtactgctttgaaaggaaggaaagcagtgcgaaagtgactaattataattaaatactgagagatgaaaagcagtcttatgcacattctaattttaataaataaaaaaatactgccagtgaattttaaagccaaaggtgaatttctgccttatggtattgaagttggtattgtttctcttggaaaacatttacaaatgaacaatgytctgacacagttttatttaggaaagttatttctagtaaatagtctagcatgcattcctgtgtatttgtaaaagtacaatgcattgataaatttctcactgttataacagtgagaaaaataaaggaaaaccgtaagtaaatggttaaaaatcagaacagtaaagatacttttaaacttgtgtaaattttattagtttgaaatatgctggtgactattctgatgattaaatataatactgtatatatttaaactagaaaaataagacagtaagtgttgatgttattatttaggtttccttttaaatttattacc

SEQ ID NO: 237722 - DNA, 620 bp, Homo sapiens
cttaaataccaaaagaaatgaatgtctaccatgaattttaaatcttgattttaattgagcaaataaacacgaaaactagtagaagcgttcaaaagttgtgtgtgtactgctttgaaaggaaggaaagcagtgcgaaagtgactaattataattaaatactgagagatgaaaagcagtcttatgcacattctaattttaataaataaaaaaatactgccagtgaattttaaagccaaaggtgaatttctgccttatggtattgaagttggtattgtttctcttggaaaacatttacaaatgaacaatgctctgacacagttttatttaggaaagttatttctagtaaatagtctagcatgcattcctgtgtatttgtaaaagtacaatgcattgataaatttctcactgttataacagtgagaaaaataaaggaaaaccgtaagtaaatggttaaaaatcagaacagtaaagatacttttaaacttgtgtaaattttattagtttgaaatatgctggtgactattctgatgattaaatataatactgtatatatttaaactagaaaaataagacagtaagtgttratgttattatttaggtttccttttaaatttattacc

SEQ ID NO: 237723 - DNA, 524 bp, Homo sapiens
tgatagcctcactttaactacagatgtttgttgcgaatgggtcaaaaattttaaatgtcatgccatttgtaagccaaggagcagtttcattaatgtagggaatccaaaaactaatttttattttaaaactaatgacttttctgttgctgaaaaagtagtttaatatttgtgagagttattttacatttacatgctgattttcttcattatcattatttgttgtttcatgtaattctaatctatgtattaggcattttacaaagtatcgtacttctgacttactaattatcttaatttgtaaaaatctacatattttagaaaaaatgcatcagaaatgatgacggcaatgaactggctcatagaggtttctgcctaatttccttcatgtcaaataacagacatttttggtgctgacccatccaatcattattgatctacawcactaagtgcttttaaatagttactcttaccaatgtgacctgtattagagttctatcagggtcaaagaattttgactggctttt

SEQ ID NO: 237724 - DNA, 583 bp, Homo sapiens
ccatttcacttatctactgaagacttttagaagatgctgacaatcttcctttcctggatttatcttgggtaaatcaacaaaagattccatccttttagtttcataatctcctgattaccatgatcttcaatcccccttaatcactttcatgacaacattttggagttgtcaatcttgtattaattgctgtatttctgaatcttaaattcaaacatcctacaatgtcccatccttttaaaacactgatgcttgtttccttaacttcttaattttctgctcatcaatccccttctttctttacttaccttctttaactatctcagattaagtacactctattattttaaccacttccttacttgtrtctcaatatttaccttgttcttttgccttggtgaacccacccagcaagacacagccctggaagaacccatcttcaaactattttcagtgcttggaagaagaaagcatatactctacatgtgttgttggacttgctgatagactatttgtgtatatgggttgtataggcagagaaagggctgaaggaaagaagtaaatcaaggatgtttcctagatgccc

SEQ ID NO: 237725 - DNA, 583 bp, Homo sapiens
ccatttcacttatctactgaagacttttagaagatgctgacaatcttcctttcctggatttatcttgggtaaatcaacaaaagattccatccttttagtttcataatctcctgattaccatgatcttcaatcccccttaatcactttcatgacaacattttggagttgtcaatcttgtattaattgctgtatttctgaatcttaaattcaaacatcctacaatgtcccatccttttaaaacactgatgcttgtttccttaacttcttaattttctgctcatcaatccccttctttctttacttaccttctttaactatctcagattaagtacactctattattttaaccacttccttacttgtgtctcaatatttaccttgttcttttgccttggtgaacccacccagcaagacacagccctggaagaacccatcttcaaactattttcagtgcttggaagaagaaagcatatactctacatgtgttgytggacttgctgatagactatttgtgtatatgggttgtataggcagagaaagggctgaaggaaagaagtaaatcaaggatgtttcctagatgccc

SEQ ID NO: 237726 - DNA, 504 bp, Homo sapiens
taagacattccaatggaagtatcaacatagttaccgtcaatacataggtgtgctcccaacatcttaccagaaaactaaacaatagtaatgattatttgaaaatgaataataaaaactgagatctcacacacacacacacacacacacacacatacacacacacacacctattaaactcaaggggctattaaaccctgttcactgaaatttaggctgtatggcttacgtagtttaagcaataggaaatatccaaaaagctaaaataaacaaagaaaaactatatacattgagcattatttaacaacactgaatctggaaatatgcatgttaaaggatctctcatagcttttcctcaacacagaaataaagatcaatattattaattcaaatgctaaagtatgttagaaycgaccccaccactgaatccaaagatagatgtaaaagagattttatgttataactaaactatttttttggtagaatagcaagtagaaaattagaggg

SEQ ID NO: 237727 - DNA, 504 bp, Homo sapiens
taagacattccaatggaagtatcaacatagttaccgtcaatacataggtgtgctcccaacatcttaccagaaaactaaacaatagtaatgattatttgaaaatgaataataaaaactgagatctcacacacacacacacacacacacacacatacacacacacacacctattaaactcaaggggctattaaaccctgttcactgaaatttaggctgtatggcttacgtagtttaagcaataggaaatatccaaaaagctaaaataaacaaagaaaaactatatacattgagcattatttaacaacactgaatctggaaatatgcatgttaaaggatctctcatagcttttcctcaacacagaaataaagatcaatattattaattcaaatgctaaagtatgttagaacygaccccaccactgaatccaaagatagatgtaaaagagattttatgttataactaaactatttttttggtagaatagcaagtagaaaattagaggg

SEQ ID NO: 237728 - DNA, 536 bp, Homo sapiens
aacaacactgaatctggaaatatgcatgttaaaggatctctcatagcttttcctcaacacagaaataaagatcaatattattaattcaaatgctaaagtatgttagaaccgaccccaccactgaatccaaagatagatgtaaaagagattttatgttataactaaactwtttttttggtagaatagcaagtagaaaattagagggatgaaattccttcatattgaacatatatttgagaacagggatataacaacaattagtattcaattcctatgcttaggaagctacaagtatgttgaaagagacaggcacattcacatggctataaaacattaagtgatatatcacagttaatttcaatacagataacaacaacaaaatatggggaagcagtgttaaaaaagataagagaaagccaagggatgctatagaaaaaggtgacatttgaactcagctataaataaggtgactatattttcctatttatcctgcatatgtgtcttcacataacagccagactgatgttgttaaaaca

SEQ ID NO: 237729 - DNA, 596 bp, Homo sapiens
tttgttgtctgaaaaagtctttatctcaccttcatttttgaagaatattttcactgaattaagaataacaggttggcagtctatcattttagcactttaaagatgttccattatcttctggcttgcataatttctgtctatttttgcaagtgatgtgatttttcttctgacagattttttaaaacttaaaatttaaatgatcatacattaaaatggacctttttacttgttctcctacataaaaatatatttactaaaaaaagactggaaatgaatatacaaaatgataatgttcagaggcaagattacagataaaatttgggtcagttttcaagattttttgcaacagggctrcatggttttttgttgttgttggcgtgtttgtgttatttttaatagaatttgtttaattctaagtttgtatattttttccaatattttactgtggtacaggacataaaacataaaatttaccatattaatcatgtttaagtgtacaaggcagaggtattaagttcagtcataatgtacaactatcaccatcatccatctccataactcttattttgtaaaactgaaactttacacccattaaa

SEQ ID NO: 237730 - DNA, 604 bp, Homo sapiens
gtgagatttagcaaaataagtgaattatttttcccctaatgtgaaaatagaatctatcatttacaaaaacttgaaatgttacacaaaamatcactggtgtatgtctgtaaaatatttttaaagtgttagtgaccattttctttaaacaagataactaataacaactctaggaactacagctgctcactgctagttaggcagaaattatgcaaataactgaaaatgatacctgttaacaaaattgatgaaaactagttatcaaaaataggaagataaatgctttctgcagtcaatgtagttcattattaaacaacatagtaataaatttagatggccaggaaattttaccagttgagtctggtgccgagctaaaaataaaatgaaatttatttcaaaacaaaggtttcaagaacaggtattcaggacaccagataataaacaaaatggagaaaactaacttcccataaccatttattaaggaaaagcttgtaagtgcttagcatggaaaggaaccacaaatgctgcttgacttaaaatggggttatgtactgataagcccactgtaagttgaacgcatcttaagtaaaaaatttatttaatatag

SEQ ID NO: 237731 - DNA, 556 bp, Homo sapiens
ggctgtgcctggcttgcacactggctcagcccgtggcttgccaggtgtaccccagcctgcccatgttataggtcatacccatattcggmagttcccaagttcttgtcccacatctaagaagaatgaggatacattgccaattgaagggttaggaggacagagaagaagtttattaagtaacaaaacacatctcagcagagaagggacgtgagggtgatcaaccacccagagtcaggtggtttctctcccagtgtggctgagtccagggcttttatgggctcagaaggagtgtgtgctgactggtttgtgagtatgcaaaagaggttaaaacaaaggcaccactcaaaggtgggcacgacagtgtagaaaaccaattagggaagggtagttatatgtaaaataggtgaagggtgagaattaaccagaggaaagcaagctaaatgggaagaagttttctcaatcaggtccatggatttgacttatagcttggcttttgggctttaaactgtccttggcttggaggtggagtttcactcgagagtttcacccttatcta

SEQ ID NO: 237732 - DNA, 392 bp, Homo sapiens
tttgagataggatttcactttgtcatccaggctggagtacaggagtgcagtgaaacggtcttggctcactatagcctcaacttctcaggctcaagtgatcctctcacctcagcctccagagtagctaggactacaggcgcacaccatcatacctggctaatttttgtattttgtatagagacagggtttcgccatgttgcccaggctggtctccaactcctgagctcaagcaatctgcctgtcttggcctcccaaattgctgggattacaggcatgaactatggctccyggcctcttcctcttctttcaaagctaaggtctcaggctgaaaagaaattacagagaaagtgtttattattctgttatatactttgagttgagagggaagaaaa

SEQ ID NO: 237733 - DNA, 628 bp, Homo sapiens
gttaaagtgcagcctgattaatgcttcattttaactctatttctgtccagaattcttgttaacgctgtgaagacggcttcaatgcctcttagctgttcccaacccacattgtctcacctagggttttctgcttttgctgttccttctgcctagaaggctttcccccarcaatcagcatggcctggatgctcaccttgttctggtctctgcttacattttgttttgcagagattgttgccaggtccttctccactgccttacctggctttgcttttactctgataatttgctgttacccgtcattgtatcgtgtttgtgtctcttccactggcaaacatgccccatgccaactttgtctcttttgtctgacactagtttattagaccctggaacagtaacaagcatagggtagggctactagaataaatattttccagtaaatatctatctattcaaaaaaatgaatgactggttgaagggatgaagcagatctcttttatttgattggtttcaataatctctgtgccaagcagtttactctcatatttagtccttttaaaaacagtgtggctactgctatcctccggattttacagacaaaggaatgcaagtgcagagaagacaagga

SEQ ID NO: 237734 - DNA, 589 bp, Homo sapiens
ggtttttcacagaggtgactgaaagttacaacatgaccattctgcgttagttctcaggtgagcacagatccttaacacagtgtttgctgaaaaggaacactgccaggtgatgttttaatgcaaattcccatttatttacaggatatcaggcaagcagtgaaccaaggagatcaaacaagccctggctttctctgttctcagcatggcctgcctgcttctgctccttatgtctcccatttgcaacttgctctaagtcaacacagattctgcaaacaatcattccataattttcttatctgattcttccagtgctttctttgtgactcaaggactgtctgcaaggacaagtgcaggtgaagggtggagtctctgggacaggtgtggctgagtggccatgcaagatgaggtatgagttctgctattggcacaatgacccgggttgtgtcgagccagccactagggccttccaccaaccagctgctcacagggtcttccatatgaacatcacgtatgtggtggtgcygtggcacacgaaggtccacaggagaccatcacttggtacttcacactgcagaaatcctaaagcttt

SEQ ID NO: 237735 - DNA, 609 bp, Homo sapiens
gaagcttgggggatttgggggatttcatttcttagattccttctagtctacaaaatatctgcattcaaagttgcaggttcctaatcctcccatgtcctaattttcacataggagaattgatgaagctataaattaaacttataatgtaattctgcaacatgtacaatcacatttggaatcttattttcagccatatctgctttatggctacaagaattaagggataattttagtgcttcaacgtactctctagttctctgaccgtgccttattctgaaagyttaagtctttgaatctgtcattttctttgtgtaagctctccagtttcatcagaaatagctagtctatctcagtctttacagtcactgtcactgtcgtgacagtcaagtaccctagccacttggccttccaaagcctggtctttaataggcactacattccaaacattcacaagtgatgatttgagaaattgtaatggcaccacaaggcacaaatttacaatatctcatttcccacatgtaatgagatgatcactgcactcttactcaacaggtcagcaacccaaccccaggattccatttatgaggttctctttctgcaagcactcct

SEQ ID NO: 237736 - DNA, 506 bp, Homo sapiens
tggggctgggggacgcggggagaggtgaaggtcaagtggccgcatgaggcccatagcactctctgccttaggttgctcgctcccaccatcccaggggtgatgccaagtgattccaaatagtggagctcccaggtagctcaagaactgattctaacattcaaactgctttttttttttttaaattagttacctaaacggtcattatggagatgcagctgcccagaacaagccagaccaagtggccatgaggctgtcttctaactctggggtaatgtcctgcagcyggggcctggctgggttcttctcattgttggctctttaactaaaaccagtgttgctgaatgtgactgtgaaattggcataatcaagatcacttacctcttcctaatggcatcctgggtgtcagtgctggtgatggctggtactgctgacggtttcccactttctgcactcctgagaatctcggcaggcgtacctagaccggagcttctccaacttctccgagc

SEQ ID NO: 237737 - DNA, 383 bp, Homo sapiens
tggcatggtcgtgttgctcaaatattcataaaagatctacccttttctgcacaatccctccagcatgctagcaagtatctgtaggatgactatacttggtttcttggaaagaatgtgacccaayggggaagtgagacaccgctaaaaatttacttagtttttatgcctagtgttccattatcggaatgctaagcgtgtgggaattatttatgtcctactgctcaaggtcatcactaaggtctgattgcaaaaattccaaaaaatgcaacctcaggcataaatgggttaatgtctctgagaccagagccctaccaaagttctgttctactaatgcagaacacaatggtttgggaagggtcagtgacaactatctgaggtggagt

SEQ ID NO: 237738 - DNA, 504 bp, Homo sapiens
gccttgatcagcagagagaactaactacctagtttctacagctttgcttactgcctctaaagatagacattaacaccttatttttgaatattaatttagagtttacaagggccctataaccttaattcatctcatctctgtaacagtcctgtgaagtaagaattatggtacccatttcatggrggagaaaactcagggaactcaggggacaatcctttggtggtatctctagttggtggcaaaaccaggtctgggattctgttcccttaactcttgagtgtcactactcagtggttttgttttccaaggaagaaggcctggatattatggatttttttaaaaaaatcaaggtaaaggaaaatatgtaacaacagaaaataagtgtttataatatcatggtgaatttagaaagggtaaaattgcgtatgtgattataattatgtgaaaagatgcatagcgactataccaaaattctctccagggcatgacagagtcgtgggaatc

SEQ ID NO: 237739 - DNA, 504 bp, Homo sapiens
gccttgatcagcagagagaactaactacctagtttctacagctttgcttactgcctctaaagatagacattaacaccttatttttgaatattaatttagagtttacaagggccctataaccttaattcatctcatctctgtaacagtcctgtgaagtaagaattatggtacccatttcatggaggagaaaactcrgggaactcaggggacaatcctttggtggtatctctagttggtggcaaaaccaggtctgggattctgttcccttaactcttgagtgtcactactcagtggttttgttttccaaggaagaaggcctggatattatggatttttttaaaaaaatcaaggtaaaggaaaatatgtaacaacagaaaataagtgtttataatatcatggtgaatttagaaagggtaaaattgcgtatgtgattataattatgtgaaaagatgcatagcgactataccaaaattctctccagggcatgacagagtcgtgggaatc

SEQ ID NO: 237740 - DNA, 504 bp, Homo sapiens
gccttgatcagcagagagaactaactacctagtttctacagctttgcttactgcctctaaagatagacattaacaccttatttttgaatattaatttagagtttacaagggccctataaccttaattcatctcatctctgtaacagtcctgtgaagtaagaattatggtacccatttcatggaggagaaaactcagggaactcaggggacaatcctttggtggtatctctagttggtggcaaaaccaggtctgggattctgttcccttaactcttgagtgtcactactcagtggttttgttttcyaaggaagaaggcctggatattatggatttttttaaaaaaatcaaggtaaaggaaaatatgtaacaacagaaaataagtgtttataatatcatggtgaatttagaaagggtaaaattgcgtatgtgattataattatgtgaaaagatgcatagcgactataccaaaattctctccagggcatgacagagtcgtgggaatc

SEQ ID NO: 237741 - DNA, 504 bp, Homo sapiens
gccttgatcagcagagagaactaactacctagtttctacagctttgcttactgcctctaaagatagacattaacaccttatttttgaatattaatttagagtttacaagggccctataaccttaattcatctcatctctgtaacagtcctgtgaagtaagaattatggtacccatttcatggaggagaaaactcagggaactcaggggacaatcctttggtggtatctctagttggtggcaaaaccaggtctgggattctgttcccttaactcttgagtgtcactactcagtggttttgttttccaaggaagaaggcctggatattatggatttttttwaaaaaatcaaggtaaaggaaaatatgtaacaacagaaaataagtgtttataatatcatggtgaatttagaaagggtaaaattgcgtatgtgattataattatgtgaaaagatgcatagcgactataccaaaattctctccagggcatgacagagtcgtgggaatc

SEQ ID NO: 237742 - DNA, 531 bp, Homo sapiens
agccttgatcagcagagagaactaactacctagtttctacagctttgcttactgcctctaaagatagacattaacaccttatttttgaatattaatttagagtttacaagggccctataaccttaattcatctcatctctgtaacagtcctgtgaagtaagaattatggtacccatttcatggaggagaaaactcagggaactcaggggacaatcctttggtggtatctctagttggtggcaaaaccaggtctgggattctgttcccttaactcttgagtgtcactactcagtggttttgttttccaaggaagaaggcctggatattatggatttttttawaaaaatcaaggtaaaggaaaatatgtaacaacagaaaataagtgtttataatatcatggtgaatttagaaagggtaaaattgcgtatgtgattataattatgtgaaaagatgcatagcgactataccaaaattctctccagggcatgacagagtcgtgggaatcgctggaacgtttctagaggtaaagtt

SEQ ID NO: 237743 - DNA, 575 bp, Homo sapiens
tctctgcagggacgtggatgaagctggaagctatcatcttcagcaaactaacaggacgagaaaaccaaacaccgcatgttctcactcataagtgggagctgaacaatgagaacacatggacacagggaggggaacaacacacacgggggcctgttggcgagggagggggtgggagactatcaggataaatagctaacacatgtggggcttaatacctaggttgataggtgcagcaaaccaccatggcacacatttaactttgtaacaarcctgcatcttctgcacatgtatcccagaacttaaaataaaataaatataaaaaaattaaaataggtatatgttttaaatatacaaatatttatgtttaaataaataaatatgcatatgttttaataatatatatatttaaaagcttgggttctgggctccagtcaagcacatttgaatgcccactccactgctgtagttctatgatgtttagcaggctgcttagcttctctgcacctcagtttcctgctctgcaaaatagggttaaaaatagtacccatccccaaaagtggcataagaaatttata

SEQ ID NO: 237744 - DNA, 575 bp, Homo sapiens
tctctgcagggacgtggatgaagctggaagctatcatcttcagcaaactaacaggacgagaaaaccaaacaccgcatgttctcactcataagtgggagctgaacaatgagaacacatggacacagggaggggaacaacacacacgggggcctgttggcgagggagggggtgggagactatcaggataaatagctaacacatgtggggcttaatacctaggttgataggtgcagcaaaccaccatggcacacatttaactttgtaacaaacctgcatcttctgcacatgtatcccagaacttaaaataaaataaatataaaaaaattaaaataggtatatgttttaaatatacaaatatttatgtttaaataaataaatatgcatatgttttaataatrtatatatttaaaagcttgggttctgggctccagtcaagcacatttgaatgcccactccactgctgtagttctatgatgtttagcaggctgcttagcttctctgcacctcagtttcctgctctgcaaaatagggttaaaaatagtacccatccccaaaagtggcataagaaatttata

SEQ ID NO: 237745 - DNA, 575 bp, Homo sapiens
tctctgcagggacgtggatgaagctggaagctatcatcttcagcaaactaacaggacgagaaaaccaaacaccgcatgttctcactcataagtgggagctgaacaatgagaacacatggacacagggaggggaacaacacacacgggggcctgttggcgagggagggggtgggagactatcaggataaatagctaacacatgtggggcttaatacctaggttgataggtgcagcaaaccaccatggcacacatttaactttgtaacaaacctgcatcttctgcacatgtatcccagaacttaaaataaaataaatataaaaaaattaaaataggtatatgttttaaatatacaaatatttatgtttaaataaataaatatgcatatgttttaataatatatatatttaaaagcttgggttctgggctccagtcaagcacatttgaatgcccactccactgctgtagttctatgatgtttagcaggctgcttagcttctctgcacctcagtttcctgctctgcraaatagggttaaaaatagtacccatccccaaaagtggcataagaaatttata

SEQ ID NO: 237746 - DNA, 587 bp, Homo sapiens
tttaatgcataaatagctttatccacgttgggaacgcatttcctgttttgacttcttctctaaatatatatatatatatatataatttttaaattataggtttacgtcaggaggacaatttagtcaagtatgactttcttccccaaacatgtcccagttgccacacataaactatggaatgtgaggaggctcagagaatgcacgaagggaggcatcctcctcctcgccctccagttacaacattttaaaatcatctctctctctactctttttctgtagcgacaaagtctamagaggagctgctctctaagcaaaagttgtaaagaccagaaccttagttgataccaacttaatagaaaaatattcaaaatcctgctgtagagggagaaagttccattaggagggggacttttcttaggtccagcgtggctagcagggcacaggcatttcttctgcaatccctcagaccacttgcttattgggggccgaagttcccaggcaatagcagagaaggaagctgacatctccagagagctgggctgtgtcgtttgtcatgcagctgcgcagaggagcaacccaagaaggtt

SEQ ID NO: 237747 - DNA, 587 bp, Homo sapiens
tttaatgcataaatagctttatccacgttgggaacgcatttcctgttttgacttcttctctaaatatatatatatatatatataatttttaaattataggtttacgtcaggaggacaatttagtcaagtatgactttcttccccaaacatgtcccagttgccacacataaactatggaatgtgaggaggctcagagaatgcacgaagggaggcatcctcctcctcgccctccagttacaacattttaaaatcatctctctctctactctttttctgtagcgacaaagtctacagaggagctgctctctaagcaaaagttgtaaagaccagaaccttagttgataccaacttaatagaaaaatattcaaaatcctgctgtagagggagaaagttccattaggagggggacttttcttaggtccagcgtggctagcagggcacaggcatttcttctgcaatccctcagaccacttgcttattgggggccgaagttcccaggcaatarcagagaaggaagctgacatctccagagagctgggctgtgtcgtttgtcatgcagctgcgcagaggagcaacccaagaaggtt

SEQ ID NO: 237748 - DNA, 480 bp, Homo sapiens
ccgtttacctattaagttaggttacaattagttattagttcacaagcactcaaatatagaagtatgaagttcttctcaggccatatttagttagctttaataggtgccccaagtgggaagaccagaaaagcaacaycctttaaaaaatggtgcctacctaggctattcctttgtgagtatgcacccatttctttcataatgtttacaccattccaaagagagaaagaaaaggaaagaagagaaagaaagaaagaaaaagaaagaaagaaagaaagggaggaagggagggtttattggaagcaattatcagtcttacacagttgatataagctctgagaagtttctatgaccacattctagcacatttcttttctttcgctgaaaatgcgtttggacattggcctataagctgcaaaacaacaaatacagctttagtctttcaaatagattccacaatgacaagtactctcctaaggaaaa

SEQ ID NO: 237749 - DNA, 594 bp, Homo sapiens
ctgtgtgaaagtgtgaggaattttgaagtcccatgataaataaccgacagaggctttgcttctaacaattcaacttgctcattctgtactttcatagcccagagtgaaaaattgctctaaatcactcatgagttccttcacccgagtagtggccagctcaccagctagatccaaccctgggagggacagggcacttagacaaggtggctgctgacaccacactgaactcacagcatccaaccccagtttacatacttaaaatgttgccaactcctaagaaaaccttgaaaaagagaactccattttccattctgaatgaaaaagtcatgagattttcttrtgatatatgaggagaggcagaaggcaaatatttctctttttgtccttaaaactaaaaggaaaaccaactgtatgttctcctttcaaagtgtgataaattgttgtattcactctcttctcaaaagacaaataccattttctgatttactagggtactagtgtgttctttgtggttggggccaaaatttgaataagccttgccaaatcactttaaagtttagcttgaatcttgtttaaattccttatcactcagat

SEQ ID NO: 237750 - DNA, 594 bp, Homo sapiens
ctgtgtgaaagtgtgaggaattttgaagtcccatgataaataaccgacagaggctttgcttctaacaattcaacttgctcattctgtactttcatagcccagagtgaaaaattgctctaaatcactcatgagttccttcacccgagtagtggccagctcaccagctagatccaaccctgggagggacagggcacttagacaaggtggctgctgacaccacactgaactcacagcatccaaccccagtttacatacttaaaatgttgccaactcctaagaaaaccttgaaaaagagaactccattttccattctgaatgaaaaagtcatgagattttcttgtgatatatgaggagaggcagaaggcaaatatttctctttttgtycttaaaactaaaaggaaaaccaactgtatgttctcctttcaaagtgtgataaattgttgtattcactctcttctcaaaagacaaataccattttctgatttactagggtactagtgtgttctttgtggttggggccaaaatttgaataagccttgccaaatcactttaaagtttagcttgaatcttgtttaaattccttatcactcagat

SEQ ID NO: 237751 - DNA, 570 bp, Homo sapiens
catagagatgtgttacaaggtatgaagctgaaacgataaaactaaattacttggccaccaagtagaccacaatgaattatttttttcttctaaagagatactgacatcagaaaattactgggaggttagggagctctttataaatgyatgctccttgagggtaaggggcatgactaattttcgcatgcctagtgcttcacagtacaccactcacagagttggtactcagaaaatgagagtatgttaatttcaaccttgaaaatatggagatgaaaggcaagattaacccaaggagaaaatgcctttgttttgctctcaatcatacataacaagtgcttaagacatatgcaccgaatgaatgaatggttgactctgaagctggcttggtacccttgattggattgttggacttagttcatagggaatcttcaaaccacctggagaaactatgctcactgaatgctgaacaaatgaactcggcaggacacggcctatcagtgagtccttggagaaccaagcaaataacaattttataacagattattttaaccactaggaagcccaagaatt

SEQ ID NO: 237752 - DNA, 472 bp, Homo sapiens
ttgttattgcagctgctggtatactggggaaacctaacaaaaatcaagtcagccaatggactttccccctgmttttttctttaaaaaattaggaagtaactaaactcctttcaaatggattatttaaaggagattcagacttcatttattgttcttctggattctcccaggtttcagtttcacaagtataagactcctgtgttcagactctttctgggaaccagagtatgatccctgtagctcctttccttttccaaatcacattctagacaagaaattggctccaaattattctatgcaattctagaatcatttttctatggcttcaaaaaccctattcagtgctcataaacttggtctatggatatttaaactccacaaggaaaattgatgcaaattgactgtgtctgtttatgtaatatgtccatctaggaatgggtttctctgccttctgagtttgtttggggtatgg

SEQ ID NO: 237753 - DNA, 539 bp, Homo sapiens
agcaatggaagcagacaccctagcaatagaatttttattggctctttccttcactcagtgtcttgatagaaaaacatctgcctaacatttaaaaccactagaagagtgtaattgggttgtttgtaacacaaaggataaatgcttgaggggaaggatgctccattctccatgatgggcttatttcacattgcatgcctgtgtcaaaacatctcaggtaccccataaatatatacacctactgtgtacccacaaaaattaaaatttaaaaaattttaaaaagaaaaayatctgcctaatctcagagcacagctcctggtgaaacttctgcctgtaggattttggccctgtggccttatctgtgatcctatgacacccactccctaccaccagccagtcgagtcctgtggaatctactctaggaaaatggctttgagagaatttccttctggctccctggtcagagccatggggagctagaagcttcctccttccatttggacagacccttgacaaatcatttctattattattattgttgt

SEQ ID NO: 237754 - DNA, 420 bp, Homo sapiens
cctggccaatatgaaaccccatctctactaaaaatacaaaaattagctgggcgtggtggcaygtgcctgtaatcccagctactcgggaagctgaggcaggagaatcgcttgaacccgggaggcagaggttgcagtgagccaagatcgtgccctgcactccagtctggtgacagagcaagactccatctcaaaaaaataaaaataaaataaaatcaaagcttgaagttcttacaccatggcaccagcaaagacatgtgctgtcttgtcactgtgcccaacagaacagatgacttctttcccatatcccacccgatgatgttctgagatggttttgaaatgttgtctagaccacagtgggcctgtcttacaaaccgcacctctgtcagtggtgtacccacacccgtgtcactctatccgtgg

SEQ ID NO: 237755 - DNA, 622 bp, Homo sapiens
cagtcctcttctaagtgagtaacgtatttttgacacttggaaaaaaaagaaacaaaattcagcctccatggggttgaatagtttaagtggcaaatgtgctttgatggaaaaatgtttgagcagcaggtcactctggttcactggtgccgtggtgggtttagccatagagttaaattggtttactcatagtctgaacttggccttgaacaagcccaagagtacctaagctttacctcatggtgcttgtgaatttggactgttaattagcrcagaatcaatctcctaccccaaatgctgtgtcctggtgggaattttcctgggatggtaggaaaagaagggcaggaaatttgagcagccatccttgattgctgcctaggttttccagaaaacttcctacccctggggagacaattcggggtcaggttatcatgtagcagtgctgcaggctattgtgagaaactttcctttctgcctgtgcctgctacctttggtgaaagttactgctctgtccctaggtcacatttacttaataaaatgccaacctggaacccaccagcgggcaaggtgaccccatggggcagttacactattctagggtagaagagtttcaataaaatgctgc

SEQ ID NO: 237756 - DNA, 622 bp, Homo sapiens
cagtcctcttctaagtgagtaacgtatttttgacacttggaaaaaaaagaaacaaaattcagcctccatggggttgaatagtttaagtggcaaatgtgctttgatggaaaaatgtttgagcagcaggtcactctggttcactggtgccgtggtgggtttagccatagagttaaattggtttactcatagtctgaacttggccttgaacaagcccaagagtacctaagctttacctcatggtgcttgtgaatttggactgttaattagcgcagaatcaatctcctaccccaaatgctgtgtcctggtgggaattttcctgggatggtaggaaaagaagggcaggaaatttgagcagccatccttgattgctgcctaggttttccagaaaacttcctaccccyggggagacaattcggggtcaggttatcatgtagcagtgctgcaggctattgtgagaaactttcctttctgcctgtgcctgctacctttggtgaaagttactgctctgtccctaggtcacatttacttaataaaatgccaacctggaacccaccagcgggcaaggtgaccccatggggcagttacactattctagggtagaagagtttcaataaaatgctgc

SEQ ID NO: 237757 - DNA, 612 bp, Homo sapiens
actggcctggtggtgcacacctgcagtcccagctacttaggaggctgaggtggaaggatggcttgaacccaggtatttgaggctgtagtcagctatgatagtgccattgtactccagcttgggtgacagagggagatctctctctctgtctctgcctttctctctctctctctctctmtatatatatatgtatgtatgtatgtgtgtgtatatatatatataaatatatatgtgtatatataaatatatatacttgtatatatataaatatatacgtgtatatacatataaatatatatgtatatatatttaaccagcaaacgcatttatactaaacaagcacaaatctcacctccttgcgttttatatgttccactggtgacgatgctgaagaacaacagaaagagctaaatggaagagaacaggtttcattgtagatgttcatttggtcattcatcaaaaccatttgcaaaagcaaggcatgttcctaggtacttggagattcaaaaatgagtacaatcctgctccctcccttaggaagcttacagtttagaagatgagatcgccaagtgtgcagaatcacaaagttatgagcgggaaagtgatagatgc

SEQ ID NO: 237758 - DNA, 612 bp, Homo sapiens
actggcctggtggtgcacacctgcagtcccagctacttaggaggctgaggtggaaggatggcttgaacccaggtatttgaggctgtagtcagctatgatagtgccattgtactccagcttgggtgacagagggagatctctctctctgtctctgcctttctctctctctctctctctatatatatatatgtatgtatgtatgtgtgtgtatatatatatataaatatwtatgtgtatatataaatatatatacttgtatatatataaatatatacgtgtatatacatataaatatatatgtatatatatttaaccagcaaacgcatttatactaaacaagcacaaatctcacctccttgcgttttatatgttccactggtgacgatgctgaagaacaacagaaagagctaaatggaagagaacaggtttcattgtagatgttcatttggtcattcatcaaaaccatttgcaaaagcaaggcatgttcctaggtacttggagattcaaaaatgagtacaatcctgctccctcccttaggaagcttacagtttagaagatgagatcgccaagtgtgcagaatcacaaagttatgagcgggaaagtgatagatgc

SEQ ID NO: 237759 - DNA, 554 bp, Homo sapiens
tgactggtctcaaatgcctctaggattcaccctgatgaccaccaatcagttggatgctggcaacctccagttactcaatgctagtgacccacacacagtttccctaacgtgaaaactaacgtgaatcagaatccacggcctctgaaaacccagacaagagccccttttccagttgaagcagtggtgctaaatagtctgaggttgcagaaactactaggggtattgtatgtgaagaattgtaaggagtgaagttggaaggggatctgtgaatagcagcagtacaagatgcttcagactctagtccccactcactctagctgtcactttaataatttactaacactttgtttccatttcctcatttataaaacagactgtgaaaattaaaccttacttcatcagactacaataagaattgaatgagataaaatctgccatgcatttacaacagtgcctgaaatatagtaagcacttaataatagcaactctttttactattccttgggagcaagaaagatctccayctctacttcttggctttctgagtattttcc

SEQ ID NO: 237760 - DNA, 461 bp, Homo sapiens
ggtgacccacccgcctcagcctcccaaagtgctgggattacaggcatgaaccagtgcacccagctagaaaaggtgctcttttctttgtccttccctgcctttgttcgcttcctaagtggtaccattcttggccaggtacaccattgtctctttgaaggtaattaaacagattgtataagatgtcattaagttttatcacaattgcacacaaggacagactattggacacaaccacctaagtacatacgtcctagatacttaggtggccatgaagcacaggtcagagtcaggccaaggttcagctgactgtaggaaggcctcaccttycttttgatgcggttacaagatggttcatttgctaccttgcagaaatagctttgaagaaaagtactgtaagctgcgtggttgtaattggatttaagtactgttgaatataatataaaagtgacgcatcctcctaa

SEQ ID NO: 237761 - DNA, 461 bp, Homo sapiens
ggtgacccacccgcctcagcctcccaaagtgctgggattacaggcatgaaccagtgcacccagctagaaaaggtgctcttttctttgtccttccctgcctttgttcgcttcctaagtggtaccattcttggccaggtacaccattgtctctttgaaggtaattaaacagattgtataagatgtcattaagttttatcacaattgcacacaaggacagactattggacacaaccacctaagtacatacgtcctagatacttaggtggccatgaagcacaggtcagagtcaggccaaggttcagctgactgtaggaaggcctcaccttccttttgatgcgkttacaagatggttcatttgctaccttgcagaaatagctttgaagaaaagtactgtaagctgcgtggttgtaattggatttaagtactgttgaatataatataaaagtgacgcatcctcctaa

SEQ ID NO: 237762 - DNA, 621 bp, Homo sapiens
ttggaaagctttgtaggaaacccagaatgctagttgccaagactctcttcccctaagttttaaaattcctaggtaattccctggaaatgtaatccggatgttcctgactcctgtatatttaaacccatcccactgttgtttccaaaagacattttatggatattccaggcgagtgttttgtctttatccaatcaaggaatgccattaattagayttaaaaaagtccacagggactgctgtgaaatctaattctgtcttaagtttgctaacttttttttcccttttttctttttcctcttttttttttttttttaatttactggccttgttaaatagtctaagaaaacaggagaaagagtgtaacataacatagagcatcctggaccttagtaccttcaggctgaaccttgctttctctgagctggcaaactgggatcccatcaaaaagcagtgtcaaaatatggagtttccagcaagtcagcttaggaaagggagtagaagagaataaagtagaaatcaatatccattcctaggttcttactgcattgtaggaagcattttctgtttgtttgtttgtttgtttgtttgttttgagacggagcctcactctgtcacccaggc

SEQ ID NO: 237763 - DNA, 601 bp, Homo sapiens
tagccatctgggtgccatagcacctgcattcttttaaaatatatattttaggcctggtgcagtggctcatgcctgtaatcccagcactttgggagggcaaggagggtgggtcatgaggtcaagagatcaagaccttcctggccaacaaggtgaaaccccgtctctactaaaagtacaaaaattagctgggcttggtggtgcatgcctgtagtcccagctactcaagaggctgaggcaagagaattgcttgaacctgggaggcagaggttgcagtgagccaagatcatgccactgcactccagcctggtgacagagcgagactccatctcaaaaaaatatatatatgtgtgtgtgtgtgtgtgtgtgtgtgtgtgtgtataatattttgggctgtaatcagtggctcatgcctctaatctcaatgctttggaggctaaagtgggagaatcacttgaggccaggagttcaagaccagcctgggcaacatagccagayccacatttctaaaataattttttaaaaaattagctggatgtagtggcatatgcctgtcattctagatatttgggaggctgaggcaaggggacctcttgagcccagg

SEQ ID NO: 237764 - DNA, 594 bp, Homo sapiens
agcttacattctagtaggggaagacatatgataaataagcaaatacacactgtgatgtcaataagtgataagtacaaaactaaaataaccaatttaattaaattgttaaaactatacaatttaattaatggcaatcataacagaattatttattttttgaaaagtaatagagccatccattcagatcaatcttgcagactttattttaatccataattattaaggagacttttactgagcgcttcctatacasaaacttctaaatgcctagagttggcatttagaatataaaagagggtccttattcctgaaggtacagatgtaaaaaaagataagcataatacttggaggcacatgatgaatgcaaatagatgttgagaggatgaagtcttctcaaggtgtagaatgatttattcattcacccacatgtatggaatacctcgtacattccagacactgtcccaagtgctgggggaacatgctgaatagacatagaaggtttttgctgttgtagagcttacattctagtaggggaagacatatgataaacaagcaaataccatactgtgatgtcagtaagtgataagtataatg

SEQ ID NO: 237765 - DNA, 594 bp, Homo sapiens
agcttacattctagtaggggaagacatatgataaataagcaaatacacactgtgatgtcaataagtgataagtacaaaactaaaataaccaatttaattaaattgttaaaactatacaatttaattaatggcaatcataacagaattatttattttttgaaaagtaatagagccatccattcagatcaatcttgcagactttattttaatccataattattaaggagacttttactgagcgcttcctatacagaaacttctaaatgcctagagttggcatttagaatataaaagagggtccttatycctgaaggtacagatgtaaaaaaagataagcataatacttggaggcacatgatgaatgcaaatagatgttgagaggatgaagtcttctcaaggtgtagaatgatttattcattcacccacatgtatggaatacctcgtacattccagacactgtcccaagtgctgggggaacatgctgaatagacatagaaggtttttgctgttgtagagcttacattctagtaggggaagacatatgataaacaagcaaataccatactgtgatgtcagtaagtgataagtataatg

SEQ ID NO: 237766 - DNA, 564 bp, Homo sapiens
atccatccatccattcaggaagcatttcctgacgacagattatgttcctggcatggtgctaggcagagcaaggcttatagacacgtagctctgctcccagccctcacagaacttaattgttttctctattcatatcagactgaaaatttgctaaatgtgccagtggaggtgraagtgagaatttatttgagcagaggtgtgtcaacagctctttttaaataaacagtgattcttttctggcatacacctgtttgagccatccccccacccccagagctctttccaaaatattacatggggtgtgagctaccctgatttctttcttcagtaactactgatgaaaataattacttccatctctctgctcttagtattttctcccagctcccacttgagcttcggtcattgagggactccgctcattcattggctgctctcttctctcaaaggactggatttaaagtcatttgcaaggggctcattctgtctcatctaattgcggtgacccctgacataactggggagtgcaccctaaaaacctttacaatcccaagtgtattaata

SEQ ID NO: 237767 - DNA, 531 bp, Homo sapiens
cttgtttacagtcccacagtgagtcctcgcataaccagggcccgaaccctggttcctgattcctgattttgccactgttcttgccttcctccacccagagatcttcagggtccttgtgcctggaagggggccctgtgcttcacgccgagggaggataagcatggcarggacttctcccaaatctatcctccttgagttcagttttgactgggctcctccctgataacctgtaactgcttcaccctttgcagctcccagaagaaaaaccccatccccagcccagggaggccaggcctgctgtgtttaattgcccatctctgtgcctcttagcccatctggggctgggcagtatctgagtgagtgtccgggcgaggatggggctgcttgggaaggaactcttgtgggtgacaagtggcaggatggggcccgtggacactccccttcctcccctttccgcggaccccctgggtcaggcagtttcggattggctgcagatccccgtctccgtgaggccgcgtctggcgaggtaca

SEQ ID NO: 237768 - DNA, 531 bp, Homo sapiens
cttgtttacagtcccacagtgagtcctcgcataaccagggcccgaaccctggttcctgattcctgattttgccactgttcttgccttcctccacccagagatcttcagggtccttgtgcctggaagggggccctgtgcttcacgccgagggaggataagcatggcaaggacttctcccaaatctatcctccttgagttcagttttgactgggctcctccctgataacctgtaactgcttcaccctttgcagctcccagaagaaaaaccccatccccagcccaggsaggccaggcctgctgtgtttaattgcccatctctgtgcctcttagcccatctggggctgggcagtatctgagtgagtgtccgggcgaggatggggctgcttgggaaggaactcttgtgggtgacaagtggcaggatggggcccgtggacactccccttcctcccctttccgcggaccccctgggtcaggcagtttcggattggctgcagatccccgtctccgtgaggccgcgtctggcgaggtaca

SEQ ID NO: 237769 - DNA, 569 bp, Homo sapiens
ggcacgttctgagtgctaagcaccggtttgtttcctgtgtcctccttggctgtactctgccacaccctgtgtgcttggactacttggttataaactgcacgccttatccttttttagggcagtaagaaaccgtttggtaaataactttttcccgtgcactaaagttacaccatggcgtttgaaagcctttgtacacttccaaaaggtaaatggtccacttggtcagtgaaggagtctttgctgagcgccaatgacttgcacagaggtgtgcgctctgctccagggatgtctttattcaagtcttaattctgtaactttaaacgttttctcatttttaaaaacagtcacatcttataatgtctgtgtggtgctttctaattgctcataaaygtggcctcctgtggtctggtccttatcacagtcctgtacggcagatgtccagcaataagggaactgagatgcagagatgaggtaacctcccatggtcatgaagcaagtagcggacagtgctgggacttgagctcaggcccctgacccagacaggcatcctccagagccacaccctctgc

SEQ ID NO: 237770 - DNA, 435 bp, Homo sapiens
atcgagcataaatcgagggacagaggccctggggagctggtgctgggcagccgctcatctcctgtttgcttgccatgtgcatgaaggrtgctggcccaggacaggtgcttgcagatgctgaagaccgcaggctccagttctcatccactagtgcgtgggctgaatcatgctgatggttttgctgcttagctctcctgagtctcctcaccccagtccccaggctggggtttgttccactcctgggagtgctggggaactttgccctttggttccatacttggagagttgattttaagcgtggattgctgggctgctccatagggcagagtctgagggcaggtcaagttggtctttaaaaggccttggcagaagcatgtggtttacatgtggcaagtggggaccgacagcaccggggcagggaagtcgtaaatcact

SEQ ID NO: 237771 - DNA, 595 bp, Homo sapiens
acttttcacatatttgtctgttagtattatcaccaaaatgtgtacatctagggaccattcattattaagcaaattaagcacatacttctttcatttgtaaatggcaaatatctcctttagacttgtaagtacagtcatgaactgcacagtgacattgcaatgacagactgcatatatggcagtggtcccataaaattataatactctatctttcctgtaccttttctgtgtttagatatgtttagatacatagataattaccattgtgttaccattgcctacagtattcaatgcagtaatgtgcgctatgggtctgtagcctaggaataatagactgtatcacttaggtttgtctgagtacactccatgatgttcacacaaagacaaaattgcctaataaygcatttctcaggatgtatgcacgttgttaagcgacacatgactgtacaatggcctaaactaaaacttgttttatttgaaattcgtatactatccatgaatccagtagtaatcataaaagaagagacagaaaataagacgtataataaaagtcagcttttttttttactagaaataacaggtgtcctatgaaaag

SEQ ID NO: 237772 - DNA, 500 bp, Homo sapiens
ggtttttgtttctctggagaatgatggttgatacagctaggtatctgtggtttacaattcctgatgtggagattattttgagggttaaataaaacagtgtgctaatttcatagtaaaatgctggcacaccgtaggtgctcaaagagtggtcattctcatggtggtratggtggaggtgatctgtgatgtgtttaccaatggagtctgatcttcatctgatcttcagttagtctatgatagcagccactgagcacctgaaatttgttgactgacttgacaagtcaaataaataaaagtgagttcctttaataagaaaatgtggtcagaaaattaactacagccataaacaggaaacacagtgtttggaatggatataaatgcttcaccaagcaggctgggttcaaattccatctttgtttcttacctactacatgatcttacctgtaaaatctgtaaaattagtataataatactttctccaagggacttagtgcaagctt

SEQ ID NO: 237773 - DNA, 501 bp, Homo sapiens
agaaaatgtctagtgaacttaagttcaaagatttttcatgaagcattcgttattaattataaccaaatataattattttagactgatagttcaccatctttgttatctgtattgtacagcccaacaatgatttttattaaattaacaattgaaagtaatattgtaaattattytctattggttttaaataaacttattctttacctgatttttaaggtgctgattggtaaaggtcttgagacaaatttactttgcataatcaatagtagatactgtgatagggatatggtaaatgctgatgatttattgaatattcggatgtgatatattatttcaaaaaaggtatgataagcaggcatatttgctctaacaactgaattaaacacttaaatatacaaattttctttaataacatgaatactttaatattcaagtcacagaagttgatcaccgatatcttactcaacatattagacttcagtgaaggaaagaactggggtc

SEQ ID NO: 237774 - DNA, 560 bp, Homo sapiens
gatgttttcacttccattcataaatcatgaatgttcttaatagcacctagaatggtgaattctttccagaggttttcaatttactttggctagatccatcagaagaatcagtatctgtggcagctatagctctatgaaatgtctttcctaaacagtaatacttgaaagttgaaatgactccttcttgatccatgggttgcagagtggatgttgtgttagtaggcatgaacacaactttaacctccttgtacatctccatgagagctcaataataaatatctattaatttgcatggaaatcaataataagcccaatacatgttaacataaaaarcataactttgtaaaaatatttatatatttcagaatgaaaagttaatgagaaaaagagcattgttgtacactaaaaaatactttaatgtctgtttctacattaaatctgttgagattttacagatcatttaccttctggaaaactccactgtaaacttgtgagagtgtgagagtgaaaaggcgattagtatcttaccattattagaaaaatagttttaattcagtcct

SEQ ID NO: 237775 - DNA, 574 bp, Homo sapiens
ctcttgcaaggaaagaggaaaataaaagcccatgcaccataatcaacaaacatttaattgaccaacacttccttttcacttacttccctttttaaaaataagaagtaggtaacaaggataacacaaacagtaatctcttctaaccctgttaatgttgatgaaataaaaggaaaagaaaggaaatagctgaaatctgttgtccttccttggagtttggggtggcctccatctttttctcccctttcttgaagtcagtcagaggtgcttttgcctttctttytacagcctaccttttaaagccttattttctagagaatggacatacacgtgtgataatcatggtatttcctctgaatggtgtattacaatttgattagtaaatcatatatatatatatatattttttttttttttttactgcttggagatactgtaaaaaaaattcaatgcaattggaatatattcaaatgaatatatattgaggcattgaaagcactgagttatcaatactagaagtgttatacacaagtcagactgcctaggtttaattcgggcttctggttaaaatgcaatt

SEQ ID NO: 237776 - DNA, 579 bp, Homo sapiens
tttggaagggtgtatgtttccaggaatttatcctttttgtctagattttctagtttatttgcatatagctgtttatagtattctctgatggttgtttgtatttctgtggggtcccctttatcttttttgtgtgtctatttgattcttctctcttttcttctttattagtctagctagcagtctttttttttttttttttttgagatggagtctcactctattgtccagtctggagggcagtgacacgawcttggctcactgcaaccttcatctactgagttcaagtgatcctcctgcctcagcctccctagtagctgggactacagttgcatgccaccatactcagctaatttttgtatttttagtagagacagcatttcaccatgttgtctaggctggtctcgaactcctgacctcaactgattcgtctgccttggcctcccaaagtgctgggattacaagcaagagccaccatgcccggcccatggtctatttttttgatttttttcaaaaaatccagctcctggatttgttgattttctttggaagggattttgctgtctctatctttttcagttc

SEQ ID NO: 237777 - DNA, 597 bp, Homo sapiens
tgttgcctgatccttcctctggaagctttgtcccagaggggcagccacctatacgaagtgtctgttggcccctactgtgaggtgtctcccagttaggctacatgggggtgagggacccacttgaggaggcagtctgtccgttctcagaactcaaacactgtgctgggagaaccactgctctcttcacagctgtcagacagggacgtttaagtctgcagaagtttctgctgccttttgtkcagctacgccttgcgcacagagatggagcctagaggcaataggccttgttgagctgtggtgggctgtgcccggtttgagcttccgggccactttgtttaccaactcaagcctcagcaatggcagacgcccctcccccagccaggctgctgcctcacagatcaatctcagactgctgccttagcagtgagcaaggctctgtgggcgtgggacctgccaaaccaggcacgggagacaatcaccatatctgccggttgctaagaccttgggaaaagtgcagtatttaggtgagagtgccccatttttccaggtagtctgtcacagcttcctttggctaggaaagggaaatcccctgacccc

SEQ ID NO: 237778 - DNA, 597 bp, Homo sapiens
tgttgcctgatccttcctctggaagctttgtcccagaggggcagccacctatacgaagtgtctgttggcccctactgtgaggtgtctcccagttaggctacatgggggtgagggacccacttgaggaggcagtctgtccgttctcagaactcaaacactgtgctgggagaaccactgctctcttcacagctgtcagacagggacgtttaagtctgcagaagtttctgctgccttttgtgcagctacgccttgcgcacagagatggagcctagaggcaataggccttgttgagctgtggtgggctgtgcccggtttgagcttccgggccactttgtttaccwactcaagcctcagcaatggcagacgcccctcccccagccaggctgctgcctcacagatcaatctcagactgctgccttagcagtgagcaaggctctgtgggcgtgggacctgccaaaccaggcacgggagacaatcaccatatctgccggttgctaagaccttgggaaaagtgcagtatttaggtgagagtgccccatttttccaggtagtctgtcacagcttcctttggctaggaaagggaaatcccctgacccc

SEQ ID NO: 237779 - DNA, 330 bp, Homo sapiens
tggagtgttagggccctcatgtcttcctcagcattgatagttcctgggttcatggctgatgtggggaggatgtgtgtcccctccacatttcatgttgaaatatgacctccactgtcagaggacgggcctagtgaggtactggatcatgggggcggatccctcatgaatggcttggcaccattcccttggtgatgagtgagttcttggtcagttctctggagagctgagtgccggttgttttaaagagtttggcccctccttcctcaggtctctcttcttcctctcttgccatgtgatgcrctggctcaccctttgccttccagcatcatt

SEQ ID NO: 237780 - DNA, 564 bp, Homo sapiens
gctgctgtaccattttacattcttaccaacaatacacaagggtatatttcttaatatatgggggctgggtgcagtggctcacgcctgtaatcccagcactttggggggctgaggcaggtggatcacctgaggtcaataattcgagaccagcctggccaacaaggcaaaaccctgtctctactaaaaatacaaaaattarccgggtgtggtggcacgtgcctgtaaccctcgtcacttgggaggctgaggcaggagaattgcttgaagccaggaggtggaggtttcagtgagccaaaatcacgccactgcactccagcctgggcgacagagggagactccacctcaaaatatatatatatatggaacctaagacaaaagcctgcactcacccctaatctgctaaattcaagttctctccatgatgaggtttcaaaaggaattagtgcaaaatgtatttaaggatatgaccagaaaggagaaagaaaaaacaaatggctattacacacacagcagaaaagtaacactaggaggcaaaggaactcaatgaagaaatatttcggtggc

SEQ ID NO: 237781 - DNA, 564 bp, Homo sapiens
gctgctgtaccattttacattcttaccaacaatacacaagggtatatttcttaatatatgggggctgggtgcagtggctcacgcctgtaatcccagcactttggggggctgaggcaggtggatcacctgaggtcaataattcgagaccagcctggccaacaaggcaaaaccctgtctctactaaaaatacaaaaattagccgggtgtggtggcacgtgcctgtaaccctcgtcacttgggaggctgaggcaggagaattgcttgaagccaggaggtggaggtttcagtgagccaaaatcacgccactgcactccagcctgggcgacagagggagactccacctcaaaatatatatatatatggaacctaagacaaaarcctgcactcacccctaatctgctaaattcaagttctctccatgatgaggtttcaaaaggaattagtgcaaaatgtatttaaggatatgaccagaaaggagaaagaaaaaacaaatggctattacacacacagcagaaaagtaacactaggaggcaaaggaactcaatgaagaaatatttcggtggc

SEQ ID NO: 237782 - DNA, 560 bp, Homo sapiens
gccgggcagtagggcctagtcggggcctggctcgccgggagcaggagggcttccggcaaagccgcgtgcgctcgacgggcaggcgctgaggattggggccggcagcgcgcctgaccccgcccctcgtaggctccgccccgtgctcgcaggcgggggtttccatggtgatggtcaacaagcctcaactgcctctgctacaactgccaagttccccgcgtcccaccctcctctaggtgctccaagggaccaccggggtgcctgataygagagcgggagtgtagagactcggaggccgaggtgaggggcggccgaagtctccgaggtcgaaggccgcacacccgggacctagcggggaccgggtccccctgggggtggggacggggggtgggatttgagattagggagactatccgaagtccagggccccgtacccggactacctggggactgggcctattggggtggggatcgttgggctggggctgggatttgggatcagggaagagcgatctgagtttaagcgccgcaaacctgggaccgagcgaggactgcacataatg

SEQ ID NO: 237783 - DNA, 603 bp, Homo sapiens
acaataatttttccaggatcatatccatgtaatttaacaatccaagttctcccatttcctatcatagtagcgatttgatccaaataaggagttagagtctgtgaattagtatgtggaagaaaaagctattctactaagtcctgctcctggacaataatacgggtaggtgaatgctgagttggaaaaattagcaaatctagagtcttctctgggtctattctatttatttgggctttatggacrtgcttttcaattcgctgtaactctgcctcagcctcctttgttaattgtcaagggctagtgagactagaatctcctctaaggatagaaaatagattactcatggcacacgtaggaatgcctagagcacgtcgcatgcaattactgtcccctagtaatttttgaaagtcatttaatgttatcagttgatccctatgtatggttactttctgtggcacaatggtagtgtcatttactaaggtacccaagtaggagtagggagtagtagtctgaattttgtcctgagctataattaaaccagtgcaagaaacccagttttgcaggtgatcataaccttggaataatatttcttgagtgggggca

SEQ ID NO: 237784 - DNA, 428 bp, Homo sapiens
tgaaaacttgcttatagactttaccgaactgccccgtgctggaggctgtcagtatatgctactgcttatttgcatcttttcaggataggttgaggctttccccaccaaaacagaaaaagcacgagtagtgaccaaagtactgctaaaagacattatccccaagtttggactgcctctatctttaggatcagacaataggctggcatttgtagctgaaatagtgcaagatttaataagactattaaaaataaaatggaagttacacacagcctgttggccgcaaagttcaggaaaagtggaacgcatgaactggacactcaagcagctactgaagaaatattgccaaaaaactcatctgagatagkatcaggtctagcctatggtcctcctctgagtcagatgcacccccaccaaacaactaagaattc

SEQ ID NO: 237785 - DNA, 558 bp, Homo sapiens
atgggagaccagtggccttaggaagcaaaagagtcaatgccacaagataattttactctgactgacttttcccccaaaccgatgcccacaagttcaagcgtctggctcttaaaaacttctattaggccaggcgtggtggctcactttgggaggccaaggcgggcagatcatgtgagatcaggagtttgagaccagcctgaccaacatggagaaaccccatctctactaaaaacacaaaattagctgggcgtggtggtgcatgcctgtaatcccaacaactcgggaggctgaggcasgagaatcgcttgaacctgggaagctgaggttgcagtgagctgagattgcaccattgcactccagccagggcaacaagagtaaaactccatctcaaacaaacaaacaaacaaaaaagccacttctattatcaggagatactgtgttgcttactggggaaaagcttttacagaccgagtaagagaattaacatgcttaggacagcaatattataatgaaaacctaagaaaaactttgtggcgaggtaaaaatcgttccaaatca

SEQ ID NO: 237786 - DNA, 615 bp, Homo sapiens
tggctcacacctgtaatcccagtactttgggagactgagtggggaggatcacctgaggtcaggagttgagaccagcctggccaacatagtgaaacctcatctctactaaaaatacaaaaattagctggtcatgttgatgcctgttgtaatcccagctactcgggaggctgaggcaggagaatctcttgaacccgggaggtggaggttgtagtgagctgagatcatgccactgcactccagcctgggcaacagagtgagactctgtytcaaacaacaaagatgagttgagtgtagcccctatccttcagaatcttccagccaacttgggagagacttaatagctatagtagagggatgtgaaagatgctatgagatctcagaggaggagaattctaactcatcctcatgcttcagaaagaggctattgtcctgagactgaaagctccaaaatggatgggagaactcaataagttagggcttactatagaaaggactgtgctagactcaagtgtaatgtgttgaatgactccaggtaatctagtgtgcctcttcctgcttttccacttcaaagtaaattgttagatacagcagagatgggctctagaaagaagtgga

SEQ ID NO: 237787 - DNA, 553 bp, Homo sapiens
atcacaatttcttggaaggctatttcaaaacacaaaccttaaacttcttgccaatttacacccaataatcaagctgaatatattcaccttagcatgtctacttaaaaagagttccttggttttctgtgtgaataaatgtaaaagagtactcacaacccaggccatacaatcaacaaagaaatatctactgcatcttacctagtaaaggaaggaagagtraaagagggatctttctctctgggggtagaaaaatttaagtggaaaaaaaaaactagtcaagaacttaatctggtcaggtatcagataatcaggtattagatagtctaatattagattaacatacagtcattttgtgtacatgaataatgcagctaatggatatttcacacaaaaaaatagcaaacttcagctgtaacctaaaatgtatgtaacaagaacaacagcaataagactttattatatatgcaaggtactgctttaaccacttttcacttattcattcatttaaccatctggacaggaaagatacacactagaatgaaaagggcaaaca

SEQ ID NO: 237788 - DNA, 537 bp, Homo sapiens
gttcagttaatctcacagggatcctcaggtagccaaggacctcctccagtaccatggtayttgccaagaaactgagaacaaagaaagccacccctcccacagatggagtatgccagagggctcgggtgtggctccatcctacatcaaggaggttttggtagctgtgccaaacttgcagcgccctgcttctgtgacccaaggaacaatgggcagctggtatggagggtcacaagctcaggacctgtaaaagcctctatttccaagagaccccagtatgtgaccaacagttgctgctctaatgatgtacagtgcaatgtcaaagagggcagtttcttgcgtcaggggctcatgggcaatttgtggccaccatgagttatgagagaaggctgctaaagcccctatggtaaaggagtctttgaggagactcatgggattcctgtcatattgcaatgtggacagattctaaagccttttgttgaagggaatccatccaaggtgggccaacttgcaagtaacagcatcagtgaaattaagtaa

SEQ ID NO: 237789 - DNA, 562 bp, Homo sapiens
aggttaagatccattggtagatcgtraaataatgcagtagggtgtaaccagcataaaacaaaaaaaggaagaaataggaaacatacacatctataacatgtagtaaaggtaaataatgtttcatgaaatgtttgttgggttataatgtaaaaatatttcttactttggatgtagtaaacgaaaattaaaaccactatatattgcaaaaaaaaaaaaagagacccttttccaaattatgtagatattttatagtgaactattttggctaagtttttgcttttttgcatctcagtcttcataattaagaattccttgttgcctcatacctatgcattaattaagactctcggtacctgcttcactcatatcttaggtaatgtagagtgggtgtaactgggctgagttcccacaatttttttgtgtgcatgtcaacttttgaactcctttgatactttaatttaaaataaatgactaacaagagctagaacttgaatgcaatataactagacatgattcactgtttgctagcttaatcatctgacatggtttaaaaagattgttt

SEQ ID NO: 237790 - DNA, 562 bp, Homo sapiens
aggttaagatccattggtagatcgtaaaataatgcagtagggtgtaaccagcataaaacaaaaaaaggaagaaataggaaacatacacatctataacatgtagtaaaggtaaataatgtttcatgaaatgtttgttgggttataatgtaaaaatatttcttactttggatgtagtaaacgaaaattaaaaccactatatattgcaaaaaaaaaaaaagagacccttttccaaattatgtagatattttatagtgaactattttggctaagtttttgcttttttgcatctcagtcttcataattaagaattccttgttgcctcatacctatgcattaattaagactctcggtacctgcttcactcatatcttaggtaatgtagagtgggtgtaactgggctgagttcccacaatttttttgtgtgcatgtcaacttttgaactcctttgatrctttaatttaaaataaatgactaacaagagctagaacttgaatgcaatataactagacatgattcactgtttgctagcttaatcatctgacatggtttaaaaagattgttt

SEQ ID NO: 237791 - DNA, 607 bp, Homo sapiens
tgagctcaggagttctagaccagccagggcaacatggtgaaaccctgtctctacaaaaatacaaaaattagccaagcattggttgtgggtgcccatcatcctagctactcaggaggctgaggctggagaattgcttgagccctgggagtggaagttgccrtgagccgagatcatgtcactgcactccagcctgggtgacagtgtgaaagcgtgccttaaaaaaaaaaaaaagaaattcaaatggaagatttgattatgcccctgaaagtgagaatggcatgtctatgcacaacatgggataaagtcaaaataaaggtagttgtggagtatctcagtgagggccatacctgaggatactttgttctagaacctggatctggtgctggtcttgttgattttgcttcttcatctcttcctgttcttttccgctgctgattccatctagaagccatttctccctcaaggcctttttctgatgtcaggaaacataaagatatgttcttatattggtcaataatttccaaaatctcttactgctttcaaatcttatgaatttcaataggtgacacgttaaagaggaattattttctgtcagtgccttgcctga

SEQ ID NO: 237792 - DNA, 604 bp, Homo sapiens
gtgggaagcatcagatgtatggtcatgttattttcaaggagctcaagtttctctttttctcctggaataaaagggctctcattatgtatccaatctgccctatcaattatttgttcagttattcattgttaattattcattggggattcactatatttaaaatctgtgaggagagaatgggaactttattttctgggacttctttctcttatattgaaatttaaatgagagtaagtaagaataactttgtgtgtttgtgtgtgggtgtgtttttttaaggatgctagaataaataccactgagatacaagtatctctgaattaagaaaacatttaaaattaagtttagttgtgatagataattrccaaaggatgattattttttactgataccactgagatacaagtatctctgaattaagaaaacatttaaaattaagtttagttgtgatagataattaccaaaggatgattattttttactgaggcaatgacttttaaatctttttttcttaaaaaaaaaaccaatataacattataacttacaacattacaaacaaatgttatatggaactatagtttggaaaacagatgaattctggact

SEQ ID NO: 237793 - DNA, 655 bp, Homo sapiens
ggctattctccaatctctctccttctcctcaggcctccctattccctgaggcacaacaatattgaaattgggccatttaagaaccctataatggcctgtaagtgttcaagtgaaaggaagagtcatatatctttcactttcaataaaaagctagaaatgattaagcttagtgaggaaggcatgccaaaagccaagagtggctgaaagtcaggcctcttgttccagtcagccaagttgtaaatgcaaagagaaagttcttgaacaaaatggttactccagtgaacatatgaatgataagaaggcaaaacagccttattgttgatatggagaaagttttagtggtctggatagaagatcaaaccaaccacaacatttccttaagccaaagtctaatccagagcaaggtcctacctttgtttaattctatgaaggctgagagaggtaggtccctaagagagaggtccctgctctatctcaccatcccttatatcttgtcatttattttgctgatatagaagcatacgaaagtaagcatatataaacatatamaaataattatatgtattattattttgaacaaactttcatgttagactaagtggaagaaaaacatttttactttaccttcacttatttcttttccaatgctctcctt

SEQ ID NO: 237794 - DNA, 510 bp, Homo sapiens
ttgctctatttcttcaaattgtgttctctgcctttcagtatgccttgtaatttgttcttaataactggacatgatgcagtgggtaaaaggaactgctgtaaataggcctttaataatgtggtggtaaggagagggaggaggagaactgttctgtagtcctgtgagtagacctcagtattttagtgagcttatgcccctggagtgtgaacttcacaaccgcttcaaggttcttcccccacttaagtgaaacaggatggctaatgtgggcaggaattgggtatttcccrtcctccaggtcatgtaggctctgataaaaccccagcaggttaggctgcggttaaatagttgctcctgattgacataactaaaaaacaataattttttctagtgattctaaggctgctattgtctatgaccagatatatgatatagaaaactccttttctataaataataaactgcctcttaggtgtttcccatctgcaacctgtccatggtgttaactttatt

SEQ ID NO: 237795 - DNA, 510 bp, Homo sapiens
ttgctctatttcttcaaattgtgttctctgcctttcagtatgccttgtaatttgttcttaataactggacatgatgcagtgggtaaaaggaactgctgtaaataggcctttaataatgtggtggtaaggagagggaggaggagaactgttctgtagtcctgtgagtagacctcagtattttagtgagcttatgcccctggagtgtgaacttcacaaccgcttcaaggttcttcccccacttaagtgaaacaggatggctaatgtgggcaggaattgggtatttcccatcctccaggtcatgtaggctctgataaaaccccagcaggttaggctgcrgttaaatagttgctcctgattgacataactaaaaaacaataattttttctagtgattctaaggctgctattgtctatgaccagatatatgatatagaaaactccttttctataaataataaactgcctcttaggtgtttcccatctgcaacctgtccatggtgttaactttatt

SEQ ID NO: 237796 - DNA, 510 bp, Homo sapiens
ttgctctatttcttcaaattgtgttctctgcctttcagtatgccttgtaatttgttcttaataactggacatgatgcagtgggtaaaaggaactgctgtaaataggcctttaataatgtggtggtaaggagagggaggaggagaactgttctgtagtcctgtgagtagacctcagtattttagtgagcttatgcccctggagtgtgaacttcacaaccgcttcaaggttcttcccccacttaagtgaaacaggatggctaatgtgggcaggaattgggtatttcccatcctccaggtcatgtaggctctgataaaaccccagcaggttaggctgcggttaaatagttgstcctgattgacataactaaaaaacaataattttttctagtgattctaaggctgctattgtctatgaccagatatatgatatagaaaactccttttctataaataataaactgcctcttaggtgtttcccatctgcaacctgtccatggtgttaactttatt

SEQ ID NO: 237797 - DNA, 503 bp, Homo sapiens
tgtctcgagaaaaaaaaaacagcattgaaaagagatytttgtttccttatttttcaggtaaggaagtggaggattaaatgatttgcccaaagtctcacagtaatttgtagagctgagattgaaattcgggtgaaacttcacatatcacattctttttatcaggtatgttgagaatatggtttgctgaacacagaaagcaagtagttatctagaattatggtccagttgtgtaaaagcttttatattttaattatatatgacaataatgggcttttacccttctttttgagatggcagtttctggatttactcttggtacctgcatacttctgttgcacattagttatgtggctaattatcccaatggaaaagtaacacagtcatgccatggaatgattcctgaacatggtcatagtccacagtctgttcctgttcatgacatttacgtgagtcagatgacattcaggccaggagatcagattgaaggtaccgtgctgggatta

SEQ ID NO: 237798 - DNA, 503 bp, Homo sapiens
tgtctcgagaaaaaaaaaacagcattgaaaagagatctttgtttccttatttttcaggtaaggaagtggaggattaaatgatttgcccaaagtctcacagtaatttgtagagctgagattgaaattcrggtgaaacttcacatatcacattctttttatcaggtatgttgagaatatggtttgctgaacacagaaagcaagtagttatctagaattatggtccagttgtgtaaaagcttttatattttaattatatatgacaataatgggcttttacccttctttttgagatggcagtttctggatttactcttggtacctgcatacttctgttgcacattagttatgtggctaattatcccaatggaaaagtaacacagtcatgccatggaatgattcctgaacatggtcatagtccacagtctgttcctgttcatgacatttacgtgagtcagatgacattcaggccaggagatcagattgaaggtaccgtgctgggatta

SEQ ID NO: 237799 - DNA, 503 bp, Homo sapiens
tgtctcgagaaaaaaaaaacagcattgaaaagagatctttgtttccttatttttcaggtaaggaagtggaggattaaatgatttgcccaaagtctcacagtaatttgtagagctgagattgaaattcgggtgaaacttcacatatcacattctttttatcaggtatgttgagaatatggtttgctgaacacagaaagcaagtagttatctagaattatggtccwgttgtgtaaaagcttttatattttaattatatatgacaataatgggcttttacccttctttttgagatggcagtttctggatttactcttggtacctgcatacttctgttgcacattagttatgtggctaattatcccaatggaaaagtaacacagtcatgccatggaatgattcctgaacatggtcatagtccacagtctgttcctgttcatgacatttacgtgagtcagatgacattcaggccaggagatcagattgaaggtaccgtgctgggatta

SEQ ID NO: 237800 - DNA, 632 bp, Homo sapiens
cccctggggaaattggaaatctgtgtataacttttgactccccccagacttaactacaaatagcctattggtgaccagaagccttactgataacaaatagttgattaacacatattttgtatttatatgtgttatatactgtattcttacaataaagtaagctagacaagagaaaaatcttattaagaaaataagagaaaatatatttactattcattaaatagaagtggattatcataaargtctttattctcattgccttcatgttgaatgggctgaagaggagaaggaagaggagtggctggtcttgctgtcttggggtgggtggaggaggtggaaggggaggcaggagaggcaccacactggtgtaactttatagaaatacattgtaatttctgtctgacttttttgttttttcgttttcttaaaaatgtttctatatggtaccaattcttccccgctttgctttagtttcagtgctatatcataggagggtccatgtcgtagaagaaggcaaaagcattgttgaataattggaacccttctgccaggttgtctaatgtcagtttgtttgctgggactgcttcttctccatagtcctcatcgtcatctggcactggtttggaaacact

SEQ ID NO: 237801 - DNA, 632 bp, Homo sapiens
cccctggggaaattggaaatctgtgtataacttttgactccccccagacttaactacaaatagcctattggtgaccagaagccttactgataacaaatagttgattaacacatattttgtatttatatgtgttatatactgtattcttacaataaagtaagctagacaagagaaaaatcttattaagaaaataagagaaaatatatttactattcattaaatagaagtggattatcataaaggtctttattctcattgccttcatgttgaatgggctgaagaggagaaggaagaggagtggctggtcttgctgtcttggggtgggtggaggaggtggaaggggaggcaggagagrcaccacactggtgtaactttatagaaatacattgtaatttctgtctgacttttttgttttttcgttttcttaaaaatgtttctatatggtaccaattcttccccgctttgctttagtttcagtgctatatcataggagggtccatgtcgtagaagaaggcaaaagcattgttgaataattggaacccttctgccaggttgtctaatgtcagtttgtttgctgggactgcttcttctccatagtcctcatcgtcatctggcactggtttggaaacact

SEQ ID NO: 237802 - DNA, 409 bp, Homo sapiens
ttcattattttaattcttacagtgatactaagagctaaatattattacatctctttctataggtgaggaaactgagactgaaaattaagtaatttgcccaaagacacacgaaaattaggcaagtcagtatttaggcccacgtttgttctttcaactgaaacaacctttctcaacacgttttttttttattgtmtccacttctgaattgagaagtctaacttatcagaatttcctgcagtaaaacccttcttccttatgtttctaatatgcataacactttccaagatacgtcttgtcaatcataaatcttttaaatcagagggcctagatgaaattctaactgatgaatttacaagacattttctgttgttcagcatatacaattccctaggactctctgaccttaatg

SEQ ID NO: 237803 - DNA, 673 bp, Homo sapiens
tgaaattctatttatctgtatattctcatgaggcagggaaaaaaagaacaaaggtccttgtttaagataatccattataggttggaatgaaaggaaagattcttctaagagtcctttttaaatcagattaggatattcacagttcctatccacatcctgcttctttcttccttgtgcagcccctaccaagctcatctctgcacccaggtcacagatggttaccagcctggaatgcccttctcagtgaaacgggaaatgttcccttgtcccccttgcagggtgtggaatggggatgtggctggcttcttcagtgccccactgctcaaatctaggggagcatacagatgggcaggctgtggggctccgaccccacagcaatgtctaggggtgaatgtttgcagctgaagccccagtgggcatgtgttaccacgtgctcttttagtttagctgtccatagttagcttgtgttagctcaattagacccctgccttattgcaaggacagagggctttctgtatccctgggttcttgccttggtgtaccaggagaatcggatcacacctgggcttgragaacgagtgcaaggttttactgagtagaagtagctctcagcagatgggggagccagaagggagatggttttcccctggagttgggccgctagactgcctgg

SEQ ID NO: 237804 - DNA, 578 bp, Homo sapiens
attacagcttgcttttgttgtgtcctcccacctttctttctgaacccattttgtatttcttacctcctctatagcctggtggttcttggccttccttgactacccaagaaaaactrcaacacccctcatctgcactctccctgtccagcttctctgctttattctctgtattgcactccctaccatgatatatttagtgaatacctactatgtgcctaactgaacctggcacacagtatctattctctaaatatttgttgaatgaataaatgactaccatctgcaaataaagagtagcttttccttccactgtaaaattcaaagttttcctctctgctctaatgcaaaccttcatttttctagaagctttgaagcatcagttttatgtaactcaatttcccatggaggtaaataaggcctaagcttcccaaaggaatattttcattttcaaaaaagatctttgtaacccccaaagaggttctattggatggaatatgtcaggagaaatatttttgaccagggaatctatgcttttaagagcttcttgtctcctttgggtctctatcttccttatccct

SEQ ID NO: 237805 - DNA, 570 bp, Homo sapiens
agatctcaacaagtggcactgtctctgtgtctgtcctccaccggctttgtggccaaggagagctatgaggaggtgtccccagacatcctcactctgtgcctaagaatggaggagggggaggcagaaaacacatggcatcgtgcctgtcacagttgagggtgatggatgaggaggcagggcccagggactcaccattgtttctggggagggcaggattctccactcctgaaacaccaggtttttgttctcaaatcacttgctcctagggccctgagcactccactttcctctagcaccagatcagggaggtctgattttaacaaaagtgtgcttgtgtagcttgagacatgtgagttactaggattgtcacctggggcaaattcaacaggggtctccctgggtaactgtgcagctagggcttcaccgtatagatgggaagtagagtctttgcatccacattcagcctcaactattgccaggacctctccagaacgcattctactctgtaagatttgggatgcaaaagttctaaaaaatgcyctttattatctagaattttctaattattat

SEQ ID NO: 237806 - DNA, 563 bp, Homo sapiens
gaaaagataatgtttaagtggttgtttagtgttttgtgtctttgggggtgggagggggtgtgtggaatacacaaacacacacacacaaacacacacagtctatatataatcttattggagccatcactatattttaagaaaatgaaataatctattgaagcttaaaattagaattttgattaagctaagagctatttttgtagaaaaataataaggcctcaaatagtaaactcatttgaggcaagtagcatttgtttctgtgtatatataagaaatgccataaatgtcaatgggatgtaatctgctctgagagctaagttatattttccaaatttctacatgtcagtgttactcagtgaaattgaaagagcatggccggtgattgaattatggcactgctccttactatgttgtatgattttggcctagttatttaacctctagagtatcagtcttgtactctgtaaaatgggatttttaaaaataagctargcatctatctagcacagtgattgctttgctctgtgtgcatagtaaaatagccaataatgatattatgattt

SEQ ID NO: 237807 - DNA, 601 bp, Homo sapiens
gggttcactgtatactgcatgggtgatgggttcaccaaaatctcacaaatcaccactaaataacttactcatgtaaccaaacaccacctgttccctaaaaacttatggaaataaaaaataaaaaaagaaagaaactagatgggcccatctatgggtgatgggagacagagacagatgatcaggtattagattctcataaggagtttgcaacctagatsgctctcatgcacagttcacaatatggttcaggctcctattgtgaaaatctaatgccaccgctgatctgagaggaggcaggactcagacagtaatgtgagggatggggagcagctgtaaatacagataaagctttactcactcgcccactgctcacttcttgacgtgcagcctggatgctaacaggccataaaccgttactgctccgtgtcctgggggttggagatccctgccttataggatagttgtgaggattgaatataataattatgtagtcaaagacctagcatggtgcattctaagtaggaaataatcactaagtgttggccagaaaattctaaagcctaaaccaaagccaaagctaataaacaaaaagcaaacaaac

SEQ ID NO: 237808 - DNA, 601 bp, Homo sapiens
gggttcactgtatactgcatgggtgatgggttcaccaaaatctcacaaatcaccactaaataacttactcatgtaaccaaacaccacctgttccctaaaaacttatggaaataaaaaataaaaaaagaaagaaactagatgggcccatctatgggtgatgggagacagagacagatgatcaggtattagattctcataaggagtttgcaacctagatggctctcatgcacagttcacaatatggttcaggctcctattgtgaaaatctaatgcyaccgctgatctgagaggaggcaggactcagacagtaatgtgagggatggggagcagctgtaaatacagataaagctttactcactcgcccactgctcacttcttgacgtgcagcctggatgctaacaggccataaaccgttactgctccgtgtcctgggggttggagatccctgccttataggatagttgtgaggattgaatataataattatgtagtcaaagacctagcatggtgcattctaagtaggaaataatcactaagtgttggccagaaaattctaaagcctaaaccaaagccaaagctaataaacaaaaagcaaacaaac

SEQ ID NO: 237809 - DNA, 465 bp, Homo sapiens
cccaaggtaatctacagattcaatgcaatctcttttaaaataccaatgacattcttcacagaaatagaaaatgcaattgtaaaattaatatggaaccaaagaagaccccaaatagccaaagaagtattgagtaaagaaaacaaagctgaagacatcactctacctgatttccaattatacaacaaagctacagtaaccaaaagagatggcattgtgtctggcaaaaaacaaacttacagaacaacagaacagaataaataacccagaagtaaatccacacacttacacccaamtcattttcaacaaaggtgctaagaacatacattggggaaagacagtctctttaataaatggtgatgggaaaactggatatctgcacatggaagaatgaaactaggtccccatcctttaccatagacaaagatcaactcaaaatggattaaagacttaaatgtaagacctgaa

SEQ ID NO: 237810 - DNA, 378 bp, Homo sapiens
caacaaacctgcacattctgcacatgtatctcagaacttaaaatttaaaaaaaaagcaggcagattgcttaatctgagttttactccatcatttctgagtttcaaacatgtgcatagcactgtcaatatagagattaataagatggttcttcatggaactcacagtttgggaatgggagacagatacgtaaacaaaatcaatcaatttgctaagggacgtaattcaaggtacaaaggtaaatcagagagagagtagtgaacgcctgtcaggaagtgaggaggtgggactcaagtatcttctgatattttagaagtaagaaaagtaaaatatccatttgataggyagtaggatggtaaagaaagccagacaaaaggggt

SEQ ID NO: 237811 - DNA, 468 bp, Homo sapiens
ttatactcaccacaacatgttgatttayctttaacaaactttacttttttcctaactccatagttaatatgaccagcacaaatcactatgtatctttttttattaaaaatatatttttcttgaaaacatattctaataatggaaagataacatttttcacaccaggggctcttatgatttaaaggacatcaaaagtctgcctatcttccacagattatataaacacctgttataatcacctttgctctcttcctcattcattattatatttctgtatatgagtcaggagtgggataatggtgtgctgataaactgattttggagagggggaaggaaggcttgatttgtaccatttgatgatttctattgtgtaaatatgtctatcatggttgatttcattctaccaatgagatagtattgaacatagaattgagaagaaatgtatacaaatcagctcttgtaagctgg

SEQ ID NO: 237812 - DNA, 570 bp, Homo sapiens
gtttgacaccttgccatattatacttcttatcagaaaggttgayaactaatatatctttttagagttggcgatagataacaatgatattgtgttctttattgtaatagtcatatttaaaatcatgaactgttattttttaaaattaaccaagtaagtcacaatcattgcaaaaaagttgaaattactgttaagtttagcttaaagcttcttccttacatattttaaatttggcctaaaggttcctccatacacagtgaaccgtaacctaactggaagtgtaaacagactataagatactcttgtagcaatcactaagtttcggcaaatcacacagagccaattatttaaacggtattcaaatgaggcaaacactaagctgtaaccaatccagctgtttctgcacctcacttctattttctgtatgttattttctttttctctgtccataaatcctctctaatcatgcagcagtgccagagttgctctgatcctattctggtttgagggtttcctgatttgcaattcattcattgctcaaactctgttaaatttaatttgtctaagatttt

SEQ ID NO: 237813 - DNA, 436 bp, Homo sapiens
ctttttctctgtccataaatcctctctaatcatgcagcagtgccagagttgctctgatcctattctggtttgagggtttcctgatttgcaattcattcattgctcaaactctgttaaatttaatttgtctaagatttttcttttaaaggtatatagatacatctgaagtaaaaaaaaaaaaaaaaaaaaaatgaaagttctagtctcccagctcatccttgaaggtgaatgaaaattaaaagtttgggatagatcctttcaracttgttgtgcttatataaatacataaacagagaaacatgcactacagtatgtatgattcaattaacatctggtttatgggtaatattttcacttgttaatgtattactggacatttaagtagacttgtcattgttgcttcacaaacaaggctgaaatggacatccttatacat

SEQ ID NO: 237814 - DNA, 545 bp, Homo sapiens
ctaaaaaggaaagccaccagtttaacagtggacttctcagcagaaactctacaaatcagaatagattgggggccaatattaaacattcttaaacaaaaaaaaaattccaacccagaattttatatctggccaaactaagcttcataagtaaaagagaaaaatgattcttttcagacaaacaaatgctgagtaaatttgttaccaccagacmtgccttataagggcttctgaaggaagcaataaatatgggaaaaaataacctttaccagccactacaaaaacacactgaagtacacagattattaacaatacaaagcgaccacatgaagtctgcaaataactatctaacaccatgatgacagaataaaatccacacatatcagtaactttgaatgtaaatgggctaaatacctcaattaaaagacacagaatggcaaactggataaagaaacaagaacaattgctatgctatctttaagagacccgtctcacatgcaatgacacacacaggctcaaaataaaaggatgaagaaatacctacaaag

SEQ ID NO: 237815 - DNA, 405 bp, Homo sapiens
tcagccttgtcctgtgctcaactggttaatatgctgttttaatgaagttgtcatttttattcggtcattgggattatatgtcattttatgtcatgttaccttgtactgggactgttcatgtattagaatattgtattactagttaaccaccctcagctatcyatgtttacataagatttttagaaaattaattttatcttttcaattaaaaaattttatgtaaaaacaatcatagttgttacttatataataattacattataacagaatttatgaaaatcaaaataatatgattatataataatataatttttggaatctgttgttaaaattatcacttttcctcctaactgaattcacttcataaatcctttattacatccatcagggataagtgatttctcc

SEQ ID NO: 237816 - DNA, 549 bp, Homo sapiens
tgaattcacttcataaatcctttattacatccatcagggataagtgatttctccaacatgtttctccttttctcttttcctctgtcagtgatttaagctttttgtaagaagctacaacctgaataattacacaatatgagtagaagtttggatagctaattacatctggaactagaaacccaagrcctcagtaaattgttcagttttcatcaaatataaataatttgtgtaaatgcaaggaaaggtagattttactgagtagggcaatttgttttattttagtttagtttatttatttatttattttgaggcagagtctcactctgttgccaggctggagtgcagtggcgcgatctcagctcactgcaacgcctgcctcctgggttcaagtgattctcctgcctcagtctcccaagtagctgggactactggcgtgtgccaccacgcccggctaatgtttgtatttttagtagagatggggtttcaccatattggccaagatggtctcaatctcttgatcttgtgatccgagtagagcaatttataata

SEQ ID NO: 237817 - DNA, 596 bp, Homo sapiens
ataatagcaagcttcctgaggccttcccagaagccaagcagatgttggcactattcttcctgtaaaggctgtagaactgtgagtcaactaaatttctttatcacttacccagtctcaggtatttctttatagcaatgcaaggatggcctaatacacatggtccatcttgctttgtctatatttccacccacattttcaatactacagaattatttgaaagcaagcctggtatcaaattgcaccatctttaaatacttcagtatatatttttatcagataatgacttcttttttattactggcatattacatttaaccacacttattaycatatctaaccaatagaaaatatattttatgtaaatatttacttatatatgcacatttgaattagaatatatacatgtatatggaaatatatatatatatctcaacaatatttttagtatcatgacaaaaatggttgcacttgtatgatacacaagtgtcaatagatatgaataattgatgctcacttccaaatcaatgcctcctacaggtgcatctgattgatagctttcattctaagtacatgagaatttgaatgagattgggctc

SEQ ID NO: 237818 - DNA, 612 bp, Homo sapiens
tgtttatgaattgctatcagaagacaataaaagcagccccagcttgtactggcgtgttaatataaattgttgatgacctttcgaattacctaccaygctagctggtcatttaaccaagtagaataataggccagacactcaatagaaagggatcaattcctttttgagtttccttatttataaaattccattcttctcagtttccttatcaagcaagtttggcaacctattacaaataaatatgactagaagattcatatttacataaaggaagaacaacatctgagaaaataaaggggacatataatttgggaagattatgcacccaaatgtctcttcacagatgaactacttatttcacttggttgctctcttattctagaaggaactatcagaggcaagtttgcaaataaaaggacatctcagcactgccaatgatttgatattacatgaccagtattttcaaatatctagaacatacacataatagaatattttcgattcaccatgataatttaagtctatcttaagttcaaaagaattaggtttaaaggtcaatgcacatatcaggcaattaatagcaacacgtctgaaactgtaaccttagtgatc

SEQ ID NO: 237819 - DNA, 578 bp, Homo sapiens
accttttcacgtgctgaattttaactctaacttgaagaaaccatgattgatgagataygttgtgtgtttagtcttaattaatattttctaattgctatattgagaggggagtgcacagattgctcctagctcatctccactctactgaaggtgaggtgtaaaatgaaatttttacaataaagcatcgacgtcatatacatctgatagggaatggcaaaaggaagcaggttcaactgagcatcttacttttgtcttgggagatgattatttcctttgttcagatagcttttgcttaggatttgcattgaagcattcgcttatctgttcaaaacaataatgcgcagtaaggatatgtgtttaattggctatactgtgtgatagagttgatttattttgatggagtttgaaaatgttagggccagagagtccttggtaagatttcccttttaataaaagcagcccccgaatcatttcttttccaacaaagagcagcctgtaaaattcagctgcagacacagaaagggaaactagaagcttgcacaggcgaatgccggcaactgtgccagtacaaaagggtt

SEQ ID NO: 237820 - DNA, 578 bp, Homo sapiens
accttttcacgtgctgaattttaactctaacttgaagaaaccatgattgatgagatacgttgtgtgtttagtcttaattaatattttctaattgctatattgagaggggagtgcacagattgctcctagctcatctccactctactgaaggtgaggtgtaaaatgaaatttttacaataaagcatcgacgtcatatacatctgatagggaatggcaaaaggaagcaggttcaactgagcatcttacttttgtcttgggagatgattatttcctttgttcagatagcttttgcttaggatttgcattgaagcattygcttatctgttcaaaacaataatgcgcagtaaggatatgtgtttaattggctatactgtgtgatagagttgatttattttgatggagtttgaaaatgttagggccagagagtccttggtaagatttcccttttaataaaagcagcccccgaatcatttcttttccaacaaagagcagcctgtaaaattcagctgcagacacagaaagggaaactagaagcttgcacaggcgaatgccggcaactgtgccagtacaaaagggtt

SEQ ID NO: 237821 - DNA, 572 bp, Homo sapiens
aatgattattgttttcgttataaatatatattaaataaccattcctcatgcactttgtgtcctccccctcactatccacaccttccttggtgcccttcaatctgtcttctgcaaaatattatttctgcaactagtaattattggtcactcattcttggccattgatctagatagtgtaaagataatattttagaagattcagtctctgtcctcttgaatatattctagttctcttccaggacttttatgatttttaaaattgtaacaacctgattcttgctattatatgtatttaatactactgatsaatcacttatttccacatttgagttccatactatcatttgcccactaggtaattgttagtatctccaagtcacatattcaaatgtaaacttgccttccttgcagaaagcatcttcttctcatgactctagtatctctgttattgtcatcatcattgttaacactgttaattctctctcaatttcaaattctgtcagctctctttctcagctgattatatgttttcataatctttgcattttcacatctgtcatccatactcactt

SEQ ID NO: 237822 - DNA, 436 bp, Homo sapiens
gaggtctctcccaggcaccctgggtcccatcycatcccaagctctgtctgccacaaatcccccttcctgattcccctacacacccagttctttccctgccacagcccaggtggctgccctctaggaaccctgatgagcagacttgcaacagatcagtgtgcaggtcggcacgggatcttcctcaattcggtgttggttcacttaacggggatggagtcacaggctgtggccacacgacgtggagggagatcaagtccccactgctgccaggggaaaacagactagaaaactcccatcccagcatctgaggacattaagggcaggccggaaatgggagcggatctgcgatgcccactccacgggaggcgaactgttgcttcagggaggaggccctggtgccacacaggtgcaaggacttgggaacccagaggaagca

SEQ ID NO: 237823 - DNA, 413 bp, Homo sapiens
gaccctatgaccaaagccatgtatctgagatatatgtggctgtgcttagggagcctatgtttgtagaaataagtatatttaagtaggagagagataaatgtatgacttggagacatygctatcatgttttaatctaactgcctgagatcacagcagcatataaaattgcaatgttccaatgtacaaattataaattcaaaccttgaaagcaaattggatttaaatctttatacttttatatgtagctcttctggtactggaccatggtcaaataaatagtttctctgtaatctttccattagattaatctcacacttaaagtacagaaattctttttttttttttttaagtattttatgcataaaactttcatctttatgagctcaccaaaggttgaaaagatttagcaaatt

SEQ ID NO: 237824 - DNA, 652 bp, Homo sapiens
aattttaacacaatgtaatttaagattattagcatttaataatctctcctctgaaaattgcttggtttctataataaggaaaccctatacaatctagtactattattttatttttaaaytgtggtcttcctttgtccacttctttataagagttttctatttgcataatctagttacatatttaatagcaaatctattaaaccttagcttgacttctaaacatttttctttcttctgaccttggaacatgtatacagcataggaactgacagtatatatctgtcattatacttttatcaaaactgctttaaaattttctaatttattgtagccctttgttaacatctctcctgagtagatgattttttttatttcacatggatgatatataaaataacagatcattaaaggtaatataattttgtcctaactaaaggataatataaattaatgatagagatatattcagtgaaatttcctaaataagttggaaatattttatatcaaaactagttaagaaaatactctgtatctttcaagagaggaaaatattatgagatatatgttgtaagaatgataattgtaatcaaatcacattgtgaaaaagtcttatttttttatactgctagaagtgagtactcacagaccactg

SEQ ID NO: 237825 - DNA, 443 bp, Homo sapiens
ttcctttttcaccataggcctgaaagcgctccaaatgtccacatccagatactacaaaaagagtgtttgaaacctgctctctgaaagggaatgttcaactctgtgacttgaatgcaaacatcacaaacaagattctgggaatgctgctgtctgctttttatatgtaatcccgtttccaacgaaatcctcaaagctagacaaatatccacttgcagattccacaaaaagagtktttcaaaactgctctatcaaaagaatgcttcaacactgttagttgagggcgcacatcacaaataagtttctgagaatgcttctgtctagttttcaggggaagatatttccttttaaaccataggcctgaaagcgctccaaatgtccacatccagatactacaaaaagagtgtttcaaacctgctctatgaaagggactgttcaacactgtg

SEQ ID NO: 237826 - DNA, 443 bp, Homo sapiens
ttcctttttcaccataggcctgaaagcgctccaaatgtccacatccagatactacaaaaagagtgtttgaaacctgctctctgaaagggaatgttcaactctgtgacttgaatgcaaacatcacaaacaagattctgggaatgctgctgtctgctttttatatgtaatcccgtttccaacgaaatcctcaaagctagacaaatatccacttgcagattccacaaaaagagtgtttcaaaactgctctatcaaaagaatgcttcaacactgttagttgagggcgcacatcacaaataagtttctgagaatgcttctgtctagttttcaggggaagatatttccttttaaaccataggcctgmaagcgctccaaatgtccacatccagatactacaaaaagagtgtttcaaacctgctctatgaaagggactgttcaacactgtg

SEQ ID NO: 237827 - DNA, 443 bp, Homo sapiens
ttcctttttcaccataggcctgaaagcgctccaaatgtccacatccagatactacaaaaagagtgtttgaaacctgctctctgaaagggaatgttcaactctgtgacttgaatgcaaacatcacaaacaagattctgggaatgctgctgtctgctttttatatgtaatcccgtttccaacgaaatcctcaaagctagacaaatatccacttgcagattccacaaaaagagtgtttcaaaactgctctatcaaaagaatgcttcaacactgttagttgagggcgcacatcacaaataagtttctgagaatgcttctgtctagttttcaggggaagatatttccttttaaaccataggcctgaaarcgctccaaatgtccacatccagatactacaaaaagagtgtttcaaacctgctctatgaaagggactgttcaacactgtg

SEQ ID NO: 237828 - DNA, 443 bp, Homo sapiens
ttcctttttcaccataggcctgaaagcgctccaaatgtccacatccagatactacaaaaagagtgtttgaaacctgctctctgaaagggaatgttcaactctgtgacttgaatgcaaacatcacaaacaagattctgggaatgctgctgtctgctttttatatgtaatcccgtttccaacgaaatcctcaaagctagacaaatatccacttgcagattccacaaaaagagtgtttcaaaactgctctatcaaaagaatgcttcaacactgttagttgagggcgcacatcacaaataagtttctgagaatgcttctgtctagttttcaggggaagatatttccttttaaaccataggcctgaaagcgctccaaatgtccacatccagatactacaaaaagagtgtttcaaacctgctctatkaaagggactgttcaacactgtg

SEQ ID NO: 237829 - DNA, 593 bp, Homo sapiens
ctatcggatgttgggatcatagctttcatatttaaaggccaatagtaaaaatattgatgataaggttggatctacaagtcttaggaatgtggaccattctaaaccaccagaagtggcatgcacttcacaggacacatccaccgctactggaaaggaggtaagctacccacttcttcccattgtttttcacagttgttctgtcactgatggatagtttccatgtacttctcctgatctattctccaccttctctccccayctgggccctggaaggctggatgataaggatacattaataagccttttagtcttctggtgtacgattggatttggtcaatgggtatcaccaccagcagattaatacagagcgaagagactctttgagatcagcatggactaaccgcttgccttaactaaatgtcatgcctcttaccaagtactcccttctcactctaggctcaggcaactgaacctcctctcacactctttggtctacaggtgataaaaccccccactcttactatcccttatggctttgctatgcatactatttctctaataaacaatccccttattaatattttttcaaccta

SEQ ID NO: 237830 - DNA, 614 bp, Homo sapiens
cagcttaataaagtctcagaagtatttaaaaaacaaaccaaaacaaacacaaacacttctcaggcaagtactatggagctacttcaagtttgtttattattattatttttatttgttaattaacacatcataattatacgtatttatgaggtacaatttgacatttcagtgcatacaktttgtataataatcaaatcagggtagttagcttatccatcacctcatgcattaattatttctttgtggtacgaacgttgaagagcctctctcctagcagttttgtaatatacaatatcttaatattcacccattaccctactgtgcagtagaacaccaaaacttattccttctatctaatagtaactttgtacccattggccaacctctgcctgtcctttttctcctctctccagtcactggtaagcactgttctgttctctgcttctatgatatcaacttttgaggtttgatagattttcctgcagtccctgtgccaggatttcaagataaagagaataatctcttccctctgagacttggtttgttgcacaaaatcttcgggtggactcctaggtgtatatatctcttcaaactatgtgcagataattgtgtat

SEQ ID NO: 237831 - DNA, 622 bp, Homo sapiens
aaattctgagatgaatagctaatcatttgacatttttactctaacaggctttggagtcagaagacaagggtttagttctagttcagatgcttctttgctattaactcaagtaagttatatgaaaggcctcactttcctcctctgcaaaatgaggataattatggtatataagacacaatgttatgaaggactaagtgagataacacatgtaaaactcttaggccagtccctgacacatagcaggccttacgtaaatggtagtggtgatggtgatggtaattataaccacaaaggaagaaaaggaagagaagaaggagaagatggagagaacaagatcgaggaaactaggtttcrtaggcaatgcaaatactccccccagtatagaaagatgattgagaacaattatttaataccttatacacaccattcactagtataaaaattctaacaaatttaatttcaccttcctagcagtcctataagaaagtgctatcatacatatttctacatgaagaatcttatacttagagtacctagctcaaagtcccataagtcttaaatgactgagccaggtatcatcagggaacaccaggacttaggtggttatcaatcttcccagcaa

SEQ ID NO: 237832 - DNA, 622 bp, Homo sapiens
aaattctgagatgaatagctaatcatttgacatttttactctaacaggctttggagtcagaagacaagggtttagttctagttcagatgcttctttgctattaactcaagtaagttatatgaaaggcctcactttcctcctctgcaaaatgaggataattatggtatataagacacaatgttatgaaggactaagtgagataacacatgtaaaactcttaggccagtccctgacacatagcaggccttacgtaaatggtagtggtgatggtgatggtaattataaccacaaaggaagaaaaggaagagaagaaggagaagatggagagaacaagatcgaggaaactaggtttcataggcaatgcaaatactccccccagtatagaaagatgattgagaacaattatttaataccttatacacaccattcactagtataaaaattctaacaaatttaatttcaccttcctagcagtcctataagaaagtgmtatcatacatatttctacatgaagaatcttatacttagagtacctagctcaaagtcccataagtcttaaatgactgagccaggtatcatcagggaacaccaggacttaggtggttatcaatcttcccagcaa

SEQ ID NO: 237833 - DNA, 620 bp, Homo sapiens
tgaggaaaaaccctgaacagtggtgctatctaaaaggcagagaaaaaaatctgaagaaagaccacaaatctttatctctacttcatattaaatatttcatctgaggttcagacctgcaaattccagtgcccacaggtcgggtcacttctacttcgatgccccttatgcacttaaaatataacattatcttttcctttaaaaatcttaattctccataaatccccctcagtgaaagaaaccaccaactagccaatgacccagccagaagtgtggccattatcctcgactcttgcaaatagtcaccaagatgttccaattctaatatttaaatatctcttaaaaattcaacaactttgtacccccaaccccaccctaatcctttagttcaggcaaccattatatttttgctagtttattaccaamaaaaacctctttaacggggctcccaaattttagtcttggtctttctgttgacttgacacactgcagccagaattctaacacatgaaacatgacactttcctttttaaaatcttggccctgctgggccgatgtaacccagaagctgtgtgtctctgaattttttctgcactatctttgtattatgagcaattcaacca

SEQ ID NO: 237834 - DNA, 560 bp, Homo sapiens
taaggttccctggggcttcctgagctcctggttggtgactctggtaatcaaaagcctcccggcatctcctccactactgttcattatcatttcacagagtgactggggtgagggacacacttggtctctctccctgccttctttctcccatcctgccctgccttgctagattactcttcctgacagccctgaacacccttctttagaggcctccaggatggcaacccatcatcagcttcagagggccccagaccggaaggatcctggaacctgaagggacctgggggcctaaacaccctcagggaaatcctggagctctctgcaagctagttcaaccgtatccatccatttagctaaagcacatccttcgctgaagccagcctggtctcatccccacttctacccccaagccttgttcatgatatgcctttgcctacgatgcccatccttctgcttcctgccaatccagaccttacytgttcttcccactctgagttccacctcctccaggaagctttccctgaacaacaccacccccaaccaggggagatttttctctg

SEQ ID NO: 237835 - DNA, 603 bp, Homo sapiens
gtgttgccaattacttcatgcctgatagagaagctgaaatgcctccccatacttgagattttttttctttccagttaattgttcttcctaaattgaatgatctatttttggaactgaaagagatgcagtgtagagagaaaggaactgacaaagcccaaggcagagaagggaggtagacagagaaaatgcggaaaggagagagtgatgctatctgcatccatcttcctcataacaaacacataaagtgaacaggaagggcattatctcttcctaggagcaggtgaatgagacatgaggggcaggatattttgcttatgaaaccacaaacacatgaaaataaaaaaatgtaaaattctagaaatagttgtaacctggmggtctaggtcttaaaattcactgggctttcccttaaaactctagagtgggcctgcatgttcatgtcatcaaatcagaagaagagaaaacctgcttctttactgtatttcttaataaaacttatttgaaaagcaccacggccttagtcttgaaaatgtgggaatgattgtcttatagatgtgattctgagagtatttagcaggacttctgatgcatttagtccacatg

SEQ ID NO: 237836 - DNA, 417 bp, Homo sapiens
gaattctaaggagacacaatttartctgaataaactttcaaaaatgttgagggaagaaagactagctcaaggagaagatattgaaaaataagagtagaaaactcattgattgtcttgttgaaaactaacacagagaaatataattaaaggaagagatatccaaagacatcccagacaacttaccaggtaataccagaggagtaaacaatgtagtcattaatattgcaagattaagcttctctcttgttttggggggaattagagcgagttcatgcagaataaagcaattaccacacatgagctcgagttaaggtttcctgcctcccgatggcatgcacggctttgtgccatgaaatcagagtagacaagactcaggcatgtcattggaatccagtaagttgtgaagtatacatttca

SEQ ID NO: 237837 - DNA, 603 bp, Homo sapiens
ttttgagtgatttgtctgagtaaagcccggatttctggtaagtctgtttattaactgagcaaaagattgttgttttgagctcagttctagaaggccacagacatatctgaggataaataaaacatatgcctaagaggtttatttatgattactgtgactttagttgcccattaaagtctcaatcattgcttctggctaagtaagtagaaattttactttattagttcactcattttaaagagcatttttaattcacacagaggtcctgggaaaagactaaggtcaaatgtggcaaaatggtccaaaggatctaagattaacaacagattatgactattcacagataagtgacactgagtagaattattttctcatggtcattgtaatgaaaaggagttgatctgggggcggccaacacaggtttaggacctttccattgttcacatgtgatagaaagtcatagaaaaatggtagcctacatctgaactaattccaattatctacaaagctgtccatttccttgaagttctgggttctatttgtcttaatctgagcrgttttttctcccctgccccctatatgggaagggacttcactatatat

SEQ ID NO: 237838 - DNA, 532 bp, Homo sapiens
ctagacacaatgacctagtcattataaggacagaaacctggtcaatctgaggatcgaatcctcaaattacaggatgtgacaaggatttgacaagggagactttcccaagggggagacctgttgccactcagaacagaccacggaaagagatggaggcacctctgttcctggaggcagaccctcagagctaggggaggcccccacgagggaggtggccctgggtcccagccgcgctcaccgatggaagctgtccaccatcttcaggtggacccgcaggtccttcttggtgaggtggtccagcatgcgggcgtccaccaggcactccatgaagtagctgcggtactgcgggagccccaggctgggtagccattcattcccaatccactcatggttcatgtccccataggccagggtctagggaaatgagatgcaggaggctattatgggrgaggaaggtagagccagcaggctgaggctggtatagctggtcgggagacacatgaatccatcctccacccatgagggaggaagg

SEQ ID NO: 237839 - DNA, 608 bp, Homo sapiens
acgtgcctatttgttgatgggtggggctggggagggaaaggaatgaccacggcttcatcattcaccagcactgaaggcgagggggtgacctgggtgcccgtccaggatgcaggcccagggctcctccctcaaggaagctgcagaacagagatgaccctgcatggttgctgggagaaggcaggtcttgagtgagtctggccctgagrggcagggtcttggtggagtggccagttggctttgctaggcctgggctccctaggttgacctgcccttgcacagcgtctgccctttaactaggagccttagcctgaaggagcccgtggctgatgggagagtttccggcatcctcaggtgggcaggtgagtgagaggtgaagtcctgggtgaggccctactgagagatcccaaatcgatctgaggatccagcagcccattccgcagggggctccctttgctctgcttccagaaaattagggacagtgtgggagtcaaaggatggctgttgcagtttggggtgttgggcaagtctcatgggaaatgactgcttaaaacaggggcatgttttgagtcccaggcccttgctttctacggggtgtttgtgggggcagg

SEQ ID NO: 237840 - DNA, 608 bp, Homo sapiens
acgtgcctatttgttgatgggtggggctggggagggaaaggaatgaccacggcttcatcattcaccagcactgaaggcgagggggtgacctgggtgcccgtccaggatgcaggcccagggctcctccctcaaggaagctgcagaacagagatgaccctgcatggttgctgggagaaggcaggtcttgagtgagtctggccctgaggggcagggtcttggtggagtggccagttggctttgctaggcctgggctccctaggttgacctgcccttgcacagcgtctgccctttaactaggagccttagcctgaaggagcccgtggctgatgggagagtttccggcatcctcaggtgggcaggtgagtgagaggtgaagtcctgggtgaggccctactgagagatcccaaatcgatctgaggatccagcagcccattccgcagggggctccctttgctctgcttccagaaaattagggacagtgtgggagtcaaaggatggctgttgcagtttggggtgttgggcaagtctcatgkgaaatgactgcttaaaacaggggcatgttttgagtcccaggcccttgctttctacggggtgtttgtgggggcagg

SEQ ID NO: 237841 - DNA, 605 bp, Homo sapiens
cgtttgttaacttcacacgaactaacagtgtgagcagctgccaaagccctgtgcaggtttgcattgcattaactgttgacatcggtctggctgtgcacagacctcagcccgagtgagggaccctacccttggataaatgttggtgaactgccctgtgtcttttggagaggagtgggtggtgcctgggctgcagagccaggccagggcaggacttgggaggaacatgatggaattctcaaggtctgaatgtctgtctgggggaaggagaattccacttgctccaggtgattcctgaaggsagagctagctccagagggtggggagggccaagaggtgattttcagctcaaatgaggagaagtttctaggttgccactctcccccagtggctgctggaggcacaggggcaggagtgagtgtctcagcactagcagcagtgtgagcaagggatggtgctttgtcacatgtcttgcacatccaaggtaaccaaaggacatttagtccaaaggattccaaagaaagggatgactgagccctgcacctgggggctgacagtattgtctgtgagacttgactcagacaaaacacagagaggaaacggcaatc

SEQ ID NO: 237842 - DNA, 613 bp, Homo sapiens
cttgtgcctttgtttcgtggactgagaaccagagggagaaatggcttgcccaaggtcccacagctactgagtggcggagggagggcactggagctcactgagctaaaccaaatgtcctttgcaacatagtactgctattggggtggggaacagtggccagaagtgcccataggcaggccgtggacttccgggtggcagcaatcaagcccagccctaactcggccccagcctagctgcactggctcccccgcccagtggaatgcttactgggaagtgcaaaaatagctgcacagtggagccatggcagcaaggtgaagacggatggagcgcgatggagagccgggtgagcgatgagctcattagggaggtgagcgacgagcccacgcacaggtgtttacttagtgagcgggagcttgggaggctgaggacrgacctgtgcatctgtcccactctggcgcttggctcgagttttagcccatgataggctctagtgtcaccaaggacataggagaggcctgctccagcctcacccaccctggctctgccctgggctaggcctgctggggcctctgtcactctgggaaccatatggggaacttccccacagaggtca

SEQ ID NO: 237843 - DNA, 555 bp, Homo sapiens
gaattcattttccattctgttctcttttgtactgttagacttatttatcacatgcatgtattaaccagtgaaaataaaattaattacaaatgatatagaaatctatttttgtcaaaagataataaagtttggatggctgtctataaagtgtgagccagagttattggtggagggaactcccacctgtctctacactttggcccctcttcccaccctctcctctcctccacctcataagcgaggaggagtttaactgagagtggtccaagcctaggatatttgggggccaccttcactagggggcaaggtcactgcactgaacagccactagtgaagcacttcttccacccctgtcccaggctgyagaaggcaggtcggtcctgccccaaagaggctgccggctttgatttcgtgggaaaggggtagaaagcccctcaaaggcttcaggcctgggccatattctccatcctatcccttaccagggttccacattcattcataaatctactcatagagtagcaattggaatctcatccggccactgtttcttgtata

SEQ ID NO: 237844 - DNA, 488 bp, Homo sapiens
tgtatcttatgttgacccctttctcatcctgtgacttagaatgctaactcgctgggaatgaagcccagcaggttttagccttattttacccaggccctattcaagatggagttgctctggtttaaacgcctctgacaaaaaggtgacccaggccctccactgcctgggaccaacagccttctagacccccatgtgcccagctgctctaygctaagagctttaagcacagccagagcagccttcacaacctgactcatgcaggccactgccagcctatatgatctgacaacaccaaaacttctgggagcctcagtttccttgttaaagggaataatactaccatgatgcctggtgtggtttggatctgtgtccccactcaaatctcatgtcgaaatgtaatccccagtgctggaggtagggcctggtgggaggtgatgggatcatggaggcagtttctcatgaatggtttagcaccatccttcttggtg

SEQ ID NO: 237845 - DNA, 488 bp, Homo sapiens
tgtatcttatgttgacccctttctcatcctgtgacttagaatgctaactcgctgggaatgaagcccagcaggttttagccttattttacccaggccctattcaagatggagttgctctggtttaaacgcctctgacaaaaaggtgacccaggccctccactgcctgggaccaacagccttctagacccccatgtgcccagctgctctatgctaagagctttaagcacagccagagcagccttcacaacctgactcatgcaggccactgccagcctatatgatctgacaacaccaaaacttctgggagcctcagtttccttgttaaagggaataatactaccatgatgcctggtrtggtttggatctgtgtccccactcaaatctcatgtcgaaatgtaatccccagtgctggaggtagggcctggtgggaggtgatgggatcatggaggcagtttctcatgaatggtttagcaccatccttcttggtg

SEQ ID NO: 237846 - DNA, 542 bp, Homo sapiens
aatttggatgatcaacagatttccaagaaaatgtaagaaacagaaaccagcaaactagcaatgaccttgtgccagacaatgtgcattcactgccaccacccactacctaggaagtgtcctaggaggatggagggtggcgggacacagaaggaagggcaagagctccttggatgggcccctctaccaaggccatagcttccactgtgcggccgctcctacagcttttctctacagaggtrtggccatgccttccctttgcccctcatattggggtggtgagagctcccactgttagcctcagggtactgtatcacccttgatggttttccttagccctgctcatacactaattcactgtcctcatcgaattctcctccaatagcccctaggagtgtgccacatgtttcctgctggaaccccagcacacaaaggctcctaccaatgctgtgatatcaactctacccacttccgtccatcccagcttcacctcctgggtatccaaagtcctgggagggtgtctgataccggctcacctcctgact

SEQ ID NO: 237847 - DNA, 538 bp, Homo sapiens
attaaacatttgaaatattggatttatgaatttataatatttacttcaagcttggttgcttttctggctctctttaatataattcaccagcataaagtcatatgaagttaacttattaaacacacattcatacctcttggttccacaaatttaacattataggttgttttgatttggagactgaagagttggagaggcataggttttaaattctctcagacaagaggttttattttttatatgcggatcatgggaaaatataatttatatgtaagatatgtttcctgatgacaatttattcaaaaaatgttttagcacttactgtatgcaaaactctgtgctaagtgctatcagggacagaagtgtggcattagagaggaaaaaaattataatgtttgaaaatgtgatagaaacatcaaaggtaaatgaaattagctatgtaaattawgaaacattagtcatcattacttcatagcttcaatgagagtataaaatctctaccatctctcaagataaaaaagtaaaaacaaaaagaaac

SEQ ID NO: 237848 - DNA, 530 bp, Homo sapiens
atttagtttgttctcaccttttcaatcttaacactgtaaaaaatagtcttacatataagtaaactttcattaatatatcctaatacattgcagtattgatcttgacatttttttcaggctgtgggactcctacatgtcatgcgttcttttagtgagcaatgttgaaagaaaattggaagaactgtttatgttttaatgtttccaatgcttgtgtaacaggatgtattcatcagagttctccaaagagacagaaccaataggatatagattttgatgaagatgatgatagatgatagatagacagataggtagatgacagatagatagrtagatagatagataagatagatagagtggggatttattatgggaattggctcatgcaattatgaaggctgagaagtcctgcaacaggctatctgtgccaaaggcctgacagcctggggtgaggggagaagagagggtgttgttaagtccagaatccacaggccagagagcctggattacgctttctaagaacaggagaagca

SEQ ID NO: 237849 - DNA, 585 bp, Homo sapiens
ctaaactcacttttccagagcaactctactttcatctgctttataacaggatttctcaagagatgttgattaaagaataaagtatagtgttaaaagctatctgtccttgtacagaaaacagatccgtggttgccagggccaatgaggggaggaagaagcaggaggagcatcatgggacttttttcatttatcaaaatgctctatattttgattgtggtrgtgcttgcagaagtatgtgcatttttcaaaattaaaaaaactgtacacctaaatagtgggaaaattatgtgactctaactttaaaaaaatcaaaggatgattaaaccacctgctctacattctggtaagagtctttgtaagaagttgtacatgatatatcacatttccatttatttttactatgccctatctgcctgaggaattagtatgctgtgtacacagattttggttagcagaaaggaagccatggctatgtctctttcactgaaaaaaaaaaacacacaagtaaataactttgtaaataaatactgtctcttaacatcacactctaagtgcttcctatctcttttttacacataaccaaaa

SEQ ID NO: 237850 - DNA, 585 bp, Homo sapiens
ctaaactcacttttccagagcaactctactttcatctgctttataacaggatttctcaagagatgttgattaaagaataaagtatagtgttaaaagctatctgtccttgtacagaaaacagatccgtggttgccagggccaatgaggggaggaagaagcaggaggagcatcatgggacttttttcatttatcaaaatgctctatattttgattgtggtagtgcttgcagaagtatgtgcatttttcaaaattmaaaaaactgtacacctaaatagtgggaaaattatgtgactctaactttaaaaaaatcaaaggatgattaaaccacctgctctacattctggtaagagtctttgtaagaagttgtacatgatatatcacatttccatttatttttactatgccctatctgcctgaggaattagtatgctgtgtacacagattttggttagcagaaaggaagccatggctatgtctctttcactgaaaaaaaaaaacacacaagtaaataactttgtaaataaatactgtctcttaacatcacactctaagtgcttcctatctcttttttacacataaccaaaa

SEQ ID NO: 237851 - DNA, 585 bp, Homo sapiens
ctaaactcacttttccagagcaactctactttcatctgctttataacaggatttctcaagagatgttgattaaagaataaagtatagtgttaaaagctatctgtccttgtacagaaaacagatccgtggttgccagggccaatgaggggaggaagaagcaggaggagcatcatgggacttttttcatttatcaaaatgctctatattttgattgtggtagtgcttgcagaagtatgtgcatttttcaaaattaaaaaaactgtacacctaaatagtgggaaaattatgtgactctaactttaaaaaaatcaaaggatgattaaaccacctgctctacattctggtaagagtctttgtaagaagttgtacatgatatatcacatttccatttatttttactatgccctatctgcctgaggaattagtatgctgtgtacacagattttggttagcagaaaggaagmcatggctatgtctctttcactgaaaaaaaaaaacacacaagtaaataactttgtaaataaatactgtctcttaacatcacactctaagtgcttcctatctcttttttacacataaccaaaa

SEQ ID NO: 237852 - DNA, 547 bp, Homo sapiens
gtcatatggtcagagtactctagtttagtggacagagatatatgattctggtattaattgttttccattttatattcagtaaccacacttgaaataattgaggcagataccatcatacaaagataatttgatgcagtagctttgtaktcaatgtggtaactagattccaaaattttcccgtaataattccagtctccaggtgttcatgccaaggtagcttccctccacattaaatccaggctgcttctctgtaaccaataaaatgcagtagaatgacattgctttgtctcacagctaatctagatcataaaaaaggtcctgcagcttctttcttggtcttttagaacttttgcttttgtgaatcttccttttgcaaacaactaccatgctgaaaagcctgaaccatatggagaaaccatgtgtaatcactgtcttacagctcaagaaaaatgatcaatcaacagacaacatcaactctgttacacaggtgaaccgtctttgatattacaaacttaacaggcacctgagcacctgatgcttatagcac

SEQ ID NO: 237853 - DNA, 603 bp, Homo sapiens
ctgtacaaagcaagaagccaacttcatattaaatcttggtccatttcttggatgttttttataacaactaatttctgatctaggtcaacagttctatcacgtacctggctttatcctgcagcttatgtcttatcaaaaaaatkgctttcatgagatgattatcataaattacacaaaaatatagtcaaccaactgttttaatagcactagactgaatgaaagccatacacttttcaggaggtcattttatactacatgttttgataagacaaaaggaactgagcataacttatacagctgcctaaacaaagtatttacatcccacatactcttgtattttttaacatcttatgtgcaagtatgtatttatcaaatattaggaagactgagaacccatattatttgtgcatttgtgcttccatgtgtgttttttttcttttacacatgatattctggtatattgaatgatatcacattttactatattgtatttgaatgatgagttaaccactcaaatttttatttttattttttggagtagtgtctagcaggaaatatgttcacactatagctgtatggggtagatattacccattaaaggag

SEQ ID NO: 237854 - DNA, 603 bp, Homo sapiens
ctgtacaaagcaagaagccaacttcatattaaatcttggtccatttcttggatgttttttataacaactaatttctgatctaggtcaacagttctatcacgtacctggctttatcctgcagcttatgtcttatcaaaaaaatggctttcatgagatgattatcataaattacacaaaaatatagtcaaccaactgttttaatagcactagactgaatgaaagccatacacttttcaggaggtcattttatactacatgttttgataagacaaaaggaactgagcataacttatacagctgcctaaacwaagtatttacatcccacatactcttgtattttttaacatcttatgtgcaagtatgtatttatcaaatattaggaagactgagaacccatattatttgtgcatttgtgcttccatgtgtgttttttttcttttacacatgatattctggtatattgaatgatatcacattttactatattgtatttgaatgatgagttaaccactcaaatttttatttttattttttggagtagtgtctagcaggaaatatgttcacactatagctgtatggggtagatattacccattaaaggag

SEQ ID NO: 237855 - DNA, 603 bp, Homo sapiens
ctgtacaaagcaagaagccaacttcatattaaatcttggtccatttcttggatgttttttataacaactaatttctgatctaggtcaacagttctatcacgtacctggctttatcctgcagcttatgtcttatcaaaaaaatggctttcatgagatgattatcataaattacacaaaaatatagtcaaccaactgttttaatagcactagactgaatgaaagccatacacttttcaggaggtcattttatactacatgttttgataagacaaaaggaactgagcataacttatacagctgcctaaacaaagtatttacatcccacatactcttgtattttttaacatcttatgtgcaagtatgtatttatcaaatattaggaagactgagaacccatattatttgtgcatttgtgcttccatgtgtgttttttttcttttacacatgatattctggtatattgaatgataycacattttactatattgtatttgaatgatgagttaaccactcaaatttttatttttattttttggagtagtgtctagcaggaaatatgttcacactatagctgtatggggtagatattacccattaaaggag

SEQ ID NO: 237856 - DNA, 597 bp, Homo sapiens
ttatttttattttttggagtagtgtctagcaggaaatatgttcacactatagctgtatggggtagatattacccattaaaggagaagataagatctggaaagatcaatgcttgcctgaagtcacaacaaattcagaatttaaaccatctgtctattaagtccacaacatttagacaatattggtgctgtcaatattaatcgaatgcactaattgaagttatgtgtcaataccaatgaggtctaaattagtttgttaaaaattatgctacaatatatrtggaaaacatttacaaatcttggagttccatttcaatttgaacaatggtccttaaatactccatgatttttccccaatcaaaactgttaattgatagaaaagaaaaataactcccccgttattttagttgcagaattctctggtacaaggtaatgtactacattggcattcattttattttcttaaaattattttgtatatatcggccagatgaatttaaaacttggtgatgctccataaagaatgaatgaaattatgagagaaaagggaaaaagggagcactttgtaggtaggacaaagtcagtgatagagttgtttga

SEQ ID NO: 237857 - DNA, 585 bp, Homo sapiens
ttcatttgataagcattttcatggacgctgggggcaaaaaaatgccaattttgtacccaagtagcttgtaaactctaatggcaaaaaagtgtaaataaatcaacatataaaggatacggggtgctggaatggaggtttgttgtgggtaccacaagaacacattaagtttttaaattatctytgaagtcaggctgcctaggtaaacacgctacccctgctgtaccacactatgttccaagttttcttgtttgtcaaataaaaatttttaaaagtagtagcaatataacatgtttgtcaaaagtagtaatgaaaaatacacaagacatgatcagaataggttctggtacatcatgagccatcaataaatgttagctgtattatttctgtaattctatttttgtgatcaaagtaatatttggtgattttagaacaatgagaacgtgtaaataagcaaaatatttttaaaatctacactatatccctcaagataactattaacaatatttatacttatctttatctatatgattatctactgtgttcttgtttgtgactgtgtatgcatgtatttaaaacatgagaatt

SEQ ID NO: 237858 - DNA, 585 bp, Homo sapiens
ttcatttgataagcattttcatggacgctgggggcaaaaaaatgccaattttgtacccaagtagcttgtaaactctaatggcaaaaaagtgtaaataaatcaacatataaaggatacggggtgctggaatggaggtttgttgtgggtaccacaagaacacattaagtttttaaattatctctgaagtcaggctgcctaggtaaacacgctacccctgctgtaccacamtatgttccaagttttcttgtttgtcaaataaaaatttttaaaagtagtagcaatataacatgtttgtcaaaagtagtaatgaaaaatacacaagacatgatcagaataggttctggtacatcatgagccatcaataaatgttagctgtattatttctgtaattctatttttgtgatcaaagtaatatttggtgattttagaacaatgagaacgtgtaaataagcaaaatatttttaaaatctacactatatccctcaagataactattaacaatatttatacttatctttatctatatgattatctactgtgttcttgtttgtgactgtgtatgcatgtatttaaaacatgagaatt

SEQ ID NO: 237859 - DNA, 562 bp, Homo sapiens
tatgattatcaacagtttcttccatctgatattacttcgctgcaatttcacagcaaatcatgaatattgatattttttctagtaaccccctcatcatcttatattaagtagtatgtttcttatttataattatttgttgtttccttttatgagaatatgagctccctggccaggcgcagtggctcacacctgtaatcccagctatttgagcagccaaggcaggaggatagcttgagcccaagagttggagaccagcttgggcaacatagcaagtccctatctccmcaaaaaaaaaaaaaaaaaaagaatagctgggcatgatggcatggtggcacatgcctgtagacccagctactcaggaagctgaggtaggaagatcacttgagcccgggaggtcgaggctgcagtgagcagaaatcccacatctgtactcctgcctgggagatagagcgagaccctgtccctaataaataaatatatgtatataagctccatcacaaaaatcaacatttttgttttattttcttgctgctctgcctgcacagcctggaacatgtagtaa

SEQ ID NO: 237860 - DNA, 607 bp, Homo sapiens
ataggaatacaaaaagcaatatcaaataatagtgtaaaaattgcatccagagtagtggcgaagcatgctggtctcagtggtagtatgttgggggaagtcagggatcccaaacagagggatcractgaagccatggcagaagaatgtggattgtgaagatttcatggacatttattagttccccaaattaatacttttataatttcttatgcctgtctttactgtaatctctaaacataaattgtgaagatttcatggacacttatcacttccccaatcaacacccttgtgatttcctatgcctgtctttaatctcttaatcctgtcatctcataagctgaggaggatatatgtcatctcaggaccccatgatgattgtgttaactgcacaaattgtagagcatgtgtgtttgaacaatatgaaatctgggcaccttgaaaaaagaacaggataacagcaatgttcagtgaacaagagagataaccttaaactctgaccaccggtgagccaggcagaacagagccatatttctcttctttcaaaagcaaatgggagaaatatcactgaattcgttttctcagcaaggaacatccctgagaaagacaat

SEQ ID NO: 237861 - DNA, 607 bp, Homo sapiens
ataggaatacaaaaagcaatatcaaataatagtgtaaaaattgcatccagagtagtggcgaagcatgctggtctcagtggtagtatgttgggggaagtcagggatcccaaacagagggatcaactgaagccatggcagaagaatgtggattgtgaagatttcatggacatttattagttccccaaattaatacttttataatttcttatgcctgtctttactgtaatctctaaacataaattgtgaagatttcatggacacttatcacttccccaatcaacacccttgtgatttcctatgcctgtctttaatctcttaatcctgtcatctcataagctgaggaggatatatgtcatctcaggaccccatgatgattgtgttaactgcacaaattgtagagcatgtgtgtttgaacaatatgaaatctgggcaccttgaaaaaagaacaggataacagcaatgttcagtgaacaagagagataaccttaaactctgaccaccggtgagccrggcagaacagagccatatttctcttctttcaaaagcaaatgggagaaatatcactgaattcgttttctcagcaaggaacatccctgagaaagacaat

SEQ ID NO: 237862 - DNA, 548 bp, Homo sapiens
gtataatgtgaggtagaggtttaattttatattttcatgcgaatatccaaacattccagtatagtagccaccacacaaaaccagcatgggccctcacaaaaactttggttcagataaaaaggctgatgatggcacrtatacccataaagagattataataaggtttgttactcacttaatggagatttctggagagaacaaatccagcttcccacattggtttgaaaatggtttaagagacttgagaaaataccttggcttggactttttatagtagttagggtatgtgcaccaagtgaggattcttttacgtggttttaacttcaagttagcaccaaatgaggaagagtcttatcatcctgcccaggatatggggcatatgcagaagagggagaagtgaggcttaaagctgtcaactgtcaaacatcaaaaggtggagtcagactttattccatcaggcatcatttgttaaaaggatcaatgttttccccactgcattacctttgcacctgtgaggaatgtgttgaatgtgtacttgtagatcgatt

SEQ ID NO: 237863 - DNA, 548 bp, Homo sapiens
gtataatgtgaggtagaggtttaattttatattttcatgcgaatatccaaacattccagtatagtagccaccacacaaaaccagcatgggccctcacaaaaactttggttcagataaaaaggctgatgatggcacatatacccataaagagattataataaggtttgttactcacttaatggagatttctggagagaacaaatccagcttcccacattggtttgaaaatggtttaagagacttgagaaaataccttggcttggactttttatagtagttagggtrtgtgcaccaagtgaggattcttttacgtggttttaacttcaagttagcaccaaatgaggaagagtcttatcatcctgcccaggatatggggcatatgcagaagagggagaagtgaggcttaaagctgtcaactgtcaaacatcaaaaggtggagtcagactttattccatcaggcatcatttgttaaaaggatcaatgttttccccactgcattacctttgcacctgtgaggaatgtgttgaatgtgtacttgtagatcgatt

SEQ ID NO: 237864 - DNA, 664 bp, Homo sapiens
aggattatgtaatattagaggtccaaaatacattaaatactggccaatacacttactttcaaggaagaaatgaagatatttaatagctattataataaaaatacacattaggggcctagccagagatagaggccaggtatcataattctgggctagtaatttttgtgactccaagctggaaactatatatttctaaaatattcaaatgaaagattctaaaygcagcattctatagctgaacttcccaaaatattgactactagctacacctggctgttgtgcaggtaaaaagtgtgtagtctgaattgagatatgctatgagtagaaaatcatacctaatttaaaatatttggtacaaacaaaggaatgtaaaatatctctaacagtttaagaatattgattatccacttaaataataataattaaatattaatatagagtcaaatatatcgcttttaccacttgcttccttttactttttaaaatggtttaaaatttaaaattttatatttagcttatatttgtggcacacaatatttttctcttggacagagttgttctaaaaactcaatgagtgaatactttatctatcttaaagatctctcacaagggattttcaccccaagcagaccagcctatctcaactcttccacatgcaatagct

SEQ ID NO: 237865 - DNA, 664 bp, Homo sapiens
aggattatgtaatattagaggtccaaaatacattaaatactggccaatacacttactttcaaggaagaaatgaagatatttaatagctattataataaaaatacacattaggggcctagccagagatagaggccaggtatcataattctgggctagtaatttttgtgactccaagctggaaactatatatttctaaaatattcaaatgaaagattctaaacgcagcattctatagctgaacttcccaaaatattgactactagctacacctggctgttgtgcaggtaaaaagtgtgtagtctgaattgagatatgctatgagtagaaaatcatacctaatttaaaatatttggtacaaacaaaggaatrtaaaatatctctaacagtttaagaatattgattatccacttaaataataataattaaatattaatatagagtcaaatatatcgcttttaccacttgcttccttttactttttaaaatggtttaaaatttaaaattttatatttagcttatatttgtggcacacaatatttttctcttggacagagttgttctaaaaactcaatgagtgaatactttatctatcttaaagatctctcacaagggattttcaccccaagcagaccagcctatctcaactcttccacatgcaatagct

SEQ ID NO: 237866 - DNA, 607 bp, Homo sapiens
tattttttttcctttgattggtccgtgctttctagtttccttgtgtgttttgtaattttttgtttaaaactggacatttgtatccaataatgtggtaactctagaatcagattctcctacttgcctagggtttgctgctttttgtttttsttttttgttttcttttgatagttgtaggctgtctctgtgctaaaaatcatcttgaactgttaatttaagattttctcaggtcttttctgagcccgtgtctttcgctgggaatgtgtgatatctttctaattacctgtatatgtgcaattacttttgattatcctagtctttaatgtatggctcctaaagggggaaaagagaaaaaaatgattagaaaagaaggtgtttactctttaaattccctgaaatttacttcagctagagagaacggaggttacaacagtgtggggagggtcaaaaccaatgttcgcctgcctctttgtctatacgtttatgactggaagcagcaatctgtgatcagataaaagatcttgatatttaaagggcagtttgtcttttgaacaccccggctcttgcaagctgtgtgcaactgaataggttggggatagatgtgtaa

SEQ ID NO: 237867 - DNA, 551 bp, Homo sapiens
tagagttattagaggaaggaaataataaagattggaacagagatgaacaaagtagagaaaatcaacaaaccaaaagattactttgttgtgggaagtcagggaccccaaatggagggactggctgaagccatggcaaargaacataaattgtgaagatttcatggacatttaccagttcccaaaaaatactttcataatttcttatgcctgtcttaatttaatctcttaatcctattatctttgtaagctgaggatgtacatcacctcagggccactatgataattgtgttaactgtacaaattggttgtaaaacttatgtgtttgaacaatatgaaatcagtgcaccttgaaaaagaacagaataacagcgattttagggaacaagggaagacaaccataaggtctgactgcctgcagggttgggcagaatagagccatatttttcttcttgcagagagcctataaatggatatggaagtagggaagatatcactatattcttttcctagcaaggaatattaataattaataccctggggaaggaaggcat

SEQ ID NO: 237868 - DNA, 543 bp, Homo sapiens
gatatctgatacttgctttaaattattccagttccttgcctttgcatgtattcactgcaccacctttcccaaaaaaaaaagaatgacagtggataaataaaagaagcaggagtggtaaaatgacaaaatgttkataaatgttaaagctgattgatagacactagaggttttaattatactgtcataactctctggttttattattaaatttcccttattaaactttttgaaaagaaaggaaaaatattttctgaagaaactttggtttgatgttgagtttttagacgtgatgccaaaagaacaattcatccatgaaagaaacaaatatacaaggcagaatttcttaaaattaaaaaattctattatgtaaaagaaaccgttaagaaataaaaagaaaatgagatattttcaaaacaaatatctgaaaaagatgtgtgccaaaaacataccaagaactcttaaaacttaacttaaaataataaacttaattttaaaatgggcaaaatatttaaacaaacacctcaccaaagacatacagaatgc

SEQ ID NO: 237869 - DNA, 592 bp, Homo sapiens
caaggcagaatttcttaaaattaaaaaattctattatgtaaaagaaaccrttaagaaataaaaagaaaatgagatattttcaaaacaaatatctgaaaaagatgtgtgccaaaaacataccaagaactcttaaaacttaacttaaaataataaacttaattttaaaatgggcaaaatatttaaacaaacacctcaccaaagacatacagaatgcaaagaagtttatgaaaaaaatgctcaaaatcatttactggtcattaggaaacacagattaaaacaatgaactacctcttcacacctattagaactgctgaaattcaaaaacttcacaatatcagttgctgtgaggataccagagcaacaggagtgcaaaataatacagacattttggaatatattttggcaatttctttaaaaactaaagtgcactattcacaatagtaaagacacaatcaacctaggtggcccttcagtggtggactgggtaaagaaactatggtacatatacaccatgtaatactacgcagacattaaaaagaatgaaatcatgtcctatgcagcaacatggatgtagctggaggccataatccta

SEQ ID NO: 237870 - DNA, 419 bp, Homo sapiens
tatctaactaaattgtacttccaactaagatttgtcctaaagcaggatttaccacagtttcagtcacgctaaaccataatccaaatgtgttaatactattgcattacctatgatctctaattcttatagtttttactttcacktcagacccattaatcaatcaatcaaaataatatgcaaaacagagccgtgatgtgggcccatttgggatttaaactgacagccttgtctccagcacaagtttttgtaagattgttcttacatgaaccaagaagcatgacctcagtgtataatagaggacgggggggacagatggaaaaaactacagggaattgactttcttttttgtaggttgtttgaaaatcaattattatagaggtctccattctagtatggcatgagtgggatgttgtcagcta

SEQ ID NO: 237871 - DNA, 341 bp, Homo sapiens
gcctcacaatcatggcagaaggtaaaagacacttcttacatggtgagaagagagagagaatgaaaccaagcaagagttttccccttataaaaccattagatctggtgagacatattcaatacctccagaacaatatggggaaaactgcccctgtgattcagttatctcccactgggtcctgccyacaacacatgggaattatgggaaccacagttcaagatgagatttgggtggagacacaggcaaaccatatctttctgcacctagcctttctcaaatctcatgtccttacatttcaaaaccaatcattctttcccaacagtcctccaaagtcttcacta

SEQ ID NO: 237872 - DNA, 590 bp, Homo sapiens
atttggagtgtagtatatggatggggacaaagtacaggagagaaaactgactagagaaaattatacttattaaaatatttttaaatataagaagttgattatgagaaatagattctaaggaaagtactgttacaggatcctttttgtgttgcttttccagctggaaacctctgcagccagtggcgcttttgctggagttttgctcggtcccactgggcccagttggcctggcaggctgtgcttggcttatgctaccggcctgataagctgccaagagcaatcggagcggctagtggtgtgtgagcgagtgagtgtggggtctggccactatacacagccagggatgcagtgggcagctctaggtgycgacatgggcagtggctccctgtgaggctgcggctggaccaggtatactgcaaagcagcttccacggctggcactggggaacgtggtggcgcccagaagcttgacaccagaaccacagagccccaaagagagtgtcacagccctggctctgggagcttctaggtctggtctccccagaggaccgcagctcttctcttctctcttctctccttctcatcacccac

SEQ ID NO: 237873 - DNA, 508 bp, Homo sapiens
tcttttatttcaggtaagtcattaggatgactcaatcactgggtttggtatgctagttgctcactaaatatttataaataaatccatgaatgaattattacagtgaattgaagaggtgaattttctgaacattaccattgtcataaactttatgatattccaaaattttacttggttaacttaatttcattgtgaatagttctctattcttgcattttacaaaataagatatatactactttgtattacttggctattattttccagttaacctgtctttctttattgcttcttttaatcttaaatgatttatatcagtttccaaaatacatgaatttcacaatcataatgcttgaagttaccctctttttttttcctctcttttctgcatggagctatgcataaactatattgctaaaatccatttcatggagtgttcattttttaaaatatggsatgaataattacatgttcttctttaaatctgcttcttgttcaatgataccat

SEQ ID NO: 237874 - DNA, 403 bp, Homo sapiens
ggttgtgtgctaggcactgagacacaaaagtgaacaagacgaagtccccatctgaaataacttagagctggaggagaagactgacatgaaaacaggttataataccacaaaaagatgtaaagataacttcaggttcctgcagctagacaaaatacttgatgtcgtttctaaaggtaatgtggragatatcctgcatgggaatggaagtcaggaaatcaagggagaaaaaatattttgagcagagcgcgcagcatgaatgaaagaagcattgccaaaataacgtctcctctttattttatacacattgttttattgtagttatcaggttatgtgccatctctttctctaaaccgcagggccctctaggcaaggtacttactttgtctatatttttatggtagct

SEQ ID NO: 237875 - DNA, 599 bp, Homo sapiens
aaaatatgtatgttatttcaactatcacatatgacatctaatcctattacaatggatagaaaaaggtttgcactgacaggcataatactggaggaaattgagtgacacacatttcctactttgaagggtgcagtagcctcagtactgcctaagtaaacatcaacacatacttttaatacaaccaacagaggtcaaaactgatgtaaaagttcacaaacctatgatgatttacatttgcagtaagaaaatattttcaattatattccattactcaagaatcttgagtaatgttttactcaaggttttttggctgcataaatgtcttcttttgagaagtgtctgttcatgtccttcgcccactttttggtggggttgtttgtttttttcttgtaaatttgtttgagttcattatagattctggatattagccctttgtcagatgagtaggttgcgaaaattttctcccattttgtaggttgcytgttcactctgatggtagtttcttttgctatgcagaagctctttagtttaattagatcccatttgtcaattttgtcttttgttgccattgcttttggtgttttagacatgttgcccat

SEQ ID NO: 237876 - DNA, 486 bp, Homo sapiens
gtacatccatgttggtatctgcagctacacacacacacacaaacacacacacacatccatccactcattcacatatatgtgtgtgtgtctctgtgtcatgtatggattaagattagacagtatagtttttaaaattattttttattggtacataaaagatgtacatattctctgggtacatgtgataatttgatacattaatataatctgaattggaatatccattaccttaactatttctcttttcttcatgctaggaayattcaaataaggaacagtagattaatgttaactatagtcaacctactatagagattgtgctctgctgtactttggcctcctttagccacagctggagctggagcagctgagacatagggcaccaagtccagaaggtgcacagagcagcaggaccctgtacccagcccatgagaccatttttctcttttaggcctctggacctgtgatgggaggggctgccatgaa

SEQ ID NO: 237877 - DNA, 502 bp, Homo sapiens
ctacttcagctcatgcacagtgtgctgcccccactgtcctgcacccactgtccagcactccccagtgagatgaacccagtacctcagttggaaatgcagaaatcacccatcttctgcgccactcatgcttggagctgtagactggagctgttcctattcggccatcttggctatctgtactgtgctgaaattttaaaagccagagggcaaagatgacaataagaaaccagtcctccaaatgctgagggtgattgatgttttctcagttttctcacaataaggcccgggtatatgkgctcaacacagagtgaggactcaagattatagacacatgactgtgtaaaatgcctagtgggtggagaagaaaatgtctgaaactccataacctggatgaaaatcagaatgtttaaacagacttcatgtgaagttgttgcaactcttggaagaggcaacaggaaagcctttccttgactattcctattttggtcaacaagtagttcat

SEQ ID NO: 237878 - DNA, 476 bp, Homo sapiens
ttcgttttgytgtcttaaatatgaaaggatcttgctgaaaggctaagtgataaattaggtgaagattccaacattgtgagctacagaatcccattcaccagtccagtttttctcactgagtcagtttacgagtgcagtttggcggttcagttggtgggatgcagcgtgttgatggatgtcccctccctctacaacctctgctagaacttggaaataggggagataaagtgtgtaggtttttttgtttctggaaagtaaatataaagccacctacttgatcacagaataggtatggagattccagctcacacaacagggcacaactcagtctcacagataaacatgaccaaataaacaatatattgatctcagggtcagggtaggagatcagtaagaaatggagcataaagaaaggtgaatggtagagatagctgaaggagaattccaggccccaggcaggtaaatcctactacgga

SEQ ID NO: 237879 - DNA, 478 bp, Homo sapiens
ttttcgttttgctgtcttaaatatgaaaggatcttgctgaaaggctaagtgataaattaggtgaarattccaacattgtgagctacagaatcccattcaccagtccagtttttctcactgagtcagtttacgagtgcagtttggcggttcagttggtgggatgcagcgtgttgatggatgtcccctccctctacaacctctgctagaacttggaaataggggagataaagtgtgtaggtttttttgtttctggaaagtaaatataaagccacctacttgatcacagaataggtatggagattccagctcacacaacagggcacaactcagtctcacagataaacatgaccaaataaacaatatattgatctcagggtcagggtaggagatcagtaagaaatggagcataaagaaaggtgaatggtagagatagctgaaggagaattccaggccccaggcaggtaaatcctactacgga

SEQ ID NO: 237880 - DNA, 476 bp, Homo sapiens
ttcgttttgctgtcttaaatatgaaaggatcttgctgaaaggctaagtgataaattaggtgaagattccaacattgtgagctacagaatcccattcaccagtccagtttttctcactgagtcagtttacgagtgcagtttggcggttcagttggtgggatgcagcgtgttgatggatgtcccctccctctacaacctctgctagaacttggaaataggggagataaagtgtgtaggtttttttgtttctggaaagtaaatataaagccacctacttgatcacagaataggtatggagattccagctcacacaacagggcacaactcagtctcacagataaacatgaccaaataaacaatatattgatctcagggtcagggtaggagatyagtaagaaatggagcataaagaaaggtgaatggtagagatagctgaaggagaattccaggccccaggcaggtaaatcctactacgga

SEQ ID NO: 237881 - DNA, 458 bp, Homo sapiens
gttaattcattcctttttatggctgtgtactattccatcatatatatataccacagtttctttgtccactcattagttgatgggcatttgggttggttccatgattttgcaattgtgaattgtgctgctataaacatgagtgtgcaagtatctttttcaaataatgacttcttttcctctgggtagatacccagtagtgggattgccggatcaaatggtaattctacttttagatctttaaggmatctccacactgttttccatagtggctctactagtttacattaccatcagcagtgtagaagtattccctgttcaccatatccatgtcaacatctactgtttttttttttttttcgattattgccattcttgcaggagtaaggtggtattgcactgtggttttgatttgcatttccctgatcattagtgatgttaagcattttttcatatgtttg

SEQ ID NO: 237882 - DNA, 588 bp, Homo sapiens
tttctgtaataagtgctgtgaatgaacattyaaggaggagggagaagggcaccaggaggaggttgcagttttaaataggatggtcagggtagactccgctaagataacatttgtacaaaaacctgcagaaagtcaggaaatgagacaagcaaatacctggagaaagggaattccagatagaagcaaaggccctcaggcagaaacatgccttgtctgctgaaagaatagcagggtggaataaaggcagagaaggtgggagatctggttagatggtgcagggccttgcaggtaaaatggaagccatggaaggaatcatgtaggttatagccatgagctaaggagagggtaatacaatataacctacatgtaggttatagccgtgggctaaggagtaagtaatatgatataacctacagttttctaagaattactctagatgctattttgagaataaacttaagaggctaaaaatagaagcaagaagactgtgaggctactgcaatactgcaagagagtgatgatgactatatgacccagcaattctattccttggtatatatctaagagaagtgaaaacaaataaaacac

SEQ ID NO: 237883 - DNA, 422 bp, Homo sapiens
tggagatttcaataatgctgaaaggttaatttttttcaggttaaaaaaaaacaattttacagatctattagttgttacctggcagccttttggttaagaataaggttaactgtyttgaactggtaaacaaaggctttaaattaatcaagtgttgtacaatagatgtatgtgaattaccattctttgtattaaaggttttttttaaaaagttatagaacctgatgtgaagcccatttttcatcttaatctcaaatcaattacttagttttagcagaacaaaaacactcatcacattaccttacatttgtaggtttgaatattagtttaaataatcattgcttccttgttttattgttttgtttttatttatattacatacatttttttggtttataatataaaacctataggcacaagacatt

SEQ ID NO: 237884 - DNA, 553 bp, Homo sapiens
ggaatctttagggacttctatgtataagatcatgtcatctgcaaacagagacaattttacttctttctttcaatttggatatcttttatttatttttcttctctaaattctctggctaggacttccagaactatattaaatagatgcgagagttcaaatcctttcttttgtttctaactttagaggaaagctctcagctttatatcactaagtatgatattagctgtgggattgtaatacctagtctttattatgttgaggcacattccttgtatacttaatttgttgagaggtttcttttttaatcatgaaaatatgttgaattttgtccagtgctttttctacatctatygagatgatcatataatttttgtccttcattctgctaatggggtgtgtcatgtttatagattcacatatattgaaacagccttgtatctcagggataaatcacaattgattgtggggtatgatccttttaatgttgtgttgtattcaatgtgctagtatttctagatttctttgcatctatctttatcagttatattggccc

SEQ ID NO: 237885 - DNA, 484 bp, Homo sapiens
tctagattctgagaaatatgtgagagcttttcaaagcccaagtggacaactcattcaaagcttttcctttcaagctttttggctactctgttgtttgcatttaytgttatccattgcagtacacagccacaaagttaaacaattactaatagttgctttcaacaaatgtcttctaaccaaagggctttttgtagtgggagagcttcaagatacatcgaatactgacatcattgcaagtagggtcttcctgggaaccactaagagatcaaagaatgacatttctttgggaataaacctttaaaagagcttcaactcttttctgctcctttgagtagctactagactgctgtttttcaccatgaatgcacattgatacatttcaaggctacagtggagttggagtgtgggatgtgggactggagaaagttataaaacacaaagctctctgttcttattgagattagaacttttcttgaattgctgc

SEQ ID NO: 237886 - DNA, 484 bp, Homo sapiens
tctagattctgagaaatatgtgagagcttttcaaagcccaagtggacaactcattcaaagcttttcctttcaagctttttggctactctgttgtttgcatttattgttatccattgcagtacacagccacaaagttaaacaattactaatagttgctttcaacaaatgtcttctaaycaaagggctttttgtagtgggagagcttcaagatacatcgaatactgacatcattgcaagtagggtcttcctgggaaccactaagagatcaaagaatgacatttctttgggaataaacctttaaaagagcttcaactcttttctgctcctttgagtagctactagactgctgtttttcaccatgaatgcacattgatacatttcaaggctacagtggagttggagtgtgggatgtgggactggagaaagttataaaacacaaagctctctgttcttattgagattagaacttttcttgaattgctgc

SEQ ID NO: 237887 - DNA, 484 bp, Homo sapiens
tctagattctgagaaatatgtgagagcttttcaaagcccaagtggacaactcattcaaagcttttcctttcaagctttttggctactctgttgtttgcatttattgttatccattgcagtacacagccacaaagttaaacaattactaatagttgctttcaacaaatgtcttctaaccaaagggctttttgyagtgggagagcttcaagatacatcgaatactgacatcattgcaagtagggtcttcctgggaaccactaagagatcaaagaatgacatttctttgggaataaacctttaaaagagcttcaactcttttctgctcctttgagtagctactagactgctgtttttcaccatgaatgcacattgatacatttcaaggctacagtggagttggagtgtgggatgtgggactggagaaagttataaaacacaaagctctctgttcttattgagattagaacttttcttgaattgctgc

SEQ ID NO: 237888 - DNA, 484 bp, Homo sapiens
tctagattctgagaaatatgtgagagcttttcaaagcccaagtggacaactcattcaaagcttttcctttcaagctttttggctactctgttgtttgcatttattgttatccattgcagtacacagccacaaagttaaacaattactaatagttgctttcaacaaatgtcttctaaccaaagggctttttgtagtgggagagcttcaagatacatcgaatactgacatcattgcaagtagggtcttcctgggaaccactaagagatcaaagaatgacatttctttgggaataaacctttaaaagagcttcaactcttttctgctcctttgagtagctactagackgctgtttttcaccatgaatgcacattgatacatttcaaggctacagtggagttggagtgtgggatgtgggactggagaaagttataaaacacaaagctctctgttcttattgagattagaacttttcttgaattgctgc

SEQ ID NO: 237889 - DNA, 438 bp, Homo sapiens
ccagcaaccaaatgatgatccaaacaagaaaaagccacattcaaattaataggaaattccattgcaattttttatgaactcaccccaacgcctgataggtatgctcttggtcttgggaaggaggcatcccaattctcaattctctatctcaagttgaactcgagagagagaactcgagagaggcaacttgagagagagcagagcacaccttattcacactgttctaatctgtccaggtgctgcctagtggaggaatctcaggtagggagaagggaaacttacctgcagaattctggagcaatagattacaggtggagaataccttagaacttctaaattagcatcccggttgccaactctttccttcaactgagagggagcacagcacaccttrttcacaaggttctaactggatagaggctgcctgaaggattagtc

SEQ ID NO: 237890 - DNA, 500 bp, Homo sapiens
agatggggttttggtgtggatgtcctttttgttgatgttgatgcttttcctttctgcttgttagttttccttctaacagtcaggcccatcagctgcaggtctgttggagtttgctggaggtcctctccagaccctgtttgcctgggtattaccagcagaggctgcaaaacagcaaatattgctgcctgatccttcttctttaaaattcttcccagaggggcacctgcctacatgaggtgtctgtcagcccctactgggaggtgcctcccagtcaggctacacgggggtcagggacccacttgargaggcagcctgtctgttattggagcttgaatgtcatgctgggagaaccactgctctcttcagagctgtcaggcagggatgtttaagtctgaagaagctttctgctgccttttgttcagatatgccctgcacacagaggtggaatctagagaggcagtaggccttgttgagctgcggtgggctccacccagttttag

SEQ ID NO: 237891 - DNA, 412 bp, Homo sapiens
cacccacttctcagaccaacttccagtcctacaagctccattcatggtaagtgccttatacaggtgttagggacaaactgcccccaaaaagcttcttgaaatgtctccgtgctgccctccgctccccactctgcaactcctttccatgccgccccactctttccctcaagcctgtttacatttctaagcccttatctgggtgccagcaaactttgcggtgaagccagcaaacttcacttatcagaccccgctgctgtgagcaaaycccaattacaaactatccggaccacacagggggaggtcgtgggaagcataaacaaactttaccctcctgtaagttcctgctatcataaatgtcaccaggtgatatttggcaaaattaaccagcaaacacccccaggatgcggccgta

SEQ ID NO: 237892 - DNA, 412 bp, Homo sapiens
cacccacttctcagaccaacttccagtcctacaagctccattcatggtaagtgccttatacaggtgttagggacaaactgcccccaaaaagcttcttgaaatgtctccgtgctgccctccgctccccactctgcaactcctttccatgccgccccactctttccctcaagcctgtttacatttctaagcccttatctgggtgccagcaaactttgcggtgaagccagcaaacttcacttatcagaccccgctgctgtgagcaaaccccaattacaaactatccggaccacacagggggaggtcgtgggaagcatraacaaactttaccctcctgtaagttcctgctatcataaatgtcaccaggtgatatttggcaaaattaaccagcaaacacccccaggatgcggccgta

SEQ ID NO: 237893 - DNA, 488 bp, Homo sapiens
caataggggtttctttggtaataaggtctctgctttaagcatttgttaaaaccagattaatctgaataagaaaataagatgacagaggcacatcagttactcatcgctcagttaatccctggcagtgcatgtatctaccgagcacccagcaaggtatacgcagagctcgtgctaagttatgtcgacacagttcaggcctcaggatacaccccaggtcttgttcacaggtgtgttacttatagtggattctcaatatacgctgtttcctcttctcacggcgtagaatccacagtgctttcacagatgtccccaagattggcagccgcctcctccaggccccatgctagrttgctgtgcatgttacagagctccccgtgctgccttgtgatttctctgtttatttgttgggctcctccatgagcctgccctttcctaggataagcaccacgatcagtgtttcacctttctggacccggtgtctgatgcaa

SEQ ID NO: 237894 - DNA, 508 bp, Homo sapiens
cagatctttataccagcaataggggtttctttggtaataaggtctctgctttaagcatttgttaaaaccagattaatctgaataagaaaataagatgacagaggcacatcagttactcatcgctcagttaatccctggcagtgcatgtatctaccgagcacccagcaaggtatacgcagagctcgtgctaagttatgtcgacacagttcaggcctcaggatacaccccaggtcttgttcacaggtgtgttacttatagtggattctcaatatacgctgtttcctcttctcacggcgtagaatccacagtgctttcacagatgtccccaagattggcagccgcctcctccaggccccatgctagattgctgtgcatgttacagagctccccgtgctgccttgtgatttctcygtttatttgttgggctcctccatgagcctgccctttcctaggataagcaccacgatcagtgtttcacctttctggacccggtgtctgatgcaatgcc

SEQ ID NO: 237895 - DNA, 488 bp, Homo sapiens
caataggggtttctttggtaataaggtctctgctttaagcatttgttaaaaccagattaatctgaataagaaaataagatgacagaggcacatcagttactcatcgctcagttaatccctggcagtgcatgtatctaccgagcacccagcaaggtatacgcagagctcgtgctaagttatgtcgacacagttcaggcctcaggatacaccccaggtcttgttcacaggtgtgttacttatagtggattctcaatatacgctgtttcctcttctcacggcgtagaatccacagtgctttcacagatgtccccaagattggcagccgcctcctccaggccccatgctagattgctgtgcatgttacagagctccccgtgctgccttgtgatttctctgtttatttgttgggctcctccaygagcctgccctttcctaggataagcaccacgatcagtgtttcacctttctggacccggtgtctgatgcaa

SEQ ID NO: 237896 - DNA, 583 bp, Homo sapiens
ctagggtgaggggtgaataaggtgagcatgggccccagtgacaagccacaggcagtgggatgttctcatctttcgctgccaagtgggatttggggagctaaacacacaccacacacacacacatgcacacactcacacatacacaccaacacacagagacacatacgcacatgcatgcatatgcacaccayagcacacacacacaccccacacacatacatgaacagatgcacacacacaccacatacaaatgcacatacacaacacacaagtgcactcacacaaacacactcttgccttggtttcatatgtgtagctagagtgacaaacagaacagggaaaggaagctccccccaaacagaggcctttattaaatttataacaattgggttggtatagaatagaggttcagttaacatttcttgaatgaattactgcagaatgtattgaatattatctataggtgaggttttccatatttaactctgccacaatataagaaaaatgacattcccttcacctgtgacctgagaattcttcattaccagatcccatttttgaaagcatgtgccttgtttgatct

SEQ ID NO: 237897 - DNA, 604 bp, Homo sapiens
ataatctgacctttacaattttctgttgtttatttgttttaaaaatatgctttggatttattttcaatacttaaaaaatattatcaaggtccgtagtggaattacaacttgttacagataattgttgctctttaattctacatcctatgggattaattttgtaattcaattctcaaatagcatacacttagtaatagctatttttctaataatttcagtatcataggaatatgtgctttattaagaaggatctaaatatacaactttaaaataccccaaactttttaaaataagataaattccctctaaatattgkgactgaaaacttcattgaagtgtccttaggttgctggtgacacaaagactgctcactaccaactgtgagcttttgcttaaaaatttccacacctggatttgcatctttctaggttgcaaaaaaaaactatttctcccataaggaatcagtgaaatagagggagtaaatgtatgtaaagagaaacaccaattgagccggaatgtattgcattagttttcaatgtcaattactaagcatatgagaaaaagtatcaatatttgtaatatttaacaaatctatagtaatatg

SEQ ID NO: 237898 - DNA, 388 bp, Homo sapiens
tgtgcttcatttagcccaactggaagtccctggtgccaaatttgaacctcatccacaagctctaccactcaagttgccctactatggtgttagtcccctgtgcctggcaagcccagttgggcaggtggcagagcctggctcccttctggctcaggccataaagagacagggccttaatttgaatgtaaatttcctgaaatcaactagtgtgcaatctaattgtagtgccaccctatatcgtacggaatcatacattctgyatatgctgtatgatcgtatcctctgtgtttctgtattaactgttagagatatagggtagcactctaattagattgcacactagttcacttcaggaaacttacattgactctgtacatcaggaaacact

SEQ ID NO: 237899 - DNA, 437 bp, Homo sapiens
aaaatttttgttatatggaagttgtagaactttgggattatgaaatactaacacaagtaaaaaatataaagtccaatctttgaaaagaagatactttgtcttagtcagtttgggctgctacaacaaaataccatggatgtggtggcttcaacaacagacatttattttctcacagttctggaggctgggaagtctaagatcaaggtactggccgatatggttcttgrtgagggcattcttcctacctgatagatagttacctttttgctgtgtgctcatatgatctttcctcagtacctgagcatggagagagagaaagctcctgtgtttcttcatttcctttgaaagacattaatcccatcacgtagtccccaacctcatgatctcatctaagcctaactacctcccaaaggccccacctccaaataccatcaaga

SEQ ID NO: 237900 - DNA, 637 bp, Homo sapiens
cagtctgtgccttccagagatccagcccctgcatcctgaggctaagccacctacccaagccgaccttggttacagtatgcactggacagtcctctaattcaggaacaggttttgtggaagcctgtaattctactcttttcctaatccctgtaaaattaatccagacatttccacacttccctaaagctctacccaccctctcaagtgtagctctctagggaagctcttatagccttttgtttgctcaatagacttaagccacttcactattgctttgcaaaactcatcaaccragggtttggtcatcaactgagggtttggtctgcaactcgttctacttgtattttggttcttaggtgtgaagagcttttgcaacttgctaggcctcctgaccttcccttcctctttcctggcctactttgcaacttgtggtgagtccttcctacctccccacatgctctatggtttcctgaaaccttcaccacacttcagctaagcagtcattcttaattccacttccccttatacctccatacttaaatacatatacatattatattaaatatataacatgaacttgttaacaaaagaaaagcaatcaactagtgcattgctccatctccattctctaataatt

SEQ ID NO: 237901 - DNA, 590 bp, Homo sapiens
tttttttcagagacagggtttcactctgtaacccaggctagagtgcagtggtgtcaycatacctcactgtagcctcaaattcctgggctcaagtgatcctctcacttcagcctcccaaatccctgagattacaggactgagccactgcacctgggcaatgcaaaattttaaaaggtatctgcaagtcaatgcaagcagcatttctcaacactggctgtgcattagacgcaactgagaaactaaactaacaaaccaacaaccaatattggccccaaattgaatctctaggagtggggcccaggaaccaggtaattttggaaaactctagaaggttctagtgcacagcctagtctgagaacccctgaccgatatggggaatatataaggaatcttctggatttctagaaagcaaactcctagtgctttctatgtgcaatgaagagagttcaccttccttgggaacatctgaatgaagcagcaggtggctccaggcttctttcatgtgggcagtacatggtgccagcacctcttcgcccctccttcttctttcctctttttttgacctctctctgtttcatgctggcttggcg

SEQ ID NO: 237902 - DNA, 508 bp, Homo sapiens
aatgaaaaacaaaataaaatttcaagaggtttatttatagtgtgagtaaaataagcaatgctgctggggaacacagttayacattaagtgaaaacttggcccaggcattaaaaccttttcagttggtgagtttatagcgagcatctacagaggtggctaggtatgggaaagaaagaagcatttataaatctaaccacagttgcttttgttctgaattctaacaataaagctgagaattttcagggcaagttgcttaaaaatagataagttatatgatattttctattacagttgaggcaagcacagatgatagctgccagttagttgtatttgttcatcttttccattgagttttgatatgaccaaacctctggacatggtaccagtgacagctacacatatcaggacatgacatgttgtgttgtgttgagaaaagttttggaaaatttaatgtgaactggtcccaattagtaaattgaactacagataagctacggtcaaggtcaga

SEQ ID NO: 237903 - DNA, 576 bp, Homo sapiens
gatgaaaataaaagatgacatggaggcttctgaggtcaaaagggaaatacagaaattaattgcatgctttttttctatttcaatttaagaaacatttaatttcttatcatttattagcccagaaaatacagttgttctttgagctactatactttttagttatttgctagcattgtccttcttccaccatgttaatccacataacccagctgaattctagtataaatcatgctattatatcaagtgcccatcctatgcaaggccctgtaggcaggagagcaactaaaaaggttttccatcaaagacagaatgaaggatgaatgtaattgatcaagtgaaaaagacaacgtatgaaatccaggcagtcacaaaagtatgaaatatcatggtggacaaaatgaaaatataaattgtttggatggctggggtagcagagaaagagcagattgcccatctgcctgggacctggggctggatccagcagcccaggggccaatcactgctcaagggaaggtttgcttcagagtcatcaggagatttaaaacacacacrcacacacacacctacctttttctt

SEQ ID NO: 237904 - DNA, 606 bp, Homo sapiens
tcatctgccctgcagccacagcacacacaaaatcatccaccatattcagacatatggagccaactggctattggtctgagatgatgcatcactttcctagatcttttcatcctcccttcagtctttgctgacagcaattttctgaggcttcggtgcagcttcttcctatgtataataatatgacatgatttttaaatggtggtatcattctaaactttggaaaaatagaattaggaaggattgagatggtgtagggctggtagtcttgcactgagctaccaataaggacagagacaatctttctgactcctgacatttattttttgtgcctctcctggtagatggtcccgaccagcttttaatccaatacaggagtacagaaaggcaagcagtgtctctgtttagwtgcttctctttcacctctcatctctgcagacctctctgcaagcaaaaaagtttgacctctttctttccaagagtaattacagctcctatcaatttttccataagaagatagatatgaaaaaaaaaaagtgaaaacttgatggagcaagacttggggttgaatacaaatgtcacttcctcacctctctttcacatttctct

SEQ ID NO: 237905 - DNA, 527 bp, Homo sapiens
aaagctcaccattcacagtacttacccaatggctgttcaaagtcatacaaattattgccatgacaactacttcttcagcaataaaattatgaaaaccacaatttccctggcaggcagaaggagcttatcattttctattcagaatgagtttaatgtttacccctcagcagtcatcacagataagacacctgtctagtaatgcaggcactcaccaacgtaaaaacgggtgcaccagaagagtatggacagtgtttggatttcaggaggaattatcccctagaagaaaacacagaaatgatgtcagagttccacactagcccacagaggcctaaatagcccgtatgatggcaaaaatgcattayatttgaggagggggaaggaaaacataccattgctatattcataattaacaacaaaagcaaaatagaaaagaaagttaatctggagaagaacctctggagagtgttaaggacttcaaggctgacaggatggcttggttgctttgctctgttgaggaaccttgtctc

SEQ ID NO: 237906 - DNA, 599 bp, Homo sapiens
aaagataatttgtaaaataaaaataatattattgccagtagtcttgacactttgaatgtggcagtggggctgagagtgcaaacaaggagtagagaaaaatactaaattcaaattacttactcaggacaacagtcaaggcaaacccatgcaggacatactatgggccattgctagacaggtttgtactctttttcttgtccactctgctaatagtggaggttcaggtggtcagagcctgacctgctgagacattactccacgtacagctacagacactcctcagcttctcaactaaaccctatctttagtcttacagtcagcagtcatttgtctctgtttctctcatactggtttttgggtaaaaatatgttctataaagatagatagttatgtggttccaggagaytggattgagggaactgtgattagagtcttcagtcttggtgtctgggcccctggagttgataacccttttgtaattcatagtactttgttattgctggaggcagtggttgtcttagtaagttgctataacaaattattattgacctaacaaacgtttggttgggtggcttaaacagcaaacatttatttcccac

SEQ ID NO: 237907 - DNA, 614 bp, Homo sapiens
aacacttaaaacaactctggcaaaaagtgagggctcagtaaatccattatcagtgttatgtttttcagctccaggaaaagttaaatggcaagaattattgggaagaaaatcaatttcagacaggcaggcctcatgaagtttgcaatatcatgaactggtaagtcattgagaatctgaatagcgctaatgctgttttttgtttccaggcctctctcccatgggctaatccttcctcagctatagatctgtttgctttcacccagcctttgccactactgtgcctcagctcttctccccaattytgggtctatggcttctttcttgatttcactgctgctggctttccagtttctgtgggctcatgctgcttcctccctgtgtggcacttaatttctgctaccatcacctatgtattggtctattttcacactgctataaagaaatacctgagactgggtaatttatgaagaaaagaggtttaattgactcagggttctgctggcttaacaggaagcatggctaggaggcctcaggaaacttacaatcatggcagaaggcaatggagaaggagggcaaaagtcaagtcatctgaaaatatctagattttgtttatg

SEQ ID NO: 237908 - DNA, 481 bp, Homo sapiens
gcacgtcttacatggtggcagacaagagagaatgagaaccaaaccaaaggggtttcctcttataaaaccatcagatctcgtgagacttattcactaccatgagaacagtatgggggaaaccatccccatgattcagttatctcccaccaggtccctcctacaacacgtgggaattatgggaactacaattcaagatgagattttggtggggatatagccaaaccatatcagtgtgcaatctgaaatttgtcattaawgcttagagaaaacaaacaagcataaaatgcagtctcaccccagcctgcatatgagagattgggtacatatgggtgctcatgacagggcagcctttcctagctgttaggaaagcaacttctaaacatacgctcttgtaactgcccacagagtcatggccgggcacggctcaatgtctcacaagaacagaaatcttacgtgaccttcattgacattgactggcagt

SEQ ID NO: 237909 - DNA, 602 bp, Homo sapiens
ggttgaaatgacactttgcagtcacttctaaattcacatcttcattccactcttttcttccctttatccatccacgaccttacattagaagaatgcactgcctttgcaaaagacctctgttttttwaaaaaaaatgtatagtttcttaaagagtaattttagatttatagaaaaattgaacagaaaaaaaaacgccagagacttcccatattatcctaagctacccgccttcaccaatttcccctattgttaacatcttgcattagtatggttcatttgttactttcaggaaataatattgatacattattattaattaaagttcatagattacattaggatttactctgtgtagtagagttctatgggttttggcaaatgcgtaatgtcatgtatctaccattatactatgatatgaaatactttcactgctctaaatatcccctgtgcttcatcaatccttccctccatccattatggctgaagtagagacaacacagaggagagcagtaggggacgaagagagagttagtgaggagccaggctatcccagccctcagaggccattgaaaggactttggctttgaaataaggagccattg

SEQ ID NO: 237910 - DNA, 565 bp, Homo sapiens
gaattccctacctttgaggttttgggacttggactggctccccggctccccagcttgcagatggcctaatgtgggacttcactttgtgatcatgtgagtcaattctcctaacaaactccctttcatatatacatctatcctattagttctgtcactctagagaaccctgactaatacaaatgtgataagggttttagatttccagtgatcagtccttttgtgatatttgcatttaaaaagttatctcattgttgaatccaagtacctaagaagtcaactaactcattacaaagaaatgataggaagagaagcagaatatttctcaaagggatggtgcacaaacgaaaccgtacatttggttgtatgccagttctcaaggaaattctagatagayattgaatttagacgtaggagtgactaagaatgcaaaaaaaatatattagaaagaggtgccttatagataacatagttaaaggcaaactgaaacaagcaaaagaggaaacaagatagctaggaaaataacaaaataattcattttaaagcatgatagtctgtggctttgttt

SEQ ID NO: 237911 - DNA, 407 bp, Homo sapiens
aggttcaatgtcttatgagggcttgctctctgtttcaaagataacgccttctcactgtgtcctttgaaggatgaaaggactccctcaaacctcttttgtaagggcactgatcccrtttatgagggcagatccctcaagaaataatcacctctcaaatgcacaacctcttaataccttggggattagattttactgtataaatattggaggggcataaacattcagaccatagctctgcccattcaggttctactggtcttaggtgctctgggtcacacaaatatgtgtcctgcaatttgtagtttttctttctcttcaattttccctaaatttgtagtttttgaattgtgtgtgtttgtttttgtttgtgtttctctgtatggtttgctaaagaggaagaaggatga

SEQ ID NO: 237912 - DNA, 556 bp, Homo sapiens
tcttttcccatggaaacattattagaggtgttttcataaaattacaagtcacatatattctagtagcttttcataagttatcatgsagcacccaagcgatgagtacagtatttctactggaaaatatgttccatgttcccagaaactgacttacagatgaacatttggtaaatactctagtcataatttggggacttcagaaaatacgtaaacatagttttgtaacctattaactcttgaattaatccacatttatcattaaaaagttcaattaactttttcatttgaaagaaaaatctagttgtttctgtttcaccaaaatgaagaacatagttatttatacagtacctgtttaataacatccctatcatttattcattgcaaattgctcaggttgtatatcaccctccaaggagttctcattgcttaagtagatgcatgttcttcatttctggcttaatttttctgtctgcttcatttttctctgttctatacctagttttatcaaatcatcataaggatctacacaaatatttaaggtcaaacagaggccaag

SEQ ID NO: 237913 - DNA, 556 bp, Homo sapiens
tcttttcccatggaaacattattagaggtgttttcataaaattacaagtcacatatattctagtagcttttcataagttatcatggagcacccaagcgatgagtacagtatttctactggaaaatatgttccatgttcccagaaactgacttacagatgaacatttggtaaatactctagtcataatttggggacttcagaaaatacrtaaacatagttttgtaacctattaactcttgaattaatccacatttatcattaaaaagttcaattaactttttcatttgaaagaaaaatctagttgtttctgtttcaccaaaatgaagaacatagttatttatacagtacctgtttaataacatccctatcatttattcattgcaaattgctcaggttgtatatcaccctccaaggagttctcattgcttaagtagatgcatgttcttcatttctggcttaatttttctgtctgcttcatttttctctgttctatacctagttttatcaaatcatcataaggatctacacaaatatttaaggtcaaacagaggccaag

SEQ ID NO: 237914 - DNA, 556 bp, Homo sapiens
tcttttcccatggaaacattattagaggtgttttcataaaattacaagtcacatatattctagtagcttttcataagttatcatggagcacccaagcgatgagtacagtatttctactggaaaatatgttccatgttcccagaaactgacttacagatgaacatttggtaaatactctagtcataatttggggacttcagaaaatacgtaaacatagttttgtaacctattaactcttgaattaatccacatttatcattaaaaagttcaattaactttttcatttgaaagaaaaatctagttgtttctgtttcaccaaaatgaagaacatagttatttatacagtacctgtttaataacatccctatcatttattcattrcaaattgctcaggttgtatatcaccctccaaggagttctcattgcttaagtagatgcatgttcttcatttctggcttaatttttctgtctgcttcatttttctctgttctatacctagttttatcaaatcatcataaggatctacacaaatatttaaggtcaaacagaggccaag

SEQ ID NO: 237915 - DNA, 555 bp, Homo sapiens
ctgccctatgttaaccataggattttggacagcttacataaggtcatccagccttactttctgtatttatgaatatgcataatgataattatcttaaaatcattatgaggctaaataagataatgcatacaaaatagttagcataagccctgtccaagccagcctgttcatggtgcttgtagggataatggtgtcctgaggtcactgattgggtcacagaaggtagaacactattagcaaggcagtattaagttagtargctggattgtaaacggaaattcaggaaatggtagatcccgaggtacagcccattgtctgagggctgcagataagattgaggatattcggtcctaggtatctggggaattctttgactacagggtagcaggacaaattgtgaaagactttgaaaagaaaagactatatcagttgttaccaggtctacctccactagtgggttattcatgcttttcattgtctttgagctattatacaactctgtaagttgtagaaaactggtgataatgcaaacgattcttgtccaggaaaaatgtg

SEQ ID NO: 237916 - DNA, 555 bp, Homo sapiens
ctgccctatgttaaccataggattttggacagcttacataaggtcatccagccttactttctgtatttatgaatatgcataatgataattatcttaaaatcattatgaggctaaataagataatgcatacaaaatagttagcataagccctgtccaagccagcctgttcatggtgcttgtagggataatggtgtcctgaggtcactgattgggtcacagaaggtagaacactattagcaaggcagtattaagttagtaagctggattgtaaamggaaattcaggaaatggtagatcccgaggtacagcccattgtctgagggctgcagataagattgaggatattcggtcctaggtatctggggaattctttgactacagggtagcaggacaaattgtgaaagactttgaaaagaaaagactatatcagttgttaccaggtctacctccactagtgggttattcatgcttttcattgtctttgagctattatacaactctgtaagttgtagaaaactggtgataatgcaaacgattcttgtccaggaaaaatgtg

SEQ ID NO: 237917 - DNA, 555 bp, Homo sapiens
ctgccctatgttaaccataggattttggacagcttacataaggtcatccagccttactttctgtatttatgaatatgcataatgataattatcttaaaatcattatgaggctaaataagataatgcatacaaaatagttagcataagccctgtccaagccagcctgttcatggtgcttgtagggataatggtgtcctgaggtcactgattgggtcacagaaggtagaacactattagcaaggcagtattaagttagtaagctggattgtaaacggaaattcaggaaatggtagatcccgaggtayagcccattgtctgagggctgcagataagattgaggatattcggtcctaggtatctggggaattctttgactacagggtagcaggacaaattgtgaaagactttgaaaagaaaagactatatcagttgttaccaggtctacctccactagtgggttattcatgcttttcattgtctttgagctattatacaactctgtaagttgtagaaaactggtgataatgcaaacgattcttgtccaggaaaaatgtg

SEQ ID NO: 237918 - DNA, 555 bp, Homo sapiens
ctgccctatgttaaccataggattttggacagcttacataaggtcatccagccttactttctgtatttatgaatatgcataatgataattatcttaaaatcattatgaggctaaataagataatgcatacaaaatagttagcataagccctgtccaagccagcctgttcatggtgcttgtagggataatggtgtcctgaggtcactgattgggtcacagaaggtagaacactattagcaaggcagtattaagttagtaagctggattgtaaacggaaattcaggaaatggtagatcccgaggtacagcccattgtctgagggctgcagataagattgaggatattcggtcctaggtatctggggaattctttgactacagggtagcaggacaaattgtgaaagactttgaaaagaaaagactatatcagttgttaccaggtctacctccactagtgggttattcatgcttttcattgtctttgagctattatacaactctrtaagttgtagaaaactggtgataatgcaaacgattcttgtccaggaaaaatgtg

SEQ ID NO: 237919 - DNA, 621 bp, Homo sapiens
taagattgaggatattcggtcctaggtatctggggaattctttgactacagggtagcaggacaaattgtgaaagactttgaaaagaaaagactatatcagttgttaccaggtctacctccactagtgggttattcatgcttttcattgtctttgagctattatacaactctgtaagttgtagaaaactggtgataatgcaaacgattcttgtccaggaaaaatgtgtgctggtggaatgcaattgattctatccctttggatagagtcatttggcatgattgtaaattcatctaaaaattgcttgcttgttctctatgtatgyatggttcttggaattctcctttgaactgattataacatcgtatttgttcccttattgattaataggttaactaaaatgtttgacagatgttcactctgtattcatatgagagtaatgactttatcttttttttataagagatttatccttacaatggggttctctcaatagcacaggaaacatcaattttttttttctgattttgcatctaagctcactcctactgagtaatctctttaaatttaaagggacgttgctagtctctgatcttgctgcctcattgtaagtatcttctgcc

SEQ ID NO: 237920 - DNA, 615 bp, Homo sapiens
cttacaaaccactgttcattcacttttcctttaggggcagaaaagtatgatacctttactcacctatcataagagtcatggcccacactcctataacaagacaggttaacaagagaaaagcataacaaatgtatttaatctaggttttacatgacacgggaacatttagaaatgaagacctaaatattcagggaaaactgtccatttttatgctcaggttcaatgaagaatagacagccaggtagaaatggaattggacaaaarggtatgatgataatagactaatggggaaatctgaacagaaagacctgtttgttccaattcttcttggcctctctgtgtagtagtccttcctcccaggtatgtggcaggacccttctagattgagagtcttatgacctattatcagacaaggcaggtcagagaatttctttatgaccaggtctaagacagaacaacagggaaagtttagagtaatatttctgagttttatagcttgctttggaggaggggagttctagtttctatgacctgccttggggaagaggaattctattttaatgacttgcctcagggcagaaagaagggcaaaaaaaaccagaagtgttgctggaa

SEQ ID NO: 237921 - DNA, 615 bp, Homo sapiens
cttacaaaccactgttcattcacttttcctttaggggcagaaaagtatgatacctttactcacctatcataagagtcatggcccacactcctataacaagacaggttaacaagagaaaagcataacaaatgtatttaatctaggttttacatgacacgggaacatttagaaatgaagacctaaatattcagggaaaactgtccatttttatgctcaggttcaatgaagaatagacagccaggtagaaatggaattggacaaaagggtatgatgataatagactaatggggaaatctgaacagaaagacctgtttgttccaattcttcttggcctctctgtgtagtagtccttcctcccaggtatgtggcaggacccttctrgattgagagtcttatgacctattatcagacaaggcaggtcagagaatttctttatgaccaggtctaagacagaacaacagggaaagtttagagtaatatttctgagttttatagcttgctttggaggaggggagttctagtttctatgacctgccttggggaagaggaattctattttaatgacttgcctcagggcagaaagaagggcaaaaaaaaccagaagtgttgctggaa

SEQ ID NO: 237922 - DNA, 500 bp, Homo sapiens
tggtgcaccatataataatttttttattttgcttacaagaaagtggtgaaaagtatagattctggctctaggtggcctagatttgaattctagaatcttatatataagaccttgacttgccttakttccatcatctgtaaaatggggataagtatatgtagtttataaggtgattataaagattaaataaatttataaatgtaaaatactttaaaaagtacatagtaaatgcctaggaatttctatttgtgataattattactactcatggtactattaggaggtagcagtcaggtgttgctattcaacatctacagataaaacacttgagccagaaagagaatatttgatgtattatgaattatagtgaaaacaatctctaaagccagaatgtgaactccatgaattcactggctttggtgtgagcattgagtggcataccctcttccactgaacagcctactttcaggttcagtacaacacagtatttgatgttgagt

SEQ ID NO: 237923 - DNA, 500 bp, Homo sapiens
tggtgcaccatataataatttttttattttgcttacaagaaagtggtgaaaagtatagattctggctctaggtggcctagatttgaattctagaatcttatatataagaccttgacttgccttagttccatcatctgtaaaatggggataagtatatgtagtttataaggtgattataaagattaaataaatttataaatgtaaaatactttaaaaagtacatagtaaatgcctargaatttctatttgtgataattattactactcatggtactattaggaggtagcagtcaggtgttgctattcaacatctacagataaaacacttgagccagaaagagaatatttgatgtattatgaattatagtgaaaacaatctctaaagccagaatgtgaactccatgaattcactggctttggtgtgagcattgagtggcataccctcttccactgaacagcctactttcaggttcagtacaacacagtatttgatgttgagt

SEQ ID NO: 237924 - DNA, 433 bp, Homo sapiens
cactctgttaggtcattcttgcattgctacaaagaaatacctgagactgggtaatttataaagaaaagagatttgtctgggctcagtggctcatgcttgtagtcccagcactttaggaggtcaaggctggtagattgcttgagcccaagagcttgaggaccagcctgggcaaatggccaaaccccacctctacaaaaaatggaaaaaaaaaaaaatgccaggcatggtgactcaagcctgtagtctcagctactcaggaggctgagatgggagaatcacctgagcaaggtaggtctaggctgcagtgagytatgatggcaccactgcattccagcctgggtgacaaaataagaccctgttaaaaaaaaaaaaaaggaaagaagaacgaaagaaagaaagaaagaaaagaaaagaaatttaattggctaatagt

SEQ ID NO: 237925 - DNA, 495 bp, Homo sapiens
cttccctatacccttccccaagttacacagccaaagcccaaattctgtaatagcttctttcttacacattcttagtaagaaaacttacagttttctcatagtgagcattcttccttgtaagatatctgcaggggtctcagtggtctttagctgaagagcattgacatttcctagccctttaaaaaactggctgtccataattggtaaacatgaataactcagttaataaaatgctaaattgacagaactcccattctccaattattccagatcaattatatctattagctmtaccaaggttacttcctattgttgataaaatatttgtattataacttcctttgcttctacagggaaaagttgtacctatgttttgcttcctctgttatcttttgtctcactaagatatttttttattaagacctcgaatacctctatagacctttatttattgtcctgttccttatatagcatagctgatgattcccatagaaa

SEQ ID NO: 237926 - DNA, 530 bp, Homo sapiens
gacttaaaaaataccgagaaattttatgttatgctttggcttgggcatcttgctaaatattatattaaagaaactgaaatgaggaaaagaatcaaatctgtagtagctttatttttatgtatacagagacccatcattcattagatggtgactgtgtccttggagaatcttcattaagtaatcagttamactgaatccagagctccaaatagatcctggttttcataacatcagagtgttgaactaatttaattataagagcaaaatgccaggagccaaaaggattcaaaggagaggaaaaagaataattagataagctgccagacataaaatatgaacaaccattatcaccaagaatatgaagaacataatcctacaaacaacaacaaaaaaaacacctccctgtgtcattggaaatctgataacattgctgtttattgttaaagccacatgaaatgaagttagtatcccttggctctactcaatctcatcatgacttaatttgccactctacaacatgttctctatca

SEQ ID NO: 237927 - DNA, 532 bp, Homo sapiens
tagaaatttcatgtatttatgttgttattcatctggtatgtatctgtgcaacctttctggatattaaaacactaacatacttttaaaactgttagcatccatccactgccccaggccctccagggtcagctggacttcttggtgatccagtaactaaaggattggtgtctggaagcactgtgcctgtgtccattaattcatcagtgctcatgcagtgccagtcattaaatattatgaataccactgctgtgtgtatctgtgctaaaatcttagagcaggtgccaagtgggtatgcccaccgagctcttagaactctttccattcagggtttccaccaaggctcattctgccttcttttttkctaaaggcattcctagtgggcagagggtaagtccacaaagcattacccttaaaatgagtgtcataggcattctgtccctagtattagaatccaagaagttcacttatgccaggtaaactggggttagaccctgactccaatgatctctccatgatgcccctgtttgctttt

SEQ ID NO: 237928 - DNA, 532 bp, Homo sapiens
tagaaatttcatgtatttatgttgttattcatctggtatgtatctgtgcaacctttctggatattaaaacactaacatacttttaaaactgttagcatccatccactgccccaggccctccagggtcagctggacttcttggtgatccagtaactaaaggattggtgtctggaagcactgtgcctgtgtccattaattcatcagtgctcatgcagtgccagtcattaaatattatgaataccactgctgtgtgtatctgtgctaaaatcttagagcaggtgccaagtgggtatgcccaccgagctcttagaactctttccattcagggtttccaccaaggctcattctgccttcttttttgstaaaggcattcctagtgggcagagggtaagtccacaaagcattacccttaaaatgagtgtcataggcattctgtccctagtattagaatccaagaagttcacttatgccaggtaaactggggttagaccctgactccaatgatctctccatgatgcccctgtttgctttt

SEQ ID NO: 237929 - DNA, 600 bp, Homo sapiens
tggaggaaagcaaactcttataaactgttgatgggaaagtaagttagcacagctattatggaaaacggtatggaggttttgcaacaaagcttaaatagaattaccatattacagtgatcccactactgggtatttatccaagggaaaataaatcaatgtattggagagatatctgcaccccacgtttattgcagcactattgacaatagccaagatatggaattagcctaaatgtccatcagcaaatgaatggataaaggaaatatggcatataataatggaatgctattcactcatgaaaaggaatgaaattctgtcatttgcagcaacatggatgagcttggaggacattaagtaaaataagtcaggtacagaaagacaaatactgcaagtttcactaatatctggaggctaaaaaacattgagctcataatagasagtagaattatggttattagaagctaggaagattagtgggaagaggaagacagagagtttgggtaaggaatacaaaattagagctagataggaagaataagttgtagttttctattgcactatggggtaaatatagttaataacaatttgttgtatacgttc

SEQ ID NO: 237930 - DNA, 613 bp, Homo sapiens
ctgtcagttgtcacagggtttttcggtgtggttgttgtttgcttcctaaatgatggtaaagcttcgttatatctgtacctatttttttctgaacatttggacatttcttggaaacacgtcagaattcatcatttggctttattattgttttggggaaatataataatttgtttagaatttttatacaaaacatatatagagaatgatctttaataattttttaaagagacattaaagaaaattgctctcctatttaagttaaatgttttagtaagcattctcttatttaattcagttttaattgcattattaattatcatgaacaaaatattgctagggaaaaagctgaagagataatctaattgcagcttttactgctttgaatgataaagtacctttgatttggtgctgagccaggagggcttgattgataatatctgtctcagatgtcaccctgggagaaaagaataaaacctcagtagagttggtgcatwgcagctgtctccgctgctccaatttttctgccccattgacgtcattgggaggtttcaaaccagtccagggtgtctagtaaacctgcacataaatgaaatgaagaaacagaaaaacagtg

SEQ ID NO: 237931 - DNA, 610 bp, Homo sapiens
actctaatacctctttataacaaaactgtaaccagtttattgcaaaatctcaactctgttggrgataaattaagaacgactttttattttttgaattgctttcttcaaatatactgtattcatcaggagttctacagagaaacagaaccaacaggaaatgaggcccatgcacattgaggagggcaaactgctttacttaacctatcaattgaaatagataggatattttaaaataaataaaaattatttatattatattatatacataattatgttatttattttaaaaaataaaatagagggtatttcaatcagaaataccctcaccgacacacccaaaataatgtttaaccaaatatctgggcacccagtggtccagtcaattgacacataaaatcaaacctcacatggtttttgagtttccctttgctgttacatttcaataacatcccaggcaaatcccatgactttgcaagcactttcagttttggaactacattccatgccactttaaaactccaatctcataccaaatgtcatgcttcccctcaccactggctcaacatttggcctttgctcttttactcatcctgccagtgtagccccttgt

SEQ ID NO: 237932 - DNA, 560 bp, Homo sapiens
tatgccactgtaatatcatctccaggagattcctacagcttccttagaaaggagtcttcctttaagagtttaatgacacataaagaaatattggctaattaatcatagagtctctggagacaaaataaatgggaagaacctaactggggaaaaaaaagaaaaagaaaagaaggcttgactgagccactgctgagaaagaggaggaacaaaactagagtggacctccatagactttggaggcggtatgtaccacattatggtgtgctgtttggactcactggccaggtgacttgaacagctgttatctttgaggggkatccagaggaagagaggtctcgttgctgtattgtgctgcagcacaagcagctattccactttatccttgttattgtgcttgtcctgtgatgccatgtcgggggttgtatggagtctatagcagatctcagggagcatatatcatgatggaggtcactaagattagggtcagttcattgaatgtttaatgagagtccagtatgggccaggatttttctaggtgcttgtgggcacaaaagaaatga

SEQ ID NO: 237933 - DNA, 580 bp, Homo sapiens
attgtctatattactatacctaagtaaaggcagggctagaactcaaactcatggcttattcctaggctcttttcactttattttgctccctccataatttagtctatataaatctgagcagtaaagagagaaaagttgaaccaaaaaaatgtgtgagtgcccacctggctaccagaactgattttaattctattctgccctctaatccagggtcacctctaacatgtgtggggccacacactgtaagtctaaatatacaaagatatacattgagctatctcctttaccttgacagatatccctccataacagcctggaaggtcaggttgaatttagaattcttgaactccttggatatgggttggccctcytctttccccatgtccttccatctccagggacctgtgagcagccgtcgtgagccctggaccgcagcctgcttacccaagttcctcctacacaagtctcttcacacctctcattgctgcctcttggttaaactccttaggcctaagggtgtgtatgcctgcagcacatcccaggaagaggcttgtgtggccaggaagtgggttcaaagcca

SEQ ID NO: 237934 - DNA, 580 bp, Homo sapiens
gccctccagccgtcatgataacttctaaaaagacttggaaattggaagccagagctaatatggtagaacaaaaagacagaggaggctgggttactgatgacccagccacaccagacctggctttccttggcttttatgtgggataatagacctttttctgtttaaacaactgttattttaggatttccagcatattcagccaaaactcatcctaattaatacagacatggagataaaaaaaaaaagtcaatacactcagtacctgaagttcatcttttcaaattaattaagggaagaggattcaataagctttcaataatattagccaaagggaacaaagaaagatacaaggartgatgacagagggtgggagggccagagggataaaaggagaaaatattttggaactgaagttcctcaatgatcttatctgtttgtgtatcaaagccccaaagaataggaaagaaagcaaagaaaaacataaaatatataatgaggacacttggttttgaatattattctgtcactgaattactatgtgatttgggagaatttacctgatatgtttaatcctaaatta

SEQ ID NO: 237935 - DNA, 442 bp, Homo sapiens
cagttatatgacataaatatcatctctttgggctgtcaagaggagaattttaatgcttaatactgatggatggatcctacacccaggtaaattcgtattttggggtagccacttgagggtcagccagcaatctctctatggggaatactctgacctcaccacaagtaattctttcaaaagttaatagaaattgaaatggtagataagtttccccttaatatgaatacattgtaaaaaaaaaaaaaaaggactagtgatgagaaaacacatagaagtaaaaaataccagttatttatatacagagatgctactggctcagactggcaattttccasacactactaagtatacttgctatgtctattagtattcccattattgttaacagttggtgccaacgtaatgcattatgaaaatttattttaacgcaaaacataagagg

SEQ ID NO: 237936 - DNA, 561 bp, Homo sapiens
aagtaagcatgtctttcacttctaaaactttccttttgcccctttataattccttcctcccatcctaacattgagaagcagccastgatttctgtcatgatagattggcttgaattttctagaattttatacaaaagaaattatatgtgcactcttttttgtctggcttatttcaatcagcataattattttgaaattcacccatgttgtggcctgtatcaatttcattgtatagatttatcacttgtttatctatctacttgttaatggacatttggacgatttgaggtctttggatgttacagataaagttgctatcgacatttgtgtacatgtactttcattttcttgggtaaatatctaggaatgtagtggctggatcatatagtaggtgtatgtttaactttttaaaaaattgacaaaatatcttccaaagtggttataccattttatattcctaccagtgatttgtcagttccaattcctccacatgcttgccaaaagttgatatggtcagtcttttaaattttagtccctctgaaaggtgtgtagtatctatat

SEQ ID NO: 237937 - DNA, 540 bp, Homo sapiens
taacatttggctcctcattatttatgcaaatttctgccacaggctggaatttctcctgagaaaatggttttttatttttctatcacattttcaggctgtaaattttctggactttcatgctctgtttctttattaaaacaatgtttttaatagcacccaagtcacctcttgaatgctttgctgcataraaatttcttctgccaggctgggtgtggtggatcatgcctatgatccgagcactttgggaggccaaggtgggtggatcacttgaggtcaggagtttgagactactagtctagccaacatggtgaaaccctgtctatgctaaaaatacaaaaattagctgggcattgtggcatgtgcctgtaattccaactactcaggagcctgaggcaggagaattgcttgaacatgggaggcagcagctgcagtgagccaagactgtgccactgcactccagcctgggaaacagagtgagactctgcgtcccccaaaatattctcctgcctaataccctaaatcatctctctcaagttcaaa

SEQ ID NO: 237938 - DNA, 618 bp, Homo sapiens
gaattctcagtcttctgcattatcaaataatcactttatatttgtattcactttaaactgaaataaatatagcttcttggtctccagtgatttctggtccccagaactttttgttatacatattaaaacaaggcagtatatcatartggttaagattactggaagcagactgcctgggctcttggctagcttggtctttaccaactatgtggctttgggaaactcttaacctttttttacttccttttctaatgtgcagaatggggataataatagtacctatcttatgttgtttttgtaagaattgaaagacctgatatctgtaggtgtcttgcatgtgattagtggtaaagaaaatttatttatttccaaaacctatcctagagcttatgcttataaattgttagaggcagagctagtagagggcatgcagaagcctagattttggcagtttctacccctttattttttcaatttacgcagaacactcttcacaaaacagttgtttaaaatggggctctccttagtgtttttgagattctctagtgtatatttaattctattgctcttcctaagtgcttccaatgcacttaaatggcttcacagttgaatttttct

SEQ ID NO: 237939 - DNA, 488 bp, Homo sapiens
tgcaggtatttggtaaaaggtagctattgatgtggtagacatttataaggtagagtttatagaacttgactgattataaatgggagataaaggaaagagagaagctgactgtaaagtcaagatgactgagagagtaatgatgccatctgttgagacaggaaacaggggaagtattaatttatctggaaggtggagttatgcttgatttttgacacattatatctgatgtatcattagaacatacatgtctagtacacagttgggaattcttgcttagacctcagaaacaactcagaactagagmagttgatgagaaaatcatcaacatttagatggaaatatatagcgatggcatgaacaaaactgctcgaggagagtgagattgaggagagacatccacattcaataaggaaacttcagagagggagactcaggagtctgtgagagaggggcaatggaagtgctaagggcccaggccaggtgcagag

SEQ ID NO: 237940 - DNA, 488 bp, Homo sapiens
tgcaggtatttggtaaaaggtagctattgatgtggtagacatttataaggtagagtttatagaacttgactgattataaatgggagataaaggaaagagagaagctgactgtaaagtcaagatgactgagagagtaatgatgccatctgttgagacaggaaacaggggaagtattaatttatctggaaggtggagttatgcttgatttttgacacattatatctgatgtatcattagaacatacatgtctagtacacagttgggaattcttgcttagacctcagaaacaactcagaactagagcagtygatgagaaaatcatcaacatttagatggaaatatatagcgatggcatgaacaaaactgctcgaggagagtgagattgaggagagacatccacattcaataaggaaacttcagagagggagactcaggagtctgtgagagaggggcaatggaagtgctaagggcccaggccaggtgcagag

SEQ ID NO: 237941 - DNA, 585 bp, Homo sapiens
aataccaattctgagtcctacacccagagattctgatttatttggtctgaagtagggcctgggtatcaatacattttttaaggttcccaggcaaatcaaacatgcagtcaagtagaacccytagaagtatggttaagagcccagaatagtcagactgtaggtaaatcttgattttactactgtgtattttgttgcttaacttctctacatctcatttttctcatctataaaattgagaaaataatctacttaattcttagggttgctgtaaacattagcttagataatacaggtcaagaacttagcctaaaacctgacataataaatgttagccattatcaatagaaaaaatagttgttactcctgggttctggcctttataattcccttttaaactcaaaaattaactcagttataatctttaccacaatgtgtttgtgtttctccatccctagcttgtatcatacttgagagcagcagcctggccctactagttcctgccctcggcttcctattcgatcagaattatttccttttgaccttttctctttaataaaacatatttgaagacatcattctctcttt

SEQ ID NO: 237942 - DNA, 585 bp, Homo sapiens
aataccaattctgagtcctacacccagagattctgatttatttggtctgaagtagggcctgggtatcaatacattttttaaggttcccaggcaaatcaaacatgcagtcaagtagaacccttagaagtatggttaagagcccagaatagtcagactgtaggtaaatcttgattttactactgtgtattttgttgcttaacttctctacatctcatttttctcatctataaaattgagaaaataatctacttaattcttagggttgctgtaaacattagcttagataatacaggtcaagaacttagcctaaaacctgacataataaatgttagccattatcaatagaaaaaatagttgttactcctgggttctggcctttataattcccttttaaactcaaaaattaactcagttataatctttaccacawtgtgtttgtgtttctccatccctagcttgtatcatacttgagagcagcagcctggccctactagttcctgccctcggcttcctattcgatcagaattatttccttttgaccttttctctttaataaaacatatttgaagacatcattctctcttt

SEQ ID NO: 237943 - DNA, 615 bp, Homo sapiens
cacttgcacaactggcttttagcagtttctaggaacatagtgcgctcaacttgcaggaagggaaaaaaaggaaagaaggatgaaagaaagaaatttggagaggattagatagtatttctgagcctaattaaaaatataattgaaagaagtctctaaaaaattatattttaagaaatgacatagaacagagggaagatgtgaatatgaagaaaatctaaggcaacataaattcataaatcattgcgaagcggtcacagactgtactggaagtgttttaaagattcaacattgatactttaatcatttctcaagctcttcaatagagttttctaattatctgcctatgccttcttcttccctacmccttccacgttgctatcaatctaagctacttttatgacatgtcttaagattggaacaccataattaggtgaatttcttacatgcagactattggatcataatgtcccttgcaaaagagaaagctgtaaaagtaaataaagatgttaaattccctttgtcagagtgctgatgaagaatgcttcaagaaatagaataataatgctgaagatcattaaaataaatctaaatttaacctgtatattctttatgatt

SEQ ID NO: 237944 - DNA, 659 bp, Homo sapiens
tttctgaatctatttgaattttgacatctgtacaagggggcaataattcctttctcataaacttgctatgctgattaaatgagattatggattatgaaaagctgtctagaaatgttggytgttgctagacaacaacgattttttttaactatacagtgaaaaaaaccattcttctaaaaaatgccagatgtttttcttggttgtgtttcaaagagcactaaatatgtttgcatcctccagggtggttgctttgtaagccaggtgcgaaaaggaggctctttcccagagagtttcaacagtgatatcagccaactcacataattcaagaccatctcaagatgccatgtggacctggtatccatctgttgtttgagtaaataataatttaatttctattttcagttaaacaaaatagacaagagcatctaccattgcttgttcattgacagtttgtctgctccctgaataattattgcatctcagttgattgtttctatatctaaatttggagtgtctcaaaatgaatttctttaaccttgggtaaatattgaagcaatcagtagaaaatgcggatccacttttacctgtataatcaattaaccttgaacaatgtctgactgacttcccctttcctaaaaatattcttcacccacagaaca

SEQ ID NO: 237945 - DNA, 659 bp, Homo sapiens
tttctgaatctatttgaattttgacatctgtacaagggggcaataattcctttctcataaacttgctatgctgattaaatgagattatggattatgaaaagctgtctagaaatgttggctgttgctagacaacaacgattttttttaactatacagtgaaaaaaamcattcttctaaaaaatgccagatgtttttcttggttgtgtttcaaagagcactaaatatgtttgcatcctccagggtggttgctttgtaagccaggtgcgaaaaggaggctctttcccagagagtttcaacagtgatatcagccaactcacataattcaagaccatctcaagatgccatgtggacctggtatccatctgttgtttgagtaaataataatttaatttctattttcagttaaacaaaatagacaagagcatctaccattgcttgttcattgacagtttgtctgctccctgaataattattgcatctcagttgattgtttctatatctaaatttggagtgtctcaaaatgaatttctttaaccttgggtaaatattgaagcaatcagtagaaaatgcggatccacttttacctgtataatcaattaaccttgaacaatgtctgactgacttcccctttcctaaaaatattcttcacccacagaaca

SEQ ID NO: 237946 - DNA, 362 bp, Homo sapiens
ttcagttataatggttgagaagccactttaagtgaaagacatttctttcctcttttcaagataaaggctcaagccctaagaatctgccaaaataaactatttcacataacaatttattcagaaaagaagcacatgtgaaaatttcttaattgttcacaaagctctcctactttcatatgtaaaggaagtatgaaaatgtaataatagtaagttggagcctaataaattgtgattgttgagagaaaaacataaaaacaggcttactcaaggtgagttccatttctttttaattacaccattttatttgttatgtctactstcatgtattcacaagaagccttgtcatcttctgtatggctgcc

SEQ ID NO: 237947 - DNA, 559 bp, Homo sapiens
ggcagttattttctcttagtacattgtaataattatctatatttcactactttctgcatcccrttgttattgaagagtcagctgtcaatcaattgtcatttctttgttggtgctttgccctttctttctgtctgtatttaatttattttttcctttttatgttctgcagcttcacagcaatgtgtctgggagtgtattattctggaagtgtctgggagactggatatattggggttcttggatctgagaaatagagtcttctcagatcagtcactgttctttcaaatactgcctgtcttaaatggaactctgattgaacctattttagacctctagctcaatcctccctggctcttaaccttttattcattattttcatctttttttttcttgagttcatgttggataatttttaatatctattttgtagaccactagttctctttatagctgcatcttgtttgctattttattcctccattgaggtttcgagttcatttattttaacattcacttctataactccattttgtttcaactcagtatgcttaataatttc

SEQ ID NO: 237948 - DNA, 559 bp, Homo sapiens
ggcagttattttctcttagtacattgtaataattatctatatttcactactttctgcatcccattgttattgaasagtcagctgtcaatcaattgtcatttctttgttggtgctttgccctttctttctgtctgtatttaatttattttttcctttttatgttctgcagcttcacagcaatgtgtctgggagtgtattattctggaagtgtctgggagactggatatattggggttcttggatctgagaaatagagtcttctcagatcagtcactgttctttcaaatactgcctgtcttaaatggaactctgattgaacctattttagacctctagctcaatcctccctggctcttaaccttttattcattattttcatctttttttttcttgagttcatgttggataatttttaatatctattttgtagaccactagttctctttatagctgcatcttgtttgctattttattcctccattgaggtttcgagttcatttattttaacattcacttctataactccattttgtttcaactcagtatgcttaataatttc

SEQ ID NO: 237949 - DNA, 596 bp, Homo sapiens
ataaaggggattttattaagtattaactcacatgatcaaaaggtcccacaacaggtcgtctgcaagctgaggagcaaggagagccagtccgagttccaaaactgaagaacttggagtccartgtttggggaacaggaagcatccagcacaggagaaagatgtagcctgggaggctaggccagtctcatattttcacatgtttctgcatgctttatattctagcctctctggcagctgattagatgatgcccacccagattaaagatgtgtctgcctttcccagcccacggagggtgttacccaaatgttaatctcctttggcaacaccctcacagacacacccaggattaatactttgcatccttcaatccaatcaagttcacactcagtattaaccgtcacatttattgaatacctaaaatacacaagatcttgaagcaaaagcctaagtattggaagtcaacagtcaatagaagcaatagtgccttcaaggacccatctccactaaccccctctacaagtctcagagctccacactctctatatccaagaatccttcatgggaacagatgtcactggtggtgcatccaatgttg

SEQ ID NO: 237950 - DNA, 596 bp, Homo sapiens
ataaaggggattttattaagtattaactcacatgatcaaaaggtcccacaacaggtcgtctgcaagctgaggagcaaggagagccagtccgagttccaaaactgaagaacttggagtccaatgtttggggaacaggaagcatccagcacaggagaaagatgtagcctgggaggctaggccagtctcatattttcacatgtttctgcatgctttatattctagcctctctggcagctgattagatgatgcccacycagattaaagatgtgtctgcctttcccagcccacggagggtgttacccaaatgttaatctcctttggcaacaccctcacagacacacccaggattaatactttgcatccttcaatccaatcaagttcacactcagtattaaccgtcacatttattgaatacctaaaatacacaagatcttgaagcaaaagcctaagtattggaagtcaacagtcaatagaagcaatagtgccttcaaggacccatctccactaaccccctctacaagtctcagagctccacactctctatatccaagaatccttcatgggaacagatgtcactggtggtgcatccaatgttg

SEQ ID NO: 237951 - DNA, 596 bp, Homo sapiens
ataaaggggattttattaagtattaactcacatgatcaaaaggtcccacaacaggtcgtctgcaagctgaggagcaaggagagccagtccgagttccaaaactgaagaacttggagtccaatgtttggggaacaggaagcatccagcacaggagaaagatgtagcctgggaggctaggccagtctcatattttcacatgtttctgcatgctttatattctagcctctctggcagctgattagatgatgcccacccagattaaagrtgtgtctgcctttcccagcccacggagggtgttacccaaatgttaatctcctttggcaacaccctcacagacacacccaggattaatactttgcatccttcaatccaatcaagttcacactcagtattaaccgtcacatttattgaatacctaaaatacacaagatcttgaagcaaaagcctaagtattggaagtcaacagtcaatagaagcaatagtgccttcaaggacccatctccactaaccccctctacaagtctcagagctccacactctctatatccaagaatccttcatgggaacagatgtcactggtggtgcatccaatgttg

SEQ ID NO: 237952 - DNA, 400 bp, Homo sapiens
aagctttctactccctgaaatgagaataaagatgcggaactgtgatgtgaattagaattttttgggggttgaaaattagttcakttacctggagtgggctagagaaaatatatcaaggactttataataaaattattactaatatggcatcaaagtttttaaatcattaatcgtgtatcaatgataatgcaactatacttaaattctgttttgcaaattaatttaaatgtttaaatgtcaccttaagtccaacctactaaatctttaaagctgtaattaattgcttcaacttaggaactaatgatagaaatctgaactgattgtagcctatcaacagcctatcaactctagtaattgatatacagtgtaaatctgtgagtttaaaatatgatttttagca

SEQ ID NO: 237953 - DNA, 570 bp, Homo sapiens
acattgtgataaaatttatacattgggataaaattcagagtaatacactgaacttcagtgtattatcctgaaaacaaaatatacgaagggtcccaaaaccggtgatatcataattctcttcaacagtgtgtgcatgtgtgatatgtgtgcaaatgcgaatgtgtacacacatggtgtgtgtgtgcatatgtggtctgtgaggcgtgtatgtatttatgtgagtatgtgtacattaaggagaccktgagagccagaaatgatatagaattcctactgccctgtaaagaacttttgtttgtatggggggttttttgccttactatctgtggtatatctggacattaagacagaactgttcaggaccatagattacagattcaagtgctgggaacttgaaattatcacatataaatgacctgatgaagcaggccattcattggaatctgatcacaatactttaatctttgaacaaaattcagaataagtccatcttttatcccttcaaaaagccaggtgaagaatcattagaagccacatataaagcagtttcaagtgataattaaataactt

SEQ ID NO: 237954 - DNA, 599 bp, Homo sapiens
cttttaaaagatcactaattcctttcatgggtggtccacccttaggatctaatcacctcccaaggtctccaccttctaaaatcatcayattggcgattagatattcaacatttgaattttagagaggacacaagcatttagagcattccagtgaccatcaggactgaagaattatcttctcttgctttcaagagcctatcttgtactcattcattcggtaaggtcaaccaggatttatggttgtaagaaggacacactgaggacttggtcacttagagatgggttggttgaaatctaagtaagtcttacaaggtcatcgctcttcaggatcacctgtaagacttgttagacagtagagaggttttggacagggtcaagagcttgaggcctaagatataataaaatatccaaactttcaacaattttataaaagacttatagttattctcatttaatgtagctctgcttttattgatgttttaatacatctgtgtcccggtggcttggctaactgtatttctactttctgatataattaagaatacttattcatatgaaaggctcattttgacaaaatctcagctacttttaaaatgtat

SEQ ID NO: 237955 - DNA, 599 bp, Homo sapiens
cttttaaaagatcactaattcctttcatgggtggtccacccttaggatctaatcacctcccaaggtctccaccttctaaaatcatcacattggcgattagatattcaacatttgaattttagagaggacacaagcatttagagcattccagtgaccatcaggactgaagaattatcttctcttgctttcaagagcctatcttgtactcattcattcrgtaaggtcaaccaggatttatggttgtaagaaggacacactgaggacttggtcacttagagatgggttggttgaaatctaagtaagtcttacaaggtcatcgctcttcaggatcacctgtaagacttgttagacagtagagaggttttggacagggtcaagagcttgaggcctaagatataataaaatatccaaactttcaacaattttataaaagacttatagttattctcatttaatgtagctctgcttttattgatgttttaatacatctgtgtcccggtggcttggctaactgtatttctactttctgatataattaagaatacttattcatatgaaaggctcattttgacaaaatctcagctacttttaaaatgtat

SEQ ID NO: 237956 - DNA, 593 bp, Homo sapiens
ggaggacatgtgctcctagcatcccaagttggaaactttgatgtatttttccacagatatggttatatgtggtggctagagtctaataatagtaacaatttatatttctggaatataagaatatacattattaacacatgttctktctttttgtctttttctttttcttttttttttttttttgagacagagtcttgctctgttgcccaggctaggatgcagtggcacaatctctcagctcactgcaacctccatctcctgggttcaagcaattgtcctgcctcagcctcctgagtagctgggattacaggtgcccaccaccacgcccagataattttttatttttatttttggtaaacatagggtttcaccatgttggccaggctggtctcaaactcctgacctcaagtgatctgcctgccttggcctctcaaagtgctaggattacaggcgtgagccactgtgcccagcctattaattcattttcacaagaatcttgtgaagtaaatacttgtatcagttagagatacttgtattaagtcagagaggcaggaccactaggagccataaagaataaggaatttttatgggga

SEQ ID NO: 237957 - DNA, 623 bp, Homo sapiens
tcccatatagattgatggcaaagagcttatcaggtaatttcctaatatccaggcactggcccattgtcacttagcatctaatctgttccttgctcccaggattcaaggaaatattcctgatgatatctctattttctcttcctccagatgggcagtcctcttcaaaaagctcataagcagttctggctcacaggtgtcttaaaattgtagcattgccgagttagcaaagagttagaaacatttatatgcctatctayaggaacatccttgtcttagtccattttgtactgctattacagaatgccacagacagggtaatttattatgaacagaaatatattggcttatggttctggaggctggaaagttcaagatcaaggggccagtatctggagagggcttctcttgctacatcatcccatggtgaaagggcaagagagggcaagagaaagattgagaagagggccaaatttattttttataaggaaactactccagcaatagcaacattaaattcattcataagagcaaagccctcatgaactaatcatgttttaaaggttccacccctttatacttttacaatggtgattgagttttcaacacaagctttttggggtaca

SEQ ID NO: 237958 - DNA, 468 bp, Homo sapiens
gaattcttaaaatttcctggaccaagaattttttttatgcccttgtgtgaatttggtcagtggctactggccctctctctcaggccactgctcctgttcacttttgcccaccctccttaaggtagaactcagaaatacagatgtgggcttctaatgcaaaaatatatatacawttttaaaatatatttatatatatatactttatctatatgtattttatatataaagtatatatttatataaatatataaagtatatttatatataaaatatatatatacacacatacacacatacatattaggccacttctgcacctgaaaaagtgagcaagcaattggagtaggaggggagctgccaaacttcgtgttttgagaaaacaaaacaattgtttgattaattgaagttcccactgtttctgttaccgcagcatcaaatcaataaacagtcatcatttattgaaacata

SEQ ID NO: 237959 - DNA, 475 bp, Homo sapiens
acagtgttagcagatggcaccataaactcagctgtttaggagctttcagcatgtttaggatcagaatactagtccttgggaggagttagtggcacctgccagtcaaggatgtgaatgagagactaggctactaccctaccccggccaggatcccaatgataggaagaagaccaaagcccgataatgacaatctggacacattattagggactgagtttggaggagttgatcaaacagcctcagcagtggagagaggagggccgagtgggctaggaatcaggcaggctctgacaactgatatgccaagccagctgtctatttagaaagttaatatataaaactatattagctatttactgggtggatcagaatyaaaaagaaatgaattgcaaattaaagtcatttaatcagacaataaaataaatagaaattcacaagaagtactaaaaaagacattttaaatctgcgagatatt

SEQ ID NO: 237960 - DNA, 547 bp, Homo sapiens
gctgtgctgtgctacagaggggatgtaccattgcatatctccactagcaatgtatgaataatccagtttccccctcttctcaccatcagtatgtgtaattactattgttcattttagttactctgtcatgatctcttattttacattttrttaatatttccttaattggtaatcatgttgaacatcttttcacaggtttatttgtcatttacgtatattttttggtgaaatgtctgcaactcattactttctcattttctatcttcctaacagaatttttcacagtaaaagttaatcttgatagactccaatttatgaaaatgtccttttatagaaagtttttgggtgtcaagtctaagacctctttgcctagctttaaatccattttttaatttcattttagttttaagttctcatttatatgtgattcatttttgatttattttatttataaggtgcaagacttagattgagctttattctgtccccttctgaatgttcaattgcttgagagccatttattggaaaagttaacttttctctgttg

SEQ ID NO: 237961 - DNA, 438 bp, Homo sapiens
aatggtgaaaatgtctccagggcatatcagagacccttcctggcagcacctcccatcacaggcttagaggcctaggagaaaaaaatggttctgtggtctgggtccaggacccctgctctgtgcagcctcgggacatagtgtcctgcatcccagctgctttagctccagctgtggytaaatcgggccaagatacaactcaagccattgcttcagagggtgcaagccccaagccttcgtggtttccatgtgatgttgagcctactggtgcacagaagtcaagaattaatgtttgggaacatccacctggatttcagaggatgtatggaaacacctggatgtccaggcaaaagtttgctgcaggggtagagccctcatggagaatctctgctagggcagtgcagaaggatatatataaggtcagaacctcaacacagggtc

SEQ ID NO: 237962 - DNA, 438 bp, Homo sapiens
aatggtgaaaatgtctccagggcatatcagagacccttcctggcagcacctcccatcacaggcttagaggcctaggagaaaaaaatggttctgtggtctgggtccaggacccctgctctgtgcagcctcgggacatagtgtcctgcatcccagctgctttagctccagctgtggctaaatcgggccaagatacaactcaagccattgcttcagagggtgcaagccccaagccttcgtggtttccatgtgrtgttgagcctactggtgcacagaagtcaagaattaatgtttgggaacatccacctggatttcagaggatgtatggaaacacctggatgtccaggcaaaagtttgctgcaggggtagagccctcatggagaatctctgctagggcagtgcagaaggatatatataaggtcagaacctcaacacagggtc

SEQ ID NO: 237963 - DNA, 438 bp, Homo sapiens
aatggtgaaaatgtctccagggcatatcagagacccttcctggcagcacctcccatcacaggcttagaggcctaggagaaaaaaatggttctgtggtctgggtccaggacccctgctctgtgcagcctcgggacatagtgtcctgcatcccagctgctttagctccagctgtggctaaatcgggccaagatacaactcaagccattgcttcagagggtgcaagccccaagccttcgtggtttccatgtgatgttgagcctactggtgcacagaagtcaagaattaatgtttgggaacatccacctggatttcagaggatgtatggaaacacctggatgtccaggcaaaagtttgctgcaggggtagagccctcatggagaatctctgctagggcagtgcagarggatatatataaggtcagaacctcaacacagggtc

SEQ ID NO: 237964 - DNA, 582 bp, Homo sapiens
tctactcccctcccccatatattgtcagatatttttcacagtgatatttttgacttaggtcttttatttttttaattttgttttaatttatataatgtatttgtgaatttaaatcaaataatgtaatcttttttctttattgttatttgttttttgctcactttctataatattaaatctctctgacttactgcagtgatgacaagataagagctttaaagagttttaaakgtagaaccgtttttctttctttagatcaaataatatattttgcagggttttgcaaatattgctggggattttcctccagcttttctgatgtaagtcattaaattgacctcaagaaaagagaatttgttcttttattctggaagccgtttcagtattttgatagacagataaagtctttgtatttttctagaattctggtctatttccatatactcaggtgttaatgaattgagataattctgttacgtcagctgtggccacaattcttatcctgtgctgtgttttgtgttagcaactagcaagactaagctccagctacccccagtggtggggtgatttgcttgatgatgc

SEQ ID NO: 237965 - DNA, 499 bp, Homo sapiens
  misc_feature (1)...(499): n = A,T,C or G
nnnnnnnnnnnnnnnnnnnnnnnnnnnnnnnnnnnntttgaatgagcctttttattcccagtaacattttttcattctgaaatctaccatctctgatatwaaataaccactgtgctctattattttcaaatttatttatttattcagagaaggagtcttgctctgttgcccaggctggagtgcagtggcacgatcttggctcactgcaacctccatcccccgagttcaagcgatttctcacctcagcctcttgagtagctgggactacaggcatgcaccatcactctaaactaatttttgcattttcagtagagacaaggtttcaccatgttggccagactggtctagaactcctggtctcatgtgatctgactgcctcggcctcccaaagtgctgcgattacaggtgtgacccactgtgacaagccccattatttttatttttatttatttattttttgagacaggagtttactctgtaacccagtctggctggattg

SEQ ID NO: 237966 - DNA, 499 bp, Homo sapiens
  misc_feature (1)...(499): n = A,T,C or G
nnnnnnnnnnnnnnnnnnnnnnnnnnnnnnnnnnnntttgaatgagcctttttattcccagtaacattttttcattctgaaatctaccatctctgatattaaataaccactgtgctctattattttcaaatttatttatttattcagagaaggagtcttgctctgttgcccaggctggagtgcagtggcacgatcttggctcactgcaacctccatcccccgagttcaagcgatttctcacctcagcctcttgagtagctgggactacaggcatgcaccatcactctaaactaatttttgcattttcagtagagacaaggtttcaccatgttggccagactggtctagaactcctggtctcatgtgatctgactgcctcggcctcccaaagtgctgcgattacaggtgtgacccactgtgacaagccccaytatttttatttttatttatttattttttgagacaggagtttactctgtaacccagtctggctggattg

SEQ ID NO: 237967 - DNA, 574 bp, Homo sapiens
ctttaatgtataatcaaattctgtgaatcagcacaaaaagccatatgaggcagggtgggaaggcctataaatatgtcatgatactgcttttctatagcatgtatttcttttcttccattttattcttattggcaccaatgtcttcatttcctcatgaaacaattaggaattcagatttggtagataagcttatcaaaacagtaaagttgcaacaatggcagtggtttgtggaacacatgttttaaggattgagctattatgtattatgtattatgaataaatgtctttaatgtctttaatggattccttgtacttttaaccamacaaaaataagtttagaaatattcacattgttttctttgtatttaatacttagtgtataatttcaaagcaaaagctgagataagaataacttctttaatggagaagtaataattattttagtcactaacaaaatttaattctaatataaataataccctttctaaattcaaatgttgaaatagtatattctgttccagaatcctagagaaatgctgaaaaagattcaatactgagcttattggaaatggaa

SEQ ID NO: 237968 - DNA, 447 bp, Homo sapiens
gaattcttgtttccattcaggtaagagaggtactcaagatatttgaaaggcaaaagaaaaacctaagcttttttttttccttcgatatcccagtggatagttggtggatcatttttgattcaagattttgcattgaactcagttgttgtgatgcatgcaaatcacttatcttgggagaatacgaatctctaatcactagtagtttccattccgaagacctccrgggtaaaccagagagagctaacagtaatcttttccgagcttgattatttattttttgatagtgcattcattgtttctgtgtagcaatttaccacatatttagctacaaacaaaacatatttgtgatctcatagatttttggggtcaggggtttatgtaccacctagctatgtcctgagctccatcgatgtgttggctggactggattctcatctggaagcataa

SEQ ID NO: 237969 - DNA, 543 bp, Homo sapiens
tgttttatattttaccaaataatcaacacttctttatctttttattctacatctcaatcatataaacaatcattaactcyttaatcaacacaatgattattgcctttcttcagaatgtagcccagccctgaatgaatcctacaatattttgcatgacactgcgcaaaatgatatgaaattttatagcaaacagaaaaattcaagaaataatgtggtacacataagcatattcttatgtgcatgtgcatatacaccagaacatgtgaatttcaaaagccacttgtttttctttaaatttgtttcatacatctaaataattactgaacctaacactatgtttaaggaaatatctcagatataatttaggatatttgcatatatattaataattttcaattgtgagttaattttattgctaattgttgaagactttccaaatttaggaccttaagttaagattgtatagcattttaattcatccttgaaggattctggataaagtgactcaaattatacattgcattttgtgacctcagtagagtt

SEQ ID NO: 237970 - DNA, 543 bp, Homo sapiens
tgttttatattttaccaaataatcaacacttctttatctttttattctacatctcaatcatataaacaatcattaactccttaatcaacacaatgattattgcctttcttcagaatgtagcccagccctgaatgaatcctacaatattttgcatgacactgygcaaaatgatatgaaattttatagcaaacagaaaaattcaagaaataatgtggtacacataagcatattcttatgtgcatgtgcatatacaccagaacatgtgaatttcaaaagccacttgtttttctttaaatttgtttcatacatctaaataattactgaacctaacactatgtttaaggaaatatctcagatataatttaggatatttgcatatatattaataattttcaattgtgagttaattttattgctaattgttgaagactttccaaatttaggaccttaagttaagattgtatagcattttaattcatccttgaaggattctggataaagtgactcaaattatacattgcattttgtgacctcagtagagtt

SEQ ID NO: 237971 - DNA, 590 bp, Homo sapiens
aatagatacatgggccagtcaaaataaaacacatcttattaaaaaaaactaacaaacataagaaagaataaaagtagtttcttagttgtaaatatataccaatattaggtttattgtgcagttaaattaaaatttaaataacatggtcaagctagtatgaagctatcactaaacataaacacaatacaaatgcctctacaaaatggattaatggctaactaaatactctaatgagttaaaacacggaaagtttctaaatgaaattaaattatattaaacagaaatgatatcactactctaaaatgtatcagatgactttatcctaaagattgtaggggtgaaagtttagagatagaacattgcaatgacaagatatctgtgtttaggacagaattgtcaaagtatatgtggagcttcacctaatgatttttttttcatataactgagttgatctgaaagaaaaaaattgaaataaaatgtgtttaccaatatgtttaaccccccaaatgggaatgcattastaatatcttatatgtgtattaaataataaacacaataagccacttgtaaattttgatttatgtaaataa

SEQ ID NO: 237972 - DNA, 551 bp, Homo sapiens
ctctgaataactcacagtgatacccaggtactatgttaaaggccttargtgagcctctgacacttggtggcttcaggtgaggctcagcacattaccaccagtggcaaaactctttctgcttgtgaaaagcaaaggtaaaagtaaaagggacttcgtcttgccccttaggtaccagcacaaccacaggaggctagagcaccaagcaagctcttggggttccaaattccataacttgattcttggaaagcatttctggacttacgctggaccagaagctcactaaatgaagggtgagtcccaacccaggcagcatttatgacaagctgacttaagagaccttgggccctaagaaaacctcaatgataatctggcagtactccttatggcctggggtgacagtgactatggtgtggtgctcctctgcctttggaaaggggagggaagagtggaaaggacttcatgttgtagttgagtgccaactcagctacaatataatagagcatcagggagaattataaggtttttactctagtctctgacttccagcacct

SEQ ID NO: 237973 - DNA, 551 bp, Homo sapiens
ctctgaataactcacagtgatacccaggtactatgttaaaggccttaggtgagcctctgacacttggtggcttcaggtgaggctcagcacattaccaccagtggcaaaactctttctgcttgtgaaaagcaaaggtaaaagtaaaagggacttcgtcttgccccttaggtaccagcacaaccacaggaggctagagcaccaagcaagctcttggggttccaaattccataacttgattcttggaaagcatttctggacttacgctggaccagaagctcactaaatgaagggtgagtcccaacccaggcagcatttatgacaagctgacttaagagaccttgggccctaagaaaacctcaatgataatctggcagtactccttatggcctggggtgacagtgactatggtgtggtgctcctctgccttkggaaaggggagggaagagtggaaaggacttcatgttgtagttgagtgccaactcagctacaatataatagagcatcagggagaattataaggtttttactctagtctctgacttccagcacct

SEQ ID NO: 237974 - DNA, 550 bp, Homo sapiens
aaataatttgcctatttcatgtaagttgtcatttttggcagaaatgtgttcatcatattatcttatatttttaatattcctattttcttgctatcttctcactccctgatattggtaagttatatcatatgtattttttctctgatcaatcttgctgtaatttgatcagatttattgatcttaaaaatagcttttggtttcattgattttctrtaccattttttcctgttttctattttattggtttccataatgatccatattatttcatttcttctatttactatgtgtttaatttgtactcttcttactagtttaaggttgaagcttcacgtatttttaatttttgaattttaatatttcagacgagtggagtacacatttaaattcccatcactgacaaatatttccactataatcatgttctctacttgctcaggtattttacttaacattacagaatccctcatattctgcctaaatttttctcacaacattcttgtttggggtagtttagtcaattaaaccaatttgataattcaaatttggc

SEQ ID NO: 237975 - DNA, 593 bp, Homo sapiens
agaattatattataaacagaaagagatagcttgacttttttccctatttgaattctcttttaaaaaaaatgtttaggctggtttctctgtctagaaattctagcgctaagtttaataggcatggtgagagtggacaaccttattattttccagttctcaaggagggtggtttcagcattgtcacattcagagtaatgttggctgtgtgtttgtcatacatggctctgattattttggggtttgttactttgatgggtagtctgttgagagtttttaccatgaaggatgttttatctaaagctttttttcatttttttttttttgktttttttcatctactgagatgatcatattgtttttgcttttaattgtttatttggtaagtcatatttgtttatttgcatatgttgaaccaggcttgcaatccaggaataaagcctacttttttatgtgcttctgaatcagtttggtagtgttttgttgataatatttgaatctacattcatccagaaattggcctaaagttttctttgttcaccgtgtctctgccatattttggattaggcttatgctggctttatagaatgagttaa

SEQ ID NO: 237976 - DNA, 568 bp, Homo sapiens
ggttggtaggtttttattactaattcagtcttggaacttgttatttgtattttcaggttttcacttttgtcctggttcaatttttagagattgtgtgtttccagggatttacccatttcttctaggttttctaattggtacgcatacagtggttcataatagtctctcaggatcttttgtgtttctgtgaaatcagttgtaatgtcatctttgttgtttctaattgtagtttttgaatattctctttacttttttgctaatatagcttgtggtctatgctttttgtttttattttattttattttttttgartaaccaactctttgtttcattgatgttttctatgaattattccatctcaatttcactcaggtcccttctaatttagttatttctatgaacctaaaagtctctaagacaggtctcaatcaatttagaatgtttattttgccaaggttaaggatgcacctgtgacacagactcaggatgtctggacaacatatgccctaagcagttgaggtatagcttgcttttatacattttagggggacataatacatcaatcaat

SEQ ID NO: 237977 - DNA, 568 bp, Homo sapiens
ggttggtaggtttttattactaattcagtcttggaacttgttatttgtattttcaggttttcacttttgtcctggttcaatttttagagattgtgtgtttccagggatttacccatttcttctaggttttctaattggtacgcatacagtggttcataatagtctctcaggatcttttgtgtttctgtgaaatcagttgtaatgtcatctttgttgtttctaattgtagtttttgaatattctctttacttttttgctaatatagcttgtggtctatgctttttgtttttattttattttattttttttgagtaaccaactctttgtttcattgatgttttctatgaattattccatctcaatttcactcaggtcccttctaatttagttatttctatgaacstaaaagtctctaagacaggtctcaatcaatttagaatgtttattttgccaaggttaaggatgcacctgtgacacagactcaggatgtctggacaacatatgccctaagcagttgaggtatagcttgcttttatacattttagggggacataatacatcaatcaat

SEQ ID NO: 237978 - DNA, 536 bp, Homo sapiens
ttttgtgtttctgtgaaatcagttgtaatgtcatctttgttgtttctaattgtagtttttgaatattctctttacttttttgctaatatagcttgtggtctatgctttttgtttttattttattttattttttttgagtaaccaactctttgtttcattgatgttttctatgaattattccatctcaatttcactcaggtcccttctaatttagttatttctatgaacctaaaagtctctaagacaggtctcmatcaatttagaatgtttattttgccaaggttaaggatgcacctgtgacacagactcaggatgtctggacaacatatgccctaagcagttgaggtatagcttgcttttatacattttagggggacataatacatcaatcaatacatgtaagatttacactgattctatctgaaagggcagaacaactcgaagtgggagctttcaggtcataggtaggttaaaaaattttctgaaaattggttgaaatagttattagcaatagaaaggaatgacaaggttatgat

SEQ ID NO: 237979 - DNA, 441 bp, Homo sapiens
agccaattcccctaataaatcatctctcatatgtctatgtaaatacctgattggttctgtgtttctggagaaacttaacacagacttggtattgggcaacccaaatattactccttcttactgkatttcttactacacagtagaagagatctttaaaattcttccttggcaaaaggctgtgataagttaaatgtaaaagtatacttagtggtgaaagataagagtttaaaagctaattataattggtgttacaaaagcagaaaatcacttaattgtgacagtcaagcaataatcagaatttcaaatagacaacatataaattttgtagaccataaccactctcaaaatacaagtggaatgagtgttttgaatatcaaataagtaaaagtactggtaataaatagaaaaaaacttccaagttattcaattatgtatgaattc

SEQ ID NO: 237980 - DNA, 566 bp, Homo sapiens
ttcgctgtgccttatgcaaacaataaggctaagtataataagactaaagcttattttgcaaacaaatcagtcttaccataattcgtttttattaaaaatgaggacagaagagagaaaaattatgttttaataattatggtacacctgttattggattctggtctcatcagttgcttctgagtttttctacaatttagactaacgctgcttgtttctgtaaatcaaccaataattcctgacatcaacttaaaagaaaccacagggatggaccatcaagcttcagataatcctcaatgagaaatactatcctatgaatattcaagaaccatcctactacagaatagtcctagactgcccatcaatgggacatgacaaaagtgagatcctgcccctattacccttgtrcctagctggatactgctttcaccaactcagggaaccaccctgccctgagagctagcaagagttcaaaactcacagaatcactaccagagctcctctggtcagcaggaagaagttacaaaacactgaacttcatccatttttcccaaagaatttgggccttg

SEQ ID NO: 237981 - DNA, 494 bp, Homo sapiens
gttcggtccaatctgtttcaggacttcagtcagtgaaaagagtgaaaaagaaaatccttttaaaccgacagcctgagatattttgcaggtctagctgggagcttcctggaaaaatgaaccaaatatggctttgaatggcacagacgaaatgagggttctaattccagctctgctgtaaatcactgtgtggccttggactgggcagttaccctgtctggactcatttttcataaacaccaggcacagacgaggtggtctctggggttcctggcaattctgtgggctatggcttgagaactctctgcaaaactggacacagagataacagcaaatattggagcagagactgtccgctggagaaagacgaagktttggcagttagataaggaacccagacctcaaacacattcaacactgacatcattaattgaatttcctgtttgatacctttacagggccagggatgttttcaattaacgtgggttagtaggtgt

SEQ ID NO: 237982 - DNA, 525 bp, Homo sapiens
cataattgcaatgtatacagcacttcatatttttctygggcttatcaagaatataaggtagatatttgtgggtatttgtatcctataacagaaacaatgtttggccatatccccgagttaaaaaattaaactgtaggtgctgaagctcaagtcctatgtctttaaactgcattcagtgaaccccaaataaatagcatttttccctgcctaggttttggaaaaaataaaaaataaataacagtaaagagagaaaccaaagtgtcaactatattactgctagaggccaagttggaggacatggccttaggtcccttagccaagtgacttgcaaatacctaactctagaactggacagacaagcccaccagtccaaggcattcctgaattgccttacctgatacctgccaaggtaagacctaaggaatgagtaagcagagaggaacaaatgctctctgcagatagacctctctcaagagagaaggaaaatggatctgagtgagcgtgcctagttattgtttccaaatt

SEQ ID NO: 237983 - DNA, 510 bp, Homo sapiens
aaatgtatttgctctgacaactaaaatcttgaaggagtatccagcatttgttctggctggagacagagatgctcaaaaagtgtcatcggggttctttctttctctgctcttctactctttgcaggttcatcacattctcccctacttccattgggtcagcacaaacagctacaggcacctccagtttatatcattcttatagttcacgaccaatggaagacagcatctttcaaaaaagttcctttgaaaaagttccaagaaggctttacttggcctaccttgggcctagcttgtctcctactgtgatagaggagtcagaactaggactgaaaaggggtggtgtgaggtcatcctttgctaaatctcctgggatggggaaggatggttcccsagagaaatgaatgctgagcgaacatcagtatatgtcaatctcataaggattagataagtatataacaagaaccttatacacaataccttctatttttttaacccaacgatgaaatcatt

SEQ ID NO: 237984 - DNA, 609 bp, Homo sapiens
aaactaacactcctggtggtatttaaaattcttcaatttgagaatgaatacaatgcctcccaatagtgaaatctcttctgttcatgaatgtggcattttgctttctgcctgtctgttgtcttatgaggaagagagtactttctgaagtctggttttctgactttgttaaaagtgmaagtctttttgtttcataattattttttacacaaatgagatcacaacactatttcactcatcaacagtgttttggagatttttgcataatactaacaaagatttatttagtgctatttatgccttacaatatactttcccactcttatctcactttatctagcacttgcttctccatttttgaatgagaaaattgaggctcaaatgagatgaagtgattgggtcctaagcagtgccttaagtggagaagtgaaaccagatgcctcagaggtagcaaaaaaagtagcttctcagttgccttgaggtggctgacattgctgtgtatcttagcgcttcccaacctgggcatgtttcaagtgtagctagtttcttatggcatgctaagcccttaactttttcctcctacaccctctatttccactcacttgtagactc

SEQ ID NO: 237985 - DNA, 609 bp, Homo sapiens
aaactaacactcctggtggtatttaaaattcttcaatttgagaatgaatacaatgcctcccaatagtgaaatctcttctgttcatgaatgtggcattttgctttctgcctgtctgttgtcttatgaggaagagagtactttctgaagtctggttttctgactttgttaaaagtgaaagtctttttgtttcataattattttttacacaaatgagatcacaacactatttcactcatcaacagtgttttggagatttttgcataatactaacaaagatttatttagtgctatttatgccttacaatatactttcccactcttatctcactttatctagcacttgcttctccatttttgaatgagaaaattgaggctcaaatgagatgaagtgattgggtcctaagcagtgccttaagtggagaagtgaaacyagatgcctcagaggtagcaaaaaaagtagcttctcagttgccttgaggtggctgacattgctgtgtatcttagcgcttcccaacctgggcatgtttcaagtgtagctagtttcttatggcatgctaagcccttaactttttcctcctacaccctctatttccactcacttgtagactc

SEQ ID NO: 237986 - DNA, 581 bp, Homo sapiens
ggccaaggtaaaaagctagggaagcaattcttctttcaaggggaaaaaatatatgtatttggcttctttttcacacatccaacccagcagaaaattggtttgtggaagatgtaggtcgtggctctggccccagcatctggatgccttatattgtacactatattaccagagtaatatcgtgcactttattagcaccagcaggaytggggattcccatggggtctgttctttgctgtcagatgtgtaaggccatttaatctcctttatcagatctagttctgcctccccgatccccacctcctcttgcagagcaataaagaaaatttcttcagattcgttgggctgaaaaccagcttttaaatactcctccatcctccccaactcctgtgtctaataagcaagcaagccaagaaggtgtcaatgccttgaaaatcagccttgtgcaattgaatagcagttttctcaggaaatttgtaattggaacgtcaccttctttaagcagagactggaggaagaatttgttgcttagcctagctagctcttgtctcacctaggcactgtgatctttggggacaaggctg

SEQ ID NO: 237987 - DNA, 548 bp, Homo sapiens
ctggcggggggagacatagagacgttaacttcctaaggtcacatagctagaaaatgcaagactcgaagccacaaaaatctaaatccaaaacccatgttcttaactgtgatggttaattgtatgtatcaacctgactgtaccacagagtacccagcttaaaaattatttctgtgtgtgtctctgaagatgtttctggatgagattatcatctggattgatggacccagtaaaacagattgccctctccaatacaggtgagcatcattcaatccattgaggccttgaacagaacaaaaggcagaggaaggaggaatttgtcccctttttttctgactcagtgcttgattggggaaattttgcctcattttttaccaccttcagactggggtttataccatctgctcctctgatcctyaggccttcagactcaggctgaattatatccccagctatcctgggtctccagcttgcagatggcagatcatgggatttctcagcttccgtaatcgtgtgctctggagaaacctcatcattgaccattgtaccac

SEQ ID NO: 237988 - DNA, 616 bp, Homo sapiens
atgcacatcgtgcaggtatgaaatccactacatgtcccctgcaagaaggatttgggcagggaagtgtgtggaagatggggctgcagtggtggagggctctaagctctgaagacctttttaatatggctgtrttgtaatactgcagtgacaaaccccgccagtcattccaaaagcaaaaggaaaccccactctgcagcagaacttcccagccctggaaacagattgtcttccttttgcacccatttaataaccactgtatttaacacgatcaggggaattgtgcattctcggaaggcacagtaaggaacctcggtctgcaacgacgcgattcctcagacaccaaactaaaatgcattcattggaactcagcctcccaaagcggaagcaaagccactgcaaggcgatttacaggcaagagcccctctgaaagagaggaaaggagggggcttggaaagcaaggggacacaccttttctgagctgttcgaaacaggctgcctgcaaagtccacccatactgcgctgccaagggttaattttctcagcaaaaattggtacacgcacacacacacacattctctctctcctactgcacccccacaacctctgccaccaccac

SEQ ID NO: 237989 - DNA, 571 bp, Homo sapiens
atttatacattttgagttgttttcttaataaattttccagagatttcaacatgcaccttaacttttcataatatactttagattaatactaagttacttctaataaaatatggaaattttgttaaaatatatctccattttctttctccttctttgtgttattatagtcatatacatcattatatgttataagcccaacaatagattttaaagttattatttcatgcaattgtcttttaaatcagttatgagaaaagaaacatatatttattgtcttttatatttatcttcataattaacttacaagtgctctttatttctccatgaattcaagctatcacctagtgtcattttctttcagtccagaaaactttctttactctttctcgtaagtcgggtctgctagccacaaattcatttagtctctgtttatctgagaatatctttgtgmagaatagttttgctggaaatagaattcttggttgataggtttttgtctttcagcactttgaatatgtcaataattctgccttccggcctctatttctagtaggaagtcagttgtgaatct

SEQ ID NO: 237990 - DNA, 624 bp, Homo sapiens
tgaattcaagctatcacctagtgtcattttctttcagtccagaaaactttctttactctttctcgtaagtcgggtctgctagccacaaattcatttagtctctgtttatctgagaatatctttgtgcagaatagttttgctggaaatagaattcttggttgataggtttttgtctttcagcactttgaatatgtcaataattctgccttccggcctctatttctagtaggaagtcagttgtsaatcttattttcattcctctgtatacagtgagtgtttttttacttcttgctgatcttagaattatttctttatatttggttttcaatcgtttgactatgatatatctaaatgtgatttgtgtgtgtgtgtgtttatcctatttggagttcactgaggttcttggatgtgaggattattttttaaattaaatttggtgagtttttgggcattatttcctcaaatattctttcccctctttctttctttcaattgcttatgagactcccatgaaacatatgttgctgtgcttaatggtgtcctataggtctctgaggccctgttcatctttctctatttgttttctgttcttccaattggataagtcctatttatctatcttca

SEQ ID NO: 237991 - DNA, 451 bp, Homo sapiens
tcagttttattattaataaaaataaagattttaaaaatatataacatatgatatataacataataatatatattaataatatatatataatgctctttcttacctctaatctcttaattgattagattttctgaaaataagcagtcctaatacctaggacaataactcctactccctgtgttttaaatcaaacctctttcagctggaccattctgcctcctattcaattttcttattttgaatgataatgataaccaataaaacagaaaagtaaacgtctctgctcttcaggtacactatccaaatacatggaaaagctacttagtacaaaccacttgaaatgcagtagaatcagctaaaatagtgttctgttctttaatccagtctgmtgcttctcctgtcaattggctggaacatgaattctaagaaatcactagatgttcacagcagg

SEQ ID NO: 237992 - DNA, 586 bp, Homo sapiens
acagtcttgtgagaaattggcttcacctgacatgaagtggtagccagctcaatggcacacccttgtatttgtcctcctttttcctttcctcactccctcttcccctcctgatacttcttgggactttagtccacagtaaggtagtagtattggtaagctcaagccttcggctcggctttctgagacccaggtcagctaayactggattagaacatctgggagtggggcatttttacaagatttcctgatgatttccaggtaccttacagtctgatgaccactggatctagaatctgaacccaatgtaaaggactctaaattcagtactctttgcagactaatatatgccagatataagaaagaatcctgctgttctcacattgggtcaaagatggagaaagaaacccctgactgactgtactccaccactctgaacttcaaggggctactgtggggttcctgacactgacaacacctgtcccacgtggtgaaccagctcaccttcccatccaggcagcagtccagcctatccccacttctctaattcttgatgtcaaataggttacactctgactagtttcatgct

SEQ ID NO: 237993 - DNA, 502 bp, Homo sapiens
gagagggcaatgttttgaaggaatagaggtctggcaaaaaaatgggaagaagaagrgatagagaaaaaaggaaagatgtaagaacagacacacaggataaaggacacacctgttattcactgagagttctctggagagatttatcttccctaaaatagaggtaatttgtgggacactagcataactcattcattaacttactcatctattcaacaatatattctaagtatatgattcaggactggaatatagcaaatatgagtcagaagatacagtgcctgtgttcaagttacttagagtctataaagtgcaacacatatggaataacagcgatattaagagctaatatttattgaatatgtgttatgtgccaagcactaaaccatattattttattcaaattttacaatagccctaacaggaagtattactgctatatctattgacatgaacacactaaagcttataagtgtttagtgactttcccaagctcataaagcta

SEQ ID NO: 237994 - DNA, 618 bp, Homo sapiens
tctcctactgctgcttagaaagcaatgtgctcagcaagcaatgtgctcagcagcaagttgctgcttagaaagcaatgtgctcagcattgggaatatacagcctagaagtcagagtccctacttttaagttatttatggtccagtgagggcaactgtgatcagccatcctggtttacctgtgactgtcctggttttaatactggaagccccacattcgagaaatcccctcagtgctggacaacctgaaatggttgattacttgaagtcttgcaggagaaatagatagatactttttaatgtggcatataagtgttttgatataggtagtcaacacagagttccttactaatattaatatctgtcctgaaaagacatatttcatgaaaaaaaatgcaatcttagagtctgtaactttcccaagatcacaaagttastaagtagttgtattagtttgttctcacactgctagaaggacatacctgagactgaggaatttataaaggaaagaggtttaattgactcacacttccacagggctggggaagcctcaggaaacttacaatcatggtggaaggggaagtgaacatgtcctccttcacatggtggcagcaaggagga

SEQ ID NO: 237995 - DNA, 644 bp, Homo sapiens
agtttctctactcctctcaattcttgtttacaagcttgctagctttcagaagcagtaggcttgtaraaacaatatttttgcaacatttcttttcaaatgagattatgtctgatgttggatcaaggctaagcttttgactaagatcaccatttccagacaagcaaatctaaagtaactgctcttggggcaggccactgtggcctcatggtgctctttggcctctacctagagtgagtgagcaatcctggaaaatctaatcgcatgaggtaaaaagtcagagatggggttttccttccagcataggattttcagcatgggcaggtttcagagggcctctatcagagaagtcaatgaatcaaagggcatttgcagagatgctgtcttccccttgcccatacatctgcagaaataggccttactgaaaccattagcataaaaactgcatgttttgtaaggttgacttctttgaccccctcttctatcatcttcttactggttctctaggctataatcatcccaatcttctacgtgtcccttgcacacttcaaatatttttgcaactctgggcctctgtctttgccattccatttacctaaaattcttccccaagatccttgcaaggctagctccttcttgtcattcag

SEQ ID NO: 237996 - DNA, 577 bp, Homo sapiens
aggccactgtggcctcatggtgctctttggcctctacctagagtgagtgagcaatcctggaaaatctaatcgcatgaggtaaaaagtcagagatggkgttttccttccagcataggattttcagcatgggcaggtttcagagggcctctatcagagaagtcaatgaatcaaagggcatttgcagagatgctgtcttccccttgcccatacatctgcagaaataggccttactgaaaccattagcataaaaactgcatgttttgtaaggttgacttctttgaccccctcttctatcatcttcttactggttctctaggctataatcatcccaatcttctacgtgtcccttgcacacttcaaatatttttgcaactctgggcctctgtctttgccattccatttacctaaaattcttccccaagatccttgcaaggctagctccttcttgtcattcaggtctcaagtcaaatgacctccctccctcagagatgcctgagggtatggctatggaaaaggcagccctcaatcctgggcaatctctggtccactccatgatagtgttttttttttttttttt

SEQ ID NO: 237997 - DNA, 577 bp, Homo sapiens
aggccactgtggcctcatggtgctctttggcctctacctagagtgagtgagcaatcctggaaaatctaatcgcatgaggtaaaaagtcagagatggggttttccttccagcataggattttcagcatgggcaggtttcagagggcctctatcagagaagtcaatgaatcaaagggcatttgcagagatgctgtcttccccttgcccatacatctgcagaaataggccttactgaaaccattagcataaaaactgcatgttttgtaaggttgacttctttgacyccctcttctatcatcttcttactggttctctaggctataatcatcccaatcttctacgtgtcccttgcacacttcaaatatttttgcaactctgggcctctgtctttgccattccatttacctaaaattcttccccaagatccttgcaaggctagctccttcttgtcattcaggtctcaagtcaaatgacctccctccctcagagatgcctgagggtatggctatggaaaaggcagccctcaatcctgggcaatctctggtccactccatgatagtgttttttttttttttttt

SEQ ID NO: 237998 - DNA, 610 bp, Homo sapiens
ttttcctacactcaaccattcattcagttatttacacacagttatttgcttcctcgccttgtcaagtaattctggaggtcccagtgtttgccaacagccatgataggaactttactgacttatctgatttaatctttataaccgcactgggatattaggagtattattctcccattttagagataaagaaactaagatacaggccacacacctaacttgtaagcatcatgactcattccatctactttattttttaacaagcatttataatatgcttattatgtagcatgcactttttaagcacttcatgcacattccccatagtacctaacacagagcccggcacttggtatatgcttcataaatatctgttaatatttgaatgaatsaatcaatcaatcatcaatcagtagaggtactatatcagctttacagaaaatgagtgctaatataattctgaggtagtatgagttgtttcttcagccattcaacatgcatttattatatattttaaaatatatatttattatacatataattatgtatgtatgtattgtatataaccacctacactgtgcagagtactggtgagatggtacagggataaaat

SEQ ID NO: 237999 - DNA, 629 bp, Homo sapiens
agtagaaaaacaatgcaataaagtctgtactttcaaaatatgcaatctggtggtgaaaaatatggaagcttgaaggaggaagatcatttaagtgggtaatgtttatggggtagaaaagagggaatgagaagttaggcagggtggtaaaggggagaaagaaaaaggaagagaagaaagtgaatgatgctgaagagtttggatcaatggatgagtgagaactaaaaaaattgatgagtgggtgaataggtaaatggatggacaaatgaatgaatgagtgaataggtgggtgggttgatagatgaagagatggttacttgtgcttgggctggtccttctccagagaaatatatttcccttagcttaaactccaccatcaaggtgtgtaatttggggctttttccttcatgagatctcagccagtattatagacctggcagctcctacttcatttcatttctaggtagagagaccagagcacgaaaacctctcactgttccaccccgcacatcaccttcagattcttcsgtcaaaaccataatgtcatcatttcccctgccccaagatacttcatgggctccccatggccaatgtgatcaaaatacattattggttctgccacccatgatgtt

SEQ ID NO: 238000 - DNA, 632 bp, Homo sapiens
tctgaatgggtgttttataaagaaaagaggtttaattggctcgtggttctgcaggctatacaggaagcatggtgccagcatctgctcagctcctagggaggcctcagggagcttttactcatagaggaaggtgaagcaggagcaggcatatcacatggccagagcaagagcragagagagagagttggggaggtagttgtattagtctgctctcacgccgctaataaggacatacccgagactgggtaatttacaaaggaaagaggttttattgactcacagttccacatggctggggaggcctcacaatcatggtggaaagcaaagaggtatgaagtcacctcttacatggtggcaggcaagagagcgtgtgtaggggaactgccctttataaaaccatcagatctcgtgagacttattcactatcacgagaacagcatgggaaaaacctgcccccatgattcaattacctcccaacaggtccctcccatgatatgtgaagattatagaggctacaatttaagatgagatttgcgtagggacacagccaaaccacatcagaggtgccacatacttttaaatggccagatctcatgtgaactcagagccagagctcactctctccaagggaa

SEQ ID NO: 238001 - DNA, 635 bp, Homo sapiens
tcaaaaaatatttatctccaaaacctccccttctctgcaggagatctagtaggcagctgctctttttgcttattcagcttccattccacctcactttgtttactataccccctttgccattggagaagtaccccacttcttgccgtgtgctttggctgggagtgtaactcatccttccttgccatcagcccatccatagccttacgcccttggcccacrtgagtatgatgcaagctggacaaatcagactctagctttttttaggctactaaaaatacaaagagtgtttggtttttgagaggaatgacacctgggctagagcaaagtcattctgctgacaggcttacggagttgatccattagttctcctcaccaagatccctagagcctcctggctctttcttgcctgaagtccgattattcaattctctgatccattctagagctaccctgagtgatctagcaaatcctgctacttgtttaagtctgttggtgctggtttctgttgcttgcacccaaagattcttaacagatgcaggcagaggcctgaccctattcacgttagttctttcatgcctcacactgagcccacctggtatgcatatgctcacaaaacatgtgttagacctggtgac

SEQ ID NO: 238002 - DNA, 635 bp, Homo sapiens
tcaaaaaatatttatctccaaaacctccccttctctgcaggagatctagtaggcagctgctctttttgcttattcagcttccattccacctcactttgtttactataccccctttgccattggagaagtaccccacttcttgccgtgtgctttggctgggagtgtaactcatccttccttgccatcagcccatccatagccttacgcccttggcccacatgagtatgatgcaagctggacaaatcagactctagctttttttaggctactaaaaatacaaagagtgtttggtttttgagaggaatgacacctgggctagagcaaagtcattctgctgacaggcttacggagttgatccattagttctcctcaccaagatccctagagcctcctggctctttcttgcctgaagtccgattattcaattctctgatccattctagagctaccctgagtgatctagcaaatcctgctacttgtttaagtctgttggtgctggtttctgttgcttgcacccaaagattcttaacagatgcaggcagaggcctgaccctattcacgttagttctttcatgcctcacactgagcccacctggtatgcatatgctcayaaaacatgtgttagacctggtgac

SEQ ID NO: 238003 - DNA, 281 bp, Homo sapiens
ctttcagcgatgctcacacaagcatatagcaaytcattctgcaggaccatcttcaaagaggaaggatattgatttatagaaaatgctattagacataaaggataatgacacatagatcacggatgctgcatcaacatatggaagagttcttgcatcagcaaataaaagggatcaataatgtgaagagagtgggcgtaagatttattaggaggctttattgccttgtgatttatgcatcactacagatggcagtgatgtagtataattttcacaaatatgat

SEQ ID NO: 238004 - DNA, 622 bp, Homo sapiens
ttttatttttatcatttaatgaatagcttcctggaagctatattctccctcagatatttttaacagtttaattgtaagaagtaattaacccagaaagcttctagtttgcttctaaatacagaatccaagaatatccagtggtttctaaaaatgttgaaccattttttctcccatagtcttaacatagggaatatcattgatattttcaaaaaattgtcaaagctttctttatcaaagccccaaagttggctgcatgaccatacctggtcttaggtctatgaggtttatatcattatacagataggaggatttgaagaatatgtgtaaatattttctcaagaagaaaaaaggtgcatacatcatagacatgatttcactgttttattrtatttattctaaatgtattataaacctggataaatgtgtttggatgtctgtatatttgtggtatgtgtgtatatgtggataaatatgtttgaacgtgtgtatatttgtgtgtgtgtgtgtgtgtaaaacctgacaatattcacatatcaagaacacttcaccaaacaacagactttccagtgtcatgaaaatatcattaaaattgaccatatgctgggcaatgcagcctgagtca

SEQ ID NO: 238005 - DNA, 622 bp, Homo sapiens
ttttatttttatcatttaatgaatagcttcctggaagctatattctccctcagatatttttaacagtttaattgtaagaagtaattaacccagaaagcttctagtttgcttctaaatacagaatccaagaatatccagtggtttctaaaaatgttgaaccattttttctcccatagtcttaacatagggaatatcattgatattttcaaaaaattgtcaaagctttctttatcaaagccccaaagttggctgcatgaccatacctggtcttaggtctatgaggtttatatcattatacagataggaggatttgaagaatatgtgtaaatattttctcaagaagaaaaaaggtgcatacatcatagacatgatttcactgttttattatatttattctaaatgtattataaacctggataaatgtgtttgratgtctgtatatttgtggtatgtgtgtatatgtggataaatatgtttgaacgtgtgtatatttgtgtgtgtgtgtgtgtgtaaaacctgacaatattcacatatcaagaacacttcaccaaacaacagactttccagtgtcatgaaaatatcattaaaattgaccatatgctgggcaatgcagcctgagtca

SEQ ID NO: 238006 - DNA, 581 bp, Homo sapiens
aatggtttcacctattttagcttttctgatcctcagtaaacccaggaaaactgagaagttgtgggacttgacccaaattgcacagcaagtgatggtggtagtagaactctggttgtccaactcaagaactcattcttttcaagacaacattgtacggtactgcaataataatgacataatgttgactgaaccattacttcatggtcctggacacagtggtatgataattagagcttttatacattacartgaaaagctatacacatatatttgtaattttaaaatgctcaagagtaaaaacaattacaaacatttattgagcactttctgtatgcaaggcatatgtagtaccttatactatatgaaaaattaccctctgcagcaggtattattattacctgcatttaacaaatgagagatttaaggttctgagttctttggtaacaggtacaggggtttacaatgggtagcagtgctagaatttgcttttaatttgcttgtttccagaaacttgttttaattggtatgctttacttcctctcttaaaaagtgaaaaccatttataccttatcaaaatagac

SEQ ID NO: 238007 - DNA, 573 bp, Homo sapiens
caaggcaagttgcttctgcctatgagcctataaaatcaaaagaaagttagttacttcctagataaaatggcggtaaagggactgggtaaatacacttgctccaactgggagaaattggcctaccagaacaaagtccaaaatccaacagggcagtcattaaaccttaaagttctgaaatgatctcctttgaagccatgtctcacatctgagtcacactgatgcaagaggtgagctcccacagccttgggcagcactgcccctgtggctttgcagggtacagcatcccctcctggctgctttcaggggctggtgttgaatgtctgtggcttttccaggcacacagtgcatgttgttggtggrtctaccattctggggtctggagaacagtgtctttcttctcacagctccactagacagtgcccaagtggggattctgtgcggggtctttgaccccacatttcccttctgcactgccctagcagaggttctccatgagggctctgcccctgaagcaaacttctgcctagacatccaggcatttccatacctggtggaggtatgaaagatttcaca

SEQ ID NO: 238008 - DNA, 573 bp, Homo sapiens
caaggcaagttgcttctgcctatgagcctataaaatcaaaagaaagttagttacttcctagataaaatggcggtaaagggactgggtaaatacacttgctccaactgggagaaattggcctaccagaacaaagtccaaaatccaacagggcagtcattaaaccttaaagttctgaaatgatctcctttgaagccatgtctcacatctgagtcacactgatgcaagaggtgagctcccacagccttgggcagcactgcccctgtggctttgcagggtacagcatcccctcctggctgctttcaggggctggtgttgaatgtctgtggcttttccaggcacacagtgcatgttgttggtgggtctaccattctggggtctggagaacagtgtctttcttctcacagctccactagacagtgcccaagtggggattctgtgcrgggtctttgaccccacatttcccttctgcactgccctagcagaggttctccatgagggctctgcccctgaagcaaacttctgcctagacatccaggcatttccatacctggtggaggtatgaaagatttcaca

SEQ ID NO: 238009 - DNA, 596 bp, Homo sapiens
  misc_feature (1)...(596): n = A,T,C or G
actttcttttttattttttggtttttcttttagataattttgttttgaaaatgttgaatgcctgttttgtaaatatttaattcatttattcattcattcaatcaatcactcagtaaggatttactgatttttctgcaaagcattttgttagatcttgagaatataaaaaagaataagtgaagttttcactctcaaagtactcagattttaattttagagtattttctcttcatggattaacaattattgatatgaaaacttattggaaaggaagtcaattcaattgtataaccactttcatttcaagtaagatgtcacatgctatacagattaatttgaaaccatcaaacctagaccattaagcaatttaatcncctagnngnaaaatcaatgtccatttcaaattcagccagctgaacatnnnaactataagtnnagcctattcaaattgaaatatacacaangnnnctaattagttctaattackgacagacatgtagnaggtagtgtcncctaacattatagaatcgncatgcctctngaggtgatacaataccaacagaggaatcgctgtcctttcaccaggttgtgnagaa

SEQ ID NO: 238010 - DNA, 590 bp, Homo sapiens
ggggttgtttttgcttgtaaatttcttcaaatttcttatagattctggatactagacctttgctgtatgcatagttttcaaatattttccctcattctgtagtttgttggtttactttgttgatatttcctttgctgtgcaggagctctttagcttaattaggtcccattygtcagcttttgtttttgatgcaattgctcttagtgtctgcctcatgtaatccttaccaggtcctatgttgagaatggtatttcctaggttatcttccagggattttatagtttgagggttacacttaagtcttttaaccaccttgagttaatttttgtatatggtataaggaaagggtctagttccaatcttctgcatatggctattccagaaccatttgtcaaatagttattccagcaccagtttatcaaatagggagtcctttccctattacttgtttatgtcagttttgtcaatcagatagttataggtgtacagcattatttctgggctctcgattttgttccattgttctatgtgtctatttttataccactgccatcttgttttggttattgtagccttgtagtatagtctgg

SEQ ID NO: 238011 - DNA, 603 bp, Homo sapiens
tgataattactatcatgaaaacatggagaaatayataaagctctggtagaacagatacacaaaagaaaaggacaagagaataaaatctgatcaccataaaaaaaaccaccatatcacgatgataaaacaataagagaggaagaaagaacaaaagaatatataaaaccaccagaatacaacagatgataagagtaattgctcaccaaaaaataataatttgtatataaatggattaaatcccccacttaaaagacatagactagctgaatggattttttaaaatgacccaactatatgctacttgtgagaaattcacttcactggtaaagatgtgtatagattgaaagtgaaaaatcgtaaaaaatatttcactcaaatgaaaacaaaaagcaatcaagagtagctactatacttatattggataaaacaagctttaagtaaaagactaaaaaaagactaaaagatcattatataataattaaggaataaattcaggaatacaatatatcaattgtgaatatgtatgcacgaagcaccagaacacatggatatataaagcaaatattattacatataaaggaagagatactctccattagtagt

SEQ ID NO: 238012 - DNA, 620 bp, Homo sapiens
ataattactatcatgaaaacatggagaaatacataaagctctggtagaacagatacacaaaagaaaaggacaagagaataaaatctgatcaccataaaaaaaaccaccatatcacgatgataaaacaataagagaggaagaaagaacaaaagaatatataaaaccaccagaatacaacagatgataagagtaattgctcaccaaaaaataataatttrtatataaatggattaaatcccccacttaaaagacatagactagctgaatggattttttaaaatgacccaactatatgctacttgtgagaaattcacttcactggtaaagatgtgtatagattgaaagtgaaaaatcgtaaaaaatatttcactcaaatgaaaacaaaaagcaatcaagtgtagctactatacttacattggataaaacaagctttaagtaaaagactaaaaaaagactaaaagatcattatataataattaaggaataaattcaggaatacaatatatcaattgtgaatatgtatgcacgaagcaccagaacacatggatatataaagcaaatattattacatataaaggaagagatactctccattagtagtttgatacttcaacatgcca

SEQ ID NO: 238013 - DNA, 620 bp, Homo sapiens
ataattactatcatgaaaacatggagaaatacataaagctctggtagaacagatacacaaaagaaaaggacaagagaataaaatctgatcaccataaaaaaaaccaccatatcacgatgataaaacaataagagaggaagaaagaacaaaagaatatataaaaccaccagaatacaacagatgataagagtaattgctcaccaaaaaataataatttatatataaatggattaaatcccccacttaaaagacatagactagctgaatggattttttaaaatgacccaactatatgctacttgtgagaaattcacttcactggtaaagatgtgtatagattgaaagtgaaaaatcgtaaaaaatatttcactcaaatgaaaacaaaaagcaatcaagwgtagctactatacttacattggataaaacaagctttaagtaaaagactaaaaaaagactaaaagatcattatataataattaaggaataaattcaggaatacaatatatcaattgtgaatatgtatgcacgaagcaccagaacacatggatatataaagcaaatattattacatataaaggaagagatactctccattagtagtttgatacttcaacatgcca

SEQ ID NO: 238014 - DNA, 620 bp, Homo sapiens
ataattactatcatgaaaacatggagaaatacataaagctctggtagaacagatacacaaaagaaaaggacaagagaataaaatctgatcaccataaaaaaaaccaccatatcacgatgataaaacaataagagaggaagaaagaacaaaagaatatataaaaccaccagaatacaacagatgataagagtaattgctcaccaaaaaataataatttatatataaatggattaaatcccccacttaaaagacatagactagctgaatggattttttaaaatgacccaactatatgctacttgtgagaaattcacttcactggtaaagatgtgtatagattgaaagtgaaaaatcgtaaaaaatatttcactcaaatgaaaacaaaaagcaatcaagtgtagctactatacttayattggataaaacaagctttaagtaaaagactaaaaaaagactaaaagatcattatataataattaaggaataaattcaggaatacaatatatcaattgtgaatatgtatgcacgaagcaccagaacacatggatatataaagcaaatattattacatataaaggaagagatactctccattagtagtttgatacttcaacatgcca

SEQ ID NO: 238015 - DNA, 393 bp, Homo sapiens
aatctaactagtttcaccacctcctgattgtagagccctagattcttgagtgagcaaaagcagtagccagttagtggttacactgggccttgggtgagattcagtgctgtgctggtttcaggtctgacctatcacagtcccagtggtggtggccacagggggcttatgttacctcacccccagctcyatgtggcccagcagagagggagacactccatttgtttgggagaaagtaagggaagaaaacaagagtctttgccggataagccagagaattcttccagatcttatccaaggccaccaaggtgatacctctatgagtctgcaagaaccacagtgttactgggctaggggtacctcctgatgcagatacagcatagatcacaacaccca

SEQ ID NO: 238016 - DNA, 488 bp, Homo sapiens
acacatatgttgtaaaatgatcagtttgggatgtatagcatgagcatcacctcatgaatttatcctttttttgtgatgaggacattcaaaagcttctcttttagctatttcatagtataaaatatttcactgttagccatcatcaccctactrtacaatagaacaccagaagtgattcttcctatttaattataactttataccttttgaccaatctcttcccgtccgcctttctcctctctctcccttctccctggtctctggtaaacactgttctactctctgtttctgtgatatcaactactcttcttttttttttaagattccacatatgatattatgtggtatttgtttttccttctgtgtctggcttatttcatttaatgttatgtcctccaggaccatccatgttgtcacaaatgataggatttcattctttttatggctgaataatattccattgtgaatatatatcatatattttttat

SEQ ID NO: 238017 - DNA, 620 bp, Homo sapiens
ctacttaaaactcagtttactcattctacgaatggggaaagtaataatgtctccctctttaggactgaagagagacaatacacataaagcactgagtatttagtatctccaaacacacccattatccaaaccattagtgatctctctctctctctctgtgtgtgtgtgtgtgtgtgtgtgtgtgtgtgtgtgagtgttcagagtgagaaagacaaatgactccatttcataccacagagaagactatttaataacacctgctggcagacatatctgttctgtatcaaattctcctgtggatacttgtgttttctattctagctactgaaacttccattcttgcaaactaatttttatgcagctttgagccttcatgctgttgacttcactgttcttcctcacccctttcttatttcaataaactgagctctgtcccagctccctcaatccatagagcccatactcatggcttccatcaacttccatagaaagaaactaaaataacacatccttgtcttgtttttattttttttatcctactagtaagctgttaaaatttgcacgttggccagctgcctcatttaaygttttgctttcaaccacctgtcacctatttaatt

SEQ ID NO: 238018 - DNA, 579 bp, Homo sapiens
tgaactttttattgacctatcagtgattattcacgaaaagggactagttaggaacaaaatgtcataagttcaagacacctgagttgttgtcagatcaataaaggatgaataaaagttagccaggactactgtagggttaaagggagggtgttgctttaagagggccaatttacaacaggattttggaattgcaattgctcacatactcaaaatctaggtatgagcttgtttcttaagaaggtgcatgtgtttcttcagataaggtgtattcatcagttctggttgccatatcaaaatattataacttctacagaaatttattttctcacaattctagaagctagaaatctgagatcagggtgacagcatggttgagtattgctgagagccctcttcctggactgcasatggtcactttcttgtagcttttcttcagtgtatgcaaggggagagatgaactacttcttcttttttcttttggttctttttgttaaaacttttattttaagttcagaggtacaagtgcaggtttgttacataggtaaacttgaatcatgggtatacagattatttaatcac

SEQ ID NO: 238019 - DNA, 589 bp, Homo sapiens
tataagttttatgtgttgagccatcagctgtttaggcatctgtgtaccatttctgaattggagggtctaaattaattttatctttcaaaactgtccctgggtctggagggattgaatagtttcaaattttggagataaaacaaaatatgaagaattagcaacatttcaaacaaaaaataaaaggttataagccctgcctagttctaagaatgacaggaagaggaagctcataggtagctaaacrttcaaattatctggtatcaaggattcagatggagacaaaattattaaatgagttttaatgtcttttattataggcctgtccccacgttttgtgaaagcaatttactttgaatgttgcctttttctagatctggagacaaggctttggttactttgagtttggtgtcagataatgacatcacattcaagatttggcagcagatggtgcctttttagatgagacgtgtatattgaggtttcaaaagcctgtaacttaatagcacaggattagttaatagcacctggtaaggaccttttcaagggactgaaggtggtgatactgagggtcaatgttccatttggaagt

SEQ ID NO: 238020 - DNA, 548 bp, Homo sapiens
ccttgcctgttggagttcaggctcacttcttcaaatggacatacggttatagcaataaatcaaaagrgaataaaaagagcaagatgtactataaactgtctcagtcgaagggataaataatctgaggaaagtcaggttaaaagaaataactaccatgaagaattaaacatttattggatcaccgtggtaccccagaaaagacagaggaataggattggtggaagaagatacccctaactggtccatgctgggagcaggcctttagctatctgctgagatgagtgccacccattcacaaaaatttgaggagactttaaatgaagaacttttccttcttcacatgaaaagacccaccattagggactttgttcagaaactttggtgggcattcagcttcaaggaaccaaagtgcagtattactgacctgagtagacagaagatacatctgtatatgtatttgtaaagttattgtcactgttcccaaactgagtaatcacgagctgaaaaggaaaaggaagttgtgggggcatcataggtccccttgccat

SEQ ID NO: 238021 - DNA, 548 bp, Homo sapiens
ccttgcctgttggagttcaggctcacttcttcaaatggacatacggttatagcaataaatcaaaagggaataaaaagagcaagatgtactataaactgtctcagtcgaagggataaataatctgaggaaagtcaggttaaaagaaataactaccatgaagaattaaacatttattggatcaccgtggtaccccagaaaagacagaggaataggattggtggaagaagatacccctaactggtccatgctgggagcaggccwttagctatctgctgagatgagtgccacccattcacaaaaatttgaggagactttaaatgaagaacttttccttcttcacatgaaaagacccaccattagggactttgttcagaaactttggtgggcattcagcttcaaggaaccaaagtgcagtattactgacctgagtagacagaagatacatctgtatatgtatttgtaaagttattgtcactgttcccaaactgagtaatcacgagctgaaaaggaaaaggaagttgtgggggcatcataggtccccttgccat

SEQ ID NO: 238022 - DNA, 548 bp, Homo sapiens
ccttgcctgttggagttcaggctcacttcttcaaatggacatacggttatagcaataaatcaaaagggaataaaaagagcaagatgtactataaactgtctcagtcgaagggataaataatctgaggaaagtcaggttaaaagaaataactaccatgaagaattaaacatttattggatcaccgtggtaccccagaaaagacagaggaataggattggtggaagaagatacccctaactggtccatgctgggagcaggcctttagmtatctgctgagatgagtgccacccattcacaaaaatttgaggagactttaaatgaagaacttttccttcttcacatgaaaagacccaccattagggactttgttcagaaactttggtgggcattcagcttcaaggaaccaaagtgcagtattactgacctgagtagacagaagatacatctgtatatgtatttgtaaagttattgtcactgttcccaaactgagtaatcacgagctgaaaaggaaaaggaagttgtgggggcatcataggtccccttgccat

SEQ ID NO: 238023 - DNA, 548 bp, Homo sapiens
ccttgcctgttggagttcaggctcacttcttcaaatggacatacggttatagcaataaatcaaaagggaataaaaagagcaagatgtactataaactgtctcagtcgaagggataaataatctgaggaaagtcaggttaaaagaaataactaccatgaagaattaaacatttattggatcaccgtggtaccccagaaaagacagaggaataggattggtggaagaagatacccctaactggtccatgctgggagcaggcctttagctatctgctgagatgagtgccacccattcacaaaaatttgaggagactttaaatgargaacttttccttcttcacatgaaaagacccaccattagggactttgttcagaaactttggtgggcattcagcttcaaggaaccaaagtgcagtattactgacctgagtagacagaagatacatctgtatatgtatttgtaaagttattgtcactgttcccaaactgagtaatcacgagctgaaaaggaaaaggaagttgtgggggcatcataggtccccttgccat

SEQ ID NO: 238024 - DNA, 621 bp, Homo sapiens
agtctagacttcccacttggctttgctggtgtatttgagggtgggtttggttggaatatagtgattactgtctaaacatgttctgtcttgctagactatgcctttgttggtcctttgactagagagagcaagctttgtctgctctcattggcacttctgagttggtaacttcttcagctgagagtctggagtacacaaagtgaaaagaaaaycaggaaactcaccactgtctcatctcctgggtcccaaagtctttagccaacttgccttctttgtcagcctttcagtcttatgtttgttttacacataatgtccaaatttttcagttgcactgtgtggtataaatagagaaaagaaagtctactccatatttcaaaatcaaaagtttaaaaagatccctttaaataaaatataaacaactttactatttattgaggtgtttgttctagttttgcttaggttggagaagttgcatatgctgtagccacagataaacctcatagtaagtcctcagtatgcagcctgtcagggtaacttgccttgaagagactgttcatcctactgaaaatgttgggtgggtccatttcatcttttttaaaaagaggtaaagttgattgtttt

SEQ ID NO: 238025 - DNA, 586 bp, Homo sapiens
caaaaacagcctgttcccttcagcagtcagaacccagaggggtcgtcagagtctctgagctccaggcttggggtaaataaaaatttatgtcttgtaccttgtgcaatgaggcaaaaggaaaagactgaaataaacatggggaaagagacagaggacttgatggatatgaggagattgtgggataaagaaattcagagaaagtcagctgggtgagggaggaagtaggcttgagaaccattgtgtccagggccttttggctttggggctgcttggcctcattttgaaaagatgttgctgaaacagtgtttatgctgcatgatacaataatactgcagattgtcaaatgaggccaaatcctaggtggtaaggtaggatccccgcagggcaagtcttggaagctgtttcttcttcatttctcacattttaatattttaccaaattgcttgatgtcagctatgtcgtaatttaattttcttggaaattagcatgtttcagtttgtttttcttactcactattttggagacagcctggttaaaaycttcccactcatgaaatttctagtcaaaatattttaggaaggaagct

SEQ ID NO: 238026 - DNA, 586 bp, Homo sapiens
gaggaaaactcctaacaaactgattcttacttagtccactcagtccttcagcaaactacatcctccagatgatcttctgtgtcaagagggaagaagagcatttgagctctaaaagtgaacgtttgggattccacctatacaaggtccaagactggaccttgtgcctgatgtgggatcttctgagacatgttttcatgagctaagtcaacacccaggatcacagactaagagaaaactttttgtggattatcagyggaaccacccccaatatttcagtgtgggtctttttactttccctaagtgtcggccagtctgagaaataaagggaaggagtcaaaagagataaattttaaagctgggtgtctgggggagacgtcacatgtcggcaggttctgtaatggcctctgagccgcaaagccagcaagtttttattagtgatttttaaaggggagggagtgtacaaatagggtatgggtcacagagatcacatgcttcacaaggcagtaaaatatcacaaggcaaatgggggcagagtgagatcacaggactggagcgaaattaaaattgctaatgaagtttcatgtcc

SEQ ID NO: 238027 - DNA, 589 bp, Homo sapiens
ccaggtacagctcatgccaccacttcagatggtgcaagccatgagacagtggctttcatgtgrtgttaggccttcagggacatatatagaatgaaaacatgaaggaggcttggcagcttccttctagatttcagagaatgtatgggaaaccctgggtgcccaggcaaaaacctgccgcagacatggagtcccaaaagcaaacttctactagggtagtgccaaggggagaggtagggttggagcccccacacagagtccctaccagggcactgctgagtggagctgtgggaaggggccattgccctccagaccccagaatggtagatccactgtcaacttgtaacctcttcttagaaaagcccacagacactcaactccaaccacgagagcagccacaaaggatgtaccctgcaaagccacaagggcagggctgcccaagactttgggagcccacctctcacaccgtgatgcaagacatgcagtcaaagattatgttgtagctttaagatttaataactgccctactgggtttaagacttgtgttggacatgttacccctttattttggccaatttctcccctttagaat

SEQ ID NO: 238028 - DNA, 670 bp, Homo sapiens
ctaaacaaagtgaaataaagccaggtagtaaaaactggaaaaaatgtgaatacacttagtggatactgaaaaaaaattacaaaaaattgctatagcaggataaaataacatgatatatgctctgtagcagcatataaactggcaaaatgattgattttggtaattagaagatagaaaatgtacctaatataatttagctatgtactmtctgtaagacagagtgctaaaagtgtaattggcttatttcagctacgtaaaatgtaatgtgatgagagaaatgtgctaagaagaaaactactctgtttgcaagaatatagaggaaatcagagaagagttagttcttgttggttttgaaaataaaactgttttggattttgaggttttccaggcagcaaaatattatccaggtgagaagttatctcaatggaaagatcaaaatgaattattttaagatcctttgttaagtcccaacaaagataaggtagtgcttggtgattttctcagttctaccaaagagcatccaaaaatttaagtgttgtcctgtagtaccctgatatgccaaagaggagagaagcctgtctcaagacgagttgtggatatgggttttgctgaatgtagtagattcaagtcagatacctaggacacctgcaaagtcgttaaagtagttgta

SEQ ID NO: 238029 - DNA, 670 bp, Homo sapiens
ctaaacaaagtgaaataaagccaggtagtaaaaactggaaaaaatgtgaatacacttagtggatactgaaaaaaaattacaaaaaattgctatagcaggataaaataacatgatatatgctctgtagcagcatataaactggcaaaatgattgattttggtaattagaagatagaaaatgtacctaatataatttagctatgtactctctgtaagacagagtgctaaaagtgtaattggcttatttcagctacgtaaaatgtaatgtgatgagagaaatgtgctaagaagaaaactactctgtttgcaagaatatagaggaaatcagagaagagttagttcttgttggttttgaaaataaaactgttttggattttgaggttttccaggcagcaaaatattatccaggtgagaagttatctcaatggaaagatcaaaatgaattattttaagatcctttgttaagkcccaacaaagataaggtagtgcttggtgattttctcagttctaccaaagagcatccaaaaatttaagtgttgtcctgtagtaccctgatatgccaaagaggagagaagcctgtctcaagacgagttgtggatatgggttttgctgaatgtagtagattcaagtcagatacctaggacacctgcaaagtcgttaaagtagttgta

SEQ ID NO: 238030 - DNA, 622 bp, Homo sapiens
cttcagtgagctatgactgtgccactgcattcctgcctgtatgacagagagaaaccctttctgtataaaaaaaattagataataattttttttaaatgtgtaayattctccattatttcctagaagacttttattttgattattttattttatttacttatttatttttcagagatgggggcttggtctgtcactcaggctggattgcagtggtgcaatctcagcttactgcagcctcaacttcccaggctcaagtgatcctcccacctcagccccaggtggctaggactacaggggtgtgccaccacacccggctaatttttttaaaatttttttgtagtgacaggttttcaccatgttgcccaggcaggtctcaaactccttagctcaggcaatctgcccgccttggtagcccaaagtgctgggatacaggcgtgagccaccgtgctcagcctataaggattattttaaattcttgttctcactggtccattaattccgcttcctctcatataggttcttcattttcggggtcctcttttaaaaggattacattatttggatgtattatttttctttctgagctcatattactctggatgtgtcattctcttggctggtg

SEQ ID NO: 238031 - DNA, 568 bp, Homo sapiens
ggatgcagggaggcgggggtggtttctccacacccctcagtccagcctggcctagagggtccctgagcccagctgtcagcccacctcccccataccaaccctgtgcctcatgacagccctggggttctgtggggaggcagagccacactgcacagaggtcaccaaagagaaggaggaggaggaagacaagaaaggagctgacaggagccagggttggggcgggggctgggcagggggaaatcgcttaaccccgaagccgccactagtctttggagcccctgcattgacgggggccagctggagctggctgaggacaaggggcccaagtgtgggaatccagggaggaggcctccccgggcttcctggrtcagctgggaagagagaccccagagccttcttctccagcccgccctcctgccgccatccctccctagagtgtggagacaggccccggctccctggctctgttgccagtgggggaatttttccagcattgacctcaccccgaccccaccccaggctggctggctgatgttcctgcactcctagcagcgtggccatggcagca

SEQ ID NO: 238032 - DNA, 483 bp, Homo sapiens
ggtggtttcagtcatccattgctttttctttattatacataaataagacttctgcaggctgcctgtttttctccttttttttccttgagcggggtccctatccctctccacctctgaaactggttgtgtttcagtttctctctttgcctgcctctttctttctctgtgcccctctctctgggaggcctgccaggctgcctctcctyccctaggccagcagccctcagtaggccttggaaaccggagtccccccaacccccgagctagccctggctccctctttagcgttccaaggtctgaggccgcatcccccactcctttcccagcgtcagaaatgttgtggtagaatcgtggggccatggcttcctttgtggccccgtaggcggaatcccaggcagattcctcgccttcgttcagaaaaagaggaaactccaattccttcctcctgccccaaggcccgcccgtctcggcgccgccgacttc

SEQ ID NO: 238033 - DNA, 356 bp, Homo sapiens
gtgtatcctaaagaaatacttagaaaggtacctccaagagacatgtacaaggaagttcccttacgcattgtttgtaaaagtaaaacagtgatgatctcaatgcccactgataggggaaaggtttaattcaccatgattcataaatacagagaaattctatataaagtrgaatagatttgtgtggcatggaaggatcgccaaaaagtattttaagattaaaaaaaaagtaaaaaatatgtgcagaattatgcctttttttcatggaaaaaagtctaggggattcaccgctcagcaggccatcctggctatctgggcataaccaccacccagagtgtaatttcttctaaggcaatcac

SEQ ID NO: 238034 - DNA, 572 bp, Homo sapiens
gaattcagagtacatcacataacggaactgtcaggaagcttttgatggcagaaacatattttcctggtgatgagattggaaggatcttcatataaccatcagatatgttattgtcacttctgaacaatgctttttatagcagattgtttctcaaaaaggaaatagaaatgcgattttaaaatatgaaaaatatgttcaatctcattattaagataaatgcaaatacaaattataagaggacttaacagattggcaaacatcagaaaagtgaacaacctcctccactggcattcttttttttttttttttgagatggagtttcactcttgttgcccaggctagagtgcagtggtacgatctcagctcactgtaacctccaccttccagtttcaagcgattcttctgactcagcctccygagtagctgggattacaggctcctgccaccacacccgactaatttttgtattttcagtagagatggggtttcaccatgttggccaggcttgtcttaaactcctgacctcatgatctgcccgccttggcctcgggagtataatttgctgtatggag

SEQ ID NO: 238035 - DNA, 458 bp, Homo sapiens
tttttttttttgagatggagtttcactcttgttgcccaggctagagtgcagtggtacgatctcagctcactgtaacctccaccttccagtttcaagcgattcttctgactcagcctcccgagtagctgggattacaggctcctgccaccacacccgactaatttttgtattttcagtagagatggggtttcaccatgttggccaggcttgtcttaaactcctgacctcatgatcygcccgccttggcctcgggagtataatttgctgtatggagggcaatttgacagtatctgtcagattttataatgtacagagccttgaattcagtaattctacttttaggaacttatcccacagatattccagacatgctcaaagatgtaggtacaaagattttattgcagtattatttggaagagtaaaaaaccagtccatgaggaagactagttcaataagtt

SEQ ID NO: 238036 - DNA, 403 bp, Homo sapiens
aaatacaaattataagaggacttaacagattggcaaacatcagaaaagtgaacaacctcctccactggcattcttttttttttttttttgagatggagtttcactcttgttgcccaggctagagtgcagtggtacgatctcagctcactgtaacctccaccttccagtttcaagcgattcttctgactcagcctcccgagtagctgggattacaggctcctgccaccacacccgactaatttttgtattttcagtagagatggggtttcaccatgttggccaggcttgtcttaaactcctgacctcatgatctgcccgccttggcctygggagtataatttgctgtatggagggcaatttgacagtatctgtcagattttataatgtacagagccttgaattc

SEQ ID NO: 238037 - DNA, 458 bp, Homo sapiens
tttttttttttgagatggagtttcactcttgttgcccaggctagagtgcagtggtacgatctcagctcactgtaacctccaccttccagtttcaagcgattcttctgactcagcctcccgagtagctgggattacaggctcctgccaccacacccgactaatttttgtattttcagtagagatggggtttcaccatgttggccaggcttgtcttaaactcctgacctcatgatctgcccgccttggcctcgggagtataatttgctgtatggagggcaatttgacagtatctrtcagattttataatgtacagagccttgaattcagtaattctacttttaggaacttatcccacagatattccagacatgctcaaagatgtaggtacaaagattttattgcagtattatttggaagagtaaaaaaccagtccatgaggaagactagttcaataagtt

SEQ ID NO: 238038 - DNA, 558 bp, Homo sapiens
tcctgacctcatgatctgcccgccttggcctcgggagtataatttgctgtatggagggcaatttgacagtatctgtcagattttataatgtacagagccttgaattcagtaattctacttttaggaacttatcccacagatattccagacatgctcaaagatgtaggtacaaagattttattgcagtattatttggaagagtaaaaaaccagtccatgaggaagactagttcaataagttaataatctagaatatatcgatataatggaatactatcaaagaacaattttcacaatgtattgttaagagggggaaggtacagaaacatatgtaaggagtttcatttgtttaatatayaattagtgacacaggttgcatctggggaggaaaattagggaacaattttttgttgtacacctttatctttcattgtatctctttcaaaaccttttgtaccatttgtgtgtattgtgtattttaaaaattaatttaaatttcaacaaccgttatagtgatgcaaaaaaccctatagaaataacagtttacattcaattttgc

SEQ ID NO: 238039 - DNA, 342 bp, Homo sapiens
ggcgcccatgctgctcgcggcatcgccttagcggtgccgcccggaatccctcagaccgcccctcctccaccctctccaaatctcccagtacagcccataatacttctcaggactgcgagtctctccgcccatcactgtacagcctgggactcygtcctggctcacggaccgcagcgcagccagcacccagccgcctctccctttcctccgcacacgggcagccgcggtccaccgtagggcagtcgtcgttggcatcgcgcgtaatcatcggccggcctcctccagtgtctcccagccctggcggacagcccgggtcccagcctaggacccaggaggatgggt

SEQ ID NO: 238040 - DNA, 551 bp, Homo sapiens
taaaccacctgcttgcatgtgccctgaggaactcctgaggcttcagccccaaccctaccccagagtggttttatgaggggtgtgcctccttagtcarcctgccttgtagtttcttcttaaaaaccatcattgtttctggtttgtgggtgcccacattccttggaaagttcatgcctctcaatgtctgacttgaaagcaataatattcttagtctttttacatagctctttccaatttacattatgctttcatatgtagttgtccgtcagtatcctcaggggattggttcaaggactacccccacttcccccaggataccaaaatctgcagatgctcaagtccctgataaataatggtgtggtatttacgtataacctatgtacacacatccttctgtatactttaaatcatctctagattacttataatacctaatacagtgtaaatgctatgtaaatagttgttatactgcttttaaaatttgtattattttaaattgttgtattggtatttttattgtttttttttttcttgaatattttccattccca

SEQ ID NO: 238041 - DNA, 551 bp, Homo sapiens
taaaccacctgcttgcatgtgccctgaggaactcctgaggcttcagccccaaccctaccccagagtggttttatgaggggtgtgcctccttagtcaacctgccttgtagtttcttcttaaaaaccatcattgtttcwggtttgtgggtgcccacattccttggaaagttcatgcctctcaatgtctgacttgaaagcaataatattcttagtctttttacatagctctttccaatttacattatgctttcatatgtagttgtccgtcagtatcctcaggggattggttcaaggactacccccacttcccccaggataccaaaatctgcagatgctcaagtccctgataaataatggtgtggtatttacgtataacctatgtacacacatccttctgtatactttaaatcatctctagattacttataatacctaatacagtgtaaatgctatgtaaatagttgttatactgcttttaaaatttgtattattttaaattgttgtattggtatttttattgtttttttttttcttgaatattttccattccca

SEQ ID NO: 238042 - DNA, 551 bp, Homo sapiens
taaaccacctgcttgcatgtgccctgaggaactcctgaggcttcagccccaaccctaccccagagtggttttatgaggggtgtgcctccttagtcaacctgccttgtagtttcttcttaaaaaccatcattgtttctggtttgtgggtgcccacattccttggaaagttcatgcctctcaatgtctgacttgaaagcaataatattcttagtctttttacatagctctttccaatttacattatgctttyatatgtagttgtccgtcagtatcctcaggggattggttcaaggactacccccacttcccccaggataccaaaatctgcagatgctcaagtccctgataaataatggtgtggtatttacgtataacctatgtacacacatccttctgtatactttaaatcatctctagattacttataatacctaatacagtgtaaatgctatgtaaatagttgttatactgcttttaaaatttgtattattttaaattgttgtattggtatttttattgtttttttttttcttgaatattttccattccca

SEQ ID NO: 238043 - DNA, 551 bp, Homo sapiens
taaaccacctgcttgcatgtgccctgaggaactcctgaggcttcagccccaaccctaccccagagtggttttatgaggggtgtgcctccttagtcaacctgccttgtagtttcttcttaaaaaccatcattgtttctggtttgtgggtgcccacattccttggaaagttcatgcctctcaatgtctgacttgaaagcaataatattcttagtctttttacatagctctttccaatttacattatgctttcatatgtagttgtccgtcagtatcctcaggggattggttcaaggactacccccacttcccycaggataccaaaatctgcagatgctcaagtccctgataaataatggtgtggtatttacgtataacctatgtacacacatccttctgtatactttaaatcatctctagattacttataatacctaatacagtgtaaatgctatgtaaatagttgttatactgcttttaaaatttgtattattttaaattgttgtattggtatttttattgtttttttttttcttgaatattttccattccca

SEQ ID NO: 238044 - DNA, 480 bp, Homo sapiens
tacctattctggagcaacatttcttttgggccaatacagtactttgttacgcgttgagctacaggattctacacaggcagaatgatcctaagggaaagtgctggattgggaggcagaaagcttgggttctagtttagctttgtcattggctgccatgattttagagataactcacctaaggtctcaaaatccctagtttccctataaaatccctgtaagatgggaacaacaattcttggcccttataataatgatgrtgatgatggttagcgtttatcaagtgcttcttatgtctcagctctgttttaggtgctttacatatatgaactcatgaatttctcaacagtcctgtgaggtagctgctattattatccccattttacagatgacgcacagtgaggttaaataacttgctctgaagcacatggctagtaagtgatgaggacagattatgaacccaagctgacttaacactggtgt

SEQ ID NO: 238045 - DNA, 432 bp, Homo sapiens
ggctcttttaggatgtggagtggcctcttgcctcttacattgctctttatgtattaggccttttgtcaactaaggatttctttgaggattgtgatgaagcatgctgtaatgtggaattgaaatgttttcatgtttatgtttgttttcctttygcctaatgaataggctagtaatagtctgttgttttaaatgagtactattaataataatgacagctcatatttttatcattacagcatttaaaaaatatcattcatagggaggaagaaatgtagggtaatggaggaccagctatgtaatgttgaagatgtcattccacctttgggattctcaacttctcagctggaaagtggaaagatggattactagttcctagcttcatgatttttaggacatatgaacaaaaaatggctattgttaagtgagttgtca

SEQ ID NO: 238046 - DNA, 424 bp, Homo sapiens
gacttcaggctcttttaggatgtggagtggcctcttgcctcttacattgctctttatgtattaggccttttgtcaactaaggatttctttgaggattgtgatgaagcatgctgtaatgtggaattgaaatgttttcatgtttatgtttgttttccttttgcctaatgaatargctagtaatagtctgttgttttaaatgagtactattaataataatgacagctcatatttttatcattacagcatttaaaaaatatcattcatagggaggaagaaatgtagggtaatggaggaccagctatgtaatgttgaagatgtcattccacctttgggattctcaacttctcagctggaaagtggaaagatggattactagttcctagcttcatgatttttaggacatatgaacaaaaaatggctattg

SEQ ID NO: 238047 - DNA, 363 bp, Homo sapiens
tgtggagtggcctcttgcctcttacattgctctttatgtattaggccttttgtcaactaaggatttctttgaggattgtgatgaagcatgctgtaatgtggaattgaaatgttttcatgtttatgtttgttttccttttgcctaatgaataggctagtaatagtctgttgttttaaatgagtactattaataataatgacagctcatatttttatcattacagcatttaaaaaatatcattcatagggaggaagaaatgtagggtaatggaggaccagctatgtaatgttgaagatgtcattccacctttgggattctcarcttctcagctggaaagtggaaagatggattactagttcctag

SEQ ID NO: 238048 - DNA, 379 bp, Homo sapiens
ggatagaaaccagagaatagatagcacaggttcttcctaytcccctcttctacttctggtttaaggtttcatctttttttttttttctttgttttcttcttaaaggtttcatctttaaatgacattaattaggctttgtgtttttagccatttttagagtccgttgtgctgtatctcctgatctctctttttcagtgatttgtggttatgtaagttatctcagttctttgctgtcagcaattttaaatcaaacattgaagcattttgggtagatgacgtgttactttgattaatgaggttcttgatctggatattttaaggccagtaacaacacaatatggaaacacctaattctccttaaaactgcaatagtgttctc

SEQ ID NO: 238049 - DNA, 379 bp, Homo sapiens
ggatagaaaccagagaatagatagcacaggttcttcctactcccctcttctacttctggtttaaggtttcatctttttttttttttctttgttttcttcttaaaggtttcatctttaaatgacattaattaggctttgtgtttttagccatttttagagtccgttgtgctgtatctcctgatctctctttttcagtgatttgtggttatgtaagttatctcagttctttgctgtcagcaattttaaatcaamcattgaagcattttgggtagatgacgtgttactttgattaatgaggttcttgatctggatattttaaggccagtaacaacacaatatggaaacacctaattctccttaaaactgcaatagtgttctc

SEQ ID NO: 238050 - DNA, 593 bp, Homo sapiens
ccccacttgtactctgaaactcttttcttgaagatattgctatccatgtgcatgagttatttttcttctccatagcatccacattaaacaattaattaccttggatttagccaaaataaacactccaaattcatgatgtctttcaggaagagagtttgttttcttttttaaccaaaatgggagattgatcctgtctgtgtcccctagaggagcagaggctggtttgtattagggcagctcttgtagatgagtaacttttcccatggcctcatagaggctgatatagaaacttctggattcaaatgattgtttggaggcattagccaggcattgaaccaattataaagagtgaggttttgccatattctaaccstaagaaacagaaacggtagagggtaaaaatagaatagaatgtcaatacaactttagccttttccctggattctgagagttcataacctgaaaatcagagattcaaactgggagagatgggctaacaggtatgagcatgggaaaagcatgtttcaagaatttgagatgtatttcccagaaaaggaacatgatgaaaatggtcagaaaaggcaatttccttc

SEQ ID NO: 238051 - DNA, 385 bp, Homo sapiens
atgaactgtttttgtttcaaccaacttctgagatctggaaagggaagataagaaagggctgtgtaygcagttgccagtaaagattgcttttctttccaccaaagctaaagatatttgaggaaccggatataggcctgagatttagcagagctctgaggctggatgttgcaaggagaaaaaataggaagcccacagggccaagcttgggcctccttgtacctcctccactgtatacatacattttgggttcatatttttcaggctggctactactgcaggtctccagcagagtcttcatggaaggagaacctctggccttgaggtgtcatgcgtggaaggataagctggtgtacaatgtgctttactatcgaaatggcaaagcctt

SEQ ID NO: 238052 - DNA, 385 bp, Homo sapiens
atgaactgtttttgtttcaaccaacttctgagatctggaaagggaagataagaaagggctgtgtatgcagttgccagtaaagattgcttttctttccaccaaagctaaagatatttgaggaacyggatataggcctgagatttagcagagctctgaggctggatgttgcaaggagaaaaaataggaagcccacagggccaagcttgggcctccttgtacctcctccactgtatacatacattttgggttcatatttttcaggctggctactactgcaggtctccagcagagtcttcatggaaggagaacctctggccttgaggtgtcatgcgtggaaggataagctggtgtacaatgtgctttactatcgaaatggcaaagcctt

SEQ ID NO: 238053 - DNA, 369 bp, Homo sapiens
gtttcaaccaacttctgagatctggaaagggaagataagaaagggctgtgtatgcagttgccagtaaagattgcttttctttccaccaaagctaaagatatttgaggaaccggatataggcctgagatttrgcagagctctgaggctggatgttgcaaggagaaaaaataggaagcccacagggccaagcttgggcctccttgtacctcctccactgtatacatacattttgggttcatatttttcaggctggctactactgcaggtctccagcagagtcttcatggaaggagaacctctggccttgaggtgtcatgcgtggaaggataagctggtgtacaatgtgctttactatcgaaatggcaaagc

SEQ ID NO: 238054 - DNA, 385 bp, Homo sapiens
atgaactgtttttgtttcaaccaacttctgagatctggaaagggaagataagaaagggctgtgtatgcagttgccagtaaagattgcttttctttccaccaaagctaaagatatttgaggaaccggatataggcctgagatttagcagagctctgaggctggatgttgcaaggagaaaaaataggaagcccacagggccaagcttgggcctccttgtacctcctccactgtatacatacattttgggttcatatttttcaggctggcyactactgcaggtctccagcagagtcttcatggaaggagaacctctggccttgaggtgtcatgcgtggaaggataagctggtgtacaatgtgctttactatcgaaatggcaaagcctt

SEQ ID NO: 238055 - DNA, 385 bp, Homo sapiens
atgaactgtttttgtttcaaccaacttctgagatctggaaagggaagataagaaagggctgtgtatgcagttgccagtaaagattgcttttctttccaccaaagctaaagatatttgaggaaccggatataggcctgagatttagcagagctctgaggctggatgttgcaaggagaaaaaataggaagcccacagggccaagcttgggcctccttgtacctcctccactgtatacatacattttgggttcatatttttcaggctggctactactgcaggtctccagcagagtcttcayggaaggagaacctctggccttgaggtgtcatgcgtggaaggataagctggtgtacaatgtgctttactatcgaaatggcaaagcctt

SEQ ID NO: 238056 - DNA, 569 bp, Homo sapiens
ctttaccttcctgattttctggttactaattagcttcaggatacgctgctctcatacttgggctgtagtttggagacaaaatattttcctgccactgtgtaacatagctgaggtaaaaactgaactatgtaaatgactctactaaaagtttagggaaaaaaaacaggaggagtatgacacacacagcaacttgattctagattatttggtttgatccgtaaatgatgggatggggcgtcgcgctccgagcgtgtcccgcggcgggcccctggagccacactgtggccgcatgtgcatattgcagcctccgcccgtatctgggggccgcagccgccagcgcccggggacccagctgcggcgaaagctgtcgggcgcgcgcttckccgcagctccgcgcccccgccaaaacccagtgagaaattatttgcattcctggagcctgcaggagcgagaaatgagctgtaggagtcggtgggcagcaacggcggcaggcggatggaagagagcaaggggtcgccgttcgtgtcccattcgcccgagtcaaggggcggccccccaaaatcccaacg

SEQ ID NO: 238057 - DNA, 618 bp, Homo sapiens
ggcaaaaaaaaaaaaaaggtgttccaggatctatatcctgcaccatacatggagtcagccatttctctagggggtcttgattccttttagtagagaacacagtttgggctctaggactgaattacttttgtgaacctcctytcctgcgattacagcctgcacccctgcttatagccagtagaagctcttgttgggcatcaacagatcgaaaaccaccatgtagttctgcctcactcttacaaagattcatctcttgagaattttgtgctctacccccgttgtagtctttatggttttgaaacttttgcttcagtcaccctgaattttgccagccatagacatgccataccttggattgccaaactgccctcactggagccaatttctctggttagaatagttgtcccaactcatgcttaatactctagtaagcaaggttccacctgggctcaggttaacttttctcctttgggccctgtgttctaccagcattccatttaactgaaaccctccctcacctcatcaagatcttatctggtctttaatgatttactctgctgcttcctgggttctaaagaatccagttcaggagttcctctttcagttcgagatcttatt

SEQ ID NO: 238058 - DNA, 618 bp, Homo sapiens
ggcaaaaaaaaaaaaaaggtgttccaggatctatatcctgcaccatacatggagtcagccatttctctagggggtcttgattccttttagtagagaacacagtttgggctctaggactgaattacttttgtgaacctcctttcctgcgattacagcctgcacccctgcttatagccagtagaagctcttgttgggcatcaacagatcgaaaaccaccatgtagttctgcctcactcttacaaagattcatctcttgagaattttgtgctctacccccgttgtagtctttatggttttgaaacttttgcttcagtcaccctgaattttgccagccatagacatgccataccttggattgccaaactgccctcactggagccaatttctctggttagaatagttgtcccaactcatgcttaatactctagtaagcaaggttccacctgggctcaggttaacttttctcctttgggccctgtgttctaccagcattccatttawctgaaaccctccctcacctcatcaagatcttatctggtctttaatgatttactctgctgcttcctgggttctaaagaatccagttcaggagttcctctttcagttcgagatcttatt

SEQ ID NO: 238059 - DNA, 584 bp, Homo sapiens
gactgttcacatacccgtcagrctaaattaggtgaaatctctttggccttaatgaatgttgaaggattttaaagggctaatggaaattcttctagaagtaacaattcccattctattggtgaggcagttctaaagaaagtccctgaacctcttaggttattttgtacagcaaaagaaccagcattgggttttctttgctaatagatgacagggagaatgtagacacttggaatacatggagaatccctaagttgcattttagccttcatgttatgtctcctttcctaacctttttaccagagctgatcacaggaaacagcatgatagatttgcatgacctagctccctgccttctcctgccattcttttagaaagtggtgagtggctgcctgccaggtaaaatctgggtgacaaaatccaaagttagattcagagttataagcatagcccccacccaagttgcttccaaagaaaagaaaggaagagtgttgtgtaaaatcttgcttccttgcctttaaattgggtacttattgagttaccacattagaatcgtgcattgtgctagttgttgtactcctgttgat

SEQ ID NO: 238060 - DNA, 584 bp, Homo sapiens
gactgttcacatacccgtcagactaaattaggtgaaatctctttggccttaatgaatgttgaaggattttaaagggctaatggaaattcttctagaagtaacaattcccattctattggtgaggcagttctaaagaaagtccctgaacctcttaggttattttgtacagcaaaagaaccagcattgggttttctttgctaatagatgacagggagaatgtagacacttggaatmcatggagaatccctaagttgcattttagccttcatgttatgtctcctttcctaacctttttaccagagctgatcacaggaaacagcatgatagatttgcatgacctagctccctgccttctcctgccattcttttagaaagtggtgagtggctgcctgccaggtaaaatctgggtgacaaaatccaaagttagattcagagttataagcatagcccccacccaagttgcttccaaagaaaagaaaggaagagtgttgtgtaaaatcttgcttccttgcctttaaattgggtacttattgagttaccacattagaatcgtgcattgtgctagttgttgtactcctgttgat

SEQ ID NO: 238061 - DNA, 584 bp, Homo sapiens
gactgttcacatacccgtcagactaaattaggtgaaatctctttggccttaatgaatgttgaaggattttaaagggctaatggaaattcttctagaagtaacaattcccattctattggtgaggcagttctaaagaaagtccctgaacctcttaggttattttgtacagcaaaagaaccagcattgggttttctttgctaatagatgacagggagaatgtagacacttggaatacatggagaatccctaagttgcattttagccttcatgttatgtctcctttcctaacctttttaccagagctgatcacaggaaacagcatgatagatttgcatgacctagctccctgccttctcctgccattcttttagaaagtggtgagtggctgcctgccaggtaaaatctgggtgacaaaatccaaagttagattcagagttataagcatagcccycacccaagttgcttccaaagaaaagaaaggaagagtgttgtgtaaaatcttgcttccttgcctttaaattgggtacttattgagttaccacattagaatcgtgcattgtgctagttgttgtactcctgttgat

SEQ ID NO: 238062 - DNA, 584 bp, Homo sapiens
gactgttcacatacccgtcagactaaattaggtgaaatctctttggccttaatgaatgttgaaggattttaaagggctaatggaaattcttctagaagtaacaattcccattctattggtgaggcagttctaaagaaagtccctgaacctcttaggttattttgtacagcaaaagaaccagcattgggttttctttgctaatagatgacagggagaatgtagacacttggaatacatggagaatccctaagttgcattttagccttcatgttatgtctcctttcctaacctttttaccagagctgatcacaggaaacagcatgatagatttgcatgacctagctccctgccttctcctgccattcttttagaaagtggtgagtggctgcctgccaggtaaaatctgggtgacaaaatccaaagttagattcagagttataagcatagcccccacccaagttgcttccaaagaaaagaaaggaagagtgttgtgtaaartcttgcttccttgcctttaaattgggtacttattgagttaccacattagaatcgtgcattgtgctagttgttgtactcctgttgat

SEQ ID NO: 238063 - DNA, 534 bp, Homo sapiens
tggtcttgccacataatttgcatttgtatcttaaagccagtggggaaccatggaaatattttaagcaggggagtgacatgattcatttgcattttactttttttttttcttttatgagacagagtcttgctctgtcrcccaggcttgagtgcagtagtgtgatcatagctcactgtaacctcagactcctgggctgaagtgatcctcttgcctcagcctgttaagtagcagggactacaattgtgcaccactacacactgctatttttttttttttttttttgagatggggtctcactcttgtttcccaggatggagtgcagtagcgtgatcatggcttgctgcagcctcacctacctgggttcaagcgatccttgtgcctcagcctcccaaggtgctgcgattacaggtgtgagccactatatttggtctcatttgtatttttgaaagatcactggtggcagtgaagataccagtgggttggagggagggagactagaggcaataacagtttagataatagatatttactgag

SEQ ID NO: 238064 - DNA, 324 bp, Homo sapiens
gtgctgtgcgaccctttaaaaagctgcctttgttcactgaagtattgcttgtaatagcaaatactggaaacaactcaagtgcacatttgtaaggaactgattcaataaagtaggaggcagccatccacacaatggaatactatgcagctctgatataygaatgagaaagctttctctgtaccaacaaggaaagatccccaagacatactgttaaggacaaaatagtacacaacaggttagataatgatttacctttcatgtaaaagaacgtggaggggtaagaacatatattcatatctccttttacttacataaagaaacact

SEQ ID NO: 238065 - DNA, 585 bp, Homo sapiens
ttcaaaaaaattttttttcatattttaaatttacctttactacctatttatttggttcaaggctccatttcgtccactttgggactaggtaatcaggctttaaactacttacctctgcctgtcagaagtcactaacctcatgacaggaataatttaggttagaggagtagcaaaactattactcaactgtttctttagaaaaggagaaactcataaaacatgggaccctaatatttgaatattatatgtaagacggggttaaaatgtgttcaaaaagtgtcttctaaaaatgtacaaacaacagaggtgtgacagtatgctgaaaaaaatatgaggggggtggaagagcgggatagagagtggtcmtccttccctactccctttacaatgttgatttcatccttgggttttcataatgaacttctgtaaaggggagatttgcatccagttttaagaccattttcagcacaagtgcttttttattaagtatttctgtggttccccttccccagacaaaaaggaaaggggaagctattgttcaggacttctaatgggtttatctagctttgtgggttaaaagaaccc

SEQ ID NO: 238066 - DNA, 439 bp, Homo sapiens
atatgagcatctaaaacaattaatagtgactacaatgggctcaaatgcaaacaataatctatgagctcattacgatattcaggaaaaaaaactattggtcactacagtggaggttactagtcactaactcattattctgaaaaatgacttaaaatgggagatagggtggagaattaggtatttatccagtttttcctgtacaaatgtaaatgtttagggagattgaagtagatgaaacaagtctggcaaaattgagataactgtttaatccgggtgttgrgtacatggaggttcattatatttcttttccgtatattttatatttgaaccccctcctaaaaaaaaaaaaaaaaaaaaaaaaaaaaaaaaaaaaaacagaaaaagcaagacaagacagaatgtgagctaagcagcttagggtttaggcaaggcttctgcc

SEQ ID NO: 238067 - DNA, 439 bp, Homo sapiens
atatgagcatctaaaacaattaatagtgactacaatgggctcaaatgcaaacaataatctatgagctcattacgatattcaggaaaaaaaactattggtcactacagtggaggttactagtcactaactcattattctgaaaaatgacttaaaatgggagatagggtggagaattaggtatttatccagtttttcctgtacaaatgtaaatgtttagggagattgaagtagatgaaacaagtctggcaaaattgagataactgtttaatccgggtgttgagtacatggaggttcattatatttctttyccgtatattttatatttgaaccccctcctaaaaaaaaaaaaaaaaaaaaaaaaaaaaaaaaaaaaaacagaaaaagcaagacaagacagaatgtgagctaagcagcttagggtttaggcaaggcttctgcc

SEQ ID NO: 238068 - DNA, 359 bp, Homo sapiens
tccagcctgggggacggagcgagactccgcctcaaaaaaaaaaaaaaaaagaaagaaagaaaagagaaagaargagagagagagtgaaggaagtgagggagggaggaaagaaaataagaaaagaaaagagaaaagaatttcttacagttctggaggctaggaagtccaaggtcaaggaacctgcctctggtgagggtcttcttgctgcatcatcccatggcagaaggcagaagggcaagagagagcgaaagagcaagagggcaagagggcctgaactctctttcacaaaggctagcaaagaagtatgcacaggttaagggaaaaagtcacaatgaatcctgtagtacagactactttat

SEQ ID NO: 238069 - DNA, 359 bp, Homo sapiens
tccagcctgggggacggagcgagactccgcctcaaaaaaaaaaaaaaaaagaaagaaagaaaagagaaagaaagagagagagagtgaaggaagtgagggagggaggaaagaaaakaagaaaagaaaagagaaaagaatttcttacagttctggaggctaggaagtccaaggtcaaggaacctgcctctggtgagggtcttcttgctgcatcatcccatggcagaaggcagaagggcaagagagagcgaaagagcaagagggcaagagggcctgaactctctttcacaaaggctagcaaagaagtatgcacaggttaagggaaaaagtcacaatgaatcctgtagtacagactactttat

SEQ ID NO: 238070 - DNA, 280 bp, Homo sapiens
agaattccactccagagctgagtgacacaggagtagctgggccacaggctccctctctgaagttccaaatagagactcacactcggaaatagtaacctagtggaaatacatataggatgcccagtacctgtgcagaacttcacctctgtgcatgacctraaaccagaagtctgtaaaattgatctctttttattacatggaaccatgtgaaattatcaacaaaatggtaatttcatatgatttaacctaaaagaatcctaaaaagcaaatcaggcattta

SEQ ID NO: 238071 - DNA, 511 bp, Homo sapiens
gaattccactccagagctgagtgacacaggagtagctgggccacaggctccctctctgaagttccaaatagagactcacactcggaaatagtaacctagtggaaatacatataggatgcccagtacctgtgcagaacttcacctctgtgcatgacctgaaaccagaagtctgtaaaattgatctctttttattacatggaaccatgtgaaattatcaacaaaatggtaatttcatatgatttaacctaaaagaatcctaaaaagcaaatcaggcatttagctaacaaacaagaatgcaaaatcaattgtttcccaggtggttccactatggaacacctcgtaagacaggccgagcaytgataagaaacatctattcgctcatggttccatgtttatatccatatttgttcctggccctcgagagctcacaaaggaacaggcaagtgaacaggcaaataccgcacagtatggaaactactactctacagagacgtgcaaaataagaacccta

SEQ ID NO: 238072 - DNA, 576 bp, Homo sapiens
aaatttgacttccatttcttcataagcattttccctgaatatgtttagaaatttctccttgttcccaaattttgtcactgtgaatctaggtgagggtccttctcatcctgtatgctcagaatttaataggaccttgcaatctaaggatgtatgtatgcatttagatcctgtgaaatatcctccttttattcctttattttctcatgactatggttgcatactacacaatagtaggttgtacactacacattggcaaatcttactattcaaatgacagcccctgaaattgtgcagtgcacaatcagcaaatcttatttggtagatctgtattttatttcttacttgttctcaattctcccctcctctctaactcctcatcctgttacatgagtttggaacatctggatctatttttcatatcatttaacttttctttcatctctgcatgcatctttttatatggctttgtggaggaatttctggcttatcttgatcacgatgaggcgggrgaaactcaaactatgtgtttcctgtgctttcacactacaacaatcaacacagaagactgacggcaga

SEQ ID NO: 238073 - DNA, 538 bp, Homo sapiens
caacagtaacttcagctagaaaatgctggaaacaatttaataagcagaaatgattaamtccaaaatcatcaacatgactccaccaaccccatttttaaatttctatttaaacatttcccaaattatttgcacattcttcttttggctgtaagttttgtttttctctatgctagctaatagttttctagataatttctattcccttgacttgttcttatgttaaatcctcaaaattaagagctttcaactcaaaaatcagaaataggaaagaagtgtttaatgaaatgatttcacttttttctgaaagtattgacatgaagtattaaaagcatcatctgatagaaaaagaaggtacttgccaaatgttatatcggcctttatagagcactagtaacagacactataaagtcttttgtttcctaatttattattttcctaatgggccacatagcagacactgaaggttctacgtaacaaaggtcctacaagtaaattgtgaaaatcccttattggatggtgtttttagaatacagaaggt

SEQ ID NO: 238074 - DNA, 538 bp, Homo sapiens
caacagtaacttcagctagaaaatgctggaaacaatttaataagcagaaatgattaactccaaaatcatcaacatgactccaccaaccccatttttaaatttctatttaaacatttcccaaattatttgcacattcttcttttggctgtaagttttgtttttctctatgctagctaatagttttctagataatttctattcccttgacttgttcttatgttaaatcctcaaaattaagagctttcaactcaaaaatcagaaataggaaagaagtgtttaatgaaatgatttcacttttttctgaaagtattgacatgaagtattaaaagcatcatctgatagaaaaagaaggtacttgccaaatgttatatcggcctttatagagcactagtaacagacactataaagtcttttgtttcctaatttattattttcctaatgggccacatagcagacactgaaggttctacrtaacaaaggtcctacaagtaaattgtgaaaatcccttattggatggtgtttttagaatacagaaggt

SEQ ID NO: 238075 - DNA, 505 bp, Homo sapiens
aaatgttaaaccatccttgcatgtatgatatccatctacttctaatggtttttctttttttctcctcaatacacacacacacacacacacacacacacacacacacacacaccctctaccccatacacataactaatactggtggagtatatttgctaaatttttagcatttttgtatttatgttcatttgagactgatctataattttcttctcaggattgtccttgtcctgttttggtatcaaagttatagaaacttcctaaaataaacsgggaagctttctttttttccctttttccttggaatcatttgtttatggattacttattccttataaatttgataaaacttatattaaaaatatcaggacctgatgtattttttataaattaaggatgggctttttatactaccaatttaatttctttaattatgattctaggtaatacatattcatctaggaaattgttcatttcatctaagttttcaaatttattgacatat

SEQ ID NO: 238076 - DNA, 547 bp, Homo sapiens
aacataactagtcagagatagatctaggattagaacagagctaatttgatatttgattcatgactcacgtaatcaataattatatgttgaacacccaccatgtcaaaagcacttcgctaataagctctagggctgatttcrtaagaacgtactcactggaattataaataggagtttattggtgattatgcttgaagtagaataataagtgtagaagctagacttgcatgagttgaggaagagattaaagaccaaagacatatagtcactgtttaatttaaaccatagaaaagaatattacaagtattaaattgcaaataacaaaaccaaaaataattaaagcatgaccagaatagatctagtgatgtagttcaatgaaaaacacaaagaattcctttatggtcaaatttggcacttaaacatattatttacattttaatgagaacttctgacattcatgataatttacccaaattctggaaaatactgaaatacagagctcaaggtcccatatttcactgtacagaaccacctagcttcataattg

SEQ ID NO: 238077 - DNA, 362 bp, Homo sapiens
gggcgctggtgagaacacatgggaaacataataggttctgtgtgttacattgaaagttatggaaagctgcttatgaagaagacattcaaatatttatctctaggctagccctggccttctcctgatcctcagttttgaccagcggctgtgcaccttcctcattgtagttggtgacaattccgcctctataaaattgcgctggtctcccttccttccttgggkcaagcttctctcctgtgacacacgcttccattactagtgttggtaatctagcctccacccacatggaaaactctggttttctttacatctccttcacctttgtccctgcttttctgacatttcctggcacagagacagga

SEQ ID NO: 238078 - DNA, 337 bp, Homo sapiens
attttttcctattagtaccctgcagcaccaattcctgctgttgtgcaaggagtacctgaagtgttgatcagcaagagacttggcaaatcttgctgacatgtctcttctgacaagaggataaatgctttccatggatcctttctgtcctgcactggccccttggctgaccatctgtttgaaagtgcagggcatgatggtgacaataaataaggtgcycttctgtaaatttcagtaatccaactacagtacattccaaagcatgactgaacagcgtacctggtaatctttgttacaaatagaacctgcagatcctggagcagcagaggttagagatgga

SEQ ID NO: 238079 - DNA, 628 bp, Homo sapiens
atctatatgatattgaccagaagacatcgaaactgtccagtgacgtttcttaattcagttaaaaaagagggaagatgctatacttctaaattctgcctatataggtatacataattaccacatttatatacttatacctaatagatacagctcagcatgcctcttcattttacaattggttgatacagaaatagactagatctagccatatttcataccggcgacactaatacatgtgttttacacatttttcattataaaagtaggtactctggtgaaaatctcaacatataactgtgtacatgatattaattaaaaaaatacctactagtgaagagacttggttctgtacatcatgatggggatggatacagttcattcaatccacagtccwctgagtgactcataaccaaaatatgtgccattactgttcatatctaaacagacacaaaaagatgaaaaaatcggtcagtaaggatgatctcatatgatttgcataagattgtctttctaatctgtagcataataataataataaaaagatgtttgacaagcaacccaacagaaagaccttaacctacatacctctattgttgctgtttttatttcattagctttaagaatataa

SEQ ID NO: 238080 - DNA, 628 bp, Homo sapiens
atctatatgatattgaccagaagacatcgaaactgtccagtgacgtttcttaattcagttaaaaaagagggaagatgctatacttctaaattctgcctatataggtatacataattaccacatttatatacttatacctaatagatacagctcagcatgcctcttcattttacaattggttgatacagaaatagactagatctagccatatttcataccggcgacactaatacatgtgttttacacatttttcattataaaagtaggtactctggtgaaaatctcaacatataactgtgtacatgatattaattaaaaaaatacctactagtgaagagacttggttctgtacatcatgatggggatggatacagttcattcaatccacagtcctctgagtgactcataaccaaaatatgtgccattactgttcatatctaaacagacayaaaaagatgaaaaaatcggtcagtaaggatgatctcatatgatttgcataagattgtctttctaatctgtagcataataataataataaaaagatgtttgacaagcaacccaacagaaagaccttaacctacatacctctattgttgctgtttttatttcattagctttaagaatataa

SEQ ID NO: 238081 - DNA, 628 bp, Homo sapiens
atctatatgatattgaccagaagacatcgaaactgtccagtgacgtttcttaattcagttaaaaaagagggaagatgctatacttctaaattctgcctatataggtatacataattaccacatttatatacttatacctaatagatacagctcagcatgcctcttcattttacaattggttgatacagaaatagactagatctagccatatttcataccggcgacactaatacatgtgttttacacatttttcattataaaagtaggtactctggtgaaaatctcaacatataactgtgtacatgatattaattaaaaaaatacctactagtgaagagacttggttctgtacatcatgatggggatggatacagttcattcaatccacagtcctctgagtgactcataaccaaaatatgtgccattactgttcatatctaaacagacacaaaaagatgaaaaaatcggtcagtaaggatgatctcatatgatttgcataagattgtctttctaatctgtagcataataataataataaaaagatrtttgacaagcaacccaacagaaagaccttaacctacatacctctattgttgctgtttttatttcattagctttaagaatataa

SEQ ID NO: 238082 - DNA, 546 bp, Homo sapiens
actttgaagccaaggaaagaaaagaaaaagaaatttaattatcattttaaaacctaatagaatccattctggaatgtgaagctttctatcagtatacatcaacagttgcaaaatatacatttagattgaaatgaaaattattcccttacaacctcttctaagccgtccactaggatgcataataactctcaagtactcaaaagtcagtgtataactgattctaaaatctgaaaagaccttggttttcctggaaatacagtaagaaggcaggcagccaaaagaacatagaaaacattacgaccagggttttcttgttttacatttaccagcccaggtacttagatggctatcttcactagtctttggatattttcctagttttgtattaaagggaaatgatttgtgactcagaaatcatataattaccttgagtggatgatggtttactaatatcttggttatgcaygtgtctgtgtctatggtatgttttggaattacaatatttacacattttaaaaattgtccttagtctttggaattgataat

SEQ ID NO: 238083 - DNA, 562 bp, Homo sapiens
catccaggtgcacatttttttctcttagtttatataatcaaaatttgtttgtttctaagaataaggagatcatcacagaaatggtttaccccaagtcaggaagacaaggtcagctcagagtgggcataaaattgcttaaagcatctcagatagctaatgtaatagtgatttatcagaatgtccctaaaatgaccaatatttggggacagtaagaatggctaaagcttaaaaaaaatgtaaaagargcttgagttacctttctactggttctccaaatatatgatattttcattgttgctatttttaaatctaaaagatttttcaataatcatgaagaattccaaataggttcacagaatctagattttttttgtttgtactacagcagcgatttgtttcaagagaaggagacaaaatttcaatggaaaagttgtgctttgtgaatttagttaaagagatgtggatgtaatgaaccaaggggtctctttatttatggttactctgcagaggtaagtactcatctgacgagaggctatttgtaggaagctaatttagagtagaa

SEQ ID NO: 238084 - DNA, 640 bp, Homo sapiens
caacacataaatgctagttcatttcttcttttccctttatatagtgagccttcatttattcaattaatacttttgagctttacaatgtgccagcaatgttctaggtgggtgttaaaactgatagatagttcctacctccttatagccacggcgatgggaaggtaaattaggtgggtgaattagcatcctaagcaatagtgatttgacctatgggtaccataagggacccaggcagggctgataacatcctagaattgataaatagatctttggggaaaaaaagtttccattttcatttcattttctaagctgagactgccagttaacatcttggccacctggaggcagttccatctgatttgtgagagtgttaccttacaagattacccagagaygggtagagagaattggtgatatcacttgagctgactgaacctatcataactgaagtgcggccatgactggacttcttagttaaatcaggcaatatatcctgccactacatattttttgcttcgggtagtttcattgacttatatcgcttgcaactgaaagagctctgactaatataactttctgagctcccataaaggtagtttgtcctctgaagccttttgtctataggaagattatgggcatc

SEQ ID NO: 238085 - DNA, 620 bp, Homo sapiens
  misc_feature (1)...(620): n = A,T,C or G
gcatcctaagcaatagtgatttgacctatgggtaccataagggacccaggcagggctgataacatcctagaattgataaatagatctttggggaaaaaaagtttccattttcatttcattttctaagctgagactgccagttaacatcttggccacctggaggcagttccatctgatttgtgagagtgttaccttacaagattacccagagacgggtagagagaattggtgatatcacttgagctgactgaacctatcataactgaagtgcggccatgactggacttcttagttaaatcaggcaatatatcctgccactacatattttttgcttcgggtagtttcattgacttatatcgcttgcaactgaaagagctctgactaatataactttctgagctcccataaaggtagtttgtcctctgaagccttttgtctataggaagattatgggcatcaaaggcattctaccctttagaacagatctctcaagggtaaatacaattcctgattaccttaagamgtggcctcatgtatccagaagctactgaatatggaattgtttgacacaccatcgagnnnnnnnnnnnnnnnnnnnnnnnnnnnnnnnnnnnnnnnnn

SEQ ID NO: 238086 - DNA, 595 bp, Homo sapiens
tccatggctctcaggctttcagactcagactgaattataccaccaggtttcctggttctccaatctacagagggcacattgtgagacctcatggcctccacaattgggtaagccaattcccataataaatctcttatacatctataagtgtatcagagcaatctcacactgctataaagtaatacctgagactgggtaatttataaagaaaggggtttaattggctcctggttcttcaggctttacaggaagtatggctagggaggcttcgggaagcttacaatcatagcagaaagcgaaagggaagaaggcacattttattatgtggccagagtaggaggaagagagagaagggggtggtgccacacacttataaacaaccaaatctcatgagcactcactcactttacaagagcaacaccgagggggaaatctgcccccaggatccagtcaccttccaccatgccccaccttcaacacctaggattacaatttgacatgagatttgggcagggacgcagacccaraccatatcactaagtatcctattggttgtgtttcactggaaaaccctgactaatacagccactggcat

SEQ ID NO: 238087 - DNA, 622 bp, Homo sapiens
catctttatggatttctttgccaaaaggctgcctgagaagttcarggtaagtcctcctgctcaaaaaatatctccccaattctgtatctttccattataaaactttgttatttttcttaaacaatgctggcccatcttttctcctgctaaagggggcccatggaatatgggctttgttcatactatgatagaattttaaagagcaacagagaagagagcagcaacttacacagtcacttaaatgacgacattcaattattttgcctttgttttgaaagaaccttgcaaaaaatgcaattcttccaggaaggcaaatcatttctactaattctactaaataacttctctaggatccttgttagctaggaaagaataagatatatagaaatggaacccagaaaaaacaaatcttgaaacttcagaggctcccaagtgtccagaggagaaataaagtactaactcagaaactatgacagcatccaaacaactttctttagagttgtgcctaaagaaaactttagcctttacctgcagcaccatctggaatggtgattcagtaacatttaaagcacaactttcaacagacagtagacaaatagtcatcaatttttaaatattatct

SEQ ID NO: 238088 - DNA, 622 bp, Homo sapiens
catctttatggatttctttgccaaaaggctgcctgagaagttcagggtaagtcctcctgctcaaaaaatatctccccaattctgtatctttccatyataaaactttgttatttttcttaaacaatgctggcccatcttttctcctgctaaagggggcccatggaatatgggctttgttcatactatgatagaattttaaagagcaacagagaagagagcagcaacttacacagtcacttaaatgacgacattcaattattttgcctttgttttgaaagaaccttgcaaaaaatgcaattcttccaggaaggcaaatcatttctactaattctactaaataacttctctaggatccttgttagctaggaaagaataagatatatagaaatggaacccagaaaaaacaaatcttgaaacttcagaggctcccaagtgtccagaggagaaataaagtactaactcagaaactatgacagcatccaaacaactttctttagagttgtgcctaaagaaaactttagcctttacctgcagcaccatctggaatggtgattcagtaacatttaaagcacaactttcaacagacagtagacaaatagtcatcaatttttaaatattatct

SEQ ID NO: 238089 - DNA, 622 bp, Homo sapiens
catctttatggatttctttgccaaaaggctgcctgagaagttcagggtaagtcctcctgctcaaaaaatatctccccaattctgtatctttccattataaaactttgttatttttcttaaacaatgctggcccatcttttctcctgctaaagggggcccatggaatatgggctttgttcatactatgatagaattttaaagagcaacagagaagagagcagcaacttacacagtcacttaaatgacgacattcaattattttgcctttgttttgaaagaaccttgcaaaaaatgcaattcttccaggaaggcaaatcatttctactaattctactaaataacttctctaggatccttgttagctaggaaagaataagatatatagaaatggaacccagaaaaaacaratcttgaaacttcagaggctcccaagtgtccagaggagaaataaagtactaactcagaaactatgacagcatccaaacaactttctttagagttgtgcctaaagaaaactttagcctttacctgcagcaccatctggaatggtgattcagtaacatttaaagcacaactttcaacagacagtagacaaatagtcatcaatttttaaatattatct

SEQ ID NO: 238090 - DNA, 532 bp, Homo sapiens
tttctgccatgtgaggattcaacaagaaaacaaccatttgtgagccaggaagcaggccctcaccaggaaccaaatcagttgggaccttgaccttggacttcccagcctccaggactatgagaaagaaacrtctgttgtttaagccacccagcctatgctatttcattgtagcagcctgagcagactgagacataagcatgtctagctgccaagatgggacagggaaggggagctcatgagaggcctagaagttgccacctctgtgtggccacagtctttagggcttattgacatgtgtctgcctggtggttagcccaggggttgttgttggtcagtagagtcatagctggaaagccagttgagcatggagtaaagtgttgggagatgccgtcccctgctgaatctgcctacattcactttctgaggtgagtggctgcttcttcccttcctttatggctctctaatccagatatctttagggaaaggggttctaggaaaagtagttccagccttagccaaggtggcccaggac

SEQ ID NO: 238091 - DNA, 646 bp, Homo sapiens
tcatttcttgatttcatttatctccactctaatctttattattttcttcctttcagtttcatgtttagtttgctatttttctgattccttaaggtgtaacattaggttgttgatttgagatatttcttcttttataatgtaggtacttattgatagaaatttcttccaagtactcctttaccgcagtctgtaagttttggcatactgtatatctttttcatttgtctcaacatatttttttatttagaatttactttgtgattgctgctttgactgattggttaagagtgtgtcatttaattttcacatatttatgaactctacttttttgttccttttatctatacttatttcattgtgatccctaaagatagtttgtatgacttcaatttttttaatattttgagactgctgtggcctaatacatagaggatgttccatgtgaacttaataagaatttgtattttgttgttggtattttgctgttgttggatggactatcctgtgcatgtctgttaggtctrgtttgtagtgttactcaagtcatcttgtcaagcaacttcattgtgcactggttaccaacttgtctgagtctagtgagacaggacactcgtgtacaagttaccttaagtgaatgtattactta

SEQ ID NO: 238092 - DNA, 513 bp, Homo sapiens
agagaaagtgatctttaatttaaaagtatttttagacataattcacataccataaaaattcactttttaaaagtgtacaatatacccatttatagaaaactcacaaagttgtgcaatccttgccactatttaattccagaacataatactttcaaggttaattaatgttgtagcctatatccacaatccattcatcttttaaaataactgttggatatattcccttgtatgcatctaccacatttgtttattcattcatcagttgatacatttgggctatcatcatacatgtacatatttttgtgtgggtatatgttgtcatttttcttaggataaaattgctatgctgtatgatacctctatgttaaacattgtgaaggactgccaaagtgtgttccaaagtgcattaycattttaccttcccaccaatggtatatgcaaggttccatttctccacattttaccaacagttgttacatctttttttaattgttgtcatcctagtgggtgtga

SEQ ID NO: 238093 - DNA, 594 bp, Homo sapiens
cacctccaaagatatttatatcttaatcctcagaacttgtgaatgcgcatgaatgcacacagcaaaggagaattaaggttgcagatggaattaatgttctaatcagctgactttaaaatacagatattattctgaattatctggcaggtcccaatgtaatcacacgggtctttaaaagtggaagaggaaagcagggaagaagttagagtgatgcagtgtgaaaacttgatcctttattgcatgcaaaaaaaaaaaaaaaaaaagatgaaggaagagggccaggagccaagaaatggggacagcttctagaagatggaagaggcaagaaaacaaattgtttcttaggggcttcagagggaatgcagccttgccagtatcatgactagcccagtgagacccattttaatcttctgaggtacagaactataaaataaggaatttgtgtagttttaagccataaaattgtgtaatttgtaaaggtaaccatataaaattaatatagcttctatgaatacctctatcttaattatrtagttacagttttaattttttttataatgcatatcccttgaaaagttgtaagcaatatagcat

SEQ ID NO: 238094 - DNA, 624 bp, Homo sapiens
ataaaataaagcaaaatcagcataaataaaatttattaattatgtctcagtgattggaccttttcttttacgttaaagaaggtttacaatgacagcagcrtatactagaaatgatggagtccctatttatccctggtaatgcaccttcttagatcacagttggttagttgtcatcacttaatgtttataaagagctctaaaattgaaattactccctaagtgtcgagtagcctcatcattcctgaacaatcctaatgaagaaaagcatatgtgaccattttgcaagcctcttcagaggaaagtgaatatttaccattgaataaaacaaaacaggaaaacaaacagataaacataagagcaaaagaacaaagtcaaaacaagttgcagaccaatgtagaaagaaacaaaagtctgtgcttcttccgttcaggttcctcgggccagagacagcatgtaggtcatgctgtggttgatcacaagggccacagatgatattccctagtgtttgcaagaacttcctttaaagtactattaataatatagagaaaaatgagaaataagtttagcatgatcattagtatgcagtgtatgtgagtgatgcaaccatcatatacaagcattata

SEQ ID NO: 238095 - DNA, 593 bp, Homo sapiens
agtttaaccaaaaaaagagagaagactcagataagcacaatcataaatgataaaggtgacatcacatctgatacatgccacagaaatagaaaagatcaccaaagattagtgtgaacatcagctgtatgtgcacaaactagaaaacttaaaggatgtaaataattcctggaaacatacaacctccgaaaattgaaccaagcagaaatgtaaatcctgaacagaccaataatgagtaataaaattgaatcaattaaaaaaaaattataaaaataagcccaggaccaacagattcagagctgayttttaccagatgcacaaacaagagctgctaccaatcttactgcaactattccaaaaatttgggaagggattcctccctaactcattctctgaaacaagtatcactgtaatactaaaatcatgcaatgacaacaccaaaaataactacagaccattatctctgacgaacatggatgtaaaaatcctcaacaaaatgcaagtaaactgaatctgacatcaaaaagatgattcatcatagtcaagtgggttttattccagggatataagggcaattcaacatttgcaaatcaatg

SEQ ID NO: 238096 - DNA, 516 bp, Homo sapiens
tggaagatctctacaagaagaactaaaagacactgatgaaaaaaaaaaattgtagatgacacaacaaattaaaagacatctcatgttcatggattggaagaattgatattgttaaaagtaccatagtgcccaaagcagtctacagattgaatgcaattcctatcaagtagcaatgtcattcttcacaggattagagaaagcaattgtaaaattcatatgaaaccacacaagagcctaaatagcaaaaacaatcctaaactaaaagaacaaagccggagacatcacattacctgacgataacacatactacaagggtataygaaccaaaagatcaagtactgatataaaaataaacacatagatcagtagaaaagtgtagagaacctaaaagtaaagccacatacctacagcaaactgatctttgacaaagtcaacaaaaataaacaatagggaaaggactccccatttaaaaaatggtgatggaaaaattggctaatctacgtataacaatgaaac

SEQ ID NO: 238097 - DNA, 483 bp, Homo sapiens
tgatgaaaaaaaaaaattgtagatgacacaacaaattaaaagacatctcatgttcatggattggaagaattgatattgttaaaagtaccatagtgcccaaagcagtctacagattgaatgcaattcctatcaagtagcaatgtcattcttcacaggattagagaaagcaattgtaaaattcatatgaaaccacacaagagcctaaatagcaaaaacaatcctaaactaaaagaacaaagccggagacatcacattacctgacgataacacatactacaagggtatatgaaccaaaagatcaagtactgatataaaaataaacacatagatcagtagaaaagtgtagasaacctaaaagtaaagccacatacctacagcaaactgatctttgacaaagtcaacaaaaataaacaatagggaaaggactccccatttaaaaaatggtgatggaaaaattggctaatctacgtataacaatgaaac

SEQ ID NO: 238098 - DNA, 568 bp, Homo sapiens
gtgcaaaacagactccaggactgttctcacacaggggcttataaagccaggacataggccaggctgggaggagttggggaatccctgccaccctcctctttcctgggattcattactccctctacccaaatgccaaagcctcatgcacatcaattcatgcagcctgaacccagcaggatccacgactgccaatcctggcttgcagtttgtgctgggaaatggctgcattagcaacgtggagacatacttccttgtaactaagactttgtgcatctctgtaattatgtccttaggataaattccaacatgcaggctaattgagaaaaagatatctcatcatgagtttattttaactcyaaagcctctttgccttatgttcttatttatatacatttcctttttttctcttttttaaaatttaactttaaagttcaggggtacatgtgcaggtttgttatatagataaacttgtgtcatgagggtttgttgtacagattatttcgtcacccaggtattaatcttagtacccattagttagttttcctgatcctctcccttctcccaccac

SEQ ID NO: 238099 - DNA, 438 bp, Homo sapiens
catttttgtaccaggaaccagtttcatggaagacagtttttccatggaccagggaggaggatggttttgggatgattcaagcacattacctttattgtacagtttatctctattattattacattgtaatatataatgaagttattatacaactcactgtaatatagaatcagtgggagccctgagcttgttttcctgcaactagatggtcccatctggaggtgatgggaaacagggatggatcatcaggcattagattctcataagaagtgtgcaacccagatccctcatatgygtagttcacaatctgctgagaatcgaatgctgctgctgatctgacaggaggtggagctaaggcagtaatgcttgctcgccactactcacctcctgctgtgtggccaggttcctaataggctaggttgccccagatgggtactg

SEQ ID NO: 238100 - DNA, 438 bp, Homo sapiens
catttttgtaccaggaaccagtttcatggaagacagtttttccatggaccagggaggaggatggttttgggatgattcaagcacattacctttattgtacagtttatctctattattattacattgtaatatataatgaagttattatacaactcactgtaatatagaatcagtgggagccctgagcttgttttcctgcaactagatggtcccatctggaggtgatgggaaacagggatggatcatcaggcattagattctcataagaagtgtgcaacccagatccctcatatgcgtagttcacaatctgctgagaatcgaatgctgctgctgatctgacaggaggtggagctaaggcagtaatgcttgctygccactactcacctcctgctgtgtggccaggttcctaataggctaggttgccccagatgggtactg

SEQ ID NO: 238101 - DNA, 596 bp, Homo sapiens
acttgtgcagtttgaggtatctctgagaacctcctaagaagtctgaactgaacagctagagaggcaggaagaacacaaggaggtagtaggtcatagagtctctgcatgacatttggtgagcacagagagggtcagttcttgtctgtgatcaaacacttgactggcaagatttaagcccaagagtgtccatagagttttgtcaccttcttgcttctattaattttcmgaagacttaaagcctttaggaagagaaaaattatacattcaggcaaggaatttgctaattgttcttcattcttcatatgctgagtatgagtatgtacacagatattgcatcaacttggagaaatgtgaacgtgttggactaacttgcctggttctttgtgactgatgtgcccagaggatcacagtgatgcgaggagaagtatctttggtggtctgcagatgtgtttgagtatgagaataatatacccctaaagttcttaaagactttccttgtcccagaggctgtgtttgatgttttcagtctcatcaggtccctcgagtgtttatctgagaaagaagtacatgatgcaagtgggcctggggaagccaaa

SEQ ID NO: 238102 - DNA, 610 bp, Homo sapiens
atgtcttgtttttaaatttcaggcagcaattcgtaaagaattaaatgagtacaaaagtaatgaaatggaggtacatgcatcaagcaagcacttgacaaggtcagatttgtttctrtgaatttcatggtacttatttttgaaacacacaccgccttcccccgtcccccgccacaaaccatgtatccagctatacaaattcagcatttttccagagaactctattgaacaaatagaatgtacctcaagtaagaatgctgcctgctcccattatttcctttaggacttggtgaaaggtgatatgtatggtaacaatatcggtttatttaagtagttaatgcatatttaacaaaaataagcctcaaggcaatgaaagtaatttttctgtgtatttaattcccctctaatattcagaattcctccaatttatagaactcacctgtttatacttacagatttttgtgaaattagtcactccccaccttcacatttactttttcctatcgtaaattattagtcacatctttaacacagccagcgttctcctaaagctgagtatttgtttcctcagtaaatatttgagtaagtgctgagaatgcaatagtgaatatga

SEQ ID NO: 238103 - DNA, 620 bp, Homo sapiens
ctatgaaacagaaaaggaaaaggtgctactgtttagaaaccaccttggcccccaaagtacaaaagatcagtactgcttaacaaaagaaccaggcagatcctatagttagaaatgacctggttagatgggacatatatttagttttttccccaagtcccataactagtggataataaaactaaaaaggtaaagtgcaggataaccaaaggagggtttggactggttcagactcaaaggttctaagatatcctaaaaccagcagacatattcacttaaatcaaaatttgtggcaatagyatctaacttctaccattgtgtttttattatgcacaaactattactctatacttacatatttcatgttcttatcaggtattataagggttaagagataaactaaaattgaatcaagtatatttactctccacctgcacatcacaactatcaagttagaggaataaaattaaaaagcaattcacaagtcatattacactgatgacatacatgtatatgtacacgcatttgcatatatttataatttgaagagaaagtttatatacttaacagccaacagatttagaaaaaactatttgtcctactgaataacagtatatatgaat

SEQ ID NO: 238104 - DNA, 554 bp, Homo sapiens
gctggcggaatcaaaagaagatattggaagacatgctcttcatagagtatgagcaggtgtctcagcctagaaaaatggagacccagggattattttctacaacgttcagtctcttttattcaatctggtgatggcttggacaataaaaatctctcaaaacttttttggtcccagttggcttcatctgccaaaacacacctacagtttttctgagatgtaccttttccatagatctaagaccctgatcttgtcaggctcccataaaagagctataaccatggtccctttgccaatgaattttgtcctagtttgctaacaccacataaatccatttgggatttttaaccacaggtgtgacagcagaccaattctaaaccacsctttgccagttaaaacctttttggctttcttttgttgcttttctcattggttctaagaagccagggttttttttccaatcttacaaaactttgaagttctagattctcttttatttttgccagaccctgttatctgcatagacactttcccagaagtactggttatattattga

SEQ ID NO: 238105 - DNA, 441 bp, Homo sapiens
aataactggtccaaatgactggaaacagagggcaatgtctttgacatcaggccgacctgggtttgagacacacggctgaactccttactgagctgtgggaccatgggcaagtgacttaacctttctgattatgtttgatcaactgtaaaatgaggatagtagtcacactgacctcccagggtcgctaaaattaaattaagtgatccccaggaaagacttatctccctcctaacccacaccgagcacttggaaagtgtctgctgctgctactgtagcatcactgttactctcaccatcatcgttgtcatcgtcattgtcatctgtygtcttcattgtcaaaaacaacccttggaaagggacgcactaacacgcattatttagctgcctacagatgctcccagagaggccatctctctggtagcatgtgtgttttgggatgtg

SEQ ID NO: 238106 - DNA, 478 bp, Homo sapiens
ggtcatttgttttcagacaacagatttatatatgataaagttatatcttttgtaattaatgtcatctgtgtggtggtaatttaagttgtatgaatgtcctgtgattttarcattttttgatgaccttgctgaaatcagttattacatggataattgaaaaatgattttttgtaattctattcctctcatttattaacaataacttatttatattatattctaatgaaatatgtaattgttacttatttcctcacaatttttatgctagtagtgttaaagtctgtgtgcccttgtatttacttaataatatcctgatgggataaggaagaagatagtatttttgggtcataagtgcattttcacaagttaacattctcacacaatttcctcttgaaaatttttgttactaattagatttaagtaaaccatttagttattcttttttccagcgaatattttctattttcatctttgtttt

SEQ ID NO: 238107 - DNA, 584 bp, Homo sapiens
ttctaattaatttggagagggctttctttcatttgtagcaattgatgcttttcatctaacaattacaatatatttgcatatttatcattggaactgtctctgcttgttttaaaccctgtgaaaactacgccctgcttttcaggaatgcttagaatgacttgtatgtactaggaaaacttgtttacaagtgagcacccagagatgactcttcacttattccttcattgttcctgctaggattgtgtactcgcctttgcatttttcgatagagctgtcaacgcgatctactgcagttaaaggttagcaaacaagacaggcaagagctaatggggcgggrtgaagacccgcgtgcaagaaggctggcttcaccagataaagaagacaactgtcctccattctgtccttttttgcacgcaggctaagaggcgttcaccatctctacgtcaggcttcaaagaacagctcccttgcaattttgctgatacccccattccttagcttggaaccggaggggcggtgagggccgctgtcactcagccccgcgggccaatagaaaaggggtgaaccccgccttcttcctgagtt

SEQ ID NO: 238108 - DNA, 618 bp, Homo sapiens
acctgtgtgacaaaatagtgtgcatattaaacccccgtgacacaagtttacctgtatcacaaacctgcacatgtgcccctgaacctaaaataaaagttacaacaaatagaaagaaagaaaagcccggtgtgatagctgacgcctgtaatcccagctctttgggaggctgaagcagatgaaccacacttgagcccaggagttcaagaccagcctgggcaacttggtgaacaccctgtctctgtaaaaaaaatttaaaaaataggccgggcacggtggctcatgcctgtaatcctagcgctttgggaggccgaggcaggcagattgcctgagctcaggagttcgagaccagccttggcaacacagtgaaaccccgtctctactaaaatataaaaaattagcccggtgtggcagcatgcacctgtagttgcagytacttgggaggctgaggcaggagaattgcttgaacctcccaggcagaggttgcagtgggccgagattgtgccactgcactctagcctaggagacagagcgagacttcatctcaataaccaagaacaaaaccaaatccagaagcaaataaaacaaaaaacaatacttcaacacacattgtgcttgatt

SEQ ID NO: 238109 - DNA, 548 bp, Homo sapiens
cggaatgttatgaagtccttaaaaagtgctaagagttcctgtacaaacttacatgtgaagacaatcacaatatttttttttactaaagacaaaacaaaaaactctaatatagcttacaaaacagtatatataatacagcccctatatatgtaatgtatgttcttatatgcattcttacaaagtctcatcttatgtattacaggcagtgtgtatgtgggtggaggagggaataattactttgtaaattatctcgtttgtgataaaataatatgttaaaattgataaagccatttcacatatctcagttctgatctgagcattgaaataagggttatctgtttgtytgtcttcattcaaggagaatatcttttgagtatgtatctgtggcatatagctttttaacatatgaaatgaaataatagctgcattggtatatttcagaaactacattttaaaggcattaatgtatcttaggaattacatcttaatttattaatgtattataagtgttattttgcagcaggtctatcagatcttccaactctttc

SEQ ID NO: 238110 - DNA, 548 bp, Homo sapiens
cggaatgttatgaagtccttaaaaagtgctaagagttcctgtacaaacttacatgtgaagacaatcacaatatttttttttactaaagacaaaacaaaaaactctaatatagcttacaaaacagtatatataatacagcccctatatatgtaatgtatgttcttatatgcattcttacaaagtctcatcttatgtattacaggcagtgtgtatgtgggtggaggagggaataattactttgtaaattatctcgtttgtgataaaataatatgttaaaattgataaagccatttcacatatctcagttctgatctgagcattgaaataagggttatctgtttgtctgtyttcattcaaggagaatatcttttgagtatgtatctgtggcatatagctttttaacatatgaaatgaaataatagctgcattggtatatttcagaaactacattttaaaggcattaatgtatcttaggaattacatcttaatttattaatgtattataagtgttattttgcagcaggtctatcagatcttccaactctttc

SEQ ID NO: 238111 - DNA, 595 bp, Homo sapiens
taaatggatagatctgtgtagagctgaaaagactagagagatttatttgggggccataatcttatatgtcacaattaatcacccagggaactaagagttaaggaaatggttatttattatgaatcttctgtgtgtcagttatctaccaaacatcattgtaaagtaatgaaattgcttttctcatgtcacatgcaagtcaaataattacaatcctgcactatggcctgaacaaaattgttcaagatgctgtattttactttatgacttatggaagaagttaggtataatgcattactctgttctcatgctgctaataaagacatacccaagactggttaatttataaaagaaaaaagtttaacggactcacagttccacatggctggggaggcctcacaatcatagtggaagatgaagaaagagcaaagggatgtgttacatggcagcaggcaagagagaccgtgtgcaggggaacttctctttataaaaccatcagatctcgtgagacttattgactgtcatgagaacagcacaggaaagtcctgccccccatgattcgattatrtcccaccaggtacctcccatgacacacggg

SEQ ID NO: 238112 - DNA, 563 bp, Homo sapiens
tggtgaaagaaaaacttcagccaaattaaatttaaaggaatttgattgagccaagaagattcatgaactgggcagcctcccaaactagagtaaattctgagactccagtgcagccacgtagaggaagaagatttatggacagaaaaaaggaaagtgacatacagaaaataggagtaagcacaaaracagctggattggtgacagccccgcatttgccttaactgaacacggttcaaacagttggctacatttggccaaaactcagtgattggtacaagtgtaggctatgatctgtacctccacttgtttgtagttcacgatgtacggagaaacctttaggctgaacttaaaatacataaggaggcagctttaggctaaacttgttgtaacactttgctcttgctactgtaggattactgtaaaaccttagtaagtaaaggtttgccttaggctctatttttcaagacacttggactaagacttctgtgaattgtctattatgagcttttactaagttttctagtgtggtgtcttggtttggtttctctagaagcagaaacttg

SEQ ID NO: 238113 - DNA, 630 bp, Homo sapiens
gaaactgaatgctttcctcctaagcagaaacccagcacaaatgtcctctctcgttagtaccattcagtgtcataatggaagttctaattagtttgacagagcaagaaaaacaaataaaatgcatacagaataagaaaaaaataaaactatattcacagattatattttttgtggggaaaatagtgattttattttaaatgccaatctgccaygtaacttctgactaaccccaagtccaggaatgccgccaaaatgtcttgctgatgtattactttttatttagaaatacctatttattgtaagttttcctccaaaacctcccttgatgctgttacagaaatcttaggccctgatgctcatagccacctgcacattccttccagagtacatatacttttccctcaagatacatgccctgggtctcagggtttgcagtgcagagaactatgtgtcttgtggccacccaagaccatgctgctgtctgtaagttccctctaataagtcacccaataccaatgaactagatttgtctgcctccttctttggtttcttggcttctttggcatttgggggtcactttttatatataccctttcacagaacaaccgtctatgtagaaagttccaaata

SEQ ID NO: 238114 - DNA, 647 bp, Homo sapiens
ttcttaattagcatgtcatgctatgtaggacactttagtatccctgagactgaagcagattttcacatttggattcttatctagccataattttttggattgttttcatattaagctttacattttcgaatatttgttgctgcatatgtcaaataattagagtcttttactacctttgagactctaatacaaatgaagaatctaaacaagcaattaaacaatagcaggatattcagctggaaacmattaagtactgccgattagaagctcaatcctctagaataaactcttacactaagagcaaagtttatagccactctacaatttatttaacacttcccatctccttcatttataaaccacatatgtatattttctttctttcttttttgagactgtctcactctgtagctcaagctggagggcagtggtgtgatcacggctcgcttcaggctcaacctcccaggctcctgatcctcctgcttcagcctcttgagtagctgtgactacaagtgtgcaccaccatgcctgcctaattttttattgttatttttgtagagacagggtcttgctatgttgcccaggttgatctcgaactcctgggctcaagcaatcctcctgcctcagcctatcaaagtgctgggatt

SEQ ID NO: 238115 - DNA, 647 bp, Homo sapiens
ttcttaattagcatgtcatgctatgtaggacactttagtatccctgagactgaagcagattttcacatttggattcttatctagccataattttttggattgttttcatattaagctttacattttcgaatatttgttgctgcatatgtcaaataattagagtcttttactacctttgagactctaatacaaatgaagaatctaaacaagcaattaaacaatagcaggatattcagctggaaacaattaartactgccgattagaagctcaatcctctagaataaactcttacactaagagcaaagtttatagccactctacaatttatttaacacttcccatctccttcatttataaaccacatatgtatattttctttctttcttttttgagactgtctcactctgtagctcaagctggagggcagtggtgtgatcacggctcgcttcaggctcaacctcccaggctcctgatcctcctgcttcagcctcttgagtagctgtgactacaagtgtgcaccaccatgcctgcctaattttttattgttatttttgtagagacagggtcttgctatgttgcccaggttgatctcgaactcctgggctcaagcaatcctcctgcctcagcctatcaaagtgctgggatt

SEQ ID NO: 238116 - DNA, 647 bp, Homo sapiens
ttcttaattagcatgtcatgctatgtaggacactttagtatccctgagactgaagcagattttcacatttggattcttatctagccataattttttggattgttttcatattaagctttacattttcgaatatttgttgctgcatatgtcaaataattagagtcttttactacctttgagactctaatacaaatgaagaatctaaacaagcaattaaacaatagcaggatattcagctggaaacaattaagtactgccgattagaagctcaatcctctagaataaactcttacactaagagcaaagtttatagccactctacaatttatttaacacttcccatctccttcatttataaaccacatatgtatattttytttctttcttttttgagactgtctcactctgtagctcaagctggagggcagtggtgtgatcacggctcgcttcaggctcaacctcccaggctcctgatcctcctgcttcagcctcttgagtagctgtgactacaagtgtgcaccaccatgcctgcctaattttttattgttatttttgtagagacagggtcttgctatgttgcccaggttgatctcgaactcctgggctcaagcaatcctcctgcctcagcctatcaaagtgctgggatt

SEQ ID NO: 238117 - DNA, 647 bp, Homo sapiens
ttcttaattagcatgtcatgctatgtaggacactttagtatccctgagactgaagcagattttcacatttggattcttatctagccataattttttggattgttttcatattaagctttacattttcgaatatttgttgctgcatatgtcaaataattagagtcttttactacctttgagactctaatacaaatgaagaatctaaacaagcaattaaacaatagcaggatattcagctggaaacaattaagtactgccgattagaagctcaatcctctagaataaactcttacactaagagcaaagtttatagccactctacaatttatttaacacttcccatctccttcatttataaaccacatatgtatattttctttctttcttttttgagactgtctcactctgtagctcaagctggagggcagtggtgtgatcacggctcgcttcaggctcaacctcccaggctcctgatcctcctgcttcagcctcttgagtagctgtgactacaagtgtgcaccaccatgcctgsctaattttttattgttatttttgtagagacagggtcttgctatgttgcccaggttgatctcgaactcctgggctcaagcaatcctcctgcctcagcctatcaaagtgctgggatt

SEQ ID NO: 238118 - DNA, 480 bp, Homo sapiens
ttgggataatcgggacattttaagatttcttagaaaataaacaaagtcaataaccatacatattagttaaatcttttgaaaattaaaaccttatacttttcaaaaacactgtcatgggactgaaaagtagacatttacagcatgtatttggaaataagatatatccagtcaactcaataataaaaaataaaattcagtgaaaaatgagcaaacgtttttacagatggttcactaaaatgaatacattagcagctaataataacatgaaaagatgctcaacatcattattcaccaacttaaaaatgtgagatactgctacaccctgtagaatggatacaacaaaaagaratggcagtaccaagtgttgaagagggcttagagcgattggaacattcaggttgctggtgggagcataaaatggtgcaattattttagaagatagttcttagcttcttacacagttaagcataagtttcccat

SEQ ID NO: 238119 - DNA, 511 bp, Homo sapiens
aaaatgctgggattatagacttgagccaccatgtccggccaacaagcatcttttgaagtacaaattattgaagggtttacagcacttgctcactcatgtacgtgaggtccctgcactggttctttccatcaaccagatggatccactggtgggaggaagtggatgatagaagtggggtccatgaggcactgctcagaggactggcaggacagtaggctgacaggacatctaagggaagcagaaggtctgagggaggaagaggagaggcagagcccaggcaacctgggccccctgcctggccagttctgggatgctgccctcagcagagctgggggagaactgtcacactttcactgcycttgccacccggctcatatcaccaggcaccatgccactgcagggacactcctcaattcaccaaccagcaaaggacccctggaatttttcttgactctgaggctttagtgaaagtagtgaggaaaacatctaaaaataaaatcgtgatgaattc

SEQ ID NO: 238120 - DNA, 568 bp, Homo sapiens
agtgtactgtttttccaggtaccatctgtcacagcttcccttggctaggaaagggaaatcacccaaccccttgtgtttcccaggtgaggcaacacccggcctgcttcrgcttgccccccgtgggctgcacccactgtccaaccagtcccaatgagatgaaccaggtacctcagttggaaatgtggaaattacccatcttctctgtcaatcatgctgggagcggcagactggagctgttcctactcagccttcttggaacagagcccccctcacaaaggactttctctggctaactctgatgcttttctgagttcttacctaaatttccccttctccttctgtggccctgccagttttgttttgttttgttttgttttgtccttatcactacccttgctgcctcctcaaattatccagagccactgttgttttctagaacattggcaagcacgttgatagagtgcccacattgtactgaactctgaggggaatagtctcgtccccatcactcaggtggggaaactgaggtgaggttagtttaaagtgggtaagcagtgggtttggaatt

SEQ ID NO: 238121 - DNA, 585 bp, Homo sapiens
cagtcctactggatcagggcccacccgtgtgacttcacttttacttgagtacctctcacagaccctaactccaaatcaggtcacttgctgaggtactgcatgtgaagactttgacatttgaattttgagggggccaccgtttaacctgaaccaccaaggacagagccaaagaccctgggtgacaggcccagaacaggacctggtggaggctcttctttaggggagagagggaaatgggagccaccactggcagagcctgaaggcagggcagccagaaagaagctgtgggagtccccaccatggaagaccctgccgagcatcctgtgtctcctgaagcagaccctgacatgaggactgggrgcacgtgtttattaagggcgatccccggaaggaggagataaccaggtagggaaggagggaaccccagggcagggctctagagagagaggatgaccctcaggagcaggaggggctggacctgaaaccagacccagcaagagatggaagccctgggagcagccccactccaggtcctctgcaggagtgacccagctgccaccaggctgccctgcccagctcagcagg

SEQ ID NO: 238122 - DNA, 465 bp, Homo sapiens
ccatgcatgtatttattcactctttctttctttcattctttcattcaggctcttcctaaactcctggcctgcccagacaatgtgctgggcattgggcacagccaacatcaatcctagaatccaagttggggtttccagggccaagatcccagcagcattgtgggagggagagagggagaggggcccatccccaccaggtctgggccagccaggtgtttctccaggtgtggtcagccccagatgaggtgggcargtgagatgacagggctacagaggacaacgttgggagccctagagagtcaggagcaaaactgtgggtgaatgtcagtatttttggacaggaaataagtgctatgcaaatggaatgcaaaactatgcaaatcatgagcattcaatttcagtccaaagctacttttggtaataagtctgtggcagggctggtaattggcagggagggtgcattac

SEQ ID NO: 238123 - DNA, 620 bp, Homo sapiens
cgtgtctgcctgtgggctgaggtgcctgcttctcagcaaagatgttttcatccaccctcattttcccttcttgtttctgtgcccctcaatccccaccttctttgcagccctgggacccacctctctctctcacctctcagtgcctttacacaaaggactgccctcctgggatgctccctttctctcatggacccagctccaatatcaccttcccatgaaacctttctttactgcccagggacccccccagtcccctgtctctctcatctgtgcctgcttttattttagcacctgctgcatgataccgcatgacctactctcacrtccgtctcctgctaggcaggagtttcttggctgtcaggagctggtctcagtggctggtgctctgcaggggctgtatcaatctggctttctaaggcttcaaggatgaatctgtccatgttgcctttggtgagcggaaggagagtcactgtgaggacagaaagggcagagagctagtatagctatacaaacatactaggttccagaatgtactaggttcatgaaaaacaggaacaaatgctcagcaatagtccagaaatacctaggatgacccaacccaccttctgtgcaacccccag

SEQ ID NO: 238124 - DNA, 552 bp, Homo sapiens
cagttgtatgagcgaacactccccatgccccgtctactcttcagactgcatccttcctctccctcaacccacaccgataacccatgtggcatgccctgagataagtggactgtgaaaggtcacaactgattctggctgacacatagttctgcacaacatactggtgctacccagaagggcaactgcaacagcacagcctgcactttgggacaatggtgacggacaatcctccaggggcataactgagcagtgaacctgattgcttatttagcctgtggggagaaacggccacagcctgtggattcataggctrtggctcgtggtctggctgaatagtcaggcccttgggccataattggaaataataataattattacctaattattcttttgtagaaataattattatactatatataatataataataattataaaaataataattattattattactacaaaataattatcacaaaataattttctataattggaaaattggtgaaggaggtcttgagaagaactatacagctagaactttctgaattg

SEQ ID NO: 238125 - DNA, 636 bp, Homo sapiens
ggcacggtattaggagaaggcaggagaaggaagagaggggcggggctgtaaatactaattgttgtatcaggaggttgctttttatttccttactgaagggaaggctatgtttaattaactctgcctgtgtgctggggatggggcctgattgaaaatgagttactgggcctctgtgacaaggcggagggcacaaactctgaggcagaaagtcccaaaggctctgagctatctgttcccaaaaaccctgccacggccccctcrcacccctcctgcagcctgcaggtgtccaggcctctgcttgagcccctctcccttccagggacgccctttcccgtttcctctggccagcaccaacctatccactcacctgccctcgggctggcattatttggggacaagaaactggaggccacgctagcttcacttaagtccagggaatttgattgtcaagctgtaggttgcccatgaaccccagaagctggaagaatggctgggcctctagaactcagaaatggtaaggaatcaaaggcaaagcaggtgcattccctcttttcccccaacccctggcctctgccctactctccttctctccttggtgctagctcctctctgaccctccagtctgaggccaccaca

SEQ ID NO: 238126 - DNA, 636 bp, Homo sapiens
ggcacggtattaggagaaggcaggagaaggaagagaggggcggggctgtaaatactaattgttgtatcaggaggttgctttttatttccttactgaagggaaggctatgtttaattaactctgcctgtgtgctggggatggggcctgattgaaaatgagttactgggcctctgtgacaaggcggagggcacaaactctgaggcagaaagtcccaaaggctctgagctatctgttcccaaaaaccctgccacggccccctcacacccctcctgcagcctgcaggtgtccaggcctctgcttgagcccctctcccttccagggacgccctttcccgtttcctctggccagcaccaacctatccactcacctgccctmgggctggcattatttggggacaagaaactggaggccacgctagcttcacttaagtccagggaatttgattgtcaagctgtaggttgcccatgaaccccagaagctggaagaatggctgggcctctagaactcagaaatggtaaggaatcaaaggcaaagcaggtgcattccctcttttcccccaacccctggcctctgccctactctccttctctccttggtgctagctcctctctgaccctccagtctgaggccaccaca

SEQ ID NO: 238127 - DNA, 603 bp, Homo sapiens
ataataaaattaattttaaagggagattcaatagctaaagctaaagattagttctttgaagggattaaagtaatttaaaaaaaactataaatcctgatcaagaaaaaattgggggaaaggggaagagagagagagagagacagagaaataggtaactagaacaactatatggtctataaagtctacgttttgccttttcaatttctgaataatgtacttagataaatgaaagttctgaaattcaataaagcctattaagaacatctgtctatcaaagtacaacattctctaggccaaatacttgtcaaatacttatatttgacaacagaatttgattcgtctatattcagaatagaaaaataattgtcaaatatcaacaacagaaaaaaataagtaaaacatagagaataaccaaatgactaataaccatatcaaaatttgctcaacgtcattactcatcatggaaatgcaaatattagcataatgtgataacaccacaaaccatcaggtaagtaaaataaagaacatagtgccaatgctaggakaaataatagcaactggaaccttcaattattgctgggagtgtgaattacttcaattact

SEQ ID NO: 238128 - DNA, 479 bp, Homo sapiens
tatttgaataccttgggtggttataatatttttggaccataatttcctacctgcagaacattgttgctgtagagaaatctgaggctcatctgatttatttttgccttataagtgcttttttatttttgatgyatgaaatgtctgcctgtattcttgatgctcagtagtttaactagcagcttgaatattttatatcaaattgtcatggaatatttcatgagctttcaatattaggatacagtttttaaaaattctaaacatttcatcctggccaacatggtgaaaccccgtctctactaaaaatacaaaaattagccaggtgtgatggagcatgcctgtagtcccagctactcgggaggctgaggcagaagaatcgcttgaacccggaaggcagaggttgcagtgagccgagatcacgccactgtactccagcctggctacagagtgagattccacctcaaaaaaaaaaaaaaaaaaaa

SEQ ID NO: 238129 - DNA, 388 bp, Homo sapiens
atactccttagcaagaagctccaagagcacctcagccagagggagaagatgctaatcagaggagaatatagaaacgtagatgggagtctcccgtcccacatttggtgtgtgtctggtgtatgtgtgcatatgtgtgtatgtgtgcatatgtgggcatgtgtgtatgtgtgtgtgattgtggaaatagttccattagatggcaggaaaggacactttcagtaccctatgataaaatataaaatagaacaataaagtagaaaaaagacttggggtgggtccatttaatgtaactgtaaggtgaaaaaaaaaaaaaaaaacaatccagaagaatacagggacyagtggataatagattataatgtatagtcttataatagccaattattta

SEQ ID NO: 238130 - DNA, 600 bp, Homo sapiens
ttgttgtaaatggtggtatctcttttttaaggctaaacaatattctgttgcataaatgtatataacatatgtttttaatccagtcatttgttgataggcacagattatttctataccttggcaattgtgaataacactgcaataaacatgagagtgcagatatctctataaggtgctaatttcatttcctttggacatacaggcaacagagggattcctgggtcatcaggcagttttacttgtaatttttcgagaaatctccatactgcctataccaatttacatttccaccaaaaatacctaagggttttcttctctttacttccttgccaatatttattttttgtcttttagacagcagctatcttaaatggtactagataatttctcattgtggttttaattttcatttccctgatgattaattaygctgagcaccttttcatatacctattggtcatacggatttcttcttttaagaaatgtctattcagactctttgcatttttaaaatcagtttatttggttttttactcttgagttgtgtgagctacttatacattttggatattaaccccttataagatatatggtttgaaa

SEQ ID NO: 238131 - DNA, 570 bp, Homo sapiens
acactatagaatgatgcctatcccctcagtctatctttacctctcccatgaggacttcagcacaggctgctttgctcactaatctagcacaggagaaccagaggaagtgctttttatgcatctagaatgtcaacatcaacagacatgggccaagcataagctgcatcttacactgtaaaaccagaataagtaygagagaatcatggaggaaatgaagcaataaaagatgagaaattttttctgtgttagattaatacagaagcattttgttttacctcttattattccccattttaccaatggagaaaaaaagtaaaatttaagagtatgtgtgtgttacataggctagattatatttgtcccagagcacaggtcttttgactccaagtctagcatgctatatgtggctaaccattttcattctgattagcttaatgaatccctattcttttctcttggagataaaaggaatatgtatacctacactaagatctaagcattggcatctactgagtatctatagatagagccagcagaagccccttggcatctgacttttgtctgagttac

SEQ ID NO: 238132 - DNA, 485 bp, Homo sapiens
gacatggagaatctgtgccttcatcacattagcaagggttgcctagtcattgaataccactccaaaaatagatggataacttaacatactccagtgtttcacagacaactcaaagcgtgtataccctcctggtaaagcataaagattacctcagtatccaccaagtatcttctttttaggttcagagtaagcacattaattccagtttattgtcattttaatgcacacacacatacacacacaaaaaaacaataaataaataaataaataaaaataaatatttttktataaacaataaaaaggaataaacagcccagtgagtttactttatagatgaatgtctttgcagttagcaatgagctgaatgtagtacatggctctgggttaaaatcactttgttgttttctaggcacaggaccattcaatcaatcaacttcactcactctccacttcctcagaaaactggatgatgagttgaaggatca

SEQ ID NO: 238133 - DNA, 603 bp, Homo sapiens
tctgactccgtattacatatttgacatgaatggacaaagttgatcagagcatacgatcagctctcacaagacaatataacccagccccagcacaccactgaatagagtttacttaacagtgcactttctgctgtaaaaaagtaaatttatcctttttagtgtttacagattgaattagaaataaaacgtacacacaatatacacaaacacaaacacatatggacacatatatgaaaagatacagaagcataggagaaattgtccaccatccacaacagaaaatgtagctattaagtagagatattctatgtgtttggagtgtgggtgttctgttgtataaacaggaattataacaatatactagcacacagttggaatatttctttgatgacttaaaaaggcagcacacatgtttctatgtagaaaatgctttgttttctcaattcaattatttttaatggtctcacaaaggtctttgaatttgggcagttgctctccattcattctcagatgtggttgtaacatacagtgactaatccaacaaaaagctgckcattatgtactctgtagcagcacggccctaaggaccagtggtaccagaca

SEQ ID NO: 238134 - DNA, 573 bp, Homo sapiens
ctgtgacaggctgggtgaggcagtccctaggtccacaggtggtatgtgtaggtgcatgtaagctgctgtggtagtggcaggttgggtggatccatcttgaagcccaaggaggaatgcttagatgcaaatggtggtggagtgggctggataatccctaggcttctggacagcatgcttkggcactgggattgcagggggtagaaatacagaatatacattctcagcacatggaaatttctccaggatagaccatatattaggacatgaaacaagtctcaacaaatttataaattcaaagttatatcaagtatcttctcaaaccacaaatgagtaattctagaaattagtaaataggagaaattggaggaaatttgcaaactgtaaaaacacacggaaattaaacaaaatgctcctgaatgaacactggttcaaggaagaaattaaggaagtacccaaaaatttcttaaaacaaatgaaaatcaaagcaacgtatcgaaagctatgggatacagcaaaagcattgctaaaagggaagtcttaacagtaaatacctttctcaaaatagaaaaattt

SEQ ID NO: 238135 - DNA, 573 bp, Homo sapiens
ctgtgacaggctgggtgaggcagtccctaggtccacaggtggtatgtgtaggtgcatgtaagctgctgtggtagtggcaggttgggtggatccatcttgaagcccaaggaggaatgcttagatgcaaatggtggtggagtgggctggataatccctaggcttctggacagcatgctttggcactgggattgcagggggtagaaatacagaatrtacattctcagcacatggaaatttctccaggatagaccatatattaggacatgaaacaagtctcaacaaatttataaattcaaagttatatcaagtatcttctcaaaccacaaatgagtaattctagaaattagtaaataggagaaattggaggaaatttgcaaactgtaaaaacacacggaaattaaacaaaatgctcctgaatgaacactggttcaaggaagaaattaaggaagtacccaaaaatttcttaaaacaaatgaaaatcaaagcaacgtatcgaaagctatgggatacagcaaaagcattgctaaaagggaagtcttaacagtaaatacctttctcaaaatagaaaaattt

SEQ ID NO: 238136 - DNA, 573 bp, Homo sapiens
ctgtgacaggctgggtgaggcagtccctaggtccacaggtggtatgtgtaggtgcatgtaagctgctgtggtagtggcaggttgggtggatccatcttgaagcccaaggaggaatgcttagatgcaaatggtggtggagtgggctggataatccctaggcttctggacagcatgctttggcactgggattgcagggggtagaaatacagaatatacattctcagcacatggaaatttctccaggatagaccatatattaggacatgaaacaagtctcaacaaatttataaattcaaagttatatcaagtatcttctcaaaccacaaatgagtaattctagaaattagtaaataggagaaattggaggaaatttgcaaactgtaaaaacacacggaaattaaacaaaatgctcctgaatgaacactggttcaaggaagaaattaaggaagtacccaaaaatttcttaaaacaaatgaaaatcaaagcaacgtatcraaagctatgggatacagcaaaagcattgctaaaagggaagtcttaacagtaaatacctttctcaaaatagaaaaattt

SEQ ID NO: 238137 - DNA, 582 bp, Homo sapiens
taaaaatcctagaagaaaacctaggaaaatctctttcagacaatggcctatgcaaagaatttatgatgaagggcccaaaagcaaatgcaacaaaaatagacaaatgatatttaattaaactaaaaagtttcttcacagcaaaagaaataascaacagagtaaacaaagaaactacagaatgggagaaaatatttacaaattatgcctctgacaaaggactgatatccagaatgtataaggaactcaataagacataaaaacaaaacaaaaaataaactaccctattaaaagctgggcaaaggacatgaacagacatttctcaaaagaagaaatacaagcagccaacaaatgctgtaatgagaaaaaaaatgctcaaaatcactaatcatcagagaaatgaaaattaaaactgcaatgagagatcatcttacaccagtcagaatggctattaaaaagtcaacaaataacagatgttggcatggatgtggagaaaagggaatatttattcattgttgatgggaatgtaaattagttcattctctatagagaacagtgtggagatttctcaaataacttaaaata

SEQ ID NO: 238138 - DNA, 214 bp, Homo sapiens
agcttactttttgcatctattgcytagttttccatggaatgtttagtacctttctcaatttttgtaagttatttttatgttaaggatatcaacctttgtctatgacatacgttacaagtatttttctaattttttctcttaatttttgcttataaggcttgtaccatgaaaaagttatttttcttttaattatttatagtcaaatttatcagtc

SEQ ID NO: 238139 - DNA, 278 bp, Homo sapiens
atcttaatttagctttaatttgcatttgaatatctcgtaaatttaaggtccattttaatatctccctggtgaattctctgttcacatctacagcttactttttgcatctattgcctagttttccatggaatgtttagtacctttctcaatttytgtaagttatttttatgttaaggatatcaacctttgtctatgacatacgttacaagtatttttctaattttttctcttaatttttgcttataaggcttgtaccatgaaaaagttatttttctttt

SEQ ID NO: 238140 - DNA, 473 bp, Homo sapiens
aagtgcactcatgtctactttgatttcaaagctagtgaggcaaaaaaaggtaaaacacaagaggtggtggagctcatgttggtgaagatggcggcaggaaaaaaaaaagcatattcgagatccagaagcagtagtggtaacagttcactcactcttaggtacctgggtacagtggtaacatcatgggacatgtggcatgactttggctatttttttttctgtgtggtgtgcaagcatggcttttcagttctctacgaaatgcattgaactactcaatgtcttagtaaattcactttttgctcaaattaggcagagtcagtgtcttgtaatttcagyagaaaaatctaactcactagcctcatacatatagtctgaaaagaaagatatgcaagtaaatagtcaattactatgtaatgttactcaagggtttattaaaacctatttacaaatggtccatatgtcttgcctatacc

SEQ ID NO: 238141 - DNA, 473 bp, Homo sapiens
aagtgcactcatgtctactttgatttcaaagctagtgaggcaaaaaaaggtaaaacacaagaggtggtggagctcatgttggtgaagatggcggcaggaaaaaaaaaagcatattcgagatccagaagcagtagtggtaacagttcactcactcttaggtacctgggtacagtggtaacatcatgggacatgtggcatgactttggctatttttttttctgtgtggtgtgcaagcatggcttttcagttctctacgaaatgcattgaactactcaatgtcttagtaaattcactttttgctcaaattaggcagagtcagtgtcttgtaatttcagcagaaaaatctaactcactagcctcatacatatagtctgaaaagaaagatatgcaagtaaatagtcaattactatgtaakgttactcaagggtttattaaaacctatttacaaatggtccatatgtcttgcctatacc

SEQ ID NO: 238142 - DNA, 584 bp, Homo sapiens
tcctcacaccactggaccgttagaggttttgctgaggtagaaggcccctggatttcaattgaatttattttctaccctctgacatgcaactatcttaccaataagtctagagtagttgttacttctctcttactgggttcaatcagcatatcattcatgctacatcttgtaggaaaaaaggatgatcaagaaccctgcaaaagaaattctgacatagacctggagaatttatagatycctgaggtaggacagtaaaggtgtattgtgggtcttgccagctgaatgcagactgcttgtagtgtaccttatggacagggtaggaaaatggaattttccagatcaatagctgtatacaaggtgctagaatatgtgataatttgtgcaagcaatgaaaccacatctagtacagcagttgcaattggagtcaccacttaattaagcttgtaacaatccactgtcattctccaaaatccatctgttctttgtacaggcaaaataggaaattgagcacggatgtggtgggatcaccaaccctgcatctttcaaattctgcaccagtctctacagtccccccaggaatgcat

SEQ ID NO: 238143 - DNA, 583 bp, Homo sapiens
aaaaacttggaatgagacagctgaatcgccatgaatggataactgaagaatctctagcagattcaattattctgacaacatttttattctgctttatcactgaaactattcagaaagctagaactactgcaggcaggacaccaagacccctggtcatctctacaggatgggaacatttagtaaaaccaaatggaaaacttgtgagctcttccttcccagctgatgctcaggcagtctggacaaaggactgattaatagaagagagctcagcctgaagctctggagttgcttcgtcgggtctagaagggaagtgatttccaggacctctcaatcctgtgtctgtcttcctattcctccactcctcctcttagttgccttttgtgctcagttaacataaagcacagatacacagtgtttcctgaaggacctgactgccattttttttattccactatcagtttctttaatctagctattagtccgttytgaagtctcacattagatatacaatccaacatatacaaatgtaatgtttcccagtaatccactgtgaaaggagagatttatttctagggttgaacat

SEQ ID NO: 238144 - DNA, 604 bp, Homo sapiens
gctgcaagaaggacctgagaagagagggtgatgtttcatcatgtaattgagtgaggcctaggcctctccttttgctgtttctttgactgatagtgactagtcactggaagaggtgttgcctctcctgtagagcaaagagcactctggaggaccctgagggcttcctaactccacttctctctggtgtgaagatttaggctctggcttgatcagcatcctcccacttagctcaagccactgttacagaaacaccagggatttggtctaggacttgctgctcaccacacagaaacctaatcactgagacaacaagtattgccagggaagaaggctttaatccagtgctgcagcagaggagacgggaggtcagtcgcaaattcatttctctgactgactaaagttaggggttcatatagcagggaataaatgtaactacatgcaggaaaacagaaataagggagggatacggaagaggagttggccaacaggaaggagacggtcacttaggcaatcataaygagtgaggagtctgacatctcattgaccagatctggtcatctgataagtttcagttgcttgataggatctggtagaactgacagtt

SEQ ID NO: 238145 - DNA, 534 bp, Homo sapiens
cattcgatgagtaaaaagaatcagaggcctcaaactcaacacgggtagaagaaatttcacaactgtgctaacagcaactttttactacagtaaagggaaaaaaattctgataagtaattcttgctggcacagttaggagaaacatgaatcagatactcctgatgagatgtacaaagtgctccatcatcccatcatgctgggaaacaaaaggctccaatattgaaaacatcatcagctggatcccatggatacaagttaaggaacaatgacattgatgatcgcgcagcacatcctatggaagcagaactggattttctcttttctcctacaacagaccctcttayatgactttggactaagagccacagagaagaaaagaaagacataattataaaattttaactctctgtgctttaagaagagtgttttaagcaagattttctctttttgatgtaaaggcagaacacagcaggattgggaacataccagtatgctgattactagagagcaagctgtgttagtgaaataaaaagc

SEQ ID NO: 238146 - DNA, 520 bp, Homo sapiens
ccaatccaaaatggatcgataacaagatcggtacatttgacaggaaaaaattgtctcagaggcacttgactattgactgtgttagaactgaaagaattgagattggcatggtatattgacaaaggataaactgtgaactaagagaaattgatcataattgtctcagggcttgggtaagaaataaataaaaactacaggctgttaattcatttctaaacaaatgcattacttgtaacaataagtaagataaaataaagttcataatagctaaaacgtcaaatgtgattttgctaacaacaatgataattacaacaccaattttagaaaactagatttagtagaaataacacaaaattggcagtggctaaccactgatagaagaattaaatcttcctmgtaaaatttcagtcatgccaatatttgaccaagaagtctggacttcatgaaacagcaatttcaataacagaagctataatcgttaacattttaattcatgccagaaagttgaataatatgttaa

SEQ ID NO: 238147 - DNA, 520 bp, Homo sapiens
ccaatccaaaatggatcgataacaagatcggtacatttgacaggaaaaaattgtctcagaggcacttgactattgactgtgttagaactgaaagaattgagattggcatggtatattgacaaaggataaactgtgaactaagagaaattgatcataattgtctcagggcttgggtaagaaataaataaaaactacaggctgttaattcatttctaaacaaatgcattacttgtaacaataagtaagataaaataaagttcataatagctaaaacgtcaaatgtgattttgctaacaacaatgataattacaacaccaattttagaaaactagatttagtagaaataacacaaaattggcagtggctaaccactgatagaagaattaaatcttcctcgtaaaatttcagtcatgccaatatttgaccaagaagtctggacttcatgaaacagcaatttcaataacagaagctataatcrttaacattttaattcatgccagaaagttgaataatatgttaa

SEQ ID NO: 238148 - DNA, 532 bp, Homo sapiens
gaagtctggacttcatgaaacagcaatttcaataacagaagctataatcgttaacattttaattcaygccagaaagttgaataatatgttaaattattgttttaaaagctatacaaaatgtaagccatccaatgaaattaatcccattaaactaagatggacataaaaagtgaaatttagctgttctgtatagaatggaggttaattctagaaaagactagactaaccagtgttaattaagttttaaaaatttaaatttatgaacagaaagtcatgaacattctcagggtcaaaacattctataacgaagtgatgttgatctcttgactacatattcaaaaaactcttctccccctttcctggatatttacaatatctaagctctcagtgtctatgtaattcatattctgtaacaacaatagaattaggtcagaatcccagaacaagagcatgggccttggtgtcagtgagactcgaattcaagcccactctaccaccagctgcatcatcttaaacaagtgactgaggttct

SEQ ID NO: 238149 - DNA, 532 bp, Homo sapiens
gaagtctggacttcatgaaacagcaatttcaataacagaagctataatcgttaacattttaattcatgccagaaagttgaataatatgttaaattattgttttaaaagctatacaaaatgtaagccatccaatgaaattaatcycattaaactaagatggacataaaaagtgaaatttagctgttctgtatagaatggaggttaattctagaaaagactagactaaccagtgttaattaagttttaaaaatttaaatttatgaacagaaagtcatgaacattctcagggtcaaaacattctataacgaagtgatgttgatctcttgactacatattcaaaaaactcttctccccctttcctggatatttacaatatctaagctctcagtgtctatgtaattcatattctgtaacaacaatagaattaggtcagaatcccagaacaagagcatgggccttggtgtcagtgagactcgaattcaagcccactctaccaccagctgcatcatcttaaacaagtgactgaggttct

SEQ ID NO: 238150 - DNA, 508 bp, Homo sapiens
attgttactgaatggctttggcttcatagtttcatcaaagatgtgacccctattcagtaagcctgtctatcttgatcatagaactgaatagtaaagatagagctttaccatgaatgtacacaatgtggaaggactcatttccttctaaaaacttttaaataccagaaactctttccaatatgttttctcatctaacccaaaaaaactaaaaataattgattctaaatacaggtttttctcaagaggtacwagagctttcattttgctttaagaaacactttctttaatatggaatctataaatcagaaaaatatgtttaaattcttaaacccaaatgtaaacagcatagccaacatggggacaccaagtcttaaaataacgaagaaggagataaaccatgaccagggatcaaatttgacatgcagccttcaggtaacagtgagcatcatataaatataaatgcaagttgccattttgtattttgaagagaagttttcagatgtgtgaa

SEQ ID NO: 238151 - DNA, 508 bp, Homo sapiens
attgttactgaatggctttggcttcatagtttcatcaaagatgtgacccctattcagtaagcctgtctatcttgatcatagaactgaatagtaaagatagagctttaccatgaatgtacacaatgtggaaggactcatttccttctaaaaacttttaaataccagaaactctttccaatatgttttctcatctaacccaaaaaaactaaaaataattgattctaaatacaggtttttctcaagaggtacaagagctttcattttgcttyaagaaacactttctttaatatggaatctataaatcagaaaaatatgtttaaattcttaaacccaaatgtaaacagcatagccaacatggggacaccaagtcttaaaataacgaagaaggagataaaccatgaccagggatcaaatttgacatgcagccttcaggtaacagtgagcatcatataaatataaatgcaagttgccattttgtattttgaagagaagttttcagatgtgtgaa

SEQ ID NO: 238152 - DNA, 508 bp, Homo sapiens
attgttactgaatggctttggcttcatagtttcatcaaagatgtgacccctattcagtaagcctgtctatcttgatcatagaactgaatagtaaagatagagctttaccatgaatgtacacaatgtggaaggactcatttccttctaaaaacttttaaataccagaaactctttccaatatgttttctcatctaacccaaaaaaactaaaaataattgattctaaatacaggtttttctcaagaggtacaagagctttcattttgctttaagaaacactttctttaatatggaatctataaatcagaaaaatatgtttaaattcttaaacccaaatgtaaacagcatagccaacatggggacaccaagtcttaaaataacraagaaggagataaaccatgaccagggatcaaatttgacatgcagccttcaggtaacagtgagcatcatataaatataaatgcaagttgccattttgtattttgaagagaagttttcagatgtgtgaa

SEQ ID NO: 238153 - DNA, 403 bp, Homo sapiens
aagaaaactccatcctccatcagcacttcaacaaaaagtacctatggctatcccccaacagtgaatagaagactcgtgcttgttttgttgtttttgatccctctaggtattaaacaaacagatatataaygaatcaaaagcaatcagcacagaaagagctattgacccttatgtatttctctccctctaagatactcattttgaaatgaaaaatggttttcttgcatagtgcctccatgtacttggttatattgccatggctaattgacagcagggtctctctaatcagcaaggtaaaggctgccttaaaagagcacccactgtgtgctcctagactggcatgaagacaactgaagtcatgcacattcatttgcccattctaccttccatgctgtgctgggcc

SEQ ID NO: 238154 - DNA, 591 bp, Homo sapiens
cagaagaggagcatttaaacaccacacttggcagcacatcccaactctcaccctccaacaaaggcagatcctagtaagcagaaatgttatttacaggtgagtaagcaaggaatctcaaatacagcaatgagcacatacaggaatcatcaaatagttcaagaaaaccagccccataagagagggcaccaaattcaatcaagagaaccacaaacatctttttgttcaaacatacttgaacaaagagaaggtgactttcaaagaagtatggttgatcctcattgtttgcggactccataactgtgaagttgcttacttgctaaaacttatttataaccccatttcaatactcttgccactttcatgatcattcacagacatacatctagagtggcaaaaaatttgagtcacacaacatgcacattcctagctgaggtcaaataaagcaacactctgctttcttgttttagctctcgtactataagcaagtgtctttttgcggtcattttagtgctrtgtttcacatttttgtgcattttgttggtgatttcactgtttaaatgctcaccctcccctccaccaagcatagtgctg

SEQ ID NO: 238155 - DNA, 605 bp, Homo sapiens
agatgaaaagtagttcactaattgtcaaagctttaaatagcgtttgctgagctataacaacatagacactgaattttgatctagataactatatttgactgatgacaggacaaaatgatgcataggtatatttggagttaggaaaaatgaaagctaaattgacagctttcatagtgagaaaacactagaagaatcaactaagagaatgcaaagtgattgcctccagtgatggggaaaatggtggaaaagraggaggagcactactgttttacataacaaaccttgtagaattatctgactctttaagccatttctagatataactttgaaaacaaaatttaattacaaaaaaggaaaatacataagtgtaaccttgatacatatttttgtttctgttgagttcttggtgttatcaaggcaccttcctgaggagcttgcagctaagggagaaaattggaggttgatgccaagagctggaatagtttcttatttaggctaacaaagaagtttcacagaaaatctgcaaacaagttcattaatttgccaattattctttcattctgtagagatgtctactttttctttgttgataaatgttcgatttc

SEQ ID NO: 238156 - DNA, 626 bp, Homo sapiens
tcatcgtccccatctcagcaaatggcactaacatctattcagttctctaacaaacaaacaaaaatatgtagtagtgacctttcatccctcttttcattgccccagcatccaatctatcctcaagtactataggcactgcctctaaaacttaacacctccttatccagtgcataaaacatgctttgcacatggcccttgctcagaaagtttgctttaatgaattgaatgaataactctcaaattgtcttcagcctrgtattttactctggcttctagatatatacagtgaactcagagtcttcacttagatgttttaaatcttccactgaatatgtccaagacaaaatttataattttattctcaatccaaactgatgctcaccaaccttccccccaaatgcacaaacttgaaatttaactattatcccttatacacttttttcactcttttccaaatttaatccaccagtgagtcctgtccatttggccttctacatatttccagaatccaatcatttctctatcatcactgccactgctttagtccaagctacatcatctcttgtttgggccactgcagtagtccctaaatcgttccccttgtatccattctggcccagtcccaa

SEQ ID NO: 238157 - DNA, 562 bp, Homo sapiens
gctgggccatgtggcaattgtctttttaattttttgcagaactgccatgctgttttacataccaactgcaccattttacatttccaccagcagtgctcaagggttccagtttctccacatcttcagcaacacttgttattttagcccttttttaatagtagccactttcgtgggtgtaaaagktattaaaataatttagacttcagtgccttttgccatacacaatacatagcaactactttatgaaagcttatggttgagatgtattaaaaatgtatattttcataatgtgtttgctttataaagttgatgttagagatcattaatggagcctatgatctgtgctttaggataaaataagacatatcttagggaaaaaaagactatctctgctttgaaggaattctcaatttggtgagcaaaacatctataacaaccaactaaatcatcatatgataagtgttacaagggaagaataaataacatacaatgaaaatagaaaggtaagtgtgactcactttgtgaaagagttgaggaagaagaggttacagagaaaacttct

SEQ ID NO: 238158 - DNA, 614 bp, Homo sapiens
gctcaacagtaatatatggctagttattactctattggacagagcacatatagaatatatccattattgcagaaaatgtcctccagctatattgagatatagttattaaatatgacatgtatacatttaaggtatacaacatgatgttttgatacttgcacacattttaaaatgattaccactatgaagctgattaacatcacatcacctgatgtttgcatatgtgcatggcaagaacatttaagatctactcttctagcaaacttcaagtatgcaatacagcattattaacaatagtcagtatgctgtatattaggtctccaaaacttatttatcctatgtagctaaaacttcataccttgattgacatctccccattggacaacattgtactagactaataggatgctgagacttcacattgttgaactacagggctttaaggagaaaactcctaaaattaaattaaacatacaggattagttatattttatttaccagggcaattagaggacaatgtctcaattagtagtggaaacatggttttccttaatcaggaatgakgtcattattctgataagagcttttgatgtccaacttgagcatgattaata

SEQ ID NO: 238159 - DNA, 518 bp, Homo sapiens
cccttgtctcctcaggacaatgataactttgggagaacggtatctcagttttacttgtttgagttarcattaggctttgcagtataaaacgataaagctaaataagttggattaacagagtagtggcttattactcactaatgtaaaaggaacctggagcttgcagtttttgggtggtatgacagctcccctgtcttcaaggactcagattccttgctttcttttgctctaccatccttagtatgtgacttccaccctcaacattgccttattattcaagatgactatcacatttccagccatcaattcagcattcctggaaggaggaaaaagtaagaggaatggacaaaaatggctattctaaaagcccccaagatgagtgtggttcttccagagcacttggcacagtgacaagcatcatgtagcactatgtgccaagaattgtgcttaatgctttacaaataccatcttatatactctacccattcactatgtgagatggatactactgcccccac

SEQ ID NO: 238160 - DNA, 614 bp, Homo sapiens
gcttctaatcaagaaactcacttcacagcaaaagaagtatagcaatgggcctatgctcatgaaattcacactcccaccatgttccctagcatcctgaagtagctggtttgacaaaatcatggaatggccttttgaagtctcaattacagcaccagctaggtggcaacaatacttcgtaggactggggaagggttcttcagaagcctctatgtgctccaaatcagtgttcaaaatatggtgctgtttttcccattgctaggattcatgggtccmaaaatcaaggggtgaaaatgagagtgacatcactatttcccctagtaacccagtagcaatatttttgcctcatgtttccgtgtcctcatgctttattggcctaaaaatcttagtgccaacagcaagaaaacttccaccaggaaaaacaacaataattcattgaactaaaagttaagactaatgcttggacactggacttctcatgcttctgaatcaacaggcataaaaaagagttactatgctggctggggtcattcatcctaactatcctaactaccaaggggaaattggacaggtactccacagtgcaagtaagaagagtatgtctggaatacagaaga

SEQ ID NO: 238161 - DNA, 618 bp, Homo sapiens
tcatctcaaaaaaaaaaaaaaaagattgataactctagtatgttaaaattacacactcttttcatctaaaagcactataagagagtgaaaaggaaagacatggagtggggaaagaaattttcaacacatacaatgagaaaggaataatacagactatgtaatgagcccctataaattaattagaatacaccaacaactaagaaacaaatacaaatgtgagcaacatttgaggaggtattttaaaaaaataaatattcaaatagataataaatatttttaaatggtgctcaatgtaattaccaatacaggaaattaaaattaaaatcacaatgcaatgctactacacacttacaaggtcagttaatttaaaaataaataaataggccgggcacagtggctcatgcctgtaatcccgcactttgggagactgagatggaaggattgcttgaggccaggagtaagagaccagcctggtcaacatggcaagaaccccatctctaaaaataaataaataaataaaacaatattgattattgtcagggatgtgaaataattagcactctcrtgccctgctggtgagagggtaaactggcacagccgctttaaaaacattttgga

SEQ ID NO: 238162 - DNA, 625 bp, Homo sapiens
tgtatgtgtgtataaaatattttgcatattattatcaaggaagccctctctgataacgtgaaatttgagcagagactagaagaaagtaaagagtagagttacgtaggtggctgagggaaaggcttgacaagtatagagaataggacatgcaaagacactgaggtgtggaatatgcttagcttgttggcagaacagcaagcagaatagtgtggccagaatatsatgagtgagaaacataaaggtaggagacaagatcagagagttttcagtgcatcagatcaagtacagccttgtaggtcattgtaaagtgttttaactttattctgagttagatggaaaatcactgaaaggctttgagctgaggagtgacacgaacaaaattgtattttaaggttgtcattctgcctgctgtgtgacaaatagaccagtcagaagagagactagctgggaggctattgcaacagtccaggtagtaaatgatggtagcataggctaggtagtagtagtggaatgggtgagaaatagctaaactctagatataatttcatggtagagctgacgagttggagaaagaaggatgtcaagaaagacacgaagatttttgttctgagaaactagataaaaa

SEQ ID NO: 238163 - DNA, 583 bp, Homo sapiens
cgtggattcctggttcacgagaaaatgagaaaagtgacattgaagacagtgagctatacaactcttcatagttatatctcaacaagaaggataaaagattggagtggtatacggaaggtgggtaacaagggtaatggtttgcttttgttttgctttgttctacttaaaaattatatatgtataaattttatatatttttatatatattttgcaatttaaacagctagaggagaacacacaattaggcttattggtctcatttaaaaatcgttattgctaacctcaaatgattgctcaatagcatatatgttcaaggctatccccttttctgtccatcttgtctgaggctatatctatagatatatagatagatatagatatagatgtagatatatgcagttcagaggagtgagggtccataggtactagtgcttataaggatgcaagtatgttagtaattgctcaaggaagttttttggcagtgaaatagaaaacaaagtcatcaactaagagtgaggagagtaagaagccgttagacattccaggagagaggagaaggyataaataattttttaagagatct

SEQ ID NO: 238164 - DNA, 443 bp, Homo sapiens
gaaattggaacttatatttaaagagaaagcaaagcataaagttttggaaaatttgcagcctgaccatgtggtagaaaagaaaaacccattttctggggaggaattcaagccagctgcagaaatttgcataagtaaaggggagctgaacattaatggccaagacaatgaggaaaatgcctccagggcatttcagagacctttgaggcagcccctcccatcacaagcctggaggcctaagaagaaaaaacggtttcatgagccaggtccagggccctgctgctctgtgcatcttcaggacacagcaccatgtgtcccagccactccagctccagtcatggctaaaaggagccaaggtatagcttggaccattgyttcagagggtgcaagtgccaagctttggtggcttccatgtggtgtgggcctgcaggtgcacagaagacaag

SEQ ID NO: 238165 - DNA, 460 bp, Homo sapiens
agatgcttcacatccaaggtcaaaaagtggagggcacagaaaactrggccatatgaaagcccaagaataaatgaataaggagagaagtcatcacgtggtttcctgttgctctagcaagaggactcccagatagtcaaatggtcaaccaaaagagagctggctactgtgaaaaggaacccgtctccagaatctaagttgttaatttttttaatttagaaatggccaacctggacatcagacaaatacaaattcagaaggctaacaggattaaatagaggtgccaaagagaaaactgaaaacgtaacttctgattttagtgtaaaggactgcttaaaggaagtagagtacaaagaaggagagggtagttctgtaaaataatatgtctatgaaagaaagaagggtgttcacatttgatactttggtagacttaaagattctacactgtacctcagatcaactt

SEQ ID NO: 238166 - DNA, 460 bp, Homo sapiens
agatgcttcacatccaaggtcaaaaagtggagggcacagaaaactaggccatatgaaagcccaagaataaatgaataaggagagaagtcatcacgtggtttcctgttgctctagcaagaggactcccagatagtcaaatggtcaaccaaaagagagctggctactgtgaaaaggaacccgtctccagaatctaagttgttaatttttttaatttagaaatggccaacctggacatcagacaaatacaaattcagaaggctaacaggattaaatagaggtgccaaagagaaaactgaaaacgtaacttctgattttastgtaaaggactgcttaaaggaagtagagtacaaagaaggagagggtagttctgtaaaataatatgtctatgaaagaaagaagggtgttcacatttgatactttggtagacttaaagattctacactgtacctcagatcaactt

SEQ ID NO: 238167 - DNA, 634 bp, Homo sapiens
gtgatgtaaacaggatacaagtggtgatttgcgaatggttatgacaccttgcctcaggcaaatcctccaagctgaatttgcaggctttttgctcaatgggaaaaatatactacaggtgacaactcaattaaaactcagccatctctgagaaaataacctcatggcatatgcaacgcacagaaataaaaatttgaaccataaagcttaattttgacctygttcaatgtgcttacaatctcggaatttactcttacagcctcggttcatgggctatgatttctgactcttcatcaacttcttaattaggagacattcatgacttcaagctcaacatatttctatttcgtgaaaggctagactgatatctaggccctgaaggttgatgtgcatcaatttctaagatataaaagctttaaaagcttaaatctgggcagattgtgtttttatttcccacttctgtagtattctcatattactgagaatcaaagcagcacacacttaattatctaatgaaacccaagatcttgcagtccatcccccagcctgtgggtaagccactgagctaactgccctaaaaagatccacaaggaaagaaagtggctactagataaggaggaaagaatggtggactagg

SEQ ID NO: 238168 - DNA, 666 bp, Homo sapiens
tatcgtttttttccatttagttttattttataattattmttaggcaggcattccctgctttccaatatttaatattttagctatttttttatactttttgtttacatttaattctgaatactactaaaatttaattgtattacatcatttgatgtagacaattgaaattcctaatttttttcaattacttagtatcgttaattggaatgtctacatttatttgaaatgctagctttattacatgctaagtgttctatatatgaatgggtctctttctaggctttgtatgctattgcattgataggtttatcagcacagaattactaaaattattgtaaaaatataaacactctaatgtctctcagtctgagtgacctcttttgttcttctaattatttttgtaaacattattattatgaagttttcaaaaaacttgaaacttatttaaccttagaagtagtgaagtgactattacaatttagaaaatcttcctccccaccctaaaaattataaaacttttcgcaattgtaatgaccttggacaagatacctaaagcttaactttcatcataatgatcattgaggcatttttttctgcaatattctttagagctatacaaaaagtaatgaccattgtccagaaagtagctctaacatcagtcataag

SEQ ID NO: 238169 - DNA, 573 bp, Homo sapiens
tgtaattcatccagtcacaggataatattctgtgtttgattttcagcaatttcagctttgtagctataagagataagaatctctttcagggcagacctagaagtgttctggtcattcatgtggtacttcagctaggaattcaaatccttgagtttattcttttctttcaccagtttttccagtggcattaggagcaatcagataacctcattatatttattagttttttcagaagtgtttgaaattacagtagtccccacttttctgtgacttcattttccacagtttcagttacccagggtcaatcaactgtggcccaaaaatgttaaattgaaaaatttagaaataaacaatttgtaggttgcataccattctgagtaccatcatgaaatatcatgccatcctactctgtcccacccaggagagaaaccatccctttgtcygcagtatctatactgtatataccacccttccactagttacttagtagccatttctattagattggctgtcatggtatcatagtaattgagtccaagtaattcttattttacttaataatagctccaaagc

SEQ ID NO: 238170 - DNA, 326 bp, Homo sapiens
tgttgatttcattagaaaactgtaatgcctcccttgtcttttccatgcttctggatttgacgccttccctcaaggcatgtccagatgcagggttttccttaaagaccctctcagcctcactaggaaaaaaaccttasaaaggctgtggtaggctcagtcaagggagaaaatgtttcctcaatctttacagttgctattctttggatggggccttttgcttttattttctttgatgcccttgagaatttgcccgtggtataatttgggttcagttgactggcttcatttctggatgatttcagggggacaaggctcagctcagcact

SEQ ID NO: 238171 - DNA, 611 bp, Homo sapiens
cctgttccacttgtagtccttggccagctcaaacaacctgaggtgcatgttggtgataggattaaaagaaccacaagcaaggagaaccacttcagacttctctgaattttccatggtaagaagttgaagttgttgatttcattagaaaactgtaatgcctcccttgtcttttccatgcttctggatttgacgccttccctcaaggcatgtccagatgcagggttttccttaaagaccctctcagcctcactaggaaaaaaaccttagaaaggctgtggtaggctcagtcaagggagaaaatgtttcctcaatctttacagttgctattctttggatggggccttttgcttttattttctttgatgcccttgagaatttgccygtggtataatttgggttcagttgactggcttcatttctggatgatttcagggggacaaggctcagctcagcactcctgagccatgtgctctaaccctgggggctggaacaaggcccacagctttgttctgtggcctgtcaaggttaaatacctggtgtgccagaggggctgaggtgttcctggtttgctggcaacaacactccaatgggaggtgctggcaaaatcactt

SEQ ID NO: 238172 - DNA, 449 bp, Homo sapiens
ttcacgtttttataattgtttaaaaagaactggaaaattattttttgatgcacataaactacatggcattcaaatttcagtgtccataagtaaagttttattggaacacagatatgatcattcatttttgtatttttaacagctgctttcaccttataatggccaagtagagtagctcaacaaagactgtatggcccacaaggcctaaaatatctactatctggtcctttacagaaagtttgtaaactcctgttctagtggaagagttaaactccactgcagcaaaagctggatgggaagcaaacaaaatgcaggatagmataacaggagtgggatgtacttcatacagggggctctggaggggcctctctgaagagatgaccaggtttttaggtcctggtaaaataaaaggagttaaccaggcaacacttcaaagaacagactagcat

SEQ ID NO: 238173 - DNA, 578 bp, Homo sapiens
ggacatgggatttagactacataatttgctaattgtgttttctttaatatcacagtatgatattccatttagaattaggacaaataactttgagatagaagagtcaaaccaaaatcatatctttgtgatatatgtaacttgaccatctgcctactattagaagcccaattctttgctaatrttgatagctgtgataatagtagtaatgaaacaataaacatttttgagtgcatactatatgataggtcctgtgctactagtaaaaacaacaagaaacaaaaaaccttgctttcgcccagtgtattatgactgagaagagaagcagcactaaaggtctttaaaattctgttgcctatgccttatctcccacacccgccaaataatgcaaaattgaaagtagtaaaaaattgctgccaatgcaaagagtaattctaatattaaagaagaacaacccaggaagacacaatcactaacaagcgttaaaaaaaggcagaacaaacccttgtatagaatcttgctgacaagtgctattaaatattaattctacagaccgtggagacatcattaaacaaacatat

SEQ ID NO: 238174 - DNA, 557 bp, Homo sapiens
gacaggagaagaacaggaagcaataggagtacataggaggaatgtcagtcccagaatatggagggtcaaggaagccttttcagaaaaaatggaaagaggcattcaattyggattagacctaggtttgaaaccctgtctagtcatttcatagttgtaagaccaaagttgtttaatccatcaaagcttcagttttcccatctataaagcagagaaaattaaaattaaccattcatatttatttcaatgatcatgtgaattgaagcacttaaaataccaagcatggtgattgacacaaaacagatgctccagaaaatattcatcctttccccttttcctcatccctgttgtaatactaacatgcagtagtggccaggctggcatatagtacacattcaacaaatgtttcttgaattgatttgaatttcagcaaaaccacataacagtcaccttgtgccaacttttctggaatacttgtatttgtaacatcatgtagagtctatactcatgaggtcatttcttacagtgataacatccagataatacttctcatcaatcaa

SEQ ID NO: 238175 - DNA, 557 bp, Homo sapiens
gacaggagaagaacaggaagcaataggagtacataggaggaatgtcagtcccagaatatggagggtcaaggaagccttttcagaaaaaatggaaagaggcattcaatttggattagacctaggtttgaaaccctgtcyagtcatttcatagttgtaagaccaaagttgtttaatccatcaaagcttcagttttcccatctataaagcagagaaaattaaaattaaccattcatatttatttcaatgatcatgtgaattgaagcacttaaaataccaagcatggtgattgacacaaaacagatgctccagaaaatattcatcctttccccttttcctcatccctgttgtaatactaacatgcagtagtggccaggctggcatatagtacacattcaacaaatgtttcttgaattgatttgaatttcagcaaaaccacataacagtcaccttgtgccaacttttctggaatacttgtatttgtaacatcatgtagagtctatactcatgaggtcatttcttacagtgataacatccagataatacttctcatcaatcaa

SEQ ID NO: 238176 - DNA, 586 bp, Homo sapiens
ggcactatgtatacggtaactaattctacagcaccagccactggtgttcgttatcattgaatccagcattgattcatcacttgttggatagaggacaaagttacccatctgaatcttcctatggagttctgttttccaagtactcgcacaagttaaaagttctaatattttctcaggccatgtgctttttctgagggtaaagaatgacactaaagtttttggtttcaaacatgtgaaacccaagctcatagcagttgcagggagaactggataggtgtgaatcaaacggattccctcttcctgctggggccatacctagactactttgttggcctcccttgcagttgagttccagttaatgcaactgcagacagaagtgatgtgtgtgccacttccaggtccacccacaaaatccccagtgctatcttccatgtgttctcttccctcatcttccagtcagatgtagacaccggggaaggttctgagaacaattaggatagcagtgccattaaataagaggaggctgggtctctaagtgaactckctcacctccatcaatctgcattgcactgcaacagtagaaaga

SEQ ID NO: 238177 - DNA, 643 bp, Homo sapiens
tgccatttcaagattgccccaaagttttaaaaaacttatgtatggatattgtatattattaaatgtatattctccaacagctaagaaaatcatataattctttattctgatgaaatggtgaattatactgattttttccaaaatttagtcaattttatagtcatagaataaatgaagcttggtcaagatgcatttttcttttgtatgttttgggatttattgttatttttatataggatatttaatgtctattttcataagaaatattgagctaccttgtaattgaaattttcctttcctaygaggtttttgtctagtcttcgtatcaataaaccatagaataaattgagaagtatttcattttttcttttcttctgaacctattgtttgaaacatataatcaaattagcattgtttctctttaatgcttggaaaaatttaccagcaaagtcatgagagtctgaagttttctttatgagtacaaagttgcctttttcaataattttatatatttcatctaaagttttaaatttattggcataaagtttttcataatattcttttatttttaaatgtctgtaaaacatataggacctgtagttatatcaaccatttcattaattgtactaatatttgtgctttt

SEQ ID NO: 238178 - DNA, 469 bp, Homo sapiens
ccagtttagtattcaggcagactcaaagtgatctttaaggagatcacaggatctgcgtgtgtgtgtttacaaagtgtagctccctcttctcaaatgttctgtccacaaattctagctttttcagggtctttgatatctactttctgtcttttaagttcattaagatcattattttaaactttaggtcctcctctttgtgccwtaacctggaaaatatatcctacaagaaactatgtgaatacaaggaggaacatcatatttagtgtgtaatgaccttaccaggcattatctcacttgagccattattatcatgttgtaagtaacattttttcccatctaaatatgaggaaatggagattctgacaatttacggaacttgaacttgaaaacaaattcatacatgtattcaatgagcattatatttactgaacatctactacgttttggtcttttgaaggtagctattata

SEQ ID NO: 238179 - DNA, 582 bp, Homo sapiens
tattttaaactttaggtcctcctctttgtgccttaacctggaaaatatatcctacaagaaactatgtgaatacaaggaggaacatcatatttagtgtgtaatgaccttaccaggcattatctcacttgagccattattatcatgttgtaagtaacattttttcccatctaaatatgaggaaatggagattctgacaatttacggaacttgaacttgaaaacaaattcatacatgtattcaatgagcattatatttactgaacatctactacgttttggtcttttgaaggtagctattatacattgataagccaaagaagtatgcrtcttatcttgtgagggttttggtttggagagaagactgatagtaaacaagaaagtataaaaggaaatatacatgtatatattgtaaaaagagttgtgaaagacataaagaagccatggaacaaccctggtggggaccttgaaagaaacatgggaacttaggtgggtaaggtggaagattgtgttttacatgtaagggatatttaaacagacatctgaaggagtctagggagctaaccatgcatgaagagtagggaaa

SEQ ID NO: 238180 - DNA, 607 bp, Homo sapiens
tggcacatatataccatggaatactatgcagccataaaaaagcctgagttcatgtccttttcaggggcatggatggagctggaaaccatcattctcagcaaactatcacaaratcagaaaaccaaacaccatatgttctcattcataagtgggagttgaacaatgagaacacatggacacagggaggggaacatcacacaccagggcctgcagggggtggggggttaggggaggagaaatacctaatgtaggtgatgggttgatgagtgcagcaaaccactatggcacgtgtatacccatgtaacaaaactgcacattctgcacatgcaacccagaacttaaagtataataataaaaaactaatattaaagtttaaggttttctccttggccttttggtctgtttcccacctcacactccaacctacagatattgctctttctagtttccgacaactgaacttcttcaggcttcaccctctcatgtaacactctgtggtttaggaatgttttctttcttgcacaaattccctttaacaatggaactttaaaaatcatacaaagctaagagtgcaaaaagcttattgggaaagaaaaaaaacccaaaa

SEQ ID NO: 238181 - DNA, 562 bp, Homo sapiens
ttgctatcttttattcaagaaattgtttagaaaagccccatgattcttctccgtaggccaccttgtctttgtgaagtgctctggaagtaatctagcatcatgaagtattactaacaaattattaaagaaaggctacttagtgaagcaaaaaaaaatgaggggactaagcttcataaaatggggaaaaacaaatttaagtttcgattaagaaaaataatggataaatattagaaaaatataaggtaaagtgatraaggacaatttcatttgggtcagttttgctgttgtggtagtgttggtggtggtggttgtttttaactttaacattagaaagaagatgaggagagaagtaaaatttgatttggaaagcaaaaattgaaacagagcattcatttggaatttgtaaatttttattctatcagagtcattggtgttctctgcctttctaattgtacacaatttgagcagaagaagaaaagcaagtcttctttagccatttatgagaatgtatttccaccagtgtgatttccactccagctgtcacgagctgggaggatatatt

SEQ ID NO: 238182 - DNA, 554 bp, Homo sapiens
ggtggtttatattcctttgaaatcctctgcagaatgtaatacagtgaagttttaattaattggaacgtatggactatgatgattaacaaaacatcattttgattcttaacatttactgaaactttttctttattttttgctaccttgaccttaatgataaattttaataaaaatatatttaatctccctttgatgactaaggatactatatatcctcacacttattgctctcaatattatagctgaatgtatattgattccaagataacctaagaagttrcctatattatcaatgaattgtgaattttttttattaaaggtggataagaatttcaaagaaattgcaaagccattaagtcattgttaataaaactactgatttctctagggaaaatttatcagtgggctttgttcttggtttgtgattcttgggagctgctggagccagaaaaaacaaaatgagtaggcgaacatttccaaaagtagggcttttaaaagagcaattcttctctgtttcttgtctttgtaagagacagattgttcttataaaattg

SEQ ID NO: 238183 - DNA, 540 bp, Homo sapiens
tgctccttgacacttacccaaaggagttgaagacttatgtctacacaaaamcttgcacatgaatgtttatagtagctatactcataattgttaaaacatggaagcaaccaaaatgtccttcagtaggtgaatgataaataaacttccgtcatccaaacaacagaatatacttcagagctaaaaagaaatgagctatcaaaccatgaaaagacatggaggaaaggtaaatgcatattagtaagtgaaaagagtctatctcaaaagaccacatatgaagaaagatacactttggttgggggaaggagagtaaaatgaacacctgacttttcctcagtcccatcatcagacttagctcattgaaatctggtgctagcccagcccccaaatatcagactccaggctggcatctacagaccaagcctttaggccactttcacagctaggccagcccccacaacctcaggctccagaatagtagctgtggccctagtattcaggcctgccacaaagtcaggttagccctggtatccccaagggtag

SEQ ID NO: 238184 - DNA, 540 bp, Homo sapiens
tgctccttgacacttacccaaaggagttgaagacttatgtctacacaaaaccttgcacatgaatgtttatagtagctatactcataattgttaaaacatggaagcaaccaaaatgtccttcagtaggtgaatgataaataaacttccgtcatccaaacaacagaatatacttcagagctaaaaagaaatgagctatcaaaccatgaaaagacatggaggaaaggtaaatgcatattagtaagtgaaaagagtctatctcaaaagaccacatatgaagaaagatacactttggttgggggaaggagagtaaaatgaacacctgacttttcctcagtcccatcatcagacttagctcattgaaatctggtgctagcccagcccccaaatatcagactccaggctggcatctacagaccaagcctttaggccactttcacagctagrccagcccccacaacctcaggctccagaatagtagctgtggccctagtattcaggcctgccacaaagtcaggttagccctggtatccccaagggtag

SEQ ID NO: 238185 - DNA, 540 bp, Homo sapiens
tgctccttgacacttacccaaaggagttgaagacttatgtctacacaaaaccttgcacatgaatgtttatagtagctatactcataattgttaaaacatggaagcaaccaaaatgtccttcagtaggtgaatgataaataaacttccgtcatccaaacaacagaatatacttcagagctaaaaagaaatgagctatcaaaccatgaaaagacatggaggaaaggtaaatgcatattagtaagtgaaaagagtctatctcaaaagaccacatatgaagaaagatacactttggttgggggaaggagagtaaaatgaacacctgacttttcctcagtcccatcatcagacttagctcattgaaatctggtgctagcccagcccccaaatatcagactccaggctggcatctacagaccaagcctttaggccactttcacagctaggmcagcccccacaacctcaggctccagaatagtagctgtggccctagtattcaggcctgccacaaagtcaggttagccctggtatccccaagggtag

SEQ ID NO: 238186 - DNA, 537 bp, Homo sapiens
tgctcaaaaatttgaagaagagggaatattttggaagtcattttgtgaggacagtgttaccccaatacaattccagaaagagacattgcaagagaagaacattatacgtcaatatcactgattaacatagatttaaaaattatcacaaatactagcacattaaaaggatcacatatcatgaacaagcaggatttatccctggattgcagggatggttgttacacatatgtacatcaataaatggaatacaccgcataaacataagaagaagaaaaaaacacagtcatctgaatagatgcagaaaaagtgtttgacaaaattcgacatcctttcatgacaaaaataaacttttaaactttcaacaaattaggtatttaggaatgtatctcaacctaataaaggccatatrtgacaggccaacagctaacatcatatctcaatggtcaaaagctgaaagcttttctctaagattaataaaagacaaggaggcccacctcacaacttctattcaataggatagaagtcctagccagagca

SEQ ID NO: 238187 - DNA, 554 bp, Homo sapiens
ctcccctcttccccccgctcttccctgccctgctcaccacactacaggcaacaagaatgagagaactgtggcccttctgggagcccagaccccagggctttctgagccagggctgtgacatgctgtaacactctctttgggactttgtggttactggtgtctccgagcttttggttggcaccatggtccttggtacctgcaatggaagctgcttgtggtacacctggtccaagccacagcctcgcacagagccagcacctgtgccagcttctggagctgcctgccctgtcacagcagccaacatgcctggctgtgcacagtagccaaaccccacacttactcrttcacacacccctcaccactccatgcctggttcgcccttggcaggcatgggatccaggccagtagtgcaagcggagtgcagcccactggaccaagagcccagtggagtgagcaaaacctgagcagaggtgccgctggccacagaggtttctggctggcgaaatgatacattaaggatcctgtggaaaatatatatttattacaatataata

SEQ ID NO: 238188 - DNA, 619 bp, Homo sapiens
  misc_feature (1)...(619): n = A,T,C or G
agggatgtctgctatctgattattgataaattacactactgttgattgttttaagagactctactactaagtagagcccaccccgcttctctgagacgaaacctgtgttttttggttggtttgtttttaagagatggggtcttgttctgtcacctagggtggagtgcagtggcacaatcacagctcactgcagccctgaactcctgggctcaagtaatcctcctgcctgagcctcttacgtagctgggattacaggcatgagccactgagccctactttttttttttaaagcaatgaggtcttgctgtgttgcccaggctggactcaaattcctgggctcaagtgatcctcccacttcaccttcctgagcagccggaactacagatgttggtccactgcacctggcagaaaagaagttttgataggggcagaaatgaaaaaggagaaaacaggtgagttttaaggtgcagggcactttagggtactgggtagccctaggtagctaaaggttgcatgaaggccctgggcgttygcagatggggtagaagccagccaaagcctaactacttgttttgaaagtttcttgaacacaggnnnnnnnnnnnnnnnnnnnnnnnnn

SEQ ID NO: 238189 - DNA, 444 bp, Homo sapiens
gtggctggagggccatgagcaaaggagaatggcgaaagagtgaaccccaggttagcagggatccagatcacacccagctctcttaagcaactgtgttagtcggctggggctaccataacaaaataccacgggctgggtggttaaacaatagaaatttattttatttattttctcatgactggaggctggaggtccaagatcaaggtattggcaggtttggtttcttmtaaggtctctctccttggcttacagatggccaccttctctcagtgtctccatgttaccgtcggagagtgtccaggttcttggcattctgaacaaagaattggacaaaatggacaaacaaagccaagaaagaatcagcaataaaaagagagatttattgcaaacaaaagtacactccacagggttggagcaggccaagcacagggactcaagagccca

SEQ ID NO: 238190 - DNA, 458 bp, Homo sapiens
tgtggctggagggccatgagcaaaggagaatggcgaaagagtgaaccccaggttagcagggatccagatcacacccagctctcttaagcaactgtgttagtcggctggggctaccataacaaaataccacgggctgggtggttaaacaatagaaatttattttatttattttctcatgactggaggctggaggtccaagatcaaggtattggcaggtttggtttcttctaaggtctctctccttggcttacagatggccaccttctctcagtgtctccatgttaccgtcggagagtgtccaggttcttggcattctgaacaaagaattggacaaaatggacaaacaaagccaagaaagaatcagcaataaaaagagagatttattgcaaacaaaagtacactccacagggtkggagcaggccaagcacagggactcaagagcccagctacagaatttt

SEQ ID NO: 238191 - DNA, 386 bp, Homo sapiens
tctagaggttttccattggtcacttggtgtacaacccatgcaaatgaagtagtggcccrcaatcagtgaagtgaagttacaaaggttacaccatttgcaaacgtctgattggttgtggaaagcaaccattcagagactaaaatgaagttacaaagttacgcttttatgcaaaggaagacaaggcctgcaatcagtctgaatggttgtggtaagcaaccaatcagaagctgaagtgaagttacaagttacactcctatgcaaacatctgattggtttcagaaagcaaccaatcagaggtactttcaatattccatctgccacgcataaaaagtggggggcagtttgcaaagggagtagcttccagtccttttgttacttaggtgtgg

SEQ ID NO: 238192 - DNA, 525 bp, Homo sapiens
aacagtattgcattagtatatcaatcacatcaaggtgtccaagtaaaaatgtactcaagtttcaacctcagataaccagaacatcttyctcctcaatgagcaaagacttcttgggtaaggagagcagggtctctgttggatcaaatcaatagtagaggttcccatggcccatgaaaataatttgacactttaagaattaagaattatgcagaattctagccactagtgtcaaggaactaaatcaggatgatttaagaggggaatttatttttgtaattgtctatgaaaatctaattttacttttaaaaagaaaaatcccttaaaattccatggaataagttattgtgaatatttaacactgtgatttttatcacatatttgtaatcaacttttaaatttaaaattcagacaaaattattagaagagcacagaaagggagtcaggagagacattttataatttatcctggtccacaaataaatatatgtgcatgcacattcacagcagtgttacaacagccaaagg

SEQ ID NO: 238193 - DNA, 525 bp, Homo sapiens
aacagtattgcattagtatatcaatcacatcaaggtgtccaagtaaaaatgtactcaagtttcaacctcagataaccagaacatcttcctcctcaatgagcaaagacttcttgggtaaggagagcagggtctctgttggatcaaatcaatagtagaggttcccatggcccatgaaartaatttgacactttaagaattaagaattatgcagaattctagccactagtgtcaaggaactaaatcaggatgatttaagaggggaatttatttttgtaattgtctatgaaaatctaattttacttttaaaaagaaaaatcccttaaaattccatggaataagttattgtgaatatttaacactgtgatttttatcacatatttgtaatcaacttttaaatttaaaattcagacaaaattattagaagagcacagaaagggagtcaggagagacattttataatttatcctggtccacaaataaatatatgtgcatgcacattcacagcagtgttacaacagccaaagg

SEQ ID NO: 238194 - DNA, 525 bp, Homo sapiens
aacagtattgcattagtatatcaatcacatcaaggtgtccaagtaaaaatgtactcaagtttcaacctcagataaccagaacatcttcctcctcaatgagcaaagacttcttgggtaaggagagcagggtctctgttggatcaaatcaatagtagaggttcccatggcccatgaaaataatttgacactttaagaattaagaattatgcagaattctagccactagtgtcaaggaactaaatcaggatgatttaagaggggaatttatttttgtaattgtctatgaaaatctaattttacttttaaaaagaaaaatcccttaaaattccatggaataagttattstgaatatttaacactgtgatttttatcacatatttgtaatcaacttttaaatttaaaattcagacaaaattattagaagagcacagaaagggagtcaggagagacattttataatttatcctggtccacaaataaatatatgtgcatgcacattcacagcagtgttacaacagccaaagg

SEQ ID NO: 238195 - DNA, 527 bp, Homo sapiens
aattactagtatgagagataaatgcctttaatctaggcagtcaacagcactttcttatagtgtatttccatgtaaacttagatgtaaaacttaagaggtctttatcaatatcaggtatttgtgttaacattttaaaggtgaatttgaggacatgcataaaataaggtgatctattgagagagacagccccaaaatacaaacccaaatgctgtmatctcataacttggcgacagaaaaagagggtaggtagttcactatcttttaactactaccagcacagaaaaataaggatacagcagtttagcttggtcatctctttaaagaaatcctattttaatgctatgcaactcttcccaaggtaagatgcaaatacacggtttgctcatcttctttagcccaagaattacaatgtattttggagaaaaactgaaaaggcattctgtgctcatcatagttaacatcagtgtgtcatgtgatactgttgcttactgacttctctttgctctgctttttattccaagatgcta

SEQ ID NO: 238196 - DNA, 571 bp, Homo sapiens
taattgactactggacatgacagcagcttttagattgccttctgtgcttctggcatttccaatgttcaatccatacttcacacttctgacagtgactcgaccatgtcattgccctacttaaatgttttcaatgattccccactgccttcrgcattaaagtcctcagtatgatatataatgaacttcaatatcgagtccaatctcatctcttcaaaagtaactgtggtcctctgaacaagtcatgtgtgctcctgtgctttcgaataggctgttccatatttctggaaaactctacctagcatgcctgttatgggattaattacgtatgtttcacgactagctcagctggcaatatttattgaggacattttatatgctggcactaggttcctacagtcatggagtttacatttgtttgtgtctctttccaatgggagtagggaggcaaatgaataaacagtgaactggtgaagcagtaataaagcttatgattaaaatgaaacaagttgatgacagtgactacttttttttttttttaactgaatgactaaagacttctctgaggaaggaa

SEQ ID NO: 238197 - DNA, 571 bp, Homo sapiens
taattgactactggacatgacagcagcttttagattgccttctgtgcttctggcatttccaatgttcaatccatacttcacacttctgacagtgactcgaccatgtcattgccctacttaaatgttttcaatgattccccactgccttcggcattaaagtcctcagtatgatatataatgaacttcaatatcgagtccaatctcatctcttcaaaagtaactgtggtcctctgaacaagtcatgtgtgctcctgtgctttcgaataggctgttccatatttctggaaaactctacctagcatgcctgttatgggattaattaygtatgtttcacgactagctcagctggcaatatttattgaggacattttatatgctggcactaggttcctacagtcatggagtttacatttgtttgtgtctctttccaatgggagtagggaggcaaatgaataaacagtgaactggtgaagcagtaataaagcttatgattaaaatgaaacaagttgatgacagtgactacttttttttttttttaactgaatgactaaagacttctctgaggaaggaa

SEQ ID NO: 238198 - DNA, 571 bp, Homo sapiens
taattgactactggacatgacagcagcttttagattgccttctgtgcttctggcatttccaatgttcaatccatacttcacacttctgacagtgactcgaccatgtcattgccctacttaaatgttttcaatgattccccactgccttcggcattaaagtcctcagtatgatatataatgaacttcaatatcgagtccaatctcatctcttcaaaagtaactgtggtcctctgaacaagtcatgtgtgctcctgtgctttcgaataggctgttccatatttctggaaaactctacctagcatgcctgttatgggattaattacgtatgtttcacgactagctcagctggcaatatttattgaggacattttatatgctggcactaggttcctacagtcatggagtttacatttgtttgtgtctctttccaatgggagtrgggaggcaaatgaataaacagtgaactggtgaagcagtaataaagcttatgattaaaatgaaacaagttgatgacagtgactacttttttttttttttaactgaatgactaaagacttctctgaggaaggaa

SEQ ID NO: 238199 - DNA, 489 bp, Homo sapiens
actgcttttatgcttttgttttcccagagcctgactttaattagcccgaatttggctttaagctttatgtggattcaagctaatggaatcttagctctttttctttggtagtcacaagataatgtagtgagctttgttcttcccagcaatatggtctcagcttcattttctggtttatacaaactaagaatgactttgaactatgtacacagtcacacactaccattactcctttaaatgactcctgctctaaagtcttgggtttctctayccacagtgtgaccatataatttgctgtcaaaatggactctgagaataaaaaatgatgcttatgataattgtaggcaacaggtgtaaaacaggttttgtggccaccctctctatccagcagtttcctgaagagtttcatctgctacaatgacttctttcttggctttctgctgtcctggccaagctagcccctcacactgtcacttccattgtggtttt

SEQ ID NO: 238200 - DNA, 332 bp, Homo sapiens
cttcttcatttgcagctgcagattgttcctcaacttgcttggcatctatgcygcaccctaatgagaaaaataagagaaaattcaaaatatttgattgcttctggcacttgagggagtctggtaatggccatgtgtactactccgtgagaaccagaaggcagatcacagtctggatgaaaaccaatggcatttatatcacagaacaaatgtcacagagaagaaagaatcttgattataaacatgcgatttgagtaccaataggggatggaagataagcagcagcaatggcaaatgagagcaaagcagttaagaaatggatcttgcatggctag

SEQ ID NO: 238201 - DNA, 388 bp, Homo sapiens
gaattcttttgtagggatttcaaaataacttggttccctacagaaaggaaaaagtacttcttcatttgcagctgcagattgttcctcaacttgcttggcatctatgccgcaccctaatgagaaaaataagagaaaattcaaaatatttgattgcttctggcacttgagggrgtctggtaatggccatgtgtactactccgtgagaaccagaaggcagatcacagtctggatgaaaaccaatggcatttatatcacagaacaaatgtcacagagaagaaagaatcttgattataaacatgcgatttgagtaccaataggggatggaagataagcagcagcaatggcaaatgagagcaaagcagttaagaaatggatcttgcatggctag

SEQ ID NO: 238202 - DNA, 468 bp, Homo sapiens
tcaacacagaaaaataaaacacctttcctccctcagaacactaacagaacatattctggaatttagaaatttaacattcatctatcttcaaaactcattttgttataccaaatgaaactaaataatagagtaaatacttgtttagactaatattatattattaatctcaattactagattttaaaaaattatttaatgattgaytatgccataattaattccatatatctcaatcagaaaagcaattggtgataatctgcttatgttcttaaggtattttatgactgtgttaccttaacacaatatgttataagggatacttatacttcatccagaataaatgttcttttcattcttctgtactaaattcaatgaaatattaaacttatttgagatgacaaggactataattataacagctcattctgcttaagacatccatctaacctagtctgttcaagcatgtca

SEQ ID NO: 238203 - DNA, 468 bp, Homo sapiens
tcaacacagaaaaataaaacacctttcctccctcagaacactaacagaacatattctggaatttagaaatttaacattcatctatcttcaaaactcattttgttataccaaatgaaactaaataatagagtaaatacttgtttagactaatattatattattaatctcaattactagattttaaaaaattatttaatgattgattatgccataattaattccatatatctmaatcagaaaagcaattggtgataatctgcttatgttcttaaggtattttatgactgtgttaccttaacacaatatgttataagggatacttatacttcatccagaataaatgttcttttcattcttctgtactaaattcaatgaaatattaaacttatttgagatgacaaggactataattataacagctcattctgcttaagacatccatctaacctagtctgttcaagcatgtca

SEQ ID NO: 238204 - DNA, 468 bp, Homo sapiens
tcaacacagaaaaataaaacacctttcctccctcagaacactaacagaacatattctggaatttagaaatttaacattcatctatcttcaaaactcattttgttataccaaatgaaactaaataatagagtaaatacttgtttagactaatattatattattaatctcaattactagattttaaaaaattatttaatgattgattatgccataattaattccatatatctcaatcagaaaagcaattggtgataatctgcttatgttcttaaggtattttatgactgtgttaccttaacacaatatgttataagggatacttatacttcatccagaataaatgttcttttcattcttctgtactaaattcaatgaaatattaaacttatttgagatgacaagractataattataacagctcattctgcttaagacatccatctaacctagtctgttcaagcatgtca

SEQ ID NO: 238205 - DNA, 506 bp, Homo sapiens
taaggtgttatgagttgtttgctatataactgaactgcttgtaacaaatggcattttacttgaatttagacagaaagtgacctcagaagaacaagtttgttgaaactagacaataatcaactagggaagaacaaaaccagtctgatcagaaatggctcattaagactaaatgtaaaagacaaagctaaagtaaattttcacatgagtagctattttccaatttttttccagcccaaggacacaaaaactagttcttaacagaactaacatwtttttgtttgagcaaatgtagtaatgcctattcatttaaaaacttgtttctgtttgaatgggattatttatgtaaggcattttataacgtgcctagaattgtaaattattatatggtgatacagccacatttgatttaaaaaatttttcttttaattcgttttcgttgttatgctgcagaagaaaatgcagacaaacatgaaataataaaaatattataaggtaaactacacagt

SEQ ID NO: 238206 - DNA, 495 bp, Homo sapiens
ataactgtcaatttatactgttttttttttatcctatcaagctcaagaatcttgaatgtctcattattattattcaaaattataagtttcacagcttaaccttttgagactttgtgtgttctggcccttttcttacgtgcgtatctatgtgtcccattatagtatytaccaccatttacaagtttcttgaccaccatgagcttttcatccttctgtaccctgcgtcttcctccccttccttcctgcttcaaggtcccaccaacctcttcataaagcttcctccacttgaccgcaccacaaagggctgtgccacatgcgtgcattttctcttcccttcccccatgacatatacacgtttcttccctggtaactaaagtaatcttcatttcctggatagtccctttgctttgaaacatctgtgccgttttgtctccttcatctctccttggatttgcttgccacatctctgcctgaaaggattctaacttggaaagg

SEQ ID NO: 238207 - DNA, 495 bp, Homo sapiens
ataactgtcaatttatactgttttttttttatcctatcaagctcaagaatcttgaatgtctcattattattattcaaaattataagtttcacagcttaaccttttgagactttgtgtgttctggcccttttcttacgtgcgtatctatgtgtcccattatagtatctaccaccatttacaagtttcttgaccaccatgagcttttcatccttctgtaccctgcgtcttcctccccttccttcctgcttcaaggtcccaccaacctcttcataaagcttcctycacttgaccgcaccacaaagggctgtgccacatgcgtgcattttctcttcccttcccccatgacatatacacgtttcttccctggtaactaaagtaatcttcatttcctggatagtccctttgctttgaaacatctgtgccgttttgtctccttcatctctccttggatttgcttgccacatctctgcctgaaaggattctaacttggaaagg

SEQ ID NO: 238208 - DNA, 495 bp, Homo sapiens
ataactgtcaatttatactgttttttttttatcctatcaagctcaagaatcttgaatgtctcattattattattcaaaattataagtttcacagcttaaccttttgagactttgtgtgttctggcccttttcttacgtgcgtatctatgtgtcccattatagtatctaccaccatttacaagtttcttgaccaccatgagcttttcatccttctgtaccctgcgtcttcctccccttccttcctgcttcaaggtcccaccaacctcttcataaagcttcctccacttgaccgcaccacawagggctgtgccacatgcgtgcattttctcttcccttcccccatgacatatacacgtttcttccctggtaactaaagtaatcttcatttcctggatagtccctttgctttgaaacatctgtgccgttttgtctccttcatctctccttggatttgcttgccacatctctgcctgaaaggattctaacttggaaagg

SEQ ID NO: 238209 - DNA, 652 bp, Homo sapiens
tcatatttagagtaattgaaacaaatataacaaggagtgaggggctgttttttctaggcagtataataaatgctttacctgcactgtcccttttaatgctcacacctcattaataagctgttactcctgcattagagatgaaggaactgaggcagcagcccagttgggatttgatcaacacgtatttgacttggaaatccaaactgtttataaccattctccacgggctgtcacccagcaaacaactggtagagcctagacaaaccaagtgacttgtattcaccctttacagctttgtctcgtgaccacagacccgaagaggycaccaggcccttcctctgcttttgagtagaacttctagagctggggatcctgacatttctcctagtaagcttctctactgatgacaagcaatgaccaaatgctaagaatgtctttgttatgtgaaacagattctttgaaagagataatgaactgtctccttgaaagctggatgttgggtgcttcaggaagaatgctatgaagaaccacgtcggtttatgagctgactgtactctccacttgttttaaagaggtgaaacccagggctgccaatagaaactctggtgactccacatcagagctacgtgaccagtgagctgcctcccaaggt

SEQ ID NO: 238210 - DNA, 439 bp, Homo sapiens
aatccatcctgatgtcattctttcgagtctaagggtcattatcttttctagttgatacccaaccttcacttgagaaacttgagagtctataaattcaaattcaactttcaactctgaaatctgtgcaattaacttttgtgtcttatyttcagcaaacaagagaaagaaatgatattctttcaggactggcctggaagcttcttaattatctatgactcaagctcagaacttaaagaagcaggcttttttttttctttctttcttttttccttatgcaagtgctttagggcattcagagggagccattccatactatcacccgtgtagtcatcgtagctgctgcagtagtcaaatgcagaggacatttggttcttccaaggctcttgctttagtaagcacttgaaaagcaaccacaggtaatagttttataaactgtgat

SEQ ID NO: 238211 - DNA, 544 bp, Homo sapiens
cctctgccaataatgcccttccagcttccttagtgagtctccatcctgcttccatacttagcacaaatgtttcttccactatgagcccttagcagagatgaacgttctttcttctgtgtttccacttagggtgtacataatcctcctccataccaaccatttttactctaattatctctttctatggctgccttactccccagacaggagtgccatccgttatggccagtgttctacgatcctgtatctacagtgcctagaatatggcagatgcttaccaaaaaatacgtttgttgaacaaatgaatagtcatctctgttataaagccaacacagatacactcagggatttctatgttttttktttttttttttttcaaaaaaaaatgacagaatcatgttttaccttccatatctttgcttttgcagcagaatttaaagattaccagtttatcaaggacaagaacaaaatgagctcgtgacacacaacctcccaatggttggaccaggccattgggttcagatatatgtgtgttcctgtgtct

SEQ ID NO: 238212 - DNA, 642 bp, Homo sapiens
tcatgtgaaataattggaccataattgttttggaaaggaacaatctgcttttttgtcgatactattttgraaaaatattttacttctctagtcaccagcctttctgtttgaagcttacaggtcttagaggtaaaactggtcaagcaacatgattacagttcagcagatgaggcacccatgctatattgaactaaaagcatgtaactgggttttaggtgtgtattttttttttttcttttgaggcagagtttcactctgtcacctggtctggagggcagtggtgcaatctcggctcactgcaactccacctcctgggttcaagcgattctcctgcctcagcctcccaagtagttgggattacaggcacctgcctctatgcccagctaatttttttttttgttgatgtgtatttgtagtaggcagggcatggtggctcatgcctgtaatctcagcactttgggaggccgaggagagtgaatcactaggtcaggagttcaagatcatcctgaccaacatgatgaaactcagtctctaataaaaataggtgtgtatttaaaaaggattaatagctcatttttacctggatagaccagccctgacatccagaatttttgctaagacttaggccatcacccaactggc

SEQ ID NO: 238213 - DNA, 642 bp, Homo sapiens
tcatgtgaaataattggaccataattgttttggaaaggaacaatctgcttttttgtcgatactattttgaaaaaatattttacttctctagtcaccagcctttctgtttgaagcttacaggtcttagaggtaaaactggtcaagcaacatgattacagttcagcagatgaggcacccatgctatattgaactaaaagcatgtaactgggttttaggtgtgtattttttttttttcttttgaggcagagtttcactctgtcacctggtctggagggcagtggtgcaatctcggctcactgcaactccacctcctgggttcaagcgattctcctgcctcagcctcccaagtagttgggattacaggcacctgccwctatgcccagctaatttttttttttgttgatgtgtatttgtagtaggcagggcatggtggctcatgcctgtaatctcagcactttgggaggccgaggagagtgaatcactaggtcaggagttcaagatcatcctgaccaacatgatgaaactcagtctctaataaaaataggtgtgtatttaaaaaggattaatagctcatttttacctggatagaccagccctgacatccagaatttttgctaagacttaggccatcacccaactggc

SEQ ID NO: 238214 - DNA, 473 bp, Homo sapiens
tggtaaaatagtgatagttcaataactgataactaactataataataattaacatgtaacagtgactgagtttccaaataactgtatgatgtatgtatttttagtgcctgtattttgtacatgagtcttttacaaataaagtgatttgctcagtcacacaaaggcagaggcaggactcagaactatacttacctgtttccagaatcctagctcatcctacaactggccatttacatagttttaattggttttaaaaagttttttttttacattagaaatcatttctgtaataacattttatcttattgcatcctgttttattacagtgaaaggayctgcttacttattatctccccagctacactggaattcttccacagcttacatgaggtcatcagcctctggccatgtctggaaaacagcaggagctcaactaatgtttattaaactaaactagatctaaaatggataca

SEQ ID NO: 238215 - DNA, 588 bp, Homo sapiens
ccacctgccttggcctcccaaagtgctgggattacaggtgtgagtcactgcatctggcctaaaatttatttttttgatgaaagaaataactgtacataatttaaaaagtcaatagtaccatagggattataattttaaaaagcagtcctctgtcccaactctttgataatawtgctgataggacaataatgataaaataagtattttgggaaagtgaactacattgcattccatgataatatttgcttcgatgtacagattctcttggacaatacttgcgttcctcccccttcaccacaatttttcttagttttctctgacagaactgtaaaactgttctcaacataattgaatacactgggttcctcctactcccaagttccctttggggacataactcccagagatgagagatacaatctaattgcagtaggggctactctctgctgatgcattctccaggactgttccacagttgtcatttattatctataaatgatttttgcttcttttctgtgtagaattcaccttcctggatcccatgtcttctttcttcgttttcttcttgctttctgtaaagcatatagt

SEQ ID NO: 238216 - DNA, 588 bp, Homo sapiens
ccacctgccttggcctcccaaagtgctgggattacaggtgtgagtcactgcatctggcctaaaatttatttttttgatgaaagaaataactgtacataatttaaaaagtcaatagtaccatagggattataattttaaaaagcagtcctctgtcccaactctttgataatattgctgataggacaataatgataaaataagtattttgggaaagtgaactacattgcattccatgataatatttgcttcgatgtacagattctcttggacaatacttgcgttcctcccccttcaccacaatttttcttagttttctctgacagaactgtaaaactgttctcaacataattgaatacactgggttcctcctactcccaagttccctttggggacataactcccagagatgagagatacaatctaattgcagtaggggctactctctgctgatgcattctccaggactgttccacagttgtcatttattatctataaatgatttttgcttcttttctktgtagaattcaccttcctggatcccatgtcttctttcttcgttttcttcttgctttctgtaaagcatatagt

SEQ ID NO: 238217 - DNA, 621 bp, Homo sapiens
ttccaaagtacttgtcaaagccaaaataaaaatgtggaaacaaatcttgaaatttaatgttttagtttggaagaaagaattgcatttcagggcatacacacagaccaagtggtctcaggtttgtccaaagaacagagagaagattagaggttttacaaaaatagaaatgttatgtatcactctcgaagaaagttcattggcattaattagggattgaggaggtagctagcttcaactggtaagcaatggtggtgggcaaaattattcctgaatttgcagcaagttatctcaaaagctataggtaaaactggtttcaggttgcaatagtttaaacagtcaggcttgcagagaagtactttcttggagcaatattttgtaccctgagtgatttttccccatggcttctcaaatttttcttctgggtcttctattgaatttttaacttacgttattaaattttaaaatgccatattcccttttaattctttgcatattcttgtaaaatggctttctatttttatatcacaataaaatttattttctcatctgtatgaagatacacattagtcttttaygtttttaaaattgctctctaaactttttctgttcattgaagttttt

SEQ ID NO: 238218 - DNA, 412 bp, Homo sapiens
agtgctgtgggtttcattattcatcaagatattaaaaatgcatgcactgggtcttggagtcttttcaattcaaatttagataggaatctagatacaaacagctgtttttcctccttgtatctaaacaagccttaaaactaagaggtttaactacatatgtcccaaataaagaatatggtatattctcttagcttttagtattttaaggtaattttattcaaaatcttatataactatatatacttacattaaaacaasgtaaaaaaacatttactgtaaaattatttctgattttaacacgtttaacatatttctttattggcaatttactatgtttttttcctcaactgataattgattcaaaaattgctttgaccttaactagtctttgcttttcatcttcatccaagtg

SEQ ID NO: 238219 - DNA, 613 bp, Homo sapiens
gagctaaactttttctattttggtagaataatttaaaagcacaagagatttgaaatgaattagttatccagccagagagcagaatgttaagttttaaagaaatggttcagattttattttagttggaagagactggaatacatatgtgaacaatggcctgagtactgtcacaaaagcaaacccatgcattgattgacaggaaagtaaaatcaatttacattgaaatcaatggatgtgtgctccagttactgtggctgtgttgcaaacattctcaaaatgtagcaacttaaagcacctacccttttattatatctcaggattctgtaggttagaaattcatgtagagttcagctaggtaattcctctgtaatgtatgcagtcaactgagtctctaagtgrtactcaactggtaggtggactggtatagaggaccaaactcggcttcactcatatgtctggggccttgggagggatggctggcagagtgggcttagctggaaatgtcagcaaatgtacctatatgtggcctctccagcagggagacttcagggtattctaaaatcttacatgatagctgactttccccagtaggtgtgtcaagagaacgattcag

SEQ ID NO: 238220 - DNA, 633 bp, Homo sapiens
tctcctgggtccatggagttgcagaacagtgtccatgaaacagtaacttgttagcttgttattaatagcttgtaattagtagaaattcacaggctgttcatagtacttgccaacaaacaagcagtaattacagtaaattaacaaacaacatacagcttgaaacatataatagataaaattgaatcagaaatgagaggaagaaaaaatgactgtggtagcatttgattgagatctcaaaaaataaatgtctcagtgataaaggaaatacatttcaaacaggaagaagtgtcatgtgcagaagtacaaaactggaaaatacgatacaagtttaggaagtgacaaataattattttagctggactagggaattgattaaaataaagctaaatataaaggcattgctttctggcatgcaatatttattctggggacttagattggagtcaatgatctagtgcaccagagaccactgaatagcctagaatttgttccttccgccaaggaaatttttaggctgtaaaacaagacgaagactagctgcataaccggctctcagatcacatcagcactcattggcakgcctgcaatgtccttctagctcatctccccaccccagtgtctatgtttgtccca

SEQ ID NO: 238221 - DNA, 605 bp, Homo sapiens
  misc_feature (1)...(605): n = A,T,C or G
ttaaaatgtgtaggaattccataaattacatatgcattatgcatcttggcaccgcagctgcgaaatgaagaagtttgatagtgaattcttctggaaataaaacttatttttgctagtttaaattcaaaaataaaatggtccctgtgtaaacacaggcagaagcttgcatatttaaaaactgattatgtttgtgraatgctgcccttaagcatggagcccaggcagactttgcagcctgcacgtcgactctggtgtgctctccagttagatggaacacaagcacagagacacagcaaacacagtctcccttaccaatgaagcagcagttggaactgaaatgctgttttcactcttcagaaactgtaactacattttttaaaaggtaaattatcatccatcaagtacctaaggctgttgagaagaatttaggttcatttttaatggactccttggtgggaactggagtaactgcaatatcatttggaagtttgcaggatggagtgaatgtttgggtagaatccattgcattatgtacttcaggaaaaacaatgcaagtcattttgtctccaaaatactttcctttttttattttttgcgctgnccgc

SEQ ID NO: 238222 - DNA, 605 bp, Homo sapiens
  misc_feature (1)...(605): n = A,T,C or G
ttaaaatgtgtaggaattccataaattacatatgcattatgcatcttggcaccgcagctgcgaaatgaagaagtttgatagtgaattcttctggaaataaaacttatttttgctagtttaaattcaaaaataaaatggtccctgtgtaaacacaggcagaagcttgcatatttaaaaactgattatgtttgtggaatgctgcccttaagcatggagcccaggcagactttgcagcctgcacgtcgactctggtgtgctctccagttagatggaacacaagcacagagacacagcaaacacagtctcccttaccaatgaagcagcagttggaactgaaatgctgttttcactcttcagaaactgtaactacattttttaaaaggtaaattatcatccatcaagtasctaaggctgttgagaagaatttaggttcatttttaatggactccttggtgggaactggagtaactgcaatatcatttggaagtttgcaggatggagtgaatgtttgggtagaatccattgcattatgtacttcaggaaaaacaatgcaagtcattttgtctccaaaatactttcctttttttattttttgcgctgnccgc

SEQ ID NO: 238223 - DNA, 583 bp, Homo sapiens
attgtctgctgccatactagacactcagaaaagcaaaataagataaataatttcattgtgaggrtaagaaattctattaaattgtaaaatgttgtgtacttgggtagcgtggggtggatataattaggaatcatgtctttacttggcggatcagcctattaggctgggtagcaggtaggtagcttcagaaaaggcaagctaaagaaaagactcagaggtagaaatgagtgttagggctgtcctaggaactaggaacaagggcctaatgacacccaagacttctgcgtttatttttacctgatttatctgaaaggttcagtcccagagataaaaaattgaatgatgaggctgggcttgattcacatactgataaaggagacagactgtcctctggaaactgattgtgcaaaattatcagaaccttggcactgataaggcaagggaagaatgctgaaaccagcaagattggtgacatttatgaaggcacatttatgcaatgggaaaacattcatgtatttataaaggtcccttgttattgactaatcaatctatatgctgtagtgaactctgaagaaaaacataa

SEQ ID NO: 238224 - DNA, 583 bp, Homo sapiens
attgtctgctgccatactagacactcagaaaagcaaaataagataaataatttcattgtgagggtaagaaattctattaaattgtaaaatgttgtgtacttgggtagcgtggggtggatataattaggaatcatgtctttacttggcggatcagcctattaggctgggtagcaggtaggtagcttcagaaaaggcaagctaaagaaaagactcagaggtrgaaatgagtgttagggctgtcctaggaactaggaacaagggcctaatgacacccaagacttctgcgtttatttttacctgatttatctgaaaggttcagtcccagagataaaaaattgaatgatgaggctgggcttgattcacatactgataaaggagacagactgtcctctggaaactgattgtgcaaaattatcagaaccttggcactgataaggcaagggaagaatgctgaaaccagcaagattggtgacatttatgaaggcacatttatgcaatgggaaaacattcatgtatttataaaggtcccttgttattgactaatcaatctatatgctgtagtgaactctgaagaaaaacataa

SEQ ID NO: 238225 - DNA, 583 bp, Homo sapiens
attgtctgctgccatactagacactcagaaaagcaaaataagataaataatttcattgtgagggtaagaaattctattaaattgtaaaatgttgtgtacttgggtagcgtggggtggatataattaggaatcatgtctttacttggcggatcagcctattaggctgggtagcaggtaggtagcttcagaaaaggcaagctaaagaaaagactcagaggtagaaatgagtgttagggctgtcctaggaactaggaacaagggcctaatgacacccaagacttctgcgtttatttttacctgatttatctgaaaggttcagtcccagagataaaaaattgaatgatraggctgggcttgattcacatactgataaaggagacagactgtcctctggaaactgattgtgcaaaattatcagaaccttggcactgataaggcaagggaagaatgctgaaaccagcaagattggtgacatttatgaaggcacatttatgcaatgggaaaacattcatgtatttataaaggtcccttgttattgactaatcaatctatatgctgtagtgaactctgaagaaaaacataa

SEQ ID NO: 238226 - DNA, 496 bp, Homo sapiens
acaggaaagagcgcaaggcttccacccacgtgctgtctgcagatgtctgactttcgtggcggtgggatcctgggtgctgggctgagaccacctacctgaggagacaggccgttgctgaccgggttcatgtggttggagggcgccgccggattcatgaagctgtcagagtagctggagaagctgtggcgggctccgtaggcagagctggtgtcggcggctgcagccgctgcagccagcccgccctggtgcatggtggacggtggcaggggctgaggccggtgcacagtgctgcccccatctgtagagagacccaagagaggtcctaagcaagtggcctcaycctggacgctgggcctctgagagcagaaggcaagccaagagactcctcctcccggtctccattccttggagggaagggaccaccctctcatgctacctgggatgagacaagttggctcctgggcagggcagtaggcactggccaggtcttgactga

SEQ ID NO: 238227 - DNA, 496 bp, Homo sapiens
acaggaaagagcgcaaggcttccacccacgtgctgtctgcagatgtctgactttcgtggcggtgggatcctgggtgctgggctgagaccacctacctgaggagacaggccgttgctgaccgggttcatgtggttggagggcgccgccggattcatgaagctgtcagagtagctggagaagctgtggcgggctccgtaggcagagctggtgtcggcggctgcagccgctgcagccagcccgccctggtgcatggtggacggtggcaggggctgaggccggtgcacagtgctgcccccatctgtagagagacccaagagaggtcctaagcaagtggcctcatcctggacgctgggcctctgagagcagaaggcaagccaagagactcctcctcccggtctcyattccttggagggaagggaccaccctctcatgctacctgggatgagacaagttggctcctgggcagggcagtaggcactggccaggtcttgactga

SEQ ID NO: 238228 - DNA, 524 bp, Homo sapiens
ggcctgccaccagaagaggtgatatttgactgaaacctggatggaaggaaagaggtaaccatttatggaaaacatctactacttaggacaatggccagttgagagctgactgcatatgtgttaagtgctttacattaatgaattcatcagatcctcccaagaatacctcaaaggagagattattaattaagaagcccattagtagatacagaaattgaggcatacagagaggtgcctcagctctttgggtccagatgggcagggccatctcacyggacacctgtgccctccccttgcccacctcttgctatgtgccagaaactgagccaggtgctctatacacctcccttaactccccagccatgccccgtgggtatctgttttcccagttttgtagatgaaagcacagctcagagaggtttactcagttgcctggagtcacacagtcaacaagtggagagccagtcattgaatctggtaccacaaactcttcctgctgcaacagctgtgcttttgcaggcact

SEQ ID NO: 238229 - DNA, 551 bp, Homo sapiens
ctcagcattctcagagcaaacaaacttttggcaagttcagagaaaaggaagtgggattgaatttcctcttcgactcacctggggaaaaattcagactgcttggtggtgggggcatcagggacctggctccaggataggctgagggagygggggtcctctggggtcattgagaagggtccctgagacgctccgtagcttctccatagcagctggttctagagctaagggctaccaagtttggacagttcttcgtttggtctgatttcattccctcctgctgcagatcaaaagacagcttctcccttgctcaccagctgagttgaggagtcaggttcaagtcctgaccctagctgtgtgtgctgtcagataagctgctttacctctctgtgcctttcctcatctataaaattggggaaaataataattgccccctcagaagttctgggccaagtggaaaattttacaagaagggaagaggtggggagaagtttgtacagtggttgggttttgcccgcatcttcagagagtggaaggaaggaaggaaggaaaaa

SEQ ID NO: 238230 - DNA, 575 bp, Homo sapiens
ttctcttccccacaccactgaatttatttttttggaggaggaagtcctttctacttttctcttttttctacattttttcataaatcagagctcatcttttgtatacccctttcacatatattgtcttactacttctaagagcaaactttagaagaacctagatattggagccattgctgtactctagagaaactaccaccttctccactcagagagaacgaatcctcctgtgaagactctccttgaggtgagatgacctgaattactgtccagagctttgcactgctagtggctggacaggacccagaaagaccaccaggagctccaagagcctaagctggagaaatccttcatcatccgtgcaaaagtatggtaattcaaactattgtctcttccccgtgattattttaaaagatttaaaaatctgactgctgatacttgcagactgtaattctagacatggacattgcttgacctgggacaggaatgaygagtacttgctgagagttataagagtgaactgaatattccatcctagagtggaagattgtgaaatattagatctcaaatttact

SEQ ID NO: 238231 - DNA, 543 bp, Homo sapiens
ccttccagcttgctgtgtggccttaggaagctcacaggccctctctgggtatcttgccacattagctctcctgagggtccctgcaaatcaacaatcatacacccaggckgcccctccgcccccgagtggtggccctaccagggatggtgggaacctcacatgggtgtcaactcagagaagaagccagggatctcagctcccagcccaagctccttccccacccctcactgaggccccgacacgtggacaaacagctcttcgaatctgtcatatgaagagctcgcacgctgcagctcagagaaacttccagaggaatgcacttaatcctggccacagctctctaaagaagctacgattatgattcccaatctttgggtgagaaaactgaggccacagggcaggttattgcccacagacccaaagctgtgaagcaagtgaccagggttcaaatccagaaagcctgaccccagacctgcctcatacacgctcagtatggaggaaaagccccaatctccttccagagctctcaccctcagagcttcg

SEQ ID NO: 238232 - DNA, 528 bp, Homo sapiens
gaggaattccagcctccgaaacctggaaggagactcctgagagtcctttgttcctggatgttcagtttccctccccacccccacgcccaccccctcctctytcattatcaaacatttgaagactgagtaattccatttgttgatgtctttggcctcctctagcagagcaggccagagcctctgaaaatgcaaaggcccccaatgaaataaaaacccctggttttcaaggtggatttatcaccctttaaaggaatatttattgggtaatcactttccaaaagtgctcatgacacaggggactgaaataaagagcgtcctctccctcgggctgagggaagaggctgttggccacttggatgcagggaggagggagcctctttgtggcctatgtcttgggagggagcagccagagacaggccaagtttccccagctaaactcaagctggggtcttgcttctgtaccttgggcctacttatttctctcccgtttccaaacccaaattgggtttggaagatgccacttggaaa

SEQ ID NO: 238233 - DNA, 585 bp, Homo sapiens
agatcttgggagaccttgtgctcgcatcagagatgggagaagctgagtcscagaaaggtaacgtgaggttcactcaaactgtgctccccgcccctgaccccttccaccaatacaaagatcccttcctcccaatcgcttcaagtgttaattataggaataggcctaggcccctcccccaaggggcaaccccctcctccccgcaacaaaaacaaaaagagaaactagtactgccttacatgttaagtggaggtgaagggaagggcactgcaggcagacaggagagcacatgcaaacgcctggtgtgtcaaaaggcatgctgggtaatttaatcatggtgccacattcatagccaggaagctggtgggtatggcccggatgtgtgagaggtcatgcgcctggagggtcatccatcttggcaatgcctctctgccctgggcccacttccttccatcctgctatcttgtccgttggaaagttatccttgctttttttttggccagtgccaggtggtctctgatggtgacgccatgccacacagcgaaggaatggattgcaagggagtcctgccttcatcatggcctgcct

SEQ ID NO: 238234 - DNA, 488 bp, Homo sapiens
gaattccaggcccaccacctgctcccccatgttggtccacgggagcagcagcagcaggcaggtccctttctctcccagcctagtgacctgccagagccagcttctctccacactccctccagcctcttctcccactcccagtccaggtgtctgtggcgaggaccttttcccatgcacagggggctgcccgggcctgaaccccagatgccctggcctcccagtgcagcggtggtgggtcccagagcsctcagagcccagggtgagaagtcctgcccttttgccgagtgttttcctttagttccagatgccaccctgacaggtgctaccctgtgattaatgtccccacccccaaggcctgggaccagcccctcctccccaagccagaggtggcggtgggtgtgcagcgcagggactgagcttcccgaatcccttcctggttcctccctctccctggaccccctccagccaccaggagcagagagcagacc

SEQ ID NO: 238235 - DNA, 488 bp, Homo sapiens
gaattccaggcccaccacctgctcccccatgttggtccacgggagcagcagcagcaggcaggtccctttctctcccagcctagtgacctgccagagccagcttctctccacactccctccagcctcttctcccactcccagtccaggtgtctgtggcgaggaccttttcccatgcacagggggctgcccgggcctgaaccccagatgccctggcctcccagtgcagcggtggtgggtcccagagccctcagagcccagggtgagaagtcctgcccttttgccgagtgttttcctttagttccagatgccaccctgacaggtgctaccctgtgattaatgtccccacccccaaggcctgggaccagcccctcctccccaagccagaggtggcggtgggtgtgcagcgcagggactgagcttcccgaatcccttcctggttcctccctctccctsgaccccctccagccaccaggagcagagagcagacc

SEQ ID NO: 238236 - DNA, 532 bp, Homo sapiens
acagtaattatgttaacaatcatttagattaacatatctttttaaataaaagttcaaactaatttgcgttcatttatggttggaaacctaaggcagagagtgccaagtaatatttctgaaatcatttgaggtgagagggttagaaccaaagttgggatgtgacctgtatccagttgtatcttacatctacttaatctattaataataatcagtccactataatatgatgagaggacttagtgtggtttttactattaactcaaaagccaactttcctctgctaacactaccagatgactgctggttctgggccatttctaacatctgttttcataactgatctcagaatagctggtcagatccttcagctctgtgctagaaatggaggaacctatcttagggtttctatttttcayttaaaaaaaaaaggtgtaacgtcttgaactcaaagaactggagttgtttattgatagtgtcattttaaatgcccatgaccaaactctaagtttagtagtaagtagcttatttagca

SEQ ID NO: 238237 - DNA, 515 bp, Homo sapiens
gtcagcacttcaaatagtttggatggtcccattttctattacaactctggacccatagaggaaaattacacttaatggtttagtgactcatggaaaagaatacctgattatctttccaaagcccttatttatttatttatttatttttttttgtkgatcaagaagacaactcctgatttttattgatgagctggattttgccaactctgttctggtaattatcatgacagcacaaaaaaaggtagttaatattctctgtttctaatacatggtcaataagacaattaattacctgcaagcaagttgagaagacttgtcatgttagcgttttagtacagggaattaagcattataccaggaaaaggagaaaaattcaactaacatgagcagtgaagaaaataaacttgttttgtagaaagagaaacatttcaaatcgtcttatatttttttggtcatccattcatagctccttggagacctgctagagcattttgctgaattattcattaatttac

SEQ ID NO: 238238 - DNA, 570 bp, Homo sapiens
gcccgctgccactgttagaaccctggtaatagagtatatactgcagagtgccygctgccactgttagaaccctggtaatagagtatatactgcagagggcccgctgccaccgttagaaccctggttatagagtatatactacagagtgcccgctgccactgttagaaccctggtaatagagtatatactgcagagtgcccgctgccaccgttagaaccctggttatagagtatatactgcagagtgcccgctgccactgttagaaccctggtgggtgcttgtgagtacttctcactacagaatcttgcaacagatgacaaagtagaattttttttcaagtgtggggaaggctatcatgagccctgcttagtaagccctttgagtcggctgtactgttatgaaagtaaagaggcagagttgacatgctggagagacttagaactgatctttccccttttccctcaatagcacattcgtgttggatgggagctgctgctgacaaccatcgccagaaccatcaatgaggtggagactcagatcctgacgagagatgcgaagggcatcacccag

SEQ ID NO: 238239 - DNA, 570 bp, Homo sapiens
gcccgctgccactgttagaaccctggtaatagagtatatactgcagagtgcctgctgccactgttagaaccctggtaatagagtatatactgcagagggcccgctgccacygttagaaccctggttatagagtatatactacagagtgcccgctgccactgttagaaccctggtaatagagtatatactgcagagtgcccgctgccaccgttagaaccctggttatagagtatatactgcagagtgcccgctgccactgttagaaccctggtgggtgcttgtgagtacttctcactacagaatcttgcaacagatgacaaagtagaattttttttcaagtgtggggaaggctatcatgagccctgcttagtaagccctttgagtcggctgtactgttatgaaagtaaagaggcagagttgacatgctggagagacttagaactgatctttccccttttccctcaatagcacattcgtgttggatgggagctgctgctgacaaccatcgccagaaccatcaatgaggtggagactcagatcctgacgagagatgcgaagggcatcacccag

SEQ ID NO: 238240 - DNA, 570 bp, Homo sapiens
gcccgctgccactgttagaaccctggtaatagagtatatactgcagagtgcctgctgccactgttagaaccctggtaatagagtatatactgcagagggcccgctgccaccgttagaaccstggttatagagtatatactacagagtgcccgctgccactgttagaaccctggtaatagagtatatactgcagagtgcccgctgccaccgttagaaccctggttatagagtatatactgcagagtgcccgctgccactgttagaaccctggtgggtgcttgtgagtacttctcactacagaatcttgcaacagatgacaaagtagaattttttttcaagtgtggggaaggctatcatgagccctgcttagtaagccctttgagtcggctgtactgttatgaaagtaaagaggcagagttgacatgctggagagacttagaactgatctttccccttttccctcaatagcacattcgtgttggatgggagctgctgctgacaaccatcgccagaaccatcaatgaggtggagactcagatcctgacgagagatgcgaagggcatcacccag

SEQ ID NO: 238241 - DNA, 570 bp, Homo sapiens
gcccgctgccactgttagaaccctggtaatagagtatatactgcagagtgcctgctgccactgttagaaccctggtaatagagtatatactgcagagggcccgctgccaccgttagaaccctggttatagagtatatactacagagtgcccgctgccacygttagaaccctggtaatagagtatatactgcagagtgcccgctgccaccgttagaaccctggttatagagtatatactgcagagtgcccgctgccactgttagaaccctggtgggtgcttgtgagtacttctcactacagaatcttgcaacagatgacaaagtagaattttttttcaagtgtggggaaggctatcatgagccctgcttagtaagccctttgagtcggctgtactgttatgaaagtaaagaggcagagttgacatgctggagagacttagaactgatctttccccttttccctcaatagcacattcgtgttggatgggagctgctgctgacaaccatcgccagaaccatcaatgaggtggagactcagatcctgacgagagatgcgaagggcatcacccag

SEQ ID NO: 238242 - DNA, 426 bp, Homo sapiens
gatgagttttgttgtctcttagtcacagaaagtaagccaagttccaagtctccccyggtaatttagtccttaaggcaacttacctgaaaataatacaagtgttatgaggcaaaaggcaatacaattttctcacttgatagggtccgagaaccagaggactctcttctaactatggacagggtacatctggacttgacattttattttaaacactactttgtgcttgggttaattgtctttggtctaaagttctatagcagcagatgactcattttttctccctctactcttctccaatgtgagaaataagggagattaactattagcgagtattagtgataggggaatcttagtgttcatatccaggcctctcattttaaagataaggatattgaagctaagagattaaggagtctgccccagctc

SEQ ID NO: 238243 - DNA, 523 bp, Homo sapiens
gaattctgggttagtgttccccatccccacccccaccctgctttctgggaaagttcaaaggaataggaggccataggtcaaagagcaaatgcttcaggggtgttcaacctggctctcaccaaagggcctagatctaacacatgatttaaaccattattaaaggcagagactgctgtgtgtgaaggccactgccaaccccccaacccccacttttttttttatgactctgttgcccaggctggaatgcagtggcaagatctcagctcactgcaacctccacctcctgggttcaagtgattctcctgcctcagcctccctagtagctgggattacaggcacacgccgccatggccaactaatttttgtatttttagtagagatggggtttcaccatgttggccaggctggtctcaaactcctgacctcaagtgatccgcccacctcagcctcccaaagtgctgagattacaggcrtgagccaccgcgcccggcctccaaccatgtttaaaccagactaattaaaa

SEQ ID NO: 238244 - DNA, 491 bp, Homo sapiens
ttttaactgacaagtggaagttgtatatatttatcatgtacaacacattgttttaaaatatgtacacattgtggaatagctagactgagctaattaacatatgtattatcttacatacttttttatggtgagaacacttamaatctactctcttagcagcaattttcaaggacgcgatgcattgttattaacgatatttacatgtttctcccccgcagtgtctccagtggaagaagtgggaagatgaggttcggaaggggtgcattctttcagcgtgccacaggctttgcagcaaaactcaccaggagcttgagagttctctgcagtgtagatgaaatgagggaggaatggagtttacagggagaaaaatgtgggccgatgtaacactaaggccaattagctcagacaaagggcaaaaatgagagctggcaacctgtctagtaagaaacgtgagcaaggccctaatgcaggtgctgttcctcagggtccaa

SEQ ID NO: 238245 - DNA, 491 bp, Homo sapiens
ttttaactgacaagtggaagttgtatatatttatcatgtacaacacattgttttaaaatatgtacacattgtggaatagctagactgagctaattaacatatgtattatcttacatacttttttatggtgagaacacttacaatctactctcttagcagcaattttcaaggacgcgatgcattgttattaacgatatttacatgtttctcccccrcagtgtctccagtggaagaagtgggaagatgaggttcggaaggggtgcattctttcagcgtgccacaggctttgcagcaaaactcaccaggagcttgagagttctctgcagtgtagatgaaatgagggaggaatggagtttacagggagaaaaatgtgggccgatgtaacactaaggccaattagctcagacaaagggcaaaaatgagagctggcaacctgtctagtaagaaacgtgagcaaggccctaatgcaggtgctgttcctcagggtccaa

SEQ ID NO: 238246 - DNA, 385 bp, Homo sapiens
ataaaaaattaactgctgtgtaaggaaaaataaaaaatgaataactactgcataagttaaaactctacaaaccatgtctttcctctgctacactattcctcacactacaacratcagcacagatgacttctgtgaccgaatgtgtgggggttttccccacacaccaagcaggggatgccatctgggtgtccgccaattcaattctgacactatctgactggacatagtgtcagaccaccagccactagcctgggcgtctggaacttctgaccgaccagcttcaaacagctggggttccaacagccccctctttgtatttgattaatttgctggagcggctcacagaactcaggaaaacacttacttacatttacaggtttattat

SEQ ID NO: 238247 - DNA, 394 bp, Homo sapiens
caagtgatcgtggggtcgctaattggaacaaccaaggactagatgggccactttgggggtttggtgggtgggaaacggcagcagcaggaatgtttattttgatcagcttctctcatttcatctcctcctcctaccctctcccactgagaaagcttccctgtgtgctggctgtagacgccgccccctccccaacacacctgccctggccccacacagccacagtgctgggtcactgccaaggcacaggacagccagatgattcatgcaaatggmaaatctacaaagagtacatttctgctcttaactaaggcctgcagaggctgcagcagcccagaatccatctccataaacatcttcctgtaactccacctccttcagactgcagacagggtta

SEQ ID NO: 238248 - DNA, 440 bp, Homo sapiens
attatcacccagaaagcatagtttaccttatgattcactcttggccttgtacattctgtgggtttggataaaggtataatgacatgtacccaccattatagtgtcatacagggtagtttcactgccttaaaaatctactgtgatctgcttactcatttcctcttcccccaacttctggcaaccattgatgtttttactccatagttttgtcttttccagaatgtcatatacttggaattatataatatgtaacattttcagattagcttcttttacttagtaacatgcacttaagtttcttccaygtgtttttgtggcttgatagctcatttctttttagcactaagtaatattccattgtctatgtgtagcaccattttttaatccattcatctactaaagaacatgttggatactttcaagttttggcaattattaat

SEQ ID NO: 238249 - DNA, 563 bp, Homo sapiens
cttagcagctactgagtgggtttgtataggagtagatgttattttgaaacacataaacatcttgagctaaaacttcctctcttgcctctgcctgaaaaagagaaactgggcttgttgcctctctgtttaccctaccacagtggctggactatctttaggagaccatcatgttccctaagtaaagaaatttctcccagtctaccttaagtagctggattttgaaataattacagtaaatgtaggggcaccaaaatgttccataaatagactaaacactacagtgaaaagaaagagattgagaaactggaaattttaaaaaggaagatacaattatgtattatattagagaaacagtttaaggataatactaattgaaaatataagggtatcattatgatacccaaaacaccaacaataacaaagctgatgcaactgatgtagacttcaaaacaaagagggatatttcataatgacaaaagcatcatgttatcaaaaagacacacttctaaatgtgtatgtaccccccmaaaaaagctttaaatgcattaagcaaaatttgacag

SEQ ID NO: 238250 - DNA, 341 bp, Homo sapiens
ttctacaatgcttcttcttgcttaattttttctatcgttgttgctattcctcaaactcagcaggcatactttctgatttgaactggctattccttctccttcaaataatctgacaaacttcttcacttctttcaagtttgrgtccaaatcatgctttgtgaccactctttttccgtaaactgtctcattcaccgtttctccttaagctgctcttattttttcttttccttaatagcacttttttttttacctctaacatatataatttacttaattattaaagtattgcttatcatctgctccctctcagtagtgtgtaggctcctagagagaggaatatt

SEQ ID NO: 238251 - DNA, 473 bp, Homo sapiens
gggagttttcctgcacaagctctctttttttttcctactgccatccatgttaagacctgacttgctacttcttgacttctgccatgattgtgaagcctccccacccatgtggaactgtaagtccaataaacctctttctcttgtaaattgccyagtcttgggtatgtctttatcagcagtgtgaaaatgtactaatacaccttcaaaacacagtatgccgctccccacttactcaggtctctttttgcatctttaaatgggaaagcattgtcttggtagagggcttgttcaattcttactaacagttatttccttatatgttctaataggctattggcagtatatcaagaaaccaacacttgatttgagttgtttttctatttggtctaattatcaaacccctattagtttgtaagttatgtgacttattttggaattttaaggtaggcaatatacatatagtgcatgttttg

SEQ ID NO: 238252 - DNA, 473 bp, Homo sapiens
gggagttttcctgcacaagctctctttttttttcctactgccatccatgttaagacctgacttgctacttcttgacttctgccatgattgtgaagcctccccacccatgtggaactgtaagtccaataaacctctttctcttgtaaattgcccagtcttgggtatgtctttatcagcagtgtgaaaatgtactaatacaccttcaaaacacagtatgccgctccccacttactcaggtctctttttgcatctttaaatgggaaagcattgtcttggtagagggcttgttcaattcttactaacagttatttccttatatgttctaataggctattggcagtatatcaagaaaccaacacttgatttgagttgtttttctatttggtctaattatcaaacccctattagtttgtaagttatgtgacttattttggaattttaaggtaggcaatrtacatatagtgcatgttttg

SEQ ID NO: 238253 - DNA, 409 bp, Homo sapiens
atgattttaaacaaatacatatcaaatataatgtatttaaaagatttgtcatatatgttttaagattctattatcagacttaaatttcattttaagcattctatttaaaatgttaactataatttagaaataatacttaggcaactttattgatttgttgtgactttgtttttagtggatcaacaggggataaatacatatgctaaggtaggcttccaccatttctccaaattttgccttgagtcaaaaccttttagaacttcaaaaaagttaaatcaaaattccattttcactactttttattgttgatccctcagtgctttcagataataagtgaagccagcactagaaatgttgaaatacrgtcaaccagtttttcccattgaatttccaatctaaacagaaatct

SEQ ID NO: 238254 - DNA, 599 bp, Homo sapiens
tttttaaatattagctcccaggaattaaatcaatgccaatggctagggtaaatgccttctactgagcctaccaggtagcaaaacaaaaaagaactgttatttatacaaatgttaaatatgctctagaatgctttggtctttttatttttccttttattttcagtatggattgagaattttctttgctggtaaattgtattttactggaacttttattmaaaaatgttgaacaccttttcaacattagagtaaatggacttttaaaaccaaagtagagactaaatggacttccaaaaccaaaattggcaaagctataagaagtctaaaactgcatttgtcaatatggtggccactacccaccatatgtggctatttaaactcaaatttgaattaaacttaaaataaaaatccagttctacaattgcacctgctgtatttcaagtgctcaatagttacatgaggctaatagctgcaatattaattagcataagtaagaatattttctcagtatgaaatgttatattagagaatactatctagaactttcattgctttctattagccttgatgctatgagatttctctttatgagctaagaa

SEQ ID NO: 238255 - DNA, 496 bp, Homo sapiens
tggtgggtagtattaataaaaatgtagattggataaattacatttactataaccagcaacgatttgttaactataccagagatgccattaaaggaatagctgaacaattgggacccaccagtcaaatggcctgggaaaatagaatggcattagacatgatagtagcagagaaaggtagagtttgggtcatgatcagaacccagtgttgtattttcatccctaacaacacagtccccattgggccaattacaaaggctttgcagggccttacctctctatgagatgaattgtctaaaaactccrgaatagatgacctctttacaagcctcatgaaaaagtggttcggtgggtagaaaaagctagtaacttcaatagtcacctccctgacaattgttataagtgtattaattcttgttggatgttgcctcataccctgtgctccagggttaatacaaagacttactgagacaactctctccaaaactttcctcaattc

SEQ ID NO: 238256 - DNA, 611 bp, Homo sapiens
ttggtgttttgcaaattacaattgtaacctgaaaacttgttttttcccaactaatcatacccaccagagatttttattccactgtaccaccattctctccctaaaacaccacaactaccactaccactaccacaacaacaaccactgcaaaatcattgctattggcatttcctgagcagatgtctaaaaaaagaaagttgtttagttccactaatataaaacagatcaactttaggacttgcgctgcttcttcatgctttgttcttttagctaatgtgtaatacttacataacccaagggtyagctgagctcatcctatttagaaaaaaataaataaactaaaaataagatttaaaaaaggctgaatcctcaatcctacatgctttgaggaggccaattccctctcaaagatttgacaatccccacagaacctgtgtctatggagccacctctggctctgaggttcatgcccaagggacccccgatttcctctatgtgttttcttcttccacctcacaccaatttatctgtggaaatcaactttgtttctgtttgtttctttggtctctcacttcccaactcctcacacagcatgttagcatttggggcag

SEQ ID NO: 238257 - DNA, 611 bp, Homo sapiens
ttggtgttttgcaaattacaattgtaacctgaaaacttgttttttcccaactaatcatacccaccagagatttttattccactgtaccaccattctctccctaaaacaccacaactaccactaccactaccacaacaacaaccactgcaaaatcattgctattggcatttcctgagcagatgtctaaaaaaagaaagttgtttagttccactaatataaaacagatcaactttaggacttgcgctgcttcttcatgctttgttcttttagctaatgtgtaatacttacataacccaagggtcagctgagctcatcctatttagaaaaaaataaataaactaaaaataagatttaaaaaaggctgaatcctcaatcctacatgctttgaggaggccaattccctctcaaagatttgacaatccccacagaacctgtgtctatggagccacctctggctctgaggttcatgcccaagggacccccgatttcctctatgtgttttcttcttccacctcacaccaatttatctgtggaaatcaactttgtttctgtttgtttctttggtctctcacttcccaactcctcamacagcatgttagcatttggggcag

SEQ ID NO: 238258 - DNA, 698 bp, Homo sapiens
tccatttgatgatggagtgctgctgtgcatgcctaactttatggcttgttaggtccaatrtcagccagttcatgatggagagcccagattgcatgggaacttggtggctcacggtcaagtgttcagtttttactaaggcccagtagcaggccaagagctgtttctcaaaacgagggtagttatccatggatggcagggccttgctccaaaatcctaaaggcttccataagattgatttacagggccctgccaaagactccaaacagcatccctgtgtgccatcgacacctcaagcatcattttatctgctggatcatatggcacaagtggcagagcaggttgcatggcagcctggacctgttgcagggccttctcctgttctggaccccactcaaaaccagcagcctttagggtcacttgttaatgggttggagtaacacacccaaatgtggaatatgttggctctcaaatccaaatttgcctaccaggcattgtgcctttttcttggttgtaggaggggccagatacaacaacttatctttcaccttagaggggatatgtcccacaccactgcacccctagcaatttcattaagaaagaaggcccccggattttagtcagatttatttcctacgctctgacatgcaaatgtcttaccagtaagtctagagtagttgctacttctcactcactaggtt

SEQ ID NO: 238259 - DNA, 468 bp, Homo sapiens
ggagcaggattgctgtatagttttcaaactattcatgcattcactcaacagtgcattcactccacaaatattctctgagctcctttttgttttgttttgagacagggtctcattgtgtcacycaagctggagtgcagtggcaccatcacagctcactgcagccttgacccccgggcttaagtgatcctcccacctcagccttctgaatagctgggactataggcaggcaccaccatgctaattttcgcattttttgtatagatggagttttgccatattgcctaggctagtctcaactcctgagctcaagtgattcactcttctcagcttcccaaagtactgggattacaggcgtaagccaccatgcctggcctctgagctccttctacgtggcagttcctgggagccactggggatagttgtctgatgaactgtatattctagcagagactgggggctgggtagtgg

SEQ ID NO: 238260 - DNA, 415 bp, Homo sapiens
aacatatgaattgcgggggacacaaacattccgtccatggcacctacttcatagggtttggcatgctgctcggtacatggttaacattcataaatggtgggggcccttactgtggtagaaaccattgtcactgcaaggcagccctgcttgggattcaggtgaacaaatgtaacatgggtgggtgagggactccctcctcttcagagaagccctcctgtggctcaggggcagctgcagggccagatggagttggcctgcagggagtcagccttaccccatcagagaccaacttgaaagatttttttctctgtgtagttcgtgttatcaatctgatctgcagccaggctatttacttctgaagcattggagttatcrattgccattgccccatggttctcactctttgcaggcactc

SEQ ID NO: 238261 - DNA, 573 bp, Homo sapiens
tctttctgtttaaaatatgtatctacrtaatatgagtggtgcatcatcactggcaattttgaaattccccagttaatctctagaagcagttttgtgaacttacttgcagtatcacggcccacccagtggctaccaaaaatagaaattgaagtcagggaatatctgaggctaccagattgattctattcaggtcgctaaatgattcacataaagtgtaacccaacacaccctccgggtcacaagatgcttgagggtgagtgatttactatttggctctctgttattagtagcacacaattactcctttggtgttgattagatttttaaaagggaacatttctaactcagacctcctttctgatagctcatggatatgggacatgtaagcttatttgacgactctttaaatatccttctacagcacttagggtagcaccttgctctttttggctgtaatctcaacatggggaatcagtatgtgtaatctatagtgtttcatcctcacggaataccccagagccatagagaatcacctctttctgtaattggtaatgagagaattaaccaaaacct

SEQ ID NO: 238262 - DNA, 615 bp, Homo sapiens
tgcttccttctttgctttttaaatttaaggtggacatgatctsagggctttgtacagaaaacctctgagggtcagttgagtgacccacttaccctgccattccccaccctgctggggtcctcctgctacttcaactccatcaccacagagactcaattcctgcactctgaggttcaaatctgcatctgctgaagaatcttccagaactgcaactcccatctgcactgggagcatgtctggcccacaccagctcaagcactgtgtgaagggtcccagttattcagtgtgaaattgtgtaagactttctcctggagacaggacctttgcaatcacagcttggggaattgtctttacaataaccacttcctcttagggagtcagcagcctgggctcaaatcctgcttggtcattaagataattttgtgactctagacaagtcacagcacccctcttagcctacatttcttcatccattcaacaaatattcacatagcagctaccggcaccaggaatagagaggggagcatgattgataaatcatcttagaatttatgattgcattatgggagttactcagtaaatgagtttttaaaaatcagggggagggggaaaacc

SEQ ID NO: 238263 - DNA, 592 bp, Homo sapiens
cagggctttgtacagaaaacctctgagggtcagttgagtgacccacttaccctgccattccccaccctgctggggtcctcctgctacttcaactccatcaccacagagactcaattcctgcactctgaggttcaaatctgcatctgctgaagaatcttccagaactgcaactcccatctgcactgggagcatgtctggcccacaccagctcaagcactgtgtgaagggtcccagttattcagtgtgaaattgtgtaagactttctcctggagacaggacctttgcaatcacagcttggggaattgtctttacaataaccacttcctcttagggagtcagcagcctgggctcaaatcctgcttggtcaytaagataattttgtgactctagacaagtcacagcacccctcttagcctacatttcttcatccattcaacaaatattcacatagcagctaccggcaccaggaatagagaggggagcatgattgataaatcatcttagaatttatgattgcattatgggagttactcagtaaatgagtttttaaaaatcagggggagggggaaaacctttgaagaacaatttggca

SEQ ID NO: 238264 - DNA, 592 bp, Homo sapiens
cagggctttgtacagaaaacctctgagggtcagttgagtgacccacttaccctgccattccccaccctgctggggtcctcctgctacttcaactccatcaccacagagactcaattcctgcactctgaggttcaaatctgcatctgctgaagaatcttccagaactgcaactcccatctgcactgggagcatgtctggcccacaccagctcaagcactgtgtgaagggtcccagttattcagtgtgaaattgtgtaagactttctcctggagacaggacctttgcaatcacagcttggggaattgtctttacaataaccacttcctcttagggagtcagcagcctgggctcaaatcctgcttggtcattaagatarttttgtgactctagacaagtcacagcacccctcttagcctacatttcttcatccattcaacaaatattcacatagcagctaccggcaccaggaatagagaggggagcatgattgataaatcatcttagaatttatgattgcattatgggagttactcagtaaatgagtttttaaaaatcagggggagggggaaaacctttgaagaacaatttggca

SEQ ID NO: 238265 - DNA, 338 bp, Homo sapiens
actcccatctgcactgggagcatgtctggcccacaccagctcaagcactgtgtgaagggtcccagttattcagtgtgaaattgtgtaagactttctcctggagacaggacctttgcaatcacagcttggggaattgtctttacaataaccacttcctcttagggagtcagcagcctgggctcaaatcctgcttggtcattaagataattttgtgactctagacaagtcacagcacccctcttagcctacatttcttcatccattcaacaaatattcacmtagcagctaccggcaccaggaatagagaggggagcatgattgataaatcatcttagaat

SEQ ID NO: 238266 - DNA, 392 bp, Homo sapiens
aagctaaccttgggaagcatttaatttatagtttaactttgaagcaaggatgataatagtccctccctaaaactgacaccttccttcttcaggggctcaaaccctgactaatgaaaggccayaagattaggattatgagaggggcctgcattctgctaaaatgtaggcatagtttctataatttcttactgctcaggagtcatatggccagaggtcacagaatttgtgacttcctcaattgctcttagagataatatcactattgtagaatctaagattggtcttttgagatgtttttaaaatttttgcattctggcaactcaccaaccccatccagacccatgactcatgtctcagccagtcctgtggccccaccaagaggcagactcagc

SEQ ID NO: 238267 - DNA, 568 bp, Homo sapiens
ttgctgtactccttggctataaatctccacttgtccttgttgtatttggagttgagcccaatctctttcccctatagcaaaacccccattgcaatagtttcttgcgtgagacaaagtagcagacataagacaccttatttggtcatttctgcttgctcacataatttcacaaaacccctacctctgtgatgatgtgcagctttgaagactaaacaagatagagaacacgacctcccacatctcttccctgactcactgtattccttaaaagataaataaccctaatccttgcctcttcctacacaggagataaaaagtctgacagagttagygattgtacctctgtaatttataaccagatatgctcttacacccagactttgatgtagttctgtgataatgtgacttctgagcaagtctgatgtgcttttgcacactctgacaccctgccatctctatgtaagcagtgggttgaaacactgttctgggcagtctaacaggaatgctcctgggctattggcctcagtctctgtcctcaagacttccgaataaaactactttaattctt

SEQ ID NO: 238268 - DNA, 365 bp, Homo sapiens
ttgacacctcgattttggacttccagcctccagaactgtgagagaataatacatttctgtagttttaagctatttggactctgatactttgttacagcaaccctgggaaactaatataatcagccatctccttaaatgccaagccaacaagtgcctttattgagagacaccytgtagtctcagctactagggaggctgaagtgggaggactgcttgagcccaagagtttgaggctgcagcgagctatgcttgcaccactgtactccagcctgggtgacagaatgagaccttatctctgtcttaaaaaaaaaactatcttgttttgtaaaaattaagtctccataagaagcaaatatactattgat

SEQ ID NO: 238269 - DNA, 365 bp, Homo sapiens
ttgacacctcgattttggacttccagcctccagaactgtgagagaataatacatttctgtagttttaagctatttggactctgatactttgttacagcaaccctgggaaactaatataatcagccatctccttaaatgccaagccaacaagtgcctttattgagagacaccttgtagtctcagctactagggaggctgaagtgggaggactgcttgagcccaagagtttgaggctgcagcgagctatgcttgcaccactgtactccagcctgggtgacagaaygagaccttatctctgtcttaaaaaaaaaactatcttgttttgtaaaaattaagtctccataagaagcaaatatactattgat

SEQ ID NO: 238270 - DNA, 442 bp, Homo sapiens
ctctgatactttgttacagcaaccctgggaaactaatataatcagccatctccttaaatgccaagccaacaagtgcctttattgagagacaccttgtagtctcagctactagggaggctgaagtgggaggactgcttgagcccaagagtttgaggctgcagcgagctatgcttgcaccactgtactccagcctgggtgacagaatgagaccttatctctgtcttaaaaaaaaaactatcttgttttgtaaaaattaagtctccataagaagcraatatactattgataactcttacataatattgctctggaacatgacattttcctattaaaaccatttgtgactaatagcactacagagtttctatcctcttttcttgaatgcatgtcatgttgtttgtggttaagcttttttatataaaggcattgatttcaaaaaatc

SEQ ID NO: 238271 - DNA, 575 bp, Homo sapiens
tgatgctttcacttccccttatcacctgcctcccgcgctgtgcccaccccaggtctgttggcagcagagaactcacaagagaaggtgcctcagcggatgctgtttctgtcttcatctcacagtcttaatctgggtggaagaaaggcaggagagaggccttatctcttttctagggartattcccatgcaaacaacaacagggtgagaaccagagccatcaacattctggtgaatagaagtcaatcggaggagtccagccagtggcgaggtggctcatgcctgtaatcccagcactttgggaggccgaggtggaaggattgcttgaatccaggaggtcgagaacagccctgggcaacatggtgaagccccatgtctacaaaaaaaaaaaaaattagtcaggcatggtgacacatgactgtggtcccagccgcacgggaggctgaggtgggaggattgcttgagcctgggaggtagagactgcagtgagtggaaatcacaccactgcactccagcctgggtgacggagctgagatcttgtctcaaaaataaataaaataaattaaaaaattaaaaag

SEQ ID NO: 238272 - DNA, 323 bp, Homo sapiens
agaattcttcctgaactgttccaagaccatcaagatggcacctctattagtctggaagaaccacagtattactgggcttgaagtgtcccctaaagcagatacagctaagatcacaacactcaagtcatttcaaaatatctgaaagtccttcccaaggagagctacaaataaacccagacagtgaagactgtaataaatacctaatccttccatgcccagacaccaaagaatatctattagcattatcaccatccygtaaaataaaatctaaccaaataaactaaataaggcaccaggaaacaatgccaaagaaacagagatat

SEQ ID NO: 238273 - DNA, 631 bp, Homo sapiens
ttataagagcaacattaacaatgatggacacttaaatggagaagtaaaatctcaaaaaaacaacaacttaactttacactttaagaaagtagaaagagaacaaatttcagcacaaagtaagcagaaggaagggaataataaagatcataaataaataaataaaaattagaaataaataaaatagacatgagaaatacaatagaaaagattaataaagctaagagttagttttaaaaaatataaacaaaatttaaaaaattttagctagacaaggaaaatagaaagaagactcaaataaataaaaytataaatgaaaaaggagtcattatagctgatatgacagaaatacaaagaatcatagacaactactatgaacagttatatgccaacaaattaagtaacctggaataaatggttaaatttcttgaaacatacaccctgccaagactgaatcataaagaaattgaaaaactgaaaagaccaataatgaataaccgcaaaaagcctatgacttgatggctttattactggattctaccaaacaattaaggaagaattaatgctaatacttctcaaactcttgaaaagtagaagagggggagctctttttatttcaaagcataaggcaagc

SEQ ID NO: 238274 - DNA, 273 bp, Homo sapiens
gagctgcaatctagtcctgactcccatctgccatgatctcccatgatttgctttyaacaaaaatgaggactggagagagagaaattatgtttcaaaaattatcctacatttgtcattaaattctagaatcattagttgttttttgcctacaatttggactaatcctactcattcctgtgaaccaaccagaaaactctggctgcagctcagaagaaacaaaagaaatgtgtagtgtaaaaatctggatcaatagtctagttctgggcagttacc

SEQ ID NO: 238275 - DNA, 273 bp, Homo sapiens
gagctgcaatctagtcctgactcccatctgccatgatctcccatgatttgctttcaacaaaaatgaggactggagagagagaaattatgtttcaaaaattatcctacatttgtcattaaattctagaatcattagttgttttttgcctacaatttggactaatcctactcattcctgtgaaccaaccagaaawctctggctgcagctcagaagaaacaaaagaaatgtgtagtgtaaaaatctggatcaatagtctagttctgggcagttacc

SEQ ID NO: 238276 - DNA, 531 bp, Homo sapiens
tcattatttaaaaaataaattttataaggctatagctgccatagatagtgattcctctgatggatttgggcaaagcaaattgaaaaccttcggcaaaaccrtcatcattctagatgactttaagaatatttgtgattcatgcgaagatatcaaaatatcaacattagcaggagatgggaagaagttgatttcaaccttccttggataactgagggattcaagatttcagtggaagaagtcactgcagatggcatggaaatagcaaaagaactagaattagaagtggagcctgaaggtgtgtctgaattgctacaatctcatgacaaaacttgaagggatgaggagttgattcttatggatagacaaagaatgtggtttcccgtggtttcactaatcttagtgaagatactgtgaacattgttggaatgaccacaaaggatttagaatattacatgaacttagttgataaagcagcagcaagatttaagagaactgacttcaattctgaaagaagatctgtgggtaaaatgc

SEQ ID NO: 238277 - DNA, 396 bp, Homo sapiens
cattacagagttgaaataagataactttaaatcagtgaactggtctatataaaggcagaagaataagttaaaactttattttttattttctcactgtaatgtaaaatgtcattaaattaaataaataaaaatataaaactattccctcatcagttatgttctaggtttataagacaatagatcatgattaacagcttttctattattaatggaaaatgaaagggggtagaaaacaccgcatgttctcacttataagtgggagmtgaacgacgagaacacatggacacagcggggaacatcacacactgggacctgtcaggggtgggtggggagagggagagcaaggcttcatacccaggtgatgggttggtctgtgcagcaaaccaccatggcaca

SEQ ID NO: 238278 - DNA, 595 bp, Homo sapiens
attttaaaaatctacaaatttttttcattgaaacaatggattatgaatatgaatatcaattttcatagaattatattaattacaaaaatcaagttttaaagatagtattaatgtgtgaaaaaatacttatcttaatttttaaaatgtactgtatggtattaacatgaactagaactagattgaagtaaagaataaaatatattcaaatctcaaaatggaaaaatgattatatatttgaggtaaatcctagacagagtatattaaaaaattggattataaaaaatatgaagataaagaatgagaaaaaatagagtccaaaaacagacagacaatattgatgtagtaatcattctaaaacgcagtatttcgttacaaataatgcacattgtgatatattttgaataataaaaggtttgcaatatttgaattgtctattaaaagcatgacactgttctgttaygggaaatctacttcattactgggagctgaataagacactctgcagattttaaaaattttatttcatctttaaacactagtgctggaaggaaattagagttcatgtcccaacaaaccttcacactttgtagaacag

SEQ ID NO: 238279 - DNA, 488 bp, Homo sapiens
tcattcataatatattgctagaatatctgtttarttaggattaacatgtaggagggaagaaaaacaaatgcatatactgaaaaaagtcacagagaaaagaaaaattgcttgattgtggtttagaatgggcatagttttctaattcaattcttcaactatttgagtgcccattctatgaaaatctccatgtttccttctttttttttctttttttttttacaatacttttcttctttcctaattatatcacaatatatgcagtgttagccagaaaatttagaattatcctagacttcactttctctcttaccttttctgtctagttagactctatttaaaacacaattctcttcttggtgtctcatctccctatctacccaccttatcctcattactcacagtgtttcagttggactgtcgatgaatttcctaatggggttcctcatcaccagactctttcaagaattataaacactgcctaccactcc

SEQ ID NO: 238280 - DNA, 357 bp, Homo sapiens
cacagggattttcaattattttctcatttgttttagtgccatcattacaaagaaaataaaaccattaatcaaaaagtgatgtttatttttaaatatcctttccaatcaccaagactatatgatattttcaaagtgtgacatgcactttcataactccttacctttttattccattctctaagcctattttcatgtatrtatatatatatatatatatatatatatatatatatatatatataaatgtattcttcaacactcaactgaaaagaccgctcatttatttggctttctctgagatgacttattcaggcaggtttaaatgcaccctaacattgcctgtaaatttattgtgcc

SEQ ID NO: 238281 - DNA, 521 bp, Homo sapiens
aagggaggcacagggattttcaattattttctcatttgttttagtgccatcattacaaagaaaataaaaccattaatcaaaaagtgatgtttatttttaaatatcctttccaatcaccaagactatatgatattttcaaagtgtgacatgcactttcataactccttacctttttattccattctctaagcctattttcatgtatatatatatatatatatatatatatatatatatatatatatatataaatgtattcttcaacactcaactgaaaagaccgctcatttatttggctttctctgagatgacttattcaggcaggtttaaatgcaccctaacattgcctgtaaatttattgtgccacttatttttagttttattattattataattagatttttgcatttctcttttctgttgtagattaaactactttaatagcttacatttattraactctcaccaggtgtattgtttcttttaattcttatgagactcctacgtgggagatactatta

SEQ ID NO: 238282 - DNA, 615 bp, Homo sapiens
ggaggaagtaaataaaatttgagagtgggcatggcaaagttttgattttaaatttttaaaaatatttttacaatgcacacataagtttaagatgtcttgtgaaagtccacattgaattctggaagcacttgggaattcatacatacaaattattctgataacacctggatcaaactggtttgcccatcacaattataacacaggcatatattactgtaacatatttttatttccccatcttagatgttttatatagatcattaaaactaatctcaaattgttaattcaacaaatgacatttcttgttggttttggtagcatacatagttctcaatttgcaaatagtcaacatttgaaaaccaacartattttttcctttttttatttgcctgtttattattttctatctctatacctgactcccattcttcccaaacacaggcaaccatttttgttgtgcttattgcatatttagtatttaattatgttctttctcaaatgattattttgtctgcagacatttagtatacataactggaattatatgacaaaatatagtttccattttaaaataatcattttatttctgaggtcattcacattcctaggtttttg

SEQ ID NO: 238283 - DNA, 600 bp, Homo sapiens
actaaaccaacaaagtgtctttgagattgatcaatattgctagatttagctgtagttctttaaggctgcatattattcccttgtgtgaggaatttacaatacagtcatcatttgactttggatgaatattcgatgggttatttcttgtttgaagctattacagctaatactggaattgacactagtacatgccttttggtgcccatgtgcatgaattttggttaggaacatatctaggagtagaattgtttcaagcccagtttagtcaatcaaaggcagttgtcttcttcttacaatttcagggaaaggattatgactaatccatctytggtcaggattgtagattttgtccaattatttatagttaggatgtcgattatcctgcccacttaatggactacggaaagttacatttcaatgaataggcacaggcatggaaagaaattgaattatattttcactgtactgaccacaaattaacctaataaccttttcttctttagaattccttattctagttgaccatacgaccatcaaaacagtcctataatcataaactttatccaatagaatcctttatccagtaggatggcttatcca

SEQ ID NO: 238284 - DNA, 571 bp, Homo sapiens
ccacttttctgttcctgaagaggcccttttgtgcataatattctaaaatgaagacatttcaagccatacaaattacctccaagttttcatgatgtatgggaagattttcagtaggtgtattatattcacggtaccaaatgctgaccagtgttgctccattttttaaatcttgaaaagggtttctgtacttacctggtttgccaagtatgccagtgtgatgaaactgcccttattttaaaagccagtcaaagawtccactgattgacatttgataaataaacatcaggattatgtttaaaaaaaaaaaaaagaaactcactcaaaaccacacaattacatgtaaattgaacaacctgctcctgaatgactcctgggtaaataatgaaattaaggcagaaatcaagaagttctttgaaaacaatgagaacaaggagaaaacatactggaatctctgggacacagctaaagcagtgttaagagggacatttatagcactacattcccacatcagaaaggtagaaataattcaaatcagcacgctaacatcacaattaagagagctagagatgca

SEQ ID NO: 238285 - DNA, 571 bp, Homo sapiens
taacccattaaatgaaagccacatccaatattttttatattaaatatttaatacttagtacatattaaatattatttatttaatatattaaataatatttaatatgtactaagtattaaatatttaatataacttttacattatctttaacttaggctccctgtgagattytctgaagccttattgtttaacagagataaattttaaggaatatttttaaggtctttaggagccctttaactatcaggagggtaacatgaagcaccaaagatctttaaaacagatattaaaacatctcgccctataaatttggtcttttgccagaattcatttcctaattttagaattgtttgctatctgcaaaggctaaaaataaggaagaatttcagtttttaacccaccaagcctcagttccactatatttcacaacttattgtttagctcatctcttttcttttacattttatcctaggcagtgggaatacagttggcactttcaatgttcttcctggaaatttattttcccaataccaaaatctgtgcctactacctattacctattactgtttaa

SEQ ID NO: 238286 - DNA, 571 bp, Homo sapiens
taacccattaaatgaaagccacatccaatattttttatattaaatatttaatacttagtacatattaaatattatttatttaatatattaaataatatttaatatgtactaagtattaaatatttaatataacttttacattatctttaacttaggctccctgtgagattctytgaagccttattgtttaacagagataaattttaaggaatatttttaaggtctttaggagccctttaactatcaggagggtaacatgaagcaccaaagatctttaaaacagatattaaaacatctcgccctataaatttggtcttttgccagaattcatttcctaattttagaattgtttgctatctgcaaaggctaaaaataaggaagaatttcagtttttaacccaccaagcctcagttccactatatttcacaacttattgtttagctcatctcttttcttttacattttatcctaggcagtgggaatacagttggcactttcaatgttcttcctggaaatttattttcccaataccaaaatctgtgcctactacctattacctattactgtttaa

SEQ ID NO: 238287 - DNA, 571 bp, Homo sapiens
taacccattaaatgaaagccacatccaatattttttatattaaatatttaatacttagtacatattaaatattatttatttaatatattaaataatatttaatatgtactaagtattaaatatttaatataacttttacattatctttaacttaggctccctgtgagattctctgaagccttattgtttaacagagataaattttaaggaatatttttaaggtctttaggagccctttaactatcaggagggtaacatgaagcaccaaagatctttaaaacagatattaaaacatctcgccctataaatttggtcttttgccagaatycatttcctaattttagaattgtttgctatctgcaaaggctaaaaataaggaagaatttcagtttttaacccaccaagcctcagttccactatatttcacaacttattgtttagctcatctcttttcttttacattttatcctaggcagtgggaatacagttggcactttcaatgttcttcctggaaatttattttcccaataccaaaatctgtgcctactacctattacctattactgtttaa

SEQ ID NO: 238288 - DNA, 571 bp, Homo sapiens
taacccattaaatgaaagccacatccaatattttttatattaaatatttaatacttagtacatattaaatattatttatttaatatattaaataatatttaatatgtactaagtattaaatatttaatataacttttacattatctttaacttaggctccctgtgagattctctgaagccttattgtttaacagagataaattttaaggaatatttttaaggtctttaggagccctttaactatcaggagggtaacatgaagcaccaaagatctttaaaacagatattaaaacatctcgccctataaatttggtcttttgccagaattcatttcctaattttagaattgtttgctatctgcaaaggctaaaaataaggaagaatttcagtttttaacycaccaagcctcagttccactatatttcacaacttattgtttagctcatctcttttcttttacattttatcctaggcagtgggaatacagttggcactttcaatgttcttcctggaaatttattttcccaataccaaaatctgtgcctactacctattacctattactgtttaa

SEQ ID NO: 238289 - DNA, 612 bp, Homo sapiens
ttttaattatcattatgagtacatacatatctttgactattaggtccacattctttgtgtggtaccaatattttcctatcatttttatacctatacattagaaaaatctcttgattgttatgtttgtacaaaaaacatatttctaaaattatatttatttcaaaatatatgttatgttttaagtcataaaaaataatttgggctccatcaacagtgcatatatatatatgtgtgtgtgtatatgtgtgtgtgtgtgtgtgtgtgtgtgtatatatatatatatatatatatatatatattattgttacttccagtggtgaaaaatatgcagcttagctgattggaaagcttctcttactgaccccatttcacatacaaaactcaccaagataccaaagatactattatacgtctgtatataatttttatttatttatttaaattttaggttcagggatagatgaacagatttgttatataggtaaactcatgtcatggagatttgttgtacagattattttgtcacccaggtattaatcctagyacccaatagttattttctgatcctctccctcctcccatcctctatcttcaagtaggcccagtgtctgt

SEQ ID NO: 238290 - DNA, 413 bp, Homo sapiens
aaggaaagaatgggatagtggttgccgtaatttgcagattctgctacacaaattgacatctcaaaaacaaactgatctataggaatacagarcaaagctctttagatggtaaaaataaatgcattgggaatttgagagaaaaactatccaattaatagtaatataatgatggactccaaggctattgatttttactaggtaaaaagaaatagaactcactgtgacatactctctgaatatattagtgcagtgtggtcttctggctaaaaaaaattataataccatgagcaaggagaaatagaattttaccctcaaaataaaacatcttaaactaaataattaaagtgcaagaaaaagagatgcaccttaaaatctaaaaagggataaaaattgaaaagataaaagaagtgctt

SEQ ID NO: 238291 - DNA, 555 bp, Homo sapiens
cacaaggaaaagggcaaagcaaagatcacaaggtaaaggggaaaatcaaaaactcctgataagggtctatgttcagctgtgcatgtattgtcttgataaacatcttaaacaacagaaaacagggttcaagagcagagaacctctctgacctcaaatttaccaggaagtggttttttcctcaccctaataagcctgagggtaytgcaggagaccagggtgtatttcagtccttatctcaaccgcataagacagacactcccagagcagccatttatagacctccccctaggaatgcaattcctttcccagggtcttaattattaatattctttgctaggaaaagaatttattgatatcttccctacttgcatgtctgtttataggctttctgcaaggagaaaaatatggctctattctgcccgaccccacaggcagtcagaccttatggttgtctttccttgttccctaaaatcgctgttattctgttctttttcaaggtgcactgatttcatattgttcaaacacacgttttacaatcaatttgtacagttagat

SEQ ID NO: 238292 - DNA, 581 bp, Homo sapiens
taattttgcctcatgtaaatgtttacatcatgtttcattgttcatccctaaaaataccacagttaatagagaaaagcaaatatatagctacatatagaaagaaataatacacatgtaatcattattaactgtttccacagacacatgtttatttctctacagtcataacttcataaaaacagcataaagagttttctttaaatattaaaggatcaatgggtctttttactaacaatatctttagttatattttggttgaaacraagttagtaaagctctagaatgacaaattctacaagatatttaaacaattttctcattaggcaagttttctcttcagtttgattactgatctacattaacatataatttttccttgtttagatttctctattgaaagagatctgcttcacagcaagataaggcattagcagttgcacttaacaatttcatatagcagtagttgtagaattgaactgagtatcaagcatatgacttcttgttcccttaagaagagtatttcatttcaatgtgaatttcacattggaaaaaactgaaataatgattatgttgcacttgga

SEQ ID NO: 238293 - DNA, 625 bp, Homo sapiens
gctcactttaggttatcacctttaaagaagagataataaatagttatatgctattacastcaagatcaaatacagtttatgaagtattttctactaacattcttccatttttgttttagaattgaattatattctatattgggattctatactgaattctatttcaggaagaattagatcttttcataggacaatgagtacaatatacttttaaagttatatcatggaaggtcactggacattgtttctatttctagcttaaaaacttgataaaataaaaaagaggcctctgaattgtgttgtaatatatgtaagaaacttgggacacaaaaaacacagaaaaacacagatgctgaagagaaaagagctattggaaataaagaatgagttgcaaaagtttaaacagacagtaggaaatatgtggtatttatgagtatgtatatttaactactaagagaacaatcccacagaataaacagcatgaagcatgtgaaatcatttgttaaatttgcaaaagaatatgtgttccatctctctttttctctttctccactttctttcccttcccccaacaagattgggttgacacgtcttttaaaataaaccataatccacttgtcactta

SEQ ID NO: 238294 - DNA, 643 bp, Homo sapiens
agccaaacagagaggcacatagtgggaggtctggaagggtcctaagcacaggagcctctaaccccatggagttggggtgtgccaccctcctggcatgtggatgtgttcactaactcagaagctccctgaaacccattgtttagggatctcatgtagatttcattaaatacatatgattgactaaatcattgtccataggcattggtgacgcaggctatagcctcttacccaggaattgtggggtggggctgaaagttctaaccttttaatcaagtcttgttctttctggtgaccagcttcatacttaagctgtctagtggcctgccaagagtcacctcattagaacaaaagactctcctatcacccttatcactgaggaaattccaacagtttcagttgttctgtaccaggaactggggacaaagaccaaatttcccattttaccataactaattaccagccatgtgacctttgatatgttgcttaatctttctgtgcctcagtttcctcatcaataaaatgaagacaattctagtatctacttcatagaattacagggaggattaartgagttaatatatgtaaagcacttagaacaatgcctgacacacagtaaatgctaaacatgtgttagttattagtg

SEQ ID NO: 238295 - DNA, 606 bp, Homo sapiens
gaattcctttctagctagatccggtccatgtgttcctyccatgtacaggtgctggctgagaccagcacagctttgctctctgttgtgaatgggcaacactgagttcaatgtgaagtcccccagtttcggtgctcccccctccccaagtttacagactatctctccatgccgaatggctgctgctgggacagggggtaggggtggtattggtgatttaagactgtctctcctaccctctttaatgcctctatcagtgacagtaagttaaaactaggtactgtgattgctcacctgatttttaggtcttgtaacagtacttttctgcgtacagatagctgttaagatttggtggtcctgcagtggtgtggaggcaaatggtttaggtttctattttgccatcttgctctacccgtcatcaagtctcttgaagctttcaaaattattttgtatttgttttaatgatgtcttcaatttcagaatttgtattttgttcctttgtaaactatctatctcttttgtaaatttctcatttatattctgaattggttttctgatttcttttttatcatttttcagaattttcttgtactgcactgagcttcttta

SEQ ID NO: 238296 - DNA, 606 bp, Homo sapiens
gaattcctttctagctagatccggtccatgtgttccttccatgtacaggtgctggctgagaccagcacagctttgctctctgttgtgaatgggcaacactgagttcaatgtgaagtcccccagtttcggtgctcccccctccccaagtttacagactrtctctccatgccgaatggctgctgctgggacagggggtaggggtggtattggtgatttaagactgtctctcctaccctctttaatgcctctatcagtgacagtaagttaaaactaggtactgtgattgctcacctgatttttaggtcttgtaacagtacttttctgcgtacagatagctgttaagatttggtggtcctgcagtggtgtggaggcaaatggtttaggtttctattttgccatcttgctctacccgtcatcaagtctcttgaagctttcaaaattattttgtatttgttttaatgatgtcttcaatttcagaatttgtattttgttcctttgtaaactatctatctcttttgtaaatttctcatttatattctgaattggttttctgatttcttttttatcatttttcagaattttcttgtactgcactgagcttcttta

SEQ ID NO: 238297 - DNA, 573 bp, Homo sapiens
tccttccatgtacaggtgctggctgagaccagcacagctttgctctctgttgtgaatgggcaacactgagttcaatgtgaagtcccccagtttcggtgctcccccctccccaagtttacagactatctctccatgccgaatggctgctgctgggacagggggtaggggtggtattggtgatttaagactgtctctcctaccctctttaatgcctctatcagtgacagtaagttaaaactaggtactgtgattgctcacctgatttttaggtcttgtaacagtacttttctgygtacagatagctgttaagatttggtggtcctgcagtggtgtggaggcaaatggtttaggtttctattttgccatcttgctctacccgtcatcaagtctcttgaagctttcaaaattattttgtatttgttttaatgatgtcttcaatttcagaatttgtattttgttcctttgtaaactatctatctcttttgtaaatttctcatttatattctgaattggttttctgatttcttttttatcatttttcagaattttcttgtactgcactgagcttcttta

SEQ ID NO: 238298 - DNA, 573 bp, Homo sapiens
tccttccatgtacaggtgctggctgagaccagcacagctttgctctctgttgtgaatgggcaacactgagttcaatgtgaagtcccccagtttcggtgctcccccctccccaagtttacagactatctctccatgccgaatggctgctgctgggacagggggtaggggtggtattggtgatttaagactgtctctcctaccctctttaatgcctctatcagtgacagtaagttaaaactaggtactgtgattgctcacctgatttttaggtcttgtaacagtacttttctgcgtacagatagctgttaagatttggtggtcctgcagtggtgtggaggcaaatggtttaggtttctattttgccatcttgctctacccgtcatcaagtctcttgaagctttcaaaattattttgtatttgttttaatgatgtcttcaatttcagaatttgtattttgttcctttgtraactatctatctcttttgtaaatttctcatttatattctgaattggttttctgatttcttttttatcatttttcagaattttcttgtactgcactgagcttcttta

SEQ ID NO: 238299 - DNA, 573 bp, Homo sapiens
tccttccatgtacaggtgctggctgagaccagcacagctttgctctctgttgtgaatgggcaacactgagttcaatgtgaagtcccccagtttcggtgctcccccctccccaagtttacagactatctctccatgccgaatggctgctgctgggacagggggtaggggtggtattggtgatttaagactgtctctcctaccctctttaatgcctctatcagtgacagtaagttaaaactaggtactgtgattgctcacctgatttttaggtcttgtaacagtacttttctgcgtacagatagctgttaagatttggtggtcctgcagtggtgtggaggcaaatggtttaggtttctattttgccatcttgctctacccgtcatcaagtctcttgaagctttcaaaattattttgtatttgttttaatgatgtcttcaatttcagaatttgtattttgttcctttgtaaactatctatctcttttgtaaatttctcattyatattctgaattggttttctgatttcttttttatcatttttcagaattttcttgtactgcactgagcttcttta

SEQ ID NO: 238300 - DNA, 514 bp, Homo sapiens
ggaattctctttcccttgctaagtgctctgccagaaatttgtaatactaatagtcagctttaattaataggtgactgtgcctggagtcacagtcctcgcaacaataagttacatacacatcttattaaaccttcgaatgctgatgcctctgaaattttttctataataacacacccatctgtggtatgagtaccaaaaatactatacgcagaacatacctgatcaccatagatactaaaacaagagtatttgttgagtgaatacatgtttaaatacacgaaggctgaactcttctatatctttctgtgtatttctattctattacttatgttaayggtaatattttgatgaagatgatgatgataacaaagtctgcattttagagtgctttgatactgtgtaaacaaagaaacatttagagtttctttgatactgtgtaaacactatgtcaagcaaatacagttctttaataatatattctattatcaggaatatactatcagggacagacaca

SEQ ID NO: 238301 - DNA, 566 bp, Homo sapiens
aaagacacagtaaaatagagatctcctagtgctcaacaacacttaatagtagtacacaacagaattttttctactataatattactgaaaccagatattaaacccagggagtaaaactaaattctcccagtcatatcttatggtaaacatgctaaaatataaaattcagaataataaaaccagacatcactgaattaatctgtttttaagtatattactcatttatagaaaagaaatagaatcaatatatgagaatagaattatctataattcaaatgattaaatgataattattagatttctattaaaccaaggcatatgagttatttaaaaagatttatccccctttacagtcatttttattcattcaataaatgtatattaagtatctgtgttctaggggcagtgagttctagggattaatcagtagggacacagtaacagcctaagcagacttgcttcttatgtctactcactggaacatttacagaaaatgaaggaaatgtaaaaaccagcrtatccccatgtggggatactgcagtaagtaaaatagagtactatgaaaa

SEQ ID NO: 238302 - DNA, 578 bp, Homo sapiens
ttaaagggaagtttcaaacctacaaattaacagttttaatatgctgttcctggtgattaactgcttcattttaacaggcattcactgttaacactgcaactgttaatttgaacggcttgatttttaaattctaagaagagtaaaactggttcaaaaaaatacctaccatttttatcattggcctaaccatctttatttagaaaatcttcttgaataacattattctcctctcaagaaatttggctcttttacctccaataggccctgatcagaaatcttgctgttttggtttggttgtgggttttttggtctctacctcaatcgcaaactttgcgtgttactatctctttggagactgtatgaaaagaaaaatgttttgaggaaaatctcctttacgtaatcaaacatttatatatgtttgtagwttttagaaataaatttagaaaattgtacctcaatataaccaacttacaatgacagatattagaaaatattgtaaattaaatctgttgaaaaatctaaaatacagccagctttgaagaaactgacttctgacttttagagttttacttgttcat

SEQ ID NO: 238303 - DNA, 578 bp, Homo sapiens
ttaaagggaagtttcaaacctacaaattaacagttttaatatgctgttcctggtgattaactgcttcattttaacaggcattcactgttaacactgcaactgttaatttgaacggcttgatttttaaattctaagaagagtaaaactggttcaaaaaaatacctaccatttttatcattggcctaaccatctttatttagaaaatcttcttgaataacattattctcctctcaagaaatttggctcttttacctccaataggccctgatcagaaatcttgctgttttggtttggttgtgggttttttggtctctacctcaatcgcaaactttgcgtgttactatctctttggagactgtatgaaaagaaaaatgttttgaggaaaatctcctttacgtaatcaaacatttatatatgtttgtagtttttagaaataaatttagaaaattgtacctcaatataaccaacttacaatgacagatattagaaaatattgtaaattaaatctsttgaaaaatctaaaatacagccagctttgaagaaactgacttctgacttttagagttttacttgttcat

SEQ ID NO: 238304 - DNA, 561 bp, Homo sapiens
ataaaccagcaaaatttatagttaagtatatttaatagttgaaggtgtggctgtaaaccttaagacaatctataaaatttacatctatgaaagtagaagcatattgaaaatataataaaaaccagatattaaaactccagaagatttcaacaaaatatgggatattggaagaggaagaaagtgacagcttgcaaaaagyatttttatttggaaggaaatgttatagttgctgattaattttccatgttgatggaaaaatatgtttaaatattaaatgtttaatataaatgttacataaataatagtggagtcatcatattagcactggatcacctacctcaagacaattattttacatgagaaagataactctgtcctttggaattacttattactgctatgtgcaactcaacctaattttgactgatgtgtattctctttggatgaaaaaataagtttgacataatttttaaaaatatcatttgagattttagcttcaaacttttatttttaagcatcaattttacatgtaatagtaggtattttttccctagtgtttat

SEQ ID NO: 238305 - DNA, 534 bp, Homo sapiens
ctaagaatggtccttggtcatttatcctaactgggacttggtgggccttttccatttgataattatgtactttaacaatacattcttttttyatgaggaatttatgctgggaagtagagacaaccaatctagtccttcttcttgaactggaagtgagtcacctttcaaaaagtagatatgagtaatgaaaccttcacttaaaaaaatcttgaagattgacgtttgtccttaaggaaacttgagctgatatggcagagtagcacaactgatgcagacacagaaattctaaataaatatgattttcaaaagaaaaaaatttccttaatgtagaattttaagtgctagaaaaaaaggagcaaaatcaaaaccaattcagaaagtggagacaaggatgccaaaactgagggctcagttgttttgtttttaagtaaggacccaggtacctgggggttgaagtattgccctggtttccaagaaagcaagaaatctgaaagggagtctctaacataaaacttgcagctccaatgggctgca

SEQ ID NO: 238306 - DNA, 534 bp, Homo sapiens
ctaagaatggtccttggtcatttatcctaactgggacttggtgggccttttccatttgataattatgtactttaacaatacattcttttttcatgaggaatttatgctgggaagtagagacaaccaatctagtccttcttcttgaactggaagtgartcacctttcaaaaagtagatatgagtaatgaaaccttcacttaaaaaaatcttgaagattgacgtttgtccttaaggaaacttgagctgatatggcagagtagcacaactgatgcagacacagaaattctaaataaatatgattttcaaaagaaaaaaatttccttaatgtagaattttaagtgctagaaaaaaaggagcaaaatcaaaaccaattcagaaagtggagacaaggatgccaaaactgagggctcagttgttttgtttttaagtaaggacccaggtacctgggggttgaagtattgccctggtttccaagaaagcaagaaatctgaaagggagtctctaacataaaacttgcagctccaatgggctgca

SEQ ID NO: 238307 - DNA, 553 bp, Homo sapiens
ccactcttttccacaatggttgaactaatttacactcccaccaacattgtaaaagtgttcctatttcttcacatcctctccagcatctgtttcttgactttttaatgattgccatgctaagtggcctgagatggtatcacattgtggtttggatttgatttctctagcgaccactgaactcttgattagtattttttagatgaataatgtaatcgaaaacttctttatatattttttccatttgcatctctatatttttaaactgcctatccatgtctcttccctgtttttgttctagtggtgtgcttgcttattttcttatataattkgtaagagctttttatattctgtatgcaaggactttgtattatatatcacaaatacgtacatcaacactgtggtttgtctttctctctcttactagtgccttttgattaacagaatatcttaattttattgtacaacaatgtatcaatagtttctcttatatttcatgttttctttttaccatttgaaaaaaagctttatcttgttcaagtatttgacgtaaaga

SEQ ID NO: 238308 - DNA, 553 bp, Homo sapiens
ccactcttttccacaatggttgaactaatttacactcccaccaacattgtaaaagtgttcctatttcttcacatcctctccagcatctgtttcttgactttttaatgattgccatgctaagtggcctgagatggtatcacattgtggtttggatttgatttctctagcgaccactgaactcttgattagtattttttagatgaataatgtaatcgaaaacttctttatatattttttccatttgcatctctatatttttaaactgcctatccatgtctcttccctgtttttgttctagtggtgtgcttgcttattttcttatataattggtaagagctttttatattctgtatgcaaggactttgtattatatatcacaaatacgtacatcaacactgtggyttgtctttctctctcttactagtgccttttgattaacagaatatcttaattttattgtacaacaatgtatcaatagtttctcttatatttcatgttttctttttaccatttgaaaaaaagctttatcttgttcaagtatttgacgtaaaga

SEQ ID NO: 238309 - DNA, 593 bp, Homo sapiens
gctctccctttgtgcagcttctttatttctagtcctctgatcctaaattctagctaccctaaatttcctgacgtacaatctctgattaatcaattcagtgagaccgccattctctgtttgtccctttcttttctgtgtcctagaaattttctctaggcactaagctggttcctggagacaatgagggcttactttgtttctttcttttttcttagataccacagtccagcattaattgtcaaaaaactgaaatttggggggggatatattttactstaatatattttagttgtttagctgcttcatatagcttagtattttgtgttctagtttttttgtatttatctaattgtttaacacaagagagtaagtttatccctgttattctgtcttggtagaaaacaggaatccagatgctttcattatattatatatctttttctcattaatttatgggacatctttatgtgtctgtataaaattcctatatatagatagatagatagacagcaagactcttctgcacatctctgattttacttttcagtggattcaatggctttatagatttttttgatttgtcacattcaaaa

SEQ ID NO: 238310 - DNA, 579 bp, Homo sapiens
cctttgtgcagcttctttatttctagtcctctgatcctaaattctagctaccctaaatttcctgacgtacaatctctgattaatcaattcagtgagaccgccattctctgtttgtccctttcttttctgtgtcctagaaattttctctaggcactaagctggttcctggagacaatgagggcttactttgtttctttcttttttcttagataccacagtccagcattaattgtcaaaaaactgaaatttggggggggatatattttactgtaatatattttagttgtttagctgcttcatatagcttagtattttgtgttctagtttttttgtatttatctaattgtttaacacaagagagtaagtttatccctgttattctgtcttggtagaaaacaggaatccagatgctttcattatattatatatctttttctcattaatttatgggacatctttatgtgtctgtataaaattcctatatatagatagatagatagacagcaagactcttctgcacatctctgattttacttttcartggattcaatggctttatagatttttttgatttgtcac

SEQ ID NO: 238311 - DNA, 572 bp, Homo sapiens
tcacatgctactttgtattattacattatattaagttgtctattttatatgtcttatattacaattatatagatagatacagatttataatactttgattttcgtcattggcacatgctcaaaaagtttggaattcattggattaaatgaggttgctcaaatttcagtcctcacatactattttggaagttttgctgtatttgactattgccaaagataattttaatgtactgctaaaaaggacacagttaaggcttgaaaattcagaaagtgaaagcccatattagacagaagatatacaggaatgtgataaatatatgattgatgatagattagatagatgatagatagatagatagatagatagatagatagatagatagatagayagacagacagacagacagacaaatagagctagataaccatcattctcagaagactttaggctgaacttaacaaatgcttgaaacgttcgtggtcatctccagtcccacaccagtaattcatgtgttctatgtaactggatggcaatgcccccatcttactttttactttgtcctaaaaaataa

SEQ ID NO: 238312 - DNA, 572 bp, Homo sapiens
tcacatgctactttgtattattacattatattaagttgtctattttatatgtcttatattacaattatatagatagatacagatttataatactttgattttcgtcattggcacatgctcaaaaagtttggaattcattggattaaatgaggttgctcaaatttcagtcctcacatactattttggaagttttgctgtatttgactattgccaaagataattttaatgtactgctaaaaaggacacagttaaggcttgaaaattcagaaagtgaaagcccatattagacagaagatatacaggaatgtgataaatatatgattgatgatagattagatagatgatagatagatagatagatagatagatagatagatagatagatagacagacagacagacagacagacaaatagagctagataaccatcattctcagaagactttaggctgaacttaacaaatgcttgaaacgttcgtggtcatctccagtcccacaccaktaattcatgtgttctatgtaactggatggcaatgcccccatcttactttttactttgtcctaaaaaataa

SEQ ID NO: 238313 - DNA, 503 bp, Homo sapiens
tgaatagacagttctcaaaagaagacacacatgtggcaaacatgcatatgaaaatgtgctaacatcattgatcatcaggggaatgcaagtcaaaactataataagatgctatctcatgccagttaaaatggttaaaatggcttttatacaaaaggcaggcaataacaaatgcttgccaggatgtggagaaaagggaatcctcaaacactgttggtgggaatgttagttagtacaaccactatggagaacagtttggaagtctctcaataaactaaaaaktgagcaactatatgatccagcaaatccactgctggctatatagtcaaaagaaaggaaatcattatattagagagatttctgaactcctatgtttgttgcagctctgtttacaatagctaagatttggaagcaacctaagtgtccatcaacagataaatggctaaagaaaatgtggtacgtacacaaaatggactattattcagccataaaaaaataagatctag

SEQ ID NO: 238314 - DNA, 432 bp, Homo sapiens
aagactgttcagaagaatgttattataccaatatagtaatagacaaaattaaaattaagggaatggcattaacataggtaaataggtatatgcataataattaaaataaaatttacttagaaggttatgacattttatgtatataacaacattgtcaaaaaagtagtaaagcaaaaattgcaaactctscagtgtcatcagacactgatatattaagcaaagtaaaataccttaaattcaacacattgttatataaaactaactaaaatttcaaagaaatgattacccgtaaaacacatttttaaccataaggcaactcaaaaacctacacttaaaagatagcttaaaaaataaaatatacttcaaaactttgaaatgcatttagaaataacatagttcttcaaacttttcttgtttgatttttttcaatct

SEQ ID NO: 238315 - DNA, 540 bp, Homo sapiens
aattatttcataaattttatgaaaatccttcatacttggtgtctaaacaccaagaagagttcagctgggctggttggagaggagatcaccccctggactgccaaactccaaacaccaggggaagatcatcttcctactacatcccttgctaagggatgtaaattgttcagtcaccttggaaaactgttttgcagttgctcaaactatcagacatgttaactttttgatacagacaggagacagggaaatactgggtaaagagygtggttccctgtaaaggccccacactcaagcctggaaacctgcagccctaagcgggaaaaggcattcttgttttcccacccaaaagttgccttttggcccaccatgcccctctatcctgtacccatgtaaaccccagaccccaggctccagaagcagatgaggaagagatgaacggaagagcagaggaatggcagaacagcatggaagagggaaatgaaggagtgtctgaacacaaagaagagttcagctggggtgtttggagaggagatcaccccc

SEQ ID NO: 238316 - DNA, 558 bp, Homo sapiens
gacacagctgaggaaagactgagcttgaggttatatagttgacatctgtagactacttcatgcaacaacagtagaataaaaattcttctcaagctcacatagaacattcactaagacagaccaaactctacataataaaacacaattaaacaaatttaaaataacaaaagttacgaaatctatacactcaccacattggaattaagttagaactcaataactgagatatggctgaaaaatccccaaagtgtggcgattaaacaacatattttaaaataaatactacctgagtaaaaaagaaattttaagagaaattttaaaatatttcgaactcaatgaaaatgaaaatacaacttgtcaaaatgtgtgagatgctgtgaaaagaatgcttaaagggaaatttatagmattgaatgcatatataagaaaagaagaaacaactaaaatcaataatctaagcttttacctgaaactagaaaaagagtaaattaaatgcaaaataataaaaattataaaaattagacaataaggaatgaaattggacacaaaatatcaatc

SEQ ID NO: 238317 - DNA, 664 bp, Homo sapiens
caacttgacaaagactatctacaaaaagactagttaacatcataattaatagttagaaaaaagagtttctcattaagattaggaacatgggaagaatgtcctcttccccaactccttttcaatatcatactgattgtcctagttaatgaaagataagaaaataaaataaaacatttacaaactgaaaagaaataagtttatatatatgtgttgaaacctatagaaatatataagacaaaaagtgaaccctaatgtaaactggacttacgcaataatgatgtgtcaatgtagctttatcagttgtagcaaatataccatctggtatggaatgctgatatctggggaggctctgggtgtatgggggcagggtgtrtatggaaattcttttaactttctggtcagtttgtctgtaaatctaatatcctttaaaaagtaaagtcttttcattaaaataaaaaacaatcctacattactttattggtgaattctaccaagcatctgaagaaaaattaataccaatacttgacaaactctttcaagaatcaggagaaagggaatagatcccaacttattttatgaagccagtgttacctgtatgtatacataaaagacatcacagagaaaaagctgactaatatcccttataaatatagatccaaaaatc

SEQ ID NO: 238318 - DNA, 570 bp, Homo sapiens
agctacttgatcaaaaatagctgaaaacatcttaagttttggaggatacatggacatctagatccaggaagttcaaaagttaccaaatagattccattctgaggttcattatagtaaaaccatcaaaagtcaaagacaaagtgagaatattaaaaacaccagtaagaaggaatccaatcacatataagagagtctctattagattaacagcagatttcttagcagaacttttacaggccaggagaaaaaggaatcatatattcaaagtgctgcaagaagaraaaaagataactatcagccaagaatactactgccagcaaagctactctttagaagaatagcttatacaagctatccttgtaaaaaatcagtagcatttatatataccaataataaactacttgaaaaaatgtcaagaagcaattcacttacaatagccacaaaatataaaacctagaaagaaacttcaagatgaaactatctctacaataaaaattataaatctatgatgaaaaaaattgaataggacaccaacacaaaaaatgaaaaggcattccatgttcatgaatt

SEQ ID NO: 238319 - DNA, 538 bp, Homo sapiens
ccataccctaactcactaagaaaatcacagacaccactaacactgcttacagtgaaagaaatcatacagagattacactactgaatgcacccagtatcaaagccaaattaccctacccaacaacatatatacgtcttcaagaaaaagtcctcacctgtaagagtatactcaaaaataggaaaaagtgactgttatacctggtgcacagataacaacataaggacacrggaaatatgaaaaagtaagaaaatatgacacctccaaaggaacataatgattcttcagcaatacatcttaatcataaagaaacttttgaaatcacaaataaagaattcaaaatactgatcttaaagaagctcagtgcagtacaagaaaattctgaaaaatgataaaaaagaaatcagaaaaccaattcagaatatgaatgagaaatttacaaaagagatagatagttcacaaaggaacaaaatacaaattctgaaattgaagacatcattaaaacaaatacaaaataattttgaaagcttcaagagacttg

SEQ ID NO: 238320 - DNA, 538 bp, Homo sapiens
ccataccctaactcactaagaaaatcacagacaccactaacactgcttacagtgaaagaaatcatacagagattacactactgaatgcacccagtatcaaagccaaattaccctacccaacaacatatatacgtcttcaagaaaaagtcctcacctgtaagagtatactcaaaaataggaaaaagtgactgttatacctggtgcacagataacaacataaggacacaggaaatatgaaaaagtaagaaaatatgacacctccaaaggaacataatgattcttcagcaatacatcttaatcataaagaaacttttgaaatcacarataaagaattcaaaatactgatcttaaagaagctcagtgcagtacaagaaaattctgaaaaatgataaaaaagaaatcagaaaaccaattcagaatatgaatgagaaatttacaaaagagatagatagttcacaaaggaacaaaatacaaattctgaaattgaagacatcattaaaacaaatacaaaataattttgaaagcttcaagagacttg

SEQ ID NO: 238321 - DNA, 579 bp, Homo sapiens
aaatactgatcttaaagaagctcagtgcagtacaagaaaattctgaaaaatgataaaaaagaaatcagaaaaccaattcagaatatraatgagaaatttacaaaagagatagatagttcacaaaggaacaaaatacaaattctgaaattgaagacatcattaaaacaaatacaaaataattttgaaagcttcaagagacttgatgacgggtagagcaagatggcaaaatagaaacctaaaccatttgcctccacaccactgcaggaccaccaaatcttaacagctatctgtacacagaaaagtactgttacaagacctaaaaatcaggtgagcaatcacagtacctagttttaacttactgtcactgatagaggcattaaagagggtaggagagacagtcttaaatcaccaataccacccctaccccctgtcccagcagcagccattcggcatggagagatagtctgtaaacttggggaggggggagcaccgaaactgggggactttacattgaactcagtgttgcccattcacaacagagagcaaagctgtgctggtctcggccagcacctatacatg

SEQ ID NO: 238322 - DNA, 579 bp, Homo sapiens
aaatactgatcttaaagaagctcagtgcagtacaagaaaattctgaaaaatgataaaaaagaaatcagaaaaccaattcagaatatgaatgagaaatttacaaaagagatagatagttyacaaaggaacaaaatacaaattctgaaattgaagacatcattaaaacaaatacaaaataattttgaaagcttcaagagacttgatgacgggtagagcaagatggcaaaatagaaacctaaaccatttgcctccacaccactgcaggaccaccaaatcttaacagctatctgtacacagaaaagtactgttacaagacctaaaaatcaggtgagcaatcacagtacctagttttaacttactgtcactgatagaggcattaaagagggtaggagagacagtcttaaatcaccaataccacccctaccccctgtcccagcagcagccattcggcatggagagatagtctgtaaacttggggaggggggagcaccgaaactgggggactttacattgaactcagtgttgcccattcacaacagagagcaaagctgtgctggtctcggccagcacctatacatg

SEQ ID NO: 238323 - DNA, 579 bp, Homo sapiens
aaatactgatcttaaagaagctcagtgcagtacaagaaaattctgaaaaatgataaaaaagaaatcagaaaaccaattcagaatatgaatgagaaatttacaaaagagatagatagttcacaaaggaacaaaatacaaattctgaaattgaagacatcattaaaacaaatacaaaataattttgaaagcttcaagagacttgatgacgggtagagcaagatggcaaaatagaaacctaaaccatttgcctccacaccactgcaggaccaccaaatcttaacagctatctgtacrcagaaaagtactgttacaagacctaaaaatcaggtgagcaatcacagtacctagttttaacttactgtcactgatagaggcattaaagagggtaggagagacagtcttaaatcaccaataccacccctaccccctgtcccagcagcagccattcggcatggagagatagtctgtaaacttggggaggggggagcaccgaaactgggggactttacattgaactcagtgttgcccattcacaacagagagcaaagctgtgctggtctcggccagcacctatacatg

SEQ ID NO: 238324 - DNA, 579 bp, Homo sapiens
aaatactgatcttaaagaagctcagtgcagtacaagaaaattctgaaaaatgataaaaaagaaatcagaaaaccaattcagaatatgaatgagaaatttacaaaagagatagatagttcacaaaggaacaaaatacaaattctgaaattgaagacatcattaaaacaaatacaaaataattttgaaagcttcaagagacttgatgacgggtagagcaagatggcaaaatagaaacctaaaccatttgcctccacaccactgcaggaccaccaaatcttaacagctatctgtacacagaaaagtactgttacaagacctaaaaatcaggtgagcaatcacagtacctagttttaacttactgtcactgatagaggcattaaagagggtaggagagacagtcttaaatcaccaataccacccctaccccctgtcccagcagcagccattcggcatggagagatagtctgtaaacttggggaggggggagcaccgaaactgggggacttyacattgaactcagtgttgcccattcacaacagagagcaaagctgtgctggtctcggccagcacctatacatg

SEQ ID NO: 238325 - DNA, 489 bp, Homo sapiens
atttgaatttcccagcaagctttgccaccatagacctaggtaaacttgaaaggcagtctaggacacaaggactgcaattcctaggcaactcctactgcagggctgggcacagtgccagtggacttagggttcatggaacctagggagattccaacttgggtggctaagacagtgcctgtgccacccctccccarcctcaagcagcacagcttgcagcaatgaaagtgacccttccttctgcttaaggagcggaaagcaaagagtaaagaggattttatctagcatcttggatatcaggccagccacagtaggatacggcagtgggcagagtcatgaggaccctactccaagcctgagctcccagacaacatttctaaatacatccttggccaaaagggaacatactaccttgacaggaaggaaccagtactggcaggattcatcacctgctgactgcagagcccttgggccctgaataaccagcagcaa

SEQ ID NO: 238326 - DNA, 497 bp, Homo sapiens
ttatgattaaaatgtgttgctgagagagggaaaactaaaaacgactttgtcttgcaccttaggtaccagctaggccacagttaggtacagcaacaagcaggctcttggggtccccaagtccaggcctagactcttggacagcatttctggaccttccctggatgagaggggagcttacttccctggagggtgacttgcagacatggcagcatttaccataagctggctgaggagcccttgggctttatgtgaatgtcagtgatgtcctctcataaacccctgtgggctggtgatggtrgtgaccaaagaagaaagaggctcttctgcctatggaaaggggagggaagagcagaaaggactttgtattgtagtttgagtgccgccttagccatcacagaatagaacatcaggtaaatttctaaggtttataaatctaatatctggctcctacacagcatctctggacctgcccagtgcctcagggaactcattgccct

SEQ ID NO: 238327 - DNA, 455 bp, Homo sapiens
ggacaaaactcactggcaatagtaggcataccgaaaaacacagaatattataacacggtaattgtgctgtgtacactactcaatgtaaaaaactaaatgargaaaatcaaaaataataactacaacaacttttcaagacacagttcagtaagacataaagagaaaccacaaaaaattaaaaagtggggggatgaagttaaagtgtagagtttttattagttttcttttggtgtgtttgtttgttcatgcaatcactgttaagttttcattagtttaacataatgttataaagtagtagttataagtttcatggtaacctcaaatctaaaaacatataatagacactcaaaaatgaaaggtaagaaattaagtcacaccaccagagaaaatcaccctcacttaaaagaagacagaaagaaaggaaataatgaagagaacaaacaaaataataggca

SEQ ID NO: 238328 - DNA, 519 bp, Homo sapiens
attttcttatgtgttttgaagggtacagaagtaattgaagacaccgagatttaaagaagcaaaatactttagcatcaacatttgtttccagactcatccttcaccaaatattttagcatgtttgccttgcccagttaagagtattttggccacatttcccaactctaagtcctggaatgtttctgcccacttcttagccctgtaaacatttccttcaatacatgattccagggtgttttccccagctggtgaatagattcatttactgcatttcgtatatacacttcataaaaatgtattataaaacttatcatggaatgtggttgttattggtttaggtaaaagtgtcatccagtaaactgtgagttcctgggcctgagaaagatgtcttattctgctcaagaaatagaaagtgtgttagtattgaaatagtaaacactgtgagaattgaaaaggaaattataaggttgtaaatatatgcagaaaaaygtacagaacaatgattcttaaactttagta

SEQ ID NO: 238329 - DNA, 558 bp, Homo sapiens
cagtattaatctttttaggtaaacttgaagcatctctgtatttacagcactaccaggyaaaatataaatgcatctggctcttcctatgcatcggagtaccctatgtccagttttcatatgtcaagtatcagcacctgcactaaataaataataaaacgaattcagagactcaatatttatgataatccaaacacgctcaaattattttgaactccttaaagccagtataacagcttctattcagatgcaaaaaataccaaaaaatgaagggaggttttttactgtcaaaaataattattctttttaataatatgttttgagcaatgactacattaggaatcaccatacaaaacactcaaaaagtgagaatataaagtttcagtctatgccatcatggagattttagtcaagaaaaccacctttaacaaggaaaataaggacagttgaggaggatcttcaatgtcctagaagtggaactaatcttgcatggaactaattcttttcaccatgagcacttgtggctcagagaataaaggtaagaaaatctagtcaggtttc

SEQ ID NO: 238330 - DNA, 551 bp, Homo sapiens
tactttgttacacaacaatagaaaactaatacagttaacgttatagaaagtaaaaagtttaggttgactgggactaaagaaatataataatayagcaatagctaacacagactagagaaatgtaaaaagcaattacaaaacgtaacttgttggcatagatacattttgaatatgcaatggaaaagagatgatattaagaactatttctcaattgtaatattgtttttgtagttatatattagaatgtgcatgttttttaatgcaagctgaagcattcaggaactaagtaccgtgaagtttctgcaactagctttcagatggttctgccataaaaattgtatacatgtacacagagtaaatatggcaatatttttaaaattacttaagctatgttaatgagtaaatgagggttcattcttttatgcctgagaaattcaaacatttctctaggtttaaattttttcataataaacaggtggaggaaaattacataaacgtatcctggaaaaaaagttgacaaaatgaaaaaaagtcttacagcttgtcaaatc

SEQ ID NO: 238331 - DNA, 209 bp, Homo sapiens
agaaggcaaaatcaactggactcagccatgggtgagacagaacctggcctcaaattagatcactccacmtcctcttccgccttcagatcccagcttcatcctcacttcctcaggaaagcatcccctactccctagactcctgcagatccctctcacgagctctcactgcaccctcccgctccttcctggcactggggaacgttggcacc

SEQ ID NO: 238332 - DNA, 413 bp, Homo sapiens
ccacagaattagaaaagccctcaacctaaaattcacacggaaccaaaaagagcccatatagccaaagcaatcctaagcaaaaagaacaaatctggaacaaaagagcaatcytaagcaaaaataacaaatcactacccaagttcaaattatatattacaagactatagttgctaaaacagcatggtactgatacagaaatagacacatagaccaatgcaacagaatagagaacccagaaataaagccaaatacttacatccaactaatcttcaaaaagcacacaaaaacacaaactggggaaaggatattctattcagtaaatgctgctgggaaaattggattgctgcctttagaagaatgaaactggatccccatctctcactgtatacagaaatcaactcaagatagataca

SEQ ID NO: 238333 - DNA, 551 bp, Homo sapiens
gcatctagtctctgaacatttgcttactgtgtcaaatgccctaatctcactctsatcctctgtaataacttttcattgtattccagctatatttaaaaacatttaaataaaatatgaggacagagctacgcctaattatacataaaaatgaaggaggctgggcgctgtggctcacgcctgtaatcccagcactttgggaggccgagacgggtggatcactttaggtcaggagttcaagaccagcttgaccaacgtggagaaaccccgtctgtactaaaaatacaaaattagctgggcgtggtggcgcatgcctgtaatccatctacttgggaagctgaggcaggagaatggcttgaacctgggaggcagaggttgtggtgagccgagattgcgccattgcactccagcctgggcaacaacagcgaaactctgtctcaaaaaaataaaaaataaacaaacaaacaaacaaacaaaaatgaagtagagtacaaaaattagaatgtgaaaggagaatgtgaaaattcttgtaacaaactaaagaccagtaatat

SEQ ID NO: 238334 - DNA, 551 bp, Homo sapiens
gcatctagtctctgaacatttgcttactgtgtcaaatgccctaatctcactctgatcctctgtaataacttttcattgtattccagctatatttaaaaacatttaaataaaatatgaggacagagctacrcctaattatacataaaaatgaaggaggctgggcgctgtggctcacgcctgtaatcccagcactttgggaggccgagacgggtggatcactttaggtcaggagttcaagaccagcttgaccaacgtggagaaaccccgtctgtactaaaaatacaaaattagctgggcgtggtggcgcatgcctgtaatccatctacttgggaagctgaggcaggagaatggcttgaacctgggaggcagaggttgtggtgagccgagattgcgccattgcactccagcctgggcaacaacagcgaaactctgtctcaaaaaaataaaaaataaacaaacaaacaaacaaacaaaaatgaagtagagtacaaaaattagaatgtgaaaggagaatgtgaaaattcttgtaacaaactaaagaccagtaatat

SEQ ID NO: 238335 - DNA, 234 bp, Homo sapiens
agaaggcaaaatcaactggactcagccatgkgtgagacagaacctggcctcaaattagatcactccacatcctcttccgccttcagatcccagcttcatcctcacttcctcaggaaagcatcccctactccctagactcctgcagatccctctcacgagctctcactgcaccctcccgctccttcctggcactggggaacgttggcacccatccaggggattgcctgggtctcc

SEQ ID NO: 238336 - DNA, 604 bp, Homo sapiens
aaccctactctggggcagtaagaggatgtgaaattatcaggtgctttccccccaaggttgtactttgaatcccgccttttctagatttgcctacagaatgtaaaacaggctgggcacttgtgagtctgcccaccctaggcaagaaaatgctgcaactcagccgggmgcgatggctcaagcctgtaatcccagcactttgggaggccgaggcgggtggatcactaagtcaggagatcgagcccatcctggctaacacggtgaaaccccgtctgtattaaaagtacaaaaaaattagctggacgtggtggcgggcacctgtagtcccagctacttgggaggctgaggcaggggaatggcatgaacccgggaggcggagcttgcagtgagccgagatggcgccactgcactccagcctgggcgacagagcgagactccatctcaaaaaaaaaaagaaaatgctgcaactgttggctcgtgagaattcatgctcttcccacacaccatgatgccattttgaacacgctttcaatgaaagctgccttctttttaaaaagttgctggacattattcttaaagccaggtatctatggactcaggtattcag

SEQ ID NO: 238337 - DNA, 604 bp, Homo sapiens
aaccctactctggggcagtaagaggatgtgaaattatcaggtgctttccccccaaggttgtactttgaatcccgccttttctagatttgcctacagaatgtaaaacaggctgggcacttgtgagtctgcccaccctaggcaagaaaatgctgcaactcagccgggcgcgatggctcaagcctgtaatcccagcactttgggaggccgaggcgggtggatcactaagtcaggagatcgagcccatcctggctaacacggtgaaaccccgtctgtattaaaagtacaaaaaaattagctggacgtggtggcgggcacctgtagtcccagctacttgggaggctgaggcaggggaatggcrtgaacccgggaggcggagcttgcagtgagccgagatggcgccactgcactccagcctgggcgacagagcgagactccatctcaaaaaaaaaaagaaaatgctgcaactgttggctcgtgagaattcatgctcttcccacacaccatgatgccattttgaacacgctttcaatgaaagctgccttctttttaaaaagttgctggacattattcttaaagccaggtatctatggactcaggtattcag

SEQ ID NO: 238338 - DNA, 476 bp, Homo sapiens
cattagagatgaaaaggccttttaaggtttagtccaacatcctaattgtgtaaatagggctcaagccaggtgacctacctaaggtcacacagctggatggctgaaaagggacagctgtacagtccaatctacagccacttgccacacctggctattcacatttaagttaaaattaattgaaaaaataaaatatagaagccagttccttggttgcactggccacatttcaagtgctcgaacgycacacgtggcaagtggctctgtggggacagggcaggggtgggccttgccctcactgcggggagttgtgttgggcagccctggcctagcggtcctgtacttctgacttccctggtttcctttatggggtacagcaagaggtccagcaaaactgggggcagccataggtctgtttaccaggtccccatcttccactctccccacatcatcacttggagttctcattacgttgaccc

SEQ ID NO: 238339 - DNA, 448 bp, Homo sapiens
ttgcactttctcatcacaatatttcagtagctcattaggaattattttatatccaattctgaaaatcacctttgttatataattgctcactgagtacagttgctttgcactctgacgcataatgatatcyagaaatgatttttataacaaagatagaataatgaggtatggaaatagtttgggaaaaggtttattatttctcaagtcttaagactgtttttatgtagttattccatgtgggttattgaattgctttgtggtcattctaattaaaaaattttctaatgaaatacacccttttactttgaattttacttaatgttgacagcagctgcagtctataatgtcataaggccaaggaagaagttatgcaacaacatttaaagctgagacactggaaaaattgttaaaagtatctcacactgcaaaaacacaagcaagcaccagc

SEQ ID NO: 238340 - DNA, 405 bp, Homo sapiens
acttttttttttttttttttggttattggttttggacccacctaaaaattcttgggaaaaaaaaaaaagaagtaccatttaactttgtwttataaaaaagactgaaagggtatttcatttacaaaatttatttcacaaaaaagacttttcgtataaatgcatcacattaaacagaaaggtaggaattcctgatgtctaagtgtctagtcctaaactgattttccaaagcaactgagagtttagttggttttggagacagtgtctgtcattctctccctctccctccttctttgccttgccccctccatagctctgtagttgggtctagtttagggcttacctatatgaaagattaagtaaacactctgttcttttctttgggaagttagtgttgttttagtatgt

SEQ ID NO: 238341 - DNA, 567 bp, Homo sapiens
agtgccatctgtttcctatttaaaagtggctaattttataataggttttgatttcctttccagtaccttccaggactccaattttccctacttcctacacatctatttacttgtttatcctgggcaaataatttaacccctctctgtcttgtttcctcatcttgaagtgcccaccccactgaggtcyggtgtgaggactaaatgagactacctccatgatgtgcgaaggcacactgacgagaggaatagatgggtcttcaatacttgttcctttagacgtactcattccttcttccaccaaacagtaaagaaaataaaactagaaaatgtatgaagagaatactttcgaagtttaaaaatgagatgacaatgttaaagggtggtacacttaaaaacttccaacttaatggcacttaaccttcataacctttcttaacccttcccttcacaactctacctatccctttcatcccaaagtgagtcaggcctctttctcagtcttatccttcctattcctctataaccctccctctctcactctttctttgaaatctgaagtaaatttaa

SEQ ID NO: 238342 - DNA, 407 bp, Homo sapiens
tggtataaaatatatacttaaagaaaaaaaaaacctgaaacccttgtaaaatcccctcagtctacattaacttaaggcagctttaatggaattagtggtctccaataattgagcaaagtataatattaaatcatatcccaggtctctgggataggctattctactttcagtgctagcaatgcagttattttgaaaaacaaaatttaaaaaatagccaaaacacatctggtcaattatgaaatgccacattgaccaatggtgaggaaaggaagagcaagcaaatacttctctgattgtagcatacaattaattcaactttgtcttaacaaatacaatcacccaaagatattccttcaacaaaacattccttytaaacataaccagaaaagctgcatgacgcaagtgac

SEQ ID NO: 238343 - DNA, 402 bp, Homo sapiens
gactgcagcaaaaagcttcagggctgacttgaaggtgtggcagaagttgtatctcttatgcyttttccagtgcaagtaatgggaagcacaactacaaatgtgtttaaaccataaggaaggctactttcgcataacaaaaggtccagagttggctcattcagtggctcagtgatttcatcaataattcagattttttcttatgtctttgcctctccattcagtaggtcatctttttacctcaggctatctctctttaaaggtctaaaatctatggctattccaggtacaaaattcagacacaacagtatcctgaagaaaaagaggttcttagttgtctcctccttatgtcttataagtatcaataaataaacacaaaaaactttcctgggatactctttgata

SEQ ID NO: 238344 - DNA, 570 bp, Homo sapiens
taaaaaatatggaacataccaaacaaatttaattatttttattgttcctaatcttacaaggcaaggaagtgaatccctgcggttgtccaaagacctataggaaatcacaaaggcagattagaagaaaagacctcttgaaatttttattttttctgaatttgttgttttatcatgcaaggaagaatcagaagtgttatcacaggagattggtcacttgattaagacaggtgcctaaaaataaggaataataccagtattttaaaattattaatattaatatttataatattaattatattaatatagtaattttgatatttaaaaataaaatagaagrtaacacaatgataaggaaactcagctcttccaagaaataaagttgtatttgtttttaatcatcaaaaccataataaaataaacttaatatgtataatactatcctggagagatacccaatcattcctcagattaaacagaaattaggaataatttttgtaacctctttttaagaggagactgaaaatactaagatcaatttgttattttaacagagataaaacctaattccag

SEQ ID NO: 238345 - DNA, 585 bp, Homo sapiens
ataaccaggtgggatttattcctggaatgcgatggttcaacactaaaaaaaaatggatcagtataatacacaacaacaacaaaatgaaggaaaaacaaacacaattatctcagttgatgcagaaaaagcatttgacgaaattcaacatccttttataaaaacaacattcaacaaactaagaatagaaggtaatgcctaggcaacacaatgagaccttgtctctactaaagaacgttttaaattagccagacagtggcacacaactgtagcacctcctcaggaggctgaggtgggaagaccacttgagcctggaagtttgaggctgtggatagctatgattgtgccactcyacctcagcccatgtgacagagtgagacaccgtctcaacaacaacgaatagaaagaaactacttaaacataataaaagccatatacgaaaaattcacagtgaacctcatactcgatggtgaaaggctgaatgctcttcctctaaaatcaggaacaaggcaaggatgcccactttcatcatatctattcaacatagtactggaagttctagtcagagcaattaggcaagaaagagaa

SEQ ID NO: 238346 - DNA, 574 bp, Homo sapiens
aagctaatagtcattagtgttgggatttcctagtaaaattgggcatataaaggaagactatcactgagccaaatcagtcttagaaatgactattataggggtcaaaacaatttgctaataggaaattgaaacataaactttgtaaaaagaccaactcttaaccaaaagcccaggaatattttaaccaarggctccatctgtcagtaggggagctgcagtgtggcgtctcagaggttaggtaattttgctagaacctcactgactgtggcttgtgacaaatgactgacccctaaggccaccaaccctggctgcctggtgctttgcttggcccctgccgagtggctcctattctctcacctccgaccgggccattcctctagcctaaggcgggtattttcattatgatccataatcaagtcgaatggactttgtaattgaatgaacatcacacactggagacttttgatgggctcagctcatcaggatttgagggaggctgtgtgagggagaagaggtgcgggggagctgggcgcacttgctctcgcctgtgctttgcttcagtcatttgctgaaa

SEQ ID NO: 238347 - DNA, 574 bp, Homo sapiens
aagctaatagtcattagtgttgggatttcctagtaaaattgggcatataaaggaagactatcactgagccaaatcagtcttagaaatgactattataggggtcaaaacaatttgctaataggaaattgaaacataaactttgtaaaaagaccaactcttaaccaaaagcccaggaatattttaaccaagggctccatctgtcagtaggggagctgcagtgtggcgtctcagaggttaggtaattttgctagaacctcactgactgtggcttgtgacaaatgactgacccctaargccaccaaccctggctgcctggtgctttgcttggcccctgccgagtggctcctattctctcacctccgaccgggccattcctctagcctaaggcgggtattttcattatgatccataatcaagtcgaatggactttgtaattgaatgaacatcacacactggagacttttgatgggctcagctcatcaggatttgagggaggctgtgtgagggagaagaggtgcgggggagctgggcgcacttgctctcgcctgtgctttgcttcagtcatttgctgaaa

SEQ ID NO: 238348 - DNA, 574 bp, Homo sapiens
aagctaatagtcattagtgttgggatttcctagtaaaattgggcatataaaggaagactatcactgagccaaatcagtcttagaaatgactattataggggtcaaaacaatttgctaataggaaattgaaacataaactttgtaaaaagaccaactcttaaccaaaagcccaggaatattttaaccaagggctccatctgtcagtaggggagctgcagtgtggcgtctcagaggttaggtaattttgctagaacctcactgactgtggcttgtgacaaatgactgacccctaaggccaccaaccctggctgcctggtgctttgcttggcccctgccgagtggctcctattctctcacctccgaccgggccattcctctagcctaaggcgggtattttcattatgatccataatcaagtcgaatggactttgtaattgaatgaacatcacacactggagacttttgatgggctcagctcatcargatttgagggaggctgtgtgagggagaagaggtgcgggggagctgggcgcacttgctctcgcctgtgctttgcttcagtcatttgctgaaa

SEQ ID NO: 238349 - DNA, 574 bp, Homo sapiens
aagctaatagtcattagtgttgggatttcctagtaaaattgggcatataaaggaagactatcactgagccaaatcagtcttagaaatgactattataggggtcaaaacaatttgctaataggaaattgaaacataaactttgtaaaaagaccaactcttaaccaaaagcccaggaatattttaaccaagggctccatctgtcagtaggggagctgcagtgtggcgtctcagaggttaggtaattttgctagaacctcactgactgtggcttgtgacaaatgactgacccctaaggccaccaaccctggctgcctggtgctttgcttggcccctgccgagtggctcctattctctcacctccgaccgggccattcctctagcctaaggcgggtattttcattatgatccataatcaagtcgaatggactttgtaattgaatgaacatcacacactggagacttttgatgggctcagctcatcaggatttgarggaggctgtgtgagggagaagaggtgcgggggagctgggcgcacttgctctcgcctgtgctttgcttcagtcatttgctgaaa

SEQ ID NO: 238350 - DNA, 586 bp, Homo sapiens
cctattgggacaaaatacacattactaaatgattcttcattaaagaaacatagtttacctaggctaggtgtggtggctcagacctgtaatcccagcactttgggaagctgaggcaggtggaccacttgagctcagaagttcaagaccagcctgggcaacatggtgaaacctcatctctactaaaaatagaaaaaattatccaggcatggtggcccatgcctttgtttccagctacttgggaggttgatgtgagaggattgcttgagcccaggaggtggaggttgtagtgagccaagattacgccattgcactccagcytgggtaatggagtgagatcccacctcaaaaaaaaaaaaaaaaaaaaaagaaaaagaaatatagtttaccaaaagaaatacttcacatggcaaactcctctcacacattaatatgtaattcagttaatagacattttactcacacatcgattttgtgaagcaggacagtttgagttaggtaggaaggtctggcttatcaacctgctgtacctactgacatgtctcccaaagtacttcctaactgcacattttgttgatcgtgtagcact

SEQ ID NO: 238351 - DNA, 555 bp, Homo sapiens
accccgtttgccttttttaaaaaaagaaaaacttcttctacatcataacagacactacaatcgttgaaaaatgggcaaagaacaccaaaaggtaaatacggaagaaaaaaatcattaaagatttttaaaagttttacacctcgacaaagaactgtaaatttttatgttttatttttttygctggctgactggcaaagattaacattagttctaaggacacagagctaagtcagcatggatccctcattcttgagttcgttctggttgggggaaaagaagtagtgtgtgagctctgcacaccccctgggtgcatacacctgctgtgtcctttacccaccaggtaaccttgaggggctcctctaatgaccacagggtctgctttcctacctcacaggagtgtcaggagggtcacctgtggaaatacgtggctaggaccataggaaatgctcagtacacactggctattattattactacttcagtcactactcttagagcaaggagtttataacctgggactctgggaatccattaccttctgaaactgtatacaga

SEQ ID NO: 238352 - DNA, 555 bp, Homo sapiens
accccgtttgccttttttaaaaaaagaaaaacttcttctacatcataacagacactacaatcgttgaaaaatgggcaaagaacaccaaaaggtaaatacggaagaaaaaaatcattaaagatttttaaaagttttacacctcgacaaagaactgtaaatttttatgttttattttttttgctggctgactggcaaagattaacattagttctaaggacacagagctaagtcagcatggatccctcattcttgagttcgttctggttgggggaaaagaagtagtgtgtgagctctgcacaccccctgggtgcatacacctgctgtgtcctttacccaccaggtaaccttgaggggctcctctaatgaccacagggtctgctttcctacctcacaggagtgtcaggagggtcacctgtggaaatacgtggctaggaccataggaaatgctcagtacacactggctattattattactacttcagtcactactcttagagcaaggagtttataacctgggactytgggaatccattaccttctgaaactgtatacaga

SEQ ID NO: 238353 - DNA, 526 bp, Homo sapiens
tatatatacacataacacatatgtgtgtaatgtacatacaacatatatacacatacaatatatacctatatacatacatctatacaacgtgtatatatacatgcaacatatatatgtatgttgtgaagattaatgaaaaacacacacatatactaaacccttgtgctttgtgtattttacaaatatatatrtatatagggtgtgtatatatctatttattgtgtatatatacacacacctatttattgtgtgtgtttatatggtgaagattaaatgacataaaatatataaagcaccacagggtttagtagtttctggataataggtgcatactactggagtcctgagaaacttgcttcagtccttacctttccaagaagtgtagtctgagaaccacaaagtttgaatcaccattatactcattaaaacgcagattttatgtctctaccccaatgctttgagtaagactctctagagggttgcatccagtaactggtatacttagaaacacctcttatgattctga

SEQ ID NO: 238354 - DNA, 468 bp, Homo sapiens
ttctctagttggagggtcttcctacccaggtggagtctgtctttgagcctgttaactcactatcccagtttmtaagcagcccttttttatggtaggccccacgtggttgggtaacctaactgatgtgataatgaggacagactaaaggtcacgagattgttaacacgtgtgaggagattgtaggcttagcctatcaggtgagggaaaggttagcgtaccaactgtctccacacttcaaagcatgtagctagtttgctgcactaacttaattatctgtgctattgatatctttgaggaacatatctataccctggatacagttacttcacagtaggagatagcaggaggtggcttgttcggttgccaacttcctaaaatgctttttagagtcagctgggttgcttagtcctctcttgctcttggattaaatataaaaataactatgtaaagcatatcagccctcttttc

SEQ ID NO: 238355 - DNA, 470 bp, Homo sapiens
gagggtcttcctacccaggtggagtctgtctttgagcctgttaactcactatcccagtttataagcagcccttttttatggtaggccccacgtggttgggtaacctaactgatgtgataatgaggacagactaaaggtcacgagattgttaacaygtgtgaggagattgtaggcttagcctatcaggtgagggaaaggttagcgtaccaactgtctccacacttcaaagcatgtagctagtttgctgcactaacttaattatctgtgctattgatatctttgaggaacatatctataccctggatacagttacttcacagtaggagatagcaggaggtggcttgttcggttgccaacttcctaaaatgctttttagagtcagctgggttgcttagtcctctcttgctcttggattaaatataaaaataactatgtaaagcatatcagccctcttttccctgtctgctgaa

SEQ ID NO: 238356 - DNA, 481 bp, Homo sapiens
ttctctagttggagggtcttcctacccaggtggagtctgtctttgagcctgttaactcactatcccagtttataagcagcccttttttatggtaggccccacgtggttgggtaacctaactgatgtgataatgaggacagactaaaggtcacgagattgttaacacgtgtgaggagattgtaggcttagcctatcaggtgagggaaaggttagcgtaccaactgtctccacacttcaaagcatgtagctagtttgctgcactaacttaattatctgtgctattgatatctttgwggaacatatctataccctggatacagttacttcacagtaggagatagcaggaggtggcttgttcggttgccaacttcctaaaatgctttttagagtcagctgggttgcttagtcctctcttgctcttggattaaatataaaaataactatgtaaagcatatcagccctcttttccctgtctgctgaa

SEQ ID NO: 238357 - DNA, 566 bp, Homo sapiens
ttctttttgctcagaaactcagagagtttactagaatatgtcttgctattggtcttttttgggtcagtattttcagatatgtggcacagcttttcaatatcatttcaatttttttgtacttcaggacattttcttgaattatagttattagtatttcttctcttccctcgcttttcttacttataatctctggttatccatatgttcaattttctttgcctatgttcattattattttttctcttaattcagtggtgtccaatcttttggcttccctgggccacgttggaagaagatttatcttgggccacacataaaatacactaacactaatgatagcygatggagctaaaaacaaacaaaatctcatagtgttttcagaaagtttatcaatttgtgttgggccacattcaaagtcattctgggccacatgcagcccacaggctgtgagttggacaagcttgtcttaaatcctttttatctctttattgctttcagagttttcagttttcctccttttcaccttttatatttattattagattatctgttctgtttattttttt

SEQ ID NO: 238358 - DNA, 516 bp, Homo sapiens
ttttctttccattcttgtgtgtgtatgtgtttgtggtttaaaacaacattttatttttttttttattttrtttgtttatttattgagacagagtttcactcttgttgcccaggctgaagggcaatgatgcgatcttggctcaccgcaacctctgcctcccaggttcaagtgattctcctgcctcagcctcccaagtagctgggagtacaggcatgcgccaccacgcctggctaattttgtatttttagtagagatggggtgtctccatgttagtcagactggtctcgaattcccgacctcaggtgatccccccgcttcggcctcccaaagtgctgggactacaggtgtgagccaccgcaccctgcctaaaccaactttttaaaataaattactacattccagatttaaacactgcacatgcatcaattcatagaaatcttttaacaaccttatgcaataggtgttgttacatccatttttaaatctgtaaaaacggaggcacaaagtggttaggaa

SEQ ID NO: 238359 - DNA, 516 bp, Homo sapiens
ttttctttccattcttgtgtgtgtatgtgtttgtggtttaaaacaacattttatttttttttttattttatttgtttatttattgagacagagtttcactcttgttgcccaggctgaagggcaatgatgcgatcttggctcaccgcaacctctgcctcccaggttcaagtgattctcctgcctcagcctcccaagtagctgggagtacaggcatgcgccaccacgcctggctaattttgtatttttagtagagatggggtgtctccatgttagtcagactggtctcgaattcccgacctcaggtgatccccccgcttcggcctcccaaagtgctgggactacaggtgtgagccaccgcaccctgcctaaaccaactttttaaaataaattactacattccagatttaaacactgcacatgcatcaattcayagaaatcttttaacaaccttatgcaataggtgttgttacatccatttttaaatctgtaaaaacggaggcacaaagtggttaggaa

SEQ ID NO: 238360 - DNA, 521 bp, Homo sapiens
acttctgctcttgttcatagatgtacttattttgcttatgcagaatgatggcatctgtgtctcagagctaagccctttccatccagtcttcccaaatgggagcagagaagaccagctgctttcacttcactttctgccccattctggatcactttcttttcttgtggcctctttcttctggctgccagaaaagctgctgttgacttctcaygaatgacactggctgatctccctggattggaaccaattctaatgcagcctgtggtgcttggagctcaggccgcaaccatgggccaaggaattgggtggaggaccttgcccagtggagagatcatgagtgccctacacagggcaagttcctacactcacctctagatcttcttgacagtaccaatggacacacaagttattcttttttcttctcttctctgctatatgactgccttagcaccttctcaaaacaaattcaacagtttctccccttgataggcatagtatatcttctcttttccaagaagctt

SEQ ID NO: 238361 - DNA, 557 bp, Homo sapiens
ttctgaataaccttccccaaagcatggtttttgtccttcatttattctttaacacatatttattaaaaactacattccaagcaatgkttttctaatccatcattcacaggtaaatctggtatgtccctagcctacaacaagctcttactctttgggagacactggcacataaacatcatttctacacattgtaaaatgtgtcctgtagaggtacacagaaaaaggcctctaaggtggcatgtaggggcgggtgggaagaatgggtcaaagaaggctaagcacaagctgagaggcttatacagtcagcgaggcagctgatgggggagagagaaggggaataaagaagagagggcctgcttggcagaggggaaatatgaacaaatgcagagagactcctgtgagcaggagactgcaaatcatactgtcaaataattctgtcattctgtgtcaaaggggtttaggtacccagtctggaaggcttggattggagatttgtcttgaagcttggtttatagaaagcacagagtttttacatgtttattctgttcatttgagct

SEQ ID NO: 238362 - DNA, 409 bp, Homo sapiens
tgcttaattgttttgtggccagagtgaagcttgctgcagaaggccaggtccgccagtggttctcagaactacactgaattgggaagaaaatcctccgggcctatccgagctagacccaggagtggcagcatttcagacagaccatcggggaccaaaaattttcaaaagaacgtgtctcaaactgtcaaactctaacagttgtcagaataccttgcttgaaataagtgcagcctaaaaatgtggctatatgggtacgaaagatatttaccatttttatttatgtagragccaaagagatccctttctacagcaagccgttttatccctggatgctttaaaatgtaattcaagttgcaaaatctcatagacattattattttcagtaaatgcctattaaattatagattat

SEQ ID NO: 238363 - DNA, 570 bp, Homo sapiens
gctgaggagggaggatcacttcagcccaggcgtttgaggctgcagtgagctaggactgtgccactgtattccagccttggtgacagagcaagactctgcctccaaaaaataattaattaattaattaattaattaaaagaattttttaaagggaatgacatgattgtacttatgttaatgaatagaatattcagatgacgaatgcccctccaagcctcacaattctaaagtgccttcctcatgcacaaagaaggaaccaagcattaaggccctgaggtgtcagcatattttttctgtttgagaaacagcaagcagactcaagtggctgaagtagaatccaaggtgagacagcgtggggcactggaaatagtaggggaaaatatcagagagatgggagtcactggaaggtcctgatggcaggatcaacctcacttggcttattatgaaaagaagcactgtttgctctgatccttgatawcacataaagatacgtaactattcctagaacagagcttggcacccaaaacatcctctaatgttgctcttccctcagcacctattccttgttaa

SEQ ID NO: 238364 - DNA, 580 bp, Homo sapiens
agttatcttttatcaaaccattactttttttttttaaagcagaaatttatttttggctacaactatttgaaatagatgtcaccctactaagcgtttatttttaatgactgacactggcaaaatcattctgcagaaacatatgctaaataattcttgccttgttttcasaaaacaaaagcactctgtggatgccttttcctgattccctagatttctaaatacgttttttaacctgatgatgctgtagactctgggacttatcgagcacagctgtttggcttcagcattgctcctggtcccttaaggcttctagctttggggtcctgagcaggataacgaggaaggtggtgagtgtatgcaggggctccacagtcctggtgctgcttcttccaagctgagtggccttgggcatgttactaaaactcttcatgcctcagtttcctcctatgtaagtggaaggatgttttaaagtatatctctgctgctaattggctgagtaatctggagcaagtcacctaatctctctatacctcaatttgctcatctataataaaacgcagacaataatagtgcctccctc

SEQ ID NO: 238365 - DNA, 580 bp, Homo sapiens
agttatcttttatcaaaccattactttttttttttaaagcagaaatttatttttggctacaactatttgaaatagatgtcaccctactaagcgtttatttttaatgactgacactggcaaaatcattctgcagaaacatatgctaaataattcttgccttgttttcagaaaacaaaagcactctgtggatgccttttcctgattccctagatttctaaatacgttttttaacctgatgatgctgtagactctgggacttatcgagcacagctgtttggcttcagcattgctcctggtcccttaaggcttctagctttggggtcctgagcaggataacgaggaaggtggtgagtgtatgcaggggctccacagycctggtgctgcttcttccaagctgagtggccttgggcatgttactaaaactcttcatgcctcagtttcctcctatgtaagtggaaggatgttttaaagtatatctctgctgctaattggctgagtaatctggagcaagtcacctaatctctctatacctcaatttgctcatctataataaaacgcagacaataatagtgcctccctc

SEQ ID NO: 238366 - DNA, 580 bp, Homo sapiens
agttatcttttatcaaaccattactttttttttttaaagcagaaatttatttttggctacaactatttgaaatagatgtcaccctactaagcgtttatttttaatgactgacactggcaaaatcattctgcagaaacatatgctaaataattcttgccttgttttcagaaaacaaaagcactctgtggatgccttttcctgattccctagatttctaaatacgttttttaacctgatgatgctgtagactctgggacttatcgagcacagctgtttggcttcagcattgctcctggtcccttaaggcttctagctttggggtcctgagcaggataacgaggaaggtggtgagtgtatgcaggggctccacagtcctggtgctgcttcttccaagctgagtggccttgggcatgttactaaaactcttcatgcctcagtttcctcctatgtaagtggaaggaygttttaaagtatatctctgctgctaattggctgagtaatctggagcaagtcacctaatctctctatacctcaatttgctcatctataataaaacgcagacaataatagtgcctccctc

SEQ ID NO: 238367 - DNA, 619 bp, Homo sapiens
ggcagccacaatgatacacttaattgccataaataaagaagttctttcttccaaaaatgaaaaagaataaagtgctgagataaggttgatgtctttaaatgcagtagtctctaagtgatagatttcaaatagtgtttaaggaagggaaacattgtttttgtaagtaatggtagttaaattctcaatacataatccagagaaaagagcggcatctctgactaaatggcaacatgaatgaaggtcagacctcttctaggttgtccttctctgttcagccaccattcgggaagcccctcgtttataccacacacatacatctattcacacactcacataygcacacacacacacacacacacacacacgacctggtctcagcctttttattttttaagcgattctatgactcattcctgaaagtatttagttcagtgtgaattgagatgacagggttgtaaaagacattgatggttttactttaggaactggatattaaggaagaagaaaagctctgagttgttttgcataaagaaccacatggatcaggagggattttctgaaacagaaattcccttagcagtcttcttccctatcctgttacaagctgcttgaccaacct

SEQ ID NO: 238368 - DNA, 589 bp, Homo sapiens
accaggtcaaaggaagttcaggaaccaggaaaccattgacacaacccagaagtgaatccaagagaaacttctaacataacagtctccccacaaaatctccagactcatatattcaaagtgaaaggatctgcagagttgactcgggtattaaaagtgggagaaaaggggggacctgctagagtaaacccattaactacccttgggacctcccaaaggaaaatgatgagaagtctcgagctttccctgatctcctgagatggctggtctttgtgaggaggcacgaggttgccccagtttccaaggatgggatattggaaggtttgcacagcaaggccatgtgggatagcacgtgtggctcttggccatgttaaccgggcttttcctagatacgacggcagttgtcrtttttttttcatttgatcagggaatgtaatacatcttcaaaacaattttcacccaaccggtcagagatgttaaaatccaaccctgaaagcctcccttgggcgctttccctcagaggcacactgtcctttgctgctatgtttcttttgaaatatgtaattttcacaaaaaaatctttggagtgttt

SEQ ID NO: 238369 - DNA, 589 bp, Homo sapiens
accaggtcaaaggaagttcaggaaccaggaaaccattgacacaacccagaagtgaatccaagagaaacttctaacataacagtctccccacaaaatctccagactcatatattcaaagtgaaaggatctgcagagttgactcgggtattaaaagtgggagaaaaggggggacctgctagagtaaacccattaactacccttgggacctcccaaaggaaaatgatgagaagtctcgagctttccctgatctcctgagatggctggtctttgtgaggaggcacgaggttgccccagtttccaaggatgggatattggaaggtttgcacagcaaggccatgtgggatagcacgtgtggctcttggccatgttaaccgggcttttcctagatacgacggcagttgtcgttttttttycatttgatcagggaatgtaatacatcttcaaaacaattttcacccaaccggtcagagatgttaaaatccaaccctgaaagcctcccttgggcgctttccctcagaggcacactgtcctttgctgctatgtttcttttgaaatatgtaattttcacaaaaaaatctttggagtgttt

SEQ ID NO: 238370 - DNA, 520 bp, Homo sapiens
  misc_feature (1)...(520): n = A,T,C or G
tcttatcccacaaagctcagcaggaaatggtcttgacccatgacaaagatttcaaaaagggctgctttccatgacaaatccaaccaccttctaaatgtccatgagcttcacaattctcccagggctgaagtttccttcagagcaggttaagcaattatctaacacctaatagaaacttccaatccaagtttcttggaaaggtgtatctaacaaaattcttagtagagtcctacattaatccaaaaagtttgaaaaaaattggtagaaattaaaggtagataaatataaaaratacaaatcactctaataactctaaatgagtaacccatttaaagccatataagcataacccagcacttcaaagtagaaaatgctcctaaatgtgtgtgtgtgtgtgtgtgtgtgtgtgtgtgtgtgtgtatgaaaatgattactcctcttncctcatccactccaacctccatagcttaaaataaaaataagttggagagaattaaactaggacactactccatgaggt

SEQ ID NO: 238371 - DNA, 520 bp, Homo sapiens
  misc_feature (1)...(520): n = A,T,C or G
tcttatcccacaaagctcagcaggaaatggtcttgacccatgacaaagatttcaaaaagggctgctttccatgacaaatccaaccaccttctaaatgtccatgagcttcacaattctcccagggctgaagtttccttcagagcaggttaagcaattatctaacacctaatagaaacttccaatccaagtttcttggaaaggtgtatctaacaaaattcttagtagagtcctacattaatccaaaaagtttgaaaaaaattggtagaaattaaaggtagataaatataaaaaatacaaatcactctaataactctaaatgagtaacccatttaaagccatataagcataacccagcacttcaaagtagaaaatgctcctaaatgtgtgtgtgtgtgtgtgtgtgtgtgtgtgtgtgtgtgtatgaaaatgattactcctcttncctcatccactccaacctccatagcttaaaataaaaataagttggagagaattaaactaggacrctactccatgaggt

SEQ ID NO: 238372 - DNA, 235 bp, Homo sapiens
taaatatagggtcatggtgctgggagaggggccggagagataataagaatgggggggggtatgtggaggctcaagcactataaataaccaaagaacacgactacatttagaacttcccatgtgtagaattcaagcaaatcttgtgctttgtttcttgaaacaaaagaaacaagagcwtcgttcaggtttctgggagcccctggcaggaatatactcttccgtatattttttcttt

SEQ ID NO: 238373 - DNA, 514 bp, Homo sapiens
attactttacttattatcatcaagtccagaagccatatatggccaacagcatsattgctttctggttaccctgaatgtgacatttgagggtgagaaattacttaccatcaggatttaggtattccattatcactgtagaaactttttggattacctgtaaaagactatttttgatctcccatacttatcagttgttttccttattgtaattttcaaccctcaatgtatgttgcttgtgaacacaggaactcagcagcaaaactcactgcctccctcttcctagctgctacatgggtctccttcaggttccctgtccaactagctcttggctgtggactcattcttaatttctgtccttctgtttgagaaccccaaccctcagatttactgggttctgatatggtggcttgaatattcaatccatacttagttcctctttaggggtagctacttgagcttgataataccatatttgtatatttccctggcttagattctggtacttgaaggtaaa

SEQ ID NO: 238374 - DNA, 514 bp, Homo sapiens
attactttacttattatcatcaagtccagaagccatatatggccaacagcatgaytgctttctggttaccctgaatgtgacatttgagggtgagaaattacttaccatcaggatttaggtattccattatcactgtagaaactttttggattacctgtaaaagactatttttgatctcccatacttatcagttgttttccttattgtaattttcaaccctcaatgtatgttgcttgtgaacacaggaactcagcagcaaaactcactgcctccctcttcctagctgctacatgggtctccttcaggttccctgtccaactagctcttggctgtggactcattcttaatttctgtccttctgtttgagaaccccaaccctcagatttactgggttctgatatggtggcttgaatattcaatccatacttagttcctctttaggggtagctacttgagcttgataataccatatttgtatatttccctggcttagattctggtacttgaaggtaaa

SEQ ID NO: 238375 - DNA, 501 bp, Homo sapiens
ttcctattactttacttattatcatcaagtccagaagccatatatggccaacagcatgattgctttctggttaccctgaatgtgacatttgagggtgagaaattacttaccatcaggatttaggtattccattatcactgtrgaaactttttggattacctgtaaaagactatttttgatctcccatacttatcagttgttttccttattgtaattttcaaccctcaatgtatgttgcttgtgaacacaggaactcagcagcaaaactcactgcctccctcttcctagctgctacatgggtctccttcaggttccctgtccaactagctcttggctgtggactcattcttaatttctgtccttctgtttgagaaccccaaccctcagatttactgggttctgatatggtggcttgaatattcaatccatacttagttcctctttaggggtagctacttgagcttgataataccatatttgtatatttccctggcttagatt

SEQ ID NO: 238376 - DNA, 528 bp, Homo sapiens
catctgttccaattctctgaaaatgcttaagatgaattggaaaatggaaaaaagctgggctagccttactgctaggctgtaggctacatacagatgctttgcttagaaggcacctctccagcctgggcaacatggcaaaaccccatctctacaaaaattttaaaaattagctgggtgtcgtgatgtgcacctgtagtcccagctactcaggaggctgaggtgggaggatcaggattgcgaatagggctgaagttttggattcctatccagaacatgacagttctttacactttcacagacccatgaagcttatcccttctccttcaacccatgaggatgaggctgcagtgagctgtgatctcaccactgcactccaccccctctaaaaattaaaaaaaaggcacctctctattataaaactcctamatttactgtttactcttatgtgtacagttcttgtagggaataaagtctgtcatttcccaatcagacttaaaactcaaaggctgactttccgggcaagaaaat

SEQ ID NO: 238377 - DNA, 562 bp, Homo sapiens
tagtaataatggttctactcttattaataaaaagctatttattgccgatcagaatttgtgatttgcacaagataactcagtgttgtcaaaaagggagaggtgagtttatatcagccaaaccaagaccaaaaccaaagagatgtcttagttagcttgtgtatattgtgattttatgtcttattttcattagacttttttaaatactgaaagtgagtcwttcccctattacttcctccaaggattctaaatgagaagaactattcaggtccaaccacctcctttgaaggacaatcatgaccagagcggtagatgattagtccaagcacacagctaaatagtggcataagctggacagtaaattacatattaaaacaaagactggtgccttttctccactgcgctaaaatgattggaggtttgcccatgacaactaccagctcaataagccaaatcaataaaaatttcaatcacaactgttgcttggcatacacagataagccctctaaaagaacagggaactcttagacacttaggataatgctaaacagataggacaactaat

SEQ ID NO: 238378 - DNA, 562 bp, Homo sapiens
tagtaataatggttctactcttattaataaaaagctatttattgccgatcagaatttgtgatttgcacaagataactcagtgttgtcaaaaagggagaggtgagtttatatcagccaaaccaagaccaaaaccaaagagatgtcttagttagcttgtgtatattgtgattttatgtcttattttcattagacttttttaaatactgaaagtgagtctttcccctattacttcctccaaggattctaaatgagaagaactattcaggtccaaccacctcctttgaaggacaatcatgaccagagcggtagatgattagtccaagcacacagctaaatagtggcataagctggacagtaaattacatattaaaacaaagactggtgccttttctccactgygctaaaatgattggaggtttgcccatgacaactaccagctcaataagccaaatcaataaaaatttcaatcacaactgttgcttggcatacacagataagccctctaaaagaacagggaactcttagacacttaggataatgctaaacagataggacaactaat

SEQ ID NO: 238379 - DNA, 364 bp, Homo sapiens
tttctctaagtcttaaagaatgtggcaatatattctcaaagaatcttatggtcatttcmgacaccttggcaaggacactggagatgcacaaaggcaggggatgacaatcttgaaagacaaaagaatagctaatgtgaaccagatacctgcaagggaggccttgatccctgataaatgtttttttaaagttactttccacatgacttgcattatccaaacttagctggataagtgctgctcagcaggattttattcataccaattaatttcttacaacattgctcaccctatatcctcactctctccatttgttaatacctcatttgcactgagaagatcaagcagcctctgactcaagctcctt

SEQ ID NO: 238380 - DNA, 408 bp, Homo sapiens
attccttacattacacaggctgggccactaaaatcaacagagattaaaaactttacattttaaaacccaacctgcagtttacctggaggttcattcaattccaaaatatttctggcttggggacattttcttaaaatttaccattctttactacgtcataccctttctatctatattgaaagtaagggmtgaaaattaagagaatccgaagttattttaagagagaaatctaagaggggctttcttatgggagattaaaattaagtaatatttcataggggaagaggaatccagaaatacagatctcatggtcaatgcagaatctgaagcaataaaagctaacatttcttagaataattctgaattttgttaaatctctgtaggagagatgaaagataattaaatgaa

SEQ ID NO: 238381 - DNA, 553 bp, Homo sapiens
attacagtatgcacactgtttggtgccttgctttttcattcaataatatgtcttagaaatatttatatattagcaaatatagacatatttyattctctttgaggactgtatagtataggtattgcattgtgtatgtgtatcataatgtaagtaactagccagtctctgtttgtggatgtataccatgtttctagttttttaatattacaaacaatattgcaatgaatagaattatacatagagaaaattgtttacttttgagagtatgtaacatggaatctctatgtcaaaaggaatgtacatatgaaatgtttacagatgttgccaaatttcccttcaaaacggtggtgcctatatattcctttccaaatgaatataagaataccttttttctacctccacatggaagctattatttaatggtaacacttagccaagctgataagtgaataaagttacttaaatttgcagtgtttaatttatgagtgtgggtgagctttcttccctaaataattatatcacagaagtccagctcaggtaaacaaattacagg

SEQ ID NO: 238382 - DNA, 361 bp, Homo sapiens
attttatgaggttctagctctcaccaacagagggcagggttgaggcccctgcctgcagacaaacccttgttcataattttgagycaaatgctagtgtggcagagtgagatttctttttaaactaaattttgagaagaaccaggtaatacaactgctatttgcctgttaataaagcaggggaaattcacaaatatttcacagcctcctaggaggtgagaacatgccactagatacactattttgaatttcctattttcctacttcctatccatctgatgccctaatggcagctaacagggaggagtccagcgtgggaaggtgaggagggttgggattgcaggaggccaggtgataccctgac

SEQ ID NO: 238383 - DNA, 361 bp, Homo sapiens
attttatgaggttctagctctcaccaacagagggcagggttgaggcccctgcctgcagacaaacccttgttcataattttgagccaaatgctagtgtggcagagtgagatttctttttaaactaaattttgagaagaaccaggtaatacaactgctatttgcctgtyaataaagcaggggaaattcacaaatatttcacagcctcctaggaggtgagaacatgccactagatacactattttgaatttcctattttcctacttcctatccatctgatgccctaatggcagctaacagggaggagtccagcgtgggaaggtgaggagggttgggattgcaggaggccaggtgataccctgac

SEQ ID NO: 238384 - DNA, 538 bp, Homo sapiens
aaatggtggaaggagcaaagaccactgctcctgtgatggctacaccaacagcatctacaccatctccatcagcagcactgcagaaagcggaaagaaaccttggtacctggaagagtgttcatccacgctggccacaacctacagcagcggggagtcctacgataagaaaatcgtacgtgacatgtgcatgcccatcatgatctgttkatttaatgttcactttgaaatacaaagggagaaccataaacatatatatatatacacacacacacacacacacacacagaagtaatatatggaaataggaaattagattcgctgataatagaagaagttgtaaacattaccaattgaaaatgcttgtgcagtcatcacattgcaacatttaatgtggacttagatgttattaagcttcaattttattgaggataaatgattggttcacgttcacattgtgagttagtggcagagaagagactggaatctacgcctgactcagtcctgtactcctatcactgtgtttccgcaccgactttta

SEQ ID NO: 238385 - DNA, 498 bp, Homo sapiens
ttctcccccatagctgtgtctgaaacagctttcttggcacaattctagttcaaatcaaaatcaacaccagaaacaaattcaacctaacagacagtaaaatcatttcatgtttcaaaaatatctgttcagttgctcttttaacagatacgagacaatatggcaccttcaaagtaaaacggatcactagatatcaaggagagagaaactcttgactgtggggttgctataaaagcttgtcacttatggccaaagtcaatctgaactgagattccctggagaattacatcaacaggctaaaatcaaaggtccaatcagaacaagtaatgaaatgtgaaatactaggacataattgcttagggtgagaaaaagtgatggttcatcttagtggaggctgtctaaacctgaacagtacccacygcttgtcatcaaaggatgatgacatccctaacatagtggagtccaaaaaaccatctgctactgatcctgagagacgctgaa

SEQ ID NO: 238386 - DNA, 543 bp, Homo sapiens
atatacttgccttgatgcgaaagacagatttactaatagccttccaataacttcaatgagaccactaactcctctcacagacttctatactcccccagaggtgatactgtcccaaagagggcaaaaaatggattcttgtccaagagggaggatttaaaaaatcttagagctattakagtggtttccagaatcttattccatagtattaaaggagaagttaaatttaatgtattttttccatagtgagaaaataatgaaacaaaggttgagaaacattgcctttgctggatggtaatattattccgtcacagctgaagtgaactggatttaagccaagaggataaaaatgacttagttctcacattttgattaaaaaataaaatggagaaataactaattttctctaatatacaagcttacacttagtgctgtaattgcatatcaagtacactggcttcagccttatttttagtatccatgttatatctttgaggaagtcttggttcatccgtgcaacatttctattgattctagaaacaggtc

SEQ ID NO: 238387 - DNA, 465 bp, Homo sapiens
tgggttggagcctctttggtttgggttgtgttaagctctacagccacctttgacagtctcatcatgagtcttgcctttctgctaaagtgagagatttcctccttgttctcaaagatgcttctaaaaattatggacgattttagaataagaaaaaatactttaatcttaaaagagaggggagaaacaattttttgtgatgtggtaccctcagaacatttttattggttcagaatgtttaatagtatgattttttttctggattttttttggtaactttctggtgtttcagctaaatgaatagggaacatgtaaccagtgattataggatatcatttgggcgattgctgcttaaaatgatgtctttttacrtagcctaactcaaaaagttcaaataaaatgagtatgcaaggaagcaggtttattaaatgaaaaaccaaaatgaaagatggctgtactaattttagc

SEQ ID NO: 238388 - DNA, 530 bp, Homo sapiens
ggggattttatattctcattagggaagcaaatgtacactaacagatatatgcaaattatttaaggaagtcaatgaaatcgttctgggggaagggttgtagggggtgcaggacttggatgaaaataaaaatgcccagctttgatgattcaaattggaacattggttccatagaaatttgtatcctccacgacacctaagcataatgttttgaacaaggtccattctcaacaaatattaaattaattcgtctagtccaaccttaccttttgtacaatggaactgagtcctagagaagttcaattkctcaattagttacttttaccgtccatatcctttagttgatattcattagtgacttctttctcccatactgcctcaactcgtctctcatcctgttgatttatcatttgctagaagtggacctcacctggctaaaataaagacatgaatgttattccctctctcaccttccaagggaatcccctctaccttttgtctttggaggaagggatcattcgagacaaggaaag

SEQ ID NO: 238389 - DNA, 420 bp, Homo sapiens
ctgaaaactcctgttcttccttgggcttacttttgttttcccagtgttgagtaatttattaataacttgttggaaaagtagtttaaaaaaaaataggagaacaatttcacaaattgctcartaggtacctgccagtaatagggacatcagcgtcacccatcagaatttctttctcatcacgtaaagcagaagccacttagagtagcaaacaactcagttttggagttcagacatcactagacttgatagtctttgttatcactgataacttcagtaaagccaacaccccaatgaatagtctctaccaaaaccctaccaaatccattttatccaacctccttacatttcttcagacatacccccatgtcctacatcctaggcagacagcagggctggatgatgtgtgagctaaacttgtgt

SEQ ID NO: 238390 - DNA, 583 bp, Homo sapiens
aatcaactgcaatattttgattctctttttatactttgttgttacagaacattgggtagatatttgtctactagtctccattcattttgagatgttttattttcttagrtcattagtagcaattgtgtgtagaaagaggtgggaatttgaatgacttattaagtctcctagttcaaaagaacaataatattttgatacagtaagaattatttgattttatcaatgcatttggagggtgtgagaggagggtagatggccttctgatttagtgattctccgttgctttaatatgacttctgcttttcatcactttcgttttttgagacagggtctcactctgttgcccaggctggagtgcagtggcgtgattatggctcactgcagctttgacctcctgggttcaagtgattctcccacctcagcttcctgagtagctgggaccacaggcgcctgtcaccatgcccggctaattttgtgtgtgtgtgtgtgtgtgtgtgtgtgtgtgtgtgtgtgtgtgtattttttgtagccacaaaaaaatacaacatggtttagccatgttgcccaggctagtctcaaactc

SEQ ID NO: 238391 - DNA, 576 bp, Homo sapiens
ctctctgggatctcaccttgtcaagcaaggaggagccatcaactaaaaataataatttatctagagttttacagttcacaaagtacttttacatttatgcccacatcacttgwaaacattcatgtcagataggtagggtagatttttgtttttgtcccccagtttctgaattcttttttacgtataaggaatcttctgtcttaagagtcttggttgaggacaaagactgctcggtagtatggcagctgaaaacggctaacactcctcacttcatgtactctagggcacaggccatgtgatccagattgtaaaaatcaattgcacctgctattaagagcataagccaagtaaggtctcactcccttagatgtgttctctgtctctctctctctctctctctctctctttctctctctctctctctctctctctctctctgtctctctctctctctctctctctctctcaacaggtctttcctcatagatcagctgtgtctttttattgatccttagcttccaccctggttaatcagtgctcccaacaattccgagcttcccaagatccctttaacaa

SEQ ID NO: 238392 - DNA, 576 bp, Homo sapiens
ctctctgggatctcaccttgtcaagcaaggaggagccatcaactaaaaataataatttatctagagttttacagttcacaaagtacttttacatttatgcccacatcacttgtaaacattcatgtcagataggtagggtagatttttgtttttgtcccccagtttctgaattcttttttacgtataaggaatcttctgtcttaagagtcttggttgaggacaaagactgctcggtagtatggcagctgaaaacggytaacactcctcacttcatgtactctagggcacaggccatgtgatccagattgtaaaaatcaattgcacctgctattaagagcataagccaagtaaggtctcactcccttagatgtgttctctgtctctctctctctctctctctctctctttctctctctctctctctctctctctctctctgtctctctctctctctctctctctctctcaacaggtctttcctcatagatcagctgtgtctttttattgatccttagcttccaccctggttaatcagtgctcccaacaattccgagcttcccaagatccctttaacaa

SEQ ID NO: 238393 - DNA, 576 bp, Homo sapiens
ctctctgggatctcaccttgtcaagcaaggaggagccatcaactaaaaataataatttatctagagttttacagttcacaaagtacttttacatttatgcccacatcacttgtaaacattcatgtcagataggtagggtagatttttgtttttgtcccccagtttctgaattcttttttacgtataaggaatcttctgtcttaagagtcttggttgaggacaaagactgctcggtagtatggcagctgaaaacggctaacactcctcacttcatgtactctagggcacaggccatgtgatccagattgtaaaaatcaattgcamctgctattaagagcataagccaagtaaggtctcactcccttagatgtgttctctgtctctctctctctctctctctctctctttctctctctctctctctctctctctctctctgtctctctctctctctctctctctctctcaacaggtctttcctcatagatcagctgtgtctttttattgatccttagcttccaccctggttaatcagtgctcccaacaattccgagcttcccaagatccctttaacaa

SEQ ID NO: 238394 - DNA, 498 bp, Homo sapiens
aaattagtgcctttaaaacttggtctttggrtgtgttacctagtgatagagaaatcatttttatcttttagagaactcatagaaattcaacagtattctcagtcacagtaagtcaagcatagcaggcccacataattttttttttccagctcattcctggtctgctgaaatgttttaagtgctaattctgacttttctttcattactgtgctctgtgtcccaggcccttccacttaacatttgtgcatttacacaagcacacaaaaacaaacactgtgcatgtttttgcaattagtgcttactttgaatcaggtggtctttaagaagatagtgaaaaagaactcacagaccactaaattagaatgggtctaaatcataattcaagccctcagctcatgctcaataccgctctagtaagttttcaaaaactagaaatatactctactcagatggctctttctgtaatgggtgattccactcaaaaacacttccttgtac

SEQ ID NO: 238395 - DNA, 498 bp, Homo sapiens
aaattagtgcctttaaaacttggtctttggatgtgttacctagtgatagagaaatcatttttatcttttagagaactcatagaaattcaacagtattctcagtcacagtaagtcaagcatagcaggcccacataattttttttttccagctcattcctggtctgctgaaatgttttaartgctaattctgacttttctttcattactgtgctctgtgtcccaggcccttccacttaacatttgtgcatttacacaagcacacaaaaacaaacactgtgcatgtttttgcaattagtgcttactttgaatcaggtggtctttaagaagatagtgaaaaagaactcacagaccactaaattagaatgggtctaaatcataattcaagccctcagctcatgctcaataccgctctagtaagttttcaaaaactagaaatatactctactcagatggctctttctgtaatgggtgattccactcaaaaacacttccttgtac

SEQ ID NO: 238396 - DNA, 595 bp, Homo sapiens
ctttttagtttaattagacccaacttatcaacttttgtttctgtcacaattgcttttgagaacctggtcacaaattctttcccaagacccatatccaaaatggcatttcctagattttcctctaggattcttatagcttgaggtcttacatttaaatctttaatccatcctgagttaatttttgtatatggtgaaaggtaggggtccagtttcattcttctgtataagrctagccagttatcccagcactatttattgaatagggagtcctttctctattacttatcccagcgccatttattgaataaggagtcctttctctattgctatttttttggttgactttgttgaaaatcagattgctgtagatgtgtggctttatttctggattctctattatattttattggtctacatgtctgtttatgtaccaatgtcatgctgttttggttactgtaggcttttagtatagtttataccaagtaatgtaatgcctctggctttgttctttttgcttaggatcactttggccattcggactcttttttggttccatgtgaattttagaatagtttttactagttctgtgaaaaat

SEQ ID NO: 238397 - DNA, 595 bp, Homo sapiens
ctttttagtttaattagacccaacttatcaacttttgtttctgtcacaattgcttttgagaacctggtcacaaattctttcccaagacccatatccaaaatggcatttcctagattttcctctaggattcttatagcttgaggtcttacatttaaatctttaatccatcctgagttaatttttgtatatggtgaaaggtaggggtccagtttcattcttctgtataagactagccagttatcccagcactatttattgaatagggagtcctttctctattacttatcccagcgccatttattgaataaggagtcctttctctattgctatttttttggttgactttgttgaaaatcagattgctgtagatgtgtggctttatttctggattctctrttatattttattggtctacatgtctgtttatgtaccaatgtcatgctgttttggttactgtaggcttttagtatagtttataccaagtaatgtaatgcctctggctttgttctttttgcttaggatcactttggccattcggactcttttttggttccatgtgaattttagaatagtttttactagttctgtgaaaaat

SEQ ID NO: 238398 - DNA, 579 bp, Homo sapiens
gcatgggaacgcccacccctgtgattcaattacctcctacagggtccctcccacaacacrtggggattatgggagctacaattcaagatgagatttgggtggggacacagccaaaccatatcagagaatctcaagattctctgaaccttttaaaatgcacaataagtatgtatgctctttaatttgaagagaaacatgatccttttcaaagatacaagcagtgcctctgctcacaaaacatgcagaaatatgaaagatgcatggagagttgtcttgcaataattctttgcatgcctggtaattttgttgattttactttgttgggtatgagatatatttataatttttataaatatttttgagcttcattctaaaatgcagttaagttactcagaaatattctgatcctttcaagtctcacttttaagctctactggggaggacatgaggagcatttagtctattgcctgttttgctctgctactaaggcaaaaaccttcagagttctttatgaatgttgaggctttccagtcttgctggtgggaacaggcacttcttctagccctatgtaagctccag

SEQ ID NO: 238399 - DNA, 621 bp, Homo sapiens
tttctgtgtactcatttcattgtagttcctaggttagggtcaaggtcatgaggtggaccaagcagctagctccaaactgccctccctgttgccgtggttccaatccctgctcaccttgcacaggttgcagggttcccatgacaccctctgccttctctagacacacctgcatcctacccactcaggcaaagaaagtcctctgctccaaattcatgatacgggaggcagcatggtggatagaaaatgcatgggctttgggttcagacagatttggcttccaaattctggttctagcttttgggaaactgatccagctattcaaactttctgagcctcagttatctgcaaaattgggataataacactgaygactttttaaaagtaataatgagagattgctttacatccattgaactgtcaaaaatcagaaagaacaaaaataacagttgctgatagaaatatgaattgctatagcctattgggaaagcaatttggcaacatctattaaaaacacatactgctgaaagcagaactcacatttctggaatctttccatacaaataaaagcatcagcatataaggatatgtgtgcaaagatgtctattgcagcatagtctatgt

SEQ ID NO: 238400 - DNA, 621 bp, Homo sapiens
tttctgtgtactcatttcattgtagttcctaggttagggtcaaggtcatgaggtggaccaagcagctagctccaaactgccctccctgttgccgtggttccaatccctgctcaccttgcacaggttgcagggttcccatgacaccctctgccttctctagacacacctgcatcctacccactcaggcaaagaaagtcctctgctccaaattcatgatacgggaggcagcatggtggatagaaaatgcatgggctttgggttcagacagatttggcttccaaattctggttctagcttttgggaaactgatccagctattcaaactttctgagcctcagttatctgcaaaattgggataataacactgatgactttttaaaagtaataatgagagattrctttacatccattgaactgtcaaaaatcagaaagaacaaaaataacagttgctgatagaaatatgaattgctatagcctattgggaaagcaatttggcaacatctattaaaaacacatactgctgaaagcagaactcacatttctggaatctttccatacaaataaaagcatcagcatataaggatatgtgtgcaaagatgtctattgcagcatagtctatgt

SEQ ID NO: 238401 - DNA, 624 bp, Homo sapiens
aacagacttttacaggttataaaataggaatgaatttaacaggtattttgtcacagagttgacgagttttatcaacttactgggtgtggagaatatagtagaaagtaacgtaaagaccccactatactttcaggtctgtcatctgttgcagtggcctccagttttatagctgttgaacttttgttaacagtttatcttcctccaaatwgacagtgagctttttaaggcaaaggtctatgtatttctattactccctcagagtccagtagggtgcctcataagaaggaaatgcccatatatttagttgattaattattaagagtctgagtgtctgtttttctgacttcaagctgcaagctttgggaagagctttgagaacttctatttgggtcagctgcccatccttgggccatcgtggtagttaggggcctgtggtccggttcacatcatgtcttcccctcattccttgacttaggaggagtgagggctacatgaagatattgacatccctacttaaaccagcaggttggggccagggggtgactgtttctagtagaacaaacattagatgtccaccttacctttcttctgagctcttcacctacacatggaactttccattct

SEQ ID NO: 238402 - DNA, 624 bp, Homo sapiens
aacagacttttacaggttataaaataggaatgaatttaacaggtattttgtcacagagttgacgagttttatcaacttactgggtgtggagaatatagtagaaagtaacgtaaagaccccactatactttcaggtctgtcatctgttgcagtggcctccagttttatagctgttgaacttttgttaacagtttatcttcctccaaatagacagtgagctttttaaggcaaaggtctatgtatttctattactccctcagagtccagtagggtgcctcataagaaggaaatgcccatatatttagttgattaattattaagagtctgagtgtctgtttttctgacttcaagctgcaagctttgggaagagctttgagaacttctatttgggtcagctgcccatccttgggccatcgtggtagttaggggcctgtggtccrgttcacatcatgtcttcccctcattccttgacttaggaggagtgagggctacatgaagatattgacatccctacttaaaccagcaggttggggccagggggtgactgtttctagtagaacaaacattagatgtccaccttacctttcttctgagctcttcacctacacatggaactttccattct

SEQ ID NO: 238403 - DNA, 624 bp, Homo sapiens
aacagacttttacaggttataaaataggaatgaatttaacaggtattttgtcacagagttgacgagttttatcaacttactgggtgtggagaatatagtagaaagtaacgtaaagaccccactatactttcaggtctgtcatctgttgcagtggcctccagttttatagctgttgaacttttgttaacagtttatcttcctccaaatagacagtgagctttttaaggcaaaggtctatgtatttctattactccctcagagtccagtagggtgcctcataagaaggaaatgcccatatatttagttgattaattattaagagtctgagtgtctgtttttctgacttcaagctgcaagctttgggaagagctttgagaacttctatttgggtcagctgcccatccttgggccatcgtggtagttaggggcctgtggtccggttcacatcatgtcttcccctcattccttgactyaggaggagtgagggctacatgaagatattgacatccctacttaaaccagcaggttggggccagggggtgactgtttctagtagaacaaacattagatgtccaccttacctttcttctgagctcttcacctacacatggaactttccattct

SEQ ID NO: 238404 - DNA, 521 bp, Homo sapiens
aaacagaaatgggtgaaaggaaaaaatggaacccaataaagggaacattagtgagaggctgggggtcaatactattggggacccttggggaaactgggtaagacatacttcatacttcagagtcatcccatgtgatgtccaggaagtagaagcgcatttatccaatgacttcaattcctcattgattgagggttcccaggggacatgaactctcctaaacatccaaattatatttctgagtagctgagctacctcactgaaatgtggttcttttttaaaaaagtaatttcaacttttattttaggtagggggtacatatgcttktttgttacctgggtatattgtgtgttgctgaggtttgtgatatgattgaacccttcacccaggtactgagcatagcacacaatagttagttttctaacccttgccctccccacctcttcctgctctagtagtccccagtatctattgttgccatctttatgtccatgaatcccagtgtttagcccccacttataagt

SEQ ID NO: 238405 - DNA, 521 bp, Homo sapiens
aaacagaaatgggtgaaaggaaaaaatggaacccaataaagggaacattagtgagaggctgggggtcaatactattggggacccttggggaaactgggtaagacatacttcatacttcagagtcatcccatgtgatgtccaggaagtagaagcgcatttatccaatgacttcaattcctcattgattgagggttcccaggggacatgaactctcctaaacatccaaattatatttctgagtagctgagctacctcactgaaatgtggttcttttttaaaaaagtaatttcaacttttattttaggtagggggtacatatgcttttttgttacctgggtatattgtgtgttgctgaggtttgtgatatgattgaacccttcacccaggtactgagcatagcacacaatagttagttttctaacccttgccctccccacctcttcctgctctwgtagtccccagtatctattgttgccatctttatgtccatgaatcccagtgtttagcccccacttataagt

SEQ ID NO: 238406 - DNA, 515 bp, Homo sapiens
ccatttaatagagcctggggcactgctgaaaaggtgggcctgcttgaggtggcaacctgagtctgttgatgaacaccagggagtttctgtgacttgtaaggcttgacccttcactttgaggataaagtgctatttcaaatatctcttggaatatttctcttccttgccctctaaacctgtctctactcttgatctgtttcacctgtgtgctttacatattttgacaatcttttcttgaaatagaattttttttctcatttttcttaaataaagttaattaaaaatgggggaagaaacaaaacaaggtgtccagctttgaaaacgaggcaggctttggcgtattgcacaaagacaaggtatgcctgactgccttgcacygcacccaggcctgctgtgtgttaatgactcctcccagggcttccagcccatctgcctttctcctcagtgcatgcagacctttcacattccatcctgctttcttggccccatgggggcaagctttatgtttccctctt

SEQ ID NO: 238407 - DNA, 559 bp, Homo sapiens
agccccgtccgcggcccctctagtcattgctcaggttgctgtggtggcactcatccacttgtgaacacatggacacctactggtgcacagtgctttacagtttacaaagcccttttgccttctggatcttgcatcagtcctcacggcagcccagcaaggtactttacacgtgggaaactgaggcccacaagaataagtgagtgagttgccccaggttatgcagcaagtcagatgtggaactagaatccaaacccttgctccttccacaaaaccatgggcaggaacagtggctagtgctgccaggaacactcayatctcacagagctatgaggggcaggcggatcccacgaggggccattctttgcctgactcccagcactcaccctgccccagctttggaagcagccccttcacgttgctgggcctcaggtccctcatctgtgatgtggggacagtacactctcctgcaggtttgggaggctcagcgagatagggtgtgggagggcccagagctaggggtgggggtcaaaatggcagcaattctggccccctccttact

SEQ ID NO: 238408 - DNA, 559 bp, Homo sapiens
agccccgtccgcggcccctctagtcattgctcaggttgctgtggtggcactcatccacttgtgaacacatggacacctactggtgcacagtgctttacagtttacaaagcccttttgccttctggatcttgcatcagtcctcacggcagcccagcaaggtactttacacgtgggaaactgaggcccacaagaataagtgagtgagttgccccaggttatgcagcaagtcagatgtggaactagaatccaaacccttgctccttccacaaaaccatgggcaggaacagtggctagtgctgccaggaacactcatatctcacagagctatgaggggcaggcggatcccacgaggggccattctttgsctgactcccagcactcaccctgccccagctttggaagcagccccttcacgttgctgggcctcaggtccctcatctgtgatgtggggacagtacactctcctgcaggtttgggaggctcagcgagatagggtgtgggagggcccagagctaggggtgggggtcaaaatggcagcaattctggccccctccttact

SEQ ID NO: 238409 - DNA, 594 bp, Homo sapiens
acacagtaggtggtttgccgccagagctggaatcctgatcctgggaccctcagtgcaggactcttttgtcttaataatccccaggcccaggcggtggtgggtcctatggcagtccttttttaatatggtttgtgccatgtctccgctgggagcgaccccaaattatcacagcccgcccccttctgaggcagccaagaagctttttgtagcttggggcatctactgttggacccagggccgtccattggtgccgggagacacatccatccctcctcccacacgatggccccctgactatttgaaggcagggatcttgtgtcactcctgtgtgtcatccaaacctatttttaacgtcagctggttctgcctcttcacgtagcaacagctctgttttctctaaactgcacaattagagcccctgttctccaaaactgattctkttctgtggtctgcatatgaaaccaggaatcctcttcctgtccccttcccttctttgaaccccagttctgtctgtcttggcctttccatctgggtgatgacattcccccggtcgcttccattcctgatttatatctttagtttgttgttgctgct

SEQ ID NO: 238410 - DNA, 453 bp, Homo sapiens
gtatagctgtagctgtgacagtgctctatcctcgcaaccagaacatacttagaagattaacacgccatccttcaagaagcatcttctgtaagatagggaccttgtttggttcaatgaacattggtacagaccccagcacagaagagaagcaggtttgcaatacttttcctaaaacaaaacagaacaaaacaaaatgaatcaatgaatgttaaatagcaatccacggatctattatctttatgtgtctttcatttygaactattcaaagctcttctataagcctcgtttataatttagctgagcgctttctctacctattttctgaccgtatctgtggatttgtgggcagacactctattttggaagatatttacactgtcaatatactttccatttgacactgcctaccttcttccttgcatccttatggttcagctggaggagggaaccaag

SEQ ID NO: 238411 - DNA, 538 bp, Homo sapiens
tgcagtggcacagttatggctcacggcaccctcaatctcctgcactcaagcgatcctcccacctcagcctttcaagtacctgggaccacaggagcacaccaccacgttcagataatttttttttattttttgtagagatggggtcttgctctgttgctcaggctrgtctcaaactcctgggctcaagcagttttcccaccttagcctcctaaagtgctgggatcacaggagtgagccatcacgcccatcctgggctctttctacatatctgctcaatgacatttagctagtacatcctcattgtcacacttgttaccttgtagttacaagatggctgctgaatagccagataggggtatttgctgtttcaggaaagcaaaatccctcccagaaaccctcagaaatgagctaagggtttctgggagggcttttgctttgctgaaacaggaaataccgctatcggggcattcattagtcagaactatgtcacatgacctgtcctgagggaagggaggttgaataaacaagtgttttttgc

SEQ ID NO: 238412 - DNA, 427 bp, Homo sapiens
gcttcaattacacacatcctccagagactgcygcttttccctttacctcttccagaccttccgcctccatttcccgcccagcccagcttccattcccactctccaactgcaggggttctcaacagccaccagagctacgtagatctcacgttacaaaatcccctggtagttactttaatgctcaagccttccacacagtgaccccaccctctccagccatcgtcctctctgcagccacccgacccatccgccttgccagtttattctgcttgactaggtgattaaatggtagagattctgaaaagactctctcttctcatcctgtattctttccctcggcaatctctgccatgcccgtggtctgtttgccagatgaatatcattagatcagcgacttcccaaattacatctccagcccagaactctt

SEQ ID NO: 238413 - DNA, 427 bp, Homo sapiens
gcttcaattacacacatcctccagagactgccgcttttccctttacctcttccagaccttccgcctccrtttcccgcccagcccagcttccattcccactctccaactgcaggggttctcaacagccaccagagctacgtagatctcacgttacaaaatcccctggtagttactttaatgctcaagccttccacacagtgaccccaccctctccagccatcgtcctctctgcagccacccgacccatccgccttgccagtttattctgcttgactaggtgattaaatggtagagattctgaaaagactctctcttctcatcctgtattctttccctcggcaatctctgccatgcccgtggtctgtttgccagatgaatatcattagatcagcgacttcccaaattacatctccagcccagaactctt

SEQ ID NO: 238414 - DNA, 437 bp, Homo sapiens
attttaaaggaactgagcttcaattacacacatcctccagagactgccgcttttccctttacctcttccagaccttccgcctccatttcccgcccagcccagcttccaytcccactctccaactgcaggggttctcaacagccaccagagctacgtagatctcacgttacaaaatcccctggtagttactttaatgctcaagccttccacacagtgaccccaccctctccagccatcgtcctctctgcagccacccgacccatccgccttgccagtttattctgcttgactaggtgattaaatggtagagattctgaaaagactctctcttctcatcctgtattctttccctcggcaatctctgccatgcccgtggtctgtttgccagatgaatatcattagatcagcgacttcccaaattacatctccagcccaga

SEQ ID NO: 238415 - DNA, 427 bp, Homo sapiens
gcttcaattacacacatcctccagagactgccgcttttccctttacctcttccagaccttccgcctccatttcccgcccagcccagcttccattcccactctccaactgcaggggttctcaacagccaccagagctacgtagatctcacgttacaaaatcccctggtagttactttaatgctcaagccttccacacagtgaccccaccctctccagccatcgtcctctctgcrgccacccgacccatccgccttgccagtttattctgcttgactaggtgattaaatggtagagattctgaaaagactctctcttctcatcctgtattctttccctcggcaatctctgccatgcccgtggtctgtttgccagatgaatatcattagatcagcgacttcccaaattacatctccagcccagaactctt

SEQ ID NO: 238416 - DNA, 437 bp, Homo sapiens
attttaaaggaactgagcttcaattacacacatcctccagagactgccgcttttccctttacctcttccagaccttccgcctccatttcccgcccagcccagcttccattcccactctccaactgcaggggttctcaacagccaccagagctacgtagatctcacgttacaaaatcccctggtagttactttaatgctcaagccttccacacagtgaccccaccctctccagccatcgtcctctctgcagccacccgacccatccgccttgccagtttattctgcttractaggtgattaaatggtagagattctgaaaagactctctcttctcatcctgtattctttccctcggcaatctctgccatgcccgtggtctgtttgccagatgaatatcattagatcagcgacttcccaaattacatctccagcccaga

SEQ ID NO: 238417 - DNA, 551 bp, Homo sapiens
aagcttgagccactgcacctggctctgatcattattttaaaaaactaaataaaaataagacaattattaactccaagaaagtgaaaacattttgtaagaaaacagggtcatcatagtattttaaaagtcttggttgtgattaacactcacgtaaaacagcatgaccacatttactacataactgtagtgggagaatggggagaggggagtgaatgttgasaggtaatcagaggtagctgaggggcagatttggtgaaagagaaagaaagtttcatctccagcattggaaagaaaatagaaaatgcctaatggtgaaattcaagaaatagcattcaaaacatgttacttagtgataacggaggttaataccaaaggaacaattaaaattgttgaaaagcatgcctgcagtcccagctactcaggaggctgaggcaggagtttcccttgagccccagagttcaagaccagcctggacaacatagtgagacttcataaaaaaaaaaaaaaaagtgatattctctggagattaggaaagtgtaggagggttttgg

SEQ ID NO: 238418 - DNA, 668 bp, Homo sapiens
cagtcaagggtgatctgtgaggccctttccagccccaacactgcgtcttcccttgactctaaatcaccatctgaggagcctcacaggcatcagaatccacagagcttagaggccattgttgctaaactccaaactactcctgagaaccaaatcaaaagaggtgcaaggkgaaaaaccgtctcactcattaaaaaaaaaaaaaaaaaactacataaaaaaatagaaccattgcttagctctaatatgaaacaagaaagttaagcagagtgggggtggggatgggggtggggtggggggcatttttccagaacccgttcgcctctcccaagtggcaacacccatgtgcctctcactggaagcattgcaacactccatccctgaaactgacctagtttgtggctggttctttaagaatgtgcttcttgctccaaagatggtcctcaccttgtccaggtacaaggagagggaacctatacctggacactcgctaggactctatcactctggaggcagctttgggtgagatgaggaaaatgccagtcactgctctacaaagaccccagagccccaaagagagacggggcacctccccagccacattgctcacaagtcccagaagccacctgcattcgtttctcacctggcctgggatcacttgtgacccagaa

SEQ ID NO: 238419 - DNA, 622 bp, Homo sapiens
ttctcccttgaaagttagttcttagaagcaagaaatctctatttgaagttttaaacttgcagcatagaagtataaccttagcaagaaacagaatatttaaaaaattttacactagtataacatcatgaggcttacaagtaatgttacatcaaacattttgtttgatacattattcaataaagatcgacccagtcactgctattcaagtactagtgggaggcaccagacctgcaaagcaaaggggatcccagtccccaaaaggttcacagtccacccttgagacagacaggatattattattctatccattttgggtgaaggaggctaagggacatgyctaaagtcacataactagaaaaaacccaagctgggccgggtgcagaggctcatgcctgtaatcccagtactttgggaggttgaggcagtggatcacctgaggtcaggaaatcaagaccagcttggtcaacacagtaaaactccgtctctactaacaatacaaaaaaaattagccggatgtggtggcagatgtctgtaatcccagctatttgggagactgaggcaggagaattgcttgcacctgggaggtggaggctgccatgaaccaagatcacgccactgcact

SEQ ID NO: 238420 - DNA, 622 bp, Homo sapiens
ttctcccttgaaagttagttcttagaagcaagaaatctctatttgaagttttaaacttgcagcatagaagtataaccttagcaagaaacagaatatttaaaaaattttacactagtataacatcatgaggcttacaagtaatgttacatcaaacattttgtttgatacattattcaataaagatcgacccagtcactgctattcaagtactagtgggaggcaccagacctgcaaagcaaaggggatcccagtccccaaaaggttcacagtccacccttgagacagacaggatattattattctatccattttgggtgaaggaggctaagggacatgtctaaagtcacataactagaaaaaacccaagctgggccgggtgcagaggctcatgcctgtaatcccagtactttgggaggttgaggcagtggatcacctgaggtcaggaaatcaagaccagcttggtcaacacagtaaaactccgtctctactaacaayacaaaaaaaattagccggatgtggtggcagatgtctgtaatcccagctatttgggagactgaggcaggagaattgcttgcacctgggaggtggaggctgccatgaaccaagatcacgccactgcact

SEQ ID NO: 238421 - DNA, 347 bp, Homo sapiens
catactttgtaacaggtatctaagatttgaaagaaatcaagtgagaggcggatagaaatcatctgaaatgcgctaatggaatatagaatggagtagagagggatacctgtccaagtacagggtgacagaggttgaggcaaggaaagatgtagaacaggaatgrataaccttatttctatcaggggctctgacccaaagaaaaaataaaaactaccaacagcagcacttgagtagaaagcaacttattttagtatttttaagaactcaaaacatcaaacaccagattatttgcttttaaaattgagaatgagaaaaatgaacctatattcaaaagatatagcaaagcc

SEQ ID NO: 238422 - DNA, 319 bp, Homo sapiens
actctgaaaattaaaaaaaaattatcaaaaaatattaaaaaagaattaaataaaaagaaagatactccaagcacagtcgctcatgcctataaaccagcactttgggaggtaaaggcaggaagatcrcttgaggccaggcattcaagaccagcctgggcaagaaagtgagacccgtctctacaaaaaaaaattaaaaatcaaccaagagtggtggtacatgcctatagtcccagctacttgggaggctgaggtaggaagattgcttgagcctgggaggtttaggctgcagccattgctttccaacctgggaaacagagca

SEQ ID NO: 238423 - DNA, 529 bp, Homo sapiens
tgacagatagcttaaggcaaccagggaataccataagcctcttttataaccaataataagtaagtttgaatgattgttctaccataagttcccatttttgtttatttttagaaccattatagtagtggcaggtgtgttttgggggtggggtggttatttgttgtttttcccagaagaaaaattttcacaatcccactatccctaaaaatctatttttgttttggtgttccatctcttagtccttaggcatatatgcttttaaaaaaaamattgaaatcgtactataacatactatgttaagtggtaatggttggttttgttctgtctacactctgttgtttattattctgaaacagtgatgtgtatgcagatgcctggtggtaattcctagctcttgggcagagattttaattttaccagaaccatgagactgtagtccctggtcttgcccagtgttttctagagttgtcaatagtgtgtcacaaaattatccacacatagatttattcttgaagagaatattaaaaaa

SEQ ID NO: 238424 - DNA, 536 bp, Homo sapiens
gaccttagggaagtctgttccttattagtgtggcagacatgttgtcaaggaacacaaagcaagctttctctgttaaatgatcatcatatttatgtcaaagctgttatctgctatttaccaagataattttgcagtctgaaggaaaaaaccctttaaactttgaaacaacgttttaatctaaatgaaaactttgaagttttgaaaaaacttgttggtctaaatgaaggatcataagaagatgctaaattgagattttcactgtaatagacygctggtatcagctggcatgactatggggcaagagaataacattccataattttctgcaataccacagatatgtgcagatagcaataacttgggaaatgaggttttagtagtttttacaaaatacttagggctctgtggtaccaggagttcagagtacaagagggtgctgttgagctgactataaaaaatattgactttgtttttgcaaccaagggtaatgttaagcaaacacatgtatattggaatcactttctactttatgttgc

SEQ ID NO: 238425 - DNA, 537 bp, Homo sapiens
ttgtgtgcttatttttcaccaggttgcatagttgcacagttaatagataaaaagaacaacttgtatgcaaacgtagatttgactgactccaaattctgtgtgtagtcaacaatactgtattaycacaatagggaaaggaattcacaaatatttatgtgagcgattcccacttcaagccctgtttagctgtggtctctgatgtctttaacccacagactaatcccaccaagattcctgtaccaatcccatcaacccagacagcttattccagtgcttatttcttccagttgggggattcagatgttagggacacggccatacactgcatgaagtatcataggaaatcctcatttgtgttctctcaattcacttacctaataagaatcttacccctgcctttcctatgccaatttccttcctcaaaagaatggagttagctctatagccagagtcatcatcaagagtctggaccactgcttgagactgtagttatgtgaacaccaatactgtccataagcagccagaagatgttatttt

SEQ ID NO: 238426 - DNA, 503 bp, Homo sapiens
aatttacggctgatttttgccactctcttttcaacatatttwtctgactggtatttttcactttcttattacctcttcaccatcttttgcaccttaactctaaacatcactttatcactatacattttttgtcccttgcactactgaatcaacttgttttccaacattacccatgtgctgaagactcccaaagcttctctccattcctgatctcaaatccttaattatctcctaggcaatcccactgaatatcctctcttcccttcaaatattacaagactaaaatgagttgatagattaaactgcctttaactttttataagcgtgatctcaagatagcatctggcaaactaagagcaacactttttttttctatgtaccctgtcttgcttcttttgtgctgctataataaaatcccacagactgggtaattataaagaacagaaattgtgtacacttctagaatctgggaggtccaagatcaagacgcaggcagttcagtg

SEQ ID NO: 238427 - DNA, 503 bp, Homo sapiens
aatttacggctgatttttgccactctcttttcaacatatttatctgactggtatttttcactttcttattacctcttyaccatcttttgcaccttaactctaaacatcactttatcactatacattttttgtcccttgcactactgaatcaacttgttttccaacattacccatgtgctgaagactcccaaagcttctctccattcctgatctcaaatccttaattatctcctaggcaatcccactgaatatcctctcttcccttcaaatattacaagactaaaatgagttgatagattaaactgcctttaactttttataagcgtgatctcaagatagcatctggcaaactaagagcaacactttttttttctatgtaccctgtcttgcttcttttgtgctgctataataaaatcccacagactgggtaattataaagaacagaaattgtgtacacttctagaatctgggaggtccaagatcaagacgcaggcagttcagtg

SEQ ID NO: 238428 - DNA, 503 bp, Homo sapiens
aatttacggctgatttttgccactctcttttcaacatatttatctgactggtatttttcactttcttattacctcttcaccatcttttgcaccttaactctaaacatcactttatcactatacattttttgtcccttgcactactgaatcaacttgttttccaacattacccatgtgctgaagactcccaaagcttctctccattcctgatctcaaatccttaattatctcctaggcaatcccactgaatatcctctcttcccttcaaatattacaagactaaaatgagttgatagattaaactgcctttaactttttataagcgtgatctcaagatrgcatctggcaaactaagagcaacactttttttttctatgtaccctgtcttgcttcttttgtgctgctataataaaatcccacagactgggtaattataaagaacagaaattgtgtacacttctagaatctgggaggtccaagatcaagacgcaggcagttcagtg

SEQ ID NO: 238429 - DNA, 617 bp, Homo sapiens
atagtttacctggaaaaaaaacagagccctggtttggttgtttttttccgtctttctttgtgccagaagccacttgacaagtctgcaggcagacatgtttaacctttattctctctccctagagtctctagtaatagagcaaatgtgatgcttcctatcaaagatgagcaatgtgtctatgggctagggggtttgcactttaccttcagcttgattagtcttgattgcttggatccacactttagaaaacacatacttgaacaatcctaaatctcttctttctgaaaggcagtaaaataatggaggtggatagagcattagtgtgcatgtgtgtgtgtacaatgagccaakagctgttagaaattatttttataatcttatgtaatcattccaaaaacacaagtgagagtttaagaagatccctagtgaatctcttgctatttccaatataacaaaaatctttatttcacctattaaaaattactatagcaatttattctccatttttcccttaaatcagttttctacctttcttggtcctatagtacccatgagaagaatgtgtatagaccacgtcacatatgatgacttacctattggctttagccaattggaag

SEQ ID NO: 238430 - DNA, 617 bp, Homo sapiens
atagtttacctggaaaaaaaacagagccctggtttggttgtttttttccgtctttctttgtgccagaagccacttgacaagtctgcaggcagacatgtttaacctttattctctctccctagagtctctagtaatagagcaaatgtgatgcttcctatcaaagatgagcaatgtgtctatgggctagggggtttgcactttaccttcagcttgattagtcttgattgcttggatccacactttagaaaacacatacttgaacaatcctaaatctcttctttctgaaaggcagtaaaataatggaggtggatagagcattagtgtgcatgtgtgtgtgtacaatgagccaatagctgttagaaattatttttataatcttatgtaatcattccaaaaacacaagtgagagtttaagaagatccctagtgaatctcttgctatttccaatataacaaaaatctttatttcacctattaaaaattactatagcaatttattctccatttttcccttaaatcagttttctacctttcttggtcctatagtacccatgagaagaatgtgtatagaccacgtcacatwtgatgacttacctattggctttagccaattggaag

SEQ ID NO: 238431 - DNA, 617 bp, Homo sapiens
atagtttacctggaaaaaaaacagagccctggtttggttgtttttttccgtctttctttgtgccagaagccacttgacaagtctgcaggcagacatgtttaacctttattctctctccctagagtctctagtaatagagcaaatgtgatgcttcctatcaaagatgagcaatgtgtctatgggctagggggtttgcactttaccttcagcttgattagtcttgattgcttggatccacactttagaaaacacatacttgaacaatcctaaatctcttctttctgaaaggcagtaaaataatggaggtggatagagcattagtgtgcatgtgtgtgtgtacaatgagccaatagctgttagaaattatttttataatcttatgtaatcattccaaaaacacaagtgagagtttaagaagatccctagtgaatctcttgctatttccaatataacaaaaatctttatttcacctattaaaaattactatagcaatttattctccatttttcccttaaatcagttttctacctttcttggtcctatagtacccatgagaagaatgtgtatagaccacgtcacatawgatgacttacctattggctttagccaattggaag

SEQ ID NO: 238432 - DNA, 539 bp, Homo sapiens
acaggaactacttcccgccttcatggggcttacactctagtggggcatgcaaacaaaaaactgaatcagcaagtaaaatacatgatatatttgataatgctatgtgctaaggagaaaagcatgcaggggaaaggaataggataagaagtcagggcagtgattttaagtacggggtcaggaaagacttctctgagaatgctacatttgagtaaaaatctgaaggaattgaaggtggaatcctgaaacacgaaaaaatcacacagatagctaagtaccctgttcatgtgccatggttgttgaatgataaaagccacttgaaaatggctaacgagtgattttattatgttgaaaagtattgcttaggaaaagcaagtgagggaatactagagcatagtaatcattgcctggacatgtaagatgaagattaaaaagtgtgtaagcaaggattccatagctttgtctccaggggccataaattgcctcatagasaaaataaaattatccaatccactagcattttatttttatatttgtgaatt

SEQ ID NO: 238433 - DNA, 606 bp, Homo sapiens
tccactagcattttatttttatatttgtgaattcatattctattataggataactgaaaataaaaaatgaagggagtttttattttttccattggggtctataaaaacctaaaagctccatcgaaaatcatttagcactgaaaaaacattcagtaaaattgcaggatatgaaatcaacatataaaaatcagtagcatttcartacaccaccaacaaagtaacagaaaaagaaatcaagaaagcaatcctatttacaacagattatctgaaaaagacaaaatgactaggaatacatttaaccaagaaggcaaaagaactctatcaggaaaagtataaaacatggaaaagcaattcatgtaagaattaatactgtgaaaatgattacatcactcaaagtgatctgaagatctaatcaactcctaccacacaacaaataacattcttcagagaaataagaaaaaaaaattatggtaaggcatcttgaaaaataaaataataagatgaagaatatatagtactccatgaattaaatgaccagatataagatatttctgatctctaaactgtcacagctaggatacttcacaaagcctttcattatttagg

SEQ ID NO: 238434 - DNA, 421 bp, Homo sapiens
gaattcatttgcatggaatgtattttctcattttttaacttttggtctatgtgtgtctttataggtgaagtgaagttcttgtaggcattatatagttgggacatagtttaaccatttatctactctgtgttttttaaatgggggagattaatctctttacagacaaagttattactgataggcaaggacttactcctgtcattttgttaattgttttctggttgttgtgtatatccactgtccttttatttctctcattgtttatcagtgcagtttggtggttttctctagtgatatagattaattcttttctcgttctcatttgtgtatctgctcttccagtgagttttcygcttttgcatgtttttatgatggtgattattatcttttcactttcagatgtaggttttctttgaacatt

SEQ ID NO: 238435 - DNA, 555 bp, Homo sapiens
taagtgtcctgggcacagaagtgagagttgaggctatgaacctgactgatttctaaaggaaagccaacaaagaaaatcttccccaaggaaaacktggagaacatctaatcattgtctatggaaatttggagagaaatagaacagagttaaatatttattataaattgaggggaagcaatattattaaaaagaatgaaatgaccagttgtgttaaacatttcaaggaggtaaaagagggtgggacaaagaagagaaaactggattgacaatcagaaagactctgttaatagattatgtccagagacgacatccagaagaaaccagaagaaagccagattataaggtgttaaggaattggtaactgatgatcaaatggaggaagaaaataatgcattatgctttctagaatgtttgcaaatcaaccttttaattaatcagaaaattattaaatcacttatatccaaccagaaattggaaatgtcactgaagcctggattacaaacagccaaccataacagagttatgctctggctgctggagtagggttgaggagag

SEQ ID NO: 238436 - DNA, 621 bp, Homo sapiens
tgcattatgctttctagaatgtttgcaaatcaaccttttaattaatcagaaaattattaaatcacttatatccaaccagaaattggaaatgtcactgaagcctggattacaaacagccaaccataacagagttatgctctggctgctggagtagggttgaggagagagaatccgagtaacagatgccgtgagactccatgtaaggagatccagcctagtatctgaaggtcagggtaggcttctcagaggtagtgactgtcgagaaatggaggtgggtataagaaaagaagaagaactggggaagacaggcagctcaggtaagagaaaaasaatatcaagtagctggaaaatggcccacgtcaggaccctggaaaggaaaatattgtgagggggttggtgagaaatcaggaaagtgatgagaggtaaggcttaaaaggaaatcatggccttgaaagtgctgctaataaattataactttcccttgagtacactgactaatggggttctaagtagggggctgatgtttatcctaatcacaagagtagccttgctattcccttagtttatgaaaaacggcaaaggcaaagaaaatgaaccaaatcaaatggcaatcaaggggca

SEQ ID NO: 238437 - DNA, 538 bp, Homo sapiens
tatctacacagagagtaaacatgcttttgggatagtacatgattttagtattgtatggaaaaccagaggatttttaacaactttgaggacaccaactaaaaatggacacaagtgtctgtccccttagcagctttgtgatggtcaaaggagttgcacatacttaaagtagaagctcacatggataacaaaaccccaaagcaaaaaaaaaaaaaaaaaaaaagaaaaaagtcactgcctgacaataygcttacctggcagcttacaaatctattccagtttcaacacaaccagaaaaaatcttaaatgactacacttaccaactgagcccctaactaaagagcttagaatctccccatttaaagccctctaacgtgaaagaacaattggaaacaagttggatgctttaccttcccagacctactttggagacacccacatggccactcggctctctcacttgaaatttagtcgctggcctttacaagatcattcaacctgggagaaagaaactaaatcatctctcctgtcaacattgatg

SEQ ID NO: 238438 - DNA, 590 bp, Homo sapiens
aaaattctcataatctaggtctataattgactagacctgtgttaacttagtcttagaaataaggaaggtattagcagaagaaataaggctaagtacattattttgaaaaggataactttacattgtctttaatcattagcgatacatagatataagtttgtatttaatatactgaaagacagttatggctagtttacaaaacatttgtaactttcacgtaacctacatgaaacaccagaaaacaaaacatagtttctctgaagaaagtcaaaagagaaggaagtgggaaaaatagtataagatgagaaaaatgattgacaaaccacttgtgactattaaaaataaatgtaaaagggttaacaatgttggaattttccccagtcctgttctccaggaaaatagcaccagttaagaaatccctgatcattttataaaaatggtttatagcaaagwtccgcctttccccacataacttagataacagtctaagttatctttccccatacaatttagataacagtatgacccccttgtagtccatgacaaggccagatatagaccctttaaattcccattgtttatctcataaa

SEQ ID NO: 238439 - DNA, 578 bp, Homo sapiens
tatagtgagtacaattcttatactaaggacagtaaataaagtaggaataaggaggcactcatggaactagggttactgagaagtctacatggtgaattagcatccagaacggagtaacttttatctctatagtgtgcatgaatgtatgtaggttatatatgtgtaatattatccagccttcaaatggtattaccaaattatattataaatccctaaaaggagatctattctgactagtttacagataaataagcacttatataaactgaatattcttaagattctcagaaattaaggaaattgaatttataatactttcagtgtggaaaaaagtattcttatagaaactagtaaactcaatgtttagtagtttctataaactcaaatgtttctaactcaagtgtttcaagaattcaagttcacataatttaggtaagtctttggcagcaagactcatttaatattgttcttttakcaaaaacaggggatgtcttctgagttatttgttaacacatgtttttattctacttgggcatgttcaccctaaacttgtacaggtttactcatcaaataagctt

SEQ ID NO: 238440 - DNA, 562 bp, Homo sapiens
ggacagagaacaaaagcacagaaatattgtcagctttgcatggtgtctccagaacttcacaattatctctacgttgaatttattgctactcttcctcttgttttacgttggttctttatttaatggtaaatggggaaaaaaaagttctagtgtactttttcaacacatcattagattatttgaatccagtatggcagctgttatcaccctacttgtgagtaatgcaattggtgttctttatatctgttcgttcatgtcgagtattgacactttcagatcggtacacgatgctttgcaacccaagtccagattgtgttacygcagtgcgcagtactcaggaagctggctacccactacatatcattgtatttatctattatgcattctgcttggtattaatgatgctgctcccaactttctggtgaagaagattgcatgtgagttagggaagtctgatttaaaagtatttatgcagcactttactgtttcctaatattacccatgcttcaggtggttggtggaggccttttatattatgccttcccatacattatattagtgt

SEQ ID NO: 238441 - DNA, 562 bp, Homo sapiens
ggacagagaacaaaagcacagaaatattgtcagctttgcatggtgtctccagaacttcacaattatctctacgttgaatttattgctactcttcctcttgttttacgttggttctttatttaatggtaaatggggaaaaaaaagttctagtgtactttttcaacacatcattagattatttgaatccagtatggcagctgttatcaccctacttgtgagtaatgcaattggtgttctttatatctgttcgttcatgtcgagtattgacactttcagatcggtacacgatgctttgcaacccaagtccagattgtgttaccgcagtgcgcagtactcaggaagctggctacccactacatatcattgtatttatctattatgcattctgcttggtattaatgatgctgctcccaactttctggtgaagaagattgcatgtgagttagggaagtctgatttaaaastatttatgcagcactttactgtttcctaatattacccatgcttcaggtggttggtggaggccttttatattatgccttcccatacattatattagtgt

SEQ ID NO: 238442 - DNA, 609 bp, Homo sapiens
gtttacatctatatttatttcaatgtttatctatatatttttaaaaccacgaattcatacaaatacctccaattgcagtccaatattataatttttagtctaattttctctattttaatatttgtaacatcttgttttgaaagcaatgtacttagatgtcattatctttaacacatttccttattcgatcaatttcctggtgaattttccttctckattgccaccaatttccataagtgccattatcatcctgtataggctatgacccacccataccaggccaccactcatttggattctctcctcagtctgcttggggtgtgacacctattttggaccatttccttgcttgctctgactaagctaagaagttccctgagttgactcaatcatcatcctgttttagctctaactccatgttctcagctgtcatattcctcttcctcacttctggcacagatgcctgtctttatctgcctcgtccaatgtctttaggactgaaatattcgacaagagaagatgaataaataaaagagaatggaaagaggacaaagaaaaaaaaataagtgatcactactatattttttttaaatgtttgtgggtatataa

SEQ ID NO: 238443 - DNA, 580 bp, Homo sapiens
atctcccttttgaagctgctccacctctggacttgtcatgtgagctgctcattttcctttctgtttaagctggagtaaatgttaagtttcttgaaattttgagagcatcttctctgataaaaacagactcaggatgttggatttgatccttaattagtggaaggtaatcctcagttaccatcacctggaagtaacgaagagagatgcaaagagataagaaagccatgcagatgtatactagatgacctaaggtgcagtgtgtggcacatcccttttgtgtagrcaaggagtatgcataaacagcctcctttccttttctctccactccagaggttcttatgtgtgttctccacaccttggcagtctgatgatacccaaagatcactttttagataaataattttaaattagtaaaagaaaacgtatatataattgcaaaaattatattgtaatagctatcaaaatgtttaaaaaactaaatttgtggtatatattaaatgtgttctttctctgttttacataaaagtctattctatgtctaaagaccactattattttaaagtagtaaatgaaattattt

SEQ ID NO: 238444 - DNA, 529 bp, Homo sapiens
tactacaaagaactttttgttgttattcagggagggtaattccaatatttcaaaattatttgctttttctctatcatctagcaattgaaaggttgcatgactcctgcttggaaataaactctttggctaagtggtattactaatcttagctaggacagcattaagaaagtgaaatttgttaactgctagaatgcctatcccaacaatctcaattcctattttcttggtccaaacctcaaatgtaattttctaaaaatcacttaaggctttactttacacttaataaacaatccagagaacaagaaaacattttattttatgacttagtagagctgtctcacaaaactctatattatgtttaagaagaagaaaacatgtttaagaagatagctgccgcttgccctcctctccaaattcctgtggccatagtgtttcatttaggacctttgttttgactcattccratgaattttgcaaaatatttatatcttctcatttcaaataggatttgatatacaaaaaaatagtg

SEQ ID NO: 238445 - DNA, 612 bp, Homo sapiens
tcccttatctactccattggtactgttggtgaagtcttatccttaaagtcttatgtatgttgagcactttggcttcagaattgcagataagtggcttcagaacagaagacaacacggtggaggggatctttgttgaacaatagacatagaagacattcagaaagccacatttcaaggagcaatacttctagaagtgagttggtgttttctcaaagggttggatacttgtgatagatttgagttcagacagccacaaaaattcttttcttcaatatcacaaggacctttcgggatagttttatcaaattttcctacgctaagagactcatacctgctggttgttcgattatcagtgracagcttaaataatcggtttgatactaaattttatacagataatttcaatgataaaacaaaaaatccaggagttgataccagaataaaaagatcatgtgtgggttggttccacagaagagagtttcataccttcagtgatgaattctaagcccgaaattagtagaagtgaaaaacatcctctgaaaggctcctttaatgtatcaagtggttggtttctacaaatagaaatacccatcataataagtgacaagcatg

SEQ ID NO: 238446 - DNA, 509 bp, Homo sapiens
cactagctctaaaatctcagctgttctttccatttcatttttgtggacattgccccagttcaaacaatattcsacttttacctagactcatgcctgtaaagtttctcattcaacctattcgttgtccgttatttttctaaactacatatctggtttgcccacatccatgctcataatgcttttggtggttctcattgtttaaaactgtgtttcccaaactatgatactaataacttttggtgacgcagaatatgattttggtgatgtgtactttttttaatttaaaaagttttgcatataatttatattaggaaaaaatatagctagcacatcaaatctttgatttcacagacatattgctgagaatgagcaatatgttattgctcaagtataaacagtccaattaaaagtactctaagaaaaaatatcaagtacgtaaataatagtttataatggtgacaaaatttgtgtcagtggtatatagatgtttgaagtttggtagctgtcag

SEQ ID NO: 238447 - DNA, 494 bp, Homo sapiens
cactagctctaaaatctcagctgttctttccatttcatttttgtggacattgccccagttcaaacaatattccacttttacctagactcatgcctgtwaagtttctcattcaacctattcgttgtccgttatttttctaaactacatatctggtttgcccacatccatgctcataatgcttttggtggttctcattgtttaaaactgtgtttcccaaactatgatactaataacttttggtgacgcagaatatgattttggtgatgtgtactttttttaatttaaaaagttttgcatataatttatattaggaaaaaatatagctagcacatcaaatctttgatttcacagacatattgctgagaatgagcaatatgttattgctcaagtataaacagtccaattaaaagtactctaagaaaaaatatcaagtacgtaaataatagtttataatggtgacaaaatttgtgtcagtggtatatagatgtttgaag

SEQ ID NO: 238448 - DNA, 550 bp, Homo sapiens
ccccactctaattgaaaagttttaaccactgacaacagtttggagcctttctcagttactgatggttggatacaaggataaataaaagggtggagggatatcatcatatctgtggctttgtggttttcagagactggaaacaatctctgatttctttcctggagcaaggcctgaggcctgagataactaactctgctaaggggttcatgtgaattaagagtaaacaaaattgttctttaacctctgcagtgaayctaaccatttcaaactcaaattggctgcaaatattaaaaggagacaaatgaaacaagagaatcagagaaacaaagacatggtcatctaatgcaggtccttaaggatgcaacctgcagttgcctgtgaggcttatgggaggtagagaggcttgtactgaaaatccaagaccaaaatattaatatctatgcattacacagtccattctaatgcagtttgagacataatttcatgtcatacctgaaacagtcaatggagtaaaggtggggcagacttgggtggaggataagactggaca

SEQ ID NO: 238449 - DNA, 550 bp, Homo sapiens
ccccactctaattgaaaagttttaaccactgacaacagtttggagcctttctcagttactgatggttggatacaaggataaataaaagggtggagggatatcatcatatctgtggctttgtggttttcagagactggaaacaatctctgatttctttcctggagcaaggcctgaggcctgagataactaactctgctaaggggttcatgtgaattaagagtaaacaaaattgttctttaacctctgcagtgaatctaaccatttcaaactcaaattggctrcaaatattaaaaggagacaaatgaaacaagagaatcagagaaacaaagacatggtcatctaatgcaggtccttaaggatgcaacctgcagttgcctgtgaggcttatgggaggtagagaggcttgtactgaaaatccaagaccaaaatattaatatctatgcattacacagtccattctaatgcagtttgagacataatttcatgtcatacctgaaacagtcaatggagtaaaggtggggcagacttgggtggaggataagactggaca

SEQ ID NO: 238450 - DNA, 604 bp, Homo sapiens
cttggctagtttgaataatgctgcaatgatactaatttcatctcctttgatgtatacctagtaatgggattgctagatcatatgataatcctatgtttaattttttgtggaacctctatgctgttttccataatggctgttttcccattcccaccagcagtgtacagggctttcctttctccacatcctcaccaacacttgttatatctcttgcctttttgataacagtcattctaacaggtgtgagatgatatctctttgtggctgtaatttgaatttccctaatgattagtgatgatgagcatagttttatatactcgtaggycatttgtatatcttcttttgagaaatatttattcaggttctgtgcctattttttgatcagctgttttcttgataacaagttggttgagttcctatatattttggagcttaataccttatcagacatatggcttgcaaatattttatcccattccatgggttgtctctttatttttattgtttgtgtccttggctctgtagaattttgttagtttgatgttattctacttacctatttttgcttttgttgtctctgcttttgggatcatatctgaaaaat

SEQ ID NO: 238451 - DNA, 544 bp, Homo sapiens
ggcaccactggcaaggcttgcagctgacataagacaccaaatcttgggctttccctttcagagaacagggaaacagctgacgaataagggagtaccgcatggtcacatgactaattttatcgaatgggatgtgagcagaagtaatatgtttcacttcctggacagaggggttaagaaatgagtgttctttcttcatgttttctttctgcttccaccagttggtgaacgtgagtatgaagaacttggaaaccatataatcactatgaatggaaccagaatatgaatgggacctgggcatttgagtcactaggtaaagaactgcacattgacctggaactgttatcagattgttatgtgagtttataaatttcygttatatagagacactgaaatttgattttgttttgttttcattagagctggtgttactctaagtaacacaggtcaaagctctgagaagtcattggtttgcccattaaaatgagtcaggcaatctgacagcactatgagttttagacttaatggtctcttggtgataagctct

SEQ ID NO: 238452 - DNA, 527 bp, Homo sapiens
tctaatctgcttcattagtctatgtaactgttttttgtagcaataccatgctgctttggttactgtagccttgtagtatagtttgaagtcagatagggtgatgcctccagctttgttctttttgcttaggattacttttgctcttcaggctattttttggttccatatgaattttagaatatttataattctgtgaaaaatgacattggtggtttgacaagaatagtgtttaatctgtagattgctttgggcagtatggccattttaacaatattggttcttccatccataagcatggaatgtattttaatttatttgtaatatctctgatttatttcagcagtttttagttctccttgtagagatctttgtagagacctgcttgtttagctatattcctaattacttcattttttktgtgtttattgaaaatgggattgtgttcttgatttgattcacagctagaatgttgttggtgtatagaaatgctactgagttttgtacgttgattttgtatcctgaaactt

SEQ ID NO: 238453 - DNA, 531 bp, Homo sapiens
tattttaatttatttgtaatatctctgatttatttcagcagtttttagttctccttgtagagatctttgtagagacctgcttgtttagctatattcctaattacttcattttttttgtgtttattgaaaatgggattgtgttcttgatttgattcacagctagaatgttgttggtgtatagaaatgctactgagttttgtacrttgattttgtatcctgaaactttactgatgtcatttatcagttctaggagcctgttggtagagtctttggggttttctatgtatatgattatattaccaacaaagagagatagtttgacttcttcttttcctatttggagcattttattatttttcctgcctgattgctctggttaggacttccagtactacgttaaatagcagtggtgaaagtgggtatccttgtcttttttcagttcttaaaggcaatgcttccagcatttgcccattcagtataatgttggctgtgggtttgtcatagatggccgttattattttgaggtatgtt

SEQ ID NO: 238454 - DNA, 531 bp, Homo sapiens
tattttaatttatttgtaatatctctgatttatttcagcagtttttagttctccttgtagagatctttgtagagacctgcttgtttagctatattcctaattacttcattttttttgtgtttattgaaaatgggattgtgttcttgatttgattcacagctagaatgttgttggtgtatagaaatgctactgagttttgtacgttgattttgtatcctgaaactttactgatgtcatttatcagttctaggagcctgttggtagagtctttggggttttctatgtatatgattatattaccaacaaagagasatagtttgacttcttcttttcctatttggagcattttattatttttcctgcctgattgctctggttaggacttccagtactacgttaaatagcagtggtgaaagtgggtatccttgtcttttttcagttcttaaaggcaatgcttccagcatttgcccattcagtataatgttggctgtgggtttgtcatagatggccgttattattttgaggtatgtt

SEQ ID NO: 238455 - DNA, 460 bp, Homo sapiens
attgttctaagcactttaaacatattaacttattctcattgcagcggctattccattattatcttcaatatactgatgaagagtaccactgttagatgagggcaaraaaggctcctggtctgagccttttccatttatgccctttatcatgggcaaagaatcaatggggttaggaagacatccttagctgaagtcagaggcatggccaaggggtggcctcaggttgactgtttgtgggaattacagactcccaggtactcatgggtcaggatggtataatcaagtgcatttgaagccctttgttggaaagagagagtgtaggggaggagaggaatgtgtgccactctccaactgtcctggtaccaccatgttcctgcctggtagtctgagaatgctagataagtactttttgtttttctaggatgatagacgatataacaggtgctagctagatttacga

SEQ ID NO: 238456 - DNA, 605 bp, Homo sapiens
ctattttggaaatcattattggtctgttcaggtattgaatttctccctggttcaactttggcagattgtacatttccaggaatttattcatttcttctgggttttccagtttgtgtgcattgaggtattcataacagtctctgagggtttttttttttttttttggtgcatttckgtagggtttgtggtaatgtctcctttgttatttctgattgtgtttatttggatcttctctcctttttctttattggtctagctagtagtctaacagtcttctttattgttttagcaaccaactgtattagttcattctcatgcatctaataaagacatacttgagattgggcaatttataaaggaaagaggtttaattgactcacagtcacacagggcagtgaggcctcaggaaacttacaatcgtggtggaaagggaagcaaacgtgtccttcttcacatgatggcagcaaagagaagtgccgagcaaaaggggcaaatcactttataaaaccatcagatctcatgagaactctctttcacaagaacagcagcatggtgataaccacccccatgattcaattaccttccaccttgtccccccccataac

SEQ ID NO: 238457 - DNA, 545 bp, Homo sapiens
acagatttttgcttatgttgaaaactcatttctcaatatcatagtttatttcctttttcttaaacagtatctgtttaaacaaaaataacataaggagaatagttcagcagtttatcagtttcctaatgaactagactcagtttcagttactgttgcttgcaagtagaactccagagctacagaaaccaagtctggcagattaagtgaaaaaaagctgatattaaaatatgtacagctcttcccccccccccacccccagagtcattgggagggccagagaatttaccttagtcctgtttccaggaataacctccttaatcactctacagaagcagtctgataaaaacaaaacaaaacaaaaaccctgcytccatcaagctctagttgctacaatttgtgtctctgcttcttgaacaccaggaactcaactttactgcaaccacattgtctgccactccaacgccaaagttctatacagggcatcagtttgataagcaaggaagtcacaggtgatgctatccttgccaggaaatgagttctaccca

SEQ ID NO: 238458 - DNA, 545 bp, Homo sapiens
acagatttttgcttatgttgaaaactcatttctcaatatcatagtttatttcctttttcttaaacagtatctgtttaaacaaaaataacataaggagaatagttcagcagtttatcagtttcctaatgaactagactcagtttcagttactgttgcttgcaagtagaactccagagctacagaaaccaagtctggcagattaagtgaaaaaaagctgatattaaaatatgtacagctcttcccccccccccacccccagagtcattgggagggccagagaatttaccttagtcctgtttccaggaataacctccttaatcactctacagaagcagtctgataaaaacaaaacaaaacaaaaaccctgcttccatcaagctcyagttgctacaatttgtgtctctgcttcttgaacaccaggaactcaactttactgcaaccacattgtctgccactccaacgccaaagttctatacagggcatcagtttgataagcaaggaagtcacaggtgatgctatccttgccaggaaatgagttctaccca

SEQ ID NO: 238459 - DNA, 545 bp, Homo sapiens
acagatttttgcttatgttgaaaactcatttctcaatatcatagtttatttcctttttcttaaacagtatctgtttaaacaaaaataacataaggagaatagttcagcagtttatcagtttcctaatgaactagactcagtttcagttactgttgcttgcaagtagaactccagagctacagaaaccaagtctggcagattaagtgaaaaaaagctgatattaaaatatgtacagctcttcccccccccccacccccagagtcattgggagggccagagaatttaccttagtcctgtttccaggaataacctccttaatcactctacagaagcagtctgataaaaacaaaacaaaacaaaaaccctgcttccatcaagctctagwtgctacaatttgtgtctctgcttcttgaacaccaggaactcaactttactgcaaccacattgtctgccactccaacgccaaagttctatacagggcatcagtttgataagcaaggaagtcacaggtgatgctatccttgccaggaaatgagttctaccca

SEQ ID NO: 238460 - DNA, 383 bp, Homo sapiens
aatttttgtggacaatatcctcaaattatgttttccaagtcgctttctgtctcttcttctctttctgggatgccaatgagttgtaggtttggtctaatcccatatatatcagaggttttttcattttataaaattcttttttctttacttttgtctaattgagttgatttgaagaactggtctttgagctctragatgctttcctcattttactctattctgctgttaacatacttctaattgtgttatgaaattcctgtcatgagtttttgagttctcaaccagtttgtttctttcttaaaagggctatttggtctttcagctgttgtatcgttttattggattccttagattccttgggtttcaaatcttcctggatctta

SEQ ID NO: 238461 - DNA, 533 bp, Homo sapiens
gccatttcagtccagttaagaaccattgctgggaagctagtgtggttgctttgaggtaagggaagactgtggcttttagagttactagagttcttgttctgtttgtttgtttgtttatctgtgtgctctactgttcctttaatctttgaagttgctatctttggatgaagctttttccttttatattctttgatgcctttgaggatttgactgtggtatataatattsggtttagtcaactggctttgtttctggatgatttcagggggccaaacactcagctcagcactcctagactttgtgctctcaccctggagggctaggactagacctgcagcttttttctctggcccctcaaggttaatcatctattgtgcttgaggggctgaggtgttccctatctgctgacaacaacattcagatgaggaatctggttaaatcacttccgtgggaaggaggtaggcggtggagggccccaggtgaccactgctaagtcacacaggtgtgtgtgtgcacctgtggcagtgactggc

SEQ ID NO: 238462 - DNA, 477 bp, Homo sapiens
agccccggggcgggactgacgaggaggcgcaagggctccaccggccgcyggccgccgaaacagaaagcaacctcagaggcccggaggaggacaggccaggctcagagccacgcagactccccaggcagcctgtgggtgtgtttccctcgcattgtttttcttagtgcaggaacacagagccaagaactaccctgaggactgcctggaggtcaaggtccacccacacacacaaacacgtgcacacgcacacacataaatagcagaaacttgacctcatttccgggctgggccagaacatgaagggaaggagcctcaacagggccaaggaacagcctgacgcaggcgggagagtgctcagaggttccgcctagctgcacgtgctggcacggggaggggggccgagcgggggtggggggtgtggggcggggcagggtgggggaggcgggggcagggggagtgggtcggattcggcagcac

SEQ ID NO: 238463 - DNA, 551 bp, Homo sapiens
tatggtacatgtcataattttaaaagcaacatttgaagccttgttaatacagaaagctaaaagcaaaatatcatataaagcatttttactgcagaaataatttttctaaagaaaaataaacacatagtytgactagttctatgaggcaagcattttacaaccttggctctaaaacacaacttcctcctgctactgtcccagcttcctttcctttgaatcagtgagtcagttagcaactatattgaattgtggatcactgtagtgacaggttattctgggtgattcattagaaacttcagtaatattctgaacttgaaatctaactggggaaataaccttaataaacaagaaatagcaacagaaactaccaaagaaaattaggtgctaagttgggcagaatataggatagtagcatgtcaaaagaaaagatcacagaaatctgtggtggacagtcagggcttactggaggaggtatgttttgagaaatgggccttaaagactggatacctagatgcaagggtaagtcatctcaatgaggaagaacagtagag

SEQ ID NO: 238464 - DNA, 550 bp, Homo sapiens
ctgctactgtcccagcttcctttcctttgaatcagtgagtcagttagcaactatattgaattgtggatcactgtagtgacaggttattctgggtgattcattagaaacttcagtaatattctgaacttgaaatctaactggggaaataaccttaataaacaagaaatagcaacagaaactaccaaagaaaattaggtgctaagttgrgcagaatataggatagtagcatgtcaaaagaaaagatcacagaaatctgtggtggacagtcagggcttactggaggaggtatgttttgagaaatgggccttaaagactggatacctagatgcaagggtaagtcatctcaatgaggaagaacagtagaggtaaaaggttggaagtaaggatgcatattgcatgttgatgaggaaatgagaagacacaataaataagtagggtgtagccttggaaatcaggaagggaagaaagatgaaatcggaggtagtaatacaaaatatgctgagaaaggtttttgaatagttgaatgacacaacaaaaaaaggtgtgagaa

SEQ ID NO: 238465 - DNA, 602 bp, Homo sapiens
cctgacttgtgctggggtcaggaccttatggaaggacttgaattagagtaggaaaatacctggagacagaaacattyccttggggagttcatgcttttccagtttactttatcctcccaggggaatgaaaaccaaatatactcagatgtagacacaagatactaaagaataatgaacttggccaggcgcagtggctcatgcctgtaatcccagcactttgggaggccgaggcaggtggatcatgaggtcaggagatcaagaccattctggctaacacagtgaaaccccgtctctactaaaaatacaaaaaaaattagctgggcgtggtggtgggtgcctgtagtcccagctactagggaggctgaggcaggagaatggcatgaacctgggaggtggagcttgcagtgagccgagattgcgccactgcactccagcctgggccacagggtgagactccatctgaaaaaaaaaaaaaaaaaaaaaaaaagaataatgaaattcagagcaaataagctcctaaaacccagactggatcttacagctagctacctctgtcacctccctttttccttcttccaagacgtaaaatgtggcagggagta

SEQ ID NO: 238466 - DNA, 572 bp, Homo sapiens
tttctgaggctgcggccgcagccgctgctgctgccttggttacagccatgtgggttctcaacaagctcttaatttgaatgggctgtttatgttctgcttacaggaggcaagcctaggtatgaagtccactaaccacaggagagctggactcggtgaattactttctttgcactaaatatgctctatgtgactagctctcagcccacttacagcaacagtgcaagtgataagtgcttgtgttggttctcattcataggtgggaattgaacaatgagaacacttggacacagggtggggaacatcgcacactgggcctgtygtggagtggggggatgggggagggataacattaggagatatacctaatgtaaacgatgagttaatgggtgcagcacaccaacatgtcacatgtatgcatatgtaacaaacctgcaggttgtgcacatgtaccctagaacttaaagtataataataataataaaagaaataaattggatctctgatacccccactacctcaagcagagactgatgagtcagttctatagatagatgccatctcctctaaacaca

SEQ ID NO: 238467 - DNA, 393 bp, Homo sapiens
aagacttctctaaacctgcttccttatctctaaaatatggctaccaacaagtatgttgtaaagattaaatatgaagatatgcaaagtaccatatagcatcagattattattatattcattataattctacaataaaaaataaagaaatgagctgactacagtggctggcacttgyagtcctagctactctggaggctgtagtgggagaattgcctgagcccaggagtttgacactgcagtgagctatgatcacatcactgcactccaacctgggcaacagagcaaggctttatctcttaaaaaacaaaacaaaacaaaacaaaacacaagaaagaaaggaggaaatggatacagtgatctgaacatgatcccagtacaggcaaaacaatgaat

SEQ ID NO: 238468 - DNA, 263 bp, Homo sapiens
agcaccagaaatctacagatgtggcagtgagcacaattgtttcacatcagtgagggatttctaggtgtcagcaaaaataggttcatatgaacttttctagttttgtcaaataytttatcctattttcattttttagataattgagaaccatgcctcttaccagcaaatgtatgtactccggtaaaatgtaaaagaaaactaagaatgtcccctgctgtcattaagttcatcctctgtaatgcttttaatttttaagagtttgg

SEQ ID NO: 238469 - DNA, 263 bp, Homo sapiens
agcaccagaaatctacagatgtggcagtgagcacaattgtttcacatcagtgagggatttctaggtgtcagcaaaaataggttcatatgaacttttctagttttgtcaaatattttatcctattttcattttttagataattgagaaccatgcctcttaccagcaaatgtatgtactccggtaaaatrtaaaagaaaactaagaatgtcccctgctgtcattaagttcatcctctgtaatgcttttaatttttaagagtttgg

SEQ ID NO: 238470 - DNA, 537 bp, Homo sapiens
gagatcatgcagtatttgtcttgctgtaactggcttatttcacttaacataatgccatttggctccactcatgttgttttaagtgactggatttccttctttttataggctaatgctccattgtgtatatacaccacattttctttatgtattcatccactggcaaacacttaggttgtttctagatcttggctactgtgaataacgctacaatgaacatgggagtgcagatctctctttggggtactgattttattttccttagttatgtatacagagtgggattgttagatcatagggtagttctatttttaattttttatggaacttccatagttttttccataatggctaygtcaatttacatttctacccactgtgtacaagggttcccttttctccaacccctctccaagacttatcttttttataaataatagtcattctgatgactgccttttgaagtttcaaagtgggtacataaatgcagtgcttgtctatttttgaagtgtaaatactcccaaggtggatttcaag

SEQ ID NO: 238471 - DNA, 594 bp, Homo sapiens
gttgcccaggctggagtgcagtggcgccatctcggctcactgcaagctccgcctcccgggttcatgccattctcctgcctcagcctctcaagtagctgggactacaggtggccaccaccacacycagctaatttttttttgtatttttagtagagacggggtttcaccgtgttagccaggatggtctcgatctcttaaccttgtgatccacctgcctcggcctcccaaagtgctgggattataggcgtgagccaccgctcctggccaacatcattgttttaacagtaagttatgggattttgtttttgcttttttattaaaagtattttattccccaaagcacctcacaaggggtcttccgtaaagtcacaacccaataacatccttttgcttatattaaattgaacagtatccgtaactattgcttattttttagcactttatgaattaagtttgactagattaatccctattttcaaataaaatctttcaccaaagatagcccagtgaaactgttatattttaataaatgctatttctcaagctaaaataaagactcaggctaagcaaaactatatcaacactatgccagaa

SEQ ID NO: 238472 - DNA, 594 bp, Homo sapiens
gttgcccaggctggagtgcagtggcgccatctcggctcactgcaagctccgcctcccgggttcatgccattctcctgcctcagcctctcaagtagctgggactacaggtggccaccaccacacccagctaatttttttttgtatttttagtagagacggggtttcaccgtgttagccaggatggtctcgatctcttraccttgtgatccacctgcctcggcctcccaaagtgctgggattataggcgtgagccaccgctcctggccaacatcattgttttaacagtaagttatgggattttgtttttgcttttttattaaaagtattttattccccaaagcacctcacaaggggtcttccgtaaagtcacaacccaataacatccttttgcttatattaaattgaacagtatccgtaactattgcttattttttagcactttatgaattaagtttgactagattaatccctattttcaaataaaatctttcaccaaagatagcccagtgaaactgttatattttaataaatgctatttctcaagctaaaataaagactcaggctaagcaaaactatatcaacactatgccagaa

SEQ ID NO: 238473 - DNA, 594 bp, Homo sapiens
gttgcccaggctggagtgcagtggcgccatctcggctcactgcaagctccgcctcccgggttcatgccattctcctgcctcagcctctcaagtagctgggactacaggtggccaccaccacacccagctaatttttttttgtatttttagtagagacggggtttcaccgtgttagccaggatggtctcgatctcttaaccttgtgatccacctgcctcggcctcccaaagtgctgggattataggcgtgagccaccgctcctggccaacatcattgttttaacagtaagttatgggattttgtttttgcttttttattaaaagtattttattccccaaagcacctcacaaggggtcttccgtaaagtcacaacccaataacatccttttgcttatattaaattgaacagtatccgtaactattgcttattttttagcactttatgaattaagtttgactagattaatccctattttcaaataaaatctttcaccaaagatagcccagtgaaactgttatwttttaataaatgctatttctcaagctaaaataaagactcaggctaagcaaaactatatcaacactatgccagaa

SEQ ID NO: 238474 - DNA, 519 bp, Homo sapiens
gcaatctccataaggctactactgaacttctcagcagtaaacatacagtataataaaaagtagtatatagtcgaagtgctgaaaggaaaaaaaaaaatctgtccaccaggaatactacacccagcaaaattattctttaaaaatgaaggagagataaagacatttccagacaaacaagctgagggagattatcaccactagatctgccttagaagaaatactaaaggcagttcttcaagttgaaacaaaaaaatggtaagcaacaatatgaaatatataaaagtataaaactcaatggtataggtaaatatatagccaaattcagaatactctaatactgtaattatgttgtattgtatatatgacyttcaatccttcaataaaagtaaaaagacaaaggtattcaaaataactacagctacaataatttgttaatggatactcaatataaaaagatgtaaagacctcagtatcataaaaatacctcagaagtaaaagtgtagacttttcatatgcaat

SEQ ID NO: 238475 - DNA, 603 bp, Homo sapiens
ccctggtggagtgggtttgctaagggatctcctgaccgacggttgcaaagatccatgggagaaatgtgggwccccggggttgctcactcactcaccgcttgcctgggcaggggaggctcccctggctccatgttgctcctaggtgggcactcatcctgccttgcttttctccattctctatggattgaattgtttacttgatgaatcccaatgcttgtacctggatgtctcagttgaaggtgctgtatttacttgccccttccatttctctccctgagagaggcacactctaactccttctgatcagccatcttggccagacttgcatttttatttctaataagcacccccaagcaattctgatgcaacttgtccagagaagggcatttgggaaatggtacagactgaaaattgcctaaggtcacacagcaagccagtgagcaagcaaagaccagaacatctcttcccttcccatccagggtggaggaggaagaagagatggaggaggaaagagaaaaataataaggcagagaaggcccatgtgggtcaaatccactcaatgttagtgccaaaattatactttccatcttgcactaagcccag

SEQ ID NO: 238476 - DNA, 603 bp, Homo sapiens
ccctggtggagtgggtttgctaagggatctcctgaccgacggttgcaaagatccatgggagaaatgtgggtccccggggttgctcactcactcaccgcttgcctgggcaggggaggctcccctggctccatgttgctcctaggtgggcactcatcctgccttgcttttctccattctctatggattgaattgyttacttgatgaatcccaatgcttgtacctggatgtctcagttgaaggtgctgtatttacttgccccttccatttctctccctgagagaggcacactctaactccttctgatcagccatcttggccagacttgcatttttatttctaataagcacccccaagcaattctgatgcaacttgtccagagaagggcatttgggaaatggtacagactgaaaattgcctaaggtcacacagcaagccagtgagcaagcaaagaccagaacatctcttcccttcccatccagggtggaggaggaagaagagatggaggaggaaagagaaaaataataaggcagagaaggcccatgtgggtcaaatccactcaatgttagtgccaaaattatactttccatcttgcactaagcccag

SEQ ID NO: 238477 - DNA, 603 bp, Homo sapiens
ccctggtggagtgggtttgctaagggatctcctgaccgacggttgcaaagatccatgggagaaatgtgggtccccggggttgctcactcactcaccgcttgcctgggcaggggaggctcccctggctccatgttgctcctaggtgggcactcatcctgccttgcttttctccattctctatggattgaattgtttacttgatgaatcccaatgcttgtacctggatgtctcagttgaaggtgctgtatttacttgccycttccatttctctccctgagagaggcacactctaactccttctgatcagccatcttggccagacttgcatttttatttctaataagcacccccaagcaattctgatgcaacttgtccagagaagggcatttgggaaatggtacagactgaaaattgcctaaggtcacacagcaagccagtgagcaagcaaagaccagaacatctcttcccttcccatccagggtggaggaggaagaagagatggaggaggaaagagaaaaataataaggcagagaaggcccatgtgggtcaaatccactcaatgttagtgccaaaattatactttccatcttgcactaagcccag

SEQ ID NO: 238478 - DNA, 439 bp, Homo sapiens
gaattccacagggtgtgttcgactaaagggttgtattacagccttctgtgaacttcattagtatcccttgccctcttctggaaaggcagaagaggaagccagatgtgtttgtgaagtaatgatggctcacacagcaaggatgggaggaaaagcatgcctgagagccaggaagactcagatgggacagaggctgtgccccagacacaggtgctgtcacccagccactcatgctgctcaatgcattccactaaatactcactaagaggatgattaatccaggacaggcacagaggccatcctccagaaaggggctccaagaccgagggaactgttctagagggaagcasgggaaggacatgatatggtgctcagatgtgcatcacgccccacaagcaattcccagctagactgtgccaactccacgcctttgcccttgctt

SEQ ID NO: 238479 - DNA, 554 bp, Homo sapiens
actcccatttgcacttgggctagtcctgtgataattaaactctttctctactgtaatactgctgtctcagaagattggttttatctgtgcagcaggcaggatgaacccattgggcaattataataaagcaaatgccaaggggcaattggccgccatcagtaccatcagtatgggcttatcggaagctgacagtcacgaagagtgagagggtagggggatttcattttaataagttttcggatacacttactgtatttagaaaacaaagaaaagttcacagcaggaatactgtaattacactatctgccattcttggggggatgcaaggaaatctttaaaacagcaatgccacagacacacagcagttttttaccttttaaatatgaatttataataataaakctcatatttattttggtacatatttctcccaattaaaaacaatatataaagcctgatcctaattaggagtaagtcaatgtcactttgacaaaaccacaaaaatattgatttattgactatttttaaagaaataagccttattctgtacacat

SEQ ID NO: 238480 - DNA, 550 bp, Homo sapiens
cgaaggacttaacatttgtatttttcctctgaaaatagacagctaaattcttcagaaaatgtgctggggcagaggccattgctgagcccagctgttgaggagtctgcccgccccagcgcatgccccacaccatggtcatccccagctccatctgtctggtgtcctggccctgacctggcagatgtcgtgggtgagcatgagaggggcatcctggcagctgtgggttattctaagaagaattgtgtcattgtgggagaaaggttgccgctgatggccaacttgtgctggtttgcctaatactttcccagtctgaaagtcttgtgtccagggaaaccaccgtcagtcctgggcaaaccagggtgcttggwccccttcagaatcacctctatccacggaaacagcacccaccccataacaagggatgcacattttcagctagactggactcaaaatttgactgtttaaaagatgaaactatgagctaaaagattttcaggagttgctgtctattcttagttgtaaaagacttccattgccttcttcaaccaag

SEQ ID NO: 238481 - DNA, 578 bp, Homo sapiens
tccaatcacttagaagtgggtccgccagcaaatatgcaagattgatttttggaagcgatgctggaaactgtggctggcgaaggtagacggagctttgctttccaatatctgcaaggggccgacttctccgtagcctgtgtatgtcggggcactctcaggctttcatatcgagccagatgttcccacttccttttgattctcttgctgatggagaaaattgccgctctgggggatgaaatacttcccaatgacttggaaattgtgatggtaacttgtagttgatgaatcatgagttgttaccacaggccccacaaagacccrcaatgcacaccaaagacgggcaccaaaaccaccccagtggtatggagagaagcacgtggttctctcattttgaacactctgtgttttaaagatatcagtaatgtctccctcccttcccaaattattttctcccagggaagctccacgttatgacatcttcacagatgcagtcaactgttttctttaaatgtcattggccaccgaggagaggtaggccctaagtcttgtggccccaacccaccctgctgagaggttgg

SEQ ID NO: 238482 - DNA, 578 bp, Homo sapiens
tccaatcacttagaagtgggtccgccagcaaatatgcaagattgatttttggaagcgatgctggaaactgtggctggcgaaggtagacggagctttgctttccaatatctgcaaggggccgacttctccgtagcctgtgtatgtcggggcactctcaggctttcatatcgagccagatgttcccacttccttttgattctcttgctgatggagaaaattgccgctctgggggatgaaatacttcccaatgacttggaaattgtgatggtaacttgtagttgatgaatcatgagttgttaccacaggccccacaaagacccgcaatgcacaccaaagacgggcaccaaaaccaccccagtggtatggagagaagcacgtggttctctcattttgaacactctgtgttttaaagatatcagtaaygtctccctcccttcccaaattattttctcccagggaagctccacgttatgacatcttcacagatgcagtcaactgttttctttaaatgtcattggccaccgaggagaggtaggccctaagtcttgtggccccaacccaccctgctgagaggttgg

SEQ ID NO: 238483 - DNA, 525 bp, Homo sapiens
ctcattcattatcacgagaacagcacaggaaagacccaccccctaattcaaccccctcccaccaggttcctcccatgacaggtgggaactgtgggagttaacaatttgagatgagatttgggtgggcacacagccaaaccatatcagtgaggcaaccagaggattcaacagagtttaaggagcctgacggtttcacagagtctgactattctgcgagagtggccaggaagcatgcaaggttcatgaagcaccacgctgtgggcccagttccccatgctgcygcactgaccagcagctccagcaagctccttccacatgtggcttcagcccaggtccacctcgcagcccagggctgcagcctcttcccagaattatcttcctttttcaccagctcctcctcactggcatcgggtctgaattcttctcatccatggtcagatggcagggctacagtcttataaatgattgaatgactcatggggaaacacaagtttccaaggaaaaatgttttaaaaagaaaaaata

SEQ ID NO: 238484 - DNA, 534 bp, Homo sapiens
acagtaatagtgaggtacttcaacattccactgacagcattagacagattattaagacaaaaaactaataaagatattctggacttaaatttgacacttgatcaattgtgcctaacagacatctacagaatattccacccatgaaacacagaatatacattcttctcatctgcacacggaacrtgctccaaaatcgatcaaaccacaagcttgactacaaagcaagtctcaataaactaaaacaaacaaacaaaaacagaaatcatatcaaccacactcatggaccacagtggaatgaaaatagaaatcaataccaagtagacctctcaaaactatgcaattacagggaaattaagcaacttgctccttaatgacttttgggtaaacaatgaaattaaggtaaaagtaaaaagaatcattgaaataaatgaaaacggagacatggcatatcaaaatctatggaatgcagcaaaaacagtattaagaggaaagtttatagtgttaaacatatacctcaaaaagttagacagatct

SEQ ID NO: 238485 - DNA, 532 bp, Homo sapiens
actgctgctttatttactgagcctagtgtgttgcagcggtaattaacccatgttattagcaaagcccttgtggatatccattaattctcttgcatggatgatcatttttctagtgttttccccaaataargtatcattgttctgtttttttccctaaattgacggcatttgatatatttctttgatttaatctgacctgtaatatatattggtcattttataaagaataataattaactcagcttttaaaaatgctaatagaagcaggaggaaagatttttttgttgttgttctttttaaagtgaaaaaagaaaagaaaagaaggtttaaaaataatgcaggaaatcagctttaactctaaatttttcagatcttacaatttataacaatttatatctttgaggtattttaatcagtttttttcttacttagttaataacacttcaggcatttttgtaaaatattgagccagcagaaaaatacttgtgcttcctggctgagaaaagataaggaccatctcattagccgggcc

SEQ ID NO: 238486 - DNA, 608 bp, Homo sapiens
cttaatgtaaagcatgatagctttcaaacaaatgcaaaatatraatttcctttatctgtactacataaacatatcatttgctctttttctaaaagcaaatatataaaactataagtattatatttctataaagtacattatagatttcagaattatttaattttattctaagaggtaagtttagaagtctgtgaatttacttagtaaatgactgttgagagaaagcacttatgcaattgctttttctattctaattcttgttctaattcatgttctttttaaaattcctagattcattgcctacctttatttatttgcataacattttaacaaatttactgctattgtgtttttaaaaaaattctgctaaccgcttctttatgccaatctatcagatcaaagttagctcctttattatctgagggtgggaaatgacagccttttgaaggatttacctggccttttattcttgtttcaagttcatttttagtcttgtactttgtaaggtctaggaaacctaagctaataaaataatttccattcagagttttagcacacacatctctccactctactttttctttccagaagtgacacatgtttcttgt

SEQ ID NO: 238487 - DNA, 548 bp, Homo sapiens
ttagcaaaataaaacaactgtgtgtccttttggaaacagatttttttatagtggggataacacatttgactttttagtgaataatttacacagattgtgtcctttttttccttactagatataaaaaaatagaaaataatttctatgtcaattatattcgtttatgtggccattcagaatattttagttggctaccatgtacaaagcattgttttggattttgcatatatattaatatatactaactattaaatgaaagtcttaaaacgtgtaaatctctatgtaactgtgtgttttgtgcctagataaaccacatggacaggtacctacttgattagcccaaaaragaaatacttaaagcgattgtaaactagagtcaaacaagtcatttatactgaaatagacactgttgcaatcaggaaagtttaaacatactatttttaaagacttactggtatcttttgtatctaacaagataagtttacaaagctgtagtgtcattgtggactaggaagagctaatttatataaaaatgattataaattgta

SEQ ID NO: 238488 - DNA, 587 bp, Homo sapiens
taggcttttggttcgcagaagagtaacttgtgtaaagtaagaaatattttcagggattggagacaaaatgcttgtttttccatctgctgtgcatgtttgtttccgtctaggaggttttcragattctctcttcggatccattggcgtcatgtagttgagcagttgtgaggatatagttaattaagctgcattagggcaaatatacacacttgttaaaacacttaatttgcctcaataatattgattacatggcagaagtttatttaaactaaatggtatttcccccctactgttacagtttttgagtgcaatctgtataatagctaatagccatcatcagttaaatatcatgttagttataaagtaatgtcataagaattgatttggacttggcagtggaggagagctctcccttcaaagccgatgtagatgattagccagagttttaagcagaatcacggttcatataaactgtgtatattttatagacttatagctgctctatattacatgagtgcccattatattaaagaaaagctcagatggttaattatgcaaaacatcatgtatgcaattactcggcatta

SEQ ID NO: 238489 - DNA, 587 bp, Homo sapiens
taggcttttggttcgcagaagagtaacttgtgtaaagtaagaaatattttcagggattggagacaaaatgcttgtttttccatctgctgtgcatgtttgtttccgtctaggaggttttcgagattctctcttcggatccattggcgtcatgtagttgagcagttgtgaggatatakttaattaagctgcattagggcaaatatacacacttgttaaaacacttaatttgcctcaataatattgattacatggcagaagtttatttaaactaaatggtatttcccccctactgttacagtttttgagtgcaatctgtataatagctaatagccatcatcagttaaatatcatgttagttataaagtaatgtcataagaattgatttggacttggcagtggaggagagctctcccttcaaagccgatgtagatgattagccagagttttaagcagaatcacggttcatataaactgtgtatattttatagacttatagctgctctatattacatgagtgcccattatattaaagaaaagctcagatggttaattatgcaaaacatcatgtatgcaattactcggcatta

SEQ ID NO: 238490 - DNA, 587 bp, Homo sapiens
taggcttttggttcgcagaagagtaacttgtgtaaagtaagaaatattttcagggattggagacaaaatgcttgtttttccatctgctgtgcatgtttgtttccgtctaggaggttttcgagattctctcttcggatccattggcgtcatgtagttgagcagttgtgaggatatagttaattaagctgcattagggcaaatatacacacttgttaaaacacttaatttgcctcaataatattgattacatggcagaagtttatttaaactaaatggtatttcccccctactgttacagtttttgagtgcaatctgtataatagctaatagccatcatcagttaaatatcatgttagttataaagtaatgtcataagaattgatttggacttggcagtggaggagagctctcccttcaaagcygatgtagatgattagccagagttttaagcagaatcacggttcatataaactgtgtatattttatagacttatagctgctctatattacatgagtgcccattatattaaagaaaagctcagatggttaattatgcaaaacatcatgtatgcaattactcggcatta

SEQ ID NO: 238491 - DNA, 595 bp, Homo sapiens
tctgagtttttgaaatgcattaaagttgccaaattataaataacaaatatcattctactcttgctattttaattgttaggttcagtgtttattttaatagtaaaatattgcaatctttcttttttggtgaagaagtactatatgaatgggtgtcctaaaacagcataatttagtttttcttctcctggttttgacttactggaaccacttcttgagacaaatgagtagtgattccttttccacggtttgttctgacttgggaagtcacctaaattatacttttgaggttgtcaaagagctactggtcagcaggcattttcaagagacagataataaattaratagtttaaatatcttaggttatcacatatatcaggatctgtgtgccacatgccttctctgttccatactctttgttttgttttttttttaagctgtttaaaaatataaaaaaacactctgagcttgagggcattcaaaaacaagcccagacctggatttgacctgttggtcgtagtttgggtaacttctaaatcaagacaccctatttttcttccttgcaggcaacattgatgaaaaagatttttataccaaa

SEQ ID NO: 238492 - DNA, 595 bp, Homo sapiens
tctgagtttttgaaatgcattaaagttgccaaattataaataacaaatatcattctactcttgctattttaattgttaggttcagtgtttattttaatagtaaaatattgcaatctttcttttttggtgaagaagtactatatgaatgggtgtcctaaaacagcataatttagtttttcttctcctggttttgacttactggaaccacttcttgagacaaatgagtagtgattccttttccacggtttgttctgacttgggaagtcacctaaattatacttttgaggttgtcaaagagctactggtcagcaggcattttcaagagacagataataaattaaatagtttaaatatcttaggttatcacatatmtcaggatctgtgtgccacatgccttctctgttccatactctttgttttgttttttttttaagctgtttaaaaatataaaaaaacactctgagcttgagggcattcaaaaacaagcccagacctggatttgacctgttggtcgtagtttgggtaacttctaaatcaagacaccctatttttcttccttgcaggcaacattgatgaaaaagatttttataccaaa

SEQ ID NO: 238493 - DNA, 323 bp, Homo sapiens
aacacacactgggggctgcggtaggtggaagggaggaagtgagagcatctggaagaatagctaatagttgctgggcttaatacctgggtgatgggatgatctatgcagcaaaccaccatggcacacatttgtctatataacaaacctgcayatcctgcacatgtaccctggaacttaaaatgaaagttgaaggaaaaaaaaaaagaaacccacagcagccactggaagatagctgctaattcttggcaatgagggcatgagctaagaggatgaggaccatgccaggcatcttgttgaacagggcatctgatgaccagtgtgcc

SEQ ID NO: 238494 - DNA, 551 bp, Homo sapiens
tatttgatttttctgttttttcctagctctaaagttttatccaaaaatttkcactagccgactttcttgtgaatatgtaatttttattcaccaagtggtatgataaaaatgatagtgcttataagtacaaactatgaataataaaaaatgttcttacttataaagtgaattccaagattacttttgtaaatatatcttagaatgtgattgtgagtgtgggagggtctatggctccaatgtattgatgatgaagggcatgtgtctgagaaattaaagtgatgatttccaaggaatcttttcagagatcaaatctttcctctgtgtattagatcattcctgcactgctataaaaaaatacctgagactgggtaatttataagaacagaagtttaattggctcatgtttctgcaggctgtctaggaagcatagtggcatctgcttctggggagtcctcaggaagcttgcaatcatggcagaaggcaaagggggagcaggcctatcacatggagcaagcaggagaaagagggaagagagtcggggaaggaggtgc

SEQ ID NO: 238495 - DNA, 425 bp, Homo sapiens
gaattctcttccaccccaaaaataaatactaaataagcacaggtctgctgctcatgtccacagtgcagtcaggctgctaatttggtttgattactagatatggcccagtggtccaggggtgtttcttctcagcaaatgacaatagcattgtggtggggagagaagcatcatttttttttttyccatgaccaaggacttaagccttttgggcacattagcactactttcagcagtaatgcaaaatgggaaataattgggttgaggagctcctgggatattagtggtgctgcaggcaggaaagcaggcattggaaaataaatgacaaattagcatgcttaatctctttattgtgaatcagatgccacagcagaggctcataatacattaataaacaccagttaatgcaactgagatactattcctca

SEQ ID NO: 238496 - DNA, 445 bp, Homo sapiens
atacctgagatagaaaggttgttagattstaaatttactacttcaagctttttgcctttggatttttgttgaactttaatgttttggttgaaaacaacacagtttgcaccagcattaagagtgtggatgtgggtaaaatctcaaacaagcctcacttacattttcattattttggtctagctaaaaactgaaatagtgtttatttttgccaaaaaaaaattgtcaaaggccatgttgcagcattaagcttttgttttatacacaaagaaatatattaatgaaaagtgttttaagtgcttattatagagatggtttgttttgaaacatgggctttttcacagcagttttacacttcattgtgtaccatgaaagacattctaagtagaggttgtcagtctcccatcagaagtagagtactgctggggaatgagccatttaggatgtc

SEQ ID NO: 238497 - DNA, 587 bp, Homo sapiens
catattgtcttagattttaaagcacaccttttatacagaggacctgtagtacagctagcagcctcattccattggtctctaataatgactatcatggtgagacacagtgactttgacagaaggaggaattcactccattaagcaaatatactagaggctccatactttgttggagttaataatttcatctttaacaactgaagcaaatttgaaagatgctgcacctctcattcaatgctacactcattttgccttgatcagggaaggttgaatgctcctattttgaagtaaaatctccctaaactcttaagtttgagggtttttttaattgtctgggagagtccaacaccagagggcgatgtgaattcaacatttttacttgttttcttgtacagtttacttttggtgtgtaaacaaaataagcatatttkgtgttcataacgattcattttctgaagttgttttttcagtaactgcaattttacttactctgttcctctcccacttttgcattttaacaaggaatggaaagattaagaaatcagtcattcatttagctgtcatttattgagtatctagtatatgca

SEQ ID NO: 238498 - DNA, 551 bp, Homo sapiens
aaagattttaaattaattggctggggtgaggcctgaggattggaatttttcaaaggttgaaaccaatgctatatatagaccatttcatttaatcccttagcaacaatatgagattggagtcatcaccatgttaaaaatgaggaaactgagacatacaagactttaacccaccagcccacctgtctaccagctaaagaatagcagaagccaggctcaaaacaagggtgaaccactgtctgcagctcttctggtcaccatatctgtctccaccaattttaaggcttttgcttcaaactttgaagcagatgcagctgagtgaaccatgagacatatactagccagagaaagaactgaatttagagtttttaaaagtycaaggaccacattcctctctgtaaactgagccgtagcagccagcatcactttatttattaatttatttggtatttcttgttgcaggatttgatttttaagactcaatgtgttgaaacatgaagtttaaaaaacgtaggggctgggggtggagaatatatgaataacaaagcgaattc

SEQ ID NO: 238499 - DNA, 607 bp, Homo sapiens
cccctgcttctctatctccactacccgcccccgccaccttcctctcagagttaagctaccctttattttggacaacactatcacacacatgattgagtcaacaatttatggcttttaaaaayagggattttgtcctctcttaggtttactgtttatcataatcatctttcaagtgaaaaggctaatttactctttctataggaatattttaagcttgattatcataatattacagctgcctcaaaaggtctaaaatgggacattgaccttgaatgttttctgcatttagctcatggtgcttaacattcaggaaagaatataactgcaacttatttattaatgtataatctcaaaacgttaactattgctctgtaaatacatgccatgcagattatagaaagcttgtaggatactgtaaaatgcatttggtatcttaccagggtaagtatgatggaaatacaacctaactaaggtcagttttcccattggagctactgtagtttataatttaatttttactgacatttcaccatgtgtattattagtttgacaaaacgaaggtgaaataatcctgaattaattaaacagaaactgaattgcctctatt

SEQ ID NO: 238500 - DNA, 607 bp, Homo sapiens
cccctgcttctctatctccactacccgcccccgccaccttcctctcagagttaagctaccctttattttggacaacactatcacacacatgattgagtcaacaatttatggcttttaaaaacrgggattttgtcctctcttaggtttactgtttatcataatcatctttcaagtgaaaaggctaatttactctttctataggaatattttaagcttgattatcataatattacagctgcctcaaaaggtctaaaatgggacattgaccttgaatgttttctgcatttagctcatggtgcttaacattcaggaaagaatataactgcaacttatttattaatgtataatctcaaaacgttaactattgctctgtaaatacatgccatgcagattatagaaagcttgtaggatactgtaaaatgcatttggtatcttaccagggtaagtatgatggaaatacaacctaactaaggtcagttttcccattggagctactgtagtttataatttaatttttactgacatttcaccatgtgtattattagtttgacaaaacgaaggtgaaataatcctgaattaattaaacagaaactgaattgcctctatt

SEQ ID NO: 238501 - DNA, 569 bp, Homo sapiens
ctgcgtgagttctccttttcaaggcaaaagagatcttaggttagaaatcaaaggcaaatccctccagtgctyagagagttaagttagttatgtttcttttgtagcttcccagaagaaaaaaaaaagaaagagagagaagggaggaaaaaaaatcaaacccgagagtgtgtattgggagcgtttcaatcgctcccttctccgctccctttttctctgcccactctcagtttccagcccccttcggctctctgcaccctgcctacctgcctggctcctctcgctccgtgcagcctcccgtcgcctccctcctgattgggcagaggccccccaatcggctgcgcggctgggccggtgggactgcatatgtaaagccctacttcatattaataagctccaatcggggctttaagtccttgattaggagagtgtgagagctttggtcccaactggctgtgcctataggcttgtcactaggagaacatttgtgttaattgcactgtgctctgtcaaggaaactttgatttatagctggggtgcacaaataatggttgccggtcgcacatggattc

SEQ ID NO: 238502 - DNA, 477 bp, Homo sapiens
cgaggacacaatctctcccctgaggcagagacccagggctgccccgcacagtcgcgcagaccgtgtactgccctgctcctggggctcattcacacaggttgccatggctgtggggtccctggggctgggctatctgccaacctgggggacgctgcaccctgttttctgtccygtctactccagcttttcacactctctgttgcccttgtccttgggcatctcagtgactcgaaggaattgggtcttgagacacagccgagcctgtgagcgctgacctgtgtaaagaagacaccagaatgagatgtctccacacacagagagctgcagccgatgccggccggtgacttgggacttggatgcttaacaggaggctccccctctcttgggaggtgaggatggggttgggagcatgtgtctcaggggctggcttcactcgctccttagccccagcaggtgcatctcccccctgcgagggcc

SEQ ID NO: 238503 - DNA, 564 bp, Homo sapiens
tttttggctgagttcagcagcagggcaccttgtggttgatagattcttctctcagcaattcaaaacaatgcagttaaagcaaattcctcattttcagagcccagcttaatgaggcatacagtattttaaaaatagtcacacttaaaatggtcaatagcagtgactgcaatcagtggttaccttcaacactctattgcgttgttaactttgccagggtgattgcataacacggatttttcaaaagaccatgtagctcactgtttactcactttgtaggaatttacattatttatgaagtttatgcagatcattctagggtgtaaatattggcaaacttgatcaaaaccacttrgaggcctcatggctatcctttcccaaaagtgtgcattaagccactgtaggctcagaggtccaattcctaggaaagtttccaaggggccaaattttgaagacaaaatgaaaggaaacatatgaacagcgtgagctggaaaaagcacagagttggaagtcagggtcgaaggttctagctctagtcctgatactaactggctgtgtgagtccttg

SEQ ID NO: 238504 - DNA, 564 bp, Homo sapiens
tttttggctgagttcagcagcagggcaccttgtggttgatagattcttctctcagcaattcaaaacaatgcagttaaagcaaattcctcattttcagagcccagcttaatgaggcatacagtattttaaaaatagtcacacttaaaatggtcaatagcagtgactgcaatcagtggttaccttcaacactctattgcgttgttaactttgccagggtgattgcataacacggatttttcaaaagaccatgtagctcactgtttactcactttgtaggaatttacattatttatgaagtttatgcagatcattctagggtgtaaatattggcaaacttgatcaaaaccacttagaggcctcatggctatcctttcccaaaagtgtgcattaagccactgtaggctcagaggtccaattcctaggaaagtttccaaggggccamattttgaagacaaaatgaaaggaaacatatgaacagcgtgagctggaaaaagcacagagttggaagtcagggtcgaaggttctagctctagtcctgatactaactggctgtgtgagtccttg

SEQ ID NO: 238505 - DNA, 381 bp, Homo sapiens
ttgagcttactgtcatgcctaaatgaaactttgctaaggggagagggtattttatataagaaagaaggtaaatgatttggtgaccagaacrttagcctatgtagttattcatactgttcaccaatgttttcaggtctctcctcctggccccatgatcagattgcacctccctgctcatccaccaggcatggccacgtggcttgattggccatgcaaagtgcaagcagaagtacttcttagccaaagccactaagagctagtgtggtgatatggttaggttttgcgtccccaccctaatctcatcttgaattgtaatccccataatccctgtgtgtcaagggagagactaggttgaggtaactgaatcacggaggccatttt

SEQ ID NO: 238506 - DNA, 425 bp, Homo sapiens
caaaacttgaatatgaatgtttataacagcattattcataatagccaaaaagtgaaaaagaaaaacagttgtccatcaactgatgaatggataaacaaaatgtggtatatccatagaatgkcatgtattcagcaacataaaggaatgaaattttgatacagcattgatgaaccttgaaaatattatgctgagtgaaaaagccagatgcaaaaggccacgtaccacatgattccacttatataaaacacccataactgataaatttatagatacacaaagtagggaagtggtttccagggactggggagaagggagaatggggagtggctgctaatggattctgacattttttggggagtaatgaaaatattctggaattaaataatgatggtgattgcacaaccatgtgaatatactagaaacca

SEQ ID NO: 238507 - DNA, 425 bp, Homo sapiens
caaaacttgaatatgaatgtttataacagcattattcataatagccaaaaagtgaaaaagaaaaacagttgtccatcaactgatgaatggataaacaaaatgtggtatatccatagaatggcatgtattcagcwacataaaggaatgaaattttgatacagcattgatgaaccttgaaaatattatgctgagtgaaaaagccagatgcaaaaggccacgtaccacatgattccacttatataaaacacccataactgataaatttatagatacacaaagtagggaagtggtttccagggactggggagaagggagaatggggagtggctgctaatggattctgacattttttggggagtaatgaaaatattctggaattaaataatgatggtgattgcacaaccatgtgaatatactagaaacca

SEQ ID NO: 238508 - DNA, 583 bp, Homo sapiens
tgagggtcagggttcatactttgttgtgtatcagaatgatgacctagacagcctcttaaaagtgcagattcccgtctgrgcgcagtggctcacgcctgtaatcccagcactttgggaggctgaggtgggcagatccgaggtcaggagattgagactgtcctggttaacacggtgaaacccagtctcttctaaaaatacaaaaaaattagccgggtgtggtggcaggcacatctagtcccagctactcaggagggtgaggcatgagaatcacttgaacctgggaggtggaggttgcagtgagccaagatctcaccacggcactccatcctgggcaacagagtgagacacacctttgtagactctgatttcatgggtcaaggcttgggctcagagatctgcatttctaacaagcgagccagatgattttgacacagctagtccatagaccacactttgtgaaacaccgacgtctacttcctcttggcttctttgtttaatcattaaaagcaccaagcagggatagggtcctaagaaggttgagtctagaacttgaagaaaaatgtaccttcaagagctaaagcaa

SEQ ID NO: 238509 - DNA, 595 bp, Homo sapiens
tttctaacaagcgagccagatgattttgacacagctagtccatagaccacactttgtgaaacaccgacgtctacttcctcttggcttctttgtttaatcattaaaarcaccaagcagggatagggtcctaagaaggttgagtctagaacttgaagaaaaatgtaccttcaagagctaaagcaagatgggatgtgaaaagccaggacacacaggcaaagacataacaaaaatgcagtgagctaatatcacattcaatcttgttcccaccttgctgcagcctccacccaggtaaccccaaccagttccaggctaacactgaaccccatcaaaccatccttcttacaactcacgtcgctcaaccttaaacaaaacaaggcaaggggagaggtggctcgtggtgatcaagaagtaagatacaattttacctttggtttctatagatttatgacctatatgaccttccccataaaagcacctatgagtagctgtcttttgccttttttggagatcatagactgttttgaaaatatgataaaacctctgatccctcttcctagatcattgtatatggacacttgtacacaccatttgccat

SEQ ID NO: 238510 - DNA, 595 bp, Homo sapiens
tttctaacaagcgagccagatgattttgacacagctagtccatagaccacactttgtgaaacaccgacgtctacttcctcttggcttctttgtttaatcattaaaagcaccaagcagggatagggtcctaagaaggttgagtctagaacttgaagaaaaatgtaccttcaagagctaaagcaagatgggatgtgaaaagccaggacacacaggcaaagacataacaaaaatgcagtgagctaatatcacattcaatcttgtycccaccttgctgcagcctccacccaggtaaccccaaccagttccaggctaacactgaaccccatcaaaccatccttcttacaactcacgtcgctcaaccttaaacaaaacaaggcaaggggagaggtggctcgtggtgatcaagaagtaagatacaattttacctttggtttctatagatttatgacctatatgaccttccccataaaagcacctatgagtagctgtcttttgccttttttggagatcatagactgttttgaaaatatgataaaacctctgatccctcttcctagatcattgtatatggacacttgtacacaccatttgccat

SEQ ID NO: 238511 - DNA, 595 bp, Homo sapiens
tttctaacaagcgagccagatgattttgacacagctagtccatagaccacactttgtgaaacaccgacgtctacttcctcttggcttctttgtttaatcattaaaagcaccaagcagggatagggtcctaagaaggttgagtctagaacttgaagaaaaatgtaccttcaagagctaaagcaagatgggatgtgaaaagccaggacacacaggcaaagacataacaaaaatgcagtgagctaatatcacattcaatcttgttcccaccttgctgcagcctccacccaggtaaccccarccagttccaggctaacactgaaccccatcaaaccatccttcttacaactcacgtcgctcaaccttaaacaaaacaaggcaaggggagaggtggctcgtggtgatcaagaagtaagatacaattttacctttggtttctatagatttatgacctatatgaccttccccataaaagcacctatgagtagctgtcttttgccttttttggagatcatagactgttttgaaaatatgataaaacctctgatccctcttcctagatcattgtatatggacacttgtacacaccatttgccat

SEQ ID NO: 238512 - DNA, 561 bp, Homo sapiens
tttacaaatctaaactcataaaggaaaagaactgcattgtgttcaacataagtcaaatgaatatcttctttctccatcaacagtctaatgagtttttatacacaagccatcttgagtttcatcatgaaagaagacaaggaggaacacaggggtgatttcatgaatgacaagggctgtaatatttgggctgatttttggatgatttagagggaagcccatttaaaatggcctcctttaagacagagccagtttaaccaatttacttttttaagacaccgggtctgaatctgctacctagtctggagtgcagtagcatgaacrtggctcactgcagcctcgacctcctgggttcaagcaatcctctggcctcagccccccaagtagttgggactacagacatgcgccaccacacccggctaatttttgtattttttgtagagatggggttttgccatgttacccaggctggtctctaactcctgagctcaacaatctgcctgcctcggcctcccaaagtgctgggattagaggcgtgataccgcgcccagcttcaatttaacc

SEQ ID NO: 238513 - DNA, 553 bp, Homo sapiens
ggtgtgtgtgtccttgtctttctttgtgtctgtgtctcatgtatatgtgtgcatgagagggagaagctgggagggtccatgtttctggcagctcatgggaaggagargcagaatatgcaaagatctttgagaaggaaagacaactggacatttgagtcattgaataagagttactgaaggccatgtggcttgagcctagaggcaaacatggctggagatgagacagaaatgtcatcagggcctgatagccatgactttgtggttacagtaagggttgggggaattggcttgagagcaaaggaaagccatctgatacatatttgtccaccttctcaaccaccctgtgagttaaatatcattaacctcatttgatggatgaggaaacaaactcagagaggttaaactgtttgcctaaggacacacagcaagaaggtgattgagcctgtagataagcacgggtctgactccagagcttcctctcattccatcacatcaaacacagccatactccctggggacctctgtgtccatagctgctgaaaaaaaaaaaaaa

SEQ ID NO: 238514 - DNA, 578 bp, Homo sapiens
aacccctgaagatcagagagtgagatgctgaaaggtgttcacactcgccactcctcctcccttaaagatgaaccttaaaagggtcacacttagtacctaactagtgaggacaatgttgcaaaacagaaaaaggcattttctgatcatcttttggtatatagaatgcaggcatatgcccctgtaggttagtttattttcattgtttatatgtgattgttgattttgtttctttaatgttatttcaataacacttctctttattaatactttattttgggggacagggtcttgctccgtcacccaggctggagtgcagtggtgtgatcrtggctcatggaagccttgactttctgggctcaatcaatctggccacctcagccacctatgtagctgggactacaggtgcataccaccacacccggctcttttgttgttgttgttttttaatagagaccaggtttttccatgttgcccaggctggtctcaaactcctgggctcaagcaatctacccacccttgcctcccagagtgctgggattacaggcatgcgccactgtgcctggccgatacgttttatg

SEQ ID NO: 238515 - DNA, 589 bp, Homo sapiens
aaactcttcagtaaactcttcttacttgtgctagcttgaatggatttcagttaatcacaactgggtagctaagagacttcttcacagcctcacagtgtataagcgactgatatgcgctgagggttcctccccttacctgctaccaaaatttatatgctgaagctctaccctycaggaacctcagaatacaactatatttggagatagtcttgaaagaggtaatcaaggtaaaatgaggtcatgagggtgggccctaatccaatatggctggtgtcctcataagaggaagataggacacagacatacagagagggaagaccctgtgaggacacagggagaagacgccatttgcaaagtaaggagagagccttcggagtagccaaccctgctggacttccagcctccaggctgtgagaaaataaatttctgttgttgaagcttcccatctggtggtactttgcgatggcagccggagcaaacggacactgtagcaaaccctttctccgtgcgccatgagggtgctttgcttctcaaaggctgtcccccatttctgggcaaactgtgtcattaccaggcactattcaagtga

SEQ ID NO: 238516 - DNA, 569 bp, Homo sapiens
attccagctcagtgcacaccagccccatttcaagggctcagaagtcatctgtggctgatgatgactgtcttggaacrtgccagcctagacaacgcttagattatgatgtccttcagtaaacatttgttttttaaaaaaataaagaatacatgagtgaataagtggatcaatactcaccaggtgatgccgacactgccagtccagggaccatcctttgaacaccactgtgctggataatacctaaatttttaaaatcaacacagggagggataagcatactatttgaaaacatggaaataacacgagtgaaaagagcaaaaagaagttctctcagggaagttagggtcaggtgtgagaggagggggcaggagaccatgatgtttgttataagccttatcgtactaatatttgtatcatttcgataaaagtaaaaggtgaacttgcagaaagtacatgaatgaaaaatgtagcactgctcattggccactagaagtttcctgctgtgcacttctgaggagtggccacacatcaggcattcatcgtccaggcagactttgggcccacagtgg

SEQ ID NO: 238517 - DNA, 557 bp, Homo sapiens
aattccagctcagtgcacaccagccccatttcaagggctcagaagtcatctgtggctgatgatgactgtcttggaacatgccagcctagacaacgcttagattatgatgtccttcagtaaacatttgttttttaaaaaaataaagaatacatgagtgaataagtggatcaatactcaccaggtgatgccgacactgccagtccagggaccatcctttgaacaccactgtgctggataatacctaaatttttaaaatcaacacakggagggataagcatactatttgaaaacatggaaataacacgagtgaaaagagcaaaaagaagttctctcagggaagttagggtcaggtgtgagaggagggggcaggagaccatgatgtttgttataagccttatcgtactaatatttgtatcatttcgataaaagtaaaaggtgaacttgcagaaagtacatgaatgaaaaatgtagcactgctcattggccactagaagtttcctgctgtgcacttctgaggagtggccacacatcaggcattcatcgtccaggcagacttt

SEQ ID NO: 238518 - DNA, 516 bp, Homo sapiens
gaaaaatcatatattttgctacttatttttcaagtcccataagcatttattggaagctgtagagtaagaaggttgagattgtcaattaagctgagttgggggttatctgcagatttttaaattctttaatttaaaaaatatttattgactacaccttatttcagacatggttgtggtgctgagtaaagcagtgcataaaaccaacacagcccccactggcataatcttgccttgagtttggaaagaaagacaacaaaccgataagcaaattcatgtatgtgatcatgtcagataacgatgtacactccaaakaaagccggagtgaggtgaggtaagaccgggtccttggatcatttcttcttctacttatattcacatctttgatgatctcatccaatctcatgattttaaaaatcaattatacatagatgattccccaaattgaaatccagacttgcatatccattttcctattccaatgtctcttcttgcatgtctaataggcacctcaaactt

SEQ ID NO: 238519 - DNA, 518 bp, Homo sapiens
actactaaacccatttcctcgctctcctgagaacacagctgaattacattttccagccttctttgggcttattacagtcatgagacttaaagtaccagtgaattacatgtaggtgtaagtgatggctgctcagtcatggcctttattaacctaccacctgcaactttcagcctcttccccatctgcctcctgaatgaagaattggagatagaagcagcctggctccctgagtgaccagctgcatggaaggccacataatgtcttggacttccaggaaatcaagaacaccttcttagaacttcatattggcaagaaatcagattttattagttaagttgctgagatttcagtttatctstgacagcagttagcattccctagtacacttccctcttctccattcttgcaagtctgcaagaggctagcagaactgagttccaatattatcttttctaattaggtgtcacctatcacatgaattatgccagctgaaatatgccataactttgcgactctac

SEQ ID NO: 238520 - DNA, 541 bp, Homo sapiens
cttgtaattccatttttaagaactgtacagagggccaggagcggtggctcacaccmgtaatcccagcactttgggaggctgagatgggtggatcacgaggtcaggagtttgagaccagcctcatcgaaaccccatctctactgaaaacagaaaaatcagctgggcatggtggcaggcacctgtactcccagctactcaggaggctgaggcaggagaatcgcttgaacccaggaggtagaggttgcagtgagctgagattgtgccattgcactgtagcctgggtgacagagtgagactctgtctcagaaaaaaaaataattacagaataggcaaatccttaggagcagaacataggattaactgcttaatgagtacagggtttccttttgtggcaataaaaaggttctgggactagatagtggtgatggttatacaacactgtgaaggtactaaatgccactggattatacactttaaagcagttaacctggtaaatttcaagctacgtgcattttaccgcaattttttttaagttgatact

SEQ ID NO: 238521 - DNA, 542 bp, Homo sapiens
cttgtaattccatttttaagaactgtacagagggccaggagcggtggctcacacccgtaatcccagcactttgggaggctgagatgggtggatcacgaggtcaggagtttgagaccagcctcatygaaaccccatctctactgaaaacagaaaaatcagctgggcatggtggcaggcacctgtactcccagctactcaggaggctgaggcaggagaatcgcttgaacccaggaggtagaggttgcagtgagctgagattgtgccattgcactgtagcctgggtgacagagtgagactctgtctcagaaaaaaaaataattacagaataggcaaatccttaggagcagaacataggattaactgcttaatgagtacagggtttccttttgtggcaataaaaaggttctgggactagatagtggtgatggttatacaacactgtgaaggtactaaatgccactggattatacactttaaagcagttaacctggtaaatttcaagctacgtgcattttaccgcaattttttttaagttgatactg

SEQ ID NO: 238522 - DNA, 298 bp, Homo sapiens
accaactaggtaagccactccacaattcctgccccatagacattgtgagataaggatctgttattgttttaagctgctctgtttggatgtaatttyttatacagcaatagatagctaatatggtgaagatttgaattctgttatagtccaccactttgattttgctccaataacctgacaagactccatcttctatgcaactctattcttaaaaacttgtgtttaagatacatttaattctgtctgtgctttcttggtcttcttccagagtaaagagagacggttccacccatcaggg

SEQ ID NO: 238523 - DNA, 561 bp, Homo sapiens
gcctctgggcttatgtgcagccagcggtgaggcctgaggagaaatggctgaggcactgacagtatctgccgagcagcgagcatcactcagatccacttatgtcttgtgttaaattcatgctgtcactgtttcttactacaggtgcctgccaccatgcccagctaawtttttttgtatttttagtagagatggggtttcaccatgttagccaggatggtctcgagctcctgaccttgtaatccaccggcctcagcctctcaaagtactgggattacaggcgtgagccaccacgccccgcccaggtcatagtttatttaaaaaggaggaggaagaagaggaataagctggccctggtaacacgtgcctgtagtcccagatacttcggaggccaaggcaggaggattgctggagcccaggagttcaagtccagcctgggcaacataacaagacccctgtctcttttttaaaaagaagaagccaggcagagtgagtcatgcctgtaatttcagtactttgggaggctgaggcaggaggattgcttaaggccaggtgttcaaggcc

SEQ ID NO: 238524 - DNA, 561 bp, Homo sapiens
gcctctgggcttatgtgcagccagcggtgaggcctgaggagaaatggctgaggcactgacagtatctgccgagcagcgagcatcactcagatccacttatgtcttgtgttaaattcatgctgtcactgtttcttactacaggtgcctgccaccatgcccagctaaatttttttgtatttttagtagagatggggtttcaccatgttagccaggatggtctcgakctcctgaccttgtaatccaccggcctcagcctctcaaagtactgggattacaggcgtgagccaccacgccccgcccaggtcatagtttatttaaaaaggaggaggaagaagaggaataagctggccctggtaacacgtgcctgtagtcccagatacttcggaggccaaggcaggaggattgctggagcccaggagttcaagtccagcctgggcaacataacaagacccctgtctcttttttaaaaagaagaagccaggcagagtgagtcatgcctgtaatttcagtactttgggaggctgaggcaggaggattgcttaaggccaggtgttcaaggcc

SEQ ID NO: 238525 - DNA, 573 bp, Homo sapiens
taactcacacgttaagtagaaatatcttagggccaaatggcatgacagtacatttaagtcagaggagggtggctcaaggaggaattgggcaataagtgaagacatcagaggttcagcatcttcagctggctcctgtctgttggtctttcccccacagaattagtcagaactcgtgactgcgagagatagaaaacataactttgactgaagccaaaaaaaaaaaaaaaaaaggccgggcgcggtggctcacgcctgtaatcccagcactttgggaggccaaggtggacagatcacctgaggttgggagttccagaccagtctgaccaacatggagaaaccccgtttactaaaaacacaaaataagccgggggtggtggagcatgcctgtattcccagctactcgggaggttgaggcagaagaatcgcttgaaccyaggaggcggaggttgcagtgagccgagatctcgccactgcacttcagcctgggcaacaagagcgaaactccgtctcaaaaaaaaaaaaaaaaaggaattcattagcttacatagccaaaaagttcagaaggcaaatata

SEQ ID NO: 238526 - DNA, 308 bp, Homo sapiens
gttgggggcgtttgaccccttggcttgtcccagtgggtaggcgggactccaacccccgcctcctccagggtawagctctcacgtccacctggcgcgacgctgagccatcttcagaagcaccgcagccctcagaaccccacatcccgctgccggtggttccccgcatccggtgtccgcccccgaagcctccctccctccctcctccgcatccccagctacctgcccttaaccgcgacctgggcctctcctggggaggcccagggtggggtcctcagaggtccagggacccaggggcatttgtggggtct

SEQ ID NO: 238527 - DNA, 605 bp, Homo sapiens
atggtactggttctcacatgttaagtgggagycaaacaatgagaacacttggacactgaggcctgttgttggggaggtgagcagggagagcatcaggagaagatcttatggatgctgggcttgatacctaggtgatgaaatgatctttgcaacaaaccaccatggcacacatttacctatgtaacaaacctgcacatcctgcacatgtatttcagaacttgaaggaaaaaattaatccgatatattttttctttttttggtttaataatttttaattttttagtgggaataattatatataatgtatatataagatacatatatttatgatatacatatagatttacaaagttcaacaaaaacaaattttcaaaatcttcaaggaaaatattttttcttcccattgttattctttatttcatatcataattactgaaaataattttgttgtatagaagagggtattgtttaaaagttatatgttccaggtataaaatattgcaggcttgtccctgctctcatatgtacagacattatgaaaaagaaaaagtcaatcattttaagcttatattgctagttactgtgttatactatggttaataaca

SEQ ID NO: 238528 - DNA, 438 bp, Homo sapiens
gaaatgatcctggccccacctctccattttcaggcactcttcccctggaagatggagttgtagggaggagggatggaaagcaaggcacaagctaattgttgaatttgaagtataaactgggcatgtagagctcacccctcattcctctactctgctgcctggatctggtgccctagtgcagccttctctttattatgataaatctacctatttctaaccagtgctgccatgattgagagctaaattggcataattctggtgtttacaattaaggaaacccatttgtttttggaattamttcccactcctcaatatgagcttaatgatggtaatgcattggtacaatgtgctttactctatagtcttattttcaaatggattcagaatttgagtggagatggaaatgcaattttactgagcctcctcagagacccaatt

SEQ ID NO: 238529 - DNA, 401 bp, Homo sapiens
tccttgcagtataaaagacgcagaactacagtaaaaagtrtctatatgttctcctgtccattgtgaaccctaaagtggttcccctccatgaattcaaaatacaccagtttcttgttgcccttgttatttgacttgtggataccaagaaaaaattaattttcatttctcttggcttttcatactcaatttcaggggcccacatgctctaagtaacaactggtattctcagaagtccacaattttacccccaaggattgatcagtacagttttctgcatggtaacctctttttccccttttcctatctgatatggttgtctctgtgtccccacccaaatttcatgtcaaattttaattcccaatattggaggagggacctggtgggaggtgattggattatgg

SEQ ID NO: 238530 - DNA, 519 bp, Homo sapiens
aaaaaaaaattagccaggcatggtggcaggtcctataatcccagttactcagaaggctgagtcaggagaatcgcttgaacccgggaggcagaggttgcagtgagcagagatcagctgctacactccagcctgggcgacagagcagggctctgtctcaataacataaaataaaatagttaactgaaagagcaggatacaaaactgtatgtgataatatataaaaagagagagaatcratatattctccagactatatggattatatattaatccatataatcatatatttctgtatgttttatgtgtttgtatacattttatacaaacacgtacatatgcacacataaaaatagtgaaagactagaggaaaatacattaaaatgttaactgtggttatttccgagtggtgaaaccatgcctgaatttttttcagacattttggcatttcccaaatttttaccacaaccctcaaaaagcaaattcctaatattgcccaatgtcaacatggaattttatcca

SEQ ID NO: 238531 - DNA, 618 bp, Homo sapiens
tgggttttagaaagacagctatggagaatccagctaactttagatccctcttgttacccaggagaaaatctgtcaatgtgattctcatgggtttggtggtagaagggcctggagcctccaattgagagtcttcagttactagtgatgaataagcagaaaaggaatcacatgaggactctagaataaatattttcaactcagtcaaccaactggttttacaaattttctttgcattagtttgattaattggctgaattaatcctttagaatagtttgaggacagtctgaagtacatgatattttcttcttcaacatgatcttgaatgctaaaccttttttcatttaaagttttactatgtagtagagtctgcttgatgttaagcagatttttaaatatttgggtatgccaaaactaattattcaatttagtgaaaatattgtaaaacattcagttttgtgaagaaaaatttttggaacgaggttggtgcaaaataaytgcagtttttgagttattgaaatttgctgtttgatattggaatatattcttaaataaatgtggttatgttatacaccattttaatgcacatttcttgctgtctgtttttttcgctaatgact

SEQ ID NO: 238532 - DNA, 322 bp, Homo sapiens
atacatttacttctgccaggctactacactatatgtccttgatcaatttatgttctcacatttgacttcattagtctactcactcttcttacctcctagatgactatatcatatctcttttttccctcaaatattcaacagccccattcccaaactcgttctgagctgatgacattgtgacgacatatctcctttgacaaaatttatgcaattaaagagaactycatagattgccaaatatatccacctatcaacatctacccctatataatttgcctccctaagtgatatgatagataagctacccataagtctctcaaaa

SEQ ID NO: 238533 - DNA, 451 bp, Homo sapiens
agtagcgtttctgcaacaacaaattatctgaaaaaagaaatcaaaagaacaatctcatttaaaatagctacaaagaaataaaatacttaagaataaatttaaccaagaaaataaaaaggtcggtacactgaaaactatrgaatgtagataaaggatattaagacacaaataaatgaaaaggtatcttatgttaatagattacaagaattaatgttgttaaaatgtccatattacccaaagtgatctagagagtcaatgcaatatttattaaaattacaatatttttacacaaatagaaaaagattaaaattcatataaaacacaaaagaacttgaatagccaaaacgatattaagaaaatgaacaaagctaagtgcattacaccacctgatttcaaaatatactacaaagctacagtaatcaaaacagcatgatatttgcataaaacaggc

SEQ ID NO: 238534 - DNA, 524 bp, Homo sapiens
gagaaatcttatacactgatctgtgtcttcattttttctgctgtaacaaaaatatctgacactgattaatttataaagaaaagaactgtattttttcacattctggaggctggggagtccaacataagggtatgagcatctgtgaggacttctctgtctgctttcaagagggcattttgaagctgcatcctctgtagggaacaaatatcgtgtccttctgtggcagaagagatggaaggggaagaacaactcaaatgytatgtgaagcttcctttatgaggactttcatcccattctgaaggaagagacctcatggtctaatcatcatttcttaaagaccttacttgttaatactattacattgtccattaagtttgaacatgtgtattttgaaggggacacattcaaaccatagcaatctgtcaccgtaataaatactaacaatattgtgtttaatgacgacttcatggatatgaatcttcctcacacattcaagttcaataaaacatgaagctccctcacat

SEQ ID NO: 238535 - DNA, 524 bp, Homo sapiens
gagaaatcttatacactgatctgtgtcttcattttttctgctgtaacaaaaatatctgacactgattaatttataaagaaaagaactgtattttttcacattctggaggctggggagtccaacataagggtatgagcatctgtgaggacttctctgtctgctttcaagagggcattttgaagctgcatcctctgtagggaacaaatatcgtgtccttctgtggcagaagagatggaaggggaagaacaactcaaatgttatgtgaagcttcctttatgaggactttcatcccattctgaaggaagagacctcatggtctaatcatcatttcttaaagaccttacttgttaatactattacattgtccattaagtttgaacatgtgtattttgaaggggacacattcaaaccatagcaatctgtcaccrtaataaatactaacaatattgtgtttaatgacgacttcatggatatgaatcttcctcacacattcaagttcaataaaacatgaagctccctcacat

SEQ ID NO: 238536 - DNA, 524 bp, Homo sapiens
gagaaatcttatacactgatctgtgtcttcattttttctgctgtaacaaaaatatctgacactgattaatttataaagaaaagaactgtattttttcacattctggaggctggggagtccaacataagggtatgagcatctgtgaggacttctctgtctgctttcaagagggcattttgaagctgcatcctctgtagggaacaaatatcgtgtccttctgtggcagaagagatggaaggggaagaacaactcaaatgttatgtgaagcttcctttatgaggactttcatcccattctgaaggaagagacctcatggtctaatcatcatttcttaaagaccttacttgttaatactattacattgtccattaagtttgaacatgtgtattttgaaggggacacattcaaaccatagcaatctgtcaccgtaataaatactracaatattgtgtttaatgacgacttcatggatatgaatcttcctcacacattcaagttcaataaaacatgaagctccctcacat

SEQ ID NO: 238537 - DNA, 524 bp, Homo sapiens
gagaaatcttatacactgatctgtgtcttcattttttctgctgtaacaaaaatatctgacactgattaatttataaagaaaagaactgtattttttcacattctggaggctggggagtccaacataagggtatgagcatctgtgaggacttctctgtctgctttcaagagggcattttgaagctgcatcctctgtagggaacaaatatcgtgtccttctgtggcagaagagatggaaggggaagaacaactcaaatgttatgtgaagcttcctttatgaggactttcatcccattctgaaggaagagacctcatggtctaatcatcatttcttaaagaccttacttgttaatactattacattgtccattaagtttgaacatgtgtattttgaaggggacacattcaaaccatagcaatctgtcaccgtaataaatactaacaatattgtgtttaatgacgacttcatggatatgaatcttcctcacacattcawgttcaataaaacatgaagctccctcacat

SEQ ID NO: 238538 - DNA, 581 bp, Homo sapiens
tgaattggaaaaagaaggagttctgttcatatacgtatgcatttatagagtgctggcagttcttcattgaatccaatgatattatttagatgaatagtatttataatctgtctatatttatcagtgactatgccatagcaatttatgataccttgaatttagatatttgatgaagaggtaaaaatatgctgacaatccccttagggctcactggcacctcagttatctcagtgctcatttgaagattcttacttgaagatcagtgttttaaagtcttagagtttcttcaagcacagccttagcatctcctatccagagtccttctttatgcacacatcttttctgtaagacagttgtctgggtaaagcttttcacatcttttccrtaaggatagattgcatatcttcatacacattaagagacatgggtggatttaaacttttcaccttttttattttttatttttttgagggagggtctgactcccaggctggagtgcattggcaacaatcatggctcactgtaggctcaaccttctaagctcaggcaatcctcccacctcagcctcccaagcaattgga

SEQ ID NO: 238539 - DNA, 597 bp, Homo sapiens
atttatcatttaagttttttatttcaatcggtttttggggaataggtggtgtttgcttaagttctttattgctgatttctgatattttggtgcaccagtaaccagggcactgtacactgtatccaacgtgtagtcttttatccctccccaccccccacattttcccctgagtccccaaagtccaatgtatcattcttatgcattcacatccttatagcttagctcccacttgtaagagagaacatatgatgtttggtgttccattcctgacttacttcacttagaataatggtctccagttccatccaagttgctgtgaatgctgttatttccttccattttatggctgagtagtattccatggtgggtgggtggatggatagatgatagattgatagatagatagatagatagatagatagatagatagatagatagatagatatagataacattttcattactgattgattratgggcatttgggctgattccatatttttacaattgcaaattgtgctgctataaacatgggcatgcaagtatctttttttgtgtaatgacttcttttcctctgggtagctatccagtagcagg

SEQ ID NO: 238540 - DNA, 597 bp, Homo sapiens
atttatcatttaagttttttatttcaatcggtttttggggaataggtggtgtttgcttaagttctttattgctgatttctgatattttggtgcaccagtaaccagggcactgtacactgtatccaacgtgtagtcttttatccctccccaccccccacattttcccctgagtccccaaagtccaatgtatcattcttatgcattcacatccttatagcttagctcccacttgtaagagagaacatatgatgtttggtgttccattcctgacttacttcacttagaataatggtctccagttccatccaagttgctgtgaatgctgttatttccttccattttatggctgagtagtattccatggtgggtgggtggatggatagatgatagattgatagatagatagatagatagatagatagatagatagatagatagatagatatagataacattttcattactgattgattgatgggcatttgggctgattccatatttttacaattgcaaattgtgctgctataaacatgggcrtgcaagtatctttttttgtgtaatgacttcttttcctctgggtagctatccagtagcagg

SEQ ID NO: 238541 - DNA, 382 bp, Homo sapiens
ttgtatttttaatttttttgcaattctttcaagtttgttaaagcttaatatttatcaaatacttacaaagcagcaggcatttataaataaattatataaatttcaaaataattcaagtgaattaaattattattgttattctcatttcagaaaaaaaggaatgtgaaacatggatagtttaaatgacttggagcccaagggttctcttttcttcacatcctcaccagtaatgataacattcatcattttggtaataggcattttatcagctgtgaggtgasatgcaattttaattttgatttgcatttctctgatgattagtgatgttgagaattttttcatgtacttgtcatccatttgtatgtcttcttttgaaaaatgt

SEQ ID NO: 238542 - DNA, 386 bp, Homo sapiens
attctcctttttagagacatctcttggctttagcagaaacttaacacttggccatgggctacctagttactatgtgagcctagctacccattacagactgggtgttatctgaccactcaaagtcatacagttaggcaygcacagcaacactccatcatcaaatggaagcaatatattcatgatggaacctgagtaggccctgaaagcacaagtaaattacatgaagaagtggcccaaatgcctctgagccccccttttcctacactgccttctctctttcagcctgcactattaggctcatggggagttcccaatgatcaacagaagaatagaagactaggttctggtttatatatggtcctgcacaacatgaaggtaccacctaa

SEQ ID NO: 238543 - DNA, 386 bp, Homo sapiens
attctcctttttagagacatctcttggctttagcagaaacttaacacttggccatgggctacctagttactatgtgagcctagctacccattacagactgggtgttatctgaccactcaaagtcatacagttaggcacgcacagcaacactccatcatcaaatggaagcaatatattcatgatggaacctgagtaggccctgaaagcacaagtaaattacatgaagmagtggcccaaatgcctctgagccccccttttcctacactgccttctctctttcagcctgcactattaggctcatggggagttcccaatgatcaacagaagaatagaagactaggttctggtttatatatggtcctgcacaacatgaaggtaccacctaa

SEQ ID NO: 238544 - DNA, 618 bp, Homo sapiens
tatgataggatcattcgtgtgattaaaaacatataaaaagaggaatgtgggaacattaaggagtaaaagtcaattaggctttattggggtgaatgtaaagaggtgtcatcaagggaaagcacatgggatgaacttgaaccagaatcccaaataaggaatagccaaaactctgtaactgtcacaactctttacctgcctaattaaaccctaagaaatgctactctgggatgtaggagggttgatttacctctgatgttgacaccaggagaayattttatattacatgttccaacatgaatttttctcaatatttggaatatacctggaaaaaacttatctctcttttagtaactcactgtaggtatcataaaaatatcttaagcatattgtaatgcagtacgtactacaagttctataattatttattgccgatggagtaacattgagtttttttggaaactgccttttttaagtttcaaaggaataccaacattaaaaaagattacagaaaaaaagttgttttagactgagagaagggatgaagtatatacatggaagttgttgactaacaatgaattctgctttaaagtagattctactttagtagtaaagtaaatc

SEQ ID NO: 238545 - DNA, 552 bp, Homo sapiens
tcaggagtttgagaccagcccggccaatatggtgaaaccctgtctctactaataatacaaaaactagctgggcatggyggtgcatgcctgtaatcccagctactcgggaggctgaggcaggagaatcacttgaacacaggaggcggatgttgcagtgagccgagatcgtgcctttgcactccagactgggcaacaagagtgaaaccctaactcaaaaaaaaaaaattaatgtatggtgatacctgtaatattttacttaacttgcttatttggcctgcgcataacgtagatggctcttggagaatgactgtgattataataaagtgaatcacatggtaactccaattacagtggctcttttatgttatatctttactggagcaaatgaacacaacccctagcacctgatagcagctactgacctgacaaataattttttctccataccagttttcaaggtctgccagagtagtttgctttgctccttggcagggccaaaaatacacatttgctttcttgcccagaagtatgtcaactctccagctctctgcc

SEQ ID NO: 238546 - DNA, 552 bp, Homo sapiens
tcaggagtttgagaccagcccggccaatatggtgaaaccctgtctctactaataatacaaaaactagctgggcatggtggtgcatgcctgtaatcccagctactcgggaggctgaggcaggagaatcacttgaacacaggaggcggatgttgcagtgagccgagatcgtgcctttgcactccagactgggcaacaagagtgaaaccctaactcaaaaaaaaaaaattaatgtatggtgatacctgtaatattttacttaacttgcttatttggcctgcgcataacgtagatggctcttggagaatgactgtgattataataaagtgaatcacatggtaactccaattacagtggctcttttatgttatatctttactggagcaaatgaacacaacccctagcacctgatagcagctactgacctgacaaataattttttctccataccagttttcaaggtctgccagagtagttkgctttgctccttggcagggccaaaaatacacatttgctttcttgcccagaagtatgtcaactctccagctctctgcc

SEQ ID NO: 238547 - DNA, 615 bp, Homo sapiens
tgctatggcagtgcagaacggaaatgtggggttgaagcccccacacagagttcacactgggacacagcctagtggagctgtgaaaagaggaccaccatcctccagacctcagaatggtagcaccattgacagcttgcactgtgcactcggaaaagctgcagacactcaatgccaacccatgaaagaagctgggaggggggctgtaccctgcaaagccacagaggcagagctgtgggagcccacctctcacatcagcatgacctgcatgtgacacatggagtcaaaagaggtcattttggaactttaaggtttaatgagtgccctattaaattttrgatttgcataggacctgtggcccctttgttttggccaatttccatttggaatgggtatatttacccaatgcctgtacccctttgtattagtatctaggaagtaactaacttgcttttgattttacaggctcataggcggaagagacttgctttgtctcagatgagactttggactgtggacttttgagttaatgctgaaacaagttaagcttttgtgggggtcctggaaaggcataactggttttgaaatgtaaggacatgagatttgggaggggccagg

SEQ ID NO: 238548 - DNA, 607 bp, Homo sapiens
gtcagataattagacaggtatccaatgcctttgaactttttgttgtttcataacaactttaataacacatcttcagtccagtattttctcctacaattctgaagaattgtccacttccatgtcagatgaaccatttaatatttggaccagtcttcaaacttttytaaagtgatttcatatttactcagagaaaaaaactgggagataaaggtgcagaaaggaaccaccaattcttgccaaaaaataaaagctttggctgagcacatgcaaatgcccaaatagtccagtttatcaaagatgacagtattaaaaaatggtcaacatcaggtactccaaaaggagagaaacaggaagagaggcaagggtagaaaaaccaccttattgggctcactatctgtacgatgggtccaatagaagcccaaatctcagaattacacaaacaatatatccatgaaaaaaccttacatgcacctcctgaattaaaaaaaaaaaaaaagtcaacgttataccccaggtctgctgatttctaacacagatcaggtatttcagtcttaaagcctatccttcagcttgtacattattaagttttctgtcatttgagtgacta

SEQ ID NO: 238549 - DNA, 594 bp, Homo sapiens
atagaaatactacagagtacagagtgtatataggactttcgactgggcctttgacaattcagatcttcaraatgttttccattattttaatgagaagtttattaccagttttaaaaagatatttgttttaggaagaatttaagatggaatttttttggttcattttaaacataatttgtcagtttcaacatattttatctgtttcttgggagattaatttacatataataaaatttaccaattacaagcatataatttcattatttttgacaaacatgtatggttgtataaccaccaccacaatcatgatataaaacacatcaatcctgaaaaaggtttcttcgctgcccttttctgcataccttctctacaccttccaacccctgggtagccactggtgtatgtaagttctgccttttctagaattttacataaatgaaatcatatggtatggggtcttttgtgattggattctttcactgagcatcatgcattagatgttcattcctgttgcatacatatatcaatagtttattcctttttgttgctgggtagtatacaaatattaaaaaataagactaaaatatataaaaa

SEQ ID NO: 238550 - DNA, 554 bp, Homo sapiens
tttctttgagcctaaggatgtctttatctgtgagatgggtctcttgaagtcagcagatggataggtcttggattgtgtttccaacttgtccctctgtgccttttaagcgagggcatttagaccatttacattcaaggttaatattgatatgttaggttttgatccgattatgtagttgtcagttggttgctttgtagtttctactttgtgcttgctttataacctctgtgggctatatacttaagtgtgtttttgtggtagcaggtatcatttcttttttccatgtttagaactcccttaagtatctcctgtaaggttaatgtagtggtaacaaattcccttaatgcttgcttgtctggaaaaaatattttatttcttctttacttctgaagcttagrttggtggaatataaaattactggttgaaatttcttttctttaaaaatactgaaaaaaaaccccagtctctcctggcttgtcaggtttgtgctgagaaatccactattagtctgatggtgttccccttatatatgatttgacctttgtctgtagctc

SEQ ID NO: 238551 - DNA, 599 bp, Homo sapiens
ttttatgaacaaagctttgcttttggtcaaaaatacagtgtacacctctctgtgcactgtagatgtacagaggacatctacagtctagatgtaccagtgtatatcctctctggatgaggaccctgggaaaggagggtgcatcactctgctgaagatcttttagtttcataattagtagaatgtgggaaggagaatttgagacatttctaactccgtataagataagcttgtgtcctgaaacactcatttttctacctcttattcaaagtgtataactggcttaagtagaaatggaaagtttgttattacaggagaaagtgagatatagtgatgataacaaaaatatacttgtgatgcattaatcttaggctgtcttatcactttttaaatataactaacaaggccttatrgcaactgtggaatatataggtattatgtgacacgttttatattttcaggcctgatgtcgtattgtatgtgtttgtattagtccattctcacgctgctaataaagacatacctgagactgggtaatttataaaggaaagaggtttaatagactcatagttcaacatggttggggaggcctcaggaaactt

SEQ ID NO: 238552 - DNA, 450 bp, Homo sapiens
aaaattaaaatccatgtttgatatttaagctaaaatacttataggctgatttaaaggaatgatccctactttctttaaaatggagttatatatctatgtttatattctgtaacagatatgccattttagaaaatcagaagagatgtatggaactgataaccttagtccggagtggctaggttatcctttaaaaccaggatatatcttttttcttccttcctaaatattttgttattcagaaaaaaattcacagaaaaagaaaattatatttaactaagaggggatgttgtatgcccaagttctttagcatsgaagagggccgatggctgggaacgctggagagaggacagagcaaggtaaggaggctcttggtggaatgatgcttgtcctcagacccacgtggtttctaggtgagaaccttgaggagaagaggcatgccttgtgcaattt

SEQ ID NO: 238553 - DNA, 595 bp, Homo sapiens
tgtctatcatcatgtttcctattagagtctkgtcactgagggcttagattgtgtcctattcatctttctatctctagcaccaatctcagtgcctgaaatataatggctgcccaacagaactttaaaaccctgaattgtgcagataaaatttaccgctttttctttaaactaccctaagtccatcataataattaaaacagacttaacaatgttcaaaaatccagtttaataaactaaaggtggttattttaaaatttaaagccattaaatctactttgtattcatattggaaattctattccaagaagtgacagatttctttttcctgggaaatcaagggaagaaattatttaggtttcttgggctaaagtagtctctgatctagtgagttaccagaattagtgtcagtgcaagttagagatgagcagctggagagtttaagagtgtgaaaggaagatgagaagtgagtaataaagatgtgagaaaagaacaagtcttcattttgtggttctttgttgctgttgttttcagaggttaatgcatgtatatctaaacacatgctccattggtttaataatatctttatcatatttaa

SEQ ID NO: 238554 - DNA, 595 bp, Homo sapiens
tgtctatcatcatgtttcctattagagtcttgtcactgagggcttagattgtgtcctattcatctttctatctctagcaccaatctcagtgcctgaaatataatggctgyccaacagaactttaaaaccctgaattgtgcagataaaatttaccgctttttctttaaactaccctaagtccatcataataattaaaacagacttaacaatgttcaaaaatccagtttaataaactaaaggtggttattttaaaatttaaagccattaaatctactttgtattcatattggaaattctattccaagaagtgacagatttctttttcctgggaaatcaagggaagaaattatttaggtttcttgggctaaagtagtctctgatctagtgagttaccagaattagtgtcagtgcaagttagagatgagcagctggagagtttaagagtgtgaaaggaagatgagaagtgagtaataaagatgtgagaaaagaacaagtcttcattttgtggttctttgttgctgttgttttcagaggttaatgcatgtatatctaaacacatgctccattggtttaataatatctttatcatatttaa

SEQ ID NO: 238555 - DNA, 545 bp, Homo sapiens
ttattttaaagaaaattctatacagcatattatctctaaacatttcagtatgcatctataaaatatatgaaatcatttgaaaatataatcacgawgtcatattgcatctaacaaaattaaaattccaaaatatcatgaatacccagctatcttatagttctataatatattttttgcttctaaatccaaattaggtctatacattgtattttattgggatatttcctaaatattttaaaatctatatatactcctctgatatctctattccttttttcttttggttaaagggactgtattttgtcctatagaattcttcacagtctgaatttttctgattgcatcacccatgggtgtcattctaccgttgtctctttcctctatatttcatttaagttattagacagttggagtagttaaatcagtgtcaggttcaattttctttcaggcaaaattacttcttaggtggtgttttgccccattagaagatacatgatgtctggttgtccctctttttgtgatgttagcagcctttgatgattatt

SEQ ID NO: 238556 - DNA, 603 bp, Homo sapiens
tgtaaacttagattttaaataaatgtcagttttattctacaaactaccttcatcggttctcctttggtttgtccacatgtctcagtgttttttggactagayaaacttttctgttacaattcttaagcctctaccttacagtatgcagggtagttgaagcacctcttttaattttactgttaattttataggtaaattaaattattgcttatttttcttcttcaggtgatgtaaaacaaatattaattttcccattgactgctcatataaagtctttattgtgtttggaggaaaatttttccattggatcagtttcctcaactcttcagtttgtcttggctatgaggcacagaaacattagctcagttaaaattaaaacccttaatgtaatgctaattctaccaggtaactaaatggtttgtacataaaagacactccagtcatttcagagcaatttatgtcaactcatgcctaatgcatgtcagtgtatttgtgaaagtttcttgatatggatgccattgccacagttcccgttgggagcataaacaaataacaacaaagattattgttaattaacaacaatttacaacaagaaagaagatt

SEQ ID NO: 238557 - DNA, 350 bp, Homo sapiens
agtggtgatagagatacattgaagaaatataccttatgtaaattactatgcagtaatataccttacgtaatcagaaatataccttatgtaaattactatgcaagtctgtataggacagaatgaaagggaaagcaactggaaaatgaaatatcagtttgaagaaaattataatggactacatgagaagtaaggcytaaataagggcaatgactgtgggtatggaggagtaaatggatatgagagaggtggaagagctagaatgtctagaattcagaaggatttgcctgaagtttaaggatgaatgtgtattcaaaggctagtgaggtttcaagacagggtgactgagaaga

SEQ ID NO: 238558 - DNA, 528 bp, Homo sapiens
ctcacactgcctatccccatatgataatcagcgactattccccatctctgaccctccactgacttccagtggccactggctccatcactccatttagaatgcagaattgacayctttaattcaaatatatttagttcaggccccaaggggcaagaaaagttcatcaagggaataagtgaaatactgctgagaggctgagaaggataatagagaaaggatcattggatttggtaatgaataatggatatctaaagacagtagagtgttgcgagcagaataaagactattaagagataaagaagagtaggtacctccatttacagaaattaaatctatgtcagaaagtgcttatttacagtgagttttcttcagcatcttatttaactccttttataaaagtctataatggaatttcaaatcgaagtgctttctctctctctctaattatgtccttgtagccagtgtatggttgatgttgacggtacaatttaaactcccagcaggaaagttccccactgtttagttttt

SEQ ID NO: 238559 - DNA, 554 bp, Homo sapiens
ctctgttttacagacccagaataaaaccaaaaatcaaaaaactattttgattatgtgaatgaaacaggcatacactctgagtgggaaaggaaaaatcagataacttgttccctttttgacttcagagatgcttctgttgtgttccacgacagaatggtgggttgaagcaataaactagtgtcaaggcacatgtggaaacagtccaagaccttctatagcaagtcattcagggtgatccagataaatcttgtcccactgttgtagctgatgaaagaattaaagtgactatttggtaaaagtcactgggcatatggaaggatctaaaacatattcaaaatagatgcagaaaacrtagggcaaagaacgagatattatatcctatttactttgtctttctaaagtccttattgattgtgaaagtttatacaatgtgtagttgaatgttcacgatttttatttccattcaacacgcatttactatgaagctgaccctgctatgcctgctaggcccatagggatgcatctcccaacatcttcccatcacagttggggac

SEQ ID NO: 238560 - DNA, 537 bp, Homo sapiens
tgcactgctcctttggcctctggtagggcaggttgatctaccttctgacttggagtatttactgtgcactctcgctctctcagtgcagaccaccctcctttcagagattcacatgagtaattcacgccctcacttgattcaggtctgggcttaaatgttatcccacctgtcactatcctctcactctaatttattttgatttatattacttatgtattgtgcatttatttatttattgttttattttcttacctgtcctkcccctttttttgtagagactttgttttgctcatggctatatcctgagcacctactatagtgaccaacacatagttagaactcaacacgcatttcttttcttcttctttttttttttttttaagatgtcactaaaggatatagtaggagctctaggatatggcatgagctcacttccagggactcaaagtccagcactggccatttaacataagccaaaagatttaagcgaacaatctactattacatgatacagataagaaaataaactcaaaattg

SEQ ID NO: 238561 - DNA, 590 bp, Homo sapiens
ctggccatttaacataagccaaaagatttaagcgaacaatctactattacatgatacagataagaaaataaactcaaaattgccttttccattttgacatctgaacataggttagtaataataaaarctgttaaactcagcttctgctgcaattttaaaaatctgcaggtaccctccttgattattgatgtggaaattactgattagtctctatttgatgccactggtcaataaggccttcccttgtaacacagaaacttgcaacataatgattaatatggaatggcagaactagcaaaaatctaggctaggcaagaagcagtattgttcttgatttcacctcacacctaaaatcaactcaaatgaattttgcaaaagccttggcatttggaaatgtggattgtgtgagcaacttctacccaagcaaatccagtacattccatttttgtgctgagcatagagctggcctgataattggtgccaaaaccagatgtttgactttggaaaaagggcattccacacattcatcaaaaacacttcttggcaaatccagcagtacaggacacatatgtgtctccatggtcgatagt

SEQ ID NO: 238562 - DNA, 538 bp, Homo sapiens
caaagctctgttgagttaatattctcacttgccaagctctcactcgtaaatagcytggaagttgtcactcatgtccttgcaactagaaaaaaagtttaacaaactgaaagtcaataccttgtcttggaacattggaaaattgaggtctcagagcaaactgctatcccaaaatctggagagacaggagaatacagagaatcaccactgagatgtggttgcctggagcagaagttgtaggagccataaactaataggccataaacttaaatgatcatcttgccaaattgctggagactgagaataagttaatgtgagaatgagaatctcctggggaccacagtcttaggggagctccctcactctcatagcttttatcttcaggaactccaccaggttctcatggtaaagaactgggaaaaattcctgtgtttctggcagaataaggggtaaggtaaccattttgaaatatgcccagagcattttccatgaccaagacctactatgtagggggaaagactttaccagagccttatcccac

SEQ ID NO: 238563 - DNA, 619 bp, Homo sapiens
ataatatctatcccctccaataattcagatgagtgtaaacatttagaaactatcagttatatttcctttgttgattttttaaaagaaaaatcaagagggcaaaaattaaacacattaracagagctgtagttgtttgcttgtgaagcaaacgagagcctgggtcacttaagaaatgagttcagtgggtttcccaagctgaaagcagaagtgctagaagaaaatggaggagttgttccatattaggagattatttaagcgacagtatagataattataatgtggttagttaagaggattataaacattcccagtcaattggtcatatattctgttttaggacacaaacatacggatgcagttttgaaagaggtcaaagaaaatgtctgatggactcagggtgatcgatggcacttttttttctttaattctcaaaagataactacataataataaatgcataacatcttgcagtttgtaaagttcattagctcagccatcctgttaggtgtgtactgtgaagatgtctgttctacagctgaggaggtggcagcccacaggttgagtaacttcacggattccacaaacactttttgagaaactgtgccttgggtttaactg

SEQ ID NO: 238564 - DNA, 598 bp, Homo sapiens
ggcactgggtgagaatcagacaactagtagcacagataggggaatcatctcagcactgaggagttcccagtcaaagcctcctgcctcccacagactctggaggctgggggcagaaagtggaagaaaagaagggataggagttgaaatactaagtcagagttgagaaaagtgcctcaacccaggctcccaataaggaactttccaaatggaagctcctgagttcctgattgcaactccctccagaaagttccaatgctttggctgtgcatcacatctaatatggmgaggcacccttccccatgagtcctgccaggcaaatccttgaaattgcctatggttgggcctgaaagatcgcacataggattttggcctgcagccaggctcctcagaaggaactgtaattctttcctgagaagtttagatttggcagtgaaaagtcacttcaaactttaaaatagggagtgatgtgaatagatttgtgctgtagaacagtcaccttggcaatgatgtggaaatcaatgtgaggggatgcaatgtctggcaggaagtcagaggactcttggagcagtctgtgagcgggatttgagtctgaaccatg

SEQ ID NO: 238565 - DNA, 598 bp, Homo sapiens
ggcactgggtgagaatcagacaactagtagcacagataggggaatcatctcagcactgaggagttcccagtcaaagcctcctgcctcccacagactctggaggctgggggcagaaagtggaagaaaagaagggataggagttgaaatactaagtcagagttgagaaaagtgcctcaacccaggctcccaataaggaactttccaaatggaagctcctgagttcctgattgcaactccctccagaaagttccaatgctttggctgtgcatcacatctaatatggagaggcacccttccccatgagtcctgccaggcaartccttgaaattgcctatggttgggcctgaaagatcgcacataggattttggcctgcagccaggctcctcagaaggaactgtaattctttcctgagaagtttagatttggcagtgaaaagtcacttcaaactttaaaatagggagtgatgtgaatagatttgtgctgtagaacagtcaccttggcaatgatgtggaaatcaatgtgaggggatgcaatgtctggcaggaagtcagaggactcttggagcagtctgtgagcgggatttgagtctgaaccatg

SEQ ID NO: 238566 - DNA, 558 bp, Homo sapiens
attatggcaatggattttagcagaaaaaatatctatttaatcagatactgatgtatttctgccagttaggtgcagcaatgccctctgcayattgcaggaaatgcactgaaaatcaaagattgggaatgtttttgacttctacgtcctacttagccaagtgcatctgggctctccaaaatttctctaaattgaccactttgaaattgttacttaactaggtgaatctgatctcttgttgaagttactgtgaactatcaaaaatctctatgacagccattcccaaaaatatttacagaaacattatcctttaagattctttggggaaagaaagaatgttttgtggtcaaaaaatttggaatacagtgtaccctacacctaaacaactaacaccaacaggttttaaaggttttgaggagtcctacagtaaggaatctgtattagttaatagcgcagtattaccctaaaacatggcgtaataatctgtattactccaaaacttggcaagttagacatctgttatcgcaaaaagattcaaaggatcaggactctgggaatgac

SEQ ID NO: 238567 - DNA, 558 bp, Homo sapiens
attatggcaatggattttagcagaaaaaatatctatttaatcagatactgatgtatttctgccagttaggtgcagcaatgccctctgcatattgcaggaaatgcactgaaaatcaaagattgggaatgtttttgacttctaygtcctacttagccaagtgcatctgggctctccaaaatttctctaaattgaccactttgaaattgttacttaactaggtgaatctgatctcttgttgaagttactgtgaactatcaaaaatctctatgacagccattcccaaaaatatttacagaaacattatcctttaagattctttggggaaagaaagaatgttttgtggtcaaaaaatttggaatacagtgtaccctacacctaaacaactaacaccaacaggttttaaaggttttgaggagtcctacagtaaggaatctgtattagttaatagcgcagtattaccctaaaacatggcgtaataatctgtattactccaaaacttggcaagttagacatctgttatcgcaaaaagattcaaaggatcaggactctgggaatgac

SEQ ID NO: 238568 - DNA, 540 bp, Homo sapiens
gatttttccattcatttgaacacaaaatactggtttttgttggacggatgtcacacattaagctttaaggcaaatgtgttcaagaatcagatctgctctaatatcatttttgaaataacacacacccaggtttaaatggaatttctttaagatatatgcagaaagaatacaagattatcaatggtatatgccatcagagttatgaagaaaccactaggtttggaggaggtaagagttcattcatctcaaggttcccagaagctatcatggaggagctaatatgtaagatgtaatggtaatgcaaaggtaatgggattttgagataaaggaaaaagtgaatgtttgtggagtattttacttcccacctttttcttctctcacttccatgggtcatgatatcaggttgtgtctatctccttactagtrgataaatgtcatatttggggttctctgagaatcagatatgaaaacaaggctagacatgcaagagatttatttgaggaaatacttatattagtttcccaaagttctcataacaaa

SEQ ID NO: 238569 - DNA, 628 bp, Homo sapiens
aaatggaaccacatctctcatcccttggttcccagacacaagtatccttcctactggggacaccatatagaggacttaacttaatggatgtactgcatcccaaaggatgacacttcatctttgaaaattatttcccccaaagctggtgctttagctgtattttcaatcattgtttcagcacttataagaccagctgtttctgaatggtctggcatrttacacaagttgatgtcgtgggcatgagcccactcccacccgtttgtcactgggaagtgggttccttgctccaatgttatattgggtaatatctcatgcctgtggatctggcattctgtaagtccctggatagtggtgcttgctgaggttttgtaagcagaaatggtaaacccatactcagagtaattatctatacctgtgaggacaaactgctagcatttcagtgatgggatggaaggggctcaatgtagtcaacttgtaaccaagtggccagttggtcttcttgatgaatagtgccatattgggagttcaatgctaatctctgctgctggcatctaagactttcagaagcagcagtagctagattggcttttaaaagtgtgaggccctcaaccaaagctgtcattgtaga

SEQ ID NO: 238570 - DNA, 602 bp, Homo sapiens
caccagcttctgagtgttaaggggaggcattcatgattttgctccctgggtttgtacttaatgacccctgtcggtggcaactctagcaaccctaagtgaagtacaagttgaagaacaagtttgtagcatgtttcagagtagaggaatatgcacagaagttaggacctccctttctcatgatattwttttactgtttacgaataaaacattcagttaagaaagcgtatactgtaaactctttattggagaacagacttaaaaatacatagcaattatttttccggagtccctccacaaaagggtagtttctgaactgaaaaactctgtcatagagggtctcctcatagggtgggggagaccccagtttggattcagtagacaatgttagagatttagtgttattttggccaaggcttttctcttaatgtatcacttcaaagagaaaggaaattgattgtatatacatcacagtgtttgaatgtatgattataacttgatctcccatcattcctagtaccacattacatagagattcaaaaatgacctattatgctctgatactagtgttacattcttcctttaatttaatgtattcacaaata

SEQ ID NO: 238571 - DNA, 503 bp, Homo sapiens
tggatacatgagtaagttccttagtggtgatttgcgagattttgctgaacccatcacctgagcagtatacactgcacacaatttgtagtcttttatctctcacccccttcctacccattccccctggatccccaaagtccactgtgtcattcttatgcctttgcatcctcatagcttagctcccccttataagtgagagcgtatgatgtttggttttccattactgagttacttcacttagaataatagtctccaatctcatgcagagctctgtgaatgccattaattcatttttatggctgtagtattccatagtatacatatatatacaacagtttcattatccactygttgattgatgggcatttgggttggtttcatgtttttgcaattgtgaattgggctgccatgaacatgtgtgtgcaaatacctttttcatgtaatgagttcttttcctctgggtagatacccagtagtgggattgctggatcaaatggtagctc

SEQ ID NO: 238572 - DNA, 536 bp, Homo sapiens
taccttatgagcacagacaaccacaggaaaaatggacaaatgggatcatatcaagttaaaaagcttttgcacaacaaaggaatcaacaaaataatgaagagacaacccacagaatgggagaaaatacttttaaactatccatctgacaagggattaataactattaatagaatatacatggagttcaaacagctctataggaaaaaatgcaataaaaatttaataatctgattttaaaatgggcaaaagatctgaatagacatttctcaaaagaagacatacaaatggcaaccaggttgtattagtcacggttctctagagggacaggactaataggatagatgtatatatgaaagggagtttattaaggagtattgacttacacggtcacaaggtgaagtcccacaataggccttctgcaagctgaggagcaaggaagccagttagagtcccaaaamctcaaaggtagggaagccaacaatgcagccttcagtctgtggctgaaggcctgagaaaccctggcaaaccactggtgt

SEQ ID NO: 238573 - DNA, 602 bp, Homo sapiens
tgatatgctgaagactgaaacagatggagtgccccaaaattctcctttaattgtgcagrtgaaaattcctagaactgagaatcggtgaccgatttgaatagcttcaatcgagaaaaatttcctgacttgaaacagtcatagactagttgaatgaacaggaagtcatgtctcattgagaaaggatgctataaaccaccacagcaatatgtcttctccttgtcttctcaaaagagatcagaggtcatttaaccgaaatggcattatcaagacttctagaggtctttttggccttagtttatacatatacatttccttggctattaaaacaacactgtgctacttgaacagagaaaggtgctaattaaaggcagtaattacaaatgcagttctgacttagattttaagtgaactttctattttcaggatttgaatcttcatattggttccctgacctagaaagactgtgtctgaaaatgtcccaggattcactcccattattaatacttgtgagaaactggtacatgtgtatttccctctggcataacactaaccccttaaatattctgagtaattttgagcatgccataataaacactagaaat

SEQ ID NO: 238574 - DNA, 602 bp, Homo sapiens
tgatatgctgaagactgaaacagatggagtgccccaaaattctcctttaattgtgcagatgaaaattcctagaactgagaatcggtgaccgatttgaatagcttcaatcgagaaaaatttcctgacttgaaacagtcatagactagttgaatgaacaggaagtcatgtctcattgagaaaggatgctataaaccaccacagcaatatgtcttctccttgtcttctcaaaagagatcagaggtcatttaaccgaaatggcattatcaagacttctagaggtctttttggccttagtttatacatatacatttccttggctattaaaacaacactgtgctacttgaacagagaaaggtgctaattaaaggcagtaattacaaatgcagttctgacttagattttaagtgaackttctattttcaggatttgaatcttcatattggttccctgacctagaaagactgtgtctgaaaatgtcccaggattcactcccattattaatacttgtgagaaactggtacatgtgtatttccctctggcataacactaaccccttaaatattctgagtaattttgagcatgccataataaacactagaaat

SEQ ID NO: 238575 - DNA, 602 bp, Homo sapiens
tgatatgctgaagactgaaacagatggagtgccccaaaattctcctttaattgtgcagatgaaaattcctagaactgagaatcggtgaccgatttgaatagcttcaatcgagaaaaatttcctgacttgaaacagtcatagactagttgaatgaacaggaagtcatgtctcattgagaaaggatgctataaaccaccacagcaatatgtcttctccttgtcttctcaaaagagatcagaggtcatttaaccgaaatggcattatcaagacttctagaggtctttttggccttagtttatacatatacatttccttggctattaaaacaacactgtgctacttgaacagagaaaggtgctaattaaaggcagtaattacaaatgcagttctgacttagattttaagtgaactttctattttcaggatttgaatcttcatattggttccctgacctagaaagactgtgtctgaaaatgtcccaggwttcactcccattattaatacttgtgagaaactggtacatgtgtatttccctctggcataacactaaccccttaaatattctgagtaattttgagcatgccataataaacactagaaat

SEQ ID NO: 238576 - DNA, 456 bp, Homo sapiens
ccctgcctctgccagccacttatgctgctgttctcccctctccttcccctttttgatggcttyggcagtgtaagactgccacctccttggatttttgcactgcatgcagtaactccatgatttccttgtggtatttaatggggttcccccagaggttaggaactccctttctttccatattgcagcatgggcatgtaggattagataagcatacttactatatgtatacacatttattcttcttccccttcccagttctaaggcttgggtaagtgccactagttctgctaactgggcactggtccctgggggaagaggcttactttcaagtactgttactaactatggcataacctgcccttcatatcccattctccacaaatgaactttcattggtctataggttaatgtcaggattaactaaggggacttctaagagattctcttgggtgacgt

SEQ ID NO: 238577 - DNA, 565 bp, Homo sapiens
atggaaccacagctcactgcaaacttgacctcccaggctcaagtgatcctcccacctcagcctcccaagtagctgggactacaggtgtgtgccaccatgcttagcaattttttttttttttttttttttttttttgtagaaaggaggtctcattatgttgccagggttgttctcaagcaatcctcccgcttatctctcaaagtgctgggattgcagtaataagccatgtgcccatccctctctttattttgaaatcaacttaggcctaaagtgaaagcccatttcactgttatttcagcctaaattaaataacatgccctatgtacttagtcaatgtacatggcaagggtactttataggatattgtacarttgtgtcttcttggccaactaaataccagaaaacaacaacaacaaagttttaaatagatgttaatatttcctcaatagaatattaaaagtagatatgaaatatcacagagttttaatcttatcagaataaatgatattattatttgcattgggaaatttatgtttgtattaggatggtcttttgaagtgaagaa

SEQ ID NO: 238578 - DNA, 624 bp, Homo sapiens
catatcaagaaatatcaaaggatttgtgcatatatttttaaactgtcatatcaaccaggagggaatgaatccttggacttgcagagcattttaaggacttattattaccaggctttctctctcaccctacttttttatacaggccagtaaggaattccatagcacttaacctcctccatgcacagaacgctctttaagtagctgaggtatgtatgtattcagaacttcttatttgaaaaatgcctcctctgcagggtattgtagatgtcatattatgagaaccctgacattgaatcgagcactcacttcytttcaaacctttggaaataggctgtattgattcttaacatttctctggcacatttgtggaaaacagcttttctcagaataattggtcttggtttcccagccttaatattctacataacaaattctctgttttcattaaggcattttatttataacaaatgggtcaaaaatattctttaccctggtcacaattctgtaggaagaaattgtcaagcattctgggatgctgctctgtaaccatctcagtaaagtcttctcatgagatggtttaaaaggtggataatttgtgttagagaactcacaaactgttagatt

SEQ ID NO: 238579 - DNA, 493 bp, Homo sapiens
tccctcatttatttacttaatcatttatgtcagtatggactcatggatgcttattatatactttaggttataatcctatactactatattttgttgctcaagttgttccatccttggccattgggagtgctttcagttggatcctgggctcctttgacatatccccatcatagtgattttctttgggcacttccttactttctggcactaaaagrtgttccaaactcatcttgtatattttattcccctgacctagaatcagccattttttcaaggattcctggtcctttaattggaaaattatattagaaaccaagaactagctactggatgtgcttgttgctcctggggtgggttcattgaatttccccagcctaccatttataaacacttacctaccatttattgaagagctactctgagctagacattttagttacacaagatgaaaaaattatcaccctgcatgatggtgttccagatgagagaattc

SEQ ID NO: 238580 - DNA, 493 bp, Homo sapiens
tccctcatttatttacttaatcatttatgtcagtatggactcatggatgcttattatatactttaggttataatcctatactactatattttgttgctcaagttgttccatccttggccattgggagtgctttcagttggatcctgggctcctttgacatatccccatcatagtgattttctttgggcacttccttactttctggcactaaaaggtgttccaaactcatcttgtatattttattcccctgacctagaatcagccattttttcaaggattcctggtcctttaattggaaaatyatattagaaaccaagaactagctactggatgtgcttgttgctcctggggtgggttcattgaatttccccagcctaccatttataaacacttacctaccatttattgaagagctactctgagctagacattttagttacacaagatgaaaaaattatcaccctgcatgatggtgttccagatgagagaattc

SEQ ID NO: 238581 - DNA, 548 bp, Homo sapiens
gtcagaaatgcagactgccaggcttcacctcaggtgatttgtatgcacactacagtttgagagaatggcaggcagtgctcagctaacccctaagggattaggaggacttagggaaagtgggaagggaagaacagagggaattctgatgttttctcatgattaacagggcttatgggttttggggaggaaaatagtgctgttctacccatatcgtatcaagagtacatactatcaatgtgacttataactattgatgttaaccttgatcacctggctgagatagtgtgtgtcagatttctccactgtagcaaattacttttgtccctacccccttccgtactttggaaggaattcactatgcacattcctcacttaaggaatggggagacatgctccgacttcatggggtcagggggactatcaatttaakttatttggaattcttctgtacaggagattcatttcttctccctcatttatttacttagtcatttatgtcagtatggactcgtagatgtttattatatactttgggttataatccaata

SEQ ID NO: 238582 - DNA, 581 bp, Homo sapiens
atctcctcaaatttcaacaagtgactttatcctcatagtttccttrcgttttccagagtatgattcctttacacaaactacagccttttatattctctatggacctgttgctgcattctttccttgggtgaatatcttcttaatcatcctccgggtttggtctaagcagggagaccaaattagaccccaggagtgtgaaactggcatattcacaattcttgtttcttactgtgattcctttaagtcatccctttagagtctggatgtaagtaaatctataatcctaggtaaaccatactagtgagagaagagctacttgtcaagaaatgggggcatactcattttaattataatgtataattattttcttaattatttttataataacttcaatgacactgtatttatattaatagctctgtagatttttaaaaataatttcaacttttattttagatttgagaggtacatgtacagatttgctacatggacatattgcatgatgctgaggtttggggtacacatgatcctgtcacccaggtagtgagcacagtacccaatagagagtttttcagccattg

SEQ ID NO: 238583 - DNA, 582 bp, Homo sapiens
ttcaacaagtgactttatcctcatagtttccttgcgttttccagagtatgattcctttacacaaactacagccttttatattctctatggacctgttgctgcattctttccttgggtgaatatcttcttaatcatcctccgggtttggtctaagcagggagaccaaattagaccccaggagtgtgaaactggcatattcacaattcttgtttcttactgtgattcctttaagtcatccctttagagtctggatgtaagtaaatctataatcctaggtaaaccatactagtgagagaagagctacttgtcaagaaatgggggcataytcattttaattataatgtataattattttcttaattatttttataataacttcaatgacactgtatttatattaatagctctgtagatttttaaaaataatttcaacttttattttagatttgagaggtacatgtacagatttgctacatggacatattgcatgatgctgaggtttggggtacacatgatcctgtcacccaggtagtgagcacagtacccaatagagagtttttcagccattgcccctctttcctc

SEQ ID NO: 238584 - DNA, 500 bp, Homo sapiens
cgcatgcctgtaatccaagcttctcaggaggctgaggcacaagaattgaacctaggaaggggaggttgcagtgagctgagatccttccactgtactccagtctgagtgacagagcaagactctgtttcaaaaaaaaaaaaaaaaaaaaaaaaaaaaaaaaaaggatgattgagtaatttagttcasttctctcattttaaagataataaaaataaagacatatgatttatcaaccactgggagtgaatggttccatgttggcagcatggaacagactgagaaaaagagatagatgggcttttgcaaacctatctctcctggattagggcagagtccacagaagggaaaatctagcagtagaatatctacaaaatgtaaagtccaagagaggttgaatcacaattctcacatttcccaatgaggcttctgagagggataactgggatggcaccacgaggtggaatcaaacagtggtggaatcagtgataggtatctgggtc

SEQ ID NO: 238585 - DNA, 530 bp, Homo sapiens
gtgaatggaactatccaagcataagaacttcaattttatggggaaggctaggggtgtttgtttgaaagttgagaaagtttgagacatgatcagatttgcattagagaatgatgactgtgacyacagtgtggaggatgacttggaggtgttgagactggaggcagggaacttattgtggaaatgtaggtgttaaatgatgagggtggtggcagtaggggtggacaagaggagatgtatctgaaagacaagtgaaataaagcctgctaatataagaagggccttccttcttctgtgtgctcctatatcaccctcttctttcctggcattcacttgtgtagctgccttttttgcattgtgagagtaaggcattcacagtggcatcaccagcatttagcacaggcctggtatggagtagggacccaataaatatttgttgaatgaatcattaaataaatgaatgagaaatccagccatgaggtgatgattcctgcattagaatagtagaagataaatcatgacttccatttctc

SEQ ID NO: 238586 - DNA, 564 bp, Homo sapiens
tagcatgtgagtaggagtttgtcccgtttcgggggtgggaatgaatgcacgtagggaggaggcaggtgtttccggctcagaagagagtcatggaaactgtagaggcttagccagcccaagcgtttgaggagctgtcaacagctagatttggctgaagcataaagtggtcattggggggctatcaggagtgggacgaggtaagctgcccagggtgccagtggccaagggtccggagagcctgttccagagctgggaacagatcctgagrgtcacgggggcgccagtggaggtctgcagcaggggatgtggggcccgacctgcaatgtagaagcacacctggctgcccacagttgggagtgaggagacagtgaaaatggggcttcccttccttctcaccccccacagcccgcaccctcctctgaatgctctgagcagccctggttccctctgagactcagcatggggacagaaggaagggggctttgggctgccggctgctcatcccaccctggcctggcccccacctcaaggcagtccctgacctcttcacccccaggaccacga

SEQ ID NO: 238587 - DNA, 516 bp, Homo sapiens
accaactatttgttaggactgagttcatcattcctacacatccctgaccctgacacagggcttggcacatggaggtcactctgcatgcatcaactgaccccccgtcccctgggcccaaagatgccaggtctgtgggctgggccttgccaagcttccctgagggctgcagctccaaacgtggcaaagggcccctctccttggaaagggctgagctcctgcaggaggaaggaaatttggccttgaatctgtgccaggcagccaggcctggatggggtgggggaaagtccggagaaacaagcacttggttttcttagtagaactgtggtctcaggaggacctgaacccctggaaggctgacctgacccaagctgggatgaggtcgccctgcaattaccacctcttccgwggccaacaggacttctccctgctgagtcccaaaacctgctgccccacccccccatgcccagcctcggtgcctcggccacactcttgcactcttgcgtccctccttggttg

SEQ ID NO: 238588 - DNA, 527 bp, Homo sapiens
tattacactataaaactccaaacttagggcaaagacaactatagcaatgtttctatctcttcctgtagctaatttctaagaatcatgactatatgaatcagaatcacattttagaattctacaaatctcctttttaaaggagctctttaaccgtaattcttcgaccaatttccctccacyatagttgaatataccagtaataaatacatgaatgcttcatgtaaatcactactagtgatttcaaccatctggaaccactgcaatctcagaagttaaaaagcaaaacaacacaaaactggaaaataataataataaaaaaaaaacccacaaaaaaagggagtggggggagggaggttttaaagtgaaccagataaaaatagcataacacctgaatattacataaaatgcactatcatttatcaactcaataaccacaaataaaaagaatctaactggttgattatggttataaaaagtctaaatcatttagttgcaaagaagagaatgatggaagaaaaacagagaaa

SEQ ID NO: 238589 - DNA, 527 bp, Homo sapiens
tattacactataaaactccaaacttagggcaaagacaactatagcaatgtttctatctcttcctgtagctaatttctaagaatcatgactatatgaatcagaatcacattttagaattctacaaatctcctttttaaaggagctctttaaccgtaattcttcgaccaatttccctccaccatagttgaatataccagtaataaatacatgaatgcttcatgtaaatcactactagtgatttcaaccatctggaaccactgcaatctcagaagttaaaaagcaaaacaacacaaaactggaaaataataataataaaaaaaaaamccacaaaaaaagggagtggggggagggaggttttaaagtgaaccagataaaaatagcataacacctgaatattacataaaatgcactatcatttatcaactcaataaccacaaataaaaagaatctaactggttgattatggttataaaaagtctaaatcatttagttgcaaagaagagaatgatggaagaaaaacagagaaa

SEQ ID NO: 238590 - DNA, 436 bp, Homo sapiens
tgcctacattcataactgaatctagaccagaattgtgagatacaaaaggccaatgttgttttcaaagcaataaagcctaaggtagtaaaaactaaaaatgctgctttattctttcaatatcatgtatcttatttgattaaatagaaaaaaaggtgacaagccagtaattcaaaataagttccaagcaggagaaacaaaaacttaacctttttacacacccctgcctaaacatattttaattcccatataacagtgtgccctaaacaaccaattccttttttytagtaaatgcacaatagcaacactagttttcctttttaaggcacgtatgtcaactaagttgaaaggaaaaaaaaaaaaaaaaaaaaagcaaaattaaactgaaattttaaacagacaaaatggcttccctatagaacagatgaaatatagcagt

SEQ ID NO: 238591 - DNA, 417 bp, Homo sapiens
cttgcattctaagcaaaagccaaggtccttacaaaggtttataagccccgtcatctctatgacctcatctctaacatttttttactcattgctcaccaatacactggcctattttgctattcctaaagcatgcctgacactstcttaccttagaacctttgtttaagctctttctctgctcttccctcaaactgccctgcttccctctttgcctagacaactcccacattcataggtctttattcaagtcttcccttctcaatgagaaatatcgtggtcacactatttaatacagccaattgctattcctccctgacaatcttaaacccccttttcttgctctattcttttttcaaagcatatattatatggtaatatgctatataatttatttagttttacatttattgtttacta

SEQ ID NO: 238592 - DNA, 426 bp, Homo sapiens
cttgcattctaagcaaaagccaaggtccttacaaaggtttataagccccgtcatctctatgacctcatctctaacatttttttactcattgctcaccaatacactggcctattttgctattcctaaagcatgcctgacactgtcttaccttagaacctttgtttaagctctttctcygctcttccctcaaactgccctgcttccctctttgcctagacaactcccacattcataggtctttattcaagtcttcccttctcaatgagaaatatcgtggtcacactatttaatacagccaattgctattcctccctgacaatcttaaacccccttttcttgctctattcttttttcaaagcatatattatatggtaatatgctatataatttatttagttttacatttattgtttactatctgtctcc

SEQ ID NO: 238593 - DNA, 426 bp, Homo sapiens
cttgcattctaagcaaaagccaaggtccttacaaaggtttataagccccgtcatctctatgacctcatctctaacatttttttactcattgctcaccaatacactggcctattttgctattcctaaagcatgcctgacactgtcttaccttagaacctttgtttaagctctttctctgctcttccctcaaactgccctgcttccctcttygcctagacaactcccacattcataggtctttattcaagtcttcccttctcaatgagaaatatcgtggtcacactatttaatacagccaattgctattcctccctgacaatcttaaacccccttttcttgctctattcttttttcaaagcatatattatatggtaatatgctatataatttatttagttttacatttattgtttactatctgtctcc

SEQ ID NO: 238594 - DNA, 426 bp, Homo sapiens
cttgcattctaagcaaaagccaaggtccttacaaaggtttataagccccgtcatctctatgacctcatctctaacatttttttactcattgctcaccaatacactggcctattttgctattcctaaagcatgcctgacactgtcttaccttagaacctttgtttaagctctttctctgctcttccctcaaactgccctgcttccctctttgcctagacaactcccacattcataggtctttattcaagtcttcccttctcaatgagaaatatcgtggtcacactatttaatacagccamttgctattcctccctgacaatcttaaacccccttttcttgctctattcttttttcaaagcatatattatatggtaatatgctatataatttatttagttttacatttattgtttactatctgtctcc

SEQ ID NO: 238595 - DNA, 465 bp, Homo sapiens
ttatattgtccatacatctcaaaatagcactgcctttctttgacatcgcattgcactatgaactcctattcaatttgttaaccgccatccttcccaagtctcactcagcacgacagcttcctgagtaatacccccataatttgaatctgtgctgagcattattttctctcaggtgcatatattttcttgcatggctttgtattaaacctcatttcacatttgttcaaccaatgccctgtattatctatatcctgctggggttgtaatatgtcatcttatctcccctccttgcaagatttctgctatttgcaaatttagtcagtattgcattaaccttttcaaggtgaggaggattgcatggaagtggtgggctcaggccatatyctgatggagcacacaggacccataccccagccctgtactatcctgataaaaaccactctttgtaagccatccaagtttatc

SEQ ID NO: 238596 - DNA, 578 bp, Homo sapiens
tctgaaaaatgaaaacagaagttccagtgctggtacttcaggacaaagatgggggacagctgaaagttctggctctttagtgcaaaaatgcatttagatcttatgataaaaatgtgtaagacttacatctaaaagacagaagaaatgttaatataaaattgtgtcagaaataagacagctagataaggggccagaaccaagaaggataaaattcaaaaaacattccttgctccatcctcttttttcactgaaggactaccagatggatggtttacttttagtgttggttgtatgtcctcttcttgcactgcaaatctaacaaagctagattaagtccatgggcaggaacaccattctgattttgtcatgtcttcatcasagcaaatgaaaacagtataaatttagttttttatactgaacctcaaattttcagcaaattgtcaaatagctgttattggcttcttaggaaatactttttttttaaaaggaagctgaaaagagaaaaattcaccacgattccagatcccaatgcatgaagttgattgttgagagtagcgcagatggaaaaggacatacgt

SEQ ID NO: 238597 - DNA, 580 bp, Homo sapiens
caagctttctgatttctctccatccttgccaacaaggcaacatagcaagaccttgtctttacaaaaatttgttttttagttagcttggtgaaacagtgtgcacctgtagtcccagctgctcaggaggcttgarcccaggagatcaaggctgtagtgagctatgatcatgccactgtacttcaacccaggcaataaactctgtctccaaaaaaaaaaaaaaaaagggtacagcaaaaatatggtattataatcttatgagaccaccattatatatgctatctgtcattagccaaaaatcattatgtcattcatgactgtagttgataaaaaatatttgtcctataaatgagtgaaagcaatgatcacctattaatattcattattgtcagcacatttctaacaatttactagtgaggggggcttctggctgatgagatggggggatatggggtttgggacagaagatccagacagtctgggactcacatagacccagagcctaggggttattgctaagtccttgcagagaggaacccattattttacttgtagtggatgttgctattcctttgggggcctt

SEQ ID NO: 238598 - DNA, 561 bp, Homo sapiens
tgatttaaaattatttaaattcatgaagaaatgttaactacatgattgttcaaaggtttaaagctttgtctagtattatcccagttttatttttttaaattatatattgaaatataagtcaaaaaacaacagggaagtaaatccagggcgagcctagtagcagttgggtataagaggccatttcagggccgggtgcagtggctcactcctrtaatctcagtactttggaaggccgaggtgggcagatcatgaggtcaagagacgaagaccatcctggccaacatggtgaaaccccgtctctactaaaaatacaaaagttagctgggcgtggtggcgcacgtttgtagtcccagctactcaggaggctgaggcagaagaatcacttgaacccgggaggcggtgcagtgagtcaagatcatgccactgcactccagcctggcaacagagtgagactctgtctcaaaaaaaaaaaaaggggggccatttcagaattacttttaaatgtcttctatataattttcctttttcactaaactacagaagctatgcactctttttctg

SEQ ID NO: 238599 - DNA, 561 bp, Homo sapiens
tgatttaaaattatttaaattcatgaagaaatgttaactacatgattgttcaaaggtttaaagctttgtctagtattatcccagttttatttttttaaattatatattgaaatataagtcaaaaaacaacagggaagtaaatccagggcgagcctagtagcagttgggtataagaggccatttcagggccgggtgcagtggctcactcctataatctcagtactttggaaggccgaggtgggcagatcatgaggtcaasagacgaagaccatcctggccaacatggtgaaaccccgtctctactaaaaatacaaaagttagctgggcgtggtggcgcacgtttgtagtcccagctactcaggaggctgaggcagaagaatcacttgaacccgggaggcggtgcagtgagtcaagatcatgccactgcactccagcctggcaacagagtgagactctgtctcaaaaaaaaaaaaaggggggccatttcagaattacttttaaatgtcttctatataattttcctttttcactaaactacagaagctatgcactctttttctg

SEQ ID NO: 238600 - DNA, 420 bp, Homo sapiens
ttgtacttttcattcttttaactacttacaagttgtacctctcttaaatatgctttagtatttaaagtgggtatccctcagacaccatatagttgggtcttgctttttgggaacatgrtaacaatgatgatgattaatagctcttttacattaaattgttataagagcttacacttttacttcttcacttgaggagaggactgaagcataggcaattgattggtatgctgaataacttgtatgtagctcagtgaagctaagacaagatcctcagggctagaaatgccccagttgctcttttgtctttcccaaccacatagttgttataaaagataaggtgccaggaccttataaagcaaaagttaataggtaaaaaccaatggtaaagatttcaaaggaggttactgccgttaggaaaaa

SEQ ID NO: 238601 - DNA, 550 bp, Homo sapiens
ggcctggtgaaggtgattaaatcatgggggcagatttttcatgaatggtttakcaccatccatttggtgctgtccctgtgattgtgagtgaattttcaccagatcttgttgtttaaaagagtgtggcacctctctctcttgttcctgcttttactgtgtgacatgcctgcttccacttcgccttccaccatgagtaaaagctccgaggcctcccagaagctgagccatgttggtgtcatgcttgtatatctcacagaaccttgagtcaattaaatctcttttcttataaattacccggcctcaggtcaagaactgcctaacacaaatgaataagaagggacaggaattcaagagtcataaggtttaaaaagaactatattttcatgatagtgtaataacagaatttaatgagattgttgtcctaacatgcaatgtaaaggtgcaccgtggtgaggccaatcctggaaggaatgctgtagtaaaaggaggctgagattaaacagacagcaacagtactgtgctgaccgttaaaagggagagtattgagggt

SEQ ID NO: 238602 - DNA, 550 bp, Homo sapiens
ggcctggtgaaggtgattaaatcatgggggcagatttttcatgaatggtttagcaccatccatttggtgctgtccctgtgattgtgagtgaattttcaccagatcttgttgtttaaaagagtgtggcacctctctctcttgttcctgcttttactgtgtgacatgcctgcttccacttcgccttccaccatgagtaaaagctccgaggcctcccagaagctgagccatgttggtgtcatgcttgtatatctcacagaaccttgagtcaattaaatctcttttcttataaattaccyggcctcaggtcaagaactgcctaacacaaatgaataagaagggacaggaattcaagagtcataaggtttaaaaagaactatattttcatgatagtgtaataacagaatttaatgagattgttgtcctaacatgcaatgtaaaggtgcaccgtggtgaggccaatcctggaaggaatgctgtagtaaaaggaggctgagattaaacagacagcaacagtactgtgctgaccgttaaaagggagagtattgagggt

SEQ ID NO: 238603 - DNA, 596 bp, Homo sapiens
aggattattgtttgtcttattaaagcgctgttttttgactggcatgtacttagtatttaaaggaaattctaaacttactaaaggaagctatcatctatttttctttcacccatagaatccattataggtaagttatttattgaagaagacctagacaatgcttactttggattagttagaaatgtcttggatttccttaaatgtttctaataatggattttgagtgtcataaggctgaatgaaagcatatcctttaactttatagattagatgtcctttaggttgatggataattttaggcctcrgaaattcccctattgtagtttacatacaacttcactatccaagatttggctgtctcccaaattcatgttagtgttccagcatgaatttccagcttctactgatccatttggaagagtaaatagaaaagtaaattgattttaacttgagtgccaattcttatggattggtagtggctctttagagcattaaggtgagaaatattctgaagttacatctgggttcagccggggaagagtgtgttggaggattagtgatgttgtttgagaaagaggagattaggcagtaacatg

SEQ ID NO: 238604 - DNA, 596 bp, Homo sapiens
aggattattgtttgtcttattaaagcgctgttttttgactggcatgtacttagtatttaaaggaaattctaaacttactaaaggaagctatcatctatttttctttcacccatagaatccattataggtaagttatttattgaagaagacctagacaatgcttactttggattagttagaaatgtcttggatttccttaaatgtttctaataatggattttgagtgtcataaggctgaatgaaagcatatcctttaactttatagattagatgtcctttaggttgatggataattttaggcctcagaaattcccctattgtagtttacatacaacttcactatccaagatttggctgtctcccaaattcatgttagtgttccagcatgaatttccagcttctactgatccatttggaagagtaaatagaaaagyaaattgattttaacttgagtgccaattcttatggattggtagtggctctttagagcattaaggtgagaaatattctgaagttacatctgggttcagccggggaagagtgtgttggaggattagtgatgttgtttgagaaagaggagattaggcagtaacatg

SEQ ID NO: 238605 - DNA, 596 bp, Homo sapiens
aggattattgtttgtcttattaaagcgctgttttttgactggcatgtacttagtatttaaaggaaattctaaacttactaaaggaagctatcatctatttttctttcacccatagaatccattataggtaagttatttattgaagaagacctagacaatgcttactttggattagttagaaatgtcttggatttccttaaatgtttctaataatggattttgagtgtcataaggctgaatgaaagcatatcctttaactttatagattagatgtcctttaggttgatggataattttaggcctcagaaattcccctattgtagtttacatacaacttcactatccaagatttggctgtctcccaaattcatgttagtgttccagcatgaatttccagcttctactgatccatttggaagagtaaatagaaaagtaaattgattttaacttgagtgccaattcttatggattggtagtggctctttagagcattaaggtgagaaatattctgaagttacatctgggttcagccggggaagagtgygttggaggattagtgatgttgtttgagaaagaggagattaggcagtaacatg

SEQ ID NO: 238606 - DNA, 504 bp, Homo sapiens
tattatgccatcttaaaacatttccccttgattccagtgggtaacatgagtgccaagctttcatcccacccatgrtaatctccattattcatgaggttcttagataccctgaggctctgcaacatatccattcagaatatgggagctacttagcactgaaatgtaaatttaaattactttttttttttgacagtctcgctctgtcgccaaggctggagtgcagtggcacaatctcagctcactgcaacctccgcctcccaggttcaagtgattctcctgctgcagtctcctgagtagctgagactacaggcatgtgccaccacgcctggctaattttttgtatttttagtagagacagggttttactgtgttaaccaggatgttctttatctcctgacctggtgatccacctgcctcggcctcccaaactgctgggattacaggcataagccaccacgcccagccctaaatctacaaatattaatagaacatttggtaatattt

SEQ ID NO: 238607 - DNA, 504 bp, Homo sapiens
tattatgccatcttaaaacatttccccttgattccagtgggtaacatgagtgccaagctttcatcccacccatggtaatctccattattcatgaggttcttagataccctgaggctctgcaacatatccattcagaatatgggagctacttagcactgaaatgtaaatttaaattactttttttttttgacagtctcgctctgtcgccaaggctggagtgcagtggcacaatctcagctcactgcaacctccgcctcccaggttcaagtgattctcctgctgcagtctcctgagtagctgagactacaggcatgtgccaccaygcctggctaattttttgtatttttagtagagacagggttttactgtgttaaccaggatgttctttatctcctgacctggtgatccacctgcctcggcctcccaaactgctgggattacaggcataagccaccacgcccagccctaaatctacaaatattaatagaacatttggtaatattt

SEQ ID NO: 238608 - DNA, 564 bp, Homo sapiens
gaatttggactctccttttaccatgtacaaaaataaactcaagatagattgtcaattgaaatgtaaaatgtcacactataaagaccctagatgaaaatctaggtcatatcattctggacatagacctggacaaagaatttacaatgaagacaccaaaagcaatttcaacaaaaacaaaaatagataaatggggtctaattaaactaaagcgtttctgctctgcaaaggaaactattaacagagtagatagacaaactagagaatgagagaagatatttgcaaastatgcatctgacaacagtctaatatccagaatttataaggaacttaaacaaatcaacaagcaaaaaacaaacaaccccattaaaagtggtcaaacatgaacaggcacttctcaaaggaatacatacacatggcgtacacatggccaacaaccgtaagacaaaatgctcaaaatcacaaatcagaaatgcaattcaaaacctcaatgagataccatctcatgccagtcaggatggctattagaaagttagaaattaactgatgctagcaaggttgcagaga

SEQ ID NO: 238609 - DNA, 571 bp, Homo sapiens
gtgcggaaccaccttttaaaactatttaatagggtgtttttataatgatttgatacccatgtagccaacctgcagatgtaccctcaaacctaaaataaaagttgaaaaagagagcaaaaacttatatgtgtaattttgactgtgcatggatcagcaaccctaacctcccactcttcaagggtcaactgtgttatgatagatagaagggcactatgcaatagggagaatagtccaaccctaagattggcgaaataccaaatcaaaacgaaaaaagcttttattttattaggagcggtaaacatagctagcaggaagtacatagggctagcaagaagtttgtggggtgtggggcataagaaargggctaaacagatgacatgagagtcacattttaaaagaacatttttattctctttggtcagctgattcttggagtgtgctatcaaaagagaatgttctgcatttcagtgcttgcttgaaagcttaggtacaagacacagttcaacctgtgagaagagaatgttgactaacatttggtcaagccaaatcaatgagtaagtaatgagcaatt

SEQ ID NO: 238610 - DNA, 539 bp, Homo sapiens
aaaccccgtctctcctaaaaatacaaaaattagctgagcatggtggcgcacacctgtagtcccagttactcaggaggctgaggcaagagaatcacttgaacctaggaggcagagggtacagtgagccgagatcgtgccactgcactccagcctggcgacagagcaagaataaaaaaaaaaaaaaaaaaaaaaaaaagcaatcttcttgattttgctttaaaaagaaaataaatttaaactgcaacagtagttgttttaayattatatagtttaggaaactctaattttaaagtatacatggttcaactatgtaaataaaatgaataatactgaacacagagggtatttcctataaagagcaactacaactcagctctgaatacttttcctcaggcaagaggcctgtcacactattagagagatctgattattttatgagaagacagtaagtcagatctttaaaatgtgaaatgtcctgaaaaaaatgcattacatgtatatttctaagtgtgtatatatagatacacacatacttaacc

SEQ ID NO: 238611 - DNA, 513 bp, Homo sapiens
cgtaacagtttaattaccctaaaaaatgatcttgtgctgctcctttgtagttaacctgtttcctcatccttaatccaaaaattaactgatctaatctcaaaaactatggtttttgtaattcacaaaagtcatatatacaaaagttattttgaatagcttaatggtttttaacactagttttttttcttataaaatataatccctgttagtgtacatatcaatagtktagtgccttttatttctgaatatttcttttctaggcttcatggatctgtgctttgtgccattattaatttgtaaaattcttagaccacattattctaatattccttttgctcttctctctttctgttatccttctggaactccaagtataagtatacttgataattcagcatacaaacaattatattatatataatgttcagatgtttcaaattccttaggactatattattatagcagtcaagagagttcatatagccctagggtaaggcagaaaacatatatttt

SEQ ID NO: 238612 - DNA, 466 bp, Homo sapiens
caaagtttaaaacaatttaaaaatgatttcttcaagaaaaaagctaaactacagtacaaacacagggatttgtgatacttaaacttggcccactactgctttgctcttcccagctctgtgacagccttgaaaattagcakttttatgacaaaaatagttataaaaagcattagcttcagagccataggcaaggttagatgggttcagagttctctaaaataccttttaaatatctggcctatcacacagttcctgaaaaatctctactgagagagcactgtgattatttgacctaatccagagcttgctgaataagaaaagccttaccctcagtgtggtagctgaaaacaatcagctgcagctttttttttttttaatttccactttttaatggtgtaagatgatgaactagatatggtcaggaaacgcttctattactaagaggcaagaccaccaagaatactgg

SEQ ID NO: 238613 - DNA, 466 bp, Homo sapiens
caaagtttaaaacaatttaaaaatgatttcttcaagaaaaaagctaaactacagtacaaacacagggatttgtgatacttaaacttggcccactactgctttgctcttcccagctctgtgacagccttgaaaattagcagttttatgacaaaaatagttataaaaagcattagcttcagagccataggcaaggttagatgggttcagagttctctaaaatacctwttaaatatctggcctatcacacagttcctgaaaaatctctactgagagagcactgtgattatttgacctaatccagagcttgctgaataagaaaagccttaccctcagtgtggtagctgaaaacaatcagctgcagctttttttttttttaatttccactttttaatggtgtaagatgatgaactagatatggtcaggaaacgcttctattactaagaggcaagaccaccaagaatactgg

SEQ ID NO: 238614 - DNA, 462 bp, Homo sapiens
caaagtttaaaacaatttaaaaatgatttcttcaagaaaaaagctaaactacagtacaaacacagggatttgtgatacttaaacttggcccactactgctttgctcttcccagctctgtgacagccttgaaaattagcagttttatgacaaaaatagttataaaaagcattagcttcagagccataggcaaggttagatgggttcagagttctctaaaataccttttaaatatctggcctatcacacagttcctgaaaaatctctactgagagagcactgtgattatttgacctaatccagagcttgctgaataagaaaagccttaccctcagtgtggtagctgaaaacaatcagctgcagctttttttttttttaatttccactttttaatggtgtaagatgatsaactagatatggtcaggaaacgcttctattactaagaggcaagaccaccaagaata

SEQ ID NO: 238615 - DNA, 489 bp, Homo sapiens
cacaaattgttttgactttgacaaaaattatttagatgtcaaacagcaaagataactaaaaaaatagaaaatggatttaggaattaaataatatactaaaaaaatcactctcagattggaaagactaaattacaatggaaattaaaacttagaactgaaaagtaaattatagtacacataccacaatttatcacatgccatyaaaatttagtattaaatatttacaatatagaataaaaatcacaaactaagtcacaatttaataaataggaaattaaaaacaataagtaaaaaaaaattagagaaaataaacgaaaaggctacaaaataatgcgatagaaaacaaacgaaaaattcagtctccaaaaacctaacagtttttttgaaaaaataataaagcagaaaacttcctaccatgattgagcaagatttatgcaggatacaaggataaatataattactcagtaaaaataaagatacattcaaaat

SEQ ID NO: 238616 - DNA, 433 bp, Homo sapiens
tagttttttctaattctttgaaaaatgatgttggtagtttgataggaatagcatgaaatctgtaagttgctttgggcagtatggccatttttaaaatattgatgatttctatccataagcatggaatgttattccacttgtttttgttatctctgatttcttttgtttttagttccgtttatgtgataaattatatttattgatttccatatgttaaactaaccttgcatcccaggaataaagtttacctaaatgtggtgtatcgactttttgatgtgttactagatktgatttgctagtattttgttgagaatttttgcatctatgttcatcaaggatagtagcctgactttttttctttttatctctctcagtttttggtatctgaatgatactggtctcttagaatgagttagggaggagtccctccttc

SEQ ID NO: 238617 - DNA, 200 bp, Homo sapiens
gagttatttagaaagaaaagaaagaggttcagttggctcatggttccacatgctgtacagaatgcatggctgggaggcctcaggaaatttacagtcatggcagaaggcaaaggggcagtgagccatctcacatggaagagcagcagcaagatgsggtgacatgctacatacttctacacaaccagatgtcatgagaattc

SEQ ID NO: 238618 - DNA, 509 bp, Homo sapiens
gaataaggctgttgctgctcccctcccttcctgaaaaggtctccgtgggattgtaatggctctgagtcctaattccaaacccttgatagcgaaataaaatctttccaggggccagacggtcccctgcctcttagcctttaaaaacataagttgtttccaagttctgatgcttcactgattttgacaggrtaactcttcattcttcttgataccctgaggttgaatttagggatctattctggacactaacagttgactcattccttgacataaaagaaaatgtattatctatttggatcagagcaattaactagactaaagcgtagagatctgatccttaggacaggaagcttggggtttttacggaatagtagggaatccaaacaggcatttttctttcataaatgtattaagtcgattctgaaaattaaataaagtggcaatattaagagcatacctcatagacagagaaacaagaaagtgtttttgcttgagtagttctaatagga

SEQ ID NO: 238619 - DNA, 509 bp, Homo sapiens
gaataaggctgttgctgctcccctcccttcctgaaaaggtctccgtgggattgtaatggctctgagtcctaattccaaacccttgatagcgaaataaaatctttccaggggccagacggtcccctgcctcttagcctttaaaaacataagttgtttccaagttctgatgcttcactgattttgacaggataactcttcattcttcttgataccctgaggttgaatttagggatctattctggacactaacagttgactcattccttgacataaaagaaaatgtattatctatttggatcagagcaattaactagacwaaagcgtagagatctgatccttaggacaggaagcttggggtttttacggaatagtagggaatccaaacaggcatttttctttcataaatgtattaagtcgattctgaaaattaaataaagtggcaatattaagagcatacctcatagacagagaaacaagaaagtgtttttgcttgagtagttctaatagga

SEQ ID NO: 238620 - DNA, 509 bp, Homo sapiens
gaataaggctgttgctgctcccctcccttcctgaaaaggtctccgtgggattgtaatggctctgagtcctaattccaaacccttgatagcgaaataaaatctttccaggggccagacggtcccctgcctcttagcctttaaaaacataagttgtttccaagttctgatgcttcactgattttgacaggataactcttcattcttcttgataccctgaggttgaatttagggatctattctggacactaacagttgactcattccttgacataaaagaaaatgtattatctatttggatcagagcaattaactagactaaagcrtagagatctgatccttaggacaggaagcttggggtttttacggaatagtagggaatccaaacaggcatttttctttcataaatgtattaagtcgattctgaaaattaaataaagtggcaatattaagagcatacctcatagacagagaaacaagaaagtgtttttgcttgagtagttctaatagga

SEQ ID NO: 238621 - DNA, 415 bp, Homo sapiens
ggaatgccaatgtggcaagtagagatcctagatcctgctacawttcatatttggactcggctaaatgtggctgtcattataggctgtatggacgctcacccagaaagtatttggtaatagctgaagcacctaagcgaaaatgggttgcaattttgaaattattgttatattagtttataaatcttaaaatatccccaaattacataatacatataaaagctttgaaatcgagtcctatgttttttttacagataatattttccaacatctgtggaatctaaaatagtaactctatctcctaattttagcaaatgatcttttataattttgttttaaaatttgtgtaacagtacaccagaggatatgacagcctaatattttcagttaatatatctttccaacacagtagtcccac

SEQ ID NO: 238622 - DNA, 415 bp, Homo sapiens
ggaatgccaatgtggcaagtagagatcctagatcctgctacaattcatatttggactcggctaaatgtggctgtcattataggctgtayggacgctcacccagaaagtatttggtaatagctgaagcacctaagcgaaaatgggttgcaattttgaaattattgttatattagtttataaatcttaaaatatccccaaattacataatacatataaaagctttgaaatcgagtcctatgttttttttacagataatattttccaacatctgtggaatctaaaatagtaactctatctcctaattttagcaaatgatcttttataattttgttttaaaatttgtgtaacagtacaccagaggatatgacagcctaatattttcagttaatatatctttccaacacagtagtcccac

SEQ ID NO: 238623 - DNA, 553 bp, Homo sapiens
ttagaccctagattgcctccactattcatggaggctgaagaatcaattgtatgttaaaaaaaacaacattctattaattcattccttctcagctccaattttcccttatttaccctctctctctaccttcctccacagtttctccagcttagacttcaaagtatttccagggccgattgacttcctcactcactgcttgggttacttctgcttacatttgacaacacactttaataatgtttatcttcctcagatctggaaatccattgttcactgttggctttgtgctgatttggctactaatggtttatatttgctctgttcgtttattgtcattttgatgaaatctcaagagggaagggggaaaagttcatgtgttaggtgcaatgtctttatacattagctccaataaagatttgtgaaatttaattttggtctaacaaaactagctacacccatgaaatattatttaaaatgtatatatcatataaagcagtgctgtaaactgttaaagaatatattctrctaatgttacattttcttttaaaattgt

SEQ ID NO: 238624 - DNA, 341 bp, Homo sapiens
ttgtcagaagtatacattatgaagattttctcccactctgtggkttatctgtttactctactgactattccttttagcatgcaaaaactctttaatttaattaagtcccacctatttatcattgtttttgtcgcatttgattttgcattcttggtcatgaaatctttgtctaacccaatgtctaaaacattttttccagagttatcttctagaatttttattgtttcaggttttagatttaagtccttgatccatgttgagctgatttttgtataaggtgatagatgaggatgaagcttcattttcttacatgtggcttgccaattatcccagcaccattt

SEQ ID NO: 238625 - DNA, 411 bp, Homo sapiens
gatgatacaaataaaaatatattaatttaacagttttgatgtaatgtcaagccaatgtgacatctctaatttctttttggtttagttttctttgcagactaatctagatctcttttgaatgaggaccaacaaacttcatttccacttttatttggktttctcacataaacctttctttattgctttggagctcaaactgacataagttccccacaattctctgagcattcagattttaagatttatttgatatgtttatattggggaaaacaaattttggggtcttattggggaattactctagataatgtttttttttatctttatgagtttaaattggaggtgcttaatgagaaagacagatattttgtgattaagcaatgcaactgcataaatgatggggaaatcata

SEQ ID NO: 238626 - DNA, 580 bp, Homo sapiens
gactgcaaattcaagacttatccagagtatgcagggaaatgtaaacaatatttcattttctggtcaaatttactaatcagaattatacacacaaataaatctttcagccatgacttctcctgaatcctgggctgtaacttctacattcctaaaatgtgatccttcactgttgaccacacccctgccatacaacatctgctgggcggcccaagcaaagcaggcacattcccataagaaatgtctgtcctttgagaaaagctcagggaaggcactcatggagagccgcatcaggagcatctgttgactcagctggaggagcctgttgatctggtggagcagtggccatcccagggttccctggcatctgcggagagggtgagtgacmaccttaggtgccagcactagggcacacagaggtaagggacaaggaagcctgctgcccttggaagcagcactgtggttggaagagaggcacggctctaacagagagaactgggttgtagtccagacaccttaattcttccatgtgcctgacatgactgggagtcacccaaaattagcacgtgggcaccactctggg

SEQ ID NO: 238627 - DNA, 238 bp, Homo sapiens
gcatacaggaacttctggatgtgaataaggttgtatgttgccctggttgctgtcaatagccgccttgactgcaggatggaaaccacctgaagatgaggcccacacactaaggagagcagagctcagaaaaccccagaatcaggagctgggttcckgatcacacggaatctgaggtttaacttacctgtggacctttgaattatgtgaactgctggaccatattttattcttaagctat

SEQ ID NO: 238628 - DNA, 476 bp, Homo sapiens
cactaatcaaaagaaagcagtagtagatatacagtcatgtgccacctggtgacattttggtcaatgatgaaccacatatacaacagtagcctcataagattataataccttgtatttactgtaccttttctatgtttagatacacaaataccattttgttataactgcccacaatatttagtatgtgaacatgctgtacaggtttatagcctgagagcaatagaccataccatctaggtttgtgtwcaccctgtgatatttgcacaatgataaaattgcctaatgatgcattttttgaaacattttttccatcattaagtgacacatgactgtaataatttttgacagagcaggcttcaaagcaagagaagttatcagagataaggaggggcattacataaaggcaaaacagtcaattctccaagatgttacaatctttaacgcgtatctgcctaacgcatttcgagcatcaaact

SEQ ID NO: 238629 - DNA, 476 bp, Homo sapiens
cactaatcaaaagaaagcagtagtagatatacagtcatgtgccacctggtgacattttggtcaatgatgaaccacatatacaacagtagcctcataagattataataccttgtatttactgtaccttttctatgtttagatacacaaataccattttgttataactgcccacaatatttagtatgtgaacatgctgtacaggtttatagcctgagagcaatagaccataccatctaggtttgtgtacaccctgtgatatttgcacaatgataaaattgcctaatgatgcattttttgaaacattttttccatcaytaagtgacacatgactgtaataatttttgacagagcaggcttcaaagcaagagaagttatcagagataaggaggggcattacataaaggcaaaacagtcaattctccaagatgttacaatctttaacgcgtatctgcctaacgcatttcgagcatcaaact

SEQ ID NO: 238630 - DNA, 476 bp, Homo sapiens
cactaatcaaaagaaagcagtagtagatatacagtcatgtgccacctggtgacattttggtcaatgatgaaccacatatacaacagtagcctcataagattataataccttgtatttactgtaccttttctatgtttagatacacaaataccattttgttataactgcccacaatatttagtatgtgaacatgctgtacaggtttatagcctgagagcaatagaccataccatctaggtttgtgtacaccctgtgatatttgcacaatgataaaattgcctaatgatgcattttttgaaacattttttccatcattaagtgacacatgactgtaataatttttgacagagcaggcttcaaagcaagagaagttatcagagataaggaggggcrttacataaaggcaaaacagtcaattctccaagatgttacaatctttaacgcgtatctgcctaacgcatttcgagcatcaaact

SEQ ID NO: 238631 - DNA, 586 bp, Homo sapiens
atctatttttaaaattgaatcaataattaataagcttccaaaacagaaagcaccaggcccagatggagtcagtggtgaattctaccaaacatttaaggaagaatttctatcaattctgtacattttccttcagaagatagcagaatattctctaactctctgatacggtttggctgtgtttccccacccaaatttcatctcgaattgttatccccacatgctgagagagggacctggtgggaaatgattggatcatggggacagtttcccccatgctgttctcatgatagagagttctcacgagaccttatggtttaaaagtcgcagtttcccctgctttctctctctctgtcttgctgccatgtaagatgtgccttgcttcccctttgcctttcaccatgattgtaagttttctgagacctcccagccatgcagaactgtgagtcaattaaaactctttcctttataaattacccagtcttgggtatttcttagtagccatgaaaaaartggactaatacactctctatgatgctggcattgtcttactatcaaaataagacaaagacattacaagaaaagaaaa

SEQ ID NO: 238632 - DNA, 587 bp, Homo sapiens
ttaccaatctcataaaatcatttccatttcaactggaaataacataattttgattttaagaagattttaaaaatattttataattaatttttttacrgtgctttatgcttattttcagagtagaatttctagtgagaagaggactataatcttaactgaactactatttcagttgcttaaaatattcaataagttccctttaagaaagaaaaattatttaaggttttagacactaaaattgttgaagtgctctttttctcttgaatgaatatatttaaggtttcagatctttgtagtagtaaaaagatgatttatcgccaagaaacaaaccatggaagccaatgttgggggtggcagagggagaggtggaggactgagggagctctgttttcatttctttttattacctgtgaaatgctgttcatcgttagtagccatcactctaggtcttaaatagtttggcccaacagcatttgaaaccctataacctcaatttttaagtggtgtgctttcctggcctagttgggctgtgacattatttcctctgccttctgagttaagaaaattacttttagcaggtcatagta

SEQ ID NO: 238633 - DNA, 587 bp, Homo sapiens
ttaccaatctcataaaatcatttccatttcaactggaaataacataattttgattttaagaagattttaaaaatattttataattaatttttttacggtgctttatgcttattttcagagtagaatttctagtgagaagaggactataatcttaactgaactactayttcagttgcttaaaatattcaataagttccctttaagaaagaaaaattatttaaggttttagacactaaaattgttgaagtgctctttttctcttgaatgaatatatttaaggtttcagatctttgtagtagtaaaaagatgatttatcgccaagaaacaaaccatggaagccaatgttgggggtggcagagggagaggtggaggactgagggagctctgttttcatttctttttattacctgtgaaatgctgttcatcgttagtagccatcactctaggtcttaaatagtttggcccaacagcatttgaaaccctataacctcaatttttaagtggtgtgctttcctggcctagttgggctgtgacattatttcctctgccttctgagttaagaaaattacttttagcaggtcatagta

SEQ ID NO: 238634 - DNA, 587 bp, Homo sapiens
ttaccaatctcataaaatcatttccatttcaactggaaataacataattttgattttaagaagattttaaaaatattttataattaatttttttacggtgctttatgcttattttcagagtagaatttctagtgagaagaggactataatcttaactgaactactatttcagttgcttaaratattcaataagttccctttaagaaagaaaaattatttaaggttttagacactaaaattgttgaagtgctctttttctcttgaatgaatatatttaaggtttcagatctttgtagtagtaaaaagatgatttatcgccaagaaacaaaccatggaagccaatgttgggggtggcagagggagaggtggaggactgagggagctctgttttcatttctttttattacctgtgaaatgctgttcatcgttagtagccatcactctaggtcttaaatagtttggcccaacagcatttgaaaccctataacctcaatttttaagtggtgtgctttcctggcctagttgggctgtgacattatttcctctgccttctgagttaagaaaattacttttagcaggtcatagta

SEQ ID NO: 238635 - DNA, 459 bp, Homo sapiens
tggctaccaagttagaaaaaagatttccagcctgttatgaggsctaaattcaaaatgaactttggaacctgaattcattttaagaaaaaaaaaaaaaaaggaaattcagaaaggatcaggaatatgactaaaattgaaaagattaaccagattaagtgatggcaaggatagggagtaactggaaccctgttctactggtggaagtaaattggttcgaccattttataaaaatgttttgctacacctgctaactctaaacaaacatatatcttcacgctatgattcagcagctccacttgaaggtcaaaagaagaatgtttatgtatgccaaaaacatgtacaagaatgttcacagcagcttggtaacgctagaaagaacccaaatatctatcaccagtagaatgggtaatttatggtattttcatataatagaattctacatagcaattagaatgaatg

SEQ ID NO: 238636 - DNA, 585 bp, Homo sapiens
  misc_feature (1)...(585): n = A,T,C or G
ttatttgaatggcaattggaggaaaagcctctttacagagacccttgacacaaataaaaacactgaagaattatgattgagtcaataagatgaaaaagagatgaaaatatagtcaatacaaattttcttcatttgtatggtttccntcttttcgggcgcaaaaccacaaaagcctcagagataaaaaaaaggaaatcaaaccatctttgacttgccgaagtaaaattaatgtatctgaaggcagaatccaggcacatataaatttagcaaattctacagttggatttgatgcacactaaacttggtaaatgactttcatctaataaattaggaaattaaaaaagagagagatgagtwaattattttctaaggtcacatagatagtaaacagcaatatagaaatatgaacccaggagatcaaattcttatctcagcatgatttcacactagtttatttttttctctttaaaaacaaaatgaatgagttcaccttttagatgatatatttgaaaatttccctgttgattaaaacagacttttaaaaatagtgaaatatactacgtaatataaaatcaaccctataat

SEQ ID NO: 238637 - DNA, 606 bp, Homo sapiens
atgggcagtcctaattgactacaaagaaatctgtaaaaacaaatatcgtgattaggacctattgatttatgcaggtggctttattttaatcaattatccactagttacggagttatttgatgtgtgtttttatcttgtacatatgtttcctgagttgtctcaggccccatagcttcagtaaaactaagataaatagctgagcataaattctcaagtctgttcattgctccacggtatctrtctttttactattatgtttgtttaaaggcaggttagaaatgcttacctgtcccagaggaagagtaatgtgcttggtgtttaaaatacccagctggttgggattgagagcgactcatgatattctttgcaggacttcctaattaaaggaaggcggaagcaactttgtcccagaataatgaaaatcaaatggatgccatcccgtttacaccctggaataacacaaggaagggccgacttacaatgtccagaatgaccttgaggggccaccttaccctaatattgggctctccctgctatgtcataaacctaaatttttatgaaatgaaaatgcttccagaatgtggtgtccagctctatgcaaaatga

SEQ ID NO: 238638 - DNA, 606 bp, Homo sapiens
atgggcagtcctaattgactacaaagaaatctgtaaaaacaaatatcgtgattaggacctattgatttatgcaggtggctttattttaatcaattatccactagttacggagttatttgatgtgtgtttttatcttgtacatatgtttcctgagttgtctcaggccccatagcttcagtaaaactaagataaatagctgagcataaattctcaagtctgttcattgctccacggtatctatctttttactattatgtttgtttaaaggcaggttagaaatgcttacctgtcccagaggaagagtaatgtgcttggtgtttaaaatacccagctggttgggattgagagygactcatgatattctttgcaggacttcctaattaaaggaaggcggaagcaactttgtcccagaataatgaaaatcaaatggatgccatcccgtttacaccctggaataacacaaggaagggccgacttacaatgtccagaatgaccttgaggggccaccttaccctaatattgggctctccctgctatgtcataaacctaaatttttatgaaatgaaaatgcttccagaatgtggtgtccagctctatgcaaaatga

SEQ ID NO: 238639 - DNA, 606 bp, Homo sapiens
atgggcagtcctaattgactacaaagaaatctgtaaaaacaaatatcgtgattaggacctattgatttatgcaggtggctttattttaatcaattatccactagttacggagttatttgatgtgtgtttttatcttgtacatatgtttcctgagttgtctcaggccccatagcttcagtaaaactaagataaatagctgagcataaattctcaagtctgttcattgctccacggtatctatctttttactattatgtttgtttaaaggcaggttagaaatgcttacctgtcccagaggaagagtaatgtgcttggtgtttaaaatacccagctggttgggattgagagcgactcatgatattctttgcaggacttcctaattaaaggaaggyggaagcaactttgtcccagaataatgaaaatcaaatggatgccatcccgtttacaccctggaataacacaaggaagggccgacttacaatgtccagaatgaccttgaggggccaccttaccctaatattgggctctccctgctatgtcataaacctaaatttttatgaaatgaaaatgcttccagaatgtggtgtccagctctatgcaaaatga

SEQ ID NO: 238640 - DNA, 604 bp, Homo sapiens
tgttcactgcagctattcccactgcaaattgcactgggactgcttgcacttttgactttgacatgctttttataggggtacatgagtaatttgatctgtaaaagaaagagaagattccacctcctgaaggaaaagtactaattagcagcaaaatctaactgcttttctccgacggggtctctctcttgctatgtttggcttaatgcaaactcctgccatgctgagtttctgcaytggattgtccaatacatcctgtttaattttaatttcctttagcagagttgatattcaattagccacaccaatgaagggatgcattagcacacataataatctcttaactttgcgtagagcattagcatttacaaagcactttcacatttgctcttcataacctctgtatttagcaacgaatataagtcccattttacagatggagaaacttaagttcaaagacattaacgatatgtctgaggtcgcatagtaagctacaggggatagagaacccagattccatagtttttaatttgttgctttttttctattatgccaagaaatggtatgattaggctcatagcaacaccctccttacgcctacatccac

SEQ ID NO: 238641 - DNA, 525 bp, Homo sapiens
gttgttcattaaattacctaatctgaggtattttgttatagcagcctgaacagtctaagacagcttctaatcacatgtgactatttgagcatttgaaatgtggcttatgtgactgaggaactaactttttaatctaaaaaaataaaaagtaatttatatttaaaacrgatactcaattcagttgttggaaaagtttatagcataattggaacaacctgggtatgaaaattattttttcaactgtaaatttcactaattctaaatataagccaagtatttctgataaaaagttagtgtctggatcaaatgtgctataagtgtaaaatatacacagtatttgaaagatagtacaaaaaaagttaaacatatcacaaatgattgtctatattgattaaacattgaaatactattctggatatattgggttaaacaaaatatattattcaaaataacttcatctggtatttttaaatgtggcttctgcaaattttgaaattataaatgtggctcacatattttcacagg

SEQ ID NO: 238642 - DNA, 556 bp, Homo sapiens
cttctgtttggctcccttgcctgtgcagcttttgttatcttatggtgtctctgagagccgaacaggccaaagtagtcctggacaaggtggtcctagctgagatgatccaggctttctcatcccggaagwactctaagcacatggatggggcctgggacaatgtgcagaatgaataacctgggcaagatgcttcaattcatgtttctatgcagatggagcaggaggttagcagagcctgtgccttcagctgcgatgggaaggtgttaagttgttctgcttggtcaagtcctatgaagaagcccaggatcccaagattaccagcctgttaaacaagctgatggtgctgttcctgccacccatgacgctgccctcaaggcctgcttctgggggtagcacagcagctcctgagggtttgccatccttggtgccactgcccagggagagaagacctttgtctttcagatgataataaatgggcctgtgactaatgggcaaaacctcacaaagaaaatctctgattgcatgattggaatggtcagggatcaatgtacagcac

SEQ ID NO: 238643 - DNA, 493 bp, Homo sapiens
cattttgttagccaggttttgggaaactgggcaggagaatagtgggaaaatggggatctattttctgattcctcatttcctgaaggggagttgcatatggtttcttggcttgtaagaagaaaagaattttagtctgaccccatttgagaatgggaactaagtggaagtcaggagcccactgagttatcaagcagtttgactttatgraagttttatgtgtgctgtgcagtttgtttcatttttcctagtgtatccattgatgtgtctaccagttcttttcgcagaatcacattgtttcattttggcttcaacacaggcaagtcccagggcagaatacattaaaaagatcgtaattcccttttcgagaatgggtttacagtgttattcttgcatctgtagcttgaaaataattctagtcagtgaaagaccggaggattaaatgggccccaaaccaaatataagaactataattctctatggtatgcacatgcta

SEQ ID NO: 238644 - DNA, 604 bp, Homo sapiens
gtacgtggttcccatgatcttcccttgctgttccctccaatcttgcccctccccctgccccttgcccatgactctgcagcaacacataggacctctctctgtccctcaagcatgccaaatatgtctcagccctggggtcttcttctccctcctcacctggctggcttcttatcctcatcccactctcagctcaggagaggcccttgacacccctctggtctcctgtcacccctccatatgcattgctcagttctattttcatcaaagcagtcagcgccatctgcaattaacacaatattttatttacttgtgtaaataagtctgggtcccccgaggaggtaggctccaaaagagcaggaccctcactgttcacctgtcttgtccacttcgtgtcctcagcakctgggatgctgtctggtaacacaatggaaatgctgccaaagaatgagttctttttccagaagtggaaacggcatgatcaaagccatccacatcctcttgctgctgggccaggatcagcgtccctgctggagtgagctttgcacctgttgtacaaagttagctggcccagccaggaggctcatcagggggtgtgcctgagttt

SEQ ID NO: 238645 - DNA, 600 bp, Homo sapiens
tttaggaaggccaggaatggattagaggggcaggctggagacagggagaccagttaggaacctggcccagctgtctctgtgggaaggaaagaagaggaggaactgagtcccarcgatctgttttgggcaaccgggtgaatggatgcccttccctgaccggggaagtagctgttgagaacgtgttgagagatcccaccaggaagggtgcctaaacccaggtaaagaccccaaccaaccccagagtccgtgaactcagcccatcggtgctgttatgtggaaccaagggggcagccgtctgggttagcaaaggcacaacctgcagggctagggttgaggggaggtgagggaggtgccaaggtgcagaattgaaggaggctcctctcccaggtctcagggtcatgcaagggcaggctggtcctgggagtgatgcctccttagagttgacatcctcgcgcctcactcaccctaatcttggcccgaccacagaatatgtcaggcctgagacattcttcccagggatcctgtgagcacagtctcctacctgctgggctgaaactctccaggaccccctgtctgatgggatggtggacactgacttgg

SEQ ID NO: 238646 - DNA, 586 bp, Homo sapiens
ttcaatttgaggtaacaaatgagggtgtgggaagcgcatctggaagaaagggcccagtgttaggatttggtaatagagacagttctscacatgtgggaagagactaaaaccagattgtagtagctggagagtacaagcatcagatgtttgttcatttagtcaatagatagttattgatcaacttccactgacaagaatttctgctctcatggaactcacatatctagtggatatgctcactgtagttttagctagaaggaaagttacaggtttatgggaagtgtttagtttagttttttttttttttgagacagaatctagctctgtcgcccaggctggagtgcagtggcatgatctcagctcactgcaacctccacctcccgggtccaagtgattctcctgcctcagcctcccaagtagctaggactacaggcgtgtgccaccatgcccaactaattttttgtatttttagtaaagacagggtttcaccgtgttagtcaggatggtctcgaactcctgaccttgtgatccacccgcctcagcctcccaaagtgctgagattacaggtgtgagccaccatgctcag

SEQ ID NO: 238647 - DNA, 387 bp, Homo sapiens
gtgaataatcatatttgcaaatacagaatccacaaataatgaggatcaactgtactgggagtgtagttgctgggtcatatggtagttctatgttcaatattttgaggaattaccaagctatttttttttttttttgcagaagctaaagcgtgttacattcccgctagcagtgtttaaggattccaatttctccatgtccttgacaacacttgttattttctgtttgtttgaaacagaatggkggatgtgaagtggtatctaataagataccacttataagtggtttcgatttgtatttccctaaatcactaatgacgttgaacatcttttcatgtgcatattggccatttgtatttcttctttagagatgtgtctattcaaacactt

SEQ ID NO: 238648 - DNA, 245 bp, Homo sapiens
aaatttcttggaagtgactagactgagaaacaggggtacagaaactggcccctctacagtttgtaacgtaggcytctcatgcgtttcttttccagttttctcctcactgttttcgcacaagaaaggactgcataaaaagatgtcgagccatgtagttcacaaggaggaacacatcgcttctacagctggatttttaaaagacactaacttaatggttttagttgtattattttaattacggcaac

SEQ ID NO: 238649 - DNA, 577 bp, Homo sapiens
cagtagaaatgatgtgtcaagtacccatataaccattctgtttttcacttgtaggtcagtaatcaatgaattacacgagctagtcaacactttattttaaaataggctttctattagatgattttgccaactataggctaatgtgagtgttttgaacatttttaagatagactaggtgtattcaatgaatttttgacatgttattttcaacttaaaatgggtttatcaggtgataacccaaatgtaagttgaggaacatttgtaatttccagtaaagctgaggaaacatatgcccagcaattccacttctgggtatacaacttcaaaaaaaattaacaagtatacaaataattgcattgttcaatgtgaccttgtattaatgtaaaactgggaacaatagcaatatcatccatagaggattaaattgtggtataarcattcaatgaaactgatacatcaattaaaatgaatgaatcattatggattaatctcaaaagcataatttaagtgattaagaaaacaagttaaaggttatgggcagtatataattcataaaattggtaaaaatccacacaat

SEQ ID NO: 238650 - DNA, 482 bp, Homo sapiens
attctaaacatatcctgttggaattaaatcttcagtcctaaaaataaagcttgcagtgctcagatgaaagaaaattaaaacattttatttaaaaaaatacgacactgaaaatcataatctgaagtaactgtaccagtgtgaataggaatayttttctgtctacaggaggcatatattatattcaagatcagatttaaatttatagactacagaaactctggatcaaaaaatactagtaacatatttttgtcataaataaagagactggatctcagaggaaactaatagtaagaccacatgcttattttttatgacttgacattgaaaaaatctgccttaataaaggccacccaaagaagtccgctgggtgatgtgtccgatggcagcatctccaatgaattaccctttatttcttactctagtccaaagatagagaattaggagtaagcatcactggtaccaacattgcaacaggaaggcag

SEQ ID NO: 238651 - DNA, 529 bp, Homo sapiens
gaaagatgtgggaaccttgaatccctkttgtgactggagtaagtggctgaggtgcatgatggcagtggttatgcacatgttctctggcgaggacttcagagctagaagagcagaagtggcctctctgataccatgaagggctctatgactcatgtgactccttatgtccaggaggccaggaggagcaggaagctctctaggtgactcaggctgctacccactccccactactcaagaaaccttagagtgtgtgatctctttgaagcagaccaggtatagtatgtgtgctatggtaaaccctaataaaatgattacagtggtgccactggacttgaaaggaaaacattaagacttcttcaatgcatcgctaccatcctttggagaaacagttcttgctcatgactaggctctgttagaaacggaattactgctcaagagatacctggtgtctgtgtaaactgagctgtgcttcatgcagtgggaacttctccatctgctgagcgttaagtcgggcatgcttagtgttaag

SEQ ID NO: 238652 - DNA, 633 bp, Homo sapiens
aagcatccaaggtctccagagtcagttcgtctgccaagtgtgttggtattggcaaggagttttgctacagctagggcatctaacaacactcaacacatttcttcagttactctgcagagaygaaattagggctccatctcaggccaagaaaataatttcccacctgtacataataaaggctgggcttgtacattcaactacatagtgttaggaaaaaatcacaggctacattgacttaataaaataaatgtggaatatgggaaacaaatcagggagtaattttggcagcttaaaatcttcagttgtgcttgctggctcttccctcatttaaatgacatagaaagcaacctcttaaaaagttctcactgcccaaaaaatattatcaaaagaatgttgactcttgctacatggcttatatttcagagctgctcgttttgaggaggtcaaaggggaagagctacagaggaattcttattttcagttttatttattttatttaacttttaaagttcaaagccataaaataattttaccacctgaatgttctcttcaacgctcctcttcaatgcaatgcaaactgaaaattagaacaatttactttagttttagttaaattctcctacattcttgttg

SEQ ID NO: 238653 - DNA, 633 bp, Homo sapiens
aagcatccaaggtctccagagtcagttcgtctgccaagtgtgttggtattggcaaggagttttgctacagctagggcatctaacaacactcaacacatttcttcagttactctgcagagatgaaattagggctccatctcaggccaagaaaataatttcccacctgtacataataaaggctgggcttgtacattcaactacatagtgttaggaaaaaatcacaggctacattgacttaataaaataaatgtggaatatgggaaacaaatcagggagtaattttggcagcttaaaatcttcagttgtgcttgctggctcttccctcatttaaatgacatagaaagcaacctcttaaaaagttctcactgcccaaaaaatattatcaaaagaatgttgactcttgctacatggcttatatttcagagctgctcgttttgaggaggtcaaaggggaagagctacagaggaattcttattttcagttttatttattttatwtaacttttaaagttcaaagccataaaataattttaccacctgaatgttctcttcaacgctcctcttcaatgcaatgcaaactgaaaattagaacaatttactttagttttagttaaattctcctacattcttgttg

SEQ ID NO: 238654 - DNA, 492 bp, Homo sapiens
acaactctaaagatacttgttatcctcaccatggaacaggaatgcataatgcctcgctgcctgcatgtggctggcagggccagcttcgggccctacgcccatctgacttcaaagctagggctttgcccagagcctcacacacctcccgatgacctggcagggctctcacaggccgctggctgacaccaacaccatgcggcagtgcaggcccaagcagcagcacccagggacactcargacagggcttcctgagttatttctgtcttggggaccctccttggaggacaaacctttggtggcccaaccctgcgtagcactctggcacttccgggatggagtgctcagatgctctgcatctcagcagtcttcagtccccttccccagaccttgcctgggctcctgtgaggcacagtgccgggcccttgttaagatgcagtgagtgggctgcagatgctgcctggagatggggacaactgagcgaagcaggccgag

SEQ ID NO: 238655 - DNA, 534 bp, Homo sapiens
ggtggttatgtatcttagggttgatcttctcacggagtatcttactggacttctctgaatttcctggatttgaatgttggtctgtcttgtttggttgaggaagttctcctggataatatcctgaagttaagttttctgacttggctccattttccctcttttaggtaccccaatcagtcataggtttggtctttttacataatcccatagttctcaaagtttttgtttgttcgttttcattcttttttgtctactctgtctgcctgtcttatttcagcaaaatagtcttcaagctctgaaaktctttcctctgcttggtctattcagttattgctgcttgtggttgcactgtgaagtcctcatgctgtgtttttcagctccatcaggtcatttatgtttctctctaaaatgattattctggttaacagctcctgtaatgttttatcgtggttcttagcttctttgcattgcattagagcatgctcctttacctcagcaaagtttataattacccaccttctgaatcctacttct

SEQ ID NO: 238656 - DNA, 384 bp, Homo sapiens
atgtgaaatctgactgaaattcagggagcttctaccttagtaaaatttctaggagtccagtggtgtggggcctattgagatattccttctaagatgaaggataagttgctctatttggcccctcctacaaccaagaaagagacacaactcctaatgggcctatttggattttggaggcaacacattcctcatttgggtgtgttacttcagcccattgatmgagtgacctgaaagactgccagttttgagtgtggtccagaacgggagaaagctctgcaacaggtccaggctgctgtgcaggctgctgggcaagctgctctgccacttgagccatatgacccagcagatccaatggtgcttgcagtgtcagtggaagataggaat

SEQ ID NO: 238657 - DNA, 559 bp, Homo sapiens
ctattatttaactggacacaaaattccctttcragctttggctagcagtggtaaccagggctgaatttatagagattccagtatacaagtaaaaagggtatatgtacataatagctagaaagacaaagagttcatcttatttgttcagtcacttaacttcaatgtttgtggctaaatcagataaatagacaaccagaatattgttcaggtttgcaggaaaaagcaacaatgaaatcaatactctactggggcaaaattactcttatttagtcctgtaatttcatctcttccaactgggccacaaatcatccaacacaagaattcaaaaggatgagacaaaccaatgattctccagaattaccaaaaccacagttcttatgtggtaaatatcacctccacataaaaaaagtttgttaatcattaaagaggaagcctatcttttatgtgggtgtggaaattctagggaagaccagcaagccattttgtaagtgtctgactattcaaggttaccctgccttgaagtgataaatcccgcatggcaggaggggagaagatttcc

SEQ ID NO: 238658 - DNA, 559 bp, Homo sapiens
ctattatttaactggacacaaaattccctttcaagctttggctagcagtggtaaccagggctgaatttatagagattccagtatacaagtaaaaagggtatatgtacataatagctagaaagacaaagagttcatcttatttgttcagtcacttaacttcaatgtttgtggctaaatcagataaatagacaaccagaatattgttcaggtttgcaggaaaaagcaacaatgaaatcaatactctactggggcaaaattactcttatttagtcctgtaatttcatctcttccaactgggccacaaatcatccaacacaagaattcaaaaggatgagacaaaccaatgattctccagaattaccaaaaccacagttcttatgtggtaaatatcacctccacataaaaaaagtttgttaatcattaaaraggaagcctatcttttatgtgggtgtggaaattctagggaagaccagcaagccattttgtaagtgtctgactattcaaggttaccctgccttgaagtgataaatcccgcatggcaggaggggagaagatttcc

SEQ ID NO: 238659 - DNA, 576 bp, Homo sapiens
ccaaaattccatacaaaagattaacaaaaccaaaaataaatttttgaaagaataaacagaatggatagactgctagattaacaaagaaaaaaaaaaagaggggagatccaaataaacatagtcagaaattacaaggtgacattacaaccaatttcacagaaatataaaagatccttggagactattayaaatacatctatgctcacaaactaggaaatctagagggaatgaataaattgctagactcacctctccagattgaactaggaaaaaattgaaaccctgaacagaccaataatgagttctgaaattaaatcagtaataaaaacttaccaataaaaatttctggaccagatggattgacagctaaattctattagatatagaagaagtggtaccaatcctactgaaactattccaaaaaattgagtagggaagaatccttcctaactcattccatgaatccagagtcatcctaataccaaaatcaggtagagatgcaatgaaaaaaaaagaacatttcaggccaaaatccctaatgaacacaaaagcaaaaattctcaacaaagtacaagc

SEQ ID NO: 238660 - DNA, 576 bp, Homo sapiens
ccaaaattccatacaaaagattaacaaaaccaaaaataaatttttgaaagaataaacagaatggatagactgctagattaacaaagaaaaaaaaaaagaggggagatccaaataaacatagtcagaaattacaaggtgacattacaaccaatttcacagaaatataaaagatccttggagactattacaaatacatctatgctcacaaactaggaaatctagagggaatgaataaattgctagaytcacctctccagattgaactaggaaaaaattgaaaccctgaacagaccaataatgagttctgaaattaaatcagtaataaaaacttaccaataaaaatttctggaccagatggattgacagctaaattctattagatatagaagaagtggtaccaatcctactgaaactattccaaaaaattgagtagggaagaatccttcctaactcattccatgaatccagagtcatcctaataccaaaatcaggtagagatgcaatgaaaaaaaaagaacatttcaggccaaaatccctaatgaacacaaaagcaaaaattctcaacaaagtacaagc

SEQ ID NO: 238661 - DNA, 586 bp, Homo sapiens
tttctaacagccctgaaatatgggtatttgctcttataacctcttgttaaggaagtagtgctgagagctgttgagtagaacagaactcagctacggttgtaaaasaaaacattgctaatatctgcaagctcagagaaatatgctaagaatttcttcaaacggattttaatctggaattttacaaataaattttagacacggcatgtttagtttgaaatactatgatagttttaataaaatgaaacaatggttagtcatccatactgagaaagttattttttaattgagatttaactgttagatgtcttttgaaaaataaaagcactgtgcataatcaactcatcatatgaatactgtttcaatgttaaaaatatttttctgacaaaattctactgtatctaagctttcaaatttattgacaggttattattttgaatcttatcatgtttttaatctccacactacaataccaccttttaaactagcattttattttctttttgccaactctattattttttcctgagaaatcttctcagatgtttattattttcaaacaaacaacttttaggtttgatgatttcct

SEQ ID NO: 238662 - DNA, 548 bp, Homo sapiens
agcctcaaaatagaatatgttgtttctgcctcttcctattccttttcttcctcctcctcactttctgcccccaaggctgtggcatatacttagacaaacaggtggtctggaaatrtttgttcttaccagactgctatgttgagaatctacatatgagtaaccagacccaagacaattagtaggacccagctttccctgagtccttagttaaccaagctgtgggttcgtgaatactattctgaggatgtccatctggtgcaggaagcagaggaaaaggcaggcagctgaggctgagaaataaaaaccataaaagactaacagttatcaagcatttccaatgcataggtactatcatgacaaattctttctaaatttctatgcaatgattattaatccttttctcacttttatgaatgagaaaattgggacgcagagaagttaaataacttgtttacgctcccacatgtagtaagtggtgaacctagaacctgaacccagtggtctaaattcagccctcaggtgcatgctacccaagaggtaaagaaacc

SEQ ID NO: 238663 - DNA, 381 bp, Homo sapiens
taatgagaagaactcctgtcctagaaccatactctggcttctgcttttcctttgtcatagctaagtccactctactgaactagaacactgtgcatgaatgcgttaagtgcctaccatctgctttatgctctgtagggctctggggagggtaagatgggttattgtggatgtgttcctgataaacagacatgaatacttctcccttggcagcctgagacatctgccgaatttgggagcatgactatccttgttcagcatagccacsggctcagtttactttctgtcactatgctattgtttcttctgtcccttggtaaggcctggggagatgagcatcccttcctctgatgtagagccagtggcccccagtaccagtgaggg

SEQ ID NO: 238664 - DNA, 428 bp, Homo sapiens
gattaaaaaaggaaaaagaagaacctgacatggtctgataaacatgactggttaacacatctgattaaataaataacaccacaagctttgaaatttgccarttgccattatatactgaagccttagaaagtgtccaattattcttatctccactaaagtttccacttgcttccacatcttcctctaattaaagcgtgttttcatcaataaataatatgcagagtagaaaatgttattgtattatttttgttgttattatctattttgttgaaagcaagcatagaatctcataaacacattatgtgttaaggagattttgagaagccataaacataatttatattcttatttctctgtggaacaggctctaacttctaaaatatatcaacttataagtgacctttggaaactatccatttataagttta

SEQ ID NO: 238665 - DNA, 428 bp, Homo sapiens
gattaaaaaaggaaaaagaagaacctgacatggtctgataaacatgactggttaacacatctgattaaataaataacaccacaagctttgaaatttgccaattgccattatatactgaagccttagaaagtgtccaattattcttatctccactaaagtttccacttgcttccacatcttcctctaattaaarcgtgttttcatcaataaataatatgcagagtagaaaatgttattgtattatttttgttgttattatctattttgttgaaagcaagcatagaatctcataaacacattatgtgttaaggagattttgagaagccataaacataatttatattcttatttctctgtggaacaggctctaacttctaaaatatatcaacttataagtgacctttggaaactatccatttataagttta

SEQ ID NO: 238666 - DNA, 507 bp, Homo sapiens
cccactctgtgtcagtcgtgtgtttggtttaattctgcaacttaagtgttacagtgactggaacagcccagatcaaattccagtcctgtaggctttggctggatgagtgtgctagatcagtgtttctcatactttaaagtgcatatgaattacctaagatgttgccagaatgcagatgctggttcagcaagtctggggtggagcccaagattctgcatttccaaggagcatccaggtgatgctgaatgctatcagtttttggaccacatttccagaactgggctataaactcaggcctttcaacagttctaagtgtttctgattctgagcaccattaaaattgtagactctctgggacaggagatgttacaccagatggcctcctgtaatgctgaatgcttcaatgcaaagttaagttgggccagtttcygattccttttcctcataattcattagggttactccaaaaaatttattgtgctgtgaccactagctttgtttacattt

SEQ ID NO: 238667 - DNA, 577 bp, Homo sapiens
aatcccactactctgtttttaaagagtcttagcacatttatgctttcgactgaaagatagaggcaggctggcttggtggtttgttttccttgggaagcagtcacatataattttttataataacatagcctggaataccaattcccatgccayactgtcatcctgcatgtcagcactttgagtattgaatcctgtgcagaaagccctcatccgcacttgtccgagaatgtttcctctgggttaaaacccgcacataaaggtttcagcagcagcagcagcagctgtttgggccactttctggagttatgtgagtactgtgggttcagttatatttccttggaacataaaaataggaggttttggtttgttacctttgaaacctcagggaaatcaaaaccagagctcattttggatgctgaagcgattaatccatactgccctctgagctgaagtaatgatttgatgcactggaatagtttctgcagcaacgttctgtctctcttctgtttgtaagtgatcagaaacagcatttaaaaaaatcccacagtaggacacagagtattcttatatataataa

SEQ ID NO: 238668 - DNA, 333 bp, Homo sapiens
ccaggttttcacttacaagtgaaagctaaatattgagtacacgtggaaacaaagagggtcacaacagacactgggcctacttgagggtggagaatgggaggaggatgagggttgaaaaactgcctatcaggtaccatgctcactacctggtgacaaaagcatttgtayaacaaaccccagtgacatacaatttacccatgtaacaaacctacacatatacccctcaacctaaaagttgaaaaggaagaaaaaacccaaacattattttcaatgcacagaatttgttcaccaaaataaattgtcacattcaggtataaggccaaataaaaaatc

SEQ ID NO: 238669 - DNA, 556 bp, Homo sapiens
tgttactggtttgactctgggcagtgagccgctagctcagttggaaggagcactgtgtgaatgaggccaccggggtggggtcactgtcacttagctagatccaggccacaggctgtgctggacctctctcttcagaggagagagccagaagggatgaaagcatggtccctggtcttcaagaactttagagcttagcatggaaccaggcttcccactagaaaaatcgcttaaggtgcacccttgtggtaggctgctggcatgagttctgttgaagcatttgtattgaacctgggcactgtgacaggaggatgggaaggtgcttacgttcatttcccttcctcccagtgcytctcctccctcacttcatcattttagcccctctgcctgcaatatttcccttccgtgcccccggtaactgtgatgcatggcaaatgggctggctcagtagctgtgtggggcaactttctcagcacacagctgcccccagacactttcagggtgcacttattctccctccctttccactcccaaccgctctgctcccttcttttcttac

SEQ ID NO: 238670 - DNA, 441 bp, Homo sapiens
gcccaagttaccactctctcacccagagcactgcaaaaaatgtcttgattagtttctctatcctcacaaacccttctcagggatatactcggcagcacagccccaggggtcttttcaaaacaaatttgattacctcacctccccatttaaatccttgttcaaggcttccccgtgccatgaggttaaagagaacacctctaccaatcatacccggtcttcccccagagcttcacttttcaccacratctacttcaccctagggctccagtcacacaactttcttttggttcctcaaaattgccaaattccccttgcctcagaccttctgttcctttctcctcccccttttcttagctagttcttactcaccctttagctctcagatcaaaagattttaacccaagcctgacaaacatgttctttccatggcaagagtctgcc

SEQ ID NO: 238671 - DNA, 471 bp, Homo sapiens
tttatttcttaaatgccaggaacattagtgtttttgtattttatctatgcttttatatwgtctgaaatcttttgtattaacaaattataacgaaagtacagacaatgaatagataaatgtaagtagaagttctgatattttcttgcccatcccaatgggttttgggatatgtccttcccacgacaccactgctttactgtaacattgagcacactatatcaattatctgtttagaaatttgtctcttccccttggctgcaagcaacttcaagtcccagaataagaatttagtaaatattcacataataaatttatggtatgaacagtgcttatatgggtttcattttcctaacttaatattctgcttttctaaataaactgaccatagcatgatctccacattaaacaactaattatctaagaaaaattaacttggcaaggtagcatccactgttggttattaactaatat

SEQ ID NO: 238672 - DNA, 471 bp, Homo sapiens
tttatttcttaaatgccaggaacattagtgtttttgtattttatctatgcttttatattgwctgaaatcttttgtattaacaaattataacgaaagtacagacaatgaatagataaatgtaagtagaagttctgatattttcttgcccatcccaatgggttttgggatatgtccttcccacgacaccactgctttactgtaacattgagcacactatatcaattatctgtttagaaatttgtctcttccccttggctgcaagcaacttcaagtcccagaataagaatttagtaaatattcacataataaatttatggtatgaacagtgcttatatgggtttcattttcctaacttaatattctgcttttctaaataaactgaccatagcatgatctccacattaaacaactaattatctaagaaaaattaacttggcaaggtagcatccactgttggttattaactaatat

SEQ ID NO: 238673 - DNA, 552 bp, Homo sapiens
tctattctaccatcatatgtaattgataatttggcaggatatatcattctagcttgaaaaatcattttccctcagatttggaaggtttatcttcagtgttgctagtctccagtgttgttgagcaacccaaagacattctttagtcctttgtgacctttttttttttttttccccttgtgatagattttaggaccttctcttttyccccagtgttgtgaaattccacaggggtgtagcttgatatggatctttttcattcattgtgtggcatactctgtgggcattttcattcaggaaatgtgtgtccttcagttctgaaaattttttcttatttattttaatgtttctcttcctgctttctggaacttctattagtttgatgctggatcttctgagttgatcctctgattctcttatctttctcctattttttcattactttctctctttgttccacttcctgggagatttcagctttacctgccagattgtgaacaacttaaaaatttttctagcataattttaatatataagggctcttgttctttgaat

SEQ ID NO: 238674 - DNA, 632 bp, Homo sapiens
gaattctggactcaatgttagggactcagtcttattcacttttgtatcttcagtgtttggaagcaccaacaaacatttgctaagtgagtgaatgggagaggaaggctgtgtggtgcagygggaaaggcaatgaactggtagtcaggacatggggctctaatcctgactctgctactagtgactgcatgactttgaacaaatcccctcattgctctgggtctcaatttcctcatctgtaaaatgagaataaaaatacagccttccaccccagggttatggagattaaatgaggtaacagagcttcaccagctgcctgccctgtttgtgccctgtcctcctgaaacagcctggactattgttcctgccatttggatctaatttgtgctctctcccctggtgagagctgagctgaaatctgttgccttgttggaggggaagtttgcagcaatggcatacatattatccagttggcccctgtgttactacaagggcagacatcaaaagtgaggaagatgtcaagctagagagatttgcttcttttgttacccctaaacctaaatgaggacccaaagtgggaagagtgaggcagagcagatctacatcacatgctgaggtgtataagtgaggcctca

SEQ ID NO: 238675 - DNA, 667 bp, Homo sapiens
acttcttgcccttttattttttgggggctgtattattattttttaaattttggatgccaatgacstagctgagaatatagaaagggtgaaaataagggtgtgtgctttgtgaaaaatatcagggagagagaggaatttgctggtgttcaaaatattcaccgcaagaggcatgaggtagtgggaggcttggtagcttagcatctcatagtgtaaacttttccaggggatgtaaagtgcagttatttgcaaatattctggaagtggcagattgtcatgttttgtgagtcactgtcccagttaattgagacgtctaaagactacgtagggagaagctgagggtgtcacccaagaaatctggttccccaggctggcatagcacaagcaggctgggctggctttgggagggagaaggcaaatgtgtcccatgttcccagtgccagttgattaacagagcggcatcaatgcagtctccgaggacaggcctgcagggctaccctcccggctaggaggaaaggctgctccccttgctggttggtggcagaggtggagctggagaggcagcaaatgacatgccactgtccccacatggacgggacagcctgggcagtgcttgaggaagagctgaaaagagcttgctgaaaacccaaataagacgttttcaaacttg

SEQ ID NO: 238676 - DNA, 667 bp, Homo sapiens
acttcttgcccttttattttttgggggctgtattattattttttaaattttggatgccaatgacgtagctgagaatatagaaagggtgaaaataagggtgtgtgctttgtgaaaaatatcagggagagagaggaatttgctggtgttcaaaatattcaccgcaagaggcatgaggtagtgggaggcttggtagcttagcatctcatagtgtaaacttttccaggggatgtaaagtgcagttatttgcaaatattctggaagtggcagattgtcatgttttgtgagtcactgtcccagttaattgagacgtctaaagactacgtagggagaagctgagggtgtcacccaagaaatctggttccccaggctggcatagcacaagcaggctgggctggctttgggagggagaagscaaatgtgtcccatgttcccagtgccagttgattaacagagcggcatcaatgcagtctccgaggacaggcctgcagggctaccctcccggctaggaggaaaggctgctccccttgctggttggtggcagaggtggagctggagaggcagcaaatgacatgccactgtccccacatggacgggacagcctgggcagtgcttgaggaagagctgaaaagagcttgctgaaaacccaaataagacgttttcaaacttg

SEQ ID NO: 238677 - DNA, 489 bp, Homo sapiens
ttctatgccaaaacaggcacaacagaaggctccaaacagcaacttgctgggctcctagcaaagagtgcaaagcagacattctcccctgaaagaccagccttgctgcttttcttgctgtggctatgagaatgtagccttctgcagaaagcatagtaaacttgcaactgaaccaacactgctcctcaggcgggtggtgctgagtggtaccactccaccacacaggtaataagggcccttccaaccatacatggtgccctggagccatgcagagcccaggaactggtcagtgcactgaggatatcacacttccatgctgatccagccttccagggtcatgcaacccggggatcatgggaagaaaccagacattatgagaatctcactttaaatgctcaggaattaagtcaaggrccaccatgggtttcgcatcacccagtgggtcacgatgtttatccatgcacctgctgtccctctgctggaatgtttcct

SEQ ID NO: 238678 - DNA, 488 bp, Homo sapiens
attctatgccaaaacaggcacaacagaaggctccaaacagcaacttgctgggctcctagcaaagagtgcaaagcagacattctcccctgaaagaccagccttgctgcttttcttgctgtggctatgagaatgtagccttctgcagaaagcatagtaaacttgcaactgaaccaacactgctcctcaggcgggtggtgctgagtggtaccactccaccacacaggtaataagggcccttccaaccatacatggtgccctggagccatgcagagcccaggaactggtcagtgcactgaggatatcacacttccatgctgatccagccttccagggtcatgcaacccggggatcatgggaagaaaccagacattatgagaatctcactttaaatgctcaggaattaagtcaaggaccaccatgggtttcgcatcacccagtgggtcasgatgtttatccatgcacctgctgtccctctgctggaatgtttc

SEQ ID NO: 238679 - DNA, 581 bp, Homo sapiens
aacaccaaacaatctatgaaagtttctttactccattcctcaccaacacttagtattctgaggcatttaaagtgtttaaatgtttaagtgttgtgtttaaatgtttaagtgttgacagtctggtggatgggagtggtatctcattgtctttatttctaactccctgatttctagtcaaacatttttcacagctatatttatgacttacgtttcctttcctagaaatgatcttctcaggcggctgacmcactttactactggattgttcatattttgctcactgattcgtaagtgttcctctaaaattctggtacaatctattgcaagcattctctcctagtcttgggcttcacttttatgttttgtattgtgcaacacccacttcctcccccaccaaatgcattgaaatgtattcatggttttcttcacagcttgtagttttcatttaagaagcctttccctattccaaaaccattaaggatatgttccaatattttcttccaaaacttacaaaattttgcattttatatgtttgatttttacccatatttgccgcgtgtatgtgcttttcacaaaaagaa

SEQ ID NO: 238680 - DNA, 581 bp, Homo sapiens
aacaccaaacaatctatgaaagtttctttactccattcctcaccaacacttagtattctgaggcatttaaagtgtttaaatgtttaagtgttgtgtttaaatgtttaagtgttgacagtctggtggatgggagtggtatctcattgtctttatttctaactccctgatttctagtcaaacatttttcacagctatatttatgacttacgtttcctttcctagaaatgatcttctcaggcggctgacccactttactactggattgttcatattttgctcactgattcgtaagtgttcctctaaaattctggtacaatctattgcaagcattctctcctagtcttgggcttcacttttatgttttgtattgtgcaacacccacttcctcccccaccaaatgcattgaaatgtattcatggttttcttcacagcttgtagttttcatttaagaagcctttccctaytccaaaaccattaaggatatgttccaatattttcttccaaaacttacaaaattttgcattttatatgtttgatttttacccatatttgccgcgtgtatgtgcttttcacaaaaagaa

SEQ ID NO: 238681 - DNA, 581 bp, Homo sapiens
aacaccaaacaatctatgaaagtttctttactccattcctcaccaacacttagtattctgaggcatttaaagtgtttaaatgtttaagtgttgtgtttaaatgtttaagtgttgacagtctggtggatgggagtggtatctcattgtctttatttctaactccctgatttctagtcaaacatttttcacagctatatttatgacttacgtttcctttcctagaaatgatcttctcaggcggctgacccactttactactggattgttcatattttgctcactgattcgtaagtgttcctctaaaattctggtacaatctattgcaagcattctctcctagtcttgggcttcacttttatgttttgtattgtgcaacacccacttcctcccccaccaaatgcattgaaatgtattcatggttttcttcacagcttgtagttttcatttaagaagcctttccctattccaaaaccattaaggatatgttccaatattttcttccaaaacttacaaamttttgcattttatatgtttgatttttacccatatttgccgcgtgtatgtgcttttcacaaaaagaa

SEQ ID NO: 238682 - DNA, 594 bp, Homo sapiens
tggccaggagactgcatcatctccaaatattagtgatttgcttaaaactaagaaggaaaaccaagccacctgtctcctaccttcttaggcagcattttcacctttcacccttcatggggctgctttgtcttcatgggttctaatttcaagatgaatgattgagagagtcaggcccaggctttctaaagctgtttggattttctagggaatcttcggatttaccttatcactgatagctcccttgagttactacattcttacatcaactctgcaaatttgggtcagagaacatcttatttaatgaataggagtgtccacacaagaatcagagaaatgctcaaccctaagagctgcactcagacactgcagggctctttatgaatgtttgttaacttggttattgtattagtctgttttcatgctgctaataaaaacatacccaagactgggtaattaatgaaggaaaaaggkttaattgacttacagttcagcatagctggggaggtctcaggaaacttacaatcatggcagaaggagaagcaacacatccttcttcacatggcagcagtaaggagaagagtgagaaccaagcaa

SEQ ID NO: 238683 - DNA, 581 bp, Homo sapiens
acattgtgtaaaatacagaaagcacatctcatgatcaagcaatcaaacattttcctaacgtagstcgtgcatcttctctttaagggatttccgtcagtgttgcaaactggtgaaaatatatcagtgcacgggaagaaacagttaaatgaggggagttgcaaattcagaataaatcaggcttgctaccttgttagcaggtagggacaggagctgaactctacacagaggtggacaactgatggacctcaggttccaagttgcttcctgaccacatgaacacacaggtattatgagatctcaacaaaggctgttaacattcccaataaataataagtcatggctctgctacctctttgttcttgaggctagttaaaaaagaaagtcctggggctgtattagctccatgggcagatggaccaggcatcaggagcatgagtggggtggtcttcaggctggtccttcagctgctgggatgagtctatggccacccaggaatgtctatcagacaggtgcctcatgagcttccagcctcctgctggcttccaggagttctcccaaaagggctacagaacctggccatg

SEQ ID NO: 238684 - DNA, 581 bp, Homo sapiens
acattgtgtaaaatacagaaagcacatctcatgatcaagcaatcaaacattttcctaacgtaggtcgtgcatcttctctttaagggatttccgtcagtgttgcaaactggtgaaaatatatcagtgcacgggaagaaacagttaaatgaggggagttgcaaattcagaataaatcaggcttgctaccttgttagcaggtagggacaggagctgaactcyacacagaggtggacaactgatggacctcaggttccaagttgcttcctgaccacatgaacacacaggtattatgagatctcaacaaaggctgttaacattcccaataaataataagtcatggctctgctacctctttgttcttgaggctagttaaaaaagaaagtcctggggctgtattagctccatgggcagatggaccaggcatcaggagcatgagtggggtggtcttcaggctggtccttcagctgctgggatgagtctatggccacccaggaatgtctatcagacaggtgcctcatgagcttccagcctcctgctggcttccaggagttctcccaaaagggctacagaacctggccatg

SEQ ID NO: 238685 - DNA, 618 bp, Homo sapiens
atgtgtgcttcatgatgattttctctgtaatcaccgtgtcatacagtagtttggtcaggattagcccagctcatsgtttcttagtttgctaagtcgaatgaagacagaagagtgaacattagacatagatagggggagcaggatattgcagtgaaacttgttcccagtgaaagagacactgagatggagttaggagtataaaagtcttgtcaggaagaaacacctgtgatggggccaagcagaactgcagaactgggcatgaagctgttggattgtgatgcagtcagcaacatgcatgccagaacaacatgcacgtcacctgagccgaagcaaagatgctgcgaaaggaggcccatgttggacggaaatgccctgccctgcaatgactgcctcactcaggccctaactgggggccaccccaggaaaagactgactctagctaccacctcattactcagtccctggctgcagaccaaagagaacttgaccttggctccaaagctgaggtagatgggcagaggttaataactggagacctccttccttcagtaggacagagagacctttcttgaaggaaggtctgagcagtacaaatccatgtatgcaataaggccagac

SEQ ID NO: 238686 - DNA, 571 bp, Homo sapiens
tcagcactgttggtcactccatcccatccctgtttctccttccctggagcatttcagttccgatggcctcgctattctgaacacagctgtctcccttctgccttcttctcccccctccctactctctctcctaataccttgggtctcacctctctcccctcaagggacatatcaagccttctcatcagcacacacagtaccctcactcatctgtggccagccattaagacaataaaatgtcacactggcacactactgttagcaagaaatgagatgtgacacctcacccctgaccgtgacacggtggtagatcaagacctggctgggrgctcacgacttcagctggggttggccttctgaggagctcttgtcacctgggcattgcagggacctgaggcctgagccttgagtcctgcaggactggacttagccctcagatgctcacccaagcaggcagccacatgcctctcgattttgtctacagctgaccagggtgcgtgtggttgaatctgtaccctaagccttattagacttccccctgtgtgtataaatgagtctattgtccaaagtg

SEQ ID NO: 238687 - DNA, 571 bp, Homo sapiens
tcagcactgttggtcactccatcccatccctgtttctccttccctggagcatttcagttccgatggcctcgctattctgaacacagctgtctcccttctgccttcttctcccccctccctactctctctcctaataccttgggtctcacctctctcccctcaagggacatatcaagccttctcatcagcacacacagtaccctcactcatctgtggccagccattaagacaataaaatgtcacactggcacactactgttagcaagaaatgagatgtgacacctcacccctgaccgtgacacggtggtagatcaagacctggctgggggctcaygacttcagctggggttggccttctgaggagctcttgtcacctgggcattgcagggacctgaggcctgagccttgagtcctgcaggactggacttagccctcagatgctcacccaagcaggcagccacatgcctctcgattttgtctacagctgaccagggtgcgtgtggttgaatctgtaccctaagccttattagacttccccctgtgtgtataaatgagtctattgtccaaagtg

SEQ ID NO: 238688 - DNA, 616 bp, Homo sapiens
gaattctaacccctgctcctagtgatggtaaccttatttggaaacagagtctttgtagatgcagtcaagtcaagatgagatcatactggattaaggtgcgtccctgacccagtgactggtgggccataatccagtgacagtgtctttgtaagaggaaggagaggaagattccaacaccgagccacagggaaagcacagaggcaggttgcagtgatgcagttggaagctgggggatgcccagggtttccagcagcaaccagaagctggagagaagggactgaccttgccaacacttcacttctgacttctggtctgtgggactgtgagactatacatttctgttgctttgagccccgccttttgtggtcatctgtgatggcagcaccaggacactaacacaggtgggtccatagaatttrgaagagaaatctgactgagctggagatacaggccagagaggcatcagcagaagggctgatgaggccttcagagctcatcctgggtgatctacgcagagagagtagaaataagaaatagtaatcgtcacaccaggtggagggaatcatgggcttcctcagaagagggggagcctcctaaaccccactccccaggtgaa

SEQ ID NO: 238689 - DNA, 616 bp, Homo sapiens
gaattctaacccctgctcctagtgatggtaaccttatttggaaacagagtctttgtagatgcagtcaagtcaagatgagatcatactggattaaggtgcgtccctgacccagtgactggtgggccataatccagtgacagtgtctttgtaagaggaaggagaggaagattccaacaccgagccacagggaaagcacagaggcaggttgcagtgatgcagttggaagctgggggatgcccagggtttccagcagcaaccagaagctggagagaagggactgaccttgccaacacttcacttctgacttctggtctgtgggactgtgagactatacatttctgttgctttgagccccgccttttgtggtcatctgtgatggcagcaccaggacactaacacaggtgggtccatagaatttagaagagaaatctgactgagctggagatacaggccagagaggcatcagcagaagggctgatgaggccttcagagctcatcctgggtgatctacgcagagagagtagaaataagaaakagtaatcgtcacaccaggtggagggaatcatgggcttcctcagaagagggggagcctcctaaaccccactccccaggtgaa

SEQ ID NO: 238690 - DNA, 546 bp, Homo sapiens
tatcttgacttcttgagttcgtgtattagtgcctgccactggttttgattttggacaattattagtcctgatctcttcacatttttccaattctgcatttcccctctctttccaggactcctatcaatcatgcgcggtgggcacgcttgctatcttcccatactccagaccatctcttctgatttgtccacccttgtctgagctgaatttatcttttctctcttttttttgatcagtgttgttcaatmatttgttcaattgttgaattcaatagtttgtccaataattttctctctacttagtccatcctgcagtcacatatgtatattgattatattaaactttcagttaatgtatttttcacttctagacactatgtggtcctttttcagatctgctaatgtcacttcttattgttttccctttcccatttttaaaatttgtcctttatttctttaaccataacaggcacagtgaagttatcttgcctatctggtgattccaacactaactaatttgatttttttttagtgactctatgtggtc

SEQ ID NO: 238691 - DNA, 546 bp, Homo sapiens
tatcttgacttcttgagttcgtgtattagtgcctgccactggttttgattttggacaattattagtcctgatctcttcacatttttccaattctgcatttcccctctctttccaggactcctatcaatcatgcgcggtgggcacgcttgctatcttcccatactccagaccatctcttctgatttgtccacccttgtctgagctgaatttatcttttctctcttttttttgatcagtgttgttcaatcatttgttcaattgttgaattcaatagtttgtccaataattttctctctacttagtccatcctgcagtcacatatgtatattgattatattaaactttcagttaatgtatttttcacttctagacactatgtggtcctttttcagatctgctaatgtcacttcttattgttttccctttcccatttttaaaatttgtcctttatttctttaaccataacaggcacagtgaagttatcttgcctatctggtgattccaacactaactartttgatttttttttagtgactctatgtggtc

SEQ ID NO: 238692 - DNA, 593 bp, Homo sapiens
ctatggcaagggggttggccactgtcacttgtgtctggcagagactccaaggcaggcggaggagtggggaagctttgtgatggaaacggaggctccaggggcascctgggtgtgggctgttagcctcggagagctgaagggcactcattagaagaagatccatttggggagcacatttggctttccctggctggtcctgagttggaaacaggagtaaaaataaaggaaattgacagatatcaacaaagtctttagcgtttgcggccaactgctacagaggttgagggttagagttctatttttatagatggtttggccattgtttgttttctgttcagtttcctaagtctaatcacctgataattacttgtggggctttgaaggcacaggagagggcctcctgcaaaggacggagccaacgtggtgtatccaaggcctcgtattagtcagctccagctgccgtaacaaagtgccacagatgggggcttcaacaacacaaattgtttgtctcacagaggccagaagtccaagatcaaggagtctgcagagttagtcccttctgagcaccctgaaggagtagctggaatgcgtgg

SEQ ID NO: 238693 - DNA, 577 bp, Homo sapiens
catttttaaaaccatctgatctcgtgagaactccttcactatcatgagaccagcacgggggaaaccacccatgtgattcaatgacctctcaccaggtccctcctttgacatgtggggattacaattcaagatgagatttgggtggggacacagagccaaaccacatcacctaatattgctgaatgtgggcaatatagaaatgtttggtagctttaggccaggtttayacaagttgtatcaaagcccagttgccaagtctctgacggccaggtggtgtttgcacacacggaaagatttggcaggcaaacagcacaagacacgttgaacacagtcaaatacctggatgtttaaaaaatgatcagtatctctttcaccccaacatattttgtgttgagagacacttataaggtgaaatgttttctgaaaatatctttcttgttacaactgagtgacaccaccattatgtcttgcttgctccaacagcaaacgaaccatgaccatcttcacgttgtctgtgattattccttagcatctgtagggataagaggtgttaacagaacatccaaggatcatgtga

SEQ ID NO: 238694 - DNA, 577 bp, Homo sapiens
catttttaaaaccatctgatctcgtgagaactccttcactatcatgagaccagcacgggggaaaccacccatgtgattcaatgacctctcaccaggtccctcctttgacatgtggggattacaattcaagatgagatttgggtggggacacagagccaaaccacatcacctaatattgctgaatgtgggcaatatagaaatgtttggtagctttaggccaggtttacacaagttgtatcaaagcccagttgccaagtctctgacggccaggtggtgtttgcacacacggaaagatttggcaggcaaacagcacaagacasgttgaacacagtcaaatacctggatgtttaaaaaatgatcagtatctctttcaccccaacatattttgtgttgagagacacttataaggtgaaatgttttctgaaaatatctttcttgttacaactgagtgacaccaccattatgtcttgcttgctccaacagcaaacgaaccatgaccatcttcacgttgtctgtgattattccttagcatctgtagggataagaggtgttaacagaacatccaaggatcatgtga

SEQ ID NO: 238695 - DNA, 584 bp, Homo sapiens
atcccgtgtctactaaaaatacaaaaaattagccaggtgtggtggtgggtgcctgtaatcccagctgcttggggggctgaggcaggataattgcttgaacctgggaaatggagattgcagggagccgagaccacaccattgcactccagcctgggcaacagagtgagactctgtttcaaacaaacaaacaaacaaacaaacwaactaactaactaactaactaactaactctgaggttcttggagagccagagaaacagatgtcataatcagggttattgattaagttctagaacttaataaaataaaataagaactagataaatattaatgaaattaaataaagccaatattgaaaaatcagagtcatgttccaggtagattaaataggaagcatcaccaagcaccacagctgggcccgcaattttggtgatggggtttatggattcatgtctggctattcctttccagcctcactgttccagcctcctggaggactccctgctctccttgccttctccaaaggctactgatgctctccctagccccacaacctccatcccctttcctctttcctagcagaat

SEQ ID NO: 238696 - DNA, 409 bp, Homo sapiens
aaattttaaacgctggaaaggaaacctagagcacttgaagacagtagcaggatgggcagccgtgccccacggcagggtgctgaggacgtggctggaactcacgtcattggttcgacatctggtgaatgcaaagtcccactgtgcagaggraacaccctgtgggtgggcgggtgcccttagaagagggttcccccaccccaccttccacgtttgattgttttagataaaaataatgaaaacaaaacataactttaaatacggtgtttcacaacccagtttggtcagctttattaggctactcgtcttgccctggtttgctgaggaaactccaggctgggaagttacacagccccaggtgggaatctctggcccttcccagctgagtggcctggggcaagcgattgaattc

SEQ ID NO: 238697 - DNA, 442 bp, Homo sapiens
cttagtcaactgtccataacatatcatcaataattgttagcactaygcatgcaaataaacaggtaaaattggtccataatcaaaacgaagcataaacagaagtagagccacaaataatccaaatgtcagaattattatataagaatgacacaatataaatatgttaagaaaattgtaggagaagatgaatgtaataacaggattttcaatagatattttaaaactctaacaaaaaaattaaaatcctagagctgaaaaatacaatatataaattaaaaatacattgaattaatagcagattagattctgcagaagaaagaaacaagaaatgtaaaatcaagtcaaaagcacaaaggaataaaaataaaataaccactgactcaatgaactataagacaatgtcagactgtacaaaataagtgcaattagagttccagaggta

SEQ ID NO: 238698 - DNA, 588 bp, Homo sapiens
acctgttccatatggtaccaattcttaatctaacagttaacagttcattcaaaataatggcaacaatgtatttgattttgtacacatatatttgtgtgtgtgtgtgtgtgtgtgtgtgtatagtcgtcatacttaggggtgcttatatataagtggaatgacascaatgatacatgggataggaaagagaaattaggattattttgttactataaggtacactgcccaagaagcagtatattattatttgaaagaggggttgcattatttgtaaatctatactgcaaacacaagggcaaccacaagaaaaccacgctagaagagagaataataaaatgccaaattaacaccatcaaaggcacaagacgaatggaagacaaaaataggaataaagaacaaggttaacaaatagaaaacagtaacattatggtagatgtttatccaaatatataaatactttgaatgtcaagggtgtaaatgtaccaattaaaagatagattattatatggaaaaactgggccagtttaaaaaagaaaaaattgtcaaagcaggatcaaagaacaaaacccaattatatgttggttacaa

SEQ ID NO: 238699 - DNA, 339 bp, Homo sapiens
gatccatcaagcagaaaatcaggaagtcaacagagaaaattgatraaaccaaaagctggtttttgaaaaattgataaaatcagtaaacctctgtcaagccagactgagagagacaaaaattaatatcagagatgaaagaggggatatcactgtaaatctatggacgtaacaaaggtaataaaggagtatcacaattgtatgcctacaaatttgataacctacatgacgaagaagtccttgaaacacaacctgccaaaactcacaccagaagaaatagatactccaaataacacctgtatctattttaaaaattgaatctattgccttcccaaacagaaa

SEQ ID NO: 238700 - DNA, 543 bp, Homo sapiens
tttggggtccaaaatttgaataagcaatttataaaactaaactattttccagtaaattcacttgaattgattttgcatttacctttattgcttcatatgtcccatataacataaaaatgttgagtataaaatgaaatgaaaaatagttcagtgaaataataagatttggtttaattattttttacttcataaggccactgaaatgttttgataaatagatatagttcatcattttctgtacaatgcatggcttttgaaaataataatgatcccaggatctggaccccttatttgatggtctctattctttaccaagtccttatttttttttgtttctttgctctttggagacaatattccctgggtgtttttctttttttctcgcttttgtatatcaacaaagggcaaaataataatttgttttgctctttctgaaattatatttttaaatgaatttaaatttctaaaaatgaatgttctttccarcacattggagtgaccagtaatcttccctgctttttattaagaagactgttgcaattt

SEQ ID NO: 238701 - DNA, 570 bp, Homo sapiens
cttctgctcttggcattttctgcctaatgtaccatataatatggttcaagttgcaagttttattttgtcaaatcattcactggagaggctagtgaaggcttttactgtatattagacaaatagaggccactgctggttcaggttacattgcttttgaagactttattagagttcacaagaaagagtcatccatacttctattgcccttcaaataaatttacttaaataacttggatcttccttattttcatgttaaattatktacaggcattacgattgctaaattaagataattctttgtgattaataccattctttggattggataactggtattgatgagaaaggatgtttctgttaataacttttaatagaatgagaacattagctctccaggccccaaatatttgaaactttcccagcgctgtttgagtctaaagaaacagagagaaatattttgcggatctgaccctccgtgggtcgccccctgactgccagtcagataagtcttggcataactgtattactcaggctgatttctgactttttttttttttttttggtcagtgg

SEQ ID NO: 238702 - DNA, 566 bp, Homo sapiens
caataatatggtgaataggagtagtgagacagagtatcattgtgccagttttcaaggataatgcttccagcttttgcccattcagtatgatgttggctgagggtttgtcatagacagctcaaaaagattttttaatgcatttatctttaaaatrtcttggaaatgccatcctcaaatatttcagcatctccagattcctgttatgagtaataccaatcagtgcaaagagggtagaagagtaagccagaacaaaacactcttattatttttactaagaagaacttgtttagggtggcccagttacaaacctgttgacacacagcattcttttcatttctatttgctactctcttctcaactgttccatgtttttcacttcctttctctgtgttgcctttctcttatatttcatttgcttgtcacttttctttcatttccacaactccttttttccaagagtttcctatttgttcttggctatttctattttatcatttgttccagtcacattttatttcaacccatttattattgcccttccatttatttttatttttaataatttt

SEQ ID NO: 238703 - DNA, 566 bp, Homo sapiens
caataatatggtgaataggagtagtgagacagagtatcattgtgccagttttcaaggataatgcttccagcttttgcccattcagtatgatgttggctgagggtttgtcatagacagctcaaaaagattttttaatgcatttatctttaaaatgtcttggaaatgccatcctcaaatatttcagcatctccagattcctgttatgagtaataccaatcagtgcaaagagggtagaagagtaagccagaacaaaacactcttattatttttactaagaagaacttgtttagggtggcccagttacaaacctgttgacacacagcattcttttcatttctatttgctactctcttctcaactgttccatgtttttcacttcctttctctgtgttgcctttctcttatatttcatttgcttgtcacttttctttcatttccacaactccttttttccaagagtttcctatttgttcttggctatttctattttatcatttgttccagtcacattttatttcaacccatttattattgcccttcmatttatttttatttttaataatttt

SEQ ID NO: 238704 - DNA, 648 bp, Homo sapiens
ctttgatttttatttcatgtttttaagaatcagcctacaccctttcttgaaccccaagaagtgggccatttctttgctaacttggagtagagtagagctaatgcatcattaaataaagcttgtctctatgccaagtcctttactcagctctggttattaacttagttgatagcattgcataaagatgctctcctcttatttattcatttattcatttttcaataaatatttaatgaacactcataatgtgccaggcacacttcttggaatacatccatggaaaaaaatgaagatccctggccttgtggaaaaactaaaaagaaattggggttgtataggggagagtaatcaagaaggttacaattttaaacaggctggtcaggacaggcctcatagaaaatatgacrtttgagcaaaatcttagaagccaggaggagaatatctagaggaaagagcattccaggcagagaaagctgttagtgcaaagaccctaagacaaagtgctcccaacatgtttgaagaataaggactccaatacatctgtaaagaggtaagagcattaagagaagaaatatgtgatcagtcttcccccaatccccacaacccaggtgcagaggttttaccagaggccggggttgggtgaagaca

SEQ ID NO: 238705 - DNA, 609 bp, Homo sapiens
gtgatcagtcttcccccaatccccacaacccaggtgcagaggttttaccagaggccggggttgggtgaagacaaatcacacaggtgcttgtaggcattgaaaagactttgactttaattggagtggagagatggaaatggagagcctttgcaaagttttgagcagaggagtgacaygtgcagttgaaaataaatagcacatattggtgatgtgaataactcttggtaaagttctgaacaaaacaaaactgaatcttcccttttctagaaattggatccctagaaaattaagtgctgtatatgataaaatcttaaaaaaatacataaataaatagtaaaaatccatccaattacttgttcaaggataatttaaaagcattaggctagccaagggaaaatgtcatttgatgacacttaaaatatacagtcaatttttgcattcttaggtatcaagtattgcatatttattaaactttttatactcaatgacaaatttcacaatgattatcttaattttaatatggagaaataattctcatttcacctaggcttaaaataatgccttaatgtctcataattaacttttttggttataaaaataaaaaatatt

SEQ ID NO: 238706 - DNA, 609 bp, Homo sapiens
gtgatcagtcttcccccaatccccacaacccaggtgcagaggttttaccagaggccggggttgggtgaagacaaatcacacaggtgcttgtaggcattgaaaagactttgactttaattggagtggagagatggaaatggagagcctttgcaaagttttgagcagaggagtgacacgtgcagttgaaaataaatagcacrtattggtgatgtgaataactcttggtaaagttctgaacaaaacaaaactgaatcttcccttttctagaaattggatccctagaaaattaagtgctgtatatgataaaatcttaaaaaaatacataaataaatagtaaaaatccatccaattacttgttcaaggataatttaaaagcattaggctagccaagggaaaatgtcatttgatgacacttaaaatatacagtcaatttttgcattcttaggtatcaagtattgcatatttattaaactttttatactcaatgacaaatttcacaatgattatcttaattttaatatggagaaataattctcatttcacctaggcttaaaataatgccttaatgtctcataattaacttttttggttataaaaataaaaaatatt

SEQ ID NO: 238707 - DNA, 609 bp, Homo sapiens
gtgatcagtcttcccccaatccccacaacccaggtgcagaggttttaccagaggccggggttgggtgaagacaaatcacacaggtgcttgtaggcattgaaaagactttgactttaattggagtggagagatggaaatggagagcctttgcaaagttttgagcagaggagtgacacgtgcagttgaaaataaatagcacatattggtgatgtgaataactcttggtaaagttctgaacaaaacaaaactgaatcttcccttttctagaaattggatccctagaaaattaagtrctgtatatgataaaatcttaaaaaaatacataaataaatagtaaaaatccatccaattacttgttcaaggataatttaaaagcattaggctagccaagggaaaatgtcatttgatgacacttaaaatatacagtcaatttttgcattcttaggtatcaagtattgcatatttattaaactttttatactcaatgacaaatttcacaatgattatcttaattttaatatggagaaataattctcatttcacctaggcttaaaataatgccttaatgtctcataattaacttttttggttataaaaataaaaaatatt

SEQ ID NO: 238708 - DNA, 609 bp, Homo sapiens
gtgatcagtcttcccccaatccccacaacccaggtgcagaggttttaccagaggccggggttgggtgaagacaaatcacacaggtgcttgtaggcattgaaaagactttgactttaattggagtggagagatggaaatggagagcctttgcaaagttttgagcagaggagtgacacgtgcagttgaaaataaatagcacatattggtgatgtgaataactcttggtaaagttctgaacaaaacaaaactgaatcttcccttttctagaaattggatccctagaaaattaagtgctgtatatgataaaatcttaaaaaaatacataaataaatagtaaaaatccatccaattacttgttcaaggataatttaaaagcattaggctagccaagggaaaatgtcatttgatgacacttaaaatatacagtcaatttttgcattcttwggtatcaagtattgcatatttattaaactttttatactcaatgacaaatttcacaatgattatcttaattttaatatggagaaataattctcatttcacctaggcttaaaataatgccttaatgtctcataattaacttttttggttataaaaataaaaaatatt

SEQ ID NO: 238709 - DNA, 566 bp, Homo sapiens
tgaaattcttaccaaaatagaaagctgaataytgttaatactttaagaggagtgtaaatgctatataaatgttttaggattgctaaaatatgtttgtataatcttataaactcttaacaaatctagtgtaaacagccaacaataaaaagaacaagttgcagaatagatgaacggttgtatctcatttatgtaaaatatgtacatatttattgactaaaatatcaagaaagaggccacatgttggttcatgcctgtaatctcagcactttgggaagccaaggtgggcagatcacctgaggtcaggagtccaagaccagcctggccaacatggtgaaaccccatttctactaaaaatacaaaaattagccaggcgtggtggtgtgcacctgtagtcccagctacttgggaggctaaggcacaagaatcacttgaacccgggaggagaagattgcagtgagccgagatgtcgccattgcactccaacctgggcaacagagtgagactctgtctcaaaaaaattaaaataaaatatcaagaatatccactcctacctgttaataatgctt

SEQ ID NO: 238710 - DNA, 606 bp, Homo sapiens
gtgaagggctatcaacaaaaatattaagcccgagagaacagcagatatgagaaagtagaccacaatttcagtttgaaatgttgaattggagagatcagaacagtcaggggactgtatagcagacatctttaaaatgttgcattgaaattcaagcacaaaatcaagtttgaggacacaaatggtgggtgctatctacatattggttacagattgtttgtaagattgggtgcaagaggatactaatgcaaatcatataaagtaagaagaagaagaaataatttttaaagtctttgggaaacatctacattgagaggcaagcaaagaaattgaaaaataaaagtcatcaaagagagtagaaattcaggcaagtggtaattaagaacttaaaagtggagagagttttgagagagaatatgtggtagacaatatcaaaygttacaggtagctcaaaggtagaaaaacctgatgaagtccatagaatttgttgattaataagttactgatatccttttcaaaaggatttgtagtaagcagcataatggctccccaaagaagttcaaacctaaatccttggaacctgtgaatatatcaccttacgggcaagag

SEQ ID NO: 238711 - DNA, 546 bp, Homo sapiens
ttagcctctaaggagagaatccgcccatcctttgaagatttgaaaccagacattgacttctctctatctatgaaagtcatagataggatcttcttccaatatgagactgttttgtctttattgaaaatccattgttttgagtagccgcctttaccaattatctcagctagatcttctggataacttgctgcagcttctacatagcacttgctacttcaccatgcacttttacgttacggagagttttatgtttccttaaacttcatgaaccaacctacratagctttaaacttttcttctgtggcttcctcacctccctcagccatcataaaattaaagagaattagcgtcttgctctggattaggctttggcttaagggaattttgtggctagtttgatctatccagaccactaaaattcctccatatcaacaattagctattttgctttcttattatttatgtgttcactgaagcagcacttttaatttccttcaagaacttttacttcgctttcataacttggttgtttggcacaagtggctg

SEQ ID NO: 238712 - DNA, 404 bp, Homo sapiens
attttttaatgtgccagaattttcatttgttcaaactataagtgttttttcttcaaacttggtgattttgtgaagtcaccacaataaaaatgtctacatgatgggcccatgcagasagctgaggaaagtcatggtacagacccctttgcacaacctgctcctgaccacccaaagcacaaaaggtgggtcccatgtgaaagtgctgctttaagggggccaagtggaaccaacaatgcgattcccatgccccttgtgaggggtgggatgggagccatcgcatttgctggtagccagttatatgctctttgattcaacccagtatctgttgtagaagaggcaatggcccctttaagaccctcatttcaaccctcggaaggcccaaagacaaattaatacctgttgat

SEQ ID NO: 238713 - DNA, 488 bp, Homo sapiens
atgtaactgccacattctggattattttttaaatgttagtggctctaagcccacatcattaaggtgtggccacctttcaagtgctatcatttttattagtcagcaccacctaatttgggaaatattttatttttttttccttttttttgattaaaacaatttttaaaaaatagagatggggtctcactatgttgcccagactggtctcaaactcgtgggctcaagtgattctcctgccttgccttcccaaagtgctgggattacaggcatgagccaccgtgcctggccagatttgggaaacattttataaataggtgcttagatcaggagagcaatgccttacatcaggaatacacccaaaatgtctaagtccggagactcgaggcaaagtgggaaacgttactcacagtgctttttatccagaggygtggacttagtactccaaaggagtccagaagcataacacttctggagaggcatctactgga

SEQ ID NO: 238714 - DNA, 356 bp, Homo sapiens
gcaccggtggcttttgaggtgtttcttgtgtttttttcagaactacttctgcagtggggccactttatttcttttcagagctacttatgcagattgatgaaggggaactttcccctctgaaatgctgctgtaactttttcagtaccatccagatattataatactgaatgagcccctactcctgccagtcactgtgggggatacaaagatgaacaagattcaatttctgcatttaggggtctagtggacctgaaactgttagactttactctgcaatmtgtgtcgggattcctgagactgagggagggaatgtatgatgcccatgcacactctgcaatacagaaatttagcaaaga

SEQ ID NO: 238715 - DNA, 464 bp, Homo sapiens
ttcaaactccctttttgaaaatttccttgcattcataaacacgttagctatccaggacagcgtgttgctctaggaacaaaagtggggacttacaaagaaggcaaattataagaaatatatttctgtcaaaattttatgaaacaaggaaaatcataaaataaaaattaatattagaagaaagtcttatcaaattctatataatgatttttcatcaatatacttggcctctaattagttaaaaggaagatcatgcaaagcccagagtttttatcttgtggttactattcaatttaaattctyatattccccaaaatgtccttgttttagttggtaagacagcaagacagtagctacaattcagtggaattaagtactttgccatattccatgaaatacacaaggagaggtcagaagaaacacaattatttttgtctggcagaatacaaaaaggtgtcacagagttg

SEQ ID NO: 238716 - DNA, 464 bp, Homo sapiens
ttcaaactccctttttgaaaatttccttgcattcataaacacgttagctatccaggacagcgtgttgctctaggaacaaaagtggggacttacaaagaaggcaaattataagaaatatatttctgtcaaaattttatgaaacaaggaaaatcataaaataaaaattaatattagaagaaagtcttatcaaattctatataatgatttttcatcaatatacttggcctctaattagttaaaaggaagatcatgcaaagcccagagtttttatcttgtggttactattcaatttaaattctcatattccccaaaatgtccttgttttagttggtaagacagcaagacagtagctacaattcagtggaattaagtactttgccatattccatgaaatayacaaggagaggtcagaagaaacacaattatttttgtctggcagaatacaaaaaggtgtcacagagttg

SEQ ID NO: 238717 - DNA, 540 bp, Homo sapiens
tatatttagttgatatgattttaatctttcataggttttaggtgctgcaaatatcttctaatttatagtttatcttttcacttttttacttttattttttaattttttttttttttgagacagtgtctagctctgttattcaggctggagtgcagtggctcactgcaacctccacctccagcgttcagatgattctcgtgcctcagcttcctgagtagctgggattacaggtrtctgccactaatgctgagctaatttcttgtatttttaggagagacgaggtttcaccatgttggccagcctggtctcaaactcctgacctcaggtgatgtattattggggttacaggcttgagacaccgtgcccagcctatctttccactttttgatgtaaaaagttcttaattttgcgatagtcaaaatgtctaatctttttaaatggttaaatggctttttgtgtctcattcacttacattttctactaacttcaaatctggcttctgagtgaccttttcagagattctccaatgtacccaagtaa

SEQ ID NO: 238718 - DNA, 540 bp, Homo sapiens
tatatttagttgatatgattttaatctttcataggttttaggtgctgcaaatatcttctaatttatagtttatcttttcacttttttacttttattttttaattttttttttttttgagacagtgtctagctctgttattcaggctggagtgcagtggctcactgcaacctccacctccagcgttcagatgattctcgtgcctcagcttcctgagtagctgggattacaggtatctgccactaatgctgagctaatttcttgtatttttaggagagacgaggtttcaccatgttggccagcctggtctcaaactcctgacctcaggtgatgtattattgggrttacaggcttgagacaccgtgcccagcctatctttccactttttgatgtaaaaagttcttaattttgcgatagtcaaaatgtctaatctttttaaatggttaaatggctttttgtgtctcattcacttacattttctactaacttcaaatctggcttctgagtgaccttttcagagattctccaatgtacccaagtaa

SEQ ID NO: 238719 - DNA, 652 bp, Homo sapiens
ggttttttctttgccattcaatttctgctgtccccactctaagcccatggtccaccattttatttttccttctaagatgtcttcccttcttgtaagattttctttgccttaagaagggcccttttcatccacccactcttttacccttcccagaagttggttaatgggcacaaaaatacaattagatggaaggaacagaagaagttctagtgttcaatagcacagtagggtgatggtcgttaacaataacttattatacatttcaaaatggctggaggaaagatgtggaattttcytaacacaaataaatgataaatatttgaggtgatggatatgcaaattgtcttgatttgatcagtgcacactgtatgcatgtatcaaaatatcacatgaaccctagaaataattataattgtcatgtatcaataaaaacaaaaagggcttatttctctttccttcctcccagcattccctcctatcccagatatgtgttgctcctggggctctcctgccccacattcagtcagcactgagccagcaggagggatttcacaggtcatatcctgagatcaaccctccaccccttcaggtaatgatcctcctgctcttagtcatttatatcctttggttcatagatattttgagtcaagtg

SEQ ID NO: 238720 - DNA, 555 bp, Homo sapiens
tattttctcccattctataagttgtctttttactttctttttcttttcttttctttttttttttttttgagacagagtctcgctctgttgccaggctggagtgcagtggggcaatctcggttcaccagaagctccacctcctgggttcatgccattctcctccctcagcctcccgagtaggtgggactacaggcatgtgccacgaatcccagctaagttttgtatttttagtagagatggggtttcaccatgttggccagatggtctctatctcttgaccttgtgatctgctcgcctcggcctcccaaaatgctgggattacaggcatgaaccaccacatckggccttactttcttgatagtgccccttgaagcacatctaagatttttgttgttttgggtcttactttaaggactttggtccattttgagttaatttttgcatatgatattaggtaggggttccaacttcattcttttgcatgtgaatatccagttgttctagtatcatttgttggaaagactattcttactctattgagtagtgttggcaccc

SEQ ID NO: 238721 - DNA, 627 bp, Homo sapiens
ggctatgatgaaaagaatattgaaaaagagctaaccagaggctaaattgcaagaatttcccatgcagaaaggcttaacattcacctattcatgcccataaaascacattaaaatataagagaatctgatgttgcttaaactctcttttaactagcttggctccagaatggaagattctatttcaagaaagtctatcaaattctgactttaaataggccattgttctccccataaggggcaatgataatgtgattgtttacaaagtattgggaagataagcatagtaaggtagggtaagagaagacccatcaacaaaacccaaataaagacttgtggcaagtctaaggaaatgagactgttcttctggtgggaagaataagtaggaagtggtatttgagatgggcttagagggcctagattacaggtagaaaacatgcatgtgcaaagaaagaacatgcatgaagcaaggaatatttgtctgggatgaaggaaagacaaatagtatgtggtaagagcagtcgttcccaaatctggctgcgagacagaattaactggggagatttaataaaaacacagctttctggtctccttcgcagaccctataaatgagaattttcaaagagatct

SEQ ID NO: 238722 - DNA, 464 bp, Homo sapiens
ctactcaaggaaaactgctcacttcatttagaagcttttttttttttttttttttttcagagacagggtctcactgtgttgtccaggctgcttgcaaactcccgggctccagtgaccctcccacttcagcctttcaagtagctaggactacaggcattccaccacatgcctggcttcttttygcatttttaaactatgacttaagtgttgttttttactgtttttttgtttttttttttttctgtgtaaattttcctttgcttatattcagggccctgagtgaaaatctacagagatgctgaaagagaaaaaaggactttgaaggatttatatttttttatgttctttacttgttagtagttaaaatattagcaagcaaggggatcttttaagtttttctctaaaatataattattctaactattgaaacaatttttccagaaaagcctcttttagacaattgt

SEQ ID NO: 238723 - DNA, 518 bp, Homo sapiens
gttagaatttttcttccaagtcaaaatgccagaactgataatgccatgaggatgcaacgagtatgtgaaatatctgtttttatcaaattctggtttttactcttaggttttttgttgttgttgttgttcatttaaaaatcttttggccagacacggttgctcacacctacgaagcacgaggatagctcaaggctaggagttcaagaccagcctgggcaacatagtgagtcaccatctctacaaaaataataataataaatcttataagagtttagcaatttctcataagtttttttttttacgttacaaaaaaaaattacagacaggagtttcaacacacattttaagtgctagtttaccaaacactgacacaaaatctgatgggtgtttgcaaaaacgggtatatctgggtttgagttgggggcttacgactaaatactattaatatrccaactgcataaaatatccatatgcctttacaaatcatgtttacttaaaaacgttaagaagtagaattc

SEQ ID NO: 238724 - DNA, 568 bp, Homo sapiens
gtcatttggagagtcagggtaagggccaatgatgtcctggaagtccgagtgagcattttaaaatatggtttagaaaaatatgtggttagtaaatacttaacagggtttgaggatacttattttaaatgtcaagccactttgcatttatgggaaatatatagtcctgcatgtccatctcttactctgagtgtaacacacacaaaatgataagacaatatcaagttttaaacaagacatcatcggccaggcgcggtggctcacgcctgtaatcccaacattttgggaggccgaaacgggtggatcacaaggtcaggagatcgagaccatcctggctaacacggtgaaaccccgtccctactaaaaatataaaaaaaaattggctgggcatgstggcggacgcctgtagtcctagctactcaggaggctgaggcaggagaatggcgtgaacctgggaggcagagtttgcagtgagccaagatcgcgccaccacactcctgcctgggcaacagagcgagactctgtctcaaaaaaaaaaaaaaaaaaaaaaaaaagacatcatcacatgaat

SEQ ID NO: 238725 - DNA, 460 bp, Homo sapiens
tttttttttttttttttttaaaagtgacagaagcaaaagaactttctacaagaacagtcaaggcgtcagctaagctttctaggcttttgcctttcaggtgatttgaagatcaggcaaaatgcaaccagatactatattttaaatgttttggtttgactaactactgtttgtagtttttgtcaactgagggagttactctcgttttaggaggccagtcttcaragttctattaaaagtagcttcctacgaaatcaccgagaagtgggttaacttcttttagtttatgaaggacaaccccttttctgtaaatgatggttttggagtagttctacatacaacttctgtattccagagagaaattttctttaaaataaatgcttcctgttataagcataaatgttaaactatttataaacctgacttattatggatcaaaaaataagttaaagaaataggattt

SEQ ID NO: 238726 - DNA, 606 bp, Homo sapiens
agtgattctcctgccttagcctcccgagtagctgggattacaggtgcctgccaacccgcccggctaattttgttttgtatgtttagacggggtttcaccacgctggacaggctgatctcgaactcctgacctctggtgatctgcccacctcaacctcccaaagtgctgggattacatgcgtgagccactgtgcctggcctgaaatcacttctaaaaattgttacagtaaaaattttatgtttaccagacgtaaattttggttacatatacatttatcccaattgacacattttattcatactgaataaaacattaatgttacttttctattttttatgatgtattttgacatgtgtttagatgtatgttttatatgtatggactgacaaaatcatatatgctattatttggcatcttatgtggttggaggtcataaagaatgtaagtaactgaaacaatacatttgctcaaagaaaggccactcaattctctgccctgtggtatctaatytccctgtaatacacatttcaccatctaggattggagaagttcattctatcaacacgaatgctaacaggtaggcttctggaagtacaatgtgatagt

SEQ ID NO: 238727 - DNA, 365 bp, Homo sapiens
tgacattacctccaactctcttgtgagtgaattcacatccaacttagagcaaagtactgcatgaattatacacgaaacattgccagtgtgagtggcagaaaaggttaaattctggatttatttttttctggtgactggttcttcatctctcccatcccatttctgtgtgtgtstgtgtgtgtgtgcacatgtgtgatgttttaaagtcccctaggttttattgaaatttcctaaacatatacaattttctcctctaaactttgttgttcttcagctttaggtactgaaggtaaaattattttatatttattttcaaatgtaactattgctgaagcctgtggcttccctttcacatttgctaaaga

SEQ ID NO: 238728 - DNA, 365 bp, Homo sapiens
tgacattacctccaactctcttgtgagtgaattcacatccaacttagagcaaagtactgcatgaattatacacgaaacattgccagtgtgagtggcagaaaaggttaaattctggatttatttttttctggtgactggttcttcatctctcccatcccatttctgtgtgtgtctgtgtgtgtgtgcacatgtgtgatgttttaaagtccyctaggttttattgaaatttcctaaacatatacaattttctcctctaaactttgttgttcttcagctttaggtactgaaggtaaaattattttatatttattttcaaatgtaactattgctgaagcctgtggcttccctttcacatttgctaaaga

SEQ ID NO: 238729 - DNA, 646 bp, Homo sapiens
gcttttgaagatttggagaatgaattgtggtccaagaaacattttttttttaaattattggatagacattggctaaagtgttccaacagttttccttctctcaagttgaaatggtaactattttttttccacagtcataaattcttgaggacttaaatatattttgagaagtttatttgcagaatatattttcaaaatgaaagcatcacgatatattttcacaacgagtaaaagtcgcacttttgcattcattcaattctgtggcattgtstccataatagctaccattctagtacttaatcattttaatatgggttagtgcttttattctttttaattgccaaggaaacttaagagaaatgcttttgaattgacaaatacccattttaggaagtatctgtcaatttttttcactgtcagcattgctggtgatggaatggtttacagaacatccatttccttttatttttcctttaaggagatgatagtatctcaagaagttacaaggtaaattacagtccagtttccaatgttaaagccatcagtgcaaaccctgatgggcaaataatgtccttgaaagttattattattaaaaaaaatttgcacttcatatagaaattacagttttattctttgcctgggttag

SEQ ID NO: 238730 - DNA, 586 bp, Homo sapiens
tttaatctttaaaatattcctgtggtcctttatcaattaggaaagctttcagctttgagttccataaaacccaaataactgtggcttaaacaaactgagtgatccactctcctcaacctcccagaagcagaagtcctatcattggttcagtgactcaggggtgtcagggctctaggtcaagtctcttggccttccattcatggttttataaagaccaccatagcccagagtattgtgccatcacatgactacatttaaaagtgagaatcaggacaaaactcgtcttctcccatgcctttcccttctcgagraagctcctcagctgactcttccttttcatctcatctcaattcagccatgctcctgcttaggccagcactgggcccatcttccttgtgatcaaggagtctccatctaggaactaaacaaaacctaggtctcactaagggtctcactgcataaaggtgcccagcagaggccagaatcagtccacactctgtacagcccacaccttaagctgtgggacctggctgtgtcagtctagaggaaggggtagcattttgcaatttgtctgcctattgggcca

SEQ ID NO: 238731 - DNA, 605 bp, Homo sapiens
aaccatcaaatctcgtgagaattcactccctatcatgagaacagcatgggggaaaccacccccgtaatcaaatcacttccctccattaacatatggggataacaatttgaaatgagatttgggtgaggacacagagccaaaccatgtctgtctgtctgtctgtctgtctgtctgtctgtctgtctgtctatctagctatctatcaggcgtggtggtgggcgcctgtagtcccagctactcaggaggctgaggcaggagaatggcgcgaacccaggaggtgtaaactgcagtgagcygagaccgcgccactgcattccagcctggatgactgagggagactctgtctcaaaaaaaaaaaagaaatattcactttgacgaatgctgcactgaccgtcatattcagcaggatttggaattatcattagaatttgtgcgtacttggcaagaacacctttcccttcattgtccaggaaaattctcatctgaacctacaaggctagaataaaattaccacctcagtgaagtcttcccttaaccccttgcagccttacattttctttctgatgttcccataagtaatttataaagcttataaattatcttga

SEQ ID NO: 238732 - DNA, 410 bp, Homo sapiens
accaataagttgtgagttattctcaatttgtctaacatcatatgcagacataccttttgcactgtactttgctttatcactcttcgcagatattatgttttcgacaaaaggatgaaatgtggtaaccctgagttgctcaagtctattggtatcatttttccaacaccatgtgctcacttcatgtctctgtgtgacatttgaataattcttccaatatttcaaacgtttycattattttgtgtgttatggctctgctgattagcaattctcttgtcattctttctctcctcaggcctccctatttctcagccacaacaatattgaaagtaggccaattaataaccctacaatggcttctaagtattcaagggaaaggaagggttgcacctctttcactttaaatcaaaagg

SEQ ID NO: 238733 - DNA, 597 bp, Homo sapiens
atctaggcatatacctcaatgtattatttttgtttctgtagtctattttcattaaataaatataaattttaatgagggcacaacttgtgttactttttttcttaattctggtaataaattttatcttaacactatacacgttgggaacaagccctccaaaatctggctgtaaactggccccaaaactagccataaacaaaatctctgcagcactgtaacatgttcataaaggccctaatgcccacgctggaaggttgtgggtttaccagaatgagggcaaggaacacctggcctgcmcagggcagaaaactgcttaaaggcattcttaagccacaaacaatagcatgagcgatctgtgccttaaggacatgctcctgctgcagttaactagcccaacctattcctttaatttggcccatcccttcgtttcctataaggaatgcttttagttaatttaacatctatagaaacaatcctaacgactggtttgctgttaataaatacgtgggtaaatctctgttcagggctctcagctctgaaggctgtgagacccctgatttcccacttcacacctctatatttctgtgtgtgtgtctt

SEQ ID NO: 238734 - DNA, 539 bp, Homo sapiens
tatccatctagaaatctaacttagatttgcattggcctctcaggactactcttgatcttcattattccattacctaggtttttgaaaatatagcataaattccatatgcccatttcatgagctcattttcattattctgctcactaataccaggtttctgaccccataaatttactgaacactatcacctaggtaatcatggtatacacttcttatttttgttaaactcagtttatctgataatgacttaccaggccctggggcttccacaaaaatttccgcataacacattttgccatttaataatgtcctrttgtttttactttattaagaaattgctaatcaaattacctaatcagatgataagttaggcatttgcaataatggagcctcttcttgttctattctactttattgatgatgaaagggacccatttaatttcagaggggtttgacaaatcgatgagatgttagtggattctagtctaaaatatctcacgaattctctttacacagaatttcactttcagatgccttaa

SEQ ID NO: 238735 - DNA, 402 bp, Homo sapiens
cacatctttctgattctcaagcctgtactgtgtggcacacctccaactctgaactgggtctatctggtcatgcaaatttttttcaagtgtggttctctgcttgcttccttcatgaagcaaaataacataagcaaggaagcatattgtgccacgttcccaaataatcacactatttctcttgtagattccttccttaaaaacattccaaagctgcattggtacacttcctgagaaagagaggggtccggatggtttcactgtgtaactrtgatacatgaggtgatatattcatcacacatcaaacctgtttatattttctaatttcattcaggctacaatctcctcttcttaaacttgccataaatttgcctcaattcactaaaattgccttgagtatgttaa

SEQ ID NO: 238736 - DNA, 617 bp, Homo sapiens
aaaacagcttcaaatactgtaacttttatttctctgttattgtgtatataatcagtacaccaaaatagcacatactgcctttttaatacactttgtacgtgtttartctaggtgattttcataattttcttcagagccactgttttgacagcatacaaccattgtagatttctgataacatgaattaagcttgatatatttagggtattttttgcttttcaaaattgatttatttatatattgagcagcttatgtacactatacatcaaaaaatgctgacctctattttcagctgtgctttatatgtgtagaaatcctgtttctcttttctaagtaaatattcaacattatttttgagatcaatttctagaaatttgattacttgatattggctgatgttaaattacatgcctatagaaaatatattaaagaactcccgcagaaaactcttggtctatttagttaaaaaatcccatggcagataagcgcaattacttattcatgacaaagagaacagaatccagtcagtttcctacattaaatgaaaaaagcaacatttggatttgataactgaaaagaaatgagagtatgtacagaaaactaaattctttcccata

SEQ ID NO: 238737 - DNA, 637 bp, Homo sapiens
actgctctttgtccatcttcttatctgtcrttgctcctatctttgggcatgggtccttttgtcatcccatgataataatgatccaatatgatacatctccagatttttgtctgatacacatgggtgcatgtgcaaacacatatctgtatgcaacttcctgttaagtatactcataaatacatatgtacagatagaatctatatatgtttcaaaatatcttgacagccaagaagtttgattgttcttctcctccatgtctctatgttcttattatatgtggacacctatcaaagtccttatcacataaagctgaagtctatttgctcaaatatctcccctaccagacataaaatcctgtatctttcacttcacatttgtattcaaaacatgaagcacaggatctggtgcaaagtaaacactcaagaaatgttactaattgaataataaaaactagaggagaaagaaagcagaaaagagagtaggaaataaattagccagcaatctattttaaagaataatcaaaatatgcaaaaaataaaatggccttgaggtatcatttttactcttaagtaaatcggcaagaattaaaaaaaataaaattctcattgctagtaagggtatcaattctgcctcttat

SEQ ID NO: 238738 - DNA, 616 bp, Homo sapiens
gagagagactactgagttagaaccatgagatctttggggatgaatctgatgctttaaaatggtatttattaaactgtctaggaaagggtatatcttatctgaatcagatacctagaatcactatctatcttcactttagtttggggaacacctcagtcctctagaggtccccaaactatgaagtacctccctcaagtccagaactctctcttataattcatcccagccccacccagcctgtgctcaaatccaatctgtccctagaaggagagagtgagaagagaagtagtacttcacatagcttgacattttgcctatttcactcttgttggtttctttyactttattctcaaaagtgctaaggatgtacaagtggcttgggaaattggggctattcaaagtcatggtcttttgcattagttggtctctaaaaataattacttgaccttgcatttgagagtgagaactcaaaggtaaatagtcatttctaagataatcaggaacaacctttacacagaaaagtcagtttgctgttatattagctgctctacagagtcataggaaaagtaaacatagtacttattaaagagttcaaatggacttgtagagggttcct

SEQ ID NO: 238739 - DNA, 292 bp, Homo sapiens
gaattcaggcacatgtctgtatgcaaagtctcatttatatcctgctttaccgttttggttttcaacatggtaagagcaaagggtggctctctacaggctcagtttctccagctgattttctgtctcctcttactcaccacttcttattaattcattagcagccagtacagtagaagtcaccttagctttctgtttccctttcctaccagcagcctcttcacatctscttcaaaactcaccaataagcttctaccatgtatgtcacagaatataaaatcttaatgttcatcag

SEQ ID NO: 238740 - DNA, 538 bp, Homo sapiens
tctttttttttttttttgagacagagtcgtctcgcactttcgcccaggctggagtacagtggtgcgatcccagctcactgcaacttctgcctcctgggttcaagcaattctcctgcctcagcctcccgagtagttgggactrcaggcgtgagccaccacgtacagctaattttttgtatttttagtatagatgaggtttcaccatgttggccaggctagtcttgaacacctgacctcaggtgatccactcacctcggcctcctaaagtgcttggattataggcgtaagccactgcgcctggccagatctctttctcttaatataggtaactggatagataaccgtatgtatatgttgccccagaaatgttgccctagaaaatattccagggacctcataaaaaacggcatttttaggatttgacgttcattgtggaaactctctggttggaggttttagcattatattgccttgaatatagcaggagggccaaaaatatttcttaattaattgacagagtccccctatttaagttcat

SEQ ID NO: 238741 - DNA, 577 bp, Homo sapiens
aggtataaacattctatccaagtgtggtagcccattctcaggctgttatgaagaaatacctgagactaggtaatttatacggggaagaggttgaattgactcacagttctgcatggctggggaagcctcaggaaacttagaatcatggtagaagaaacaaacacacccttcttcacatggcagctagagagagaagtgcagaccaaagcggggaaaagccccttgtaaaaccatcagatctcatgagaactcactcactgtcatgaaaacagcatgggggaaccaaccccatgatctaatcacttcccacaaggtccctccctcaagacgtagggattataatttggattacaattcaaaatgagatttgggtggtgacacagagccaaaccatatcacccagtatcttcccatttccctcagactaaacctttctacggaagcttctgcactcttattatttatctaatcttcatttctactcttccacccctccktcattctctttgcctttatttttctctctactagaaaaagcttcttccagatagccatatgatttgctatttatgtcctt

SEQ ID NO: 238742 - DNA, 567 bp, Homo sapiens
tataggatatttgaaaagaaatttcaatttatatacctagttttgtagcagagaattacgtggtagttaataagggctttcaagcataaggatgaatttcatcaaggtaaaattctatgagggaaagagaatggaaatacagttccaaggaaaaaaaggaacaatgctatggaagagtcgtgtaatttttttatttttttatttttattcttatttatttatttatttatttatttttgagacagttttgccctcatcrccccagctaaggtgcaatggcacgatctcaggtcaccgcaaccttggcctcccaagttcaagcaattcttctgcctcagcctcccgaatagctgggattacaggcatgcaccaccacacccggttaattttgtatttttaatagagatggggtttctccatgttggtcaggctggtctcaaactcccaacctcaggtgatccacccgcctcagcctcccaaagttctgggaagacagacttgagccaccatgcccggccccaggttatgtattttttaaattggccctgataagtgcaaaatcccatg

SEQ ID NO: 238743 - DNA, 528 bp, Homo sapiens
ttgacaatattgaatttcactgaagccctttgctcctggaagacagtgatgggtaaagtaaacccctcccatccccccacaccaacctttttttgcacgttctagaaaacagcttactgcaaaaaactgaggtaggaggtgggactcaactctggaggtggtgcttggacactggaccatattgaggactagctaaaagagggacagagcagaagcacctctccgtaaggcacgcccacctgtgtgccatgtcagtttaccattgccatggcaacaccctgaagttacagcccctttcagttacaacttgatgacctggaaactaccacccttttcctaaaaatgtctgcataatctgccccttaatttgcatgtaattaaaagtgggtataaatatgactgcagactcgcctttgagctgctactctgggcacactgccattggtacctctgctgctgctgccaatgctgggrcctgctgtgtcaataaaagttgctgtctaaaaccaccagcttacccttgaattc

SEQ ID NO: 238744 - DNA, 588 bp, Homo sapiens
gaaatcaaatacgcaattttaaaagatgagtacagagcaaaacttactggatgcattacacaaagtaaagttccatttctaaatactttcattttttaatcagaaagaataaaagtatattattgagcactaaacttaataagtatcctaaggaaatcaggagaaaagcaataaagaaaagataaaataataaattagaaaacagtgggaataaaaaaataaatcgaagatttgatccttggaaaatgccaaaaaaaaatgtgccagacatttgaaggatatcacatactcaaataggggagattctgttaattctgttaattattcaacagaaagccttgggtaaatttgggtaaatatttagaaaatatcaaggctgtgtcttacctcacatcatacataaaagtaagtcccaaatgtattgaagagttaaatattaaaaagaaaatgttaaggggaagatgtaggcaatatttccttgatctcaagrcaggaaaggatatttaaagaatgaaatcatgtcttttgcagcaacatggatgggttggaggccattatcttgagtaaaataactcagaaagtcaaata

SEQ ID NO: 238745 - DNA, 621 bp, Homo sapiens
atgctctaccttattatcttaatgtaactctccatcatttcattttttagagaataactccttttttccttttttaattttgagatggagtcttgctcagtcacccaggctagagcgaagtggcgccatctggactcactgcaacctccgcctcccaggttcaagcaattctcctgcctcagcctcccaagtagctgggattacaggcacctgccaccatacctggcttttttttttttttttttttttttttgkatttttactagagatggggtttgccatgttgatgaggctggtcttgaactcccgacctcaggtgatccgctgccttggccccccaaagtgctgggattacaggcataagccaccgcacccggctgagaatagctccttttaaaaaatacgttatcaatgttttttctgccaggcattgtgctgaattcaggaatgcagagattaaaagacccagattctgctctatttgtttttattttttaattttagggtcctgctgtgttgcccaggctgtaatgtcgtggtgcaatcatagctcactacagccttaaactcctgggctaagtggtcgtcctgcataactgagattgcaggcatgtaccacca

SEQ ID NO: 238746 - DNA, 621 bp, Homo sapiens
atgctctaccttattatcttaatgtaactctccatcatttcattttttagagaataactccttttttccttttttaattttgagatggagtcttgctcagtcacccaggctagagcgaagtggcgccatctggactcactgcaacctccgcctcccaggttcaagcaattctcctgcctcagcctcccaagtagctgggattacaggcacctgccaccatacctggcttttttttttttttttttttttttttgtatttttactagagatggggtttgccatgttgatgaggctggtcttgaactcccgacctcaggtgatccgctgccttggccccccaaagtgctgggattacaggcataagccaccgcacccggctgagaatagctccttttaaaaaatacgttatcaatgttttttctgccaggcattgtgctgaattcaggaatgcagagattaaaagacccagattctgctctatttgkttttattttttaattttagggtcctgctgtgttgcccaggctgtaatgtcgtggtgcaatcatagctcactacagccttaaactcctgggctaagtggtcgtcctgcataactgagattgcaggcatgtaccacca

SEQ ID NO: 238747 - DNA, 309 bp, Homo sapiens
tgactagccttttctgagagttgtcccctctccatgtacccttcatctgccctattctatttaactctgtctcctctgcagccacagaaggttgcacctgtaatgtgttcccagtgttcacctgaaatgaactccaggtgtttgtcctagatgctgggctgagctcagcctgagccaagctgcacrtagggagcactggtctttgaatgggagttcaaagagaaagaactttaagagagttctgtctcctggatatttggaattaggacagcaaaggctgagccaatttgccacaggcacaggatctgt

SEQ ID NO: 238748 - DNA, 605 bp, Homo sapiens
taatattatgcagctactaaaataatactttacaaagaatatatgatataaaaatgcttattataatacaagggagaaaatttgtagccattttttgttgttttatacaagcatgcattaaaaaatagcatagaaagactaataaaaagaaaccacatcagtgctaaaaacggttgtctcttagtttttctttattttcaaaattgtgtrttatgtatatgaatcgcttttataataggaagatacctaaataaatatattaacaaaaagctgaatgatagaaggacattttaagacaggcatctttcatgattatagagaatggattggcatactacaaaacgattgcttctaaaacacacaaacagcagaggaagcttttgtgttagaagattattggttgtgattagatgggttttcagcatcagggcacaagaagcaccagtttggtgacatcgagcaaggaggcagggctacaagggactggcagatggcaagaacctacactctgcaggcaaatggccaggcgccaggatcagatgagggaaagggcaagctaggagactgcgccaggggagccagtggtaggggccggacaggagcca

SEQ ID NO: 238749 - DNA, 539 bp, Homo sapiens
  misc_feature (1)...(539): n = A,T,C or G
aattgattacatttatattttggcttgattagatttttttcaattattttagtgttcagagagagcattcttattttgagaggggagcttagttttagttattrtttctctgtctcccagtgtgcccatcatgtgtttgtttagtgggtttgcaattataaaaggaaggatgaaattttaacaagaagaaatgttttcaggaagtttcacctggtgtgcccagcagcatcaaaggattcaggtgaaaacctgaagactggcagaatgaatgaatagttacactgaaaaactggctgcattgggaagagattttttgagaaaagaatctggaaatgtagactggattcataaagatgggaatctttgaaacaaagctcttccttttattatgtagacttgtagaattcttaagtattttgttgtttngcctatgattctgattccttaatggtagaacagggataatatttgcttacaattattctcaaagttatcatgtaaactaattgttactatttgtgacatgatttgaagatctg

SEQ ID NO: 238750 - DNA, 539 bp, Homo sapiens
  misc_feature (1)...(539): n = A,T,C or G
aattgattacatttatattttggcttgattagatttttttcaattattttagtgttcagagagagcattcttattttgagaggggagcttagttttagttattgtttctctgtctcccagtgtgcccatcatgtgtttgtttagtgggtttgcaattataaaaggaaggatgaaattttaacaagaagaaatgttttcaggaagtttcacctggtgtgcccagcagcatcaaaggattcaggtgaaaacctgaagactggcagaatgaatgratagttacactgaaaaactggctgcattgggaagagattttttgagaaaagaatctggaaatgtagactggattcataaagatgggaatctttgaaacaaagctcttccttttattatgtagacttgtagaattcttaagtattttgttgtttngcctatgattctgattccttaatggtagaacagggataatatttgcttacaattattctcaaagttatcatgtaaactaattgttactatttgtgacatgatttgaagatctg

SEQ ID NO: 238751 - DNA, 514 bp, Homo sapiens
ttggatccatttttttaaaagtttactttaaattctgggatacatgtgctgaacatgcaggtttgttacatagctatatatgtgccatggtggtttgctgcacctatcaacccgtcatctaggttttaagccctgcttgctttaggtatttgtcctaatggtctccctaccctttcccctaaccccctgacaggccccagtgtgtgatgttcccctccctgtgtccatgtgttctcattgttcaactcccacttatragtgagaatatgcagtgtttggttttcttagattcatttttgtgcttctcacagggcacagcactgtttctccaagagagcaggtacttaacaatggcatgactgaccactattaggcatcgaaactaattttatttcaacagaccagaactcacagaaggcctattattatttttaaagtagtcaccttagagtctttagacacctttcaataaatgttactgctcagtatattttgagaaatggtgttataaaat

SEQ ID NO: 238752 - DNA, 514 bp, Homo sapiens
ttggatccatttttttaaaagtttactttaaattctgggatacatgtgctgaacatgcaggtttgttacatagctatatatgtgccatggtggtttgctgcacctatcaacccgtcatctaggttttaagccctgcttgctttaggtatttgtcctaatggtctccctaccctttcccctaaccccctgacaggccccagtgtgtgatgttcccctccctgtgtccatgtgttctcattgttcaactcccacttatgagtgagaatatgcagtgtttggttttcttagatycatttttgtgcttctcacagggcacagcactgtttctccaagagagcaggtacttaacaatggcatgactgaccactattaggcatcgaaactaattttatttcaacagaccagaactcacagaaggcctattattatttttaaagtagtcaccttagagtctttagacacctttcaataaatgttactgctcagtatattttgagaaatggtgttataaaat

SEQ ID NO: 238753 - DNA, 514 bp, Homo sapiens
ttggatccatttttttaaaagtttactttaaattctgggatacatgtgctgaacatgcaggtttgttacatagctatatatgtgccatggtggtttgctgcacctatcaacccgtcatctaggttttaagccctgcttgctttaggtatttgtcctaatggtctccctaccctttcccctaaccccctgacaggccccagtgtgtgatgttcccctccctgtgtccatgtgttctcattgttcaactcccacttatgagtgagaatatgcagtgtttggttttcttagattcatttttgtgcttctcacagggcacagcactgtttctccaagagagcaggtacttaacaatggcatgactgacyactattaggcatcgaaactaattttatttcaacagaccagaactcacagaaggcctattattatttttaaagtagtcaccttagagtctttagacacctttcaataaatgttactgctcagtatattttgagaaatggtgttataaaat

SEQ ID NO: 238754 - DNA, 420 bp, Homo sapiens
tgcacagccatgtagaaatatgactggacaaaaagggtgtgatctaacactaatagactgaataggtaaacccagaaaggtctgtttggattctaatatggcctctgagcagcatttcttcctcctggatgtggggcaggaacttctctggaatgagargccagggacaggagggaagagggctggagagtaactatccaggattctcaatttcctgtctgtttgaaagaaagtctcccatgagctttaacagagaaaaggagtgtcttgttatctggaacaccgatggtgataatctagctagaacctgccagggtaacaaaaaggcccaaggctctctgatagtatcatattttctctacctgctcttttgaacctaatccagtcaggaattgcctctggaatagaggcaatgagtca

SEQ ID NO: 238755 - DNA, 391 bp, Homo sapiens
tcctcagaaagcttggtgtagtcatgaccaagttctggtcaatgagaatgttaatgttgcatctttcaggccacacccttttaaaaggaaggggtttgcctttcccctccatttcctaactttttttctttcctgatagctggaatgcaaatatgatactgagttatcttggactatgcakatgcatgtaacacaccagccttgtatctcatggctttcatttgctaatctctgaatattaattaggctgagcatcttttttcatatgtttacaggtcattcaagtgcagcattcaactcaatgagttgaaaaaaagtaataagacacatctaaagaaggaagaaggagagaaataataaagatgtttatttttaacctttcttaattcct

SEQ ID NO: 238756 - DNA, 391 bp, Homo sapiens
tcctcagaaagcttggtgtagtcatgaccaagttctggtcaatgagaatgttaatgttgcatctttcaggccacacccttttaaaaggaaggggtttgcctttcccctccatttcctaactttttttctttcctgatagctggaatgcaaatatgatactgagttatcttggactatgcagatgcatgtaacacaccagccttgtatctcatggctttcatttgctaatctctgaatattaattaggctgagcatcttttttcatatgtttacaggtcattcaagtgcagcattcaactcaatgagttgaaaaaaagtaataagacacakctaaagaaggaagaaggagagaaataataaagatgtttatttttaacctttcttaattcct

SEQ ID NO: 238757 - DNA, 575 bp, Homo sapiens
cccctgtttcttctcacccccaccccgcgggcatttcgaagtcacgcgtgctgctgtggcctcattcattcaacacgcttctcagcgcgtcagctcagagaagccagggacttctaagtgtgcggagcagtccggcaagaattggaaggcactagcattgccaagggtggctctaaaggccacccctaactgcactcaactccctccaactcccaccccgcacgaaaacaacagaagtaaaagcaggcagcttattagagatgcgccttcaaaatacccttcgagttaatctcagcccccctccccggattgctgtctctaaaccgctcttaccaaaaartaaaacacataaaaataaaataaaattggaaccgacacgaatttcagactgtagaagacagagaaaacttctaatttttttaagtaaacatgttttttaaagaaaggagcaagttttttctctctcccactcgacctttaagatagtgcatgttccaaggtcctgagtagataattatatcaaaagcagaaagggatggacaccggtagctacgcgaggttctggaatgggactc

SEQ ID NO: 238758 - DNA, 575 bp, Homo sapiens
cccctgtttcttctcacccccaccccgcgggcatttcgaagtcacgcgtgctgctgtggcctcattcattcaacacgcttctcagcgcgtcagctcagagaagccagggacttctaagtgtgcggagcagtccggcaagaattggaaggcactagcattgccaagggtggctctaaaggccacccctaactgcactcaactccctccaactcccaccccgcacgaaaacaacagaagtaaaagcaggcagcttattagagatgcgccttcaaaatacccttcgagttaatctcagcccccctccccggattgctgtctctaaaccgctcttaccaaaaaataaaacacataaaaataaaataaaattggaaccgacacgaatttcagactgtagaagacagagaaaacttctaatttttttaagtraacatgttttttaaagaaaggagcaagttttttctctctcccactcgacctttaagatagtgcatgttccaaggtcctgagtagataattatatcaaaagcagaaagggatggacaccggtagctacgcgaggttctggaatgggactc

SEQ ID NO: 238759 - DNA, 563 bp, Homo sapiens
cggccgcgcgaacccgtttgagctcggtatcctagtgcacacgccttgcaagcgacggcgccatgagtctgacttccagttccagcgtacgaggtgaagtggggcctgggagcgggtgaggctggtgaggctcagcggttgccgcgcccgcagttcgactgggttgttttaccactgccctacgcgcccgcyggtcctataaccttgagatgcagaagggcaagcgctcggcccggctgcgggctccgggccggacagcgaaagggggcgaggtcagggatggattgatggtttggggccatgccggaccagagtccacgtttaccccagctagccaaaccctaacacctaatgaccgcgccgctagcttttcttgttcacccctaagacgctttcatgtccttaagtcacatagcctggaaaagaaggaaaggtgggagaaaacaacagcaaacctgtttgcccttctcatgtttcagtcagcgtcgggccacaacgtcgatttcctgcaatcctgaagcattgcgtgactaatcacatcttagttttgcagattttttttt

SEQ ID NO: 238760 - DNA, 620 bp, Homo sapiens
cagcgataaggagttctgtttcagagagtgaatttgagatgatagttgaatggaaatgcacagcagacaacacgaaatgtgagacatcrgggttggagatagagatcagcaaaactgatgagtcaagtgtaggaatgcaactgatctttgatatggataaaaatcaagggctaaatatgaaatcttggggaattttctgcattttggaagggggacaagagccatttaaggagatggaatgggccagagaggttagaataaaactaaaaatatcatagcttcaaagtagaagagggaaaagtttcaatgatctggtactgaacattggcctgtgcaaagacagctacatgaatagacaagactattagattaagcaattgccattttggtgtcatttcaacggagtaattagaatagaagctatgtccatgtgagttaaagtgcaaattaactaataaagaaacgacagaagtctatgtcatattttccgtagatgcaacagtgaatggaaagaaaagtaacataattgcttgagtgaacactacagcttggctttgagatcaagtaaagggtgtttgctttgattgggttttcccagagggcaaagaatccaataaact

SEQ ID NO: 238761 - DNA, 581 bp, Homo sapiens
aataacagaggaataatatgcagttgatttattttttattttttatttttatgttttttgagaccaaggctggagtgcagtggcacaatctcggctcaccgcaacttcccctcccaggttcaagcctcagcctcctgagtagctgggattatgcgcactcgccaccatgcctggctaatttttgtatttttagtagagacagggtttcaccatgttggccaggctggtcttgaactcttgacctcaaatgatccacccacctcaacctcccaaagtgttgagattacaggcatgagccatcgcgcctggccgcaaattgattttaaataaatgaacttaaactcttagaagtaaataggcaatggacatgttcactagaaaggaatgtaactaatatataaacataaraaaggccttcaacactcatcacaatcacactgaaattcaataaatgatgtgtgtattatgcacaagtcaatttcttcatcttactaagtagcatatgtagtttacatatgctgtttaagaaagcctatataagatagccaagaaaatctttatgttatatgaattaagcatca

SEQ ID NO: 238762 - DNA, 506 bp, Homo sapiens
tgaaaactaatgggacaagtggaaatatcctgatcaaggagttggaacacacccaagcttctgtgtctaaaagataaccatggatggtatgagagaagaaagaagcacaggacatttaccttcagattttctcctcccatctccaaccaccttaagcaaaaaggaagaaaacagatccagccccactctagggctgcwcaataatttcagtaaaaagacttgaatttcaaatatcagaataaagctaattagatagtaatacatagtacagtagatccttggcattcaaaaatttattatcattaatttagactcaagagactccagaaatcttactggggtcaagttgtatatgggagtataaagatagtgagagaacgtagctaaatgtcacagcatctatatctcactgtagggttagtgtcttctacctgtcaacctgacagtgattaaaaacaaacaacaaactttttatgataagataaagataagagaagctagggtag

SEQ ID NO: 238763 - DNA, 570 bp, Homo sapiens
gtaatccttttctcacacactacatttaatccatcagcaaatctggcccattctaccttcaaaatatatcctgaatctgaccaactttctagcactccatcctagacaaagccaccatcatttctgtcctctggattattgcaatagcctcccaaatgatttccttgcttctgtgcttggtgtctctattatttagtttccacacagaagcctgggtcagaataaaagccaccatggctaacayagctctaatgacctcttggacctcatcccctcccactccctctgtcactcagctccagccccacgggcattttagctatttcttaagcaaatacatcaacaaactaagcataatttaccgcaggatacctttacccttgtcattcccatttcctggaacttgcttccctcagctatccatttaggatggtggcagagacgcaagacagggagaaagaagtgtaaatatactatgtcataatttcttaataggtagtagctaaataccgtctaaacaaatagggccaggtgcagtggctcatgcctataatcccagcacagtgggaa

SEQ ID NO: 238764 - DNA, 648 bp, Homo sapiens
tcctgaatattgatggctgctttggtagaaggttagctagtagtccactttgagagggaatagagtccttgaaaaataattgatggagagtaaaaagattatgccatgaagtaattgggaagtaagcactgggaagaactgaaattgagaagaggaaaaataataataataaataataacatggtgtcttggcacttattatgaaccagacattgtgctacgtgctttaggtatattatctgccttgttcctgacaacagccttttgaagtagctatcaccttttgtatattacacacacagagtctgaggttcagagattcagaggttcatttgctgagggtcacacaggtgataaagtggggtggagccaagatctgcagccagctttgtctgataatagtcgtctcaaagagtagaaaggtagcagaaaaagaagcaaaagaaatgttgtaacatctctctctttttttaaatgtataaaggatggaacaaaaaaaagcagagagataaattctgctgtaccttgaggaggggaaaaggcaaaaggaacttctgatagggttgggacatctgcttattcctctaaggtcaccggaaktaaaaaggactgccagcaatgtctcagggaaaaaaacacttcatcaga

SEQ ID NO: 238765 - DNA, 555 bp, Homo sapiens
gatcagcagaactgcccagccaacttgcagatccatccaaataataaagggggttaagacttacgctgccacttcggggtgttatgcagcaataattgtggatagagtggtcaggctagtccatgatttagattgattatcccctccacctctgacataacttgggtgggtcagggccaaccactatgaagagtggaaactgagagttaaaacgagtaagaatgaaaagttatggtattacagtttctttatgaatttataaatatgaggatgttctttgaactggattcaagcctcgaaagctataaactaggtctatttacctgaagtctatgatctttaaagtgtatgaggtgagactggttaytcctccgtgcactatctccacaagatgcttccacactcatcattttccttgagtccattccaaggcactttaacaatttatgttaactttcattaaataataattttaaagaccttcctagctcctcttagaaagacttggttttcaacatttcttggcatttgagccaattgtaccatgtcatttac

SEQ ID NO: 238766 - DNA, 460 bp, Homo sapiens
atctgctttctccattagatttgtcataatgatttataacttgcttttctgttttccaacatgcctatcagcaagataatatagtacaaagaaacagaatgctgacaaaactcaaattggtttaatttctttttttttttttttttttttgagacggagtctcattctgtcgctcaggctggagtgcagtggcgcgatctcggctcactgcaatctctgcctcccctgttcaagcaattctctgcctcagcctcctgagtggcctcctctgaggattacaggtgcccgccaccatgcctggctaatttttttkgtatttttagtagagatggggtttcaccatcttggccaggctggtcttgaactcctgaccttgtgatccacccgcctaggcctccaaaagtgctgggattacatgcgtgagccactgctcccagcctcaagttggtttaatttctaa

SEQ ID NO: 238767 - DNA, 488 bp, Homo sapiens
tcaggacttaagtctaagtcctctgatctagtgctctttccatcaaatgacagctagaggttggagcaaacctatgagttatgagagaagtaggaaggcagctccagaccacttgcaaggaaactgggatctgctctgggttgtgtcatccaccagctgtgaaaacttagctgagtcatttttawttctctgagccacaatttcaaggaactacactagacaatctattatgtgcttccgattctaacatcctatggctctgtaactgagaatgcttatgcaaataaggtacaaatcatgctttatataaactatgagtcttccccggtgactaccggagaaacccactgtgtatgttctgctggggttctattttagcttccacattcatgtcccatgaacacctgtgaaaatgtcagcagttaacagatgagttgaacatcaacttaaactagctttataacccaagtcacgggcttctcatttgc

SEQ ID NO: 238768 - DNA, 470 bp, Homo sapiens
acttaagtctaagtcctctgatctagtgctctttccatcaaatgacagctagaggttggagcaaacctatgagttatgagagaagtaggaaggcagctccagaccacttgcaaggaaactgggatctgctctgggttgtgtcatccaccagctgtgaaaacttagctgagtcatttttaattctctgagccacaatttcaaggaactacactagacaatctattatgtgcttccgattctaacatcctatggctctgtaactgagaatgcttatgcaaataaggtacaaatcatgctttatataaactatgagtcttccccggtgactaccggagaaacccactgtgtatrttctgctggggttctattttagcttccacattcatgtcccatgaacacctgtgaaaatgtcagcagttaacagatgagttgaacatcaacttaaactagctttataacccaagtcacgg

SEQ ID NO: 238769 - DNA, 582 bp, Homo sapiens
tttagagttagacatgcagaacctgaattttatttctggctttgcctcttaccaaatatcttcatttaataagtgtcagtacccttatctgtaacatgggaacgttaaatgtacctacctcatactgttactataaagaataaacaagattatatatgtatgtatatatgtatgtgtgtatttatacatattgaatttttagcactgtgtgtgctacatgataagaactcactaaatggtagttactgtgaatcctaatttaagaagtcgtgatggtatgtttatttcaatgcaaatttccgtgcttaatgtatttgtctgtctaatatgcgctctgagctattgacaaattggattcattgttagttgcttaaaatataccccaaagaggaagaatgcacactgggctagtattatagttatttttaactataataaamaatggaatggaaaaaagcagaatagaaataagagagatttacaatgttgctaaaaatacttatggatttcttaaagctttgatgatgaaattataagctaaatttatgttaaaaataattattgaaaagaagaagataaaat

SEQ ID NO: 238770 - DNA, 542 bp, Homo sapiens
agagatctgccaaaaaataattattatatagctatggatatgttaactagcttgattgtggtaatcgttttacaatgaaaatgtttatcaaaacatcaaattgtatgcattaaatatatgccatgtttatttgtcaattatactccaataaagctggaaaataaatcattttggcactttgaattggagcttagagaagtcagagctggaggcatttttcagtatgaagttggtattccagctacaggactggcgaactttgctstgccacagagtgtaggtggaaagtttgggccctggagcagcaggggtcaagcagggaaagaggagctcagaaggagaggccaaggaggtggataaaaccttcagagggcaagtgtcccggaagctaagtgaatgaagaacatgcttaagaatgaggatggaatcatctttgtcaaaaaaaagtctctctcagccttgtttcattatctagagataatatacaaacaaaaatggtcagagctcctagaaaaccttccaaatgattgttgtacttaatg

SEQ ID NO: 238771 - DNA, 574 bp, Homo sapiens
ggaactctctaaggacatgattcagatgactgaccttaaacaaccacctccctgttcatccatcaatcattcacaaatccatctgtttctgagtgggttactgcaattgcaccaaaatacctagcatctgtagtctcgggggaaatgtgttgcaatcttcatcagtggtaattttctgtaaggaaatgttagtacagaaaacaagctcctcacaacaaattgtaagtatgactaccatcatctatacccacctcaaccaaacsagcaacgatgaagattatgatttggactgcacaagtggaactagtagtttacccaacaagagacatttttctcaaagtgaatgaaatcacttcacatttttcatctgttcatgccttgaccataaatgtgcttttgtaatttttgctttaccaagtttgctctgcttgcctcaggttgctgagtaaccagattgtttccttcaatctccagtctgtgtatcttcattcagcaaatgtttttggttggaggtgtgtgtgtgtgtttaggtatttagggacagtaagtacacaggaagaagggatgaatgaga

SEQ ID NO: 238772 - DNA, 650 bp, Homo sapiens
tctgtaaaggttttggatatgctgtctgtgccatgcaatttgaagccgtaacctctacaccagacaagtgaacatggatgtgactgagctgtggagctgttgaaaggtgatcctgcttctcaggggtgagtggatttccagtttaggtggctcagcttgttgctgagtaatggtaatgaatgaagtgctgataatgaatgaagtgctgatatgacattcttcttgtacttggtggttttgatagatgaatgttaacatccagtgagcataacaaactagaattggttttctttcaaaagcaatggcttgtttggaaaaccttgatccagttggatatgcagtgtggagtttctatagtcacacttcatgatgggccctgaatttggatgtaatttccatatactgcttcatattgttgttctgattgagcatcgctttccattcacagaactcgttggtggcaaakacctcatgaaatttcctaggatttaatgattgagcctggtctgcttacagaaagtattttatgggtgggatatacgtagactgaagacattatatttactatattttaaaatatattttagcttttgtatttttttctagtgactttttatttatttatttatatttttgagaaggagtcttgc

SEQ ID NO: 238773 - DNA, 520 bp, Homo sapiens
ccttgcatgtgtatttcttgcctgtacagttaaatttctcaaggccaggaactgtgtcatattttaaagctactgctaattccatttggtatcagttatgtttaacatttatttcaaagccaattttataaacattgtcctttttagaggactttattcgtttttgggttctgtctttggctctgggtctttgtcttttgcttttccagatgttggaagctcttgagcaaggatttgaacactcatccaaagtcaggcatctttgtgcttccaggaggcaggkgttctgtgtgagagattaaacggccattctctctgtggctgcaggatttcgcagggcacgcctctggagagtagtgaggtggaaaagtggttacaaattagaggatacaggttcctgtccttctttgttgctgtcgagctgtgtgactctgggaaaattgctttgcccctctgagactcgctttctcacctgcgaaatccattcattcattcatccagcagatagtcactgggttcc

SEQ ID NO: 238774 - DNA, 444 bp, Homo sapiens
ctggtcatttaggcaacctctgcctagcatgtaccagaattccaaacttccagaaagaaagcaggtgtttagcataaatcatattgtttgcacaaacagcttaggcacagtgatcccctcttcagttagcaagtagtgggagccctccaaaatccaaattcccagagtacagccaactgccaactctgtaagcatgtctttctaagatagtagacctgctatgttaaatctttctgcatatcacctgaataccacactctcayggttctcctgagcttatgtacaatacctagcaccttagacattctctctcacatagagtataatagaatagggatgagtgataataagctcgatatatttttaaagtcaaccataaacatatgtctattaaatgtgtattaaggtaattattaagttagatggatagatgaccacgaaaga

SEQ ID NO: 238775 - DNA, 518 bp, Homo sapiens
atttttaaaaatatgtaatctgaatcttggattgaaaagaatcaaaagcggtcaactgaagccgctcacatctgctctcttcccaacgtcttctttttgttttccaggcttcaactgtatgaaaatgcatttagatctcttttggcatggatttgcaagaagtgatctaaagggtgaacacattgaatatcaatcagcagaatatatttcaatctgtacaaaaaaccggaaaaaactacaacatcctggaaatacaattgaacacactggtctgtctatatgatgacaaatggcatatgaaaaatagagctatattgtaaacaccgggcatctagaactggtttaaagcgagatgtggagaagcatgtttattgtgagagataattaaattttacattataaacacctactcgttgtactagattcactgaatttaaaaatattcattgaatmataatagttcaatgtatttttaaaaatcttcctgtgtgatattatcaggttatttagtcattaca

SEQ ID NO: 238776 - DNA, 538 bp, Homo sapiens
gttttataagtgagaattgctccttcacatgctcacactctttcctgtcttgttgtgtagaaggttcttgcttccccttctgccatgattgtaagactcctgaggcttccccagccatgtggaactgtgagtcaattaaacctccttcatttatacgttacccagtctcagatattatttatagcagtgtgaaaatggactagtaccgtccttttgcaagaacttggttcaggagccaggaaatagctttgggacaaagggccagactaattcagcaggagagatgggatgggaaattaggggaaagtttcyatcactgacatttactttggtttttgttttgttttatagttctttgctaattaattaatgactgtatatgtatttatttacatttgggaactcagaacaccatttgtggaaaactgataaatcatgaaatttgaggtagataccaaactcgtgttaataaattagctgctgggtgaagagtgtggaagagaaatccatcttcttttagggtatatggttataaaaa

SEQ ID NO: 238777 - DNA, 604 bp, Homo sapiens
atttgactactctaagtgccttatataagtggaatcttagggtatttatcccattgtgaccatcttatttcatttaacgtaacatcttcacagttcatctatgttgtaacatgtcagaattctcttgtcttaataacaatccactgtatgcatatctcacattttatttattcatttatctattgatgggcatttgggttgcttctaccttttggttaatgtgaataatcctgctatgagcatgggtacrtacgtatttgttcaagttcgtgttttcatttcttttggggctatacccaaaagtagaattgctggatcctatagtaattctatattcaattttttgaggaactatcatactgttttacacagcagttgcacagttttacattcccaccagcagcgcataagggttctattctcttcaatcttcactaatacttgttatgttctgtttttcttatggtagccgttctaatgggtatgaagtggtgccttattgtggttttgacttgtattttcctgaaaatgagagatgttggacagcttttcatgtgcttattggccatttgtatatctccattaaagaaatgtctattcgagt

SEQ ID NO: 238778 - DNA, 386 bp, Homo sapiens
tgaaggacacgtggcagcctccacctggatttcagcagctgtatgagaaagcctgagtacctaggcagaagtctgttgcaggggtggagcccctacagaggacctctactagggcagtccagaggggaaatgtggggtctgaggccccacatagagtccccatgagggcactgccttgtgaaactgtgaaaaggggaccaccatccttcagaccccagaatggtagatctgccagcagcttgctccctgtgcamagaaaagctgcaggccctcaacaacctgtgataacagccctaggggctgctgaaccctgcaaagccacaggggtggagctaactgaggccttgggagcccaccacttgcagcaacgtgccctgtatgtgaga

SEQ ID NO: 238779 - DNA, 386 bp, Homo sapiens
tgaaggacacgtggcagcctccacctggatttcagcagctgtatgagaaagcctgagtacctaggcagaagtctgttgcaggggtggagcccctacagaggacctctactagggcagtccagaggggaaatgtggggtctgaggccccacatagagtccccatgagggcactgccttgtgaaactgtgaaaaggggaccaccatccttcagaccccagaatggtagatctgccagcagcttgctccctgtgcaaagaaaagctgcaggycctcaacaacctgtgataacagccctaggggctgctgaaccctgcaaagccacaggggtggagctaactgaggccttgggagcccaccacttgcagcaacgtgccctgtatgtgaga

SEQ ID NO: 238780 - DNA, 469 bp, Homo sapiens
ctacccctatctctttctctacctcctctttaaggccagtaactcttagatatgcccttttgaggatattttctagatcctgtaggtgtgcttcataatttcttatgcttttatctttgtctcttctgtgtattttcaaatagcttttcttcaagcccattgattctttcttctgcttgatcagttctgctataaaataactctgatgcattcttcaatataccacttatactttttacctccagaatttctgcttgattattttcaattatttcaatctcttagttacatttatctgatagaattgtgaattctgtcactgtgttaacttgaatttctttgagtttcctcaacactgctattttgaattatctgcttgaaaggtcacacatctctgtttttccagcatygatccctggtaccttatttagttcatttggtgaggtcatgttttcctgaatggtgttga

SEQ ID NO: 238781 - DNA, 507 bp, Homo sapiens
tcagtggaagtaaaaaaaaaaaaaaaagaaaaagaaaggaaaaaaaagaaatgcctttgggcaatatatcacaagacttctacagaatcaatatacttcaaaatgaaactgaacaaaaaagccaaaacttacatatttttcaccaacatagagaaatggagattctttctaaaagtatgacattttggttttttaaagaaagaaagaaagagagaaagggaaagaaagaggaaggaaggagggaaggaaagaagaaaggaagkaaggaaggaaagaagaaaggaaggaaggaaggaaagaaggaaagaacatttaacccaattaggtcaaatattttgttacagaaatttagttcaacttcagaggatctttcttgtttcctattcccaggaaaaataagtaatacaactgcaagcaaatcttaacatagaatgtattttcttcctcattgccttatgcctaatttaatcatgtgcagatcatctatttcacctacaaaacaaattt

SEQ ID NO: 238782 - DNA, 493 bp, Homo sapiens
gcaaaaataatatagtctacatatggagaaatgaactttyaaattttcagggacaagtgagtaccacaaattgtcttcggtagcctagacagatgattagaaaggattcaagcagtggtagacccaccttctcaaaatagcctaaattgtcccctataatcaggtttgggggaaggactgtatgaaaataagattcttgtggctctggattagttccatggagcagaaccacacccttgagagaacagcatgcccaagagccggaccttaggaatctgctttgaagtagagaactggactagcaccatgtctgacatctattaagtgcttaatcacgatttcctgaatgattataggaccaaggttcttgtgggttaggtcagagaactaggaatggcccccaaatttaagctatcgtagacactaactggaaatgtctccatcaatttatgttaagtgagagattctgccttcctttcaaccacccctatgg

SEQ ID NO: 238783 - DNA, 509 bp, Homo sapiens
gcttctcttgaagacagttcctacaatgtctgttcacagtgggcacccaataaccactgtaccatgccaacagctttctccccatgctctgtaaatgaccccagtgtcttccttayatacctgtaagataagtggtccaactacgatgattgttttcctcttatttttagggtgactaggaatgccaaagctaaacaatgtcctacagaacactgggagaaagcagttggcaaattcccagaatgaggattctgaaagcaatggtgtgggtccaatgtcactgctttccaaggaacacactccctgtctacagggagtgtctactcactcccgacaagggcagacaatggcactggcacaattgtgcaccccccagtgataaagtcaatagaagaatatctactttatttgcaagctggtgaattatttgacctacaaatgtacccacagacacagaggtcccagccttaccttctctatatgaaaaggacataaggacataaggtccc

SEQ ID NO: 238784 - DNA, 536 bp, Homo sapiens
cttctcttgaagacagttcctacaatgtctgttcacagtgggcacccaataaccactgtaccatgccaacagctttctccccatgctctgtaaatgaccccagtgtcttccttatatacctgtaagataagtggtccaactacgatgattgttttcctyttatttttagggtgactaggaatgccaaagctaaacaatgtcctacagaacactgggagaaagcagttggcaaattcccagaatgaggattctgaaagcaatggtgtgggtccaatgtcactgctttccaaggaacacactccctgtctacagggagtgtctactcactcccgacaagggcagacaatggcactggcacaattgtgcaccccccagtgataaagtcaatagaagaatatctactttatttgcaagctggtgaattatttgacctacaaatgtacccacagacacagaggtcccagccttaccttctctatatgaaaaggacataaggacataaggtccctagtcctagatggaagattttaaaaggg

SEQ ID NO: 238785 - DNA, 509 bp, Homo sapiens
gcttctcttgaagacagttcctacaatgtctgttcacagtgggcacccaataaccactgtaccatgccaacagctttctccccatgctctgtaaatgaccccagtgtcttccttatatacctgtaagataagtggtccaactacgatgattgttttcctcttatttttagggtgactaggaatgccaaagctaaacaatgtcctacagaacactgggagaaagcagttggcawattcccagaatgaggattctgaaagcaatggtgtgggtccaatgtcactgctttccaaggaacacactccctgtctacagggagtgtctactcactcccgacaagggcagacaatggcactggcacaattgtgcaccccccagtgataaagtcaatagaagaatatctactttatttgcaagctggtgaattatttgacctacaaatgtacccacagacacagaggtcccagccttaccttctctatatgaaaaggacataaggacataaggtccc

SEQ ID NO: 238786 - DNA, 509 bp, Homo sapiens
gcttctcttgaagacagttcctacaatgtctgttcacagtgggcacccaataaccactgtaccatgccaacagctttctccccatgctctgtaaatgaccccagtgtcttccttatatacctgtaagataagtggtccaactacgatgattgttttcctcttatttttagggtgactaggaatgccaaagctaaacaatgtcctacagaacactgggagaaagcagttggcaaattcccagaatgaggattctgaaagcaatggtgtgggtccaatgtcactgctttccaaggaacacrctccctgtctacagggagtgtctactcactcccgacaagggcagacaatggcactggcacaattgtgcaccccccagtgataaagtcaatagaagaatatctactttatttgcaagctggtgaattatttgacctacaaatgtacccacagacacagaggtcccagccttaccttctctatatgaaaaggacataaggacataaggtccc

SEQ ID NO: 238787 - DNA, 536 bp, Homo sapiens
cttctcttgaagacagttcctacaatgtctgttcacagtgggcacccaataaccactgtaccatgccaacagctttctccccatgctctgtaaatgaccccagtgtcttccttatatacctgtaagataagtggtccaactacgatgattgttttcctcttatttttagggtgactaggaatgccaaagctaaacaatgtcctacagaacactgggagaaagcagttggcaaattcccagaatgaggattctgaaagcaatggtgtgggtccaatgtcactgctttccaaggaacacactccctgtctacagggagtgtctactcactcccgacaagggcagacaatggcactggcacaattgtgcaccccccagtgataaagtcaatagaagaatatctactttatttgcaagctggtgaattatttgacctacaaatgtacccacagacacagaggycccagccttaccttctctatatgaaaaggacataaggacataaggtccctagtcctagatggaagattttaaaaggg

SEQ ID NO: 238788 - DNA, 574 bp, Homo sapiens
actggtttcattattattattatcatgactttgtacttatattgtgtctagcaagatgtgtccccattccttgcttttctttctttcttttttattttttttttgatggagtctcactctgtcacccagggcggagtgcaatggtgcaatctcgactcactgcaacctccccctccyaggttcaagcaattctcctgcctcagcctcccaagtagctgggattacaggtgcgtgccactatgcccagataatttttgtatttttagtagagacggggtttcaccatgttagtcaggctggtctcaaactcctgacctcaggtaatccgcccacctcagccttccaaagtgctgggattacaggcgtgagccaccacacctggctgcttttctttaaataaaagtaactaaactattcatagacctttattcttccatgtatatttttgaatacagtggctaatttctttaaaaaaaaaaaggaagtctgaattttgtttgaaaataagatggcatcttcttgaaaattgtggccatgcatattttagatccttatctgtgtggtccattaattc

SEQ ID NO: 238789 - DNA, 571 bp, Homo sapiens
gagaatggagcagagcaggtaccctcaaaagtctacacatttgatagatgattaaattttctaaytgcctaaaatcacaggaagatagcaaagaagtttgtctgtctctgtctaggctctatgttttagacgtatatatctccaaagagaaattttagtcctatggctatcccaggtttgaggttaaaatgaatatactgttaattttaacaatatacatcatattattcctaagacagggattaccattaaaccacctggtaaatctacttcaaagctgtttcttaaagacaggccacagtgttctctcagataaaatgtagggaaaagcctcagtaaaataaagtagcaattaaaaaagaaaacatggaaatcgcagaaataaattaccatgaattagattaagcaaacactatagaaagattagagtcttggctgggcacggtggctcacacctgtaatcccagcactttggagggctgaggtgagtggatcacaaggtcaagagattgaggccaccctggccaatatggtgaaaccccgtctctactaaaaatacaaaaagtagctg

SEQ ID NO: 238790 - DNA, 579 bp, Homo sapiens
ctgctgccaacaagaccctgaaacaaatggcaggcctccragatgagatacacttgaagccccagagactgggatgctaaattggctggctccagatgcctcactttgatgactggaaggagaggtgagaaagggtgtaattacatagcttcacttaggtgtggctcaggacctgggccagattggagtctgtaggtgagagggcttgtaagacccaactgtaaggggaagcagcaggaaaaacaaggccaagaataactcacaggcaaaaaacaaaaagcttatctctgcgcttgccccttgcaaaacacatgtgcctattaaccgctttcctcaatcccctttgcatcacatatttttaaaaatgggccagatgtcagggggagctggataccttcctgacaggaccctaatttgcagcataaccttggacaagtgagtctcgtagtcctctggaccttgagcttccttatctagcaactggagacagcaatgcttacccataatggtgatgtgagagttaaatgagttaacaccgagaaaccttaaatgctatacaaatataagggatggcattgt

SEQ ID NO: 238791 - DNA, 579 bp, Homo sapiens
ctgctgccaacaagaccctgaaacaaatggcaggcctccgagatgagatacacttgaagccccagagactgggatgctaaattggctggctccagatgcctcactttgatgactggaaggagaggtgagaaagggtgtaattacatagcttcacttaggtgtggctcaggacctgggccagattggagtctgtaggtgagagggcttgtaagacccaactgtaaggggaagcagcaggaaaaacaaggccaagaataactcacaggcaaaaaacaaaaagcttatcyctgcgcttgccccttgcaaaacacatgtgcctattaaccgctttcctcaatcccctttgcatcacatatttttaaaaatgggccagatgtcagggggagctggataccttcctgacaggaccctaatttgcagcataaccttggacaagtgagtctcgtagtcctctggaccttgagcttccttatctagcaactggagacagcaatgcttacccataatggtgatgtgagagttaaatgagttaacaccgagaaaccttaaatgctatacaaatataagggatggcattgt

SEQ ID NO: 238792 - DNA, 579 bp, Homo sapiens
ctgctgccaacaagaccctgaaacaaatggcaggcctccgagatgagatacacttgaagccccagagactgggatgctaaattggctggctccagatgcctcactttgatgactggaaggagaggtgagaaagggtgtaattacatagcttcacttaggtgtggctcaggacctgggccagattggagtctgtaggtgagagggcttgtaagacccaactgtaaggggaagcagcaggaaaaacaaggccaagaataactcacaggcaaaaaacaaaaagcttatctctgcgcttgccccttgcaaaacacatgtgcctattaaccgctttcctcaatcccctttgcatcacatatttttaaaaatgggccagatgtcagggggagctggataccttcctgacaggaccctaatttgcagcataaccttggacaagtgagtctcgtagtcctctggaccttgagcttccttatctagcaactggagacagcaatgcttacccataatggtgatgtgagagtyaaatgagttaacaccgagaaaccttaaatgctatacaaatataagggatggcattgt

SEQ ID NO: 238793 - DNA, 456 bp, Homo sapiens
ttataaaagttgttttctcrgatgaacaaagaaaacggaggaggaaactatcagtcaagccctttccttcttgagatagtctaagtggctgtcaaggtcatagagacgagctgtcaaaatttcacctaaataggttttaattttagtcacacacatgcatcaccaagtattgcagaataattcaaattaatgacaaccaagctgaagctgatgctggaaaccatggaggagatggtgagaagtaccctcactccaaaatgaggtgtggccccaaccacagcacagccgggctactaataatagccagtgagctctgggaggagttatctttctctgccttcttttcgtcgtcagatgattgtaccctcaatattctgtctctaagacacagggaaagcaccttcacggatgcaattaggtagatggaagattccaaatcagttatttgatcaggct

SEQ ID NO: 238794 - DNA, 461 bp, Homo sapiens
caaagaaaacggaggaggaaactatcagtcaagccctttccttcttgagatagtctaagtggctgtcaaggtcatagagacgagctgtcaaaatttcacctaaataggttttaattttagtcacacacatgcatcaccaagtattgcagaataattcaaattaatgacaaccaagctgaagctgatgctggaaaccatggaggagatggtgagaagtaccctcactccaaaatgaggtgtggccccaaccacagcacagccgggctactaataawagccagtgagctctgggaggagttatctttctctgccttcttttcgtcgtcagatgattgtaccctcaatattctgtctctaagacacagggaaagcaccttcacggatgcaattaggtagatggaagattccaaatcagttatttgatcaggctggtaattacagaaaaaaaatggggtattaat

SEQ ID NO: 238795 - DNA, 621 bp, Homo sapiens
aatttctgaaactatacaaacatagaaatttaacatatgctcctgagtgaccagtggggcaatgaagaaattaagaaggaaattgaaaaatttcttgaaagaaatgataatggaaacacaacataccaatatctatgggatatagtaaaagcagtgctaagagagaagtttatagctataaatgcctacatcaaaaaagaggaaaaacttcaaataaacaatctaatgccgtatcttaaagaactagaaaagcaagagaaaaccaagtccaaaatcagtgaagaaaagaaataataaagatctgagcagaaataaataaaattgaaaaccataaaaaagatcartgtaacaaaaagttggtttttttataaagttaaacaaaattggcaaacctttagttagactaagaaaaaaagggagagcattcaaataaataaaaccagaaattgaaaaaagagacattacaactgaatctgcagaaattcaaaggatcattagtggctattatgagcaattatatgccaataaattggaaaatctagaagagatagtcaaattcctagatacatacaacctaccaaaattgaaccaagaagaaatctaaaacctgaacagaccaat

SEQ ID NO: 238796 - DNA, 621 bp, Homo sapiens
aatttctgaaactatacaaacatagaaatttaacatatgctcctgagtgaccagtggggcaatgaagaaattaagaaggaaattgaaaaatttcttgaaagaaatgataatggaaacacaacataccaatatctatgggatatagtaaaagcagtgctaagagagaagtttatagctataaatgcctacatcaaaaaagaggaaaaacttcaaataaacaatctaatgccgtatcttaaagaactagaaaagcaagagaaaaccaagtccaaaatcagtgaagaaaagaaataataaagatctgagcagaaataaataaaattgaaaaccataaaaaagatcaatgtaacaaaaagttggtttttttataaagttaaacaaaattggcaaacctttagttagactaagaaaaaaagggaragcattcaaataaataaaaccagaaattgaaaaaagagacattacaactgaatctgcagaaattcaaaggatcattagtggctattatgagcaattatatgccaataaattggaaaatctagaagagatagtcaaattcctagatacatacaacctaccaaaattgaaccaagaagaaatctaaaacctgaacagaccaat

SEQ ID NO: 238797 - DNA, 326 bp, Homo sapiens
gaatacatggacacatagaatagaaggctggttatcagaggctgggaatggtagtggagggctcaggggtgggaggatgattaatgggtgcaaaaaaatagtaagaatgagcaagacctactatttgatagcacaacagggtgactatagtcagtaataacttaattgtacrttttaaaataacttaaagagtgtaattggattgtttgtaacccaaaggatacatgcttgaggggatgggtaattccttctccatgatgtgcttattttacatttcatacctgtatcaaaatatatacacttcctatgttcccacaaaaattaaa

SEQ ID NO: 238798 - DNA, 324 bp, Homo sapiens
tccttttgcttcatgggagctgctttccttgaagaggcttctgccattttagaaaatattactgagtgtcaaaaagctgagcagagtgtttaatagacttgtagggctagcaggacaaatatggaaatttaaggcccagrggcccaggatgggtagccttggtaaaattccccaggctttgagacaccaaagggatacaattaagaaggaaagataagccagaaatagactaaggcagtttcatagagactgaagcctggattcaaattatcttaacctctaattggattaaggtgatttaggatagccagtggctagaaacaa

SEQ ID NO: 238799 - DNA, 554 bp, Homo sapiens
ttcgctgaaggctcggtttctgrctgtttcccctacaggtatatagatagtcaagactctggagaacctcttccgaatctgcctggttggctagaggtgtagaggagccaggggcacattgtgactcagaccctcactcattggcacaaagaagctacagaatagttatataaacagaggcagtgcgccagcctgggaaaactcccagcctccctttggccatagagtaagcaaaacaaatggcttcactggccccatctacccacttgacttaggtcagtattcagcctaaatgttttatttcctgagaggctggaatctgtatttgtggtatcaatcagtcaactgaaatttattaaatgcctgctgtgagcaaggcctaatgctgagggatgtaaagaagagtgagaagctagtctggttggggtgatatgacatggcaagtcatagaatgaagaagcgtattccttgtcatatgaaagctgcagattagtgtggttctaagtagaggccagggtcactggagtctaggattgcagggttggctggcttcc

SEQ ID NO: 238800 - DNA, 577 bp, Homo sapiens
atagtaagcatacttagtgaaatagaagcattttttaaatttcaaaactgaggaaggtggattttaccttggggaaaaaaaatgagaggtattttaggttcttcaacaggaaagtgccataattaaagtcacagtttaggacagtgawgctgacggtgagggtatgaataggggtagaggtagtaagaatggagaggaaagggaaattaccaaaaacaggtaaaagttttttgaagggtaacttttctctcccagattctaccccctgcccacaccccctccacccacactcatacactctgtgggccgtgttacttctgttcattagacttataggcatagagctcatcaacagggtctacatagagctagtcaggaaggtttacaggttcaagggcagcctggtgagaccagcagcatctcccagagagcccatgcccgtgcagcgtcctaatgagccacttttgtctagcttccatttgctcttccctcccaactgaatttaatgtctttccatcctctgcctctagttaagttgtaactgctgttattccactgcagccaggcagctgccagg

SEQ ID NO: 238801 - DNA, 647 bp, Homo sapiens
tagagctcatcaacagggtctacatagagctagtcaggaaggtttacaggttcaagggcagcctggtgagaccagcagcatctcccagagagcccatgcccgtgcagcgtcctaatgagccrcttttgtctagcttccatttgctcttccctcccaactgaatttaatgtctttccatcctctgcctctagttaagttgtaactgctgttattccactgcagccaggcagctgccagggcctgttggcactgaacccagagcccaacccaactgatgttctcactgagcttcttgtcagatgccaggaaagaggaggcacatcatatgccttttcttccccaatagtagctgcttccaatgtgatcatgatgagaggaaaaggctgtggggagagttaatttgatgcttgcttgtgcaatgaaatggcaatcaggcagatggccttactctatgcatagattcttctttgaggtttcttctcaggacccggacctcagagctgcttaagcaatagagaggatgatggatggccaaggaattgggatctctgggtcttttgggagggatggggaatattatcacagagttacagaatgccattgctgaagagggccttagggattacatttagtccaaggattttcag

SEQ ID NO: 238802 - DNA, 566 bp, Homo sapiens
tttctgccaagccttggggctgtccatggtgtgctcatgtgccttctccttcccacagcagtgttgtgacttaggctaccatgcaagtctgaaccgggctctacgcaccttcctctctgctgagttaaacctggaacagtcgaagcatgagggtctggatgccatcgagaatgcagtagaaaacctggatgccaccagtgacaagcagcgcctcatggagatgtacaacaacgtcttctgcccccctatgaagtttgagtttcagccccacatgggggatatggtgaggccctttccctatacccccaccctcaaggggcttgagtggasttgtctagattaattacacagaaggcacattattctggggtgggagaggcctgggcccggctttttgtcaggtgggtgaggcacattccacttattgagcaaacagttagtgagtgcctgctgtcagacactcgggcttgggtgcagacatgggggattaaagccctcggggagcttacagtctggggaataaggtcgctaaggcttgaggagggttcaaactatgcatagagagg

SEQ ID NO: 238803 - DNA, 590 bp, Homo sapiens
taattctgtggaaaactggggcacaacagcactgggggacctggtcccagaatccccggagcaggaaagcaggtaaatcagagcccagtttgtgcccagtgttggccacgctgtccctgtcactgtggttgggaggcagctgaagccaggtgggcgaggagcagagcggctgtgatctctctaaggtggccagatggcagggagcagcctgctgggcatggtaatggccaacctaggcatgggcactttttgctggaatttaatctctgttatcagggcgccaggtgacacgggtcatcttccgcttcaagccaagttacaggacaacaggagaaatccaccacctggctgagacacctcggtgaacagccytcacatgagctgagctgcaagttgatccccagaaaagaaaactttttcttgtttggtcctaaagggctctcctgtccagtcctgtgcagaagcttggctgccttcaggcctttgagggctgaacttgaagtttgttttcctgctgaacctttcacctgaccctgagggtctccgtgttgttctgcagactctaactccatccttaccccaggcccagc

SEQ ID NO: 238804 - DNA, 590 bp, Homo sapiens
taattctgtggaaaactggggcacaacagcactgggggacctggtcccagaatccccggagcaggaaagcaggtaaatcagagcccagtttgtgcccagtgttggccacgctgtccctgtcactgtggttgggaggcagctgaagccaggtgggcgaggagcagagcggctgtgatctctctaaggtggccagatggcagggagcagcctgctgggcatggtaatggccaacctaggcatgggcactttttgctggaatttaatctctgttatcagggcgccaggtgacacgggtcatcttccgcttcaagccaagttacaggacaacaggagaaatccaccacctggctgagacacctcggtgaacagcctycacatgagctgagctgcaagttgatccccagaaaagaaaactttttcttgtttggtcctaaagggctctcctgtccagtcctgtgcagaagcttggctgccttcaggcctttgagggctgaacttgaagtttgttttcctgctgaacctttcacctgaccctgagggtctccgtgttgttctgcagactctaactccatccttaccccaggcccagc

SEQ ID NO: 238805 - DNA, 534 bp, Homo sapiens
ccgctctgaggtcgagctcagatacctacaaataaatataaaggaatgagttccgtgtgggtgaacgctgttctggaaaatggggtatatctcttaggatgcaactttgatcttgaaaactcatattaagttggaaagattctttgaatgtttacctcctctgttgacttggagttgagtgccttagccttcccgtaatcctccaaatttgttttgtgtgctgactttgccctaatgaggcccaccttcctctgtatccccagctctgactcccaaaagccttcctgcagggagtgaataggtggcgaggatgtcactgaaaaggtcgcttctctggttaactgctggccatctagcatctggcaagggggttgcaggtcacagatgtctcatgctggcgccrtcactattccaagagagaacagtagaaggatcagtgtccccaccccctcccggaggccacacatctttgtctcctacacaagacttcatttgtgctttcagtagcaaaaccttgaaatatttagtcttaag

SEQ ID NO: 238806 - DNA, 565 bp, Homo sapiens
ttcaaactctggtctgtctgcctccagaaccgaagcgctgaactgccaccctatactacttcccagttggagaatacctcagtacagtaattagatgccagtgtgtatggctttgcctatcagtacacagaaatcagaaaggtgattgagagattcattaatgcctccttgcccagttcttttgagcatatcttatttgagaaaggtgcacgtgaccttgggtcagtttgtctaactctgtcagtctcagttatcttatttgagaaatggggcyatagcttttaagttaataatccagataaaacatcctatagtgccccagatgtcagtagcactcagtacatgttcatattatgttgccccaaggtcacgtggctgggaattgagctgaggactgcccacctccgaagtctatgatggcaccttttggttttggtacaagtgagtcctgagtggaccacatggcagcattagaggtgcttttgaatacgaaaggtggcgtgaggatccctctcacttatgtctgttctgttgtccagaacttagtgaaaatcctggtccttac

SEQ ID NO: 238807 - DNA, 440 bp, Homo sapiens
ctgagtgttggaggtggggcctagtgggaggtgattggatcacgggggtggtttctaatggtttagcgccrtccccctagtgctgtctcatgagtgagttctcacgaaatctgattgtttaaaagtgggtagcacttcccttttcatgctctctctctctcctgctggccatgtgaatatgtgtttgcttccctttcgtctttctccatgattttaagtttcctgaggcctttccaaccatgcttcccgtgcagcctgcagaattgtgaaccaattaaacctcttttctctataaattacccagtcttgggtagttctttattacaatgtgagaatggactaatacagatggtatgagatcgctaccaggaagacaattaaaagccatggatgattacagaccatgaaagggagggtgagttgagaaagtgcccagcaca

SEQ ID NO: 238808 - DNA, 440 bp, Homo sapiens
ctgagtgttggaggtggggcctagtgggaggtgattggatcacgggggtggtttctaatggtttagcgccgtccccctagtgctgtctcatgagtgagttctcacgaaatctgattgtttaaaagtgggtagcacttcccttttcatgctctctctctctcctgctggccatgtgaatatgtgtttgcttccctttcgtctttctccatgattttaagtttcctgaggcctttccaaccatgcttcccgtgcagcctgcagaattgtgaaccaattaaacctcttttctctataaattacccagtcttgggtagttctttattacaatgtgagaatggactaatacagatggtatgagatcgctaccaggaagacaattaaaagccatggaygattacagaccatgaaagggagggtgagttgagaaagtgcccagcaca

SEQ ID NO: 238809 - DNA, 493 bp, Homo sapiens
ttttattttcttcacagaaaataattttgagtagagagtatagagattaaataaaataaatgatatatcagctaktagctctaacatgtctggagacagtacagagatcacagtgaaataaatgagatgtggttttttctaatgatgacatgcacgtggttacagaaaaaaccttcacaagtttaacaaacaccttagttagagttaccttttgctttgcctctcccacttattaattcgtttgttgttttttttttttttttgtcttttttccctgaggtgacctattatttgggttagatgatttactgtatatcattgtataactcaaatggatgattcagtaacattcaagatttcagccattagagcaagatgaatggtaaccaggaaactgttacatgcgtcctgcattttgttttagcttctgtcagttgggtactttctacataatctctctgtgtttttattttctcaccactaaaatgtggga

SEQ ID NO: 238810 - DNA, 493 bp, Homo sapiens
ttttattttcttcacagaaaataattttgagtagagagtatagagattaaataaaataaatgatatatcagctagtagctctaacatgtctggagacagtacagagatcacagtgaaataaatgagatgtggttttttctaatgatgacatgcacgtggttacagaaaaaaccttyacaagtttaacaaacaccttagttagagttaccttttgctttgcctctcccacttattaattcgtttgttgttttttttttttttttgtcttttttccctgaggtgacctattatttgggttagatgatttactgtatatcattgtataactcaaatggatgattcagtaacattcaagatttcagccattagagcaagatgaatggtaaccaggaaactgttacatgcgtcctgcattttgttttagcttctgtcagttgggtactttctacataatctctctgtgtttttattttctcaccactaaaatgtggga

SEQ ID NO: 238811 - DNA, 480 bp, Homo sapiens
gtaccttgtatctgcattttggtaacaagcttttggttccttctctcacccagtcctcctccctgataaccccatgcccttcattccttctctgaagtcatctataattgtaggatgcacctctgtagagaatttgagagaagctacattgctcrgctcttcagcaccagtgccctgtcgggagagccctggcttgcagtcagtactggagcttaacagtcgggtcatcaggtggttccagccagccaaatggggattattatcccaaggccaggctcagggggggtttgggagtccaggaagcatgtacaaatgggagaatagaacacattaatttcagggcagtcagaaaacagtgcttccctaggaaagtgtgactgtcctcttgagtagatgcatgttgtaaatttgatattagaaacatgtcaaataaatgattgaacatgaggaatgaaatgagagagggacaaaagcccagtc

SEQ ID NO: 238812 - DNA, 624 bp, Homo sapiens
tggcataggtccacttcaaaccctgactccactcctggctgaaaatccctgtttagaagttctgagatgtcgtaattagccctcagctgccagcctctaattcagtggcacctttttcccagctttgaacaacaactgaaaaacctcagaatgtctgatcttccagtctcccgactgtctgcttaaaattgctttggcctcatttgcttgtgaagccacttgcacttccaggtgttaagcagacctgcagtatccaatgggatggagttacacaacacacacacacacacacctgtggacatccaggatggagttacacaacacacacacacctgtggacatccaggatggagttacacacacacacacacacacacacacccctgtggacatccagagattgtaattgttgaatctattgggagcagatgggtgtgcttaggaaaaaataggattgactgcaggaattaaatggagagsagtaagtgaattagtaggccagatgcattaggcctgcatagttgcaagtcacgtggctgggagtgtggggatgagccatacaggcagggcttcctcttggagacgaaagttactgtgttcgctttgagaaacgcacatattgta

SEQ ID NO: 238813 - DNA, 683 bp, Homo sapiens
tgtgggcattaagcccataaataggaatgctacagggggaatgaaaggaggggttacttccaccagaagagaagccttggagaagtgaatggaaaatgttgcctctgtttagcatgaatgagcctgggatttaaataacattctcaggccagataaatagtttttctttggcttagtaatcatgcattgcattcagatatttaagtgaaatgtttctggctttcctcacttcatctttgatctttacatgctctgttaaattttagctcatcaacttaatcacattaaaaatctcatttataccttttagtatatagaagagaagcaratttgctgtaagaaactgagagtacatgtaattgagtgtttttgctttgggcacacacacacacacacacacacacacatacacacacacacgcacacatatcccaaaatgctgggatattccagagtgataaaagaatttgctgcttggtggctgcatcataagtcattatgattatctcattattcttttcttccctctgtttcaagctgttctgcaatgaatattcattagttatataaaacatgaagttttttaaagaaacatattccaaaattccttggaattctttatcggtaatcgtctgcctttttattttttgaaaaactggttgttttgaccccatatctgacta

SEQ ID NO: 238814 - DNA, 683 bp, Homo sapiens
tgtgggcattaagcccataaataggaatgctacagggggaatgaaaggaggggttacttccaccagaagagaagccttggagaagtgaatggaaaatgttgcctctgtttagcatgaatgagcctgggatttaaataacattctcaggccagataaatagtttttctttggcttagtaatcatgcattgcattcagatatttaagtgaaatgtttctggctttcctcacttcatctttgatctttacatgctctgttaaattttagctcatcaacttaatcacattaaaaatctcatttataccttttagtatatagaagagaagcagatttgctgtaagaaactgagagtacatgtaattgagtgtttttgctttgggcacacacacacacacacacacacacacatacacacacacacgcacacatatcccaaaatgctgggatattccagagtgataaaagaatttgctgcttggtggctgcatcataagtcattatgattatctcattattcttttcttccctctgtttcaagctgttctgcaatgaatattcattagttayataaaacatgaagttttttaaagaaacatattccaaaattccttggaattctttatcggtaatcgtctgcctttttattttttgaaaaactggttgttttgaccccatatctgacta

SEQ ID NO: 238815 - DNA, 546 bp, Homo sapiens
gcaacacctcatgctatgaaatagaatggatgttctgctgagctgagcagacggagttggctttatgggcaggaaagggctgaagaaggcagaaacagagaacacaaagcagattggacatttcagagttaccctcctaacagggttaaagctaagtggacttccttatgatgcatgctcaggtaaactgggccccttccgattggttgctgtgaagctcctgttgtttggaagagtgacccatttccaagttcagtttgattatgtgatactgaacacaagtggctccactctgctttggcctggtctgctggggcctagtgcaggagctcagtctaaaacaatggcttcccataaactttgtttaacrtgagccagttatcctctcaactttctgccactcagccaggcgactacctgactggagtccctggccaagcagatagatttgcgctccttaaaagctctaccttgttgcacccctaacctgctctccttccagtcgatgtcaccccaaataaacgaggctagtaggcacagacccca

SEQ ID NO: 238816 - DNA, 602 bp, Homo sapiens
agttttccattttcatcatattccttttaaatcaacctgaacatattggcagaactttggcagaaacaaaggaagtgaatttaatgtgatctgcagcagatacccccaagtaattttcgtctttcctctagtgtcttctccagagtgggagcaccatttaacttgtcatctcagaatctactcagttgtcagtacgtcaataccaataccaatgaccattcagaattatggtcatttctaagtgggaagacaggtgagttaagagatgaaaaattgagagtaatatccactaaattctatgtggacttccactgatatcttgccatkcattttgtcttggcatgtactcagccattactatgaccttgcttaggacataaacttaggatgagcaaatcagacatgttagtgatttcaaggagatatttggactgcttaaattccttccatataatctgtgtggaaattcaataaagaccgaaaattgaaaaaccatcaacaggtagatctgagtaaacatcatgtgcctaacaaagtgctaggaaatgtcgagttgtaaaaatgttgctctagtgaggactgccagagaaacaaataaaatg

SEQ ID NO: 238817 - DNA, 571 bp, Homo sapiens
aatcttttagtttaccactttaccgtttatttattcatagaatttgattttataactttttcttcaatttagaggcagatgaacattttaagtgttgcttagtgttttaaagcagtgttttaaagagacacattcttacacagaatcactctaacttgaaataaagggatcaaagagtttgtttggtttatttttgaaagggtgaagaaatattcagaaagaagatacccttgatgagggcttgattacttagtcgaatgtgtataaatctagatattaaagcatacagatcatgaaaataattaaaataatgaaatagaatgctatgaaagaatctacattggcctaagactacaaagacatcttgamaatgtaattctagtaagaataaaatgcaagagagaaatttaaccaaatttttttacacaaacagctctatgcatgtcttctgatgatattttgatcataatatcgttttaatttatgctaagtaagttaaattgccagttcattgccagaactctcatgattttgaatttagtagattgagggatggccaataaagtattcc

SEQ ID NO: 238818 - DNA, 549 bp, Homo sapiens
tgggcaattcccttctggctaggcctgcaataaatactccctccatgggtggatatcagctgagttcagmccagttttgctttctgctgtgacagagcaacactgaattcaatgcaatgtctcacaattgctgcactctccctcttccaagcaaatagattctctctctgcactacgcagcagctgcctgaggatggggaggagtggcattagcaattcgagactgtcttttttacctcttcaatgcctcttgcagcgatatgaaattaaaaccaggtactgtgagtgctcacttaatttttgtttcttaaaaaggtttttttgtatgcagattgttgttaaattggtgtccttatgatggggatgattggtggaggcttctattcagctatcttgctctgcccttctggtcagacctgatttttaaaatttaataaaacttttttgtgccctaatatatggcctattgtggagaacgttctatgtgttgatgataagagtttgtattctgaagccattggatgaaatatgacatcaatgtctgttagg

SEQ ID NO: 238819 - DNA, 549 bp, Homo sapiens
tgggcaattcccttctggctaggcctgcaataaatactccctccatgggtggatatcagctgagttcagaccagttttgctttctgctgtgacagagcarcactgaattcaatgcaatgtctcacaattgctgcactctccctcttccaagcaaatagattctctctctgcactacgcagcagctgcctgaggatggggaggagtggcattagcaattcgagactgtcttttttacctcttcaatgcctcttgcagcgatatgaaattaaaaccaggtactgtgagtgctcacttaatttttgtttcttaaaaaggtttttttgtatgcagattgttgttaaattggtgtccttatgatggggatgattggtggaggcttctattcagctatcttgctctgcccttctggtcagacctgatttttaaaatttaataaaacttttttgtgccctaatatatggcctattgtggagaacgttctatgtgttgatgataagagtttgtattctgaagccattggatgaaatatgacatcaatgtctgttagg

SEQ ID NO: 238820 - DNA, 516 bp, Homo sapiens
atgtcatcacttaaggcaaggactggccattttcacttcttttgtggtggaatgtcatcagttaaggcaaggaacaggccattttcacttcttttrtgattcttcagttacttcaggccatctgggcatatatgtgcaggtcacaggggatgcgatggcttagcttgggctcagaggcccgacagggatcctcttgcagccacaattgctggtgtttgtggtggaagtggaaaccacttggaatatccagattacctttgccttgtataaagaagtcccccccgaatccaagtcagtccctaccaacaagactgtatagcagagacagaacaacacctagatacccgaactatggtgctatcctgaactgccacaactcacatgaattttgctgcttccatggtgttcttcagtgtacttctgcagtcactctactcaaaatataattattttttgtttctgtccgcttttgtgaggatagggcaagcactaggtaactagatccagccatcttgc

SEQ ID NO: 238821 - DNA, 516 bp, Homo sapiens
atgtcatcacttaaggcaaggactggccattttcacttcttttgtggtggaatgtcatcagttaaggcaaggaacaggccattttcacttcttttgtgattcttcagttacttcaggccatctgggcrtatatgtgcaggtcacaggggatgcgatggcttagcttgggctcagaggcccgacagggatcctcttgcagccacaattgctggtgtttgtggtggaagtggaaaccacttggaatatccagattacctttgccttgtataaagaagtcccccccgaatccaagtcagtccctaccaacaagactgtatagcagagacagaacaacacctagatacccgaactatggtgctatcctgaactgccacaactcacatgaattttgctgcttccatggtgttcttcagtgtacttctgcagtcactctactcaaaatataattattttttgtttctgtccgcttttgtgaggatagggcaagcactaggtaactagatccagccatcttgc

SEQ ID NO: 238822 - DNA, 516 bp, Homo sapiens
atgtcatcacttaaggcaaggactggccattttcacttcttttgtggtggaatgtcatcagttaaggcaaggaacaggccattttcacttcttttgtgattcttcagttacttcaggccatctgggcatatatgtgcaggtcacaggggatgcgatggcttagcttgggctcagaggcccgacagggatcctcttgcagccacaattgctggtgtttgtggtggaagtggaaaccacttggaatatccagattacctttgccttgtataaagaagtcccccccgaatccaagtcagtccctaccaacaagactgtatagcagagacagaacaacacctagatacccgaactatggtgctatcctgaactgccacamctcacatgaattttgctgcttccatggtgttcttcagtgtacttctgcagtcactctactcaaaatataattattttttgtttctgtccgcttttgtgaggatagggcaagcactaggtaactagatccagccatcttgc

SEQ ID NO: 238823 - DNA, 579 bp, Homo sapiens
aaggagattcctggccaacaaaatgtgagaataaactgaagatagtatcatagcagaagaaggactgtatcaaccataaggctagtagatcatcatggaagggataaatatagaagtgagtgacaaagtaaagcattggcaatattcaaactggccagtgagagaggatgcccttatcagactgaagttattaggtggactgccygtcaagcccattagaatccaatgccattaattatacagtgcatattatagctctatttttcctttatttaattttgatcaccaagaacacttttgatactactttggcttttatgtaactagcttacaggaggacagtccttgttaagctgacattattgttgattcatgcagaatattgcatatctcatggaaaattagctaactttcactctggtttgacatgttgatttgtttttggttttgttagcatgagccagcatctctgaatctaagccactctagtactccaatgaggttatcagtagaggcagctagacttaagaaccaccagcatgagttacctgggctctgacacttattaactctttagca

SEQ ID NO: 238824 - DNA, 541 bp, Homo sapiens
cctagaacactgagaatataaaaataacaatatagttctcttctactagtcaatctagtagaggagaaataggaagtaaaacttctacaaaatagaaatataaaaagaaaattatagcacagtagaatatataatgtactggaagaatacatttagtattgctaaaaaataaaaggcaggaatacaaagtgacagtcatactgacgttaaggctgagtagtgggcagccataggaagaatattccagggaatgtaagtggcatataagtaggtagagagttctaaaagggcsctttctgtttggagggtagaaagatagatggtatagtttacatgccatgcatgctagaagttgaacttttgccctcccaggttgtggtgtaccaaaaaatgctttaaaaatatcatctatataactttctttcttatattgtatgtatgttacagctggtcttgcagaagcatatgaaagagaagaaacagaggttttgttttagttaaatttttctttttatttctcaaattgcagtcatattgatta

SEQ ID NO: 238825 - DNA, 576 bp, Homo sapiens
aattaaggggtgtggctggaggaaattgagttccaggtatctattatccagctcattctctgacagattgttgtgaagcaatcctcaacctctcattaagcagcaagggttcaggtctttgcttctttcccttgcttttgcaggtataaaggtatttatgcctacctagctgatactrgcccaggactactgcactgttccttgtgagcttccttaaacactgctcatgcctttatacattattcttttgctaagcttttcttaaattacccccgtttgaaattgtaatcagtttcatgctgaaattgtgaatattataatcagcaacatattttcattgaatttttagatgacatattacaggcaaaactcaccaagcactgggcagtggtaagacagtcttcataacacacggagaaaactgttttagggtaaagaaagaacctttcatgtcatctggcacaggataaagttccagcacacctattataattaacatgattaacatcatttttatgaatccaattatgaacatgatgattaaaattattattatgcatctgatagaggccctac

SEQ ID NO: 238826 - DNA, 601 bp, Homo sapiens
gagtgtgtttttcttcacaacaatctattgagatcatgcttgggtgtatggatgctccattcattttttaaataaagtccccattttcagtcttttttttttttctgtatttcatttggggtagttttattgctgtttcttcaagttcactagtcttgtcttackcagtctaaacttctgttaattctctctcatgtatttttcacctcagacactatattgcaatattattgtgcctctactaatgttagtttctctgttgctatcataacaaatccccacaaatgtggcatcttaacaatctaatcccagcactctgggaggctgaggtgggtaaatcacgaggtcaggagttcgagaccagcctggccaagatggtgaaaccccgtctctactaaaaatataaaaattagctgggcgtggtggtggacacctgtaatcccagctacttgggaggctgaggcaggagagttacttgaacccaggaggcagaggttgcagtgagccaagattgcaccactgcactccagcctgggcagcagagcgagactctgtctcaaacaaaacaaaacaaacaaaaaacaacagtcaacaatcattt

SEQ ID NO: 238827 - DNA, 625 bp, Homo sapiens
gaattccatgtaagtgtaattttcaaaaagttctctttcactgtgcccagagtaaatgaggcactcactactgacagccacccaaacaccttaacagcaacaggtatcgaattggtatattcamccaagaaaacaggagcttcagaaaaatatgaacatttccctggtgaagcaagatagtgaatacatgtataatttcccaagatataatttttacagtcaaagtattttcattacaatatgacttttaaatgagttcttgagggactgagaacaaactgtctcctgcacacgaaaaatgaccatccgaggagtaccagtggacagtgatgaccgggggcatttggaaatcttcaacttaaattgtgaatataaacttattttatggcgtagatgcaaaagatgtttctaaggaaaagagaggaacagatgaaataggggcagaatgatgtttgtaagtgttgtagttgagaatagggatatgtgtgtgttcattatgttttttttggggtgaatctttgagtattgatttagtatttctaaaaggattccatttcttgactttgggtcacgcagtcctgagttaaattagagaagtggagagctacactgtgtttgagattca

SEQ ID NO: 238828 - DNA, 558 bp, Homo sapiens
  misc_feature (1)...(558): n = A,T,C or G
catttccttacctctcctggcttccattattgccttagtattctcatgcatgcctagaatgataccagtacaacaacattcatgtgtcatgtcctgaataaataacaggattgactgatgacattagcaagccactggattttccagaaatgggaatcaggatgatttctataatatattccaaatgaaacataaccgccatttcagctaagagtaggcatttcttggttcctaaaataattgagattcctgaatgtatcgaaatctagaagcatccattgagctcttactatatgcaaaactctagggtgttgtcatagaacacagatttctaygtgaatgtttaaaggatattggataaagtcacatggcttattgtgcttggttcaataagaaccaaaaaaaaaaaaaaaaaaaacagaagtaacaagtaacttctcttattacttattttttatatgacattttaaaataacaatcgtatctgaaatatgtattttggaataattttagtattcagaaaagttgaaagatagcnnnnnnnnnnnnnnnnnnnnn

SEQ ID NO: 238829 - DNA, 605 bp, Homo sapiens
atttgtaacttctttcagcaagtccacataaaatagctgaaagacaaagaggacataatatttgacatatagggaggtttggagacatcattgtgaaagctatatctaggaacccctttattcctgcttttccccttcccaaatttcctcaaagtctcctgtaactgacaaatcaaagttgtaggcccacatcaatgtagggatgctaaaactagaactcccaaattaagatggattcaatgaaaggaacagaaatcatcccaagttaatagcatcccaggagatacaatagcaaaacctctctggagaagaacawccccaatttaagctctcattattcccacagatgaggatcaactaaataagaactcaaaatcaaggatcaccaaatccacaaggaaacaaatatgataatgaaaaccaagtgataataaatttagaacccttagaactacagttcacaaaattattgattacagaatagaaaatgacaaccttttgcttacagacaggaaaaaataaaataattaaaataaactaaaatgagaaaaaaatcagcaagcaacaataggctatccaaaatgactaggcagatattttcaaaa

SEQ ID NO: 238830 - DNA, 578 bp, Homo sapiens
gactggatcttacaggaagtctcactcatatgctgaggtaagctcaaaaacacagatgggtggcagaaaatgaattaggccttgcaaaaccagctcccctataaagcayagatgcaggccacttaaataatcaagagttcactcatctaacaagtactgtctgagcataagaggtaagcaatgtggagaagacaaaggtgagtatgactgaccttcaaacttcgtataatccaggaagggaaagaagaatactaagtagtcactccctaaaaggagtactgatagagagcacaagaaaaccaaatgaagaaggaatgacctccagctgggggattaggcagtgtgcttcatgaagagaacctggaaagctctagccccaggcagtggtcttcttgcttgagtggatcagaatcacctggaaggctacttaatgctgctcccaaggctggagtttctgattcaggaaatgtggagtgagacccacaaatatgcatttctaacaagtccccaggccattctgctcctgctgatctaagaacaaaatttccagaacctctgcttcaagggaaagttaggaa

SEQ ID NO: 238831 - DNA, 416 bp, Homo sapiens
tgttgttggtcattcctgagagtaagccaagctaactttgggagagatttagtttataatgtaaccttaaagcagggttcataatagcctttcccaaaactaaaccacctttgtaagactaatgaaagtctacaaggttaggatgagaggtgctggaattctgctaagatctaggtgtacttacagataaccaggcattgttttgtgggtcaggagacgtgtaacttttcccaattactcccatagataacatcactattgtagaacctaagattgatatgttggrgtatttttcaggcttttgcattctggcaactgactgacccccacccaaaggcagacctgtgactcatgacccaactggtcccgtggccccgtgatccagaagtgaacacagtgcacaaggaccattttcc

SEQ ID NO: 238832 - DNA, 489 bp, Homo sapiens
ggtatctgatcatagatcctccaactggaggtggcttgatcatcagagacttagttttgagccagaactgacaagtagtttcctagtcttaagaactaagactttttttttwttaaagggggtgggtggggataccatcactgacttctcaaggcaaacatcctgtttaaggaactttcttataactgatgctgctgctcagccatactctggggtacttcctattctcactgaaattctgaaactaatcctggttctatcaacttcacctacttatttttcagggaataactgctaaattgacctttcagcaaggtaaaggtgttacactcctgaacagctgctttgtagtcaagccaaccctacttcaaattgctaagcaggatgtaaaccctgaccttacagggatacgtgtgtttcacgcaacaaactatcctagaagcttgatgttaacatacttgagcctcatgaaaatatcacatagtattc

SEQ ID NO: 238833 - DNA, 609 bp, Homo sapiens
aattattaaaaccaaaccaaaacaaaccaaaatatgacactgtggtacataaatagtttggtttaaattggattcagtttaaratttttgatattagaattaaaatagtttcctttctgatataacagaaagtgtaaatacctcaaacaaacaagatgatgaaggcagcttatgaataagtaacacaaaaatcctcccaaataatttcacctatcagggtcttttttctagagccagtgtgcatagaagaatacctcaacttgactggttagaataagccttatgtccaaatacacgtgttttcatctaaatttgttgattgtgcccttcttgaattggggtgaaagaaagatcgtagatgacttcttgctccatagccaaatatatggagaagtaaaaataaaaaaagaatttattggataaacagatgatgatcattatatcaatagaaattggaaaagaagctttgatgtaatttattcattcacccaattcactgtattctgagtttagaaaaatagtacaagataaaaattatttcaatatataatcattccctccagaaacttaaaataacattaaacagtagcttaaaagagcccataaata

SEQ ID NO: 238834 - DNA, 380 bp, Homo sapiens
tgaacttgtgcaaaacgcttttaacagtatccaacacrttgtaaaaataatgataaataaatgattatttatttattaataaaaataaattaatgagttagttctcttagtataatggctctcctaagtgtttctcccttataaaggaatctaaaaatcttccaagctgcaaatcaggagctattattttggtctttttcttctcctggggcagctacctcctgaggttggaaacagcatcagaccaggtggaaattagatgtactatgatatgagttgaggctcctgaatcaatatcacattatggtcctagaggcaagaaggcaagaacttggctcattccactagtaaatccttgggtgttcttaaagctgccaatc

SEQ ID NO: 238835 - DNA, 627 bp, Homo sapiens
tattcctttgcagactgtcgagttttaagtgcttcttcagcatttataaagcctcattgcttgagaaggggttcatttccctggctttctttagtctccccgccactgtcccactttgcttcacagtcctgaaattcagctagcggaatctttttattagcaattgaaacaatgtccagttcaggagagaaggcttctatttgcacttacagtctaaaatgccctcattagggataaaagtcyagagttcctcttctatatcttaattcttatgggaaaactcctctgccctcactgtcccatcattttgtagttaaaagtctcaactcagtcttatctccagctctgtcacttgtgtttgacatatttcagcaggttgtcaaaaatgctcagacctcaggaataattaagctgccaaaattaaattggattttaaaatttttcatagatactgatcactcacccaagaccccctttgactcccctcctgtatagatccccacttctcctaggtggggagagcacaaggatctctttacaggaaggacactaagtttatataaaaacaaaccctgaatttgagcatcattaggaagaaggaagtctttcggctgacttcctttcagc

SEQ ID NO: 238836 - DNA, 575 bp, Homo sapiens
cttttccagaatagagaaattttattcctactgaagatttgctctggcaagtaattttcctccacaattaacttacttacagtttctaaaaattcttcagctgccttcacattatctcttgcaaactcaccattcacttttacattaggtaataataataattcttgaaatatttatatcatccagagcttgcagcaaattcaacattgtaatggggttcggccttttttttcaacatcccaggcaaactttttctttgaccataattgtcacaatgccgtgagaaatacacctgtgtgtctggtgttcattccaggtcgttagcagtttctccatgtctgatgtaggcccttcttaaaattgtgttagtctctttgccttcaatgaagcagatcctctaacagcttccatcattttgttcttgttcttccagattatagttacrgtggaatgggacatgtctgactggcaagcaataaccatcactgactttctacctttgtagtccttacttcacttttaatttcatttcgaaatcagtcacttgatgtggtcttttgctggcaacattagca

SEQ ID NO: 238837 - DNA, 541 bp, Homo sapiens
ctacctgggctgcctcatgggaatagccaggatgctatctaaggatcttgatacccacaggtcagaggtggtgcctcagtcagctcagactgctaaacaragtaccacagactgagtgagttatgaacaactggcattgatttctcatggctctaaggtctgggagtctgagatcaggatgccaccatggtcatgttctggtgaggaccctctttctggtgctgactgcccaacttcttcttgtgtccctaaatggaggagagagagctctctgggtttccttttataatggtattgtattagtctgttttcatgttgctgataatgacatacctgagactggggaatttatacaggaaaaagggttaatggacttaaacagttccacgtggctggggaagcctcacaattagagggtaaggcaaggaggagcaagtcacctcttacatggatggcagcagacaaagacaggttgtgcaggggaatttctctttctaaaaccatcagatcttgtaagacttattcactattacaggaacag

SEQ ID NO: 238838 - DNA, 541 bp, Homo sapiens
ctacctgggctgcctcatgggaatagccaggatgctatctaaggatcttgatacccacaggtcagaggtggtgcctcagtcagctcagactgctaaacagagtaccacagactgagtgagttatgaacaactggcattgatttctcatggctctaaggtctgggagtctgagatcaggatgccaccatggtcatgttctggtgaggaccctctttctggtgctgactgcccaacttcttcttgtgtccctaaatggaggagagagagctctstgggtttccttttataatggtattgtattagtctgttttcatgttgctgataatgacatacctgagactggggaatttatacaggaaaaagggttaatggacttaaacagttccacgtggctggggaagcctcacaattagagggtaaggcaaggaggagcaagtcacctcttacatggatggcagcagacaaagacaggttgtgcaggggaatttctctttctaaaaccatcagatcttgtaagacttattcactattacaggaacag

SEQ ID NO: 238839 - DNA, 541 bp, Homo sapiens
ctacctgggctgcctcatgggaatagccaggatgctatctaaggatcttgatacccacaggtcagaggtggtgcctcagtcagctcagactgctaaacagagtaccacagactgagtgagttatgaacaactggcattgatttctcatggctctaaggtctgggagtctgagatcaggatgccaccatggtcatgttctggtgaggaccctctttctggtgctgactgcccaacttcttcttgtgtccctaaatggaggagagagagctctctgggtttccttttataatggtattgtattagtctgttttcatgttgctgataatgacatacctgagactggggaatttatacaggaaaaagggttaatggacttaaacagttccacgtggctggggaagcctcacaattagagggkaaggcaaggaggagcaagtcacctcttacatggatggcagcagacaaagacaggttgtgcaggggaatttctctttctaaaaccatcagatcttgtaagacttattcactattacaggaacag

SEQ ID NO: 238840 - DNA, 617 bp, Homo sapiens
acattaaacaacagatttttattaaacgtagttgaaacagccgtatattagaagatgccgtttgtttgggactttcagagctagagaggaagtcaatgcctggcttcagagcttcaaaggacaggctgacactcttgttaggagagaatacagtggctaagtttaaattaaaaccaacgatcatttattattcagaaaattctagagcttttaagaacttgctaaatctattctgcctgtggtctgtaaatggaacaacaaggcctgagtgacagcacatctgtttatggcatggcttagtgaatattttaagcccacagttgagascaactgctcagaaaaatatattcctttcaaaatactattgctcattgataatgcacctggtcacccaagagctctgatgaagatgcacaaaaagattaatgatgttttcatgcctgctaacacaacatccatcctacagcccatggattaaggagtaattttgacgttcaagttatttaacaaatgcactttgtaaggttataactgccatagatagtgatcccactcatggttctgtgcaaagtaagctgaaaacctgtggaaaggattcactattctagatgccatta

SEQ ID NO: 238841 - DNA, 583 bp, Homo sapiens
ttcccataaccttacaaattatgaaatacagctataagatatgacaataggcctagagacgggtttttcaagtgcaaagggaaagccctcgtggcattcccttcaaaattgacattgctaatgctcaagaccttttgsgaaactctttaaagagaagtctcttccttttatagatccaaccaaaggtcttgcagtgcccccaagagctcaatttttctccttttctgctatgatatctttcaacaagtcattcttcacaaagatattcaaaagctattctggtacagcagctccaaaagggtggataatttctaccctttatttcagaattacaaaaatctggtctgtgttaactatgccagtgtctcagagtgcagttgtctctcaccataatatctgaaatattccataaggataatgggtgtgaataaataaaggggggaaaaaatctaagatttcctccaaaaaagaaaatattgcaaaaagagcaaaaaaaagtacaaaatctgatttactacatattacatgggggaaatcattaaaatatacattctcttagtttaccaaaattggtttaatattc

SEQ ID NO: 238842 - DNA, 527 bp, Homo sapiens
gattttttgatccattaaggtcatgaattgtacatagttgagaagaaacagtggggatagttttgaaagtgccaatccattaggcaaagtgaaacatatgctagttttgtttttgtttttgttttgttgttgtcattgttgtttttgagatggagtcttgctctgtcacccaggctggagtgtaatggcatgatctctactcactgcagccttcgcctcccaggttcaagtgattctcctgcctcagcctcctgagtagctgggattacaggcacccgccaccatgcccagctttttttttttttttttttttwtatttttaatagagacagggttgcaccatattgtccaggctggtctcgaactcctaacctcaggtaatctgtccacttcggcctcccaaagtgctgtgataataggcgtgagtcgccgtgcccggacagcatgtgctagttttttaacattagctttagtggtaaatacaagaagtttatcttctttggtagtcaaattcctcaagaagagtt

SEQ ID NO: 238843 - DNA, 561 bp, Homo sapiens
ctgccgttttcagtgtgtcctcatcttgtggacagcaggccagctccagtgtctttttttttttttttttttgagacggagtctcgctctgtcacccaggctggagtgcagtggcactatctctgctcactgcgacctccgcctcctggcctcaagcaatttcckgcctcagcctcctgagtagctgggattacaggcagccaccaccatgcccggctaatttttgtatttttagtagagacggggtttcaccatgttggccaggctggttttgagctcttgacctcaaatgatccaccaggctcagcctcccaaagtgctgggattacaggtgtgagccaccccgccaggccatccagtgtctttctcttcctatcaggaccctaatctcatcatgggggccccaccctcatgaaatcatttagacctaattacctagcaaacgtcccaccttcaaataccagaatattgggaactggggcttcagcatatgaattcattggtggaggggagcactaagatttagtccataacaaagacaatttttatactgctcccttc

SEQ ID NO: 238844 - DNA, 561 bp, Homo sapiens
ctgccgttttcagtgtgtcctcatcttgtggacagcaggccagctccagtgtctttttttttttttttttttgagacggagtctcgctctgtcacccaggctggagtgcagtggcactatctctgctcactgcgacctccgcctcctggcctcaagcaatttcctgcctcagcctcctgagtagctgggattacaggcagccaccaccatgcccggctaatttttgtatttttagtagagacggggtttcaccatgttggccaggctggttttgagctcttgacctcaaatgatccaccaggctcagcctcccaaagtgctgggattacaggtgtgagccaccccgccaggccatccagtgtctttctcttcctatcaggaccctaatctcatcatgggggccccaccctcatgaaatcatttagacctaattacctagcaaacgtcccaccttcaaataccasaatattgggaactggggcttcagcatatgaattcattggtggaggggagcactaagatttagtccataacaaagacaatttttatactgctcccttc

SEQ ID NO: 238845 - DNA, 572 bp, Homo sapiens
gcaaaatacccagaatagccaacacagtacttaagaagaacagcagttagaaaaaatgatgctattcagcttcaagacataatataaagctaaataatcaagacaataaaatcaagacagyctaatattgatgaaagagtagacatagagttcaatgaactgagtaaacagccgagaaataaacccacaaaaatatagtcaactggtccctgacaaaggagcaaagcctatacaatagagaaacataccctttaaaaaatgtatgctggaacaattagacattcatgtaaatgaatctaaacacaaaacttacacatttctcaaaaattaactaaaatggaacatagacccaaatgcaaattgtaacactataacattttgagaggacagtttaggagaaaatctagacaacattgaatttgatgatgcgtttttagacacaacaccaaaagcttagtcaatgaaagacaagcttggtaaatagcactttattaaaatctagtaaaagatactcttaagaaaatgaacacacaagccacagattaggagaaaatatttgtaaaggacatata

SEQ ID NO: 238846 - DNA, 572 bp, Homo sapiens
gcaaaatacccagaatagccaacacagtacttaagaagaacagcagttagaaaaaatgatgctattcagcttcaagacataatataaagctaaataatcaagacaataaaatcaagacagcctaatattgatgaaagagtagacatagagttcaatgaactgagtaaacagccgagaaataaacccacaaaaatatagtcaactggtccctgacaaaggagcaaagcctatacaatagagaaacataccctttaaaaaatgtrtgctggaacaattagacattcatgtaaatgaatctaaacacaaaacttacacatttctcaaaaattaactaaaatggaacatagacccaaatgcaaattgtaacactataacattttgagaggacagtttaggagaaaatctagacaacattgaatttgatgatgcgtttttagacacaacaccaaaagcttagtcaatgaaagacaagcttggtaaatagcactttattaaaatctagtaaaagatactcttaagaaaatgaacacacaagccacagattaggagaaaatatttgtaaaggacatata

SEQ ID NO: 238847 - DNA, 572 bp, Homo sapiens
gcaaaatacccagaatagccaacacagtacttaagaagaacagcagttagaaaaaatgatgctattcagcttcaagacataatataaagctaaataatcaagacaataaaatcaagacagcctaatattgatgaaagagtagacatagagttcaatgaactgagtaaacagccgagaaataaacccacaaaaatatagtcaactggtccctgacaaaggagcaaagcctatacaatagagaaacataccctttaaaaaatgtatgctggaacaattagacattcatgtaaatgaatctaaacacaaaacttacacatttctcaaaaattaactaaaatggaacatagacccaaatgcaaattgtaacactataacattttgagaggacagtttaggagaaaatctagacaacattgaatttgatgatgcgtttttagacacaacaccaaaagcttagtcaatgaaagacaagcytggtaaatagcactttattaaaatctagtaaaagatactcttaagaaaatgaacacacaagccacagattaggagaaaatatttgtaaaggacatata

SEQ ID NO: 238848 - DNA, 612 bp, Homo sapiens
atatcaggtgataaaaggtttaagcttgcattagtacatcagatctggattgaacctttccaatatatgtagaagcaagataaaatggaaatcttgcatttctttttgcatgaattatttattcccgatcttaaactctgcttattttactgcttgaagtgacttcctttgctgtttcctttttggaaatcctagttcagctagaatagaacaatgaggaacatattttctratgagattgtttttcccaaaatctaaaatatggtgatagcgcatatgtgaattggattgtcatttcactgtaaataaatttgcttgcaaccctttgtcgaagtctggagaggaatttaaatatgtctttatatatttctatatataactctatggagtattgtgtcattttaaacaaaatttcatggaggatataaaatctttagataatgtacataatataaaattacatatatattttaatatatatgtgattaatctcctctgaactataataatacattacagaaaaaagacatgttctgcaacagcacaaaaagaaggcaccccactaacaagaaactatcttggtacttaagaagcttactaatgtcaagatgt

SEQ ID NO: 238849 - DNA, 576 bp, Homo sapiens
tttcttttttctttatgtctctgccrgtttttggtattaggctaatactggctttgtagaattagttctggagaagcccctcctcctcaatttcttggaataatttcagtaggattggtaccagttcttctttgtatgtctgatataattcagctgtgaatccatctggtcctgggcttctttgttgttgttgtttggtaggttatttattactgattcaatctcaaaacctgttattggtctgttcaagttttcactttcttcctggttcaatcttgggaggttgtgcgttttcaagaatttatcaatttcacctagattttctaatttgtatgcatagagttgttcataattgcctctgggtatgtttgtgtctttgtaggatcaattgtaatgtcatcttcattacttctggttgtacttatttggatcttctcatttttttctttgttaatctagctagcaatatatcaatcttatttattattttgaataatctctcttgccttcattgatgttttgtatggatttttgcactcaattccattcagttcttctctaattttagttatttct

SEQ ID NO: 238850 - DNA, 550 bp, Homo sapiens
tgtggtcaatcttaaaatatgttccatgtgcagatgagaagaatgtatattctgcggttattgggtggagtattctattaggtccaaccggttgagtttcaagtttaagtccagaatttttgttttttgccttgatgttttgtctaacattgttagtggggtgttaaagtctcccattattgttgtgtggctgtttaagtctttttgtagatcaagaaggacttgttttatgaatctaggtgctctaatgttgtgtgtgtrtatattatgaatagctcagtcatcttatttaattaaacccttcatcattgtgtaagtcccttctttctcctttctgatcgttgttggtttacagtttgttttatctgatatgaagaaatagaggctcctgctctttttcattttataattgcattttatgtttgcatatgtttgaattttgtgctttcagtgtgtgaattgcggcaatagtgaatattgtatgtaataggtaatttttcagcaaacatccctttctcaccttcctacttttaggattctccaatgccaa

SEQ ID NO: 238851 - DNA, 504 bp, Homo sapiens
gaattcatagacaaaatgtgtaccaatcaactacttacattttcaataggcttctggctaactgtaggccattagtagttaagttttgggggagtcaaaagttacatgtaggccaagtatagtggctcrtgcctgtaatcccagcactttgggaggccgaggcaggcagatcacttgaggtcaggagttcaaggccagcctggccaacatggtgaaacctcatctccactaaaaatacgaaaattagcggggcacggtggtggcgcctgtaattccagctacttgggaggctgaggcaggataatcacttgaacctgggagacggaggttgtagggagctgagattgtgccactgcactccagcctgggcgacagagcagactctgtctcaaaaaaaaacaaaaacaaaaagttacatgtagatgtccaactacacagaaggctgtctcccctaaaccccatgatgtttgaaggtcaactgtattttcagatgatgtgaatgtt

SEQ ID NO: 238852 - DNA, 579 bp, Homo sapiens
ggtaattttgaatgctggacaagtctcagtttacttcttacaacaccctggccaaattgaacagttcctcccagacccagacaactagactgaagggtgttactcactcttgggagctcacaaactccaattycaaagccacttggaaatagtctcaatttttttctcatatcctcccctcattcccatactggtgcatctgtgcaaattcagccctagaaatagcaatagttcctcaaagtaaatatccaaatgaactataataatgaccctgggttatacttcaaattactttattactttacaattcttcaaattactttagggtgtgctttcaaacataatctatacccggcaggtggttataacattaaattgcacaataacagaattattctgtgctttaacagattacaaaaatagtcaagattaagacaatatgaaatgaatgaatccaagctactagcccatcaattaatgctttgctatctcttgtctgaatagacaacatgggatcattttgtgcctatcaacatatcaaagttttaaatgtaggatccctcttccccaacacaagga

SEQ ID NO: 238853 - DNA, 579 bp, Homo sapiens
ggtaattttgaatgctggacaagtctcagtttacttcttacaacaccctggccaaattgaacagttcctcccagacccagacaactagactgaagggtgttactcactcttgggagctcacaaactccaattccaaagccacttggaaatagtctcaatttttttctcatatcctcccctcattcccatactggtgcatctgtgcaaattcagccctagaaayagcaatagttcctcaaagtaaatatccaaatgaactataataatgaccctgggttatacttcaaattactttattactttacaattcttcaaattactttagggtgtgctttcaaacataatctatacccggcaggtggttataacattaaattgcacaataacagaattattctgtgctttaacagattacaaaaatagtcaagattaagacaatatgaaatgaatgaatccaagctactagcccatcaattaatgctttgctatctcttgtctgaatagacaacatgggatcattttgtgcctatcaacatatcaaagttttaaatgtaggatccctcttccccaacacaagga

SEQ ID NO: 238854 - DNA, 622 bp, Homo sapiens
atcgtcatcacattcttcttatactaagacttcactggagatgcaggaagagggccttgaaagttattaactggtaggggtgggaattccatgcagggaggtggaaaaaacaaagactcaggtcccagagcacatggtgttgtcacggaaccagaaccagtctggtctggctggtgcctgaggcttgtgtagaggtragggctgagataaagctgggaaattaagactcttgaggacaggtgtaggagtttatacttgattgtgtggactgtgggaacaacacttcaacatggttgtgtatatacgttttctaacatgcattaatggtgaaatttaagagatttttactttttgctttgaatagtaatatttcacataaatcaaaaaaccaaaataataaattataaaaggtacacactgagatgtctcattctcactccgccctgtccactccattccataatccctgtagataaccaccgagattcatttcttgtgtatcgttctagtattttttgtgcagatatgaacaaatacaaatatatctttcccttcctctgatttttgtactcaaaagtagcacactaaatacactgctttatcttgcttttttttcacttta

SEQ ID NO: 238855 - DNA, 538 bp, Homo sapiens
gggagtccaaagcgggaggattgcttgaggccaggagtttgaaaccagctyatgcaacatggtgagaccttgtctctacaaaaagtaattttttgtaggatttgctaatatgttttcctagcttggatctatgttttcattttcttaatggtgtctttgaaatgcaaacgtttttaattcagcgaggtttaatttatcaatttgttcttttatacatcatgcttctttagcgtcatatctaagaaatctttgagtaaccgaaggtcacaaggtcaaaacattttctgttttttctagaaattatatagttttagctcttttggttaggtctaatgatccattttgagctgatttttgtttatgacattaggaaaaggtctatgtacatgtgttcatgttgcatatagctgttcagttgttcgagcgccatttgttgaaagacttctttctacctttgcatctttatcaaaaatcaattgtccatatacgtgtgaatcaatttctggactttctttactactccattgatctatttgtc

SEQ ID NO: 238856 - DNA, 538 bp, Homo sapiens
gggagtccaaagcgggaggattgcttgaggccaggagtttgaaaccagcttatgcaacatggtgagaccttgtctctacaaaaagtaattttttgtaggatttgctaatatgttttcctagcttggatctatgttttcattttcttaatggtgtctttgaaatgcaaacgtttttaattcagcgaggtttaatttatcaatttgttcttttatacatcatgcttctttagcgtcatatctaagaaatctttgagtaaccgaaggtcacaaggtcaaaacattttctgttttttctagaaattatatagttttagctcttttggttaggtctaatgatccattttgagctgatttttgtttatgacattaggaaaaggtctatgtacatgtgttcatgttgcatatagctgttcagttgttcsagcgccatttgttgaaagacttctttctacctttgcatctttatcaaaaatcaattgtccatatacgtgtgaatcaatttctggactttctttactactccattgatctatttgtc

SEQ ID NO: 238857 - DNA, 552 bp, Homo sapiens
ttgtctctgcttgggctttgtagaacatgttgtttcttctgcctagctatccttcaccttctttattaaggtatggctttctcaaaactcaggtgtcagtcctcaatgccagaaaagctgccacttccccaactacacttctgtgctttctaaaccattagttcaaacctaccatagctttcaccaaagtgccctgtaaacatgtatcttcttcgtctgtctttgcaactaaaccctaagctcctgttctgagccctctgtatccccatcagtgagaagactgcccagtacataaatgcttgctaaatagatagaagaatggatgaagtacmgttgactctcccgctagagcagcaaaacctagggacaaataaatggacaacaatctgtgactacatcctctctagatccaacctccgaatgttcagtaacctcagcactaattccaagcttgaagaactcaggattgtagatgcttctgagttttctaagcagaactcaagctcataagctcagtttgctcactggtgaagtgggcagattggactgaca

SEQ ID NO: 238858 - DNA, 521 bp, Homo sapiens
tcattccacctgcacagtgtggtgtgggggctaagggcacatgtcctagaatcacaaagacctaattccagtcctagagtcaccatttattaacctcaggcaggtgatttcacctctcactgcctccatttcctttccaatgaaatggtactaatgtatacattgacttctagggctgtgagaattaaatgttgccctgggtaagaagtgcttagcacagggtctgacacatggtaagcccatgtcaccaattatgacgattgattttccttcaagggcttttctctgtccacagcttctgttttcaagaaggaaggcaaaggaaatgtatacatatgatcagatggatagagtatctgactttggccacacaggattatctgactttaaatgacacgagaacccagtgtgccaaataggagaaacagagccccttggtgctgktcaggggaggctttcagaaggagtatatagggaagggaactggaggtcaatttggtagaggggtgggaatggtgaga

SEQ ID NO: 238859 - DNA, 530 bp, Homo sapiens
actaattccaagcttgaagaactcaggattgtagatgcttctgagttttctaagcagaactcaagctcataagctcagtttgctcactggtgaagtgggcagattggactgacagctctagctagggcttggatgtacagagcagttgcacagggcctcatggtcagaagggcccactcttggcttacagctctgcaattgccaycttgaaattattagtttttgaaaaaggagccctacatggttcttttgcattgaggcctgcagattgtgtagctagttctgttcatctatgagtataaaagaatccattttatttttattataagcaaaaaccatttgataaatattcaaacctacggcaacttgcatctcatcttcatcaattcattgaacaaatacaggtccatgttttgcatagttgtcatcagaaaatacatactacttagcccctttgccacttcttgttttgtatgtacacatttgtccatgccttgacattgttcccatatttgtcattcttaatagct

SEQ ID NO: 238860 - DNA, 665 bp, Homo sapiens
gctttcctccctgggccttgcccctctccctacatgtacccctctgtctgaattagacattcctgaacacaggctttcaggcttaccagctgtcttccacctggactcaggcatgtttcctgctcttcggggacttgcctgcaccccggctcggtgctcatctctaggcacggagcgtcctccagcggtttctctcccaatcacagcccctgtccaacctcctgtcccaggaygaagaggggctagggagtggtgaacgagtcaggacaatgtggcagtccttgtaaccttggggaatgtgaggtggttcagctccagatccatattcccaatacagacaacagtgataaaaaaactaatgctgagtgcttcctgtatgccacccttcatactgggtgctttttgttattttaacctctttataaccacatgtggtaggtgctattattaaaccattttacaaatgataaagctgaggcacagagaggccaaatgatttgctgattatcacacagctgggaagcggtagacctgggatttgaacccaggcagtctgacaatgggcccatgctcctaacttctccctgaggataccccattggtttagcactcctctagggtgtgagtcagggcagagatggtggctgtcctattcacggctgcac

SEQ ID NO: 238861 - DNA, 431 bp, Homo sapiens
  misc_feature (1)...(431): n = A,T,C or G
gcaagcagacaacactaatatgaatttggaaccctgccgatggagtcatatgcccctgctgggctgggctgctaggacaagcacctgcctatatgtgccaagtgtgctccctgctacgtgcttttaatgcagtggcctaaaggcacataatgcaggccaaaggtgggcttgaaagaatactctcacagaagtcacattatcccaaagtgataacaaggtttgattaattaggaaataytggacatttatatgagtggaattatcatatttcctcaacactctctctttacagacactaatgcttcatcagctcaacatagcatccatgtcctcaaaaccttccatcacagttttaaacataagactcggtaaacacaaacaaacaaacatctttcaaacatgcatattcannnnnnnnnnnnnnnnnnnnn

SEQ ID NO: 238862 - DNA, 431 bp, Homo sapiens
  misc_feature (1)...(431): n = A,T,C or G
gcaagcagacaacactaatatgaatttggaaccctgccgatggagtcatatgcccctgctgggctgggctgctaggacaagcacctgcctatatgtgccaagtgtgctccctgctacgtgcttttaatgcagtggcctaaaggcacataatgcaggccaaaggtgggcttgaaagaatactctcacagaagtcacattatcccaaagtgataacaaggtttgattaattaggaaatactggacatttatatgagtggaattatcatatttcctcaacactctctctttacagacrctaatgcttcatcagctcaacatagcatccatgtcctcaaaaccttccatcacagttttaaacataagactcggtaaacacaaacaaacaaacatctttcaaacatgcatattcannnnnnnnnnnnnnnnnnnnn

SEQ ID NO: 238863 - DNA, 602 bp, Homo sapiens
ccaaatggtatatattcctggaatgtgaggatgtatcaacttatgaaaatcaatcaatgtagtaggtaccgcattaacagaatgaagaggaaaatactcacaatcttctcaattgatgaagaaaaacatttgacaaaattcaacatcmattcatgattaaaatgctcaataaactagggttacaggaatctacctcaacattataaaatccaaatgtgaaaaaccgacagcaaacatcatactcaatggtaaaagactgaaagcttttcctataagatcagaaacaaggtaaggattcccattctcaccacttctattcaacatagtactaggatttctacccagaacaattaggcaagaaaaagaaataaaaggcattcaaactggaaaggcacaagtaaaattatcactgttcacagatggtatgatcttattcatagaaaaccctgaagattccacacacaaaaatggtcagagctaataaataaattcagcaaagttgcaggatacaaagacaacacacaaaaatcgtttgcatttttatacactaacaatgagcaatctaaaaagcaaactacagaaacagttcaatttacaatcat

SEQ ID NO: 238864 - DNA, 578 bp, Homo sapiens
tggatggacccactaaagaagataactgatgtgatttcatattgttaagatgtcagtactacccaaagcaatctacaaattcaacaaaatccctagcaaaattccaattttttttcagaaatagaaaaacccatcctaagatgtatatagaatctcaaggaactccaaatagacaaaatcttggtaaagaagaacaaagctgaaggactcatacttccttatttcaaaacttactacagtaatcaaaacagtttaggagtgtaaaacatatagaccaatggaataaaatagaaaacataaattataaataaaccctcagatatatgatcaggtgacaagggtcatttttgacaagggagccaagatcattcaatgggggaaaggactacattttcaacaaatggtgctgggaaagctggatatccacatgcaaaagaatgaacccttatctaacagtrtacacaaaaattaactgaaaatggatcaaagatttaactgaaacacctaaaactataaaactcttagaagaaaacttaggccaaaagctttgtgacaaaggatttagcaattatttcatg

SEQ ID NO: 238865 - DNA, 518 bp, Homo sapiens
tgttgtgacttacaaattttcttgtcttcttcttgttcctacactcactttcttaggctctgggactatggaaaggacaaatgacaactgccacgtgagctcacctcagtgtaagatgacttatggggcctcctgtatactgggggcaaagctaaccctgtttccaactgacagggctatgcatgtctcctcggacttgatactcagaggttttktttttttttttttttttttttagctcaaaatatcaagtaaagtaaatcatttaatctttcttgggaatgaactgttgtgttggccaataatgaacatgaacatgatgcatctgaaagtagaagatgctaatcttgcaaatctattttcttttccttaatgagtacaaagagattttttttttaagtctgtggtcctgcagaaaccaaaagattatggcatacaattatctcactgtcaaaaattacactttggttgaaaatgaagtctactttcttgaatatttagcctttaatttttttgtt

SEQ ID NO: 238866 - DNA, 546 bp, Homo sapiens
gaattctacaaaacattcaaagaacaatcaataccaattcttctaaaactcttccaaaaaatagatatgagagcattcttagcttattctatgaggccagaactaccttgatacaaaagtcaggggaagacatcacaagaaaaaaacagaccagtttgctccatgmatatagacacaaaataccaacaaacccaagttagcagcatattgaaagggctatgcacagaaccaagtgggaatcatttcagaaacacaaggggtggttcaacatatccaactcaatcaatgtgtaagataccacattagtaggagaaggagggagaaaaaaaagatcatctcaatagatgcaaaaacaagaaaaatatttgatgaaattcaacaccctgtcaaggaaaaataaaaacaaacacaaacttgaactagaaaggaactctctcaacttgataaaggccattcatgaaaaatcaaagctcattcatactcaatggtgaaagactgacagctttcccctaagattatggacaaaacaagggtgcccactttcac

SEQ ID NO: 238867 - DNA, 546 bp, Homo sapiens
gaattctacaaaacattcaaagaacaatcaataccaattcttctaaaactcttccaaaaaatagatatgagagcattcttagcttattctatgaggccagaactaccttgatacaaaagtcaggggaagacatcacaagaaaaaaacagaccagtttgctccatgaatatagacacaaaataccaacaaacccaagttagcagcatattgaaagggctatgcacagaaccaagtgggaatcatttcagaaacacaaggggtggttcaacatatccaactcaatcaatgtgtaagrtaccacattagtaggagaaggagggagaaaaaaaagatcatctcaatagatgcaaaaacaagaaaaatatttgatgaaattcaacaccctgtcaaggaaaaataaaaacaaacacaaacttgaactagaaaggaactctctcaacttgataaaggccattcatgaaaaatcaaagctcattcatactcaatggtgaaagactgacagctttcccctaagattatggacaaaacaagggtgcccactttcac

SEQ ID NO: 238868 - DNA, 545 bp, Homo sapiens
ctttaggaggcaattccaggcagaagtgggagaggcgtgtggaaatgagacaaggaggccgcaggggccatggggagataccactgggtgctctgggaccagatcctccctgcagaggaaggatcccatgtgtgaggccccgtgtacatcttccgcctcccawgtgtcattgcacgggcacgcacagagcccagggtccctctgcattccctgccgtgatggtggggtgggaggaagccctaggggctgggagtcccggagacccatagaggacagaaaaggacatgaactggaccagtgaatactgcggggacagcgtctgcagctgggaggcgttcctgagagtttacaagtccatcaccgccccgtccctcacggcacacccagagcctgggagtcaagccagagtggctgtgcaaagccatgcctgcaatcactgtcgctgtttctctggaatccagatgaaaatgatctacaggcagggatgagacttggggcaggagaatggtttgaggacacaaagctctggtgtcctggtgaacaac

SEQ ID NO: 238869 - DNA, 545 bp, Homo sapiens
ctttaggaggcaattccaggcagaagtgggagaggcgtgtggaaatgagacaaggaggccgcaggggccatggggagataccactgggtgctctgggaccagatcctccctgcagaggaaggatcccatgtgtgaggccccgtgtacatcttccgcctcccaagtgtcattgcacgggcacgcacagagcccagggtccctctgcattccctgccgtgatggtggggtgggaggaagccctaggggctgggagtcccggagacccatagaggacagaaaaggacatgaactggaccagtgaatactgcggggacagcgtctgcagctgggaggcgttcctgagagtttacaagtccatcaccgccccgtccctcacggcacacccagagcctgggagtcaagccagagtggctgtgcaaagccatgcctgcaatcactgtcgctgtttctctggaatccagatgaaaatgatctacaggcagggrtgagacttggggcaggagaatggtttgaggacacaaagctctggtgtcctggtgaacaac

SEQ ID NO: 238870 - DNA, 493 bp, Homo sapiens
attgtttctgtagatattaaactaactaaaagtatcccttatgggaaacgaagggatgggccgaattaaaggaataggttgggctagttaactgcagcaggagcatgtccttaaggcacagattgctcatgctattgtttgtggcttaagaatgcctttaagcagttttccaccctgggcaggccaggtgttccttgccctcattccggtaaacccacaaccttccagtgtgggcattatggccatgatgaacatgtcacagtgctgcagagattttgtttatggccagttttggagcmagtatatggccagattttggggggtttgttcccctgatgtcccccttctttgatttgcaaatcagtaaaagcaaaggcagctttgtcaccgtgagctacttctcacaggagtcaggatccacatctgcagactatacaaaagcacaatcatcattgaaattacagagcttccaagtgtttttatccattttaat

SEQ ID NO: 238871 - DNA, 523 bp, Homo sapiens
tgcaattccagctaaacatccccttaggggaccaattaataatgattccataggaatctttgcgcagcacctctgcctgttctgcaatgcaatattcctaaacaagtaccttcattatttctggccaggttcaattttgtttacaaataggtttttgagggtggtatgcctcaattataggagcagatttattatgttaaatactgagacsagaaagcatgtgtaactgtgtcatagagtgattatatccaggcattattaccagccaggattgataaatatgtccaataagtataatggttctctgtgtcagcccttgttgaaggaatactcatggcagtggtgacaactgctatcatagctaccattaaattactcgttgcgactggttttcctgctttcctcaggttttcttccaccatctgtgacagcttcttgatctgtccccaggtaattggctgtgttcaacaggtgttgctcatgacagttggggtcctcctcagcatcggtctcaacatggctg

SEQ ID NO: 238872 - DNA, 478 bp, Homo sapiens
tagagtccgtgaattagcatgtggaagaaaaagccactcagtatactaagtcctgttcttgtacaataacaccagtaggtgaatgctgagttgaaaaaattagcaaatctagagtcttctctggatctattctatttatttgagctttatggatttgcttctcaattagctgtaactstgcctcagcctcatttgttaattgccgagggctagtgagactgggattttctctaaggatagaaaacagattactcagggcataggtaggaatgcctggagcaggtcatatccaattaatgtcccttagtaatttttgaaaagtcatttaatgtttttaattgatccctatgtatggttgctttctgtggcacagtggtagtgtcatttactaaggtccccaagtaagagtaaggaggagtagtatgaattttgtcaggaaatataactaagccagcacaagaaatcgaattttgcaagt

SEQ ID NO: 238873 - DNA, 536 bp, Homo sapiens
cacttggcccaggctccagtgggagagcaggctcccacttggcagagatggatcatctcacctggtgtgagacgttcttgtctttaccctccataacctctttccctcatcctccactgtttggattaagaatgggaatcctggaagagaagagttttgggaagagttgttcttacttattcatgggagtagatgcatgaataagatgcatgatatgtctttggctgacaaatcaaaacatctgaggtctgggctttgtcaggcactactgccttaaaccatagatgatcaactctaatcaaacacctggcggagagacatttttatctggaggaatttagctcatctgttcctccagatcagtacttcttaaactgtggttcatgcatctctagttttctgtgagcttctraaaggtacttctgaaaaaatctgggggtgggtgaagaagagagttccacagacaaatcagtttgagaaataatgcatccttcacttgaccttggagattcacaatgggcattagagcattaaaa

SEQ ID NO: 238874 - DNA, 626 bp, Homo sapiens
ggtatgtcattcgtgacattatataagcatattattggtaccaggaattgacatagctgccatactcattggcttggctkgtccaaaaagaaaactggagaatacaactcagatttttaagattttgagtactgttccttggggacagtccactcatgcttacagctgtgacattggcattactgtagcatcaggaatttgagatgggctgattgtcacatgggtggctgagtcacttaattatagactaacaaaagctactagcactttgctatgaagctagaacccgcccttactcccctctcagacagaaatgaccagcccactttgtgccatggtgaatctattacatactccttagattctttgtaacattcaagagctttgcagtcataaaatggtagccaggctggtcttcttcccaacaatggtagtttacaaaggtagtgagagcaatgcatttgggaacagatcaagtgaaaatgtaaaagtgtccaaagaagtaatataacacccctttccccaacccaaaaatactccctccagctctaacattaccacctacaggaagcctgtcaggttttcccaagctactcttagaccaagaactatcccctctttatccc

SEQ ID NO: 238875 - DNA, 560 bp, Homo sapiens
tggtcagtgaacggaatctgctggaggtttcagaggttgagcaagaactggcctgtcaaaatgaccattctagtgctctccaggtcagtccaatttgatgagcacctactatgtgtaaggcactgtgccaggcagarcaagagataaaaaggcaagtaatccttcttcatcaacatggaatttagtccaacaaggagctgacatgagaacacaaattaatattatttaagatagatctataaaaagagtcacaagagaagtgtaatgtgcaattcccaagggttcagttaattagtataagggcagcctagtctactagaaagagcaccaaactagaatcagaagatctagattggagtgtttggtataccacttacaggctttgtgacatggagctgttgacttaatctctgagccagtttcattatttgtaaaataggtatattaatactcatctcacagagtggttaggaagactttaaaagataaaacatatattaaaatgtattgtctaagttttttcattattgaagatctgcttttcatcgcaccaacatatt

SEQ ID NO: 238876 - DNA, 545 bp, Homo sapiens
aattgtccacacattttaaaaaattgaggcaatatagataggattgtttggaatacaagtcagtaatatatgtatatacaattttgctgtttttcagctttttactgtgtctaagttattgctaataccatcaaactccctttgctatagttactgatattgaatggtacataataacagtagcacagagagattaaacccacacatatgcacatatacacacacacataaacatacaaatgaaaccatcaccaccaccaaaataagttctggattcacttgattaaaatatttcttataaccttttacttgtactaaaaagtaacgtcyatattaacacctgtatatatatgtacatacatacacacacccatagtcaatcttatacataatagggttaaaattatgaaattataatattcattccatgttgagattttgcctccctgtaaatctaaaagtagtatttcaaaatacttccaaagactaccaattcttactgaattaaagaccacttttctattcatttacaatttccaatttat

SEQ ID NO: 238877 - DNA, 644 bp, Homo sapiens
cctgaatcctcataattcttaactatgtccttgcccctggttgggataacagccacagataaaagggagcggacattcaaatggagttataaagtacacaccgtggttctcctccctgaccttgctctatacactgtcacaaaacaaatccacagtcccacagagaccttaacccagaggatggtgagaagcaacccaaactaatatatagccctgtctctaagtaccaagagatgacaatgacagcagttggttacatgaaggcatgaaccaatcaatgggttttttgagaaccaayttggtaggaggcatgctatcagagacgttaaaaaaaaaaaaagaaagaaaggctgaaagataagctgcactgatggaatttacagcctgtttccaaagataggatagaaaagaataattatccgttccggagatgatatgccaagttataaatgtgttaggtagacagcaagggctccgggagttcagagaggggaggcagcactgacctgggaaaggacaaggagactttcactgagaagagataaggcttgtgcatagacttcttcagtaggccagagggggaaggacatacagagtctggtgtggagaatggcatgagcaaaggtgcggggacaggaatgtga

SEQ ID NO: 238878 - DNA, 644 bp, Homo sapiens
cctgaatcctcataattcttaactatgtccttgcccctggttgggataacagccacagataaaagggagcggacattcaaatggagttataaagtacacaccgtggttctcctccctgaccttgctctatacactgtcacaaaacaaatccacagtcccacagagaccttaacccagaggatggtgagaagcaacccaaactaatatatagccctgtctctaagtaccaagagatgacaatgacagcagttggttacatgaaggcatgaaccaatcaatgggttttttgagaaccaatttggtaggaggcatgctatcagagacgttaaaaaaaaaaaaagaaagaaaggctgaaagataagctgcactgatggaatttacagcctgtttccaaagataggatagaaaagaataattatccgttccggagatgatatgccaagttataaatgtgttaggtagacagcaagggctccgggagttcagagaggggaggcagcactgacctgggaaaggacaaggagactttcactgagaagagataaggcttgtgcatagacttcttcagtaggccagagggggaargacatacagagtctggtgtggagaatggcatgagcaaaggtgcggggacaggaatgtga

SEQ ID NO: 238879 - DNA, 442 bp, Homo sapiens
ctgaaaactgaggaaccatttgcatttaagtgataattaagtctggcaaatctgccgagagagagaatagagtgaaaaggaaaagagcccaagggaacatcctcccgtgagcctgataaagaagatgggtcaaggagggaggctgagatgtagtcagggtgggcagcaagactatcaggagagagtagtgtcaaggaagccataaaaagatgaaaatttcataaaggaggcagtgatcaacaatgtcaaatgtcatagagaagttcagtagggtgacttctaagccattgggtttagcaagtagagagtcatyagtaacctcagaaaaatggcttcaatagcacaaagggctacaaacggctgaacagtgaacagcattttgtttttgtatatcataaactgtgtttattccatgtacatgttttaagatgaccaggaatga

SEQ ID NO: 238880 - DNA, 409 bp, Homo sapiens
gacaacacggcaaaaccatgtctctacaaaaaaatacgaaaattagccaggcrtggtagcatgtggctgtagtaccagctactcgagaagctgaggtgggaggatcacctgagactggagaggtcaaggctgcaatgagacatcattgtgccactgcactccagcctgggcaacacagagtgagattttaaggaaaaaaaaaaaaaaagtttatctgtcaacttggaaggagatatgaattagtctgttttcatgctgctgataaaaacatacctgactggggagaaaaagaggtttaattggacttacagttccacatggctggggaggcctcaaaatcatggtggggggcaaaaggcacttcttacatggtgacggcaagagaaaaatgaagaagcaaaagcggata

SEQ ID NO: 238881 - DNA, 588 bp, Homo sapiens
aaattaaattcacagaaagtagacaaaaggaaataattagaataagacatatcaaataaataggagaaacaattaaatgaagtcaaaagttgattatttgaaaatatcaataaagctgataagccctagcagaactgaccacaaaaaaagggagagaaagtaaaattcactgcaggcaagaatgaaagagtacataattagcatagataatacaagcattaaaaagataagaaaggggggactgtgatggattacttcatgccagtaaatttgaaatgtagataaaatgggcaaatttcttatrtatcttttagggaagttgaaattgtcattaaaatatctcctagagaaaaatccagatctggatgatttcactggtaaattctgtcaaacactttaggaagaaataataccagtcttccacaaaaaatagaagagtgaaaacaattctcaagtaggtttttgataccaaatcctaacaaagacattataataaaagaaaattacagaccaatatccatctgaataaaagaaaattacaggccaatatccctatgaatatgagtataaatataaaattattaataa

SEQ ID NO: 238882 - DNA, 461 bp, Homo sapiens
acaaagattgaaccatgaagaaatccaaaacttgaataaatcaataacatctagcaagattgaagctataataaaaagtctcccagcaaagaaaaacctaggacccaatggctttactgcaaaattttaccaaacatttaaagaagaattaataccacccctgctcaaaytattctgaaaaatagaggagagggggttacttccaaactcattctatgaggccagtagtacccttaaaccaaaaccagacacaaagacacatcaaaaaaagaaaactaaaggcccatatcccggatgaacattgatgcaaaaatcctcaaaaaatacgagcaaaccaaattcaacaacacattgaaacatcattcatcatggctgtgtgatttatcccatggatgcaagaatgattcaacatacacaaataaatcagtgtgatatatcatatcaaaccatatgatcatttc

SEQ ID NO: 238883 - DNA, 604 bp, Homo sapiens
ttttgctgggtggtgagtgaccaagttcagcatcatcatcttactgcatgtcttatcagacagaccactcttgggtccagtaccacttgtgttagtctggatgctctgaaagtagcccccctccatgtcggaattaaatatgcaatgattttattcagagaaaaacctgtgacagaaatgaggggaggaagcacctgagtaaagtatttcagagcacaggacccttgatcaattatgctccctgtagttggatatctayaagacacattctcatagttgccacagatattacattaatgtcattattcctatgttacaaataagaaaatgaacacagagtgattgagtcacttgcctaaagtctcagaaatatcaaacagaggacctgggagatattccagcagttttgcttcagcatccataattttaaccagttttctaggccccaaaataataaaaaccagcagttcatgtcaaaaagattgtccaaaaggccctgttagtgactaaactgtgctctccccactccccaattaatatgataaagccttaacccccagtgtgattatatctggacatagagcctttggaggagtaaaggtta

SEQ ID NO: 238884 - DNA, 604 bp, Homo sapiens
ttttgctgggtggtgagtgaccaagttcagcatcatcatcttactgcatgtcttatcagacagaccactcttgggtccagtaccacttgtgttagtctggatgctctgaaagtagcccccctccatgtcggaattaaatatgcaatgattttattcagagaaaaacctgtgacagaaatgaggggaggaagcacctgagtaaagtatttcagagcacaggacccttgatcaattatgctccctgtagttggatatctataagacacattctcatagttgccacagatattacattaatgtcattattcctatgttacaaataagaaaatgaacacagagtgattgagtcacttgcctaaagtctcagaaatatcaaacagaggacctgggagatattccagcagttttgcttcagcatccataattttaaccagttttctagsccccaaaataataaaaaccagcagttcatgtcaaaaagattgtccaaaaggccctgttagtgactaaactgtgctctccccactccccaattaatatgataaagccttaacccccagtgtgattatatctggacatagagcctttggaggagtaaaggtta

SEQ ID NO: 238885 - DNA, 463 bp, Homo sapiens
cttaccaataatataaacagctaattaacacttattttttgttatatgtattatatcttgtatttttacaataaagtaagctagagcaaaggaaatgagattaagaaattcataaggaagagaaaatatatttactattcaattagtagaagtgaatcatcataaagatcttcaccctcattatcatccttacactgagtaggctgagcaagaggaaaagtaagggttggtcttgctgcctcagggatagcataggcaggaaaggtagaggaggtagaagggaggtaagagagtcaggcacasttcctataattatacaaaaatatattgtattttctatctgattttctgcttttacatttctctaaaaatgtttctatatggtaccaatccttcttccattgtttgctttagtttcagtgtctatatcttagaaggatccatgtcataagaagtcaaaagc

SEQ ID NO: 238886 - DNA, 409 bp, Homo sapiens
cttaatggattagggcccaacctaaagacctcatttaacttaattacccgttaaaagaccctatctccaaatacagtcatattctgaggtagtgtgggttaggacaatcacttgtgaataggtttgaagcwcggatattgaacctattatctgtcagtgtcacatatacctgaaagccagtttaaaattgacttctccaaaacagcacaccgtgatctaaattgaataagttaccagtcatctaactcactgaaaacttgtgtgcatgtctgccctgtctgtgtaccttgtgaccttctggatggctgtgcagtattgtgaacaaaagggacctccacagctgtcctcatctggcatgttttccttaaaaccgcaggtgaccttatctaaattagaagctttattattt

SEQ ID NO: 238887 - DNA, 559 bp, Homo sapiens
aagcttatttctatcttattcctatgtcattcctgaaaaatccatgtgcttattatagattgtagtggtgataaaagaggtgaattgctgaactgacaaaaatactacaaagtagaagcaggggattaaatatacaaaattgtaacctgtgatcaaaattgtgactttgatctaggcttagaaattgttacaccttakcccatgttactggcaggcaatgtaaagtcaatatattgccaaagaatttgtcagccacactgggcagtgtcctctctactaaaaggccacagccatggaatgaaagccctgctcctggtcacagacagcccaggtctgttctgggagccagatttaagggaggccatagcagtgccagatggtagaagccagaatatggactgtggagccgggtagaacctggtttgaatcctgcctctgctgtgaatgaccttgggcatataacttaacctctctgagcttctctgagccactgtcttcttatctgtgaaatgggaatggtaacatcacactagattcttgtcaagatcaaaaaaagatg

SEQ ID NO: 238888 - DNA, 555 bp, Homo sapiens
ggacttctctgctgtgaaccagtgtagattcttcctgggaaaccagcctggcaggaaacaccgaatggacagtggatggcaggggtgcagcatggtagaaggcagtgggggtttcagtcctggctgtcacttaacagttgtgagacataaatcaccttgyctcatgggtctctgtttcttttcctttctttttgagacagggtcttactctgtcgcctaggctggagtgcattggcagaatcaagccttgacctcccaggctcaagtgatcctcccacctcagcctcccgagtagctgggaccataggcatgctccaccacacccagctaatgtttaaatgttttgtagagacagggtctcactatgttgtccaggctggtctccaactcctggactcaagcaaacctcccacctaaggctcccaaagtactgggattacaggcatgagccaccatgcctggcctcagtttcttcatctgtaaatgagaagcttggtttggctttatctggcccaccctgattccaaaaaacaataaacagcaacaaaaccaaga

SEQ ID NO: 238889 - DNA, 565 bp, Homo sapiens
ctgattccaaaaaacaataaacagcaacaaaaccaasaaaaaaccccatttgtactaacattgaaaagtttcatataaaagtatggattttggccaggctcattcctctaattccgttactttaggaggctgaagtggaaggatcatttcaggccaggaattcaagatcagcctgggcaccatagcgaggtatagtctctacaagaataagaattagaataagtatagatttcttccttctctaggaagattggcatatctggcatcatcagggcctcttggaggccattggctggacctgagtaactgctgcccctggctgtgggatgtgctatcaggcccacttctgttaccatgccaggtcactcagtaattttacctatttggttctctaggcatgtatattagtttcctggggttgccataacaaattcccacaaactgagtggctgagagcaatagacgtttattctctcacagttctggaggccagaagtctgagatcaaggtgttagcagggccatatgcactcctgagggctcgggggaagacgaccccttccttg

SEQ ID NO: 238890 - DNA, 565 bp, Homo sapiens
ctgattccaaaaaacaataaacagcaacaaaaccaagaaaaaaccccatttgtactaacattgaaaagtttcayataaaagtatggattttggccaggctcattcctctaattccgttactttaggaggctgaagtggaaggatcatttcaggccaggaattcaagatcagcctgggcaccatagcgaggtatagtctctacaagaataagaattagaataagtatagatttcttccttctctaggaagattggcatatctggcatcatcagggcctcttggaggccattggctggacctgagtaactgctgcccctggctgtgggatgtgctatcaggcccacttctgttaccatgccaggtcactcagtaattttacctatttggttctctaggcatgtatattagtttcctggggttgccataacaaattcccacaaactgagtggctgagagcaatagacgtttattctctcacagttctggaggccagaagtctgagatcaaggtgttagcagggccatatgcactcctgagggctcgggggaagacgaccccttccttg

SEQ ID NO: 238891 - DNA, 601 bp, Homo sapiens
gcggccgggccacccgccggctggggagagccgcccccgcccgccgctcgtgcctcttggccggagaccgagccgcagccggagcgctcctccgtctcagacgcgccgcgggtaggggacgaggtgccggtggccacggtgactggagtcggggacgtttttcagggcggagaggcggacgcgacggaagctgcctggagccgcgtggaggggccgcgccaggcggcggccagagaagccgagggtaccgccggaggctggggcgtcttccccgaggtatctcgtgccgcgcgccgcccctgcggctgccccctaggcggggaggacccgccgggtacaccggccgcgacccccsgcgctgcctgctgctgcgcgccgcaaccagcggaggacgagccccccgcgccgcccgcggtgtgccccaggaagcgctgcgcggcgggggtgggcggcggcccagcgggctgcccggcgcccggctcgaccccgctcaagaagccccgccggaacttagagcagccgccgagtggaggagaggacgacgacgcggaggagatggagaccgggaacgtggctaacctcatcagcatcttcggttcca

SEQ ID NO: 238892 - DNA, 595 bp, Homo sapiens
gcctggtcagatgttcacaatgtcgtatatttctacagctttttaaaataaagcatagaaggatagaggatggtagaggatattaaaatgagcttgtcacttagataacttagtatgttacattactacaattaagttactagaaaaaccactaaaaacctgagaatagatgaaaatgagtgagattattcattatatatacgggagagggaaggaccacttatgagaaaatggtgaaagtaaacatttccttgccccagcatttgatgaatatgatactgaaaaacaagtgccccwctttggcctgaatgaagcaagggagaaaaaaaacaaattagcagaaacgtgatgaaatatgacttggggcatccgtggtcaaagtgaaagcacaggctttttaatctctagccataataactggagaacattagtccattcacagcacaaaggtggtgtctagactaattatagacatgccaagtctttcagcaaatcatagttctcgatgccattttaatgattttacataaagaagaatcttctcactctcgcgtaggaataattaaactattcagcactttatatgcaaaaaagg

SEQ ID NO: 238893 - DNA, 595 bp, Homo sapiens
gcctggtcagatgttcacaatgtcgtatatttctacagctttttaaaataaagcatagaaggatagaggatggtagaggatattaaaatgagcttgtcacttagataacttagtatgttacattactacaattaagttactagaaaaaccactaaaaacctgagaatagatgaaaatgagtgagattattcattatatatacgggagagggaaggaccacttatgagaaaatggtgaaagtaaacatttccttgccccagcatttgatgaatatgatactgaaaaacaagtgcccctctttggcctgaatgaagcaagggagaaaaaaamcaaattagcagaaacgtgatgaaatatgacttggggcatccgtggtcaaagtgaaagcacaggctttttaatctctagccataataactggagaacattagtccattcacagcacaaaggtggtgtctagactaattatagacatgccaagtctttcagcaaatcatagttctcgatgccattttaatgattttacataaagaagaatcttctcactctcgcgtaggaataattaaactattcagcactttatatgcaaaaaagg

SEQ ID NO: 238894 - DNA, 595 bp, Homo sapiens
gcctggtcagatgttcacaatgtcgtatatttctacagctttttaaaataaagcatagaaggatagaggatggtagaggatattaaaatgagcttgtcacttagataacttagtatgttacattactacaattaagttactagaaaaaccactaaaaacctgagaatagatgaaaatgagtgagattattcattatatatacgggagagggaaggaccacttatgagaaaatggtgaaagtaaacatttccttgccccagcatttgatgaatatgatactgaaaaacaagtgcccctctttggcctgaatgaagcaagggagaaaaaaaacaaattagcagaaacgwgatgaaatatgacttggggcatccgtggtcaaagtgaaagcacaggctttttaatctctagccataataactggagaacattagtccattcacagcacaaaggtggtgtctagactaattatagacatgccaagtctttcagcaaatcatagttctcgatgccattttaatgattttacataaagaagaatcttctcactctcgcgtaggaataattaaactattcagcactttatatgcaaaaaagg

SEQ ID NO: 238895 - DNA, 413 bp, Homo sapiens
gactttggagactcataagcaaggaggatgggtggggtatgagagataaaaaactatatgttgggtgtaatgtatactagtcaggtaactagtgcactaaaacctgagacttcaccagtatgcaattcatccgtgtaaccraaaaccacttgtaccccaattagatagatagatagatagatggatagatagatagatagatagataattcataacaaaaaaaattaacctttgaaaactgaacacttaattcccacccttttccatgccactacccccgcccccagttctacactcctcacaatgttagcaaatggaaagtacatttttctcattatttaaggcaaaaatcttgatgttatttttgatgtttctgttggtctcatacttaaccatcaacaaatcacactggc

SEQ ID NO: 238896 - DNA, 591 bp, Homo sapiens
gcggtgcactgacgtcacagagggagcttttaaaaaacagcatgctgtggctcctccccgggaaatcctgattcaataggtttcagtgggaactggaagtctaatgtaagtaactccacaggtgattctgaagcagagctgattttggtaactattaatagtaatttaatgcaatgcccaccagatggcactcatgctccgagaatagaaaggcaagtcggaaaactgctcaatttgttaaaggctgtgctttgtactctgcatgtgtctgcctttaaaagcctacaccaggccgggcgcagtggctcacgcctgtaatcccagcacttkgggaagccaaggtgggcggatcacctgaggtcaggagttcaagaccagcctgggcaacatggcgaaatcccgtctctactaaaagtacaaaaattagccgggcgtggtggcaggcccctgtaatcccagctactcacgaggctgaggcaggagaattgcttgaacctgggaggcggaggttgcagtgagctgaggttgtgcccctgcactccagcctgggtgacaagagcgagactctgtctcaaaaaaaaaaaaaaaagt

SEQ ID NO: 238897 - DNA, 575 bp, Homo sapiens
tgtgcctgtgcttagggcaccagctcagctgccatagagaactaggattaacctgactccagaggcactgtagctctgtgcatgtccatgttctcatccccagagccctggctgctctacaagcatctgacatggcataccattaccaatttgtccatggtggtttctgtgccctgggcactggtaccattaccacctcataccccagatgtgtatttcctccacatatgttcatgctataggattaggctttgtggttgctccacaggtaccactaatcagacaccagtgccactgctactgcaagtaggcatgcaaaccagattcaatgtcaacaggatcccctaagccccaactttcccagtgggagaaaaagagactcagaggaccttaacagtcattaccactggagaaccttttarccctcactgccactgaagacatccacagtgttggttgctttggatccttgcaatctttgtcaacaccaaactcatttgacagagctgcatggggactacattgccgcaccatcatcaatgctagaactgctgtgccccacccagagagtgccc

SEQ ID NO: 238898 - DNA, 609 bp, Homo sapiens
atttttaggcactgaaatgcctcaggggattctgcagcatgtgaggcagctaaaattccaagaggaaatctatagtatttctggcatgaagaaccagaggaaaaatttargcaacaacagtctctggaaagttaaggaggaatctcagagagcagagagccagaaagggaatctccaaattgtttgcataaactctgcccaaatcttggttaacacttgagccatattatatgtgaggcagactctgagaagctcaactaacaatacaaaaagtgaactgagatttgagttgctatcaaacacacagagtttttaccttgtaaaacaaacaaaatccatattctttgaaggactaatgataaaacccagagattccataacttaatattcacaatgtccaggataaaatccagtgttatctgactgcaaagattcaggtatatgtgacccattctctaagaaaagaaaatcaacaaggaccattcctggctcttgaaattatcaggcaaactgtataaaacagcaactataaaaatgctcaatgctgtaaaagaaaatatgcgcagaatggacaaaggcagaggaaatttcagcagaagaataagaatt

SEQ ID NO: 238899 - DNA, 558 bp, Homo sapiens
aggggactgaggagattttgtatctgcattcmttttaaaatggagagacctggaaattggcctccaaagacagcaaagtaatgtttcattcactgctcttgggggcttcctattttctgaggtaaatgtgtgcagttgctttcctggaaggcactttttcctcagcctcaaggcctctccagctgaggtggctgagggaaggcctggagtgaggggataaagtcacggttgacaacaacacccttcttttcattcctcagcacttgacacactggcacgcttaataaaacaggtggcaggcatggtgggaccaaagtgctgattcagccatgccacttgcctttcatcttgggcttggactgtcgaacagacatgcttaacaagaagaggtggaggagtttatccccttaataagccaccctgaagtcactgtgcggaatcatgttcatctctcaggatgctgcgggggaatcatttctagttacagagtcttaataatttgcccagtgggcttaagaactattgatacattcattaataacaacaaaatctattgat

SEQ ID NO: 238900 - DNA, 416 bp, Homo sapiens
tcctcttggctggggtggaggaacccgcctggcgcctgggctcatgcggcctctcccacccccctgccactcccggctcacctctcactcccaggctggctctgggtctcccgtggggccagagaaaggccggtcctacctccagcctgagttcgattcccacccgttgggctccctctcccttccccagccccaggcacaggcagttcctaccccttccccataagagaagtggttgtgggtgagagggttgagtctcagggttaacccmagggctgagcccacagattgggccttgcactctctgttccttttgggctgtgcactgtcggtgagtttccagtccccgtccccaagtacagtccctcaggtagccctaccttccctgagcaggaagggtctgagctcctagcagg

SEQ ID NO: 238901 - DNA, 416 bp, Homo sapiens
tcctcttggctggggtggaggaacccgcctggcgcctgggctcatgcggcctctcccacccccctgccactcccggctcacctctcactcccaggctggctctgggtctcccgtggggccagagaaaggccggtcctacctccagcctgagttcgattcccacccgttgggctccctctcccttccccagccccaggcacaggcagttcctaccccttccccataagagaagtggttgtgggtgagagggttgagtctcagggttaacccaagggctgagcccacagattgggccttgcactctctgttccttttgggctgtgcactgtcggtgagtttccagtccccgyccccaagtacagtccctcaggtagccctaccttccctgagcaggaagggtctgagctcctagcagg

SEQ ID NO: 238902 - DNA, 602 bp, Homo sapiens
atttcataaattaccatgttacttgaaacaaccctgcaaggcagatactattattattcctattatacagtggaggaaactgaagctcagataagttgagagttgtccaaggtcccagtaagtgagtggcccagaggggattcaagctccttcagggtgatgcaatggtacagaataatgtyctcaaactttagctgcatgagaatgacttggaaggcttgttaaaacatagatcgctttcacagcagggtgactacagcaaagaacaatgtagtgtatacttcaggatatctagaagagtagatttttaatgttatcatcccaaagaaatgataaatatttaaagtgataaatatggcaattatcctgatttggtcattatacaatgtaaaggtgcactgaaatctcacactgtactctataaatatgtacaattattatatgtccattattttaaaattaatttaaaaacacacagattgttgggccccacccctggagtgtctgattcactggctctgggtggctgagaatgtacatttctagcgatttccctggtgctgctgattctggtagtctggggaccacattttgaagaatca

SEQ ID NO: 238903 - DNA, 440 bp, Homo sapiens
ccatggttcaaaagcagcctaccacttggggtcgccctggcgtgcaccccattaaggtccctacttcraggagcagattcttcaggctttccatcttggggtctcctagtctatcagcagtggaggaaacctctacagatgctgcactgtgtggtatggaaggcactggccacgcgtgactactgagtatgtgaaatgcatctggtccacactgagaagtgttccaagtacaaaacacacatcagattttaaagacgtagtgaaaaagaatgtaaaagatctcaatcactatcagaattgctcattgaaatgataccattcaattggatgaagtaaaatctgttattaaaattcgatttacctgtctctttttacttaatttaacatggaacacttaaaactgcacatgtggcttgcattatatttctttctattgggca

SEQ ID NO: 238904 - DNA, 440 bp, Homo sapiens
ccatggttcaaaagcagcctaccacttggggtcgccctggcgtgcaccccattaaggtccctacttcgaggagcagattcttcaggctttccatcttggggtctcctagtctatcagcagtggaggaaacctctacagatgctgcactgtgtggtatggaaggcactggccacgcgtgactactgagtatgtgaaatgcatctggtccacactgagaagtgttccaagtacaaaacacacatcagattttaaagacgtagtgaaaaagaatgtaaaagatctcaatcactatcagaattgctcattgaaatgataccattcaattggatgaagtaaaatctgttattaaaattcgatttaccygtctctttttacttaatttaacatggaacacttaaaactgcacatgtggcttgcattatatttctttctattgggca

SEQ ID NO: 238905 - DNA, 541 bp, Homo sapiens
ttgtaatggtcccaacacgaagaaaagatagatgtttaaggtgacggatatcccagttaccttgatttgactgttaaacattggatacatgtattgatatatcacatgtatccccaaaatatgtatacctatgatgtattaattttttaaagccccataattgtaattcttagatattgtaataagagagtaaagacaaataatgaactcaatttagtaaaaaccaaatacaataataacataagatgtgatatgttttcaaactgttctcaggcaattggtccaacttctcattttaacacttgtatgtactatgcactccttaaggtttggggagaagtccttgtagaaatgtyattgaatttttattggaataagataaaggaaaagaaaaataaaagttaaaattagagtggtgtattagaaagtcaggtacttttgtgtgtgtgaaacagcctaaggattaagaacaaaggctctggagccaggctactgggttcagattctagttttcccacttactgtgtgactttaaccaatt

SEQ ID NO: 238906 - DNA, 555 bp, Homo sapiens
aaaaaaaaaacttccaacaacccagaagcttctcatgcccctttgcagtcggtttctaccttcagtcccagcccatgaaactaaggatctgatttctcagctctagagtttaaggtaaatggaatcatagattccatttttcagctttttccaacttttttccattttccattttccaacttttttcagctctagagtttaaggtaaatggaatcatagatcatctactgtattgtgtaaagtttttttcactcagcatggttttcagatccattcatgttcttgcttccatcagtagtttgtttcttttcatgttgaagagaatttcatttgtatgaatatatcacaatctgtttacttatgtaacagttgattgacatttgaatagtttccactttgggggtcctatgaataaaattgctgtgcatattcatttacaagtctgaggtaagaatatgtatttctttytttttagataaaaacctaggagtggaattgctgagttttatggtaaatgtatgttcaactttatagaagaattgccagagtttttca

SEQ ID NO: 238907 - DNA, 539 bp, Homo sapiens
catgattacagaagttcctaagctttcctacctataaggcagagatgctgtattcttcacaacagaaaatctagccacatgtaaggaggctgctaaccagaagatggcctattgttcagcaggctagaactactcacatctttccacttagattctcttggctagagagccctttacagagcttccagtccagtgttttttgtcttctcttcaaggcagtcctagaattaccccaagctgccttagaatcaaccttaggggcaagaaaatggggctaagtaagttcttgagatttctgtttccatacrgaaactctgattttgttctcttttatatcttgggattctttgaatgatttattttaaggaaagagtacgtctgcctaataaaagtatttaaaaagaattcctcccccccccatcaccctttttttttttttttttaaaggcaaattgggtccaggagatgaaaagtgaaactaatccctttaacaaagacttccatgttgccaaagtcaaccctttttctactcgacctct

SEQ ID NO: 238908 - DNA, 550 bp, Homo sapiens
tataattgcaaactgcagtaagtrtggggagttatgagagtgtgtagcaggaggaactgatgtagtggtggggaggaagaggcacgagtgatgaggaaggttcccgagggcaatgataatgaactgagatctgaagaatgagtggagttaagtgagtgaattagtatgtgaaaagtgctctcctgggaaggaccaaactatatgaaggcttctgagcatggagttttgcaaagacagaaacaccaatgtgcctggagcctggaaatcaaggtgtagagtggctgaggatgagtctggataggtaaactggacctaagccaggtatgatattgtagacagcagtaggagattttgttttgtcctaagacaagtggcaaactgttgaaggttttaagtaaaggagtgacatgctatgacttaggctgttgtggggagaatgcattgggatgaatggcaaaaatcgaagggcagtgatcagttaaaagttctttcagtagttcaggactaggatgatagtggaggcagagagagatctaccaatttgaagata

SEQ ID NO: 238909 - DNA, 488 bp, Homo sapiens
gaattcatcgtacagtttcatgccgctccacctttgaacatgttttccctctgcttagaggaattattcctccccctgctttcctgcrcttccctattcatcctttaaaacctcatctcaaagttcctctgtgaagacattcctaatttttaccctccctctattccatcaacagacttggcttcaaatctcaggacgtggcccatttaatgagttctcaagaaatgattattgttttctcaaattcttggagttgacctggtttttctccagcttctgacagtcagaccaaatgcaatgcaggcggctagaaatcagctatgcagttgtgaaacatgcaatttgaagcaagattcttgattgctcaaatgagagttatgtaagctttgtttgcatggtgcaatgggcaggaggacctcactgtgagcagagttttggaggctatttctggtgtgacagcacctctgcttcatttccaccaaaaccat

SEQ ID NO: 238910 - DNA, 567 bp, Homo sapiens
catttcctcctctgcattacccaatttctccagcaaatagtctgaggccatatagctagttttggccaatgaactaagagcagaaatgacatttgttmtttgcaggttgaggtagttaaaagtcagtgtgtttcttctgtcttctttgcctccgcttacctgacatgacacataatccagttggcacatctataggacagaagaggacctctggaccgtcctgatattgtatgtgagaaataagtcccattatattaagccaggtgcaactgtcttttagagacctatattattgttgttgctgttttttacttactggactagaggttaacagaacacaattaatcttaacggttcattacatattttgatccttagtttttgcacgactcacttttacttattttagtagccatttagttatttttttaaatgtatgcattcacatttaaaaccacctctaacaactaaaattagaacttccataataaccatctaactccatggttcctctacaaactctttctcctctcttctctcacacagagtaaccatcaccctaaatcc

SEQ ID NO: 238911 - DNA, 567 bp, Homo sapiens
catttcctcctctgcattacccaatttctccagcaaatagtctgaggccatatagctagttttggccaatgaactaagagcagaaatgacatttgttctttgcaggttgaggtagttaaaagtcagtgtgtttcttctgtcttctttgcctccgcttacctgacatgacacataatccagttggcacatctataggacagaagaggacctctggaccgtcctgatattgtatgtgagaaataagtccyattatattaagccaggtgcaactgtcttttagagacctatattattgttgttgctgttttttacttactggactagaggttaacagaacacaattaatcttaacggttcattacatattttgatccttagtttttgcacgactcacttttacttattttagtagccatttagttatttttttaaatgtatgcattcacatttaaaaccacctctaacaactaaaattagaacttccataataaccatctaactccatggttcctctacaaactctttctcctctcttctctcacacagagtaaccatcaccctaaatcc

SEQ ID NO: 238912 - DNA, 631 bp, Homo sapiens
gtttcaggactcggtctccataaagttcaaaagaaccttctttgggtgcagggacatagtttccaccatgcttgaattctrtcctcttcacttcttcacctttgttgttgaacattctacaatacaaagtatgacatgatggaatgttctccaagcttaggtagtcctggaggcttctttattctttgtactacagaacaaaaaaggaatacatgctctccttcaagataaaggtgctggttgtaataataataataataatacaataataatatttattgagcatatgtatgtgccaattgctttgtaagcacgttagagcactattatcttattcatccacacagtaaccatttaacagatgaggaaattagtcctggggaactgggtaacttgcctcaagtccctctactaagtgacaaggtggggattagaacctgactttttcaatagctgttttactgaagaaagagaagggctgggcagactgtgagtggcttggcagtgcggcattccgtgtgcggcccatgtgctgatttcctagcaccccaaacatagctctgatcattgttgggaattcacctgatgagtcctggaacttcagttccccaaggaacaggcccggacaccg

SEQ ID NO: 238913 - DNA, 402 bp, Homo sapiens
tttcctctactgagggacattagacaccacccataaaggatggaagatgacttttttcctttccttaatttttgatggagatttcaatctagaagaaccacccctagataaaaaagttctatacacatctgtatttcaaaaacattttggcgaggcacagtggctcatgcctgtaatcccagaactttgggaggccaagatgggcggatcacctgaggtcaggagttcgagaccagcctggccaacatggtgaaacctcatctctacaaaaaatacaaaaattagctgggtgtggtggtgcacacctatagtctcagctacttgggaggctgaagcaggaggrttgcttgaacccaggaggtgaaggttgcagtgagtggagactacgccactgggcgacag

SEQ ID NO: 238914 - DNA, 616 bp, Homo sapiens
ggttacacccaaagggcatgcaattagttaaatggtaaagctggaattgggatccaggtctgtaagactctagagagtatgttcttaattgctaatttacactatcttccaagatgcagactacctaccagtctgaggactccagcatgtcacctcattggtgccactagcctgaatgaaatcagatcacacaggcaccaaggaaaacagaaccctctcaaaggaaaaatgacaatgctatataaaactgccaatttagataatcagttcaaaaaacattttgtgatcactaatttattctggtctaggaattatggtaggtgctggagtacaaagatgaataagacaatcaagmgggagatagacatatacacagatcatttcagtatagcatggccagtggtaaggtactgaggagcaggcatggggtgctatgggagcacaggctgctatgagagcatgcacaggccctttctgcatatggggaggattcctgaaggagatgattcttaagccgaataatgcaggattgaaggggaagaatgtagggatgggaattactagcacagaaatacgaacaaacatggtttaagcggagatctatgagcagtttggt

SEQ ID NO: 238915 - DNA, 588 bp, Homo sapiens
agactgagtgattggcattgggcacaagcagtttttctgtcaaggctacaaagcattgcttataaaaccacccatgttgacagctccatgccagaatcacacttcttacttgatcctgaccagcacctcctgctcaccaaagtgcaattttctttctctttctttcttctttctttgtttctttctttcccctctctctctttcactttctttctttctcactctctttctctttctctctctttctttctttctctttctttcttttcttcctttccttcattttttgagacagcgtttcactctatcgcccaggctggagtgcagtggcaccatgtcagctcactgcaacctctgtctcctgggttcaagcaattcttctgccttagcctcccaagtagctgggattacagatgcccaccaccacacccagctaattttttwaatatttttattagagatgggtttcaccatgttggccaggctggtctcgaactcctgacctcaggtgatccagccgcctcagcctcccaaagtgctgggattactggtgtgagccacctcacccaacccaaagtgcaattttca

SEQ ID NO: 238916 - DNA, 670 bp, Homo sapiens
aaaaatagcaaactttacccagaattatcagtgaaggcatcatggaagatgtgacctttgacttcagtcttgaaaagctcaaggaagaattatagttaggtgggtggatgttttcaaattcttgtctgctggcatccccatgactcaagcccatgtgaatgacgtaacagaatatgcctcatagtacatatttatttataactaaaaataacgtctaagctttataagaaatggaacaaatgtgactgtgtctctaggttttttttcctttaagaagattattgcacataataacagaggacaaatatttttagttgctattaaaaattkcttgtatccaaatacattaaattgatgacagaaacattaaaaagagtattatacaacaagaacaaggaaagtgagagaggagacaacaacagaaaagagattgcaacacaattttgtaagcaatatttgtcagaaagaagcaaatgatttaatacagtggagaaatttacaaccaaaatattggttgacaaaagacaataatgacaggaaacaaactgttttttccacagagaactggagaggctgagcacttagaagttttaaggatgtaaagaggaggagagagggtagggtttaaagctgaaatcatggggtgagacacaactgttaacaaataagt

SEQ ID NO: 238917 - DNA, 556 bp, Homo sapiens
ggacaaccagtcacaatgagtaatttaacaatagttatgatagtggtgatcaccgttgctctgagtattccttcaacaagggctgacacagagaacaattatacttattgggcatatttatcaatcttggctggcaataatgcctggatgtaatcactctatgatgcagttacacatgctttctgatctcagtatttaccataataaatctgctcctctaattgaggcatattgccctcaaaaacctattcgtaaacagaattgaatctggccagaaataatgaatgtacttgtttgggaagattgcactgcagaacaggcagagatgctgcacagtcattattgattggtccccaaaggggatgtttagcatgaattgcacctcccagtctgtgtgccatagccacactatgttcagctggtctgaacaaaatggtcagatggtagaaatgataagaggtatggcaagagttcctactatctggaaacatggcagtgtagtggcacttcaacctcaaatgatatggcccrctctaggggctaaacataaggattt

SEQ ID NO: 238918 - DNA, 614 bp, Homo sapiens
gcatcattgcacttcacccctaactatttcagcatgtatcctaagaatacgagaacattctgctatgtaagaaacaggatatcacacacaataatattaacactaattcaatgtcagcaaatgtatagtcaatatttccattccccaaaatgtcgccccaaaatatttttatacgttttttagtttagatctagaagttaatcaaggtgtatgtatgcattgtatttgattgtttacctttttggtatattttaatctagaaaaggcacatttgcccttttttgttattgtttttcatgatattgaattttttgtaaagtccaggccagttttttgttttgttttgttttttgttttttgttttttttttgagacagggtatctctcagttgcatgggctggagtatagcagtgtgaccatggctcattacagcctcaaccttccaggctcaagccatcctcccaattcagtygcctgagtagctaggactacaggtgcgtgccaccacacctggataacttttttttaatttttattaattttaatttttaaatttttttatgtccgtaagtttttggggaacaggtggtatttggttacaagtaagttcttt

SEQ ID NO: 238919 - DNA, 494 bp, Homo sapiens
gtggctcgctcctcaatgtaattgagagcagggaggccaaaagtactctaagtcccggtgtggttaggraagggtaagttccaccgaccctcaggaactgaactggaagacagatccagtgtgtcccacaagcccagtcgctgtagaagctaagtgcccacatagcctgagacaattctcttcccctacgggagggcgagcgaacggtggacgacgaaataaaggggtaaggttatgcgctcctgatccctttccctaaataaagataattatctggtgcttcctttacccttagattccccattcgtcccatccgcccgcaaacacaagactgagcagggagcggcccccgcaccctgagggcaccactgggggtggagagagttaaaaaaaaaaaggggggggcgcgctagagaggaaaggaggggagcatggcgggcatgaggcagggagtgaaagcggggatggcgggggaaacggggcgtgagggaggg

SEQ ID NO: 238920 - DNA, 289 bp, Homo sapiens
aatttctttaaatatcatcaggctttaaatcctgtgraagtggcattggtgacatggcagtctgtgaaggaaatggtatttgaagggggtcctcgtccatggatcttggagccctcccgattttttttggaattgaatgcggagaagacagagaagattggaatagcacaagtgtggctgccatctaagagaaaacagaaccagtacatctaccggatccaatgcctggatttaggggaacaagtaggaaaacagttttttataacattttctttagtgtaatactcca

SEQ ID NO: 238921 - DNA, 609 bp, Homo sapiens
atggagtgacagttctgcagttcttctgtgatggcctaggttggtctctacctttgggaacagtataatttagaattttaaagcccttttccacacagaatcaaggatcaataagtgcaacatcctttccttagatagattagatgctagtaggttatgtgacatatttattgtcacagagctaaatcaagtctaagtataccactctcgaagatatacgagagaattaaattagaagaarctgatctttgatatgcaaatctatttaattaaaaatatatttgagttaagtaactatagatggaagtatgtcccactggtgcatttaggtcagcacactggacaggcatgattttaataagtcattaattcttcccattaacactgtgcaaccttctagaataattagaaccccctgccctttgaaaataaacccttgtcttccatttagcttataatttaccatgatagaggcgatcactgtatgatttgtctctctctgcatttaagagcacccgtgtgattagaagattgtctaagtcttctgcagcaggcagatacaatctgggagtagaaattagtccagaatttttcttcttaagacaagat

SEQ ID NO: 238922 - DNA, 447 bp, Homo sapiens
attcattttcatacatatttctcatattgttgctgatacaatttagctaaaaccttgacattttgccaatgtttaagtgttctccttttcactcagtcttagcacttggccctcattgggtgtgctgtgactggactccagttataggtcaggaagtattggaaggtagtgagaatgttttgatgagacttggcattcccctgcaggctaactccctcaaatgaagataatacagggttttcaagcaagagaagagccatatctcttccgagagaaatttcccagtgtttctcccygggtccttattcgcaatctggtggttctcattctgaatgtcaagtgtggatctcacttctctcctcactgcccagtgcatcctcacatttacatgcagagcacatgttgtcttttcattatttcatgggatttctcctttagtttgtcatt

SEQ ID NO: 238923 - DNA, 575 bp, Homo sapiens
accagaaaaatgcatgttctgcatttatggtcattatgcttcccatgttaagtgaaaccgttcgtttcctaaggctgctgaaaaaaaaaaaagcaccacaaactgggtggctttcaacagaaatttattctctcacagctctggaggctagaagtctgaaatagagatgtcagcaggatcatgctgtctctgaaggttctaggggagaatctgttccatgtgttttgttgtcttctgatgttagctgcaatccttgctgatacttggtttgtagacccatcactctgatctctcttgttatcacttggcattctcctttgtgtgtgtgttttccttctctcataagaacagtcattggattaggactcaccctaatccagtgaggtctcattttaacttgattacattttcaaagaccctatttccaactatattcaattcatgggtgccaggagttaggatttcaacatacttttctgggggacataattcaacccacagcaccatctgaataagtagaacaacatttgaagaaawgctttgtttaatgtgatttcattaattaaaaaaagagg

SEQ ID NO: 238924 - DNA, 607 bp, Homo sapiens
atttcaaatctagatactgagattaaagaggttaaacaagttgaacaaggccayaccaatgtaatagcatagctactatttaaattcaggactgcctaaacacaaagtctataattataaatactacgcaataaaccctcccaggtgagaaagaggagaggctacctccagatgagtaagacgatcatgtgcaatgttcatgttccagagatttatctaacaaactctcagaaaatggaactttaacatgtatttataccgatttaagaccctttctacagaagcttccttatatgggttcaaaaactgagaggaaatagaaatattctgtatctgcatggtgctgaatatcaggtttcttttgactattcaatgattaggtggtttgtctaggtagttagcacattggtgtcagtcctcaggagtcatccttctggccctgagactgtcccacttgaattcctctggtttggaggtgaggggaatctctgcagtggcagacagagatgatcttcctgggccccacccactgcgtgtacccagcacctatacactactggggcttcaggagtctgtagactaaagcccattgaattgggctctgcct

SEQ ID NO: 238925 - DNA, 572 bp, Homo sapiens
atcaggagtaaggaaagagataaatcaaactgtgatacagacttcaaaacagccagactcaactccatgaggagctatggagctaaaactgctcttcagagatgtcctacgttgggctgagatgaccaggcctttagaccgcaaacaggtcagtcactggatgtggcaggaagggacgtgaacttggaggaagtggctttctacagctaaggccattcctacagaaaatgacagccaagggtgatctgtwgacagcacttccagtggatgggaccagtcctttattgcctgcataaattttcctgccaagtatagcatgttgaccatcttgccacctgtagacaatgtttgcagcatttgtagttctttttcttctcagatgtccatgtccctatccctacctccttggctcttttgagcaacttctattcaatcctcaaggcccagttcaaattcttcctccataagaccttgcctgtccagccctgctcattttgctcctcctgctcagaattcctttgctccttccttcactctcatccttcatccctcatctgacacattacacatat

SEQ ID NO: 238926 - DNA, 402 bp, Homo sapiens
ataaaagcctagaacaaaaaaaaaargggaatgaggaatgaaagtaattgaaaaaataaaagcatcaaagatcagcagtagacttggggactgattgaatgtaaagacaaaggaggtgagcttataaaaatgattcaaggccaggcaggctggctcatgcctgtaatcccagcactttgggagctgaggcaggaggatttcttgagtccaggagtttaagaccagcctggacaacacggtgaaatcccatctctaaaaaatacaaaaattagccagggggcacacagctgtcatcccagctactcaggagactgaagtgggaggatcacttgagcccacaagattgagtctgcaatgagccatgattgcacttttgcactccagcctgagtcacagagtgag

SEQ ID NO: 238927 - DNA, 387 bp, Homo sapiens
gcaaaaatcatagctgaagtgtaataaaagcctagaacaaaaaaaaaaggggaatgaggaatgaaagtaattgaaaaaataaaagcatcaaagatcagcagtagacttggggactgattgaatgtaaagacaaaggaggtgagcttataaaaatgattcaaggccaggcaggctggctcatgcctgtaatcccagcactttgggagctgaggcrggaggatttcttgagtccaggagtttaagaccagcctggacaacacggtgaaatcccatctctaaaaaatacaaaaattagccagggggcacacagctgtcatcccagctactcaggagactgaagtgggaggatcacttgagcccacaagattgagtctgcaatgagccatg

SEQ ID NO: 238928 - DNA, 503 bp, Homo sapiens
attattattaatattgatttgttgccttgacttaatatggaaatagcacaaatatagttcaatttcacagatctttacagattgtaggctagctcaaatcttaaaagagtttctacatcattgacttatattccctcctcaacttcgagttatttgaataatctggacaattcctgtaattcttttgtttgtgcagaaacaaagtaatgtcaaagaaataaagctgaaactttctcacaatgctccatcactcttcctatataagcttgctattttaataagtatttaatatattactgagtattatatatttttctgtattatatattgttctacaatatttaataatatattmtgtaatatatattttctatataataaaagtatatagaaaatatataatgttacaatatttctattatatatttcaatactcatactgaaattaatttaaatgaatacattaaaacttgttccttggccctgtgggatacaaaatggta

SEQ ID NO: 238929 - DNA, 666 bp, Homo sapiens
gcagctgtccttgataacgtccatgttccggagtgacacgatcaggaccatccgtgtttgtgacaaaggtcaaatccttgtgagaatgaagaggaagggccataccattgaatatgaggaaaattatatcattttcctgccccaggcggatctaccttcctcgcttcctgcttaatgtgcagcatgtatgtgtggtattctctagagctcattttgtatttgaatttctgtaggaggtatattcaaatgtagattctttaaaaaaaaaaagacacaggacacttagctagacattcaagttggatctagttttaatttgtctcatctaatttgcaagagtaaataaatggtgattggaatgtgcaaagaggtaacattgttgttttgatatatgctcctgtttttttttcctgagttaatgttctattttgagttactattaaatcaccttcaaatctcaccagcacccctgaaaatagataaattgtttttagagtttcttratttcattcctcctctaatcaccatcatcatcaaaaatttttgcggactgagtgaatgagtgattgaatagatgattctggaagtccagagaatgcagcttagttactgaagaatactaataatgttattataaataataatagtgaattatttattatttat

SEQ ID NO: 238930 - DNA, 666 bp, Homo sapiens
gcagctgtccttgataacgtccatgttccggagtgacacgatcaggaccatccgtgtttgtgacaaaggtcaaatccttgtgagaatgaagaggaagggccataccattgaatatgaggaaaattatatcattttcctgccccaggcggatctaccttcctcgcttcctgcttaatgtgcagcatgtatgtgtggtattctctagagctcattttgtatttgaatttctgtaggaggtatattcaaatgtagattctttaaaaaaaaaaagacacaggacacttagctagacattcaagttggatctagttttaatttgtctcatctaatttgcaagagtaaataaatggtgattggaatgtgcaaagaggtaacattgttgttttgatatatgctcctgtttttttttcctgagttaatgttctattttgagttactattaaatcaccttcaaatctcaccagcacccctgaaaatagataaattgtttttagagtttcttaatttcattcctcctctaatcaccatcatcatcaaaaatttttgckgactgagtgaatgagtgattgaatagatgattctggaagtccagagaatgcagcttagttactgaagaatactaataatgttattataaataataatagtgaattatttattatttat

SEQ ID NO: 238931 - DNA, 490 bp, Homo sapiens
gcagcccttttaggcgagactacttattctacgttgttcatgtaagctttaaccacatccttcttgatgaggaaaattcattctccatctctatatgcttgttgatctcatcctggtacttactcttgaagtcctccaccagcccctgcatgttgtcaagctccacctccaccttcagcttctggtcccatgtgtccagctgccgcagmaagttgttgatgcagctctccatgttgtccacgttctcccagctgtcttctgctgctgcaggctccacatggtctccagcatcttgttctgctgctccaggaaccacactttgtcaatgaaggaggcaaacttgttcagggtcttgatctgcttcttctcctgggtgttcacagcatggatgttgggatccacctccacttttagggagctcagcagactctgggtcacagtgaaaattgtgatgcctcccatatcaccagccccagcatagacctcaccc

SEQ ID NO: 238932 - DNA, 490 bp, Homo sapiens
gcagcccttttaggcgagactacttattctacgttgttcatgtaagctttaaccacatccttcttgatgaggaaaattcattctccatctctatatgcttgttgatctcatcctggtacttactcttgaagtcctccaccagcccctgcatgttgtcaagctccacctccaccttcagcttctggtcccatgtgtccagctgccgcagaaagttgttgatgcagctctccatgttgtccacgttctcccagctgtcttctgctgctgcargctccacatggtctccagcatcttgttctgctgctccaggaaccacactttgtcaatgaaggaggcaaacttgttcagggtcttgatctgcttcttctcctgggtgttcacagcatggatgttgggatccacctccacttttagggagctcagcagactctgggtcacagtgaaaattgtgatgcctcccatatcaccagccccagcatagacctcaccc

SEQ ID NO: 238933 - DNA, 548 bp, Homo sapiens
aatgcaccctgtccagtccatggagaaaacaggtactacctgatkatggatttgcactcagaataaggtaggacttaatatgaagaaatgttaccaggcagtccaaagtttgacttattccttatgaataacacgaagtggcctaactggctatggctatgctttagtaatcccaagtgtatcatcaactggataaaatcaccagggctccatagtattccatggtgtatatgtaccacattttatttatcaagtctaccactgatcaaacatttgggttgatgctatgtctttgctattgtgaatagtgctgcaatgaatatacacatgcatgtatctttataatggaacaatttacatttctttgggtatatacccagtaatggtattgctgtgtcaaatggtatttgctatgcatccatcaaaaagaatacaatcttgtcctctgcaggaacacggatggaactggaggccattatccctagcaaactaacacgggaacagaaaactaaatactgcatgttgtcacttataagtgggagctaaat

SEQ ID NO: 238934 - DNA, 523 bp, Homo sapiens
caagggaagactttgtatttcatgaggtaatggaagatctaaatggaaacttcctcatcctcccaacaactaacctcaaaatccatttcctcaatgtctgtcttctcattttgcccttctgttaaaattaactcagtgatctgccttctaccaatggccagtgcgttcatagtttgattcctttcatgcatacttgctcaatgatttggccatttatcccttctttctgttgaaacatacatatccctttcttaaatggtcattgataacattttataaacgtagtttagaatttctcatttttgaaaaagaaagaaaaatcttatttccttctcatttatttcctgctaccaccctatttcttctacctgttgtttttcctataccaatatttctctaagaagtcatttatatattctgtcactaacctcctctcttcattcttcaaccattgcaacttggatttctctcagaccactgyatgaagctgctcttgtcaaggtcaccaaattcagttgccccg

SEQ ID NO: 238935 - DNA, 562 bp, Homo sapiens
atttcatgatattctcaagagtatttttcttgatgtgagattgctggttcaaaggagtatgtaacttcaaacatactatcaatagatattatccaacatttccaaaatggtgatatmaatttacatgaccacacctagcacttgatcaaattttgtgaatgttccataatggatacaaatatgcctaaaagtaatttgtgtttttcagttgtttggtatgtatggtattttattgttcaattcttctaactcattcctactctttgttttctcagtttctttaatttaggtcaatatttgtttctttcttatcagtttttactttatatatcttaaaactgttaccaggtgaatataaatttaggattggaggactcaaaccttcatgattataaaatgaacctctttatcaccagtaatgctttgtggctaaaagacaatttttgttatatttatagctacacctttcttttgattattatttgtacttttgattactatttgtacgtattttcatttttattctttcattatctttatgctttaggtacatctaaataac

SEQ ID NO: 238936 - DNA, 644 bp, Homo sapiens
catattgaaaaccatgagttcagattaatggctataattccagtctcatacaaaaaggttcatcctagttttctttctcttatttgcaatttttcttcccctccaaagagaagcatggctctcactgcctttaatatatttacttatggattaatattactacatataaccaatcttccattgttgctactactcctttccccatgaagattcccttggactttgacactacgcacgaagccactctacatatggacacccccatacccacttcaactctgacaccactcaccaggcaatctccttcctacttcataaacgttttactttttcctctcrcttgggctccaaagcccaagcctagtccactgcagcctccctgcccagcaccaacaatcatcctgaacacagcctttgcaatgtctcatattatgtcttcaggactgcattatttgagaagaaaagggaaaggagaagagaacattctagtttggtattgtttatgttggtgcactacaagtaatactatggatgtctagcctgttgtttcaaaccaaaaaatgtatttagcttctgctacgtcgaggacagataacaataataataataatgacagtaaacccttttgtctatgagaaaaaatg

SEQ ID NO: 238937 - DNA, 619 bp, Homo sapiens
atcttcattgggacatctgcttttcactccctttctcttcatacacaaagaggagaaaaaaggctgactttaggaggcaaaggtattcttgaggaaatcatttwattctgacttctgtccttattgtcaagactatctgaaggttccttcagttttaacttcacagatctatcccaactagtccccattttaaagtcctgaagtgtaatggaatcatggtggaaaggaacttcaaaatccatgtttacttcaattctctcatctgtatgtgaaagctctgtgtaacctccctacccaggggttgctcaaggaatttttaactcaagcatatacatccatggcaggaaactcactacttcaggaggatgctcatttgggggtaacttgcttagaaagttctaccatggatagaaatacttctgtctctcctgtatattcttctcactggtgtatgtttcatttaagaatgtacacacctacagcactctgcatcttgcttaccgaccagaatggtatccacatgttcaaggattgtgcaattcacacaggttaagaaattgtttccagaagataatactaaaatgcatacattacttattttctttttctttttttgtac

SEQ ID NO: 238938 - DNA, 619 bp, Homo sapiens
atcttcattgggacatctgcttttcactccctttctcttcatacacaaagaggagaaaaaaggctgactttaggaggcaaaggtattcttgaggaaatcattttattctgacttctgtccttattgtcaagactatctgaaggttccttcagttttaacttcacagatctatcccaactagtccccattttaaagtcctgaagtgtaatggaatcatggtrgaaaggaacttcaaaatccatgtttacttcaattctctcatctgtatgtgaaagctctgtgtaacctccctacccaggggttgctcaaggaatttttaactcaagcatatacatccatggcaggaaactcactacttcaggaggatgctcatttgggggtaacttgcttagaaagttctaccatggatagaaatacttctgtctctcctgtatattcttctcactggtgtatgtttcatttaagaatgtacacacctacagcactctgcatcttgcttaccgaccagaatggtatccacatgttcaaggattgtgcaattcacacaggttaagaaattgtttccagaagataatactaaaatgcatacattacttattttctttttctttttttgtac

SEQ ID NO: 238939 - DNA, 533 bp, Homo sapiens
ttgtaatatcccttgtaattcttttaatctataatttttaaaggtaatgctctctactcaagtgaattcacacttacccccaagagaagaaatcctttaggtaacacctgtgcatgggtttatttccttttgactgttctttgtatactctcattgataatgacacaatatgtgggtgatttcagaacttcagatcctggatcaggttcaaaacactcttcatggtcagtatggaagcctttattgggcctcacctttccccagggtgtactgagatctccattaagcccagggtccatacagcyggtaggttatctacatatatatttgcttctttctctcttctatgccatcattgttctcataacctcaacaagaaacctgctaaagcccatcaagcaaacttaataaattgacaagtattaattgatcatctataaaagtgcaaggatctcattgttaattagctgattcacaacatgatttgagtcagccatggattgtgaggctgagtgaatgggtaatgatgaggg

SEQ ID NO: 238940 - DNA, 533 bp, Homo sapiens
ttgtaatatcccttgtaattcttttaatctataatttttaaaggtaatgctctctactcaagtgaattcacacttacccccaagagaagaaatcctttaggtaacacctgtgcatgggtttatttccttttgactgttctttgtatactctcattgataatgacacaatatgtgggtgatttcagaacttcagatcctggatcaggttcaaaacactcttcatggtcagtatggaagcctttattgggcctcacctttccccagggtgtactgagatctccattaagcccagggtccatacagccggtaggttatctacatatatatttgcttctttctctcttctatgccatcattgttctcataacctcaacaagaaacctgctaaagcccatcaagcaaacttaataaattgacaagtattaattgatcatctataaaagtgcaaggatctcattgttaattagctgattcacaacatgatttgagtcagccatggatkgtgaggctgagtgaatgggtaatgatgaggg

SEQ ID NO: 238941 - DNA, 601 bp, Homo sapiens
caaataaatccagatcttcaggtattaacaaaaattagtttattctagaatgatggatttagctkgggaacagagcctggagatttgtccatagctctaaagcacttctccctgaaggtggccccctttacttctgcacatattccattgaccaaagcaagtttcatggtcatcccatcattaaaagagtagagaagtactcagaagaggtgagttaggcatatcgaagagccagggtaatgtctaaatatatgatgtctagctcattgttaagtgctccagttattattaaagtgtattctgattttttcatttctcagttcaaattacgtttattggatctgctttacctccttataacacggaaactccttgttgtcgttgacactcattgtgatgtaaatcctaactacattcctgtttatatgttatactgcttcacttcattttacctttggtctgtccaagcagaattatttggttttctcatcaatgcattgtttttctctacatcactgcctctgatgtccctttaccattagtgctttaactgaatctctccatgccagtaagccttctaacatgtcaggttctcaagttc

SEQ ID NO: 238942 - DNA, 601 bp, Homo sapiens
caaataaatccagatcttcaggtattaacaaaaattagtttattctagaatgatggatttagcttgggaacagagcctggagatttgtccatagctctaaagcacttctccctgaaggtggccccctttacttctgcacatattccattgaccaaagcaagtttcatggtcatcccatcattaaaagagtagagaagtactcagaagaggtgagttaggcatatygaagagccagggtaatgtctaaatatatgatgtctagctcattgttaagtgctccagttattattaaagtgtattctgattttttcatttctcagttcaaattacgtttattggatctgctttacctccttataacacggaaactccttgttgtcgttgacactcattgtgatgtaaatcctaactacattcctgtttatatgttatactgcttcacttcattttacctttggtctgtccaagcagaattatttggttttctcatcaatgcattgtttttctctacatcactgcctctgatgtccctttaccattagtgctttaactgaatctctccatgccagtaagccttctaacatgtcaggttctcaagttc

SEQ ID NO: 238943 - DNA, 601 bp, Homo sapiens
caaataaatccagatcttcaggtattaacaaaaattagtttattctagaatgatggatttagcttgggaacagagcctggagatttgtccatagctctaaagcacttctccctgaaggtggccccctttacttctgcacatattccattgaccaaagcaagtttcatggtcatcccatcattaaaagagtagagaagtactcagaagaggtgagttaggcatatcgaagagccagggtaatgtctaaatatatgatgtctagctcattgttaagtgctccagttattattaaagtgtattctgattttttcatttctcagttcaaattacgtttattggatctgctttacctccttataacacggaaactycttgttgtcgttgacactcattgtgatgtaaatcctaactacattcctgtttatatgttatactgcttcacttcattttacctttggtctgtccaagcagaattatttggttttctcatcaatgcattgtttttctctacatcactgcctctgatgtccctttaccattagtgctttaactgaatctctccatgccagtaagccttctaacatgtcaggttctcaagttc

SEQ ID NO: 238944 - DNA, 605 bp, Homo sapiens
gagtgcagttaggaagtaagggaggtaataactcttacttctcatttttttcatttcataactatccttgtactgttttaagtatttattacacagtatgtgtattactgtcatgttttttacaaaaataactgacattaaaccattttaatttctatgcttcacaaaaaatttctaaagctaaggattttaaaaattcttcctccttttgtggaagtgaattctatacttgaacatatttaatattgtataatgtatcctcttttctttgaactgtagccctcagcatttttttcagctcctcgtgtgttcttacttactgaatctatccttattaagctgctaattctgctatcaggaagttcttggtaagttcttggtatttaggattgtgcaacwaaaattgaagtcaactattttgtacaaaaaaaaaatcattattctacattaacagttgattttggaggtacttagtaaagtcgactcaatcatagacctccaaatggaacaaacacccttacttgcatttcattgtgatttttgcaggccctttgcagtaatagttctgaaaaacagtcagaaataaacaacttaaaccctcaaac

SEQ ID NO: 238945 - DNA, 605 bp, Homo sapiens
gagtgcagttaggaagtaagggaggtaataactcttacttctcatttttttcatttcataactatccttgtactgttttaagtatttattacacagtatgtgtattactgtcatgttttttacaaaaataactgacattaaaccattttaatttctatgcttcacaaaaaatttctaaagctaaggattttaaaaattcttcctccttttgtggaagtgaattctatacttgaacatatttaatattgtataatgtatcctcttttctttgaactgtagccctcagcatttttttcagctcctcgtgtgttcttacttactgaatctatccttattaagctgctaattctgctatcaggaagttcttggtaagttcttggtatttaggattgtgcaacaaaaattgaagtcaactattttgtacaaaaaaaaaatcattattctacattaacagttgattttggaggtacttagtaaagtsgactcaatcatagacctccaaatggaacaaacacccttacttgcatttcattgtgatttttgcaggccctttgcagtaatagttctgaaaaacagtcagaaataaacaacttaaaccctcaaac

SEQ ID NO: 238946 - DNA, 582 bp, Homo sapiens
aaaaagtttagtatcagaaattaaagaatactgaatttaatcataaaaatggcctctgaaagaaagttgataatcctgggggacagcataagaaaaaaagaagaaaaaaagaaagaataaaagatttagagctgtggtgacaagcttggagggttggaagaatagcaggttattaaattactttttgggacaatagggtgcacaaggcagaatggcaaacaatgtgtgaagagtgcacatggtgaggtgccaatttgtgaaatgaagtccatgtggatgttattctgaaggcagtgaagaaccagtgaataattttaagcaggagtgacgtgatcagatttgtgatgcagaacaattgttctgatgacatcgttcctttggcacagttgttgatggggctccactataaaaacgaacacaaaacaaacaaacaaacaaagaccacttcatattagcatttcctatggggccaaaaatcaaagggacaatatagattaattgaaacagcagatcatttgatatcagaagrattgggtcttgttttatgttcttccattttttagcaacataatttcggacaaa

SEQ ID NO: 238947 - DNA, 557 bp, Homo sapiens
catttcctatggggccaaaaatcaaagggacaatatagattaattgaaacagcagatcatttgatatcagaagaattgggtcttgttttatgttcttccattttttagcaacataatttcggacaaagtatttctcctttcccattaggtttaagttcaacgtatgtcaagagcttaaaacaatttctcatgcatgagtgaagcttcataagtgtttggggaataaatgaatggatttctgggtctcygtattcttctactaagtaaggaggatcaaaaaaatgttctgagagtcatcttccactactttggaagtgactacaaagtgacacatgagattagaagttaagtgaacaacctatattgtatcccttcagggaaattatttttgtattaatattgttagtctggggaaagtatagtgggagaggagaaactatgaatcaattttcagacatctttttctcctctgttttgttttgtttttttaattttggcagtctcttctttcctgccttctcttttgctggatgtttttatattcctacattttaaat

SEQ ID NO: 238948 - DNA, 562 bp, Homo sapiens
  misc_feature (1)...(562): n = A,T,C or G
nnnnnnnnnnnnnnnnnnnnnnnnnnnnnnnnnnnnnnnnattccatcaagacatcaggtgattaaaacatcaagataaaaatggcctcaagacccatccacacaacatgggttaaggcaacagtcctggggtttccctgaggcacatcagctgtcagtcttggggaccacatttcatattcttttcactagtgggaaagggyttctcaggttctcctgagcatacggcccgggtgacgggcttccattgagttcttaaagcctagaagacaaggattaatgtcccaacctattcagtttaaagtggaggagtgcagcaaactcaatccaaaaaataatatccctaagaaacagtactttttgaaggataggcatcccaaattgatattttcatgaatgaaatggggaaaaaatgataatgatacaaaatactaatgcaactgtgcggtttaagtgcagtcaaacttggcaggatcccatgataaacattcatagttttaatggcatctaaactgtagtaacaatcaacgagttagtaaagcttgaaattagtaaactcaat

SEQ ID NO: 238949 - DNA, 537 bp, Homo sapiens
aatataaaaaggtgattgaatgacgacatggagagatcagtgccactgaaagaaaagttgagtgtttactcatagttccccttgaaacaagaggcatagcatgccacacgggggaagtaccactgttggtcaggaggcaaaaaagagtgggaggaaggcacgggccacagacttaatgaggtttccacaggaaaagcaaggtaggcagggtaaacagcttagcgttgactagtttgaataattcttcaggctttgtggcctgtggactatccctggttttctggtggtactttgtcctgggttgatttatgatttagggcaggagaaataggggcttagtgtgtgagagttagataaaggaggtggttcagagtatgggcactggatctcaggggagataaaaaacaagtttggccttgagtttggctctgtaattaatggatgtcaaacagacaaatacagaatctawgaaaacacaatacttattaatgtttaaaatagaacaggaagagtaatgacacattttgaggtaaaaaa

SEQ ID NO: 238950 - DNA, 372 bp, Homo sapiens
tgctgatcaaactctcctcacctgccgtcatcaatgcccgcgtgtccaccatctctctgcccaccrcccctccagctgctggcactgagtgcctcatctccggctggggcaacactctgagctttggtggtgagtgggaccctttgtccttctacttccccccatcctcacaatttccagaacgaagcatgcccctttatttgaatcctcttgcctcccggcttaagacacatttctagtgcccattacacacagtctctgcactgggcaccagagagatgcaaagtctcaaggacttggctcctaaaatcaagagataggacaaatggagaacttgctgtgatcacgtcttgggaggggttcaacaatgat

SEQ ID NO: 238951 - DNA, 555 bp, Homo sapiens
agtccatcccctgcctccatgccccgtagaagagggtctctgctctgaccactcacccagggagagcaataccacaaccatctactgcaggtgaagttccttttttttttttttttttttttttttgtgacagagttttgctcttcttgcccaggctggagtgcagtggtgcgatcttcattcactgcaacctctacctttcaggttcaagcgattctcctgcctcagcctcccaagtagctgggattacatgtgtgcaccaccatgcccagctaattttttrtatttttagtagagactgggtttcaccacgttgatcaggctggtcccaaactcctgacctcaggtgatccacctgcctcccaaagtgctgggattacagacttgagccaccaagccgggcccaggaagttctttcttaaatctgacttaaatcctgcaccccctaatcctcctgttcccagctcagacccttagccaactttggtaggtctctagctgttattggttaaggcttggagcttgctcagtgccctgtcaagcctgcaagacctc

SEQ ID NO: 238952 - DNA, 465 bp, Homo sapiens
gaactgcgacagaagagaggagccagggccagaggcagccccaccygcccatcccacctgcagcctgggctctgctcctgcagctgatggacctcacctgaagcccaccctgtcctccctctgaccccaagtcctgggacatggctgccagcctgcagagaagcccctcatcttcccctcgcttctggcttgcactgttagacaccaaggccttctgcccccatgctactccagacctggggtgaaccagtcttttttccaaaacatattcacaaaagaagctcccagagccccttctggagcagaagtgagctttcttctatagcagaaatggtcatatctgtgccgtctcatccttcaccactcaccactcaagccacatctgaaatgtggctacggtgactgagagattgaatgtttgatttttcattaatttgaaaattaattagccacctgtggctaatg

SEQ ID NO: 238953 - DNA, 465 bp, Homo sapiens
gaactgcgacagaagagaggagccagggccagaggcagccccacccgcccatcccacctgcagcctgggctctgctcctgcagctgatggacctcacctgaagcccaccctgtcctccctstgaccccaagtcctgggacatggctgccagcctgcagagaagcccctcatcttcccctcgcttctggcttgcactgttagacaccaaggccttctgcccccatgctactccagacctggggtgaaccagtcttttttccaaaacatattcacaaaagaagctcccagagccccttctggagcagaagtgagctttcttctatagcagaaatggtcatatctgtgccgtctcatccttcaccactcaccactcaagccacatctgaaatgtggctacggtgactgagagattgaatgtttgatttttcattaatttgaaaattaattagccacctgtggctaatg

SEQ ID NO: 238954 - DNA, 465 bp, Homo sapiens
gaactgcgacagaagagaggagccagggccagaggcagccccacccgcccatcccacctgcagcctgggctctgctcctgcagctgatggacctcacctgaagcccaccctgtcctccctctgaccccaagtcctgggacatggctgccagcctgcagagaagcccctcatcttcccctcgcttctggcttgcactgttagacaccmaggccttctgcccccatgctactccagacctggggtgaaccagtcttttttccaaaacatattcacaaaagaagctcccagagccccttctggagcagaagtgagctttcttctatagcagaaatggtcatatctgtgccgtctcatccttcaccactcaccactcaagccacatctgaaatgtggctacggtgactgagagattgaatgtttgatttttcattaatttgaaaattaattagccacctgtggctaatg

SEQ ID NO: 238955 - DNA, 465 bp, Homo sapiens
gaactgcgacagaagagaggagccagggccagaggcagccccacccgcccatcccacctgcagcctgggctctgctcctgcagctgatggacctcacctgaagcccaccctgtcctccctctgaccccaagtcctgggacatggctgccagcctgcagagaagcccctcatcttcccctcgcttctggcttgcactgttagacaccaaggccttctgcccccatgctactccagacctggggtgaaccagtcttttttccaaaacatattcacaaaagaagctcccagagccccttctggagcagaagtgagctttcttctatagyagaaatggtcatatctgtgccgtctcatccttcaccactcaccactcaagccacatctgaaatgtggctacggtgactgagagattgaatgtttgatttttcattaatttgaaaattaattagccacctgtggctaatg

SEQ ID NO: 238956 - DNA, 375 bp, Homo sapiens
caaacttccaaaggtcagggatacataaaggatcctaaaagcagcaagagaaaagaaataaatagcatacaatgaggttcaatacttctggcagcaacttttcagtggaaaccttatgggccaggagagagtggcatgacatatttaaagtgctgaaggaaaaagaaaacaacttttaccctggaatagtatatccagtgaaatacccttcamacatgaagaagaaatagagactttgccagacaaacaaaagttgaaggatttcatcaataccaaacccatcctacaagaaatgctaaagggagttcttcagtcagaaagaaaacaaaattaataaggaataaataatcatctgatggtacaaaacttactggt

SEQ ID NO: 238957 - DNA, 425 bp, Homo sapiens
tgctactccactgcaattgtgaactgccaaagggaagaaggaacaattctgtgccatctaagtaactcagcagcccagttyctcactcctgccctgtttctcctgacccctcacaaatatacaagtccgcaaaggctttatattcccttctgtgtacatgttatcctccagggcagtagcattaaagggttaatagctgaacaaacagaaagctcacattcattctaacttatcttctttctatcattccatgtttcctttcctcaaggcaggcctgatattactaactagatgtaagtataaaaacagaacaaccaataatgcatgacacatgaaagtagtatttatgtctataaaaaccactttgatgaccgaaaatgtgcatttgagaggctttatgactatttactgaattttcgtgcttt

SEQ ID NO: 238958 - DNA, 537 bp, Homo sapiens
ctttatattcccttctgtgtacatgttatcctccagggcagtagcattaaagggttaatagctgaacaaacagaaagctcacattcattctaacttatcttctttctatcattccatgtttcctttcctcaaggcaggcctgatattactaactagatgtaagtataaaaacagaacaaccaataatgcatgacacatgaaagtagtatttatgtctataaaaaccactttgatgaccgaaaatgtgcatttgagaggctttatgactatttactgaattttcgtgctttgaaataccacctgtaattggcagtctttartctcctgaaaaggatataatttcaaagagaaaaattgctataattggggagcaatgagaaaaagcaatgtcactattatgaatgaacaaatcaggaccaattcaaatgaataatagaatgtagtctgtagcaccactgtgaaaggagcaattatagctaagattggattatgagggaaagggtcttttaacagaaagatgtcctaactctgaatttt

SEQ ID NO: 238959 - DNA, 573 bp, Homo sapiens
aaaggaacagaatgctctgccatatttttaaatggcactttttcctctctccctgatgtaaacacaaagggatttttctctgaaatttactgtgagaacctgactaatctggaggtaaaacccataaaagtayggaggccacctgtgactggaatctcctacagtttttaactgtcagactgagcctccagcaattcatcgattacagttcaaattttcccaccccactaattgctcccttggatgtctctgcttgcatgtttctgctccaataagctgatattttctgtattttcctacctgtggggagtggtttaccctgtaaccttattctctgatggatccaattaagagttgttgatttttcattttgttcagttttcactggttgttaggatggagtgacaacttctaacctccttaaatgctggagcagaaactggataaagagcctgtctttatgaaggtgtgggcactgataaaggaaacaaacaagagctagtgaagatccctctacagcaactttcactacccttggccagaagctgcaagcggaagaagtggtttccaaaa

SEQ ID NO: 238960 - DNA, 555 bp, Homo sapiens
atacaagttaggggtacaataagtgtcataacactagtaatcaaattttgcaggctgattgttatcacatgctaatgtgggacttctgtcactttacaaagtccccctaagtatgtctcacaagtgctcatggacaagtctgcttcagccagacaccactggtactcagtcctcacttagctggacattggtctccttcccactttgctgggcagatggtggctggcaccctgttagtcactctgggtgttcttgctgctcctgagcatatggagtccttgctggccaggctcagcattgctcagccagagaagcagtgtctccatttgctctgccagggattttgytcctctgctgctgaggctctgggtggatacactgctgctgtgctggacagcctgcacaccaggcatgccatgcccttctgcagctccattcacccaggagtcaaatagatggatctgtttgttatgtgttatattctatatgttatgtgctaattgacatggaaaagcacagctgcttgtaccctccttttacaggttgagtgaaaca

SEQ ID NO: 238961 - DNA, 574 bp, Homo sapiens
cactgctgtgtccccagcagctgttaacagtgcctggcatgcagtargcactcaataaatagttgttcaatgactaattataggaaactcattcaaggccttccataacattacacaatctgtctttccagtgtatttgccagaaaatacgcttttacactttagcttaactggacttgtttctgtttcttaaactatacatccctgtgctttcttcacctgtcattttgttcttgttgtttcctcctcagcccaatctgtatgataaaactttattcacttttcacaatccaccttaaatgtcaccttttacactcctcagcacaattctacacatcctttaggatagatatcttagttaaatgtcatttcagtcattcatttgtgtgctggccttataccctttactagattgtaaatttcctaggataggaatatcttttcaacatatggtgctggaacaattggacattcacatgcaaaaaaaagtgactcaagacactgacctttcagcttttacaaatattaactcaaaataaatcacatatctaaatgtaaaatgtaaaaccataaa

SEQ ID NO: 238962 - DNA, 509 bp, Homo sapiens
aaaactacataactgatccaagaaattgaaggggacaccaaaaaatggaaagatattccatgtttatggattagaagaatcaatattgttaaaatacccacactacccaaagcaatctacagatttaattgcaatccctgtcaaaatatcaatgacattcttcacagaaatagtaaaaacactgctaaaatttatatggaaccacaaaagacccagaatagccaaagccatcataagcaaaaaataacaaaactggtggaatcacattacttgacttcaaattatactacagaggcatagtaacccaaacagcagggtactagcataaaaacagacacatggaccaatgggacagaatagagaacccagcgataagtccataaatccrcagtgagctcttttttcacaaaggtgctgatatggctctgtgccccgacccaaatctcatgttgaattataattcctaatgttggggggagggaccctgtgggaggtgactgaatcatggg

SEQ ID NO: 238963 - DNA, 574 bp, Homo sapiens
cactgctgtgtccccagcagctgttaacagtgcctggcatgcagtaggcactcaataaatagttgttcaatgactaattataggaaactcattcaaggccttccataacattacacaatctgtctttccagtgtatttgccagaaaatacgcttttacactttagcttaactggacttgtttctgtttcttaaactatacatccctgtgctttcttcacctgtcattttgttcttgttgtttcctcctcagcccaatctgtatgataaaactttattcacttttcacaatccaccttaaatgtcaccttttacactcctcagcacaattctacacatcctttargatagatatcttagttaaatgtcatttcagtcattcatttgtgtgctggccttataccctttactagattgtaaatttcctaggataggaatatcttttcaacatatggtgctggaacaattggacattcacatgcaaaaaaaagtgactcaagacactgacctttcagcttttacaaatattaactcaaaataaatcacatatctaaatgtaaaatgtaaaaccataaa

SEQ ID NO: 238964 - DNA, 578 bp, Homo sapiens
atcttccctcctcctttgaactaagatccatggtcaagagagtgttgtgggtaaagattcaagttcaactcccacctcttccaaacatacgtttataaaaaataaaatatttcttacacattaaaaaaataaagtaaaaaagacaaagatattttctaaaacaagatgagcattagagacgacctaacagggcaaacaaaagcaccaggtaagagggcagaaactataggctgattcaaagtctggcaccaaaaacgggaaaaagaggcctggagagtaaaggaactgaaacacacattcacaatgaaggccttgaccgaggtgtggtgggaagaatggggctgagtgtggggtcccttgcctgggaaaaagattgaaaaaactgccgcttcttccttttatatggagccaggtgcttgagatggcaggatggagagacataagatctacttcccactggctcagcaactrgatctgcaatttccttcaaatcacaatgggccctggggaatcttgaaaccagataatggcaaaggcaaaaccctccaaatagaatgcagaaggaaagaaaaaccaaa

SEQ ID NO: 238965 - DNA, 566 bp, Homo sapiens
ttgaatgtaaacaggctaaatgccccaattaaaaggcacagaggataaagatggataaagaagygaaacctaatggtatgctaagagacccatctcatatgaaatgacacccataggcaaaacacaggcgaacagaagaacatgaccattgattataaagggtccacagaagcatagctattgatcagtgaataaacatgaccctaaggccattatctgagcaatgataaattcacccaacatttaaaagacactatagatgcttcctttgaagaaaataatagaaatctctggggctgtttaacagataagaagaaataggaggagatttagttatagcaggagggaatatctttggttttttaaaagactgtttttactcacttgcttatgaagtcattgaattctgctgaccatagctcaggctgccttagttttgggggtggattcctagaaaaataagaatcaatgttggattctgtatattggtcagtcagtgtaaaatgagaggcagagccagatagactaatgcaatcctaggttctgccagttgtaatcaaggattc

SEQ ID NO: 238966 - DNA, 425 bp, Homo sapiens
gaatggaaaaaataaaaggttttaaagagaatattaaatctgctgtcatatatgttgacaatagttttctacagattgttttggtatgtttcctttggttatgatgtcttctggaacacagaagtacacttgggagggtgggttgggtgattcaaatttatcaacttttttctgtatggtcactgttttctttttttttttttggtaatagaagaaaagcttttctccaaactaagataatattttgtgaccctggtaagatggkgattaaatcattttcttactacaactacttaagcttactagatttttaaaaacaagtatgtatacaaaaaccaaagcaggaaatttttaatagttaaaaaagaaacaatgctattcactctaataactgcaaacactgtactctaattctgtagaagcca

SEQ ID NO: 238967 - DNA, 622 bp, Homo sapiens
ctgataacccagatggatactaagtcactaataggcaggtagcatatacaacatagatatgctgyacaagaagataattcacattctgggtgggatggagcaggaccacatgatatttcatcatgctaatcagaaaggcacacaactgaaaatgtgaattgtttatttctggaatttcccatttaatattttcaaacagtggttgaccacaggtgactgaaattgtgaaaagcaaaaccttggataagggtaaactgcttgtacttccaattttcctcctctgtccctttgctatttacactggttataacttcacaatatagagttataattgtagttctaaaaagcgttttttctttcaaagatacaacaagtataaaatcaaatgtttcatatctgccctatatttaccactgatggtgatttttattcctttctgtaggtatgacttttcacctggaatcattttccttcagcctaaaaaatgttctttgacattttttatagtgcaggtctctgccagtaaattcttcattttttcatttgacataaatgtctgttttaattttgtctttatttatgaataacattttcactgaatacagaattcaaaattgaaggg

SEQ ID NO: 238968 - DNA, 622 bp, Homo sapiens
ctgataacccagatggatactaagtcactaataggcaggtagcatatacaacatagatatgctgcacaagaagataattcacatyctgggtgggatggagcaggaccacatgatatttcatcatgctaatcagaaaggcacacaactgaaaatgtgaattgtttatttctggaatttcccatttaatattttcaaacagtggttgaccacaggtgactgaaattgtgaaaagcaaaaccttggataagggtaaactgcttgtacttccaattttcctcctctgtccctttgctatttacactggttataacttcacaatatagagttataattgtagttctaaaaagcgttttttctttcaaagatacaacaagtataaaatcaaatgtttcatatctgccctatatttaccactgatggtgatttttattcctttctgtaggtatgacttttcacctggaatcattttccttcagcctaaaaaatgttctttgacattttttatagtgcaggtctctgccagtaaattcttcattttttcatttgacataaatgtctgttttaattttgtctttatttatgaataacattttcactgaatacagaattcaaaattgaaggg

SEQ ID NO: 238969 - DNA, 617 bp, Homo sapiens
cagctttgaatacatttatgtgttttccctatcaaatgaaaatataaccatatattgtatatatatatatatccttaaaaattggtttttcttacttgaatgttaatttttaamaatttataatggcattgattaatgttgatgtgatttattgaatctaattcatgtaaaaatgatatattgtgaactgtgatactttcattatcacatcctgtgacatacatggtagttatatgttgaatgttgttgactgacttttattgactaggttactaaattttatctgaatttcatcttaactttgtggcctttatatctcctaagacatctttatatacactttgaaagattaaagaatgtggaaaatatagttgaataaaataaactatgatggtgggataattttactaatgcaaataaaatttattcgaagttaatctagaaaaaagttagtgtttatctagggtctattccagtattccagaagagttctttgtctggttaacacaactgctgtcccactgcctactagggttaattaggttgaccagcctggctagtgagtatctgcttcttccatttctgcttgtggtttctcctttactcattgtgtattt

SEQ ID NO: 238970 - DNA, 614 bp, Homo sapiens
ttgctgacagtttcccatcctacagactcattctcgatccatgcccaaggaacttggggtttcagacctgttgagatcactttgtacaaatgacacaatgaatctaggcagacttaaaactattctatgaaactcttgaagtgactttttgcctttttaaaagtgaacccacagtgccaggtcattttttccttgaatctgatttagctttctttgttttgggtcttttgggttttgcttttgaagcacctcaggggcagtgacccaggacagaagataaataaagttaagccaacctcaagagaaaagcaaytggggataccaggtttgcttttgtaaacgtgaacagtgacctgggggctcagggtcaacctcagtcccccaagttcccttttccaaacactaaatccacctgggacctcagagttgctttgcagattccaaaagtaaaccaggagatcatttttcctttgcctccaaaaagcaaagctgagaccagggttcctagagtgctccagagatttaaacaacaaaagtcctaaaccctagtactgcttcaaggaagaaatacttgtccttctaacaaatcctgagtaatttgccactgggaattc

SEQ ID NO: 238971 - DNA, 617 bp, Homo sapiens
cagctttgaatacatttatgtgttttccctatcaaatgaaaatataaccatatattgtatatatatatatatccttaaaaattggtttttcttacttgaatgttaatttttaacaatttataatggcattgattaatgttgatgtgatttattgaatctaattcatgtaaaaatgatatattgtgaactgtgatactttcattatcacatcctgtgacatacatggtagttatatgttgaatgttgttgactgacttttattgactaggttactaaattttatctgaatttcatcttaactttgtggcctttatatctcctaagacatctttatatacactttgaaagattaaagaatgtggaaaatatagttgaataaaataaactatgatggtgggataattttactaatgcaaataaaatttattcgaagttaatctagaaaaaagttagtgtttatctagggtctattccagtmttccagaagagttctttgtctggttaacacaactgctgtcccactgcctactagggttaattaggttgaccagcctggctagtgagtatctgcttcttccatttctgcttgtggtttctcctttactcattgtgtattt

SEQ ID NO: 238972 - DNA, 500 bp, Homo sapiens
tggaaggatgcatatggttgaccctttgggaatttcctaggagccaaatgtctctttaccacaattgttcttagaagaaaagcttttcggtaatgcaaaaaggatctaatatgtcagcagattctcttttacaagttcctttgaaatayaagaagtttgtctaagggttttctctctttgcaagttgttttcagccaaatgttagagcagggtaaaaaagtagttaactttaaaagcttagcaggtgtttttacttatttattgaactttgtagagagagggaaaatgttggtaatagttgcaattaatttttcagatgagggcaagagaaattttgaggtgcttgaaatttattaaatgtgctgtgttttctcagtcacttcacttaattattttggctttttttgttaatgttaaaaactagagcgtctctaatgaaaagggctagtttttaaaagatcattgtaaaagtactcagactatttttattctagaaaatg

SEQ ID NO: 238973 - DNA, 500 bp, Homo sapiens
tggaaggatgcatatggttgaccctttgggaatttcctaggagccaaatgtctctttaccacaattgttcttagaagaaaagcttttcggtaatgcaaaaaggatctaatatgtcagcagattctcttttacaagttcctttgaaatacaagaagtttgtctaagggttttctctctttgcaagttgttttcagccaaatgttagagcagggtaaaaaagtagttaactttaaaagcttagcaggtgtttttacttatttattgaactttgtagagagagggaaaatgttggtaatagttgcaattaatttttcagatgagggcaagagaaattttgaggtgcttgaaatttattaaatgtgctgtgttttctcagtcacttcacttaattattttggctttttttgttaatgttaaaaactagagcgtctctaatgaaaagggctagtttttaaaagatcrttgtaaaagtactcagactatttttattctagaaaatg

SEQ ID NO: 238974 - DNA, 618 bp, Homo sapiens
atgattgaaaacaggtaaatctgggactgtctctttttacattatgcacagtctgtggaaacaaagatttaatccttgtgtaactcactgaaaatttaccttaaaatgtatcatattacaataatgcttatattgtaaataagaaatattcygtatttgcccaactgcaaacttaaatgacataattttttccataaatctgttagctttatttattgtcatattgccaagttacgtatctcttttaaaaataattctgatttatatacttttttggagagctttttcagcagtacccagtaattccacttctaaaggcctacagaaatacttacacaagtgctcgatatatatgtataaatatattaatggcagcttcattaatagatagacaaaactaaagaatccataatgtccaacaaatgaggacttgtttaataaattatggtatatgtacactatagacagtacaaagaaattaaaaagaatgaaacatccatatttaccaatatgaaagcatatgttgcatgaaaaatgtgaattataacatacctcccccaaaaaggaaataactacatgtgtgcatgtaagtatctgcatgtatacatgttcgaatgt

SEQ ID NO: 238975 - DNA, 618 bp, Homo sapiens
atgattgaaaacaggtaaatctgggactgtctctttttacattatgcacagtctgtggaaacaaagatttaatccttgtgtaactcactgaaaatttaccttaaaatgtatcatattacaataatgcttatattgtaaataagaaatattccgtatttgcccaactgcaaacttaaatgacwtaattttttccataaatctgttagctttatttattgtcatattgccaagttacgtatctcttttaaaaataattctgatttatatacttttttggagagctttttcagcagtacccagtaattccacttctaaaggcctacagaaatacttacacaagtgctcgatatatatgtataaatatattaatggcagcttcattaatagatagacaaaactaaagaatccataatgtccaacaaatgaggacttgtttaataaattatggtatatgtacactatagacagtacaaagaaattaaaaagaatgaaacatccatatttaccaatatgaaagcatatgttgcatgaaaaatgtgaattataacatacctcccccaaaaaggaaataactacatgtgtgcatgtaagtatctgcatgtatacatgttcgaatgt

SEQ ID NO: 238976 - DNA, 453 bp, Homo sapiens
gaattatatttcttaagctttgctatgaaccaataccatgttaggtgctttgcatatattttcttatgctttcttcagcttaccttgttagataatgttcmtcttcctcattttcagatgatttgatagagatttggaaagcttatatgacttgtttgaggtcacttacctggaaagtggcagaattaagatttcaaacaaggtctgccattctctaaaacgcaaactctgagttactacagtatgtaattttcccaagttaaaaatttaccacaaagagatttccctccaattttttaggcaccaactcttccataagaccaagaaacctgtagtttctctccactgccatcactgcaatacatcagtagtgtacaatctttaccattcagaaggtttcacatctcaaatcaatcacattttattttattcccattcactttaaactttttt

SEQ ID NO: 238977 - DNA, 453 bp, Homo sapiens
gaattatatttcttaagctttgctatgaaccaataccatgttaggtgctttgcatatattttcttatgctttcttcagcttaccttgttagataatgttcatcttcctcattttcagatgatttgatagagatttggaragcttatatgacttgtttgaggtcacttacctggaaagtggcagaattaagatttcaaacaaggtctgccattctctaaaacgcaaactctgagttactacagtatgtaattttcccaagttaaaaatttaccacaaagagatttccctccaattttttaggcaccaactcttccataagaccaagaaacctgtagtttctctccactgccatcactgcaatacatcagtagtgtacaatctttaccattcagaaggtttcacatctcaaatcaatcacattttattttattcccattcactttaaactttttt

SEQ ID NO: 238978 - DNA, 453 bp, Homo sapiens
gaattatatttcttaagctttgctatgaaccaataccatgttaggtgctttgcatatattttcttatgctttcttcagcttaccttgttagataatgttcatcttcctcattttcagatgatttgatagagatttggaaagcttatatgacttgtttgaggtcacttacctggaaagtggcagaattaagatttcaaacaaggtctgccattctctaaaacgcaaactctgagttactacagtatgtaattttcccaagttaaaaatttaccacaaagagatttccctccaattttttaggcaccaactcttccataagaccaaraaacctgtagtttctctccactgccatcactgcaatacatcagtagtgtacaatctttaccattcagaaggtttcacatctcaaatcaatcacattttattttattcccattcactttaaactttttt

SEQ ID NO: 238979 - DNA, 453 bp, Homo sapiens
gaattatatttcttaagctttgctatgaaccaataccatgttaggtgctttgcatatattttcttatgctttcttcagcttaccttgttagataatgttcatcttcctcattttcagatgatttgatagagatttggaaagcttatatgacttgtttgaggtcacttacctggaaagtggcagaattaagatttcaaacaaggtctgccattctctaaaacgcaaactctgagttactacagtatgtaattttcccaagttaaaaatttaccacaaagagatttccctccaattttttaggcaccaactcttccataagaccaagaaacctgtagtttctctccactgccatcactgcaatacatcagtagtgtacaatctttaccattcagaaggtttcacatctcaaatcmatcacattttattttattcccattcactttaaactttttt

SEQ ID NO: 238980 - DNA, 628 bp, Homo sapiens
ggggcaatttcccccatgctgttctcatgatagtgcatgagttctcagagatctgacggttttgtaagtgtttgacagttcctccttcacatgctcttctctctcctgcctccatgtaaagaaggtccttgccttccctttgcttttccatcatgattgtaagtttcctgaagccttcccaggcctgcagagcagtgagtcaactaaaccttttttttttataaattacccagtctcaggcagtatctttatagcagtgtgagaacagactactacaggatattacccagacaaagttacatttccttttctatgcaggcttacataaaaagatatttaaaaatgtattctgaacccacaattttggaaatgcaagcagcatagtctaaaatggaatttttgatctggtcagtatgtttttttcacaacaatgtaataaacagttttatagaatcttcattccaaaattctaagggagtctaacaaaataaataacttctcccgtgttctacatccatcartaatagcctaatttttccagtatgctatgaaatgagagagtgttaagtctttttcaaagcatttgactgccaagtaaggaagaatattgtcaaatgctcgactatta

SEQ ID NO: 238981 - DNA, 356 bp, Homo sapiens
ggcatgacatatttaaaatgctgaaggaaaataaaagtaataaaagtttcactgtagaatagtatatccagsgaaaatatccttcaaatatgaagcagaaataaagactttcccaggcaaacaaaagctgagggatttcatcaaaccagacccttcctacaagaaatgctaaagggagtacttcaatcagaaagaaaaggacattaatgagcaatacataattacttgaaggtacaaaactcactggtaatagtaagcacacagaaaaacacagaatattataccactgtaactgtggtgtgtaagctactcttatgctaagtagaaactctaaaccatgaaccaattaaaaataa

SEQ ID NO: 238982 - DNA, 356 bp, Homo sapiens
ggcatgacatatttaaaatgctgaaggaaaataaaagtaataaaagtttcactgtagaatagtatatccagcgaaaatatccttcaaatatgaagcagaaataaagactttccyaggcaaacaaaagctgagggatttcatcaaaccagacccttcctacaagaaatgctaaagggagtacttcaatcagaaagaaaaggacattaatgagcaatacataattacttgaaggtacaaaactcactggtaatagtaagcacacagaaaaacacagaatattataccactgtaactgtggtgtgtaagctactcttatgctaagtagaaactctaaaccatgaaccaattaaaaataa

SEQ ID NO: 238983 - DNA, 356 bp, Homo sapiens
ggcatgacatatttaaaatgctgaaggaaaataaaagtaataaaagtttcactgtagaatagtatatccagcgaaaatatccttcaaatatgaagcagaaataaagactttcccaggcaaacaaaagctgagggatttcatcaaaccagacccttcctacaagaaatgctaaagggagtacttcartcagaaagaaaaggacattaatgagcaatacataattacttgaaggtacaaaactcactggtaatagtaagcacacagaaaaacacagaatattataccactgtaactgtggtgtgtaagctactcttatgctaagtagaaactctaaaccatgaaccaattaaaaataa

SEQ ID NO: 238984 - DNA, 636 bp, Homo sapiens
ttatgttatttttttaatcaaaccctgactaatactgagaagcagcctgctctgcaaacagcagagagattttgggatgagctttgtatcggagtagtgtcaaggaaggggtcaaactttatccatctggaaaagaagcagtaccattagatgaccctaaatgagatcccaatgacaaggaaggagaacggaagaggagatactttcagctgcrcataatggagggcttacgtaggactagaactaaccatctcaattataccaagctatccatgatagaccagggattctataagaatcccactgccttcctggaaaggcgaagagaggccttggtaaagcacacctctctatcttctgattcagttgagggacaactaatcctagaggacaaatttatttctgaggcatccctgatatcaggtggaagctacagaaacaggtcctgggaccaggtagtgctttagagaaccttggtcttttataatagagatagggaggaccgagaaagagagaggagacacaggaaagaagtagaggctttaatggctaccatgcaagcccacaaaccccagaatccctgagatgtgcctgttaactgctacagatgtggcaagccagggcattttaggaagg

SEQ ID NO: 238985 - DNA, 636 bp, Homo sapiens
ttatgttatttttttaatcaaaccctgactaatactgagaagcagcctgctctgcaaacagcagagagattttgggatgagctttgtatcggagtagtgtcaaggaaggggtcaaactttatccatctggaaaagaagcagtaccattagatgaccctaaatgagatcccaatgacaaggaaggagaacggaagaggagatactttcagctgcgcataatggagggcttacgtaggactagaactaaccatctcaattataccaagctatccatgatagaccagggattytataagaatcccactgccttcctggaaaggcgaagagaggccttggtaaagcacacctctctatcttctgattcagttgagggacaactaatcctagaggacaaatttatttctgaggcatccctgatatcaggtggaagctacagaaacaggtcctgggaccaggtagtgctttagagaaccttggtcttttataatagagatagggaggaccgagaaagagagaggagacacaggaaagaagtagaggctttaatggctaccatgcaagcccacaaaccccagaatccctgagatgtgcctgttaactgctacagatgtggcaagccagggcattttaggaagg

SEQ ID NO: 238986 - DNA, 594 bp, Homo sapiens
caacaaacactgtgtaaagagcaaaaaagtaccatatgcagatggcattgtaaacagaatatttcaatcaaatgatgacaaatattaaattaggaatgggtgggtggcaaacaatttgctgagcaaatctgtaagaatgggtgtgtgtgtgaaaacttctcatttgaagaaaaacttgagacattactttcttccttattgttctctaggaaaaatgactggatagacccagtgtggtcaaggatgggccaagggaattgaaacatgtattgccatatatttagagagggtaagtgctcccagtacatatatttcatttggggagataggactatagggtaatttargctttttgtgccattttataattattctttatttgaacagctttagtttaagagtgtttgaattgatttaatttgattaatttacattgacttacagcagcttaggaaaaattataaatgagtgaattttcaactgtagaattttaattgaaattcagccaaatccagggccattagaatcaaggtaagattcaagtaaaaggaaaatagattgaaatctctggtcctttaggaagaaatgatgttt

SEQ ID NO: 238987 - DNA, 662 bp, Homo sapiens
ccaaacagtctttatgaaccaaagttcttaatatggaaccattcatcgattattcatccagcaccaaaacataaattcaaacaccccatacattcaaggtgaagtgacctaatgtaccgaaggtatcagagcccaggtattgaggttggagtgtgatgatatgattccaagtaagtgggattagtaggcagcaaatttgaaagtttctccatagtaatgagaggcagcaaaaatttctagattacttggttccatatcctgtctaagctgaatggaaatggatagttatccacctaaatattcttccttatcctaccttctgattactgataattcaccttagataaagcacagagcttgaaccaggagccagagaattagtgaaaaaaaagaatgattataatgagctytctgagaaatatagatgagcaaaagcccagcaaacacagcagctactggcaattagaatggagacctgaagattatgctgaaaaatatcaacatcactaatgatgtgtttgagaggaagcctgggatcttcctgtcctgcagcatcctataatcactctgttcttcaacaaatatttaatagagcaaaatttgggggcatagtgccaaatattagggcacaataatgacattaaaaagataataattactct

SEQ ID NO: 238988 - DNA, 593 bp, Homo sapiens
tcattagatatcaaactcaataaaaagaactatcaatagatgccaacagcaagaatgtagagatgttaaaagtatatcacaaatattttaaagtagccatgataaaaatatttcaatgagaagtacatgcatgcttgaaacaagtaaaatgtctcagcaaaatttcaagccttagtaatgaaataaaagagatgaagacacaaatggaaattttaaaactaagaaatacaataaccagaataaaaaaacttagttgatgggctsgacacaacagaatgtgtgtgtgtgtgtgtgtgtgtgtgtgtgagagagagagagagacagagagagagagagagagcgtaaagaatcagtggactgaagatagtacagtaaaaatggccaaatttgactaactgtaagaagacagactggaaaaaacaaaagcacctcacagaccttgagattatgacggaatatctaaaattcacttctgagttctggaagaagaaagaaaaaggtaggactgaaaaaatattgggaaaaatagtagaaaactttccaaattaggcaagaaatttaagcaaacggaattaagaagcttacaaaatata

SEQ ID NO: 238989 - DNA, 593 bp, Homo sapiens
tcattagatatcaaactcaataaaaagaactatcaatagatgccaacagcaagaatgtagagatgttaaaagtatatcacaaatattttaaagtagccatgataaaaatatttcaatgagaagtacatgcatgcttgaaacaagtaaaatgtctcagcaaaatttcaagccttagtaatgaaataaaagagatgaagacacaaatggaaattttaaaactaagaaatacaataaccagaataaaaaaacttagttgatgggctggacacaacagaatgtgtgtgtgtgtgtgtgtgtgtgtgtgtgagagagagagagagacagagagagagagagagagcrtaaagaatcagtggactgaagatagtacagtaaaaatggccaaatttgactaactgtaagaagacagactggaaaaaacaaaagcacctcacagaccttgagattatgacggaatatctaaaattcacttctgagttctggaagaagaaagaaaaaggtaggactgaaaaaatattgggaaaaatagtagaaaactttccaaattaggcaagaaatttaagcaaacggaattaagaagcttacaaaatata

SEQ ID NO: 238990 - DNA, 593 bp, Homo sapiens
tcattagatatcaaactcaataaaaagaactatcaatagatgccaacagcaagaatgtagagatgttaaaagtatatcacaaatattttaaagtagccatgataaaaatatttcaatgagaagtacatgcatgcttgaaacaagtaaaatgtctcagcaaaatttcaagccttagtaatgaaataaaagagatgaagacacaaatggaaattttaaaactaagaaatacaataaccagaataaaaaaacttagttgatgggctggacacaacagaatgtgtgtgtgtgtgtgtgtgtgtgtgtgtgagagagagagagagacagagagagagagagagagcgtaaagaatcagtggactgaagatagtacagtaaaaatggccaaatttgactaactgtaagaagacagactggaaaaaacaaragcacctcacagaccttgagattatgacggaatatctaaaattcacttctgagttctggaagaagaaagaaaaaggtaggactgaaaaaatattgggaaaaatagtagaaaactttccaaattaggcaagaaatttaagcaaacggaattaagaagcttacaaaatata

SEQ ID NO: 238991 - DNA, 479 bp, Homo sapiens
ggctcaattctgaataaagcatggacaagtgcagactcagagccaaggagcagggtgagggtcagcagataaaaaattaccaaaaggaaatctcagggggaagaaggattctggctaaactgacctaagagtattcttgccaaaggcagaccagggtggtcagacctgcaggatgatagaggatgagaaacctgatgggatattggggargtaggggtggggggccctggttaaattgacttagcacaattttagttaaaatcgccaatgtttacatgaacacagaactcgaaaagctgaacctatttgaaaagttcaagggagtctcaatagagtttggtcaaggaaagtattttggtcgacaggttagtagagttgcagtaataaataggatgtccagtgaggggttcctgggttaaccctgcatcagaggctgttaggtgactacgggtgattatctgaggatttcatgaccatag

SEQ ID NO: 238992 - DNA, 584 bp, Homo sapiens
tttctgccttgcagtgggaaactagacaccatttgacaaagtgctactaatttgctgttgcattgtgatagagggtctggctatggacatcatttgatcatttggccatagctacagtctgtcaaactcatgaagtcataggttgggycacttcaacaattcattgtaatatagaagcggtaagtccaggtataacataaatacggtggcatagctgcatgagcagatagcccagaccttctcatcatttactaatgttgtgttggtacctttccctcaattcatgcctatggggggattccttttgactatctgatagaggaggaaaaggccaaacttcagatatatggctatccacgttgtgtgaagggagaagcagtgcaagataagaatgcaaatggacaaataagcaatggcaaatgattggctggctttctgcgggcctagaaggagaacagttaaaagattaatgataaacggatctggaaaagatacatatggatgcatgaatggaatttgtattaatctgttcttacactgctataaagaactacctgaaactgggtaatttatgaagaaaagaa

SEQ ID NO: 238993 - DNA, 385 bp, Homo sapiens
ctacacacttgtaaataatcagatctcttgagaactcactcaytagcatgagaacagcaagggggaaatctgcccccatgagccattcacctcccaccaggtccctccctcagcattggggattacaattcaacatgagatttgggtggggacacagagccagatcatattagaagtagtcacaaagtttgaagactttgtaatgtatattaatgtctatcagaaagcatgaacaatagaatgaatactgaaatacacagtagtccaagtaactaattatttggcttcagtcagcccttgtgttcttccacccatttctaatatgacgaactcagaaatgcagtagccatagtgtcagagatggaagctgagcatggtccctaaa

SEQ ID NO: 238994 - DNA, 463 bp, Homo sapiens
agaacagcaagggggaaatctgcccccatragccattcacctcccaccaggtccctccctcagcattggggattacaattcaacatgagatttgggtggggacacagagccagatcatattagaagtagtcacaaagtttgaagactttgtaatgtatattaatgtctatcagaaagcatgaacaatagaatgaatactgaaatacacagtagtccaagtaactaattatttggcttcagtcagcccttgtgttcttccacccatttctaatatgacgaactcagaaatgcagtagccatagtgtcagagatggaagctgagcatggtccctaaagcatgtgtttccattcactaagactgatctagctactgcttctgatgaatgtctaacttgccacaacacaaactaacactctacactccaagaagatgttattcaccagaaatggcaatcttagtaca

SEQ ID NO: 238995 - DNA, 463 bp, Homo sapiens
aacagcaagggggaaatctgcccccatgagccattcacctcccaccaggtccctccctcagcattggggattacaattcaacatgagatttgggtggggacacagagccagatcatattagaagtagtcacaaagtttgaagactttgtaatgtatattaatgtctatcagaaagcatgaacaatagaatgaatactgaaatacacagtagtccaagtaactaattatttggcttcagtcagcccttgtgttcttccacccatttctaatatgaygaactcagaaatgcagtagccatagtgtcagagatggaagctgagcatggtccctaaagcatgtgtttccattcactaagactgatctagctactgcttctgatgaatgtctaacttgccacaacacaaactaacactctacactccaagaagatgttattcaccagaaatggcaatcttagtacatt

SEQ ID NO: 238996 - DNA, 420 bp, Homo sapiens
aactgatttttttttccatgaggacagcacttctttaaatatattacagttaggggaagagagttccttctcagcttgtttcccctagagtgttcccttctctttgactgaaaagagcaatcccttgtttcctaagcctgacacctaagactaattgtggacatgtcacttttcctctccttgaatttctrctccattacttgcctagatcttacttcctaatgttcaaattcaaccacttttctattaatatatctttactgccatcaccctaattcaaaatcccactaccattggcccaagcttctgtgttcctgaatgtgttcccattgagaattccatctttttaaaacacaaattgaacagtgtaatgccatatgtaaaacctgatggtagtgtactactactttattgatgttg

SEQ ID NO: 238997 - DNA, 450 bp, Homo sapiens
agacgacccttctcatggagataaagcaccatgtagtgcaatgatcccctaaattggtgaggctgaattagccttggggtgggaaggagaccatctagattgtcacataaacacaatgagagagaactttttaaaatcccttgttccaaaagaaagacaaagactagctcaaactcctaaaaataatcaatatcaatttataacaacaagaattaacagaaagcaagataawgaaagcagtatagaatcttgtcccttctgtcatcatctgactaaatgccaataatggatatgtaataaaagaaatacaggggagattcgagcaagatgactgactagatgcaacaaggttagaacagctgccactgagggactgagaggactggtgtacccctaacagatcttcggaggaaaggcactgagagtggacagagggaagacatagcagct

SEQ ID NO: 238998 - DNA, 485 bp, Homo sapiens
aatagatcaagtggaagaatgagtctcagagcttgaagactggctttctgaaataagatagtcagacaggaatagagcaaaaagaataaaaaggaacaaacgaaagctccaagaaatatgggattgtgtaataagatgaaatctacaactcattgatgtttctggaagagttggaagagttggggagaatgaaagaaacttggaaaacatattttaggatatcatctgggagaacttccctagtgtagctagggaggccaacattcaaattcaggaaatgcagataacctaagtaagatatctcacaagaagatattccccaagacatgtaatcatcagattctccaaggtcaaaatgaaataaaaaatattaaaggtagctagagggaaaggtcaggtcacctacaaagggaayccatcagactaacagcagacttctcagcagaaaccctacaagccataagagattggggataatatttgac

SEQ ID NO: 238999 - DNA, 485 bp, Homo sapiens
aatagatcaagtggaagaatgagtctcagagcttgaagactggctttctgaaataagatagtcagacaggaatagagcaaaaagaataaaaaggaacaaacgaaagctccaagaaatatgggattgtgtaataagatgaaatctacaactcattgatgtttctggaagagttggaagagttggggagaatgaaagaaacttggaaaacatattttaggatatcatctgggagaacttccctagtgtagctagggaggccaacattcaaattcaggaaatgcagataacctaagtaagatatctcacaagaagatattccccaagacatgtaatcatcagattctccaaggtcaaaatgaaataaaaaatattaaaggtagctagagggaaaggtcaggtcacctacaaagggaatccatcagactaacagcagacttmtcagcagaaaccctacaagccataagagattggggataatatttgac

SEQ ID NO: 239000 - DNA, 546 bp, Homo sapiens
tactcagacttctttgttctgatttttacctattttgaaaaaagaaatcttattttcttacccagagtttcacatttgatgagatcaacatttgttactagtttttttctgagaaatatgtaaatttataagaaagatacctctattacaacttcartagaatatgaatggtttactgcctgacgcaaactcagatacattcaaagtcaaatattatactgaatacctatgcatagaaagtcactataaatgcatacattacagatttatatttgaataaattagtcttacctttatagaatgatctgttatatttccacacttattctttttctttttttttaagtgacagggtctctctctgttacccaggctggagtgcagtggcaagatcatagctcactgcagccttgaacttctgggctcaagtgatcctcctgcctcagcctcctgagtagctgcgactacagccacgtgccacaatgcctagttaactttatacttttgtagacatgaagtgtcactgtgtttctcaggctggttttg

SEQ ID NO: 239001 - DNA, 546 bp, Homo sapiens
tactcagacttctttgttctgatttttacctattttgaaaaaagaaatcttattttcttacccagagtttcacatttgatgagatcaacatttgttactagtttttttctgagaaatatgtaaatttataagaaagatacctctattacaacttcaatagaatatgaatggtttactgcctgacgcaaactcagatacattcaaagtcaaatattatactgaatacctatgcatagaaagtcactataaatgcatacattacagatttatatttgaataaattagtcttacctttatagaatgatctgttatatttccacacttattctttttctttttttttaagtgacagggtctctctctgttacccaggctggagtgcagtggcaagatcatagctcactgcagccttgaacttctgggctcaagtgatcctcctgcctcagcctcctgagtagctgcgactacagccacgtgccacaatgcctagttaactttatrcttttgtagacatgaagtgtcactgtgtttctcaggctggttttg

SEQ ID NO: 239002 - DNA, 573 bp, Homo sapiens
tggtagtgttaattggatgttaattatgagctcggtttaatttcaataagcaagaaaatataatcagatgactgatttaaaaaaaaacaacaacaatgtgcccatctagcctttaatgtgacatgtcaaatgcaaataataaattatgttattcagtrtcagttgtttgcatgtcttagcacaacaaaggatttacagtctgagggccaagagagaaaaaatgcttttttcttaaaacagcatatttaaaagacaagacctcatcatttcagtagtgtacatagattagtgactgaaggagccagtgctagcctttttaagtagttcaggcttttagagctgaaagagattttaaagaccagccaattcaactcctacaccttggagctgaggaaacagacagaggtgaagtgacttgcctgtagttataaactggactaatggcagtactgagactccaactcttgtctcatgttttcttctttaggcatatttccactacactttttagacagaagagtagctggaaaaagaatgcctaactgatttactaaagagtctattcatggaatc

SEQ ID NO: 239003 - DNA, 573 bp, Homo sapiens
tggtagtgttaattggatgttaattatgagctcggtttaatttcaataagcaagaaaatataatcagatgactgatttaaaaaaaaacaacaacaatgtgcccatctagcctttaatgtgacatgtcaaatgcaaataataaattatgttattcagtgtcagttgtttgcatgtcttagcacaacaaaggatttacagtctgagggccaagagagaaaaaatgcttttttcttaaaacagcatatttaaaagacaagacctcatcatttcagtagtgtacatagattagtgactgaaggagccagtgctagcctttttaagtagktcaggcttttagagctgaaagagattttaaagaccagccaattcaactcctacaccttggagctgaggaaacagacagaggtgaagtgacttgcctgtagttataaactggactaatggcagtactgagactccaactcttgtctcatgttttcttctttaggcatatttccactacactttttagacagaagagtagctggaaaaagaatgcctaactgatttactaaagagtctattcatggaatc

SEQ ID NO: 239004 - DNA, 556 bp, Homo sapiens
  misc_feature (1)...(556): n = A,T,C or G
atgtgtaggaaaagaatttgatgaacatgtagctctttctgcccygatattcttagtcatgatgacataatagctgaaaaagaacacactgagttttgtgcaactctatgggtgagttgtttgttttgataatccttgttcaagcactagaaactttcagaaaaaaattttgtgtatggatatcagtacccacatcagaaccagaataaactaaggaacaatatattgctctaggtcatattataccaagagagaatatggtttcttttgcccaaggaagcaagagagaaactggcacacaagaaacacttctcacgtcactaaactctacccncaataantgaancgaaacttttaatgtcttaatgatctgtggttaaagtaggatagatgtgccctcacctctgatcaaccgcttgtttttgtgcctatttccctttcaagatgtcacagagattagcctttttttcagctctctttggtattcaggtctatgcagtactgtgatatttttactgcagaaagtcgtatctnctagcacggcgatccggccgtc

SEQ ID NO: 239005 - DNA, 503 bp, Homo sapiens
atgtaataataggtagtaatacttaatccaaaagtaatatttaatccaacgaagtatagatgaagaaacatacaataaaagggacaaatacaattgaaacagtaagatgacaggttcatatatatatcaatatatcaaggaaataaatgaaataggttacatgacaaataatgacatacacaaaatattctttttataagagatacaccttaaagataaatacacagaatagttgaacataraaaaaaaacagatacaccatgcaaacaccagtcaagagacagctgatatatctggaccaatatcaaagtagacttgaaggcaaaaaaaaagaattactttttcatgataaaatggccaatctatcaaacagacataacagttttaaatgtgtattcacctaataacagaccctcaaaataaatatacagagtgaaaactgacaggaataaaatgagaagtgaacaagttcacaatcctactgagagattttaacaaactat

SEQ ID NO: 239006 - DNA, 560 bp, Homo sapiens
agcatgagatttgtaataccacttgctaaaccttttgcatgggaattgagtcaatctagtcagaaactgagctgggtttgggttttgttgttatcatctargcatattttagggcatttgattattcctgtcattgagtcttccaagtagcaatcatcttccagtaacaaagctactcaatctattgtgttcaatagtatttaataatagaccatgtttaattgtattaggtctgtacctgtggtagttgattgcacttgtacatctcttctctaactctaactgttagaagcaaaaccaagttcttgtgagctgtgcctgaaatgcagaggtagaaatttggttacataccttcacctttcctgcctttttttttttttttttttaccactcatgcacaacacacaggcacttttatcacaggtgcattctctttgatacacaggcatattggttttattttggagtctttattttcacccaggtatcaagatgttttgtaatttgattgctcctctctgtgaaggcattttaaaaatgtcattccactttccagaaat

SEQ ID NO: 239007 - DNA, 560 bp, Homo sapiens
agcatgagatttgtaataccacttgctaaaccttttgcatgggaattgagtcaatctagtcagaaactgagctgggtttgggttttgttgttatcatctaggcatattttarggcatttgattattcctgtcattgagtcttccaagtagcaatcatcttccagtaacaaagctactcaatctattgtgttcaatagtatttaataatagaccatgtttaattgtattaggtctgtacctgtggtagttgattgcacttgtacatctcttctctaactctaactgttagaagcaaaaccaagttcttgtgagctgtgcctgaaatgcagaggtagaaatttggttacataccttcacctttcctgcctttttttttttttttttttaccactcatgcacaacacacaggcacttttatcacaggtgcattctctttgatacacaggcatattggttttattttggagtctttattttcacccaggtatcaagatgttttgtaatttgattgctcctctctgtgaaggcattttaaaaatgtcattccactttccagaaat

SEQ ID NO: 239008 - DNA, 560 bp, Homo sapiens
agcatgagatttgtaataccacttgctaaaccttttgcatgggaattgagtcaatctagtcagaaactgagctgggtttgggttttgttgttatcatctaggcatattttagggcatttgattattcctgtcattgagtcttccaagtagcaatcatcttccagtaacaaagctactcaatctattgtgttcaatagtatttaataatagaccatgtttaattgtattargtctgtacctgtggtagttgattgcacttgtacatctcttctctaactctaactgttagaagcaaaaccaagttcttgtgagctgtgcctgaaatgcagaggtagaaatttggttacataccttcacctttcctgcctttttttttttttttttttaccactcatgcacaacacacaggcacttttatcacaggtgcattctctttgatacacaggcatattggttttattttggagtctttattttcacccaggtatcaagatgttttgtaatttgattgctcctctctgtgaaggcattttaaaaatgtcattccactttccagaaat

SEQ ID NO: 239009 - DNA, 564 bp, Homo sapiens
accttcagttataagtgatataaaatgaaaagtcacaatttagttctaggaagcagatgggaaaaaaattcagccaatttctcagtataggagagatagctacttggtgatgctttaagtgaagagaagagtgaggaaatctgtscagacttcagagttagaaactggaaaaaatttctttcacctgttaaaatttgatatggtgaccaaaaaattaccagtattatatcacaggaatgaaggatgcttcttcactccctacacacacttacaaaattagacctttttttttttcttttggccactgctaaggagacagttaagcattttgttgttattgagggccaaaaatgttgctacagtacgggtggaggtagaattactttgaaaaagaatccccactaatatctctatgttgaaatatctagacaattgatcttattgaaatgcctatggtggccaagtcagtaataataaaataactatttaaaaagcaataataataacaataacacctacaaagcacttactatgtgtcaggtagagtgataagtggcacacaca

SEQ ID NO: 239010 - DNA, 594 bp, Homo sapiens
tcaattacacctttactagtcttcttcacctcatgtcttgttatttaattcctccatytgtgctctacacaaatgggaaggatttattgtcttggttagactactgtacatagcaatgtgctaggtgataaaagggtaacaaaagcatataccacaactgaaaataagaccagtttttgtatgtgcctacagaatgtaagtgcattgtgttaggcactttgaatagttctgtggctttaataggcttgtaatatacttagggaaagaaacaaaacattcattttaaattaaatagcaatataaaatagtgaccaagactacgcaacatgtaaaaacatatactggaggggagcttgatttcaactggggagaaattgctgcatggtagagtcatcaagaaagttttcacccttctatggaaagagtgacagtgcaatgtagtgggtaatagaatcagctttggagcaagatacgcctgggtttgaatcttggttttgtgatcttgagcaagttattttccctctttgagttttgattgtctttgagtcaactggcttaataaaacttattttgtagatatgttggaagaattag

SEQ ID NO: 239011 - DNA, 594 bp, Homo sapiens
tcaattacacctttactagtcttcttcacctcatgtcttgttatttaattcctccatctgtgctctacacaaatgggaaggatttattgtcttggttagactactgtacatagcaatgtgctaggtgataaaagggtaacaaaagcatataccacaactgaaaataagaccagtttttgtatgtgcctacagaatgtaagtgcattgtgttaggcactttgaatagttctgtggctttaataggcttgtaatatacttagggaaagaaacaaaacattcattttaaattaaatagcaatataaaatagtgaycaagactacgcaacatgtaaaaacatatactggaggggagcttgatttcaactggggagaaattgctgcatggtagagtcatcaagaaagttttcacccttctatggaaagagtgacagtgcaatgtagtgggtaatagaatcagctttggagcaagatacgcctgggtttgaatcttggttttgtgatcttgagcaagttattttccctctttgagttttgattgtctttgagtcaactggcttaataaaacttattttgtagatatgttggaagaattag

SEQ ID NO: 239012 - DNA, 594 bp, Homo sapiens
tcaattacacctttactagtcttcttcacctcatgtcttgttatttaattcctccatctgtgctctacacaaatgggaaggatttattgtcttggttagactactgtacatagcaatgtgctaggtgataaaagggtaacaaaagcatataccacaactgaaaataagaccagtttttgtatgtgcctacagaatgtaagtgcattgtgttaggcactttgaatagttctgtggctttaataggcttgtaatatacttagggaaagaaacaaaacattcattttaaattaaatagcaatataaaatagtgaccaagactacgcaacatgtaaaaacatatactggaggggagcttgatttcaactggggagaaattgctgcatggtagagtcatcaagaaagttttcacccttctatggaaagagtgacagtgcaatgtagtgggtaatagaatsagctttggagcaagatacgcctgggtttgaatcttggttttgtgatcttgagcaagttattttccctctttgagttttgattgtctttgagtcaactggcttaataaaacttattttgtagatatgttggaagaattag

SEQ ID NO: 239013 - DNA, 594 bp, Homo sapiens
tcaattacacctttactagtcttcttcacctcatgtcttgttatttaattcctccatctgtgctctacacaaatgggaaggatttattgtcttggttagactactgtacatagcaatgtgctaggtgataaaagggtaacaaaagcatataccacaactgaaaataagaccagtttttgtatgtgcctacagaatgtaagtgcattgtgttaggcactttgaatagttctgtggctttaataggcttgtaatatacttagggaaagaaacaaaacattcattttaaattaaatagcaatataaaatagtgaccaagactacgcaacatgtaaaaacatatactggaggggagcttgatttcaactggggagaaattgctgcatggtagagtcatcaagaaagttttcacccttctatggaaagagtgacagtgcaatgtagtgggtaatagaatcagctttggagcaagatacgcctgggtttgaatcttggttttgtgatcttgagcaagttattttccctctttgagttttgattgtctttgastcaactggcttaataaaacttattttgtagatatgttggaagaattag

SEQ ID NO: 239014 - DNA, 535 bp, Homo sapiens
taacacgggatctggtttcaaaaaggctctagagatgttttcaacatatacatcctgccttcggcatccttcaattttctcctgccactatttcattagatttcatttctttgygattttctatctgaaatttccaattcaagctcctattttgtacttcatttggaacctatcaaattctcatccttctctccagttgaacactcttattgaaatttcttgtagatttcttccttattggtcattcccattgccatcccccttggattctaacacatttgtattagcaccttaaacacttctcctctacttactttgtccttcatgttcatccagtttgtggtctctgagttcagaccttctgaaggtgaggaagaacactggggacctttccttttgtggaacatcagcaattttttagtttccttctacaggctctttctacagactctttcatagtcacccttcctgatggatctctttacctgaattttccctctttctatatgttctgagacagttggcagttttattt

SEQ ID NO: 239015 - DNA, 535 bp, Homo sapiens
taacacgggatctggtttcaaaaaggctctagagatgttttcaacatatacatcctgccttcggcatccttcaattttctcctgccactatttcattagatttcatttctttgcgattttctatctgaaatttccaattcaagctcctattttgtacttcatttggaacctatcaaattctcatccttctctccagttgaacactcttattgaaatttcttgtagatttcttccttattggtcattcccattgccatcccccttggattctaacacatttgtattagcaccttaaacacttctcctctacttactttgtccttcatgttcatccagtttgtggtctctgagttcagaccttctgaaggtgaggaagaacactggggacctttccttttgtggaacatcagcaattttttagtttccttctacaggctctttctacagactctttcatagtcacccttcctgatggatctctttacctgaattttccctcyttctatatgttctgagacagttggcagttttattt

SEQ ID NO: 239016 - DNA, 524 bp, Homo sapiens
ttacacaaaatgacaatatataataatatataatgctgtgagccagaccttgctacaagaaatttccatatattaactcatttaattctcactataaccaattattgttctcaatttacaaatgaagaagctaaggcacagagtagctgctcatatagatgyatcttgcccaacgtcacacaattaattagccaggatttgaaactagtaatgctcttaactacaatattatactggtccctactcagcacttacattataaattatgcctataccaaaatttctgatatgtcaagaccaaaagctccaggagctccttagaggagcacaaagaacattggctttgtcctgtttaacaaagtctgtgtggttcctataactagggtcaccatacatctaattctgcctgggacagtccaggtttgtacctgtttccccagtgaaaattataaatagcaccccctttcaccttcaacagtaatgtaaattatatgtctgatctttaacttaatagttccaaatgt

SEQ ID NO: 239017 - DNA, 411 bp, Homo sapiens
ggtagttgaaaacaactattgattttactttgtatttagagggcattaaaataatattcttccactggaatraatcaaaaggacatctcatgagatgtcactgatagctctgggttgggtgcagagagagatgatctctgggtttcatgagcaccagaagagattctggtatgtattgcatgtgcacaggatatgcaaggtgcccagtgtacattcagtcaagctatctgttttaaacaaaccaaattatcatatgtcttctgctttgtccctgcctattgctggtccaaagccagtgggatatggctggaaaggtggggaagactcagatgcctggctgtatggtatgcatcattaatagggctctttctttccaatagctcccagctttcttggtaggtcaagggcggg

SEQ ID NO: 239018 - DNA, 599 bp, Homo sapiens
gtttttggatcctaaaatcactgtaggaaacctatgggaagcttttctttgtgggtggcagctggccagcccctgagtgcagatgtttgcatgtcccaggctacttaggacccagggctgcaggctgtctgcaaggcccatgatgttctttgagagtgtttctgtgcttgagttaagaaaggcctagattttttgaggggtctgcttctgtggtcctgtttacaaagtaatttgagagaagtgtctaaaaacatgtccttacttgctgtcagaagttttgcccttaggcatttgtttctttgggttaaagtattctcattttcagatgttctctttcaaaataaaaaaattygtagagggctatgaataaaaaaattcatacagccgatgtttgtcttagtccttaatttagtcttactatgcaagtagggcatcaaggtgagcctaggctttgtcccctcccagggttcaggcatgctggacatgtctgatgagatagtgggacagttgacagaactgtttgtacaggctgagcatgtctgggtggaaaatttatcccaaagcaaaaagccagaccccatgcttggttgagccataaa

SEQ ID NO: 239019 - DNA, 632 bp, Homo sapiens
tagtgtaatataatatatgccatactgtataatgacatttaatctacatagtaaactcagatactatcattagcctcatgtaaaggataatgaaactaagtttaaattggctatgtagtttctcaaaatcacagcaagcagcagtgttaagattcaaacagggctctactggactcctgaaccaagaccttgacctgcttcactaatacctcatgctttattaatatttcccacagaaaacagtgtttactagttgttcaaaaaattcccagtcagaacccacccatgttgcttaaggtatctaaaacctccatccttgaatgacattagtttagggaatgatgatagcaaagcccaccttaggagagcaccgttctcatttggtcattgattttcttagtaaatagactgtggtgacctcttggtgaagaatgtagattctggggcctagacagttagagtgctgctcactatagtctagagtagtcccagaatttacaacctagctttaggtgattagcagtcaagaaaagccctcaagttgtggagggaaagtattcacttaagtccccactgagaycctataggttccctggcttgctttagaacaaatgtaaataactcagacccac

SEQ ID NO: 239020 - DNA, 599 bp, Homo sapiens
ctcttccctattctaggttctaggtctgagttggccaaaagagaaacttgcatgatttagtaagtggaagtaaagcagtaggtatttgtactgagatgtagtgagggagagatgtagagttgaccagcaggttcaaacttgtctttgttctcctccactacacatccagctcctcttcttgacggctgaccctggtgacaaatgataacctcatgtccaccaccagatgcctagctgtggacccacagaggtggtagctctacagacgcaactttgtataaacatttacatgagcttctattcttattcccacttcaatggctggacatgcttagcttctcagattttccctacgaactttgacttctccatctgtgaaagtgctttaaaaggaacagttagtgactcttttctcatcctctaacttcggctttttgrcattcactcgttcagctactcccacaattttttaaaggtctgattcttataataaatcccagattccataacattcaatagtagtttcagctttctggctggaccctaacacagttccatatgggaaatgcatgggaacatctggatcagtgatagcgaat

SEQ ID NO: 239021 - DNA, 429 bp, Homo sapiens
catatgacttttagcaagatgccctctgccccagctttctttcaatgtagcaaggaaaaaacactactactttcctcctgggaactgggagaagtgtcaaaggaaatcttttcaatgaaaggaaaaagaacatatcacacttgtaatattttctctcttgctaagccatagttccatgaaaatattaatagaaaccatgccttmctgccccatgccaaaaaggtgaaccagcagatagagactacatgcacgagctgcaactgtgccggtgttctgagggtaaaagaatatgggtactatttcatgcaaatctcatgcaggttaatatagtcaaacccagaattatgagccttcaggaaacaaatccatctgttaggagggctctaaattatatatggcatcctagctgaaagggagtctggacaacac

SEQ ID NO: 239022 - DNA, 429 bp, Homo sapiens
catatgacttttagcaagatgccctctgccccagctttctttcaatgtagcaaggaaaaaacactactactttcctcctgggaactgggagaagtgtcaaaggaaatcttttcaatgaaaggaaaaagaacatatcacacttgtaatattttctctcttgctaagccatagttccatgaaaatattaatagaaaccatgccttcctgccccatgccaaaaaggtgaaccagcagatagagactacatgcacgagctgcaactgtgcyggtgttctgagggtaaaagaatatgggtactatttcatgcaaatctcatgcaggttaatatagtcaaacccagaattatgagccttcaggaaacaaatccatctgttaggagggctctaaattatatatggcatcctagctgaaagggagtctggacaacac

SEQ ID NO: 239023 - DNA, 433 bp, Homo sapiens
acccagttatgctacatagtttcatgcctttgaggcactgtatatattgctcgctctgagacatttgccccgtccttacctatgaatttctcagacaactcacaaaaggagttcatgtcaactgattcatgcatcaactgacaagactcagcttaactgttggttcctttgtgaagcctaccttgactccctcaacagaaatgcccactcccctccttgtgcccccacagtaatatggatctacctccatcatacacttatttctatactgcctttgtttagatgtccacctcctccacyagactccagaagggcaagcaccatggcttgttctttgcactgctaggacccagcacaacccttaggcagtaaatactcagggatctttgcagagaagcagggatgagggcacttggcaagggctatgaagatc

SEQ ID NO: 239024 - DNA, 557 bp, Homo sapiens
tatcctaattctatcattaatttttccatttattagctgtaatactctaataataataaaacccttcctgtcatctactctttgrtttcccagtaggttatatttcatgcagggaaagcatgaaaaatgcttcatccttttctctgcagttttcaagatgataaatttgtcctatatcatccttcaaaaatgacgagttaaatttttattatgaattcatgaactcaaacataactgttgagtcttaatcaattgacgttatcattcttactgtcattcaagttttctcattttggctaatggaagcttcataaaattatctcctatgtgtttttaacacaaactccattagtctttaatagtttctctgtgatctggcatgacaagatgttttgagctcatctggtacatttcttgcaccagaaatggaatctccaagaatcgctgatttctatcaagattatagtctttcacaaagggagatcagtgttatttggttagtcattgtttctagacctttgcagtagacaaagctagaaagtttacatttatactta

SEQ ID NO: 239025 - DNA, 548 bp, Homo sapiens
ttgcttgttgaagaagtgctctggggtagacccaaaggccattctaggttgttggttggcrtggagctgaaacacattggaaatggctttcaaatgctcaattgtgatttttcaggttttgttaggcctatacatggaccaggtaggagcttgtccagtaataccattctgcctcttttatccatttctgggcttcaccagttttcactagtatgtgaattaattggtaaagatcaaatatcttgaggtcataaatttcaattaagaccttgaattcttcagaaaccttttgaaggccttccctagatttagcaaaatttttaactatggcgctgagttctattatcacctagggagtgtaagtcactctgggattatttcctgaatttttgagtggctttaagcaaactgtttaattgtggttttattttgttttgttttgttttgttttcagaggagaaagccaagtcagactgagagttagtagactaaatactcaggcaaagtgggatagagaggagcagtaggaattctgtcagttttactgt

SEQ ID NO: 239026 - DNA, 604 bp, Homo sapiens
ataatataaacattatctatattgtgatagcacaacagggtgactacacccagcaataatttattgtacattttaaaataactaaaagagtataactggtatgtatgtaacataaggaaaggataaatgcttaaggtgatggataccccattttccctgatgaaattcttatgctttgtatgcctgtatcaaaatatttcatgtaccccatatatgcacctaccaaaaaagtaaaaagcaaaacaggtgaacaatgatctaaacaagagtcccaaccatgataagatgatgctgaattttttcctttaaaaaagaatggtggaatatctgtcatcccaatgacrtatttctggctgtcaccagttctccaagtatgaaaatctttatggtgccaaacctaaatgtcatttgccctaaatatttaagagcaacaactggggaacagtgagatatgatcataccatagcactccagcctagtttagagagcaagacctcatcgagagagagagagagagagagaaagagagagagagactgcaacaaccggacacatacctcagttgcaggagagctgaggatggagaccctgctgggctacgaaa

SEQ ID NO: 239027 - DNA, 564 bp, Homo sapiens
tttctatctcttcgttgcctctttcagtgatactgctcacttgacttttgattctaatgaaggtgttttttctgtgtagatagttgtttacttgtccttgtggaaggacaatcagttgagccttctactttgccatcttgttcggccttgggaatccatcttaatttaagtcaacttaatcacacaagatttttttataagattcattcttcacaaaccttctacaattggcttagactttcagtattgtcctctatttctttttcttatcctattgggacaacaaatcattctaccttaggacaaaaacttgcttctctttttttcttattattttgaccacacaaacttctctcatacaaaaaaattaccctctttcacttttcatttttttcctaaaatataccctcatacataactttttgcatctctttcttctacttactggtttatttgtgcctttttatttccttcttatatttatattttgaaataacctttaaataacytcaaaattaagcaaaattactttttccaacaaaaaatatatctttaagttttttt

SEQ ID NO: 239028 - DNA, 599 bp, Homo sapiens
ggtttgtttagtttttaaagataaaaatagtagtgatatatgtatatagggtgtgtatttrtgtgtaatggtagtgaaagatggtgttgaatcactttgaaagctttgctaaactaaacatagttgacctttcctctacccattcctaaaacacgaaggttctaattcaataattctgttgagaggtctggatgtaagtctttggaaaaagagttcaattctttgagactttgattcatgagactccccaggcagcagagagaaccagtaaaagaatatcagcaaagccatctctacctacccccagtttgtttagaagcagaaagttaaagtaatccagaactcttccatgcagggcaggagcattcagtccacaagaggcttccagattacccattatgttacccattaatattttgctactctcaataccgtgttttctttcttctttccctgctttgctttaatcctccctctgtttttttattctttcccctttctctgcttcctattagcttctatgatatttgcagggctggtcagcataatattaaggaagtttttgccactgctctattttaatgccctcccaccagggc

SEQ ID NO: 239029 - DNA, 560 bp, Homo sapiens
gatttgttcacgcaccaccttgtctgcacagctgaaatatcagagtcttacaagcagcrgggagaggcccagaagagtagtaagaaatgaagaggtgattcaaggcaaggcaaaatagacaaggagaaagtagttatgaggctgcaaccacactccaagtgagaaatgagaattgaaggcattggtgggaatggagggacaggaatgaattcagaggatatctggcagttagaaaaaaacagcgaatggagaaaattgaattggacagtgaatatcacaaaatgaatatattggcctacatagcataatccatatatcattaactatgttaacctaatgatagattataaaaagggacacatcatcaaggtttacatatatttgaatactggtaattatgagagactcagggagattacaaagacacaaagcaagacctaatagttcattataccaccactgtcttttgcattaaaatagttccttgattttcgtaccctcacgggagctcctagcttttcaactttgaccattacaattggtgcatttcctatgtgtct

SEQ ID NO: 239030 - DNA, 425 bp, Homo sapiens
ctattataaagtctgtgaatatatccaatatcccaatccatcctcaactaagataggccctatataagatagaccatgtgaccaataaaatatcctaagactttctgctaagactctctcctccaygttactttgattataactgcaattccaagaccatccatcaataagctgggcctttgggatcccaaagtgatgcttcccttccagtcccacactgaaaactatgccacaaacacaaaacccaaatactgctgggctaaatcaatagactggtacaaattggccttttttcttttcctcaaacatgctaagttcttccccttgccttctcatattgttcttttttactggaacactctgaacccagatcgttgcacagccaccaatttagcattcaagatcacttcaaaagtcacctcctc

SEQ ID NO: 239031 - DNA, 598 bp, Homo sapiens
cagtgagatgagtggcaaatactcccatagtaactccaggatatcagcgtacgtatcacattgattcagcacattgactatatcctgggcatatagggaaagtggaagcaaatagattggttttctactgggacggtgtagtgggagtggggagaatattcttcagcgctgtgtggaagttgttcagacactttcccagcatatctgagacattaaacttggcattggaaggttttcttcctcagcyttgtggcttgtgtgttttcccattccccacgaggcagttcctcccctgaatgctcagtttatattaacatctgattttattttttgaacaaatgttgtgactaaattataggcactgaaaaaatgaaaagataagcttcttcaattcaaaatcaggattggaagagaccataaatgtaaaataagtcataacacttttaccaaatatagtaatttgtcagaaatatttattcagcactcatatggtaggtgcagtagatgttaccaaaaacttataaggagatatgagttataagagtttatagtcttgcttgggatgtgtaaagcaatgcaagattatatattcaaactg

SEQ ID NO: 239032 - DNA, 598 bp, Homo sapiens
cccaagatcacacaggtagtagatcagkggtcaatctcaagccttctgactctaaagccagttctccttccacagtgccagccttttcaggttaccccataatcctactcctggggattcatgctgagaaattttacttgctaattttaaaatcaaaactaaaaaagtgttcgctgtgttgttcattgtgattccaaaaactggaagcaagctaaatatcaattataaaggaaaaatgaagcaaactgtgacaatattattcaacaacaaaaattaaaatattatagactgtagcaacatagaaggttttcatgactgaaaaatgggtatatatattatgaacataactgtgttaaattatgtaaatcacagtaggcaagacaccaggcaaaatgaaaatactatttacagggaagtagaattctagatacattttttacaaatttttttaataccattttgatatcttaacgacgtcaaacaagtaagtttataatatccctgctggtttttcagtgccagatgtgggtgctttcccaaatgatctgttctatctgccgattcaaggaaatttaatttcactctacagaaataaaca

SEQ ID NO: 239033 - DNA, 583 bp, Homo sapiens
cagcattatagaagtatacctcacatggatgtagaaatagacctcagtttctataccccattgtagaaatttatatataccttgacaatgggtacaatagactaaatataatatgcgcaaacagaaggcaaataaaactttaatttacaaaggagataaatatgaatagtactaacctctgaaatgaatatggttttaaatatttctttcataatatctacttatgtaaataattatggaaaagcaaatacagaaatttggtgcctaccttaaagaataaagaaaattattggaagatatattacccatagagcgaaaatacatcttcccattatagtagggttagaggttacatcataaaatactttacttgagttttttgtggtttgcctcagatgattagtttggagaaacagatgagctagtactgagttagctgctgttatgtgaagcaatgtttagagacaacagggtttcattttattctagaggtactacatacacttttttgaaggatattttgagaatataaaataaaaatttagggtaacattttacarttgaaattgttctttttcacaaa

SEQ ID NO: 239034 - DNA, 491 bp, Homo sapiens
gacgcgggtggcgctgcagagggtacggtggggggcggggaagaggggggcgttcgtgtgcaattagcctccccagggcgcggaccacggtgtccccttctctccagctgggggtctcgggtcctggcgctgagaggccgcaccttgccttgctgcccgggccgtgcacccgtgggccccagggcgacgcggcgggggcggccctagcgacctgcggcggcgccgggaaagccctgcctctgcagcgggtcccaggggtcggggcctggaagggtccctgggaatgctccgcgccgagaaggctctgtggtttctcctcccccacacgtctccctctcctcccctcttcccggggacctcagaggtggcggggaagtgggaagggaggcgggcttgcagaccgtgcargctggggagccggagctcgggagttgggggagtccgagtgagaacggaagcgcgtggacgcgatggaaggggccgggggaaag

SEQ ID NO: 239035 - DNA, 536 bp, Homo sapiens
aaaacacaaaaattacctgggcatggtggtgtgcacctgtaatcccagctactcaggaggctgaggtaggaaaatcgcttaaacccaagggacaaaagttgcagtgagacaagatcatgccactgcactccagcctgggtaacaaagtgaaactttgtctcaaaaaaaaaaaaaaagaagaagaagaagaaaagaaayatacttgtgatacccaatggctgggctccgggctaaacccatccttaatcttgaaaccatggccctaagtgaaaacagctggcccggtttttccacccaaatgttgctttttttggcctgccatgcccctatcctgtgcccataaaaagacttcagctggcagagcaacacatatggctgaccagtggggacgcaagttgctgagcattggagactacggatagacacagctaacttcaaacagtgtggcttcagggaaagatcaccttctccccacaccatcccctttccaactccccattccactgagagccacatccattgcccattaaaaccct

SEQ ID NO: 239036 - DNA, 536 bp, Homo sapiens
aagtacaaatacacaggacagccaagggcccttggtacctggtagtcagggcctggtgcccagccatgaagcttcctgggcggtggctgagggtctggcgcctttcggaccacacgggacgcacccactgcttcagcccagtccttcccttcctctcgagtccgcttagcgtccgcactgtctgcagagctcattgacaactgccgctgcctcctagggtcccaactgttcctaggacaaaccacatttgatgttaagtttttgcactcaggccaagcatttctgatctcactggtcagaggccttgagaattcccaagtcagctgtccaaatcattttcttcattagaatggaccaccactcccactacttccatgtgaattccacggttcagccccaccatttatcaagtcactctcattaaacagagccccaggcacgatatgtcacactatttcaccgatrcaaaaaaaagtcctcatgatcctcactttaaagcaagcttgtccaaccacatgtggcccaggatggccctg

SEQ ID NO: 239037 - DNA, 483 bp, Homo sapiens
cttgtctcttatcccctagcacgggggccataacggcacaggctaaggcaatatttctccattagaaggatggccaaacaagagtcctcagaccctgacctcaaggagtttcacagtctgcattggaaacaaccttggctactcagcagaatagctgcaakgagtactgaaagcttcagagaaatcggctaataagttccaaggagtgagatgagaatgagctagagtggtcggtggggaggggcctcctggaggagggggcatttaagggctgcactgaggatggagaggctttagctagaacaaggcaaggagcgggaggaaaggtacttctgggcggtggaaccggcatgaccaaaggaagggaggtgtgcctgtgggggtgctggggcagctcagccagcacccatggactttaggggaagaacagaggccaagtttctagggatggctgggaccccagaaggaagccagggttaggag

SEQ ID NO: 239038 - DNA, 315 bp, Homo sapiens
ttctactctagtccatggaaataacmgtaatgatatcctctaacccgacaagcacttaactgtattctgggtactgtgcaaagtactatagagttattacttctttcagcatcacagcagccttatgagagcattgctgtaatcaccagcattgtacatgtgagaaaactgaacgtcactcactcaggaagtaacttgccccaggcggcacacctggctgagcctagggttcaagtccaggtctgtgtggctccagtgcgccagccactgcccgctggcctactctgcctctggccttgctcctagcttcttttt

SEQ ID NO: 239039 - DNA, 465 bp, Homo sapiens
ggtaaccctctcatgtgtctctcctccctgattctcactctagcaattcagattcccatttctgattctctgggacacaggtctctaaagagcccatccactccaagtcaacttttcccccagtcctgcccctcctgcatcctcattcctttcccattcacactgaggaggcatttgaaacgatgggtctgtgctccctttaacatgcactcatggcctaggtttcagctccgaaatgaccagaagaaagcttgaaatatatccaccctgatggcaggcattcaacagaggcagtgactgggctccaggtcataggaggccctgatgccacagcgagggcaggggacggtgcagaacacaatgatcttgggctgccttaagtccctcrgtgtcttcatcagctcagccccaagttcagcaaatctcccccagcagagagcaccctgggtgtcataactctccaga

SEQ ID NO: 239040 - DNA, 490 bp, Homo sapiens
ggcatcactctcaggccaaatatgatcacctcatcttctcctattgctaatctcattgctctggtggaggtggaaaagccctcaattccccccagttccattctgcayttggtggccacaaatctgtatctgtgcccctgtgactaccacaaagaatgtcttccaaacaccaaggaggggacgaggtggccagtggcccattaatttctatacattgctccactgaaactcaggattactgggatctgtcactcaggatcctgaaagctaagctccacctttttgagggaaatttttttgttacttaccacccaaaaacaatgagaatgactgtcctgtggccccacacagcctgcattctcagtttacacaattagcatgcttggggaagactgaagtgactccttaaaatcaatgccacttgtttttattttgaaaaattataagagaaactataaaagcagtgtggcagtattctagagcacttgga

SEQ ID NO: 239041 - DNA, 475 bp, Homo sapiens
agaaaaggcatcactctcaggccaaatatgatcacctcatcttctcctattgctaatctcattgctctggtggaggtggaaaagccctcaattccccccagttccattctgcacttggtggccacaaatctgtatctgtgcccctgtgactaccacaaagaatgtcttycaaacaccaaggaggggacgaggtggccagtggcccattaatttctatacattgctccactgaaactcaggattactgggatctgtcactcaggatcctgaaagctaagctccacctttttgagggaaatttttttgttacttaccacccaaaaacaatgagaatgactgtcctgtggccccacacagcctgcattctcagtttacacaattagcatgcttggggaagactgaagtgactccttaaaatcaatgccacttgtttttattttgaaaaattataagagaaactataaaagcagtgtgg

SEQ ID NO: 239042 - DNA, 415 bp, Homo sapiens
agatctgctaagttcagggatggctcccatcctaagcaggatcacacagtcattcttctgctattttagggcacaaagtagcaagaacgtcccccgcctccagaaagtcctccaggcctttctctcccattccatatgaaacccaaacagcccggagatgccactggcttccaaaactgaagtactttgaaggatgttctccatcatggaatatttctgtaaatgttctttctccacrtttctgacctcactatcaatgccctgctatgtgtgcaatcgagttaaactgaaacgtgctcagtgcggcttctacttcacctgccctcactttgtgagcctgaggctgagggtgagctcagcaccaaaggtgatcctgagtgtctctgttgattgagcatgcacaaggcacagcagg

SEQ ID NO: 239043 - DNA, 370 bp, Homo sapiens
ttccagtggatcctggatagcaaggggccggaaagttggggtagcggtaagagggaagaagtcaacaggatgtagaaactgcattctttggtgagttggtgcattgcagggcccttcagatcagctggcatcagtagwttcactgacatgcagaacctgaaagaatatctcagatgaaaaagttaatgttttacaatgcttaaatggttgtctgcagggaagttaaggggaactgtaatctaaggtctatatgattttggaacagtaggttgccagcaaccatgaggaaccaggtcagagagcaagaagacctcctgatgaatgctgaatgtgttccaagcttggtttatttttgtttctctccctccct

SEQ ID NO: 239044 - DNA, 370 bp, Homo sapiens
ttccagtggatcctggatagcaaggggccggaaagttggggtagcggtaagagggaagaagtcaacaggatgtagaaactgcattctttggtgagttggtgcattgcagggcccttcagatcagctggcatcagtagattcactgacatgcagaacctgaaagaatatctcagatgaaaaagttaatgttttacaatgcttaaatggttgtctgcagggaagttaaggggaactgtaatctaaggtctatatgattttggaacagtaggttgccagcaaccatgaggaaccaggtcagagagcaagaagacctcctgatgaatgctgaatgtgttscaagcttggtttatttttgtttctctccctccct

SEQ ID NO: 239045 - DNA, 397 bp, Homo sapiens
caccagtgcaggactgtccaaggatgagaggacrgcagcccttgactgtgttcgtagaactttggctcaagaacaggactctggatgaatacctcacctgcctccttctatgggtcaagcagaggaaagatttactacacctgtgctgtaagaagctgaaaattttgggaatgcccttccgcaatatcagaagcatcctgaaaatggtgaacctagactgtatccaggaggtggaagtgaattgcaagtgggtactgcccatcctgacacagtttaccccatacctgggccacatgaggaatcttcagaagctcgttctctcccacatggatgtctctcgctacgtttccccagagcagaagaaggagattgttacccagttcaccactcagttcct

SEQ ID NO: 239046 - DNA, 397 bp, Homo sapiens
caccagtgcaggactgtccaaggatgagaggacagcagcccttgactgtgttygtagaactttggctcaagaacaggactctggatgaatacctcacctgcctccttctatgggtcaagcagaggaaagatttactacacctgtgctgtaagaagctgaaaattttgggaatgcccttccgcaatatcagaagcatcctgaaaatggtgaacctagactgtatccaggaggtggaagtgaattgcaagtgggtactgcccatcctgacacagtttaccccatacctgggccacatgaggaatcttcagaagctcgttctctcccacatggatgtctctcgctacgtttccccagagcagaagaaggagattgttacccagttcaccactcagttcct

SEQ ID NO: 239047 - DNA, 496 bp, Homo sapiens
agcaggttcctgtttcctcagtggaccctgtatggtgagcagtcctttcccagaggatctgggcaatggtcaaggcctctcatgggcaccatcagaagcctctgagccaccctagctccccaaccccaccactcctcatgagccagctgtcccttccctggatgcctggacccttcccaccaggccacctgagtcacctcacctgaggcaaaccttctgggccagcagtgtatcaagtcccttcagcacagcttgcaaggtctccagatgaggtgtcttcatcagggatcccagagggaggtggaggaaggaccaggcctgcaccatcagcttcagggcctcacagcgtctcctgctgacggcctccatgaacatcagagggaagacctccctgggcagctcgtccaggatgaagatggtcaagaactggttcctcagyaggctctgccctgccagctccaggagtctggatggggactggaggctcattctgaca

SEQ ID NO: 239048 - DNA, 565 bp, Homo sapiens
agagatcttcggagggaagtaaacctgctggggcctcagggctcagaaaaagccctggacctatctcccagtcatgcctctcccactcccaagtgcctctggccctggaactgtcagatacccctgtgtcttttccatgtgctcttcttctcctttcactcacccctgcctttgccaatgctccctgcatttgcctccatgtaaggcccccaaccccaagctctggcagtggctgggggagctaggggtttttgtgcccacctggagaaagcctcactcagcatgggcccgtgtgggttctgcaatcttttcctacacagggtcacctacaggtgttatagwtgcatctcccctagaagagccaacggggatgggtgaggaatctgaaatcactcaggcaccccacatacaaatgagagccagggtccctgcaagcacaggccccggggtaggtcctggcccttgttgttgccttctgatcccagaggccttgggtttgtggtcacaggagccctacctacttcccatgcacccccagcccaagataaacaaattcctgcagcct

SEQ ID NO: 239049 - DNA, 544 bp, Homo sapiens
aaacctgctggggcctcagggctcagaaaaagccctggacctatctcccagtcatgcctctcccactcccaagtgcctctggccctggaactgtcagatacccctgtgtcttttccatgtgctcttcttctcctttcactcacccctgcctttgccaatgctccctgcatttgcctccatgtaaggcccccaaccccaagctctggcagtggctgggggagctaggggtttttgtgcccacctggagaaagcctcactcagcatgggcccgtgtgggttctgcaatcttttcctacacagggtcacctacaggtgttatagatgcatctcccctagaagagccaayggggatgggtgaggaatctgaaatcactcaggcaccccacatacaaatgagagccagggtccctgcaagcacaggccccggggtaggtcctggcccttgttgttgccttctgatcccagaggccttgggtttgtggtcacaggagccctacctacttcccatgcacccccagcccaagataaacaaattcctgcagcc

SEQ ID NO: 239050 - DNA, 590 bp, Homo sapiens
ttgcttttactataccagccataaataataaagaaccagccaccaggtttcagtggaaagtgttgcccagggaatgcttaatagtccaactatttgtcagatttttgtagctgaagctcttcaaccagtcagagacaagttttcagactaattctttcattatgttgatgatcttttgtgtgctgcagaaacgagagacacattaattgactgttacacatttctgcagacagaggttgcaaacgcaggactgacaatagcatctgataagattcaaacctctactcctgtccattacttgggaatgcrggtagaggaaagaaaatttaaacaacaaaaaatagaaataagaaaagacacattaaaaacattaaacgactttcataaattgctaggagatattaattggatttggccaactctaggcatccttacttatgccatgtcaaatttgttctctatcttgagtggggatccagaattgaatagtaaaagaacattaactccagaggcaactaaagaaattgaattaattgaagaaaaaattcggtcagcacaagtaaatagaatagatcacttcgccccactcc

SEQ ID NO: 239051 - DNA, 600 bp, Homo sapiens
tggacccacgtgggttcttggatttctttcttcacygggtcccctgcaagtatacagtagatgcatcaactctagaagagcaaatggtgatgagtgaagacccagaaccgtctcaggcatgcacatggaaagagagagagcggtccctggaagcacaggcctgggggtggttcctgggcacttctgtctcctctaataaaagaggccagtgactttggccacagaatacacatccacttctcatgggttcatatccaaagaacaaactccttcagactcgctggtccatgcactcgagatccccagggtatcttgagttattatgtcaaaaggagagagaaaccagctaacactagtcctaatacttatacgaatacaaagagggatgttttcttcttgctgttccagggaatgtgctgagttaacaccttttttctttttattggagccgctgtggcagggaagacagtggtgaggggcttcctttgagtaaaaagcaggtaaattcagcccctgcttgctccactgtctgcccctccagggcctctgtgtcctgatgcagagtccagcctgttctcaccaggctcgcattccttatgc

SEQ ID NO: 239052 - DNA, 600 bp, Homo sapiens
tggacccacgtgggttcttggatttctttcttcaccgggtcccctgcaagtatacagtagatgcatcaactctagaagagcaaatggtgatgagtgaagacccagaaccgtctcaggcatgcacatggaaagagagagagcggtccctggaagcacaggyctgggggtggttcctgggcacttctgtctcctctaataaaagaggccagtgactttggccacagaatacacatccacttctcatgggttcatatccaaagaacaaactccttcagactcgctggtccatgcactcgagatccccagggtatcttgagttattatgtcaaaaggagagagaaaccagctaacactagtcctaatacttatacgaatacaaagagggatgttttcttcttgctgttccagggaatgtgctgagttaacaccttttttctttttattggagccgctgtggcagggaagacagtggtgaggggcttcctttgagtaaaaagcaggtaaattcagcccctgcttgctccactgtctgcccctccagggcctctgtgtcctgatgcagagtccagcctgttctcaccaggctcgcattccttatgc

SEQ ID NO: 239053 - DNA, 394 bp, Homo sapiens
gaggaactgagtggtgaactgggtaacaatctccttcttctgctctggggaaacgtagcgagagacatccatgtgggagagaacgagcttctgaagattcctcaagtggcccaggtatggggtaaactgtgtcaggatgggcagtatccacttgcaattcacttccacctcctggatacagtctaggttcaccattttcaggatgcttctgatattgcggaagggcattcccaaaattttcagcttcttacagcacaggtgtagtaaatctctcctctgcttgacccatagaaggaggcaggtgaggtattcatccagagtcctgttcttgagccaaagttctacaaacacagtcaagggctgccgtyctctcatccttggacagtcctgcact

SEQ ID NO: 239054 - DNA, 383 bp, Homo sapiens
caatcttctgggctcaagtgattctcccacaccagacacccaaatagctgggactacagatgcatgtcaccatgctcggctgattaaaaaaaaaaaaagtagaggccaagcaccagtgactcacagctgtaatcccagcactttgggaggccaaggcaggtggatcacttgaggtcaggtgttcgasaccaacctggccagcatggtgaaaccccacctctactaaaaatacaaaaattagcgaggcatggtttcagatgtctgtgacaccagcttctgaggatggagactgaggcatgagaattgcttgaacccgggaggtaaaggttgcagtgagttgagatcatgccactgcactccagtctgggcaacacagtgagact

SEQ ID NO: 239055 - DNA, 383 bp, Homo sapiens
caatcttctgggctcaagtgattctcccacaccagacacccaaatagctgggactacagatgcatgtcaccatgctcggctgattaaaaaaaaaaaaagtagaggccaagcaccagtgactcacagctgtaatcccagcactttgggaggccaaggcaggtggatcacttgaggtcaggtgttcgacaccaacctggccagcatggtgaaaccccacctctactaaaaatacaaaaattagcsaggcatggtttcagatgtctgtgacaccagcttctgaggatggagactgaggcatgagaattgcttgaacccgggaggtaaaggttgcagtgagttgagatcatgccactgcactccagtctgggcaacacagtgagact

SEQ ID NO: 239056 - DNA, 484 bp, Homo sapiens
tgttgggggttattgagagggtggaggaggaatctttccaacattgcactgagggtcccttggttttcatacttgtgaccaagaatgagtctttcaaaaaaatttatgtaattctcctcatttttcctttcaaaacctttgtcttcctttacctccccgaataatctcacatctattcccatggctttgctcatttcataataaaaatccttttttttttttcctgtgkagtctctttctctgttaagtagaccatatattttgttgccacacaagatgagtagcctggttttatggagagaaagggacaaaagaatcccaatcctcaacagctaggggtgatatgaaggtcaggattattctttgtcatatctgcacctgcatattgccagtgaaaacctgcaggtcacattaggtagacttccaaattgatcatctgtggaaggtcttatgattggcttacatcctgtccctgagtaaagaa

SEQ ID NO: 239057 - DNA, 494 bp, Homo sapiens
aaaattgcatttagaaaaaaaatcaaagcttcaaagtgttcatatgaaaaaaagaaaaaaagacaggatatagttctgtgccgtcgtaggctgcactgtcaccgttctagaccggctgactgtaggtcagatgggagtgtccttccagaaattagtgacttaccagatctggttgtagtttagacctctggttgtagttgtagctcagacctcaggaagagccaagcaggaactccaggcttgaagactttgagtctgtcctgtgggtctttagaagcttttattgacctttctaatcacaactcccacccacgcccctccacatatccgctgctagcttccaatcaaaaagcgatatctgattgcatttctgaagctccactcagttaatcmtgattgggtttttggctgtccgaagactaatggattgaaccaggtatccattcatatcacatatgcatattcatttcatgaattaagaaattgacagcgtt

SEQ ID NO: 239058 - DNA, 553 bp, Homo sapiens
tcctcatcacagagcaacttgcatgtggaccatcatcacatgatgggaataaacttgtgtttgggtgaagcagacatttccctttcagttattccccaccaccttcatctaactggtatcactgcccagaactaacttcttgatctccacaggtgcctccagaaccccttggagaacttggagttaacttgtggctacctattggaagaggacatgaagtgtctgtctcagyacccaagcctcagctacctaaagcatctgaatctcagctacgtgctgctgttccgcatcagtcttgaacccctcggagctctgctagagaaaattgctgccactctcaagaccctcatcttcgagggctgtcagatccactactgccaactcagcgccatcctgcctggcctgagccgctgctcccagctcaccaccttctactttggcagaaattgcatgtctacggacaccctgaaggacctgctgcgccacaccagtgggctgagcaagttaagcctggagacgtatcctgcccctgaggagagtttgaattccttgg

SEQ ID NO: 239059 - DNA, 546 bp, Homo sapiens
cctcatcacagagcaacttgcatgtggaccatcatcacatgatgggaataaacttgtgtttgggtgaagcagacatttccctttcagttattccccaccaccttcatctaactggtatcactgcccagaactaacttcttgatctccacaggtgcctccagaaccccttggagaacttggagttaacttgtggctacctattggaagaggacatgaagtgtctgtctcagtacccaagcctcrgctacctaaagcatctgaatctcagctacgtgctgctgttccgcatcagtcttgaacccctcggagctctgctagagaaaattgctgccactctcaagaccctcatcttcgagggctgtcagatccactactgccaactcagcgccatcctgcctggcctgagccgctgctcccagctcaccaccttctactttggcagaaattgcatgtctacggacaccctgaaggacctgctgcgccacaccagtgggctgagcaagttaagcctggagacgtatcctgcccctgaggagagtttgaatt

SEQ ID NO: 239060 - DNA, 546 bp, Homo sapiens
cctcatcacagagcaacttgcatgtggaccatcatcacatgatgggaataaacttgtgtttgggtgaagcagacatttccctttcagttattccccaccaccttcatctaactggtatcactgcccagaactaacttcttgatctccacaggtgcctccagaaccccttggagaacttggagttaacttgtggctacctattggaagaggacatgaagtgtctgtctcagtacccaagcctcagctacctaaagcatctgaatctcagctacgtgctgctgttccgcatcagtcttgaacccctcggrgctctgctagagaaaattgctgccactctcaagaccctcatcttcgagggctgtcagatccactactgccaactcagcgccatcctgcctggcctgagccgctgctcccagctcaccaccttctactttggcagaaattgcatgtctacggacaccctgaaggacctgctgcgccacaccagtgggctgagcaagttaagcctggagacgtatcctgcccctgaggagagtttgaatt

SEQ ID NO: 239061 - DNA, 553 bp, Homo sapiens
tcctcatcacagagcaacttgcatgtggaccatcatcacatgatgggaataaacttgtgtttgggtgaagcagacatttccctttcagttattccccaccaccttcatctaactggtatcactgcccagaactaacttcttgatctccacaggtgcctccagaaccccttggagaacttggagttaacttgtggctacctattggaagaggacatgaagtgtctgtctcagtacccaagcctcagctacctaaagcatctgaatctcagctacgtgctgctgttccgcatcagtcttgaacccctcggagctctgctagagaaaattgctgccactctcaagaccctcatcttcgagggctgtcagatccactactgccaactcagcgccatcctgcctggcctgagccgctgctcccagctcaccaccttctactttggcagaaattgcatgtctacggacrccctgaaggacctgctgcgccacaccagtgggctgagcaagttaagcctggagacgtatcctgcccctgaggagagtttgaattccttgg

SEQ ID NO: 239062 - DNA, 546 bp, Homo sapiens
ggttacttaataatagagggcactagacagttaccactcagttttcctttatttctgattgtttctttacaaccatccatgcaagagtaactccctcatgtttctcaagcctccactctagacattcaaattcccattttccactctacaggacacaggtccccaaagtcccatcgaatccatggcaacacttcccccaagtcctgcccctgcttgatcaccttycctttcccactttcagagcccatgtgtgaaatgatgggttctgtgctccctataggatgtacctaagacctaggttttagtttccaagtgtccagaagaaagcgtttgacatatccacccaaataggcaggcattcaacagcagcattgatctgcctccaggtcataaaatgacctgttgccacagtcagggcagcagtcagtacagaacaagatcctcttggggtgccttaagtccctcactctcttcatcagctcagccctaatttgagcaaatctgctccagcagagagtaccatcagcatcataactctcccggggg

SEQ ID NO: 239063 - DNA, 581 bp, Homo sapiens
ctaggttttatcatgcagatgaagcttccaggtagcaggcttcagagagaatagatgtaaatgtttcttatcagacttaaagagtctgttccatcagcaattccaaaagaaaggagggtataatgaggcrtgtccagctcccccttcccatcatggcctgaactagtgttttcaggttaacattggaatgcccttggctgagaggggggatccatttggatggttggagggccttaaaattttatttttggtttacacaaagttggatgaaaggagattgttgttatatagtgatggtaagtttggtagagtcattacctgtggaaacatgaaaaatagataatgtatcactgaactgatggatccagctaaggggatttccagacagacatcaaaagtgtcacctagtttctttaagctacttatcataaggtacagatagagacaagcaaaataaataattggtatatattaacaatcagcaaaattaaaaatagaagtactatataatccagcaatttcagttctggatatatatccaaaagaactacaaacaggatctcaaagagatatttgtccac

SEQ ID NO: 239064 - DNA, 545 bp, Homo sapiens
tatttcacatcaagccaataataatttaagaatatattacatgtaagatactgtacaggatctaataaraaagactcaatttctctcttaaaacagtaaaactgatgctatagggaagcagacaattattgttaaaggaatgctatggataaagaagataataaaagtcccaagaagggaatgcatgcatctttagcactgaatatagtcctttgctcctttgcaaccagtaaagactcaattaacatatgttgttgaataaataaatgagactcacttatgaggtagagacaagattttctgaataaggttgaatgtgaacaggattttaaaaggcagaaaggatttggatatgaaaaatgaatgggggggtcatttgtaggggaaaggtatattttcaagggatagaagtacagggtgtgtttaatgaacaatggtacaattagttgagatagaaaagggacatcatgagttgtgggcaatactaaggagcttcaatgggaattttcctggaccagtgacttcaaagctagcctgaggagttt

SEQ ID NO: 239065 - DNA, 545 bp, Homo sapiens
tatttcacatcaagccaataataatttaagaatatattacatgtaagatactgtacaggatctaataagaaagactcaayttctctcttaaaacagtaaaactgatgctatagggaagcagacaattattgttaaaggaatgctatggataaagaagataataaaagtcccaagaagggaatgcatgcatctttagcactgaatatagtcctttgctcctttgcaaccagtaaagactcaattaacatatgttgttgaataaataaatgagactcacttatgaggtagagacaagattttctgaataaggttgaatgtgaacaggattttaaaaggcagaaaggatttggatatgaaaaatgaatgggggggtcatttgtaggggaaaggtatattttcaagggatagaagtacagggtgtgtttaatgaacaatggtacaattagttgagatagaaaagggacatcatgagttgtgggcaatactaaggagcttcaatgggaattttcctggaccagtgacttcaaagctagcctgaggagttt

SEQ ID NO: 239066 - DNA, 545 bp, Homo sapiens
tatttcacatcaagccaataataatttaagaatatattacatgtaagatactgtacaggatctaataagaaagactcaatttctctcttaaaacagtaaaactgatgctatagggaagcagacaattattgttaaaggaatgctatggataaagaagataataaaagtcccaagaagggaatgcatgcatctttagcactgaatatagtcctttgctcctttgcaaccagtaaagactcaattaacatatgttgttgaataaataaatgagactcacttatgaggtagagacaagattttctgaataaggttgaatgtgaacaggattttaaaaggcagaaaggatttggatatgaaaaatgaatggggrggtcatttgtaggggaaaggtatattttcaagggatagaagtacagggtgtgtttaatgaacaatggtacaattagttgagatagaaaagggacatcatgagttgtgggcaatactaaggagcttcaatgggaattttcctggaccagtgacttcaaagctagcctgaggagttt

SEQ ID NO: 239067 - DNA, 602 bp, Homo sapiens
attggctgggtaatgcgatcaaaggcgtatttcaggacagtgaaactactagcacaaacggcatgggttagagtagcgagagatggaagaagtagaaaccagttacaaggctattgctatggtatgttcagttccttttattgaccttaaattccttgaagagaggaaccctattgctgtctttttggctcttaactggacatcacaggtactaaatatatgttcatttattcttgactttgggtattggtggtggaaatggaaagaagggtgtattagttcattctcacgttgctattaagaaatacctgagactgggtaatttataaagaaaagaggtttaattggctcatggttctgcaggctgtacaagaagtatagtggcttctgctactggggaggcctcagrgaactcccaatcatggcagaaggcaaaaggggagtgaggagtcttacatgactgaagcaggagccgggggtgggggaagtgctacacacttttaaacaacaagatctcctaaaaattcactcactattgcaaggacagcatcaagggaatggtgctaaacgattcttgcgaatccgcctccatgatcaaatca

SEQ ID NO: 239068 - DNA, 619 bp, Homo sapiens
cccctccccctgttatagctcttatccctcaccctgttcctactgttttgaaacccgttacaaaaaggggaaagaagtatttccgtcttcaggcctctcagtgtaggtaggctacatttttagcaccagtttcctttatttgctttgttaatgtaatccttctgttgaaaactgttttgtaacttcctggaaaacaaaacaaaacaaaacaacaacacggaattggcgcaggagggctcgttttatcctcccaatttggtgagatctttttgttttctctttactattgcggtttttcctccacagatttcttcacttcttacctagtctattccctctttcctccctcatgataaacagtagactctttcgtccttaaccaactctcttgcagctctttttcattttacttctcagatcttgatcttttctttgtggctgctcccaggccaccctcctccaccatcagtcyctgattttgtgggttttgagagattgacctgggagagcatcacagttgcatgtttgtacacacacgctgactctaactagtggtttttctgtatgtgtgtgtcagatcatctactttgacagtcattacatgtgattctcaggctgc

SEQ ID NO: 239069 - DNA, 557 bp, Homo sapiens
tggttgggctgtgtaaaactttttattaggtgactgtacaatgtttatttcagatagtggcttaaaagccacttttgtatttatccacctgaattatgcgcctgtcagtatactgttaacagatgtcagaatatggtttttttatgtgattgcagagggagacttcaattcagaattttatccttcataacattatagtgattttaaaagttatatgcagcaaatgtgtagtatttttctcatttcaactttcacagcagtaggcaggtggttgtatccctttttttatagattagaaaagtgggactcaggaaaagttagttcacttgttggaaattctgcagcatattaggacttaaattcaggttttctgactaagaatctgatgttcttttttatttacatcatgtatattgcatgctctttatgtcagggcatggtaatcagatgatacatgatagtctgtggcccattcagtgtaggctttgttttcccctgaatttctacttcaaacatgcttatctggccgctgttyatgcaactactttaaaaaagga

SEQ ID NO: 239070 - DNA, 523 bp, Homo sapiens
tatttttgaataccttctgtagaactgtgctgaagacataaagacaaaacacagttctagccttaacaatcctcatgttttgatgcaggggtcaggtgactcccaaagggccagatcataaatattttaggctgtgggctacatggtctctgttgcaactactcaactctgctattgtaatttgaaagtagccatagacagtagattgagcttgactgtgttccagtaaaattttatttacaaaaatcagtggtaggccakatttggcctgcaggctatagtttgtcaatccctggtctagtggcattgtgccaagggatatttgaagccacaggtaaccagtgtgtcttccttgaacgtaattttactcagttattgtggagaaaaagttaagtagtttgatttatattgatttaaaacattcttttaataacataagtggccacccaaggaatagaatataaaatcaagatgactatttaaaatgaaacagccttgcaagaaatgtcttgtttgtagcgaa

SEQ ID NO: 239071 - DNA, 523 bp, Homo sapiens
tatttttgaataccttctgtagaactgtgctgaagacataaagacaaaacacagttctagccttaacaatcctcatgttttgatgcaggggtcaggtgactcccaaagggccagatcataaatattttaggctgtgggctacatggtctctgttgcaactactcaactctgctattgtaatttgaaagtagccatagacagtagattgagcttgactgtgttccagtaaaattttatttacaaaaatcagtggtaggccatatttggcctrcaggctatagtttgtcaatccctggtctagtggcattgtgccaagggatatttgaagccacaggtaaccagtgtgtcttccttgaacgtaattttactcagttattgtggagaaaaagttaagtagtttgatttatattgatttaaaacattcttttaataacataagtggccacccaaggaatagaatataaaatcaagatgactatttaaaatgaaacagccttgcaagaaatgtcttgtttgtagcgaa

SEQ ID NO: 239072 - DNA, 513 bp, Homo sapiens
gttaaatatttttgaataccttctgtagaactgtgctgaagacataaagacaaaacacagttctagccttaacaatcctcatgttttgatgcaggggtcaggtgactcccaaagggccagatcataaatattttaggctgtgggctacatggtctctgttgcaactactcaactctgctattgtaatttgaaagtagccatagacagtagattgagcttgactgtgttccagtaaaattttatttacaaaaatcagtggtaggccatatttggcctgcaggctatagtttgtcaatccctggtctagtggcattgtgccaagggatatttgaagycacaggtaaccagtgtgtcttccttgaacgtaattttactcagttattgtggagaaaaagttaagtagtttgatttatattgatttaaaacattcttttaataacataagtggccacccaaggaatagaatataaaatcaagatgactatttaaaatgaaacagccttgcaagaaatg

SEQ ID NO: 239073 - DNA, 523 bp, Homo sapiens
tatttttgaataccttctgtagaactgtgctgaagacataaagacaaaacacagttctagccttaacaatcctcatgttttgatgcaggggtcaggtgactcccaaagggccagatcataaatattttaggctgtgggctacatggtctctgttgcaactactcaactctgctattgtaatttgaaagtagccatagacagtagattgagcttgactgtgttccagtaaaattttatttacaaaaatcagtggtaggccatatttggcctgcaggctatagtttgtcaatccctggtctagtggcattgtgccaagggatatttgaagccacaggtaaccagtgtgtcttccttgaacgtaattttactcagttattgtggagaaaaagttaagtagtttgatttatattgatttaaaacattcttttaataacataagyggccacccaaggaatagaatataaaatcaagatgactatttaaaatgaaacagccttgcaagaaatgtcttgtttgtagcgaa

SEQ ID NO: 239074 - DNA, 523 bp, Homo sapiens
tatttttgaataccttctgtagaactgtgctgaagacataaagacaaaacacagttctagccttaacaatcctcatgttttgatgcaggggtcaggtgactcccaaagggccagatcataaatattttaggctgtgggctacatggtctctgttgcaactactcaactctgctattgtaatttgaaagtagccatagacagtagattgagcttgactgtgttccagtaaaattttatttacaaaaatcagtggtaggccatatttggcctgcaggctatagtttgtcaatccctggtctagtggcattgtgccaagggatatttgaagccacaggtaaccagtgtgtcttccttgaacgtaattttactcagttattgtggagaaaaagttaagtagtttgatttatattgatttaaaacattcttttaataacataagtggccacccaaggaatagaatataaaatcaagatgactatttaaaatgaaacagccttgcaaraaatgtcttgtttgtagcgaa

SEQ ID NO: 239075 - DNA, 478 bp, Homo sapiens
gaccctataaatgtgataagtgtgggaaggcgtttactcaaagatcagtcctcacggaacatcagagaatccacactggagagaggccctacaagtgtgatgagtgtgggaatgccttccgaggaatcaccagcctcattcagcatcagagaatccacactggggagaagccctaccaatgtgatgagtgtggaaaagccttcagacagaggtcagatcttagtaaacaccagagaatccataatagasgtggtacctatgtatgtaaagagtgtgggaaatcattcaggcagaactcagctcttactcaacatcagactatccacaaaggagaaaaatctgtttctgtgtgatgactacagggaagttatctcacagagttcaggccagtgagaaatactatttagctttacaattattggggcaaaacttcagtcaccattgttataaggaaacctcagatatttaataagaattc

SEQ ID NO: 239076 - DNA, 178 bp, Homo sapiens
tcgaatctcagtttactagctaagtgactttgggcaagggatttaacctctcgtccctcagtttcctcctatgtaaaatgacaaggataatagtaccaacccaatgtagattaaatgagtttacgaagtgttagaatagtgcttggcacattartgctttacaactgctattttgatt

SEQ ID NO: 239077 - DNA, 607 bp, Homo sapiens
tttagtttatggtgagtcattactcagcatcatggagtccacgatgaagagaatctcttttcaatctgtgcaatcaacaagtttttgaaaggcttttgtttatagtggaaccctcttttccccctagaagaaccaccacaaggaaaaatgctgtcaccataaggaatgtgggaaagttttcagccacatggccttatttgacttcaaagaatccacatgagagagagactgcataaatgtaataactgaggaggcctttgttcagcaaagaaaccttatacaaactcgtataaagaatgtaggaagaccttcacccagaagccaggactgactgtgcaccagagaatctgcacaataaacmtgatgaatgtggagatgcttgcttcagcattggagaattcacagtaaagggaaaccctgccagtgtgatgagtacggaaaagtcttcagaggttggaacttgggaaaaatcagtgagtgaattcatattagagaggctcttataaatgagaggattgtggaaacttgtatagacagagatcagacctcaacaagggagcctccacagtattgaaaagttaatataattaatgtaagtgggcaagtt

SEQ ID NO: 239078 - DNA, 555 bp, Homo sapiens
atgtggggataagacactaaatcatgggcgggggcaggctctccagggacccttcccttgctatccacctaaggcaagctaggtagccctttcacagggtggtgggmgagacccctagagaggtcggagctttgcggcgaaaccgaggtccagaggtagagaagggtctctccctgtcaaaagccttatttcctatatacacgtaatttttatttaataagtcaacattatgcaatgtttgtcgcatatgttttctttaaatattgtaaaaaccaccaacctcataacttgtcacctctagtttctaatgcatctctaaaaattggggacatttccctacataaccacaagattattagcacacccaactaagtgtaggcgcttcacctaacacctagttcatgtttaaatccttccaccccctgttgtcccacagatgtcttttatacctgtttgtaccaactaggatccaatcatagaccactcactgcatgtagttgagtcttaacctagggcaattttactctttgcctcccttcctcccatcccattgcc

SEQ ID NO: 239079 - DNA, 555 bp, Homo sapiens
atgtggggataagacactaaatcatgggcgggggcaggctctccagggacccttcccttgctatccacctaaggcaagctaggtagccctttcacagggtggtgggagagacccctagagaggtcggagctttgcggcgaaaccgaggtccagaggtagagaagggtctctccctgtcaaaagccttatttcctatatacacgtaayttttatttaataagtcaacattatgcaatgtttgtcgcatatgttttctttaaatattgtaaaaaccaccaacctcataacttgtcacctctagtttctaatgcatctctaaaaattggggacatttccctacataaccacaagattattagcacacccaactaagtgtaggcgcttcacctaacacctagttcatgtttaaatccttccaccccctgttgtcccacagatgtcttttatacctgtttgtaccaactaggatccaatcatagaccactcactgcatgtagttgagtcttaacctagggcaattttactctttgcctcccttcctcccatcccattgcc

SEQ ID NO: 239080 - DNA, 387 bp, Homo sapiens
ctctgtgagagcagggacccacatctttcttgttcactgcagtatctccaatacctcaaactatgtctcacacaatgtaggtgctcagaaaatagttgatgcatgaattaaactccttgaagcagaggatagagagtgatgttgttatctgctttaaacaatcaatcaagcaaacaaaaagatttcagggactacatataaagaaactagaaaagctgaagtgtcagaaatgtcagtsaagatgatgaaaagaagctatgtttgttataaaggaatttaaaatgtggattaaattaaatgtagggatcatggattcatgacacacacacacacacacacacacacacacgcacagggtggaggcggggaggagtgagaaaggaaagt

SEQ ID NO: 239081 - DNA, 632 bp, Homo sapiens
aagtaaaacattcagtagggtgactcaagagaagtttgaatcaggcagaaagaattttaacttaaagttaagtcagttaaaaaatcctatctaaaacagaaagtaaaaataataaagaagaaggaacatagcctcagagatatatggtacatcatcaagcataccaacatctgcatggtgggagtcccggaagaagagaagaggaagaaataggctgaaagagtgtttacagatataatgrctacaaacttcctaaattcaatgcaaaacataaaccctacattgtgttagtcagggttctcttaggacagaactaataggatatatatatgtgagatatatgtatatatctcaaagatatatatgagtttataagttttattttataagagtttattaagtattaacttacacaagattacaaggtcccacaataggctgtctgcaagctgagcagcaaggagagccagtccaagttttaaagctgaaggacttggagtctgatgttcaagggcaggaagaatccagcattgaagaaagatgtagactgggaggctaggcctgtctctcctttttacatttttctgcctgatttgctggaagctgattatattgtgcccaccagattaagc

SEQ ID NO: 239082 - DNA, 509 bp, Homo sapiens
tggagttaatctatccaaggttctgaacatgggatatgggttctcattgtccttctttcttctccaggaccagtgggaggtagagacatgtgtaaatgagtgtaatttgcagatttacattacaacagatgtgctgcccacaagtgtacaccatggtttttcaggcttggcactatcaacatttgggtcagatgattcttygttggacatggggtgagggaagctctcctgtgcattgtaagatgtttagcagcatctctggcctgtacccactagatgcccatagcatgatgataaaaactgtctccagatgtgaccaaatgtcccccatgtccaagatcacctcctgcccttaagaaccactgccctagatagatgtggggagttggcagaacacttggacttgagaacaaatcatgtcctctaattaagcttcttcaaaaacaaacgatattttggcctccattcttagtcttccttttaacaattacagcatgttcagaacccag

SEQ ID NO: 239083 - DNA, 496 bp, Homo sapiens
ctatgttacataaaattcaaatattatgtaaatgtcaacattgactattactaaacatccaggtctttaacaaattgataggctagaaatgatgtagcattacactatcaatttgcatcttctcaatcattagtgtgagagagtgtatgtagacagttgagaagctgagaccctagagaatctggtcagaacatgttttagtacatttctgaatgtttacacttttgtctttgaattgtttttctcatttacttatttttccattttgtttgccttttatcttgtacaaagaaatacattacaagaatgcaaacacaaatgcgttatatactatatatgttgcaaatcatttaccccaagawatgatttgccttttaatcttgtttatagaatattttagactcagttgaataaacagggagagacgactgtgaaggagtagaaatatctccatttttatgtcagagaaagatctgactttgaattttggaccctc

SEQ ID NO: 239084 - DNA, 618 bp, Homo sapiens
ggaacttgaccctccagtttatctcctagtttctgagttatttgggataatagagatttataagccttgcaagtccatgcagtgacaagagagcaagtctatgctccctccttgccgttttctgaggcagccccaattgtttgagccaaatccatctctgccgagacctctgagtccagttctgcccataagctctttaaacagcttgctcatccggtctataacagtaaaaatccctggtacgacaagccaggaattgcttgaaattccaattaagccaagttttaccaaagccttttccattatctcagtaagctgctttctacattaaaaggctcctcttaattaattctttgtgcaggtctgtggacatgcaatgctttattatgacccgtgaattcaaaagcaaggaaataaagtgtagataagcagtacattgagctcttgctatcaaatcaaagcagcatcatggtgccctgtcgctggtcgtggctaattgcttttcacatcaaaaaagaaagcaaccctcaayggacggctgcagaagacagtaaagggctctttctggtctttggtatgaataatggcatctcctaaggggttgcttgtataactgtg

SEQ ID NO: 239085 - DNA, 583 bp, Homo sapiens
cgaattctctatgtaaaagtcaaggtctcgctgacttagacagtttctctgggcagagaagtcaaggcaggcagtyctgaatttggagttaaacaggatccttgggaaccagggatctggctgcatgtggtactagcagggtgaaaaaatgataatgaggaggagaaaggggagtttcaattcagtctgacaacaggtttagattttaagtatgctgggataaagctttaacaaaattgataccatgcccacaaatgggtgctacgataaaatatgttcaaagtatctatttctttctctggggctcagggcactgagctataagaggctgggtccttacttgtagtgtttcattattcattgtgcagtatgagctggcaactgaatacagggttgagagttgtcagagtcacgtctattctccagagtgtgcagattgacaaccttagttttcatgaagaagacattctgaaggtatttctaattgctttcattgaaagccataaacagaaacgactatagcagataaggtgagatggcttctgggaataatatctgcctcttaagattatgcttgatttat

SEQ ID NO: 239086 - DNA, 583 bp, Homo sapiens
cgaattctctatgtaaaagtcaaggtctcgctgacttagacagtttctctgggcagagaagtcaaggcaggcagttctgaatttggagttaaacaggatccttgggaaccagggatctggctgcatgtggtactagcagggtgaaaaaatgataatgaggaggagaaaggggagtttcaattcagtctgacaacaggtttagattttaagtawgctgggataaagctttaacaaaattgataccatgcccacaaatgggtgctacgataaaatatgttcaaagtatctatttctttctctggggctcagggcactgagctataagaggctgggtccttacttgtagtgtttcattattcattgtgcagtatgagctggcaactgaatacagggttgagagttgtcagagtcacgtctattctccagagtgtgcagattgacaaccttagttttcatgaagaagacattctgaaggtatttctaattgctttcattgaaagccataaacagaaacgactatagcagataaggtgagatggcttctgggaataatatctgcctcttaagattatgcttgatttat

SEQ ID NO: 239087 - DNA, 583 bp, Homo sapiens
cgaattctctatgtaaaagtcaaggtctcgctgacttagacagtttctctgggcagagaagtcaaggcaggcagttctgaatttggagttaaacaggatccttgggaaccagggatctggctgcatgtggtactagcagggtgaaaaaatgataatgaggaggagaaaggggagtttcaattcagtctgacaacaggtttagattttaagtatgctgggataaagctttaacaaaattgataccatgcccacaaatgggtgctacgataaaatatgttcaaagtatctatttctttctctggggctcagggcactgagctataagaggctgggtccttacttgtagtgtttcrttattcattgtgcagtatgagctggcaactgaatacagggttgagagttgtcagagtcacgtctattctccagagtgtgcagattgacaaccttagttttcatgaagaagacattctgaaggtatttctaattgctttcattgaaagccataaacagaaacgactatagcagataaggtgagatggcttctgggaataatatctgcctcttaagattatgcttgatttat

SEQ ID NO: 239088 - DNA, 557 bp, Homo sapiens
ctcgctgacttagacagtttctctgggcagagaagtcaaggcaggcagttctgaatttggagttaaacaggatccttgggaaccagggatctggctgcatgtggtactagcagggtgaaaaaatgataatgaggaggagaaaggggagtttcaattcagtctgacaacaggtttagattttaagtatgctgggataaagctttaacaaaattgataccatgcccacaaatgggtgctacgataaaatatgttcaaagtatctatttctttctctggggctcagggcactgagctataagaggctgggtccttacttgtagtgtttcattattcattgtgcagtatgagctggcaactgaatacagggttgagagttgtcagagtyacgtctattctccagagtgtgcagattgacaaccttagttttcatgaagaagacattctgaaggtatttctaattgctttcattgaaagccataaacagaaacgactatagcagataaggtgagatggcttctgggaataatatctgcctcttaagattatgcttgatttat

SEQ ID NO: 239089 - DNA, 583 bp, Homo sapiens
cgaattctctatgtaaaagtcaaggtctcgctgacttagacagtttctctgggcagagaagtcaaggcaggcagttctgaatttggagttaaacaggatccttgggaaccagggatctggctgcatgtggtactagcagggtgaaaaaatgataatgaggaggagaaaggggagtttcaattcagtctgacaacaggtttagattttaagtatgctgggataaagctttaacaaaattgataccatgcccacaaatgggtgctacgataaaatatgttcaaagtatctatttctttctctggggctcagggcactgagctataagaggctgggtccttacttgtagtgtttcattattcattgtgcagtatgagctggcaactgaatacagggttgagagttgtcagagtcacrtctattctccagagtgtgcagattgacaaccttagttttcatgaagaagacattctgaaggtatttctaattgctttcattgaaagccataaacagaaacgactatagcagataaggtgagatggcttctgggaataatatctgcctcttaagattatgcttgatttat

SEQ ID NO: 239090 - DNA, 611 bp, Homo sapiens
gaaagaaaactccaagaaatgcagacttatgtaaagagaccaaatctatgactcattggcattcctgygagagatagagaaataatgagcaacttggaaaatatatttgaagatatagtacacaaaaaattttctaatctctctagagatgttggcatgcaaatccaacaaatacagaaaatcctagctagatactataccagatgaccatccccaaggcacacagtcatcagattcaccaagatcaattcaaaagaaaaaatcataaagagaactagagaaaagggttaagtcacgtacagagagaacacaatcaggctagcagcagatatctcagcagctctctctgcagaaatcttataagccagaagagattgggagcctattttcagtgtccttaaagaaaagaaattccaaccaagaattttatattttgccaaacttagcttcataagtgaaggagaaataaaatctttttttgacaagcaaatgttgagggagtacatttcaactagaccagccttacaagaggtccttaaggaagtggctaaacatgaaatcaaaagaatgacacctgctatcatgaagtcacacctaagctcatagcccac

SEQ ID NO: 239091 - DNA, 620 bp, Homo sapiens
tgctgggtttatcaggtgtttctgcttttgcttcttcctcatttttcgcttgctcccaccatgtaagaagtgccttttatcttcccctatgattctgaggcctccccagctatatggaactgtaagtccaattaaacctctttttcttcccagtcttcagtatgtctttatcagcagcgtgaaaacggactaatacagcatccaactaggaaaagaaggagtcaaactatctctctttggtgataatgtgattctacacttagaaaattcttaagactctgtcaaaaggctaygggaactgttaaacaattttattatagtaaggttgcaggataaaaaaaatcaatgtacaaaaatcagtaacatttctatacaccaataacattcaggctgagagcaaaatcaagaacacaatcccatttacagtagctacaaacaaaatgaaatatctaggaatacaactaaccatggaggtgaaagatctctacaatgagagttacaaagcactgctaaaagaaatctgagatgacacaaataaataaaataacatccaatgctcattaattggaagaatcaatattaaaatggccctactgccaaagcaatttacagattcaaag

SEQ ID NO: 239092 - DNA, 567 bp, Homo sapiens
ctaaatctctaccagccagtcctctctcagggcttgcacacataygacgtcctctccctggcatgcactttgtcctcctttggagatgaatgtctacctagcgttaggtcccagcttcagtggccccttctcaggcacacctctcgtgtcctagactgaaccttgtctcccacctctatcttttcacagcaccctgagcttttcaccacagaccttatcacaaatgcatttaaatcgttatgtatgtaattttaacttaaaatttatctttttggtattctgctatattctcaacatttagccctgtacctcttcgataactatgaactgggcaaataaattagaaagcaacatttgagatgccagtgctgtttcatcttgaggctagtgctcaggctctgggcctggtcaagctgggtctggaaacacagctttgccatttgattgttttatggccttgagcaagaatcaaaacatctccaagccttagttgtttttctcttctgtaatatggggacaatatattaccctcacataaagttattgtgagatataaattagaatgtg

SEQ ID NO: 239093 - DNA, 444 bp, Homo sapiens
attcctcaagacgttttgagttatctcttcctaaaggctgcgctgccagaggtcagcgtgggtcagtgagggggcacctggggtgagggaagggtgtgtcagcaaaagctaagtgttctccctcactctcacatccagtttcagatgaatctcaaaaagtggttgcttatttcttatttaatcaactacttctgtcttatattctggaactcagttttttttttaagccagamaatcaattcctttccctgactcctccctgtctcttctccttgtttgagcatgttaatctctctctgattactccactgtctccttcatttgactccaaatcaagccacctggtctactgtgatggcctagcctctaattccctgactctggattctccttgctgccctgcccttgtcatgtttacaccagaataatgcatctaacgctcat

SEQ ID NO: 239094 - DNA, 512 bp, Homo sapiens
attaaatgtgcataattcctcaagacgttttgagttatctcttcctaaaggctgcgctgccagaggtcagcgtgggtcagtgagggggcacctggggtgagggaagggtgtgtcagcaaaagctaagtgttctccctcactctcacatccagtttcagatgaatctcaaaaagtggttgcttatttcttatttaatcaactacttctgtcttatattctggaactcagttttttttttaagccagaaaatcaattcctttccctgactcctccctgtctcttctccttgtttgagcatgttaatctctctctgattactccactgtctccttcatttgactccaaatcaagccacctggtctactgtgatggcctagcctctaattccctgactctggattctccttgctgccctgcccttgtcatgkttacaccagaataatgcatctaacgctcatatctgattgcaccgtgcctccactttaagcaactctgatgattttggggaattc

SEQ ID NO: 239095 - DNA, 516 bp, Homo sapiens
gaattcagacctagatgtaaattaaatgtgcataattcctcaagacgttttgagttatctcttcctaaaggctgcgctgccagaggtcagcgtgggtcagtgagggggcacctggggtgagggaagggtgtgtcagcaaaagctaagtgttctccctcactctcacatccagtttcagatgaatctcaaaaagtggttgcttatttcttatttaatcaactacttctgtcttatattctggaactcagttttttttttaagccagaaaatcaattcctttccctgactcctccctgtctcttctccttgtttgagcatgttaatctctctctgattactccactgtctccttcatttgactccaaatcaagccacctggtctactgtgatggcctagcctctaattccctgactctggattctccttgctgccctgcccttgtcatgtttacaccagaataatgcatctaacgctyatatctgattgcaccgtgcctccactttaagcaactctga

SEQ ID NO: 239096 - DNA, 572 bp, Homo sapiens
gctactgcactccaaactgggtacttcttgtattgttgggtgcctactgtgtacaaagcacattatatccaactctgtgtatgttattttcactatatcacttttaagattatgtaactttgatgaaacaccaaaagtgcaagcaatgaaagaaaaaaatagataaattggacttcatcaaaattaaaactttttgagcttmcaaagttactaccaataaagtgcaaagacaaccacagaataggaaaaaatatttacaaatcatatatctgataaaagacttgtatccagaatatataaaagaactcttaccatgcaacaataaaaacccaaatgacccaattaaaaagtgaacaaaggttctcagtagatatttccccaaagaagatacacaaatggtcaataagcacataaaaagatgctcaatatcattagctgtcaggggaaggcaaataatgagacctagaatagccaaaacaatcttgtcaaggaagaaaaaagttggaggactcacacttccaaatttctaaactgtctacaaagctatagtaatagagacagatgtactagaa

SEQ ID NO: 239097 - DNA, 570 bp, Homo sapiens
gtaatgcaatagtagtaggggactctaacaccacacctcactctgagtaaaacagatcatccagacagaaaataataaagaaacattaaactatatactagctcaaataggcctagctgacattcacagagcattttactcaactgctgcagaatagacattctgctcaatagcacatggaacattctccagcatagactatatcttaggccacaaaacaagtcttaacaaattcagaaaagtagacatcataacaagtatctttctcaccactatggaataaaattagaaatcaataacaagaaccttggaaaatacacaaacacatggaaattaaacaacatgctcctgaatarccaatgggtccatgaagaaattaggagaaaaatttaaaatatcttgaaacagatgaaaatggaaatacaacatgcaaaaatctatgggatacagcagaagcagcactaagaggaaagtttatagcaataaatgcctatatcaaaaaagtagaaagatttcaagtaatgcctatatcaaaaaagttgaaagatttcaaataagatctcagcactt

SEQ ID NO: 239098 - DNA, 582 bp, Homo sapiens
aaaagtgtgtggcacccaccccgccccttctttctcttctgctctcaccatgtgatgtgcctggcccgtcactgccttccaccacgattggaagctttccaaggcctccccagaagcagatgccaccatactttctgcacagcctgcagaactgtgagccaattcaacctctcttcttatacattactcagtctcaggtgtttcatttgttttctttttttcttttttgagaaggagtcttgctctgttgcccaagctggaatgcagtggcttgatctcagctcactgcaacctccacctcccgggttcaagtgactttcatgcctcagcctcccaagtagctgggattacaggtatgtgccaccacacacggctagtattggtattttttgtagacacagggtttcaccataytggtcagactggtctcaaactcctggcctcaagtgatcctcttgcctcagccttcagatgtttatggcagtgcaaggatggcttactgcagctgtattaacatgaaagagtggagtcttaaactgcaagtgactaagttactttgacttggtactattacatttatgg

SEQ ID NO: 239099 - DNA, 528 bp, Homo sapiens
acttagatcttgaggaatgaatgtgtgggtcaccctatcagacaaggaaccacaaccaaatgggatgtttgctgagctgaaagagaataccagacaggtgtaagacggcagtgatcaaaaycagatacaaccatgtgaccagctgcataaacagggataaaatattgtgaatttttctttcttttttgatatgcatattttatacatatatatatatcatatttttgttttcttttaaaaatattaaagggaatgtgaatcagttggaaaagaaagaatatcactcaagacaaaaaagagacacttttggagaaggggagagaatgttttcagttgtacacagattagttttatcactgtagatgcaagcataaggttgtccttatttggatattaagtaacatttaaaagggtgtatataggtgccaggctgatacagggtgaactgtgatagctttataatatgttgacatggctaggctggaccacttttcccagaattctgttctctgaatgtttccagctaaa

SEQ ID NO: 239100 - DNA, 514 bp, Homo sapiens
gccctggaccagacggattcacagctaaagtctaccacatgtacaaagaagaactgctaccaatcctactgaaaccattccaaaaaattcaaggaggagggactcctctctaactcattctatgaagccattatcaacttgataccaaaatctgacagagacacaatgaaaaaaaagttcaagccaatatcccygatgaacatagaggcaaaaaaaaaaaaaaatcctcaacaaaatactagcaaacaaatgtaacaacacatcaaaaagataatgcactatgaccaagtgggatttatccccagaatgcaagtataatttgacatatgcaaatcaataaatgtgatatatcaacagaatgaatgacaaaaaccatatgagaatcttaatagatgtggaagaagcatttgataaaattcaacatgctttcatgataaaaaaaaaaaactctaaacaaatgaggcatagaaggaacatatctaaacacaataaagacgatatatgacaaacacac

SEQ ID NO: 239101 - DNA, 646 bp, Homo sapiens
ctatatctcatccaaagggatcatgaccctttcctcagtgtggggcccttattttatcacacatgggaccctaatggaagaactcaaaatgagtttctcacttctcctatgcttctcccgaatgcacctctttttcctaagcttyctgaataaagatgctagtgctcagagctctattctaatccacagtgtcgactgaaatttgtgatagttaattttatgtgtcaacttggctgagccctggtatccagatactaggccaaatattattttgtgcctctgtgaaggtattttttaggtgagattaacatttaaattggtagaatttgagtaaagcaggttattctccataaagtgggttggcttcatctaatcagctgaaggccttaagagaacaaaaactgacctcccatgagcaagaaggaattctaccagcagattgcttttggactcaaactccaattcttccctgggtcttcagcctactttcccaccctgcagatttgccaaccctccacaatcacttgaaccaactccttaaaattaatctctctctctggatcagtcccataacctgtattcagggatctcaatgttatactgctagaaaaatacacataatcacatattttgttgctactacaaa

SEQ ID NO: 239102 - DNA, 646 bp, Homo sapiens
ctatatctcatccaaagggatcatgaccctttcctcagtgtggggcccttattttatcacacatgggaccctaatggaagaactcaaaatgagtttctcacttctcctatgcttctcccgaatgcacctctttttcctaagctttctgaataaagatgctagtgctcagagctctattctaatccacagtgtcgactgaaatttgtgatagttaattttatstgtcaacttggctgagccctggtatccagatactaggccaaatattattttgtgcctctgtgaaggtattttttaggtgagattaacatttaaattggtagaatttgagtaaagcaggttattctccataaagtgggttggcttcatctaatcagctgaaggccttaagagaacaaaaactgacctcccatgagcaagaaggaattctaccagcagattgcttttggactcaaactccaattcttccctgggtcttcagcctactttcccaccctgcagatttgccaaccctccacaatcacttgaaccaactccttaaaattaatctctctctctggatcagtcccataacctgtattcagggatctcaatgttatactgctagaaaaatacacataatcacatattttgttgctactacaaa

SEQ ID NO: 239103 - DNA, 646 bp, Homo sapiens
ctatatctcatccaaagggatcatgaccctttcctcagtgtggggcccttattttatcacacatgggaccctaatggaagaactcaaaatgagtttctcacttctcctatgcttctcccgaatgcacctctttttcctaagctttctgaataaagatgctagtgctcagagctctattctaatccacagtgtcgactgaaatttgtgatagttaattttatgtgtcaacttggctgagccctggtatccagatactaggccaaatattattttgtgcctctgtraaggtattttttaggtgagattaacatttaaattggtagaatttgagtaaagcaggttattctccataaagtgggttggcttcatctaatcagctgaaggccttaagagaacaaaaactgacctcccatgagcaagaaggaattctaccagcagattgcttttggactcaaactccaattcttccctgggtcttcagcctactttcccaccctgcagatttgccaaccctccacaatcacttgaaccaactccttaaaattaatctctctctctggatcagtcccataacctgtattcagggatctcaatgttatactgctagaaaaatacacataatcacatattttgttgctactacaaa

SEQ ID NO: 239104 - DNA, 582 bp, Homo sapiens
ggaatttaagacatttcacattctagctggcccctgcttacttttgagaacctcatctcattttttattactccctggcactgaacttttacatttcagaaacacttaactacttatatttgtctctacacacaccttatgctattytatattttgatcatctactttctccctccatctttttcatttgcataattctcaaaacaaatgccacctcctccagtaaacctgtctcaaaaccccaagtaaagccaagtgtttaccttctgagccccaaagtgcccaagacatatctcaacattatcactgaacacggtaagttaggtatctatcagtgagtgtaaccaacctctccactattcggtaagtactgatagtgcctggcccagtgattagcatactttaaggactcaatacgtatctgctacatttggcagaggcaggtataacccagaatcagacaacttcaacagtcactctccctgccccacctctcttttccaattttttcttctccacagaatctggttgaggagaagtagaagtggtggtggcttctggtaccagggacaagtaaaaagt

SEQ ID NO: 239105 - DNA, 588 bp, Homo sapiens
tggcctaggagtttcttttcaaaatggttgagtccatgagtttaaattatttcctccctgaaaactattggcatgacctaagaaatatacaattatgggatgtttatttttcaaatcagtttttaataaatgcagaatgatatcattagcatccaggtacttttggaaatttctgctagaagtggcatgggcaaggttaagtcaagggaagtatcctatagtttgcaactgaacacaacagaggagaaactctttgtgggagtaaatgagtgatattatcctgcaaatctgaaacctgcaaacccagagcagcaggrgccaggggaaaaaaaaaatctgatagttgactgcagacaaattctaggattaatggaattccaccactgtccccaaactagacagccatattttatgtccattctcagccttcatctggtgataggacatgttattcaaagcaaagatattgtggcaaaaggatgctaccaagggaaattgctccaagtaatatgggactcatctaacatggactgttataacaaatatgagagggaaaaccagctatttggcctactaaccttcactgct

SEQ ID NO: 239106 - DNA, 463 bp, Homo sapiens
gatcaactaatcaacaccacaggtctctacaggtcagactgttctgattgctgctttgactctgctattaccataccatgctcaccttgcctttggctatcaagtgccaccacctggcccttatctctctgggatccaattatacccactgcattcaggtttcccaactcagtggcagcaatttccactgcaatatctgaactacagagaagaacaatcacagtattcttcaaggattctgggactcrcctcacaaatatatttctcacagttatgagaaaagtacatcctctggacctcctggggtgggttggcaggtcttaaatgataaacctaatctaatattccaatctccctaatcctttggatcacagtatatagtatatcgaggcagttctggcattttatcttcatttagactgggccaccttttggtccatttaatacaaccaaccaaataaac

SEQ ID NO: 239107 - DNA, 463 bp, Homo sapiens
ggcacttgagctgggaaatttaatccctaagatcatcctttccttctctacattaggagtaactagccaatctcattgttctcatgagaactcaaaaatgttctaaggtatcaaatacagatgcccagaaccttgcttcttgtaaatgtctgaataggattacctaatggcaatactttgcatatctctactgtcacattacactatgaattattaatactctattcactactgaaaagtcattaatgcctttacrtcttatcagattagggaagtaattcataaaactcatccttaaaattctgttcctctagaattgctctcagtaccaaattctgttactctagattctctagataaatagaatcaataggctgtatatatacagtgagaaagatttattttaaagaactgactcatgattgtggggactggcaagtcaatatctgcagggcaggccagc

SEQ ID NO: 239108 - DNA, 532 bp, Homo sapiens
tgaaggggtggaaataatggaggcatacatgtccctttgggaaactgtgactaatayggtaataagagcacaaagcacatgatctagtccaacaacagactaaaactataaaatatcttgtttcatatataaatgaaattaggaggtagctagtcatactttattagaatatttgtggagaaagcctgaaaatctatacattttcaaagctcttgggtaactcttgtgtagccaacctagcaaccgctgccatggggaacaaggagcctgtgaaggttttaagtagtacaataaaatgatcaagtctttctgaaaatcaattttaaaattaatctggaaaaaattctgtaggaagaatgagaaaaaattcatttatgaatgaataatgatggcagatgagtctcattagatgttaaaagataatatgaagctatgctaattaacagaacaataccaataaaggaataagaaaatcagtagaaaaagtccaagaataaattaaaatatatgtaaggctctagtatatgataaa

SEQ ID NO: 239109 - DNA, 527 bp, Homo sapiens
tttctcacaaatatccctaaccttagtatgagaggaggtctaagcaggctggaaggggagataaaattcccacaagcgtagaagccattttgatcatctttgatgcccaacagaaaaacccttagatcttcccattgtgttccacctttgctagtacaaaagctgggagaatgaagagagaaaaaaatgaaaatgtagaatgactgtaacaaacactggtgttgactccccaacaccgattctacccctctggttagttaaagccatttgtsatcattccatagtaagatccttccagtgaataattcagaaataggtaggagatttgcgccaaccatagaaataggctggtcttgtaaaaaagagaagcaaacctctcttctaccctcatccctctgtacacacataaacaaagaagtataaggacctaattatcatagtctgccctcttatggccataaaaggaaagagtatagcaaatgtgaaaaacataaagaaactatgttcttgatgacattagcaactga

SEQ ID NO: 239110 - DNA, 577 bp, Homo sapiens
gcctcccctgtgtgcctgtgctttagaagggctttctttccttctcctgcctatcttccagcagtagactggtgcttgygtgcctggggagggagggccaagtcattctttgttgtcctattccattctcagccttgggcaggtcctctgtccctggtcctcagtgacaggcttggttagtgatactaccccttctcatggcatccagactctgcctgacacctttggcaagtctacagtggagaaggtttcctccccttcacttagtgtagtggtaggagttttgtaataataatggcattaaatcctgggcttaggactgttttctgcaccttctccaggaatagatggattttgtttgctctgtttccaactgcagtgggtatacacttatacaaagcagggattgctgctcctcctcctgcagtgtaaggcttttgttctgggagaaataggtctaagtggggctttacgcattttcgaccatgacagtggctcccctcctccaagcctacccttctgagggaatggttcttcccgtttcctgctctgctctcagtctttcttatgagcacct

SEQ ID NO: 239111 - DNA, 623 bp, Homo sapiens
tgccagcccctccactgaccactggccacctgcagaagcccacctggctacactggccctttcctggcactttccaagccagcgaaggtgayctccctctggcaaacagaaatctgcgcttgtgggagacagagcagtaggcatttatctccacatagctatcttgagcacctggtatgcaccattttgttagcatggaactctctccctatccctatctcagcagcttccttggagccagcagcaggcctgaggaggaggagaggggagtggccatccagctgtcaagagagaatccacaggccccataggagggacctggctgcccatcatagacactcagtctctcgctctgtggctgtcaagctcccaatatttctgtctctctcttcttttctgtctttatctgtatctttctctgtgtcttcttctctctctgtctctgtctccctctctgtttatccttctctatatctctgtctctgtctgtctctgtctctctctccctctttccctcctctccctctctttttctctctccttcctccccctttccttgcatttccctggggatgatggagttttcctccacgtcaccatgtggctagacaaatcagccctgg

SEQ ID NO: 239112 - DNA, 397 bp, Homo sapiens
caagggagggcaaaaactaaacccagttggatgtccctacattattaaataaccacaacaatctgaagggaaggccaagactaaatccaggtggatgtccctaccttatcaaatacccccaacagtcccaaagaagggccaaaattaaacccagctggatgttcctacttcatcatatacccaaaacaatcccaacagagkgccaagactaaacctagctggatgtccctacattatcaaatacccataacaatcctaagggagggccaagagtaaacccagctggatgtccctacattatcaaatacccataacaatcccgagggaaggccaagactaaatccagttggacattccgcacacaactggggatttttcattccaagtcaaactcatc

SEQ ID NO: 239113 - DNA, 628 bp, Homo sapiens
cagagctccaccaccaatgtgaaccccagctccaaaagtaagtccccaaaaggccttagtcaagttaccattccctccccatcttgcaatagtttactgtatttatcaaaggaggtaccccatatgtaaaacactaaagcactagacacatatcagctattactaaggtagaaagaaatgcccttcttccccccagagacttctctcttgttgctaatatattcaggaaaatttttccaaagagtgggaaaatgcacctatgctggttaagaggatgactaacatgtaggctattttcatcaaagtaataaatagagaatcacaaaataaaaacgttacatcctctccagtccctttcagttttttgttaaccaccaggaggtggttaggtgctacaaggtctttaacaagccagagaaagcaggcttcaggctcaaatcccaggcggactgttagtctcaactggctasagtgtcaaggaattgctttgctttcaccggacttgtttttatagtagccttctaattttagtaagtgatattagttttccaatcatcattatgctattgaagtttccatttacaatacagatattactttagaaaaattaaaaatcagaagcaaaaga

SEQ ID NO: 239114 - DNA, 585 bp, Homo sapiens
aggcacaaaggttactagcttattttcttttctgtcatggtcttcttttctctttcttctttgttttgtactgtttgtttgtttgttttgtttttgaagtaagagctcctcttaataccgattactattttaagggattactaaactcttacaacctaattgggcatakgcctttaaggtcaaactcaatctcctttgcccacatcagaaggctacatgatattttagggatatgttagcctagctcaaatgcttttcattgtcagttacaaccaagagttgaaattttagaagggatagtctcttaagagagtttatcagtcttgaaagttttcttgtgaaactacccagcagatgtttccgatgccatgaggaaataggctttaagaaagagctggtgatgaatagtgcaagagcagcagagcaggttgagaaagaggagcccaccagagttacagaaaaagagctttgcaaaacaggaataagacactcaggtgtctaccagctgctctcaaaaacccgcctcacattaaaaatcaaggtcatggacaaattggcacaagatggaccaagtggtcatggtgg

SEQ ID NO: 239115 - DNA, 548 bp, Homo sapiens
gaaacagcctgtgcaaaggccaagaggcagaagtgggtctgttacattagtgggaagataagatcagcagagatggaaaagcaaagaatcacagggagaatggcaggatacgaggctggagataaaaacagagcttgaaccagaagatccacaggcttcctagcatcattcccctaaggcaaatcctctttgtttctggagagaaatgcggagtcctgacttctggacrtgggttgtggcatgcagagcaggccacaagaaagtcatcacttttgccaggcacataaagattatgaaatcctaaaactacttccatgatcaccctcacctggtctttatagagcccttgatttgatgctctgttttgctgcaaaggctagagctgaaaggggccctggagatcatagagcctagtggtatctcactgtacttcacaaagctcaagaaccacttcagaaaggggaagagaaggcctacaaggaagggctttgggccccttcacccttccctcagccagagaagttcagctttgctctagtttttacagc

SEQ ID NO: 239116 - DNA, 548 bp, Homo sapiens
gaaacagcctgtgcaaaggccaagaggcagaagtgggtctgttacattagtgggaagataagatcagcagagatggaaaagcaaagaatcacagggagaatggcaggatacgaggctggagataaaaacagagcttgaaccagaagatccacaggcttcctagcatcattcccctaaggcaaatcctctttgtttctggagagaaatgcggagtcctgacttctggacgtgggttgtggcatgcagagcaggccacaagaaagtcatcacttttgccaggcacataaagattatgaaatcctaaaactacttccatgatcaccctcacctggtctttatagagcccttgatttgatgctctgttttgctgcaaaggctagagctgaaaggggccctggagatcatagagcctagtggtatctcactgtacttcacaaagctcaagaaccacttcagaaaggggaagagaaggcctacaaggaagggctttgggcccsttcacccttccctcagccagagaagttcagctttgctctagtttttacagc

SEQ ID NO: 239117 - DNA, 628 bp, Homo sapiens
gggctaatgagactctcccaagaattctgaattccggtgaggtcatgggagtgaggaaaggatgacagacacttggatctccttcatcctagtgggagtgctctgatgagactgtgtgctggttattgctcccaagatccccagagcaagctccttcagcaattctatccttccatgagccatcccaaatagaaatatttggatatttcttaaataaacagagttggcttctattggttgcagaccaactgatagaccctgtaatctatggatggcttggttagggtgctcasagagttgggagtgtagccaagattagaagtcagagctcttcaaccacagcctgtgacggcttgggctggtgactatttgcaacctcatgttagctgggtccttaatccctagaattctgccttgtattcccagcctctttccccagagtctcatgaagagtaaaattatatcctttctatatcctccaacagaattcacaggctatcttgcccttggggtccttctttataaatatgacatcagtcactcctcattgaccataaaataatttattcaatgtgcaaagaaacaagtacagatattatgccaggatctggatctcaagccaaacaga

SEQ ID NO: 239118 - DNA, 628 bp, Homo sapiens
gggctaatgagactctcccaagaattctgaattccggtgaggtcatgggagtgaggaaaggatgacagacacttggatctccttcatcctagtgggagtgctctgatgagactgtgtgctggttattgctcccaagatccccagagcaagctccttcagcaattctatccttccatgagccatcccaaatagaaatatttggatatttcttaaataaacagagttggcttctattggttgcagaccaactgatagaccctgtaatctatggatggcttggttagggtgctcacagagttgggagtgtagccaagattagaagtcagagctcttcaaccacagcctgtgacggcttgggctggtgactatttgcaacctyatgttagctgggtccttaatccctagaattctgccttgtattcccagcctctttccccagagtctcatgaagagtaaaattatatcctttctatatcctccaacagaattcacaggctatcttgcccttggggtccttctttataaatatgacatcagtcactcctcattgaccataaaataatttattcaatgtgcaaagaaacaagtacagatattatgccaggatctggatctcaagccaaacaga

SEQ ID NO: 239119 - DNA, 595 bp, Homo sapiens
tgctaatgaacattctgtggtcagaaacccctagagaagacacagctcatgactatttataaggattttttcctccctccaaaaaaattaccatctgctttgattcagcaaaaggaggtaaaagcaaaattgagtaagcactcattgtccacctttagaaccaaaccagaaagcaataagggtatacaacggtctgcaaggaagtgggtccattcttcgaatgtctgccaaacggaggtccagtctgtgcttgaatacctacaaggtggattgtattaccgttaggggtcagcatactgggttgttggacagctccaggggacacagcctcctgtagggctcagctctatcctctcagatctttcaagacattcgttagaatcagacaccctccccttctccaacagaaaacatactcttaatttgtgtagacttttctttagggacagggtctccccctgccacacaggctggagtgctgtggtatgggcacagctcactgaagcctcaaaytcctgggcataagtgatcctcctgcttcagcctcccaagtagccaccacactcagctcattgttgacatttaaaggaagctt

SEQ ID NO: 239120 - DNA, 478 bp, Homo sapiens
caacttttctgtaactctaaaattgttctaaagagaatgattgaatatcaaagaattaagagacgactttagagtggttcataagacccctagatatttttgtaaaacttggcttccttcatgatattgcagtgtgtatccaatgtgaaatgaagaatgagtatgttctagtttgatgaaaaaaaaaacgccagacgtttttaggccctgacttgattcattttctgttatctccaagaattagtgcctatttgccatcagaacctaaattttgttaaatgtaagataacaaattaactttcataatttttagcttcatttttcaaggsaaagtcaccatcccaattaagtgaatgcacttaaagtcatcttttcctgatctcaatgacatgtgaataactggctatgtagactcccgccatccccatcccattgtgtataaactcgctcaccatccccagctttctaagtagaattc

SEQ ID NO: 239121 - DNA, 478 bp, Homo sapiens
caacttttctgtaactctaaaattgttctaaagagaatgattgaatatcaaagaattaagagacgactttagagtggttcataagacccctagatatttttgtaaaacttggcttccttcatgatattgcagtgtgtatccaatgtgaaatgaagaatgagtatgttctagtttgatgaaaaaaaaaacgccagacgtttttaggccctgacttgattcattttctgttatctccaagaattagtgcctatttgccatcagaacctaaattttgttaaatgtaagataacaaattaactttcataatttttagcttcatttttcaagggaaagtcaccatcccaattaagtgaatgcacttaaagtcatcttttcctgatctcaatgacatgtgaataactggctatgtagactcccgccatccccatcccattgtgtataaactcgctcmccatccccagctttctaagtagaattc

SEQ ID NO: 239122 - DNA, 613 bp, Homo sapiens
gagctactcctctgtggctggtgcatttgttattccaggccctggggacccatttggtaaatgagttcttttggctcataaaatggtaccccagtgatttgaaacacttaacacacctaccctaaatgggtaatttatttttttgctcactggtagtgttattattcctrtgatctctattctataaaagttgttcttgatgctttcttggagggtagggggctatttttaaacagaggtgcattcgatttggcgaggagctgagtttcataagatgaaactcaagcatcctaggacgcctttatcgccctactttgctctttcacatttatttatttaacctaaaatgtatcttcaagaagacagttttccactcagttatactcatgtccccattcttttgccagatccttatggacttctgcttccttgagttcatttctttctactcccaggatgctttacttccccgaataagtcctcttctcttacgaaaagtactttctcccccaaatatgtcacaaagaacagcgtgagcccccattcaaggccacagaggaaacattatattaggtaccacaagaccagaggaatgaagactctaacatccctt

SEQ ID NO: 239123 - DNA, 566 bp, Homo sapiens
ttactaaatgtgagcagaccagtagcatggtaaaaacagtgtttcaagaggaattcaaagtactttacaatcccacaatgctcctatcaaatctctcgggtggcatataaacctagcttccccactgataaacaaaaatattctgcaaagaacataatacattttaacaagatgctgtgatggaatggaacattttatttccatttgtcttttttttttttttttttttttttgagacggtgtttcgcccttttccccaggctggagtgcagtggcacaatcgcggctcactgcaacctccgcctcccaaattcaagcaattctcctgcctcagcctcctgagtagctgggattacaggtgcacatcatcacccccggctaatttctgtatttttagtagagatggggtttcaccatgttggccaggtggtctcaaattcccaacctcaagcgatccacccatctcagcctaccaaagtgctgggattacaggcgtaagccaccctgcccagcggtcrtttatcttttttctagtggtggtcagggcaaaggaatgccttcctgct

SEQ ID NO: 239124 - DNA, 583 bp, Homo sapiens
ccccttgctctagccctgaccctgagttacagagcctctatttggtgtccatcctgggtcaaggtcaaggtgggtaatgaggagtgtaagtacccaacccctgtctttagggaattcacaaggtcttagggaaataaaacgtctgtaaactcagtacctagggcagtagaaaagcaagcactggcttgcgggaagcacacgtagtagctttaagagcagacatggtcatgtcagagtgcctgggcctgaatcctgcccctgcagcttactagctgaggaagcttgggcaagttacctaacttccccrggcctcagtttcctcaactttaaaaagggactaacaacagtacctagttcccagagtgggtatgcaatgatccaggcaaaacacttataacttgccccaggacaccttcaccaagtgttagcaactgttgttaacacagtcatgattattatatgaaaaccatgagcacccagaatatttggagacagaagagctggagagggctggggcagcctgttggtgctgcaccaggaggcaagacttaaggtacagccggactggagcaggtgagaagag

SEQ ID NO: 239125 - DNA, 599 bp, Homo sapiens
tagaaacactggtcttgcccacatggatcattcatccatccattcattcagtccacagatctttactgagcacctcctatgtgccaggtactgttctcagtgctggggatacagcagcaaacaaaaatgtgttgtagaaattatcaggtatgggcaggcgccgtggctcatgcctgtgatcccaaaacttttgggaggctgaggcgggcagatcacaaggtcaggagatcgagaccatcctggctaacacggtgaaaccctgtctctactaaaaatacaaaaaaagtggcctggcgtggttgtgggcacctgtagtcccagctactcaggaggctgaggcaggagaatggcgtraacccgggaggcggagcttgcagtgagctgagatcgcgccactgcactccagcctgggcgacagagcgagacaccatatcaaaaaaaaaaaaaattatcaggtatgatgctagattctcacaataagcaaacaaacaaagaaatatataaggtaagggagacaaatgctttaaagaatagggagtgacgggggtgctagtttagttagggtggtcagggaagtcttcttcaccgaggtgacatgt

SEQ ID NO: 239126 - DNA, 550 bp, Homo sapiens
gaattcgtacagcatccaagttcactgcagtgcccaccttggtcgctcacaggagatagatgtccccatttattgcctcctgtttgtaatttgcagtcagcttttatgagtcctaagtggtcttcctyttctcacttgctaccattcctttctcagttcgggatttcctcctcttcctgctcacaaaggtgtaaacagtttctcaagttcagacattctttgacccccttctcagtgttgccttactcagatatcatgtcatcacttctgttgtgtctgcgtaccacgtgttccattgttttctccactttatttttgaacacattaataaatttagtaatggagaaaacttctgatcactgctgtacatagaaaatcagaatcatatgccatcaatataaataaataccgtgaaacccaatcagtgttaattaaattctggctagatcctgcagcttaggcaaagaccatgaatatgaggctctttgttaaaaagggaaaatgttaaaaaataaacatcgttgaagagtagcaccaagggagatgactc

SEQ ID NO: 239127 - DNA, 580 bp, Homo sapiens
caaaatggctgggccagcgccagcccctgagtgagactgtgccatccatttctcagaagctcctttcttgttcttcagctcctctggggmttggaactgtatctcaccactcggctgtagatttattagtccccaggaaggattcatcatatcccagagcctgaagccactgttttggtttaatgtatgttgggtttgcacctctgctcttgagagcaggcagttcgaggtttgtcttctgcctccagtcccagaggctggcatgatgcccacatacagcaggtgctcaacaagtgctctggtttgctggagattttcaggatagtagaggcctgttagtccattgagggtggcagcgatggagggaagagccacacaacaggacttttgcacctttatccctcttcatcctcccggcagccctgcgtggtaggcataagcagctctgtttcacaaaagacgaaactggggcaccaaagaactcacctgaacctttacaatcttagatctcacaacagtggtccaagacgggggactctcctttctggaatcacttgtgagggaaactccagattcaacc

SEQ ID NO: 239128 - DNA, 580 bp, Homo sapiens
caaaatggctgggccagcgccagcccctgagtgagactgtgccatccatttctcagaagctcctttcttgttcttcagctcctctggggattggaactgtatctcaccactmggctgtagatttattagtccccaggaaggattcatcatatcccagagcctgaagccactgttttggtttaatgtatgttgggtttgcacctctgctcttgagagcaggcagttcgaggtttgtcttctgcctccagtcccagaggctggcatgatgcccacatacagcaggtgctcaacaagtgctctggtttgctggagattttcaggatagtagaggcctgttagtccattgagggtggcagcgatggagggaagagccacacaacaggacttttgcacctttatccctcttcatcctcccggcagccctgcgtggtaggcataagcagctctgtttcacaaaagacgaaactggggcaccaaagaactcacctgaacctttacaatcttagatctcacaacagtggtccaagacgggggactctcctttctggaatcacttgtgagggaaactccagattcaacc

SEQ ID NO: 239129 - DNA, 541 bp, Homo sapiens
ctcttttctcctggaggccaggctcctggggtccctctgtgctcagggagccctgcttagatgctgacataatggcacatcctaacatgcgcttctagtgcccagtgggtacctgctttggcaaaacagccccactggattttttttcccctactgaaattgaccagtaacataactgaactgagcaaactgaattgagggtaagttacttctgggttaggtagctgcaaattcttcttctcaaaaaaggacagggcatttttgtttatagcaacaagctggggctttacaacctgacgccaacccagacactccactctcctcctgcctcctccctggaaggcttcctgctaccagstggcagtgcggagtgccacccctgctattccctgccccagcactattgcccacactagccccaccatctggaatcccttcatttcttccacagacctggaccctacacacccacccactttgtgaatgtgtaatggttagcacgttttctttcctccacctggagtgttcctgccatcattaa

SEQ ID NO: 239130 - DNA, 501 bp, Homo sapiens
gtttctgtaatccagtcagttaataaacagtgaatgctttcaaattgaaaaaaaaaataatgtatcaaaaagagcagcaagatacatagtggacagagcaggaaaagtctatgtataatgtatatccaaaaagatagaagaaaaagaagaggagagaagcagatttggagaaaacaatggttaagaattgtcaaaattaaaagaagataaaaagccacagattaaagaatccctacacaattcaagcaggataaatacataatacccacacctagacacaaccaagtaaaatgttaaaatactaaaggcaaataaaaaaatctttaaaattaataaaaatttttacctygagcttactaatgaattcccattgcagctgaggaaagagaacagaggctatcataaaactctacccagatttttctttcctatctcactaaagaaacaaaatttttaatcttaaggaagaaggttcccaaaaccatggcctatggacactgg

SEQ ID NO: 239131 - DNA, 513 bp, Homo sapiens
ttatattcacaatgtgcataaccgtcatcactacccacatcctagtttatgtgtgcttttgtcttgatagtatattggattgcgtcaaatgccttttgtgcaccaaggagaagatcatgtgtttttttttttcttttgttctactaatgtagtatattacattgattgatttacttatgttgaactacccttgtatacctgggttaaatcccatttggtaatggtgtataatcctttaaatatgctgttggcaatccatttgttcagtattttcttgcacaatttttgcatttaacttcatcaagcaaatatttgtctgtaaatttattttgttctgatatctttttctggctttggaatccaaggcaaggctaacctcatataatgagttaggaagtggtttctgctctatattttgcaagagtttgagaagaatttgtgttatttgttttttaaatttttcataggtttttaattactgattcaatatatrtattgttaaagacctgttga

SEQ ID NO: 239132 - DNA, 528 bp, Homo sapiens
aatactatataattctgcttatatgaagtacctagagtagtcaaagtcatagagacaggaaataatggtggttgtgccaggggctagggagggaagaatgggaaattaatgggtatagggtttaggaactttagtctaagaaaggagaatattggatgccagaaattcagttttctttctgttccaagatccctttagctagagcgacatattgaagtcagagttcctaagggaaaatcattgtgtatggagatcatccttgtggatcaaatgtgaatcaatagtagatcaaaagatattccacttttgcagatattgacatttgttggacccgtaagattttatctagtattagatagataagatgtgaaccacttctcaacrctgcagactcaaatactaggaaatactaagaacctcaggacaaacaaatagccagtccaaaaagactcacagactagataagctgtcatctaccacctaacagataatgtatccctgttaaccactatctccagatgttcattt

SEQ ID NO: 239133 - DNA, 605 bp, Homo sapiens
cttttccactacatcacagatttaggagcagttagagggaaggcttcaatctggagaacactaacaggttttagagattattgggtcatggtggctgggacagaaataaggattcacagaaagatgtttatagtcaatgttcttttacagtaaatgttcttttgggattttccttgataaaaaggctgagcaaaagtgaaaaaaaattttctttctttcttactttctttctttgtctttttctttctttctttgttttttttttttgagacagttttgctcttgttgcccaggctggagtgcaatggtacaatcttggctcaccacaacctccacccccagggttcaagcaattctcctgcctcatcctcccaagtagctgtgattacaggcaggtaccaccacgcacagctaatttaaaaaaaaaawtttttttttttatttttagtagagacagggttcctccatgttggtccggctggtctcaaactcccgacctcaggtgatcctcccaaggtgctgggattacaggtgcgagccaccacgcctggccaaaattaaaaattttctaattgcaattctgaacaacttatgggttgtgaaat

SEQ ID NO: 239134 - DNA, 517 bp, Homo sapiens
gaattctagaaagaatatgaaaagtgattacctgagtgctctaaagagaaaacaatagaatgcagattaaggaccatagtcaaaactaaaataaaatctataatggagataagtttgcattttttctccccactttggggcacttgggaggagctaagggtcttcagagcctgtagccaacttacctgtggcaagttttctgacaaggatctctgtcagctggcttccttgtaccatttgctcacagaatctctgtctctggtagtaggcaatgtcagtgttcctgagaaggccctcaaaagacttgactgtgttcttcacatgctgggtgaaaaggtagcagacacctctcccttcctgtatcttctgtygtaagtgggtcagttcttcagcctgagcctgaattaagggatcatgtatcctaaggtgggaaagaagagtaaaatgtatgagggaatgtagtgaataataggttatagaagtttcagaggagagatctcttagaatccctgtaagg

SEQ ID NO: 239135 - DNA, 581 bp, Homo sapiens
ctcttctcacagctttactaggaagtgtcccagtggggactctgtgtcggggctccaaccccacatatcccttctgcactgccctagcagaggttctccatgagggctctgcccttgcagcacacctctgcctgggcatccaggcatttccayacatcccctgaaatctaggttcccaaacctcagttcttgtcctctgcacacctgcaggaccaacaccatgtgaaagctgccaaggcttggggctcgcacccgctgaagtcatgactcaaggtgtaccttggccccttgtagccatggttggagtggctgggacacagtgcaccaagttcctaggctgtacacagcagggaggtctctgacatgccctgaagaccttttccccactgtcttggcgattaacatttggttcctcattacttatgcaaatttctgcagccagcttgaatttctccctagaaaacaggtttttcttttctaccacataggctgcaaattttccaaatttttatgctctgtcacctcttgaacgctttgctgcttagaaatttcgtctaccagatactctaaatcatctctct

SEQ ID NO: 239136 - DNA, 584 bp, Homo sapiens
ccctcttctcacagctttactaggaagtgtcccagtggggactctgtgtcggggctccaaccccacatatcccttctgcactgccctagcagaggttctccatgagggctctgcccttgcagcacacctctgcctgggcatccaggcatttccatacatcccctgaaatctaggttcccaaacctcagttcttgtcctctgcacacctgcaggaccaacaccatgtgaaagctgccaaggcttggggctcgcacccrctgaagtcatgactcaaggtgtaccttggccccttgtagccatggttggagtggctgggacacagtgcaccaagttcctaggctgtacacagcagggaggtctctgacatgccctgaagaccttttccccactgtcttggcgattaacatttggttcctcattacttatgcaaatttctgcagccagcttgaatttctccctagaaaacaggtttttcttttctaccacataggctgcaaattttccaaatttttatgctctgtcacctcttgaacgctttgctgcttagaaatttcgtctaccagatactctaaatcatctctctc

SEQ ID NO: 239137 - DNA, 605 bp, Homo sapiens
cacaaaaacctgcacatgatgtttatagcagctctattcataactgcaaaaacttggaagcaaccaagatgtccttcagtaggtgaatggataaattttgatacatgcagtcaatggaatattatttggtactaaaaagaaatgagttatgaagccatgaaaagacatgaaagaaccttaagtgtgtaagtgaaagaagccaacctaaaaaagctacatactgtatgactctgactatatgacactatggaataggtaaaacagtggagagagtaaaaagatcagtggttgccaggtgttaggaggaaaaggagaatgaataggcagagcacagagaatttttagggcagggaatagtcattctttattacaatggtggatacatgccattatacatttatacttgtgtcaaaacctatagaatatacaccaccaagaatgaaccccactgtaaaytgtggactttgggtgatgatgagtcaatgtgggttcatcagttgtaccaaatgttatcactcgggggcaagatgttgatagtgagggaggctgtgtccttgcaggggtagggggcatatgggaactctctgttactttccactcaattt

SEQ ID NO: 239138 - DNA, 531 bp, Homo sapiens
gaaaatgggaacgaataaaattgcttgctgtccttctccctttattctccacttcttgttttttctaaatgtggggtyaaaacttccatgagggtaagaagttcagttttctgcctttccccttcatctccctatcacacatgtatactactccttaacacttaaagaagataaaaaaagaataaattgtggagagggagcatatgtgaaagtaaaagattcccagacataatatgggagttaatggagaaagaaaatctctaaggaagactagaaataattgggttagggattctcgagaagtaaattaaattccccaaatatggtattctctgagaagataattttgaagaagcaatggcgtgatatccagtgaaacagcagtcctctggagcctggctgtgacttcaaggcccagttcttctggaagggcagaaaaatacttcgaagaggagaaatgagcatttatataggtttataagtaccatctttattttagaaaataatcattttctacctggaattctagtt

SEQ ID NO: 239139 - DNA, 602 bp, Homo sapiens
taaaccgactttaaaaaaaaaaaaagaggaacttgctctgtcaccaggccagagtgcaaaggtgcaatcatagctcactgcagcctcgacctccyaggctcaagcaatcctcctgcttcagcctcctaagtagctgggactacaggtgcatgtaaccatgcctggctaatatttttactttttgtagagacaagggtcttgctttgttgcccaggctgatcttgaactcttggcttcaagtgatcctcctgcctcagcttcccaaagtgccaggattacatgtgtgacccaccatgtaagcccacatttttctaacttctacagtaatatctatatcctatttatttataacataaatcttacttagcttgttttacttctcttcactcttgctttccctaccacccttctacatcacctggaatttgaattccaggttttctttttaattttctagaatctaatttcactttgtttagcaatatcttttaccaaatacatgaccacctttgcttccattatctcacatcttcccttatgatctttttaaaattattgctggaatagaattctgaaaagtcacccacacttaaatgatagtt

SEQ ID NO: 239140 - DNA, 602 bp, Homo sapiens
taaaccgactttaaaaaaaaaaaaagaggaacttgctctgtcaccaggccagagtgcaaaggtgcaatcatagctcactgcagcctcgacctcctaggctcaagcaatcctcctgcttcagcctcctaagtarctgggactacaggtgcatgtaaccatgcctggctaatatttttactttttgtagagacaagggtcttgctttgttgcccaggctgatcttgaactcttggcttcaagtgatcctcctgcctcagcttcccaaagtgccaggattacatgtgtgacccaccatgtaagcccacatttttctaacttctacagtaatatctatatcctatttatttataacataaatcttacttagcttgttttacttctcttcactcttgctttccctaccacccttctacatcacctggaatttgaattccaggttttctttttaattttctagaatctaatttcactttgtttagcaatatcttttaccaaatacatgaccacctttgcttccattatctcacatcttcccttatgatctttttaaaattattgctggaatagaattctgaaaagtcacccacacttaaatgatagtt

SEQ ID NO: 239141 - DNA, 602 bp, Homo sapiens
taaaccgactttaaaaaaaaaaaaagaggaacttgctctgtcaccaggccagagtgcaaaggtgcaatcatagctcactgcagcctcgacctcctaggctcaagcaatcctcctgcttcagcctcctaagtagctgggactacaggtgcatgtaaccatgcctggctaatatttttactttttgtagagacaagggtcttgctttgttgcccaggctgatctygaactcttggcttcaagtgatcctcctgcctcagcttcccaaagtgccaggattacatgtgtgacccaccatgtaagcccacatttttctaacttctacagtaatatctatatcctatttatttataacataaatcttacttagcttgttttacttctcttcactcttgctttccctaccacccttctacatcacctggaatttgaattccaggttttctttttaattttctagaatctaatttcactttgtttagcaatatcttttaccaaatacatgaccacctttgcttccattatctcacatcttcccttatgatctttttaaaattattgctggaatagaattctgaaaagtcacccacacttaaatgatagtt

SEQ ID NO: 239142 - DNA, 602 bp, Homo sapiens
taaaccgactttaaaaaaaaaaaaagaggaacttgctctgtcaccaggccagagtgcaaaggtgcaatcatagctcactgcagcctcgacctcctaggctcaagcaatcctcctgcttcagcctcctaagtagctgggactacaggtgcatgtaaccatgcctggctaatatttttactttttgtagagacaagggtcttgctttgttgcccaggctgatcttgaactcttggcttcaagtgatcctcctgcctcagcttcccaaagtgccaggattacatgtgtgacccaccatgtaagcccacatttttctaacttctacagtaatatctatatcctatttatttataacataaatcttacttagcttgttttacttctcttcactcttgctttccctaccacccttctacatcacctggaatttgaattccaggttttctttttaattttctagaatctaawttcactttgtttagcaatatcttttaccaaatacatgaccacctttgcttccattatctcacatcttcccttatgatctttttaaaattattgctggaatagaattctgaaaagtcacccacacttaaatgatagtt

SEQ ID NO: 239143 - DNA, 508 bp, Homo sapiens
caggagattcctacatgctcctggggatccagaagagagaccactcacatgactggaagatttccagctcaggtaaccacaaaggccatatatttggtgaatacakgcaatgttagttagaataaaaccaaatttctctgaataatataaagtcattactaataaaacttttatagatttttctctgaagaaatttccaggaaggtgttaagagaaagccctacaattaaggtatggaggctggctgcaggccctgaaagctgctctgatgagcaatgacttaatgctgatagtgggaagtctcttgcccactgcaggatacagagaattcttcctcaacccgaggcttctgctcattcactcccttctcagcaggtcccttcttctctgagggctgatgcatcccagccttctgctgggacattttctcatgaagagctctcttacagccgtctttgaaaggaaggacagagaagaaagatgtctatgtcttcacaatggccaggct

SEQ ID NO: 239144 - DNA, 508 bp, Homo sapiens
caggagattcctacatgctcctggggatccagaagagagaccactcacatgactggaagatttccagctcaggtaaccacaaaggccatatatttggtgaatacaggcaatgttagttagaataaaaccaaatttctctgaataatataaagtcattactaataaaacttttatagatttttctctgaagaaatttccargaaggtgttaagagaaagccctacaattaaggtatggaggctggctgcaggccctgaaagctgctctgatgagcaatgacttaatgctgatagtgggaagtctcttgcccactgcaggatacagagaattcttcctcaacccgaggcttctgctcattcactcccttctcagcaggtcccttcttctctgagggctgatgcatcccagccttctgctgggacattttctcatgaagagctctcttacagccgtctttgaaaggaaggacagagaagaaagatgtctatgtcttcacaatggccaggct

SEQ ID NO: 239145 - DNA, 557 bp, Homo sapiens
gctttctgtagctggccctgtgggtcctagcttttcaaagacttcaaacagaattcctttaaaccagattttatctacttcttttcgaagggagtgctggtttgccacaaaactccatcgtaactgaaagaggaaatcttctacaaattccaggtaaatcaaattttcctaccttgatttctgaagaaaacaaaaaaaagagaagaggccattggtagtatatacttgcatttttcttgtaatacttgcrtaagtctgaatgggtattaaaggctcttgctagaatcatgtgccaaagattgtctaccatgacctaaacaatcaggcctgtccaaggtccaagaatttgatcaggttggatccagtcctctggtgcactaacagagatcctgttggaggatagaatcctgctgtaggattctacgtctgtactttgagtagacacttcaagtaaccagtttttcagacacctggccactaatatggggagaagaggtcaaaaaaaccattgaatatttctaatttattgtagggaatgttaaaatttctcactggta

SEQ ID NO: 239146 - DNA, 557 bp, Homo sapiens
gctttctgtagctggccctgtgggtcctagcttttcaaagacttcaaacagaattcctttaaaccagattttatctacttcttttcgaagggagtgctggtttgccacaaaactccatcgtaactgaaagaggaaatcttctacaaattccaggtaaatcaaattttcctaccttgatttctgaagaaaacaaaaaaaagagaagaggccattggtagtatatacttgcatttttcttgtaatacttgcataagtctgaatgggtattaaakgctcttgctagaatcatgtgccaaagattgtctaccatgacctaaacaatcaggcctgtccaaggtccaagaatttgatcaggttggatccagtcctctggtgcactaacagagatcctgttggaggatagaatcctgctgtaggattctacgtctgtactttgagtagacacttcaagtaaccagtttttcagacacctggccactaatatggggagaagaggtcaaaaaaaccattgaatatttctaatttattgtagggaatgttaaaatttctcactggta

SEQ ID NO: 239147 - DNA, 541 bp, Homo sapiens
gaattcattccttgtgtcttttaggttctggtagctgaccaaattccttaggctgtggcctcatcactccagtctctgtctccctggtcagatgaccttcttttcttctgtagtctaatctccctctgataaagatacttgtgattatatttagggcccactgaartaacccaggataatttccctatctcaagatccttaattatacctgcaaggtgccttttgcaatgtagggtaatgcttcataggttccaggaattaagacttggttacctttgggggtcattattcctagcatcacaaggccagaggataaaggatgaagtgaggatggggagaggtgaggcagagtgagcagggtcctgttcacagaggaccttgcaaatcatagtaaagaactttgacaccttctcacaggggataaggaggcttagggagagactagcttgtgttttagaaggatcatgctggcttccatgttgactggagtggagcaagaggatgagcttaaagactagttagaggcagaagtgacatcagt

SEQ ID NO: 239148 - DNA, 527 bp, Homo sapiens
ttgttaaaagataattttcgaaagtaatatcctgactcttatacagatataaaatgaacatatgttgaagattttattttactccatattttttgtaaaccaggcagatgttattactggttcaaaggagaggtccaaaaagctgctcatttatggatcaggaatatcaaatgaatgtgcaaatggaggcaaaacaactctctgtcataggggtaggaaagtcaggtgaaacttcacctgacggcagaatttgcatatttagggatctagattactttgcactgctatcagttatctacaactttcagagccgtaaacagcctcctcataatcagaatctggtaacccggaggggcgtcccagataatgcataatttttcaytggaagccgtagggaaaaactctctcctctactctcacaccacaacaatcaacaccgaagacttccgtgacttaacgtgtgggatttttttccccacactccaagaagcagacatcactgggtgtcgcctaattcaattctgaca

SEQ ID NO: 239149 - DNA, 530 bp, Homo sapiens
ccaatccaactacagtgtcattctgtctttggtgttaaagaatttagatttatctccttttaaaggacctcctttgaatttaagaattgccattatcttcataagaatcaaaacaaatacaaagaaaatatattcttgctgaatgtaatttttaaatgttagtgargaatgtctttatatcttaattttaaggcttttaaaaattagtttgcatttgctggttctttgctgtcaccctaatactggttatgttacttttttgctcagtgctgtgaattgttcataatatctatagtcatcttttgacattggtaacttctgttttctgggtgaattaggaattagtatcaccagaagaaaagctaatctgaataattgttctttcatcatctcgttcatgcacagtatttaaccatctggtttgaccacaactttcacactagacgagtctttataatgatagaaatcatgacatacttttgatgatagactcctctggtctttcccaggttttggctggtattgccatt

SEQ ID NO: 239150 - DNA, 612 bp, Homo sapiens
atatttgttaaagaatgaatatgaataagtgaatgaatagatgaaatgagcagcatccttgggcagggactcatctccaagttgactggaatcccctgagaaatccagccagagtgggccttggtgagycccccaaatgacccactacttggaatcttacctggtttttcgctttttgtaaaaggtgatatcttcgttttcttcggggattgactgtgaccaaatacaaagaaggggctgggaaggtcatgctggaaacctgaccccacgggtggcaggggagacagggaggtggggaaggtggtgcaggtgcagtcagctgtctgctccagggagaggcaagagtcacccctcctggagggccagaaaacatctgtccatgactagcacccaggtggccttcctgtatcaccccaggccagacccagacaactgtggccctgccgtctgcagttagttccactgggaagcaaggccctcctgtctctggagaaacagggcatggactctgcatcagccctccccctagccctgactcactcgctccactggtttccttgtggacttccctttgagtgggcaagacaagaaccctgcgtcttgaatgaattc

SEQ ID NO: 239151 - DNA, 537 bp, Homo sapiens
tcttggtacagtgcctgatgcctagtattcattgaacggatgaataagtgagtcatagagtctcaggtatttattcagatcattcatctactacatgcttgaatccttgcctcattcctaccaagggtttgttagcatttatcatttaaacacttctaatgacaacaagctctctactgctcaaggctgcccgttcattttctgtttaggtctcttgcctagaaagttcttcttaatattgagctgaaatatgcctccttgaggcttctggttagtattcttgttctatcctttatggccacacgaatcaagtctgggccttcttcaccatgacaactcttcagacatytgtggttagttctgacacccacttcttttccaggtaaccacaaaatcattgattagacacacatttgttgaatgtctgtaacacggaatagattagagaacatacaggtgaaaagacataatatcatcctcgagtggttactggtcttgagggagccagagaaattaagacttaatgtgctaagtgtt

SEQ ID NO: 239152 - DNA, 577 bp, Homo sapiens
taccgcaatccagctgcaacaagttaaaggtgtagcccactagctatgggttagtttgccctgagctctgaatgtgacttcttccctgggaatcttggcttgagggcacatgtgggagcctgcttgccaggcacagggtagccygtggctttgggagtcttgttttaatctgttctgtcactttccaaaggtctgtcttctaagcttatgccattgttgtaccctagaaccaactattttcattctttgctgagtaccttttctgcccatatgaattctctcctagccattctccataccacgcagacggattgttctaaaacacaaatgtgatattgtcagtcccttgactgaaaagacctcaacggctgttgctctttggatgaagatcaaaacactgtttcctacaggactgggaggtctcagacaggaggattgccatctgcatttgcatttatttaaaaaacaattgaactggtgacattctgtttcttgatctgggtggtgctgaacaatggtgttcactatgtcaatattcatctagctctacactttgatttgtggacttgtctgtaca

SEQ ID NO: 239153 - DNA, 577 bp, Homo sapiens
taccgcaatccagctgcaacaagttaaaggtgtagcccactagctatgggttagtttgccctgagctctgaatgtgacttcttccctgggaatcttggcttgagggcacatgtgggagcctgcttgccaggcacagggtagcctgtggctttgggagtcttgttttaatctgttctgtcactttccaaaggtctgtcttctaagcttatgccattgttgtaccctagaaccaactattttcattctttgctgagtaccttttctgcccatatgaattctctcctagccattctccataccacgcagacggattgttstaaaacacaaatgtgatattgtcagtcccttgactgaaaagacctcaacggctgttgctctttggatgaagatcaaaacactgtttcctacaggactgggaggtctcagacaggaggattgccatctgcatttgcatttatttaaaaaacaattgaactggtgacattctgtttcttgatctgggtggtgctgaacaatggtgttcactatgtcaatattcatctagctctacactttgatttgtggacttgtctgtaca

SEQ ID NO: 239154 - DNA, 634 bp, Homo sapiens
aatgtaattgagaaaggaaacatttttttcaggtcatgattcagagtaacactaagttgtaagaaactgcagaaaaacacataaaaaaagagtygttccatatttcagagtggactttatcctaatgagatgtattctctatcactgaccccccactgcaagtgccagatgcacatctttcatggatgatttagaagatgtctctctaaggaatagaagaaagtagcatctaaggatattcacattttgattgtatatcaccctactcatgtgtctctagcatacaaaaactgcagtcaccaagatctcaatgaaatagcaaagtaatcaaagtttattttggtatttctctttctccaccaaagaatccccctttacaaaagttctctcagatttaacatcctcagaatccccacatctacctgccactggttcttctattccatctagccctactcttcacacaagcaattccaaatataaaatttatgtttgttcttcaaaccaaaacaaatacagctatactacttagtgcctttgtgttacaatccgatgaaaacaattcaacagaagtcacagatttaagacatatttaatgatcccagaggatatctaagcatgagttaatcatcat

SEQ ID NO: 239155 - DNA, 562 bp, Homo sapiens
gcatcatcctcagcaaactaacataggaacagaaaaccaaacaccacatattctcactcatcggtagacattgaacaatgagatcacatggacacagggaggggaacaacacataccaaggcctgttggggattggggggcgaggggaaggaaaatggacaaaaataataataaagttagtttaagacttttacactgccagtatagcagatttggtgaaattaatactttcytaaagggtccaaaagaaataattttctaatgtgtatatctgaaatttgtaatacaatcaacttcgtatttttaaaattccaaaagaaatctgcttacgtcaaactaatggcattttctttggtctgtgatattggtaggcaattgaaatgtcataaagaatttaaataagagttttaaaaaagacatacttatttcccagtctagactatgtcttgtgaaataggcttcagaatccataaaaaaaaaagtcctacaaatctcatatataaatttcaaagagatctccaatggaaagacatacttttaccagtttccttaacattaagtt

SEQ ID NO: 239156 - DNA, 562 bp, Homo sapiens
gcatcatcctcagcaaactaacataggaacagaaaaccaaacaccacatattctcactcatcggtagacattgaacaatgagatcacatggacacagggaggggaacaacacataccaaggcctgttggggattggggggcgaggggaaggaaaatggacaaaaataataataaagttagtttaagacttttacactgccagtatagcagatttggtgaaattaatactttcctaaagggtccaaaagaaataattttctaatgtgtatatctgaaatttgtaatacaatcaacttcgtatttttaaaattccaaaagaaatctgcttacrtcaaactaatggcattttctttggtctgtgatattggtaggcaattgaaatgtcataaagaatttaaataagagttttaaaaaagacatacttatttcccagtctagactatgtcttgtgaaataggcttcagaatccataaaaaaaaaagtcctacaaatctcatatataaatttcaaagagatctccaatggaaagacatacttttaccagtttccttaacattaagtt

SEQ ID NO: 239157 - DNA, 569 bp, Homo sapiens
acatgcacccacatattctttgcagcaatattcacaatagcaaaggcatggaatcaacataaatgtccatcaatggtagactgaaaaaagaaaatgtggtatatatacaccatggaatactactcagccataaaaaagaatgagatgatgtcctttggaggaacatgaatggagctggacggcatcatccttagcaaaccaacatagaaacagaataccaaaaaccatatgttctcacaagtgggagctaaatgatgagaacacatggacacaaagagggaaacaatagacactagggcctacttgaaggtgaaggttgggaggagggagaggatcagaaaaaacwactattgggtactagccttagtacctgggtgacaaaataatctgtacaacaaacccctatgacacaagtttacctatataacaaagtgaacatgtacccctgaacctaaaataaaagtttttaaaaagcacattaaattataaaataaagatgaatgtcaggaattcataaatagattcataagtaattaattaattaaattccagtagtacttgtagttttg

SEQ ID NO: 239158 - DNA, 630 bp, Homo sapiens
taattgacctaacttcatgactgaattaagaaaatgatacatttcattgtgattaattgtaattgatgtctttagagaagtatgcttcaaatttgatatatacttattttaaatacaaaaataattcaaaagtgctcttaaataaaaataccttaaaagaaaatagccaaaatcactaaaaaattctccaccattaaaatatgtggctgcattttacgatagaatagctggctatcagaaagtagaaaatcaggccaactagttgtagtctarttaaactatattactcacccaaacctataggctcaacagtggcctagtcttcatgaacaatctacatcaaagtcaaaaaaaaaaaaaaaattaaaagaagacttggtctagcattctgggcctcagcattcaaacttgtatggctgtaaatataattttgtcctcctgccaagtttcagcagaagggatttaacagtatatctgggactgaaacattaccttgggttctagttttaggaaaaaaagtccttgctttttcaataatctctcagggactgtaattctgcttttgattcccactctcgtggctgaaaatttaccactccttacagatacttaatgataaaaacctgcttg

SEQ ID NO: 239159 - DNA, 584 bp, Homo sapiens
  misc_feature (1)...(584): n = A,T,C or G
gggcaattatgctatggctcatcacttaatcttcatgttgcagattctctctgtaagaataaaacaatacatgtcattataatctacccattactttgagaaggaataaacaatctctacttatttttctaattatgatatttataattccaaaaatatggcatttaagcagggtgaaatcccttttaatggtgaattgtatcagaccctgaaggtatcacaaaacagrggttgaaagtgtacagcacctgattccagcataaacatgtatttggctatgtttgagcatactcaccttccatcaaatttcaatgtacctccatctacgcgatgcttttaaagctgaaaaattatgcacctataaatgaagctgtcattttaaaaatttaagcacataatggctataaaacactttctttgggaggattaaaaacttcatcaattntcttagctctttattaatcaaatgtttcttattttttgaaaaatatttctgtgaccatggctcgtattgagcagaaagtagatttcaagatacccaacanaccagttcccattcttcttcttgctaaaaataaaatttg

SEQ ID NO: 239160 - DNA, 584 bp, Homo sapiens
  misc_feature (1)...(584): n = A,T,C or G
gggcaattatgctatggctcatcacttaatcttcatgttgcagattctctctgtaagaataaaacaatacatgtcattataatctacccattactttgagaaggaataaacaatctctacttatttttctaattatgatatttataattccaaaaatatggcatttaagcagggtgaaatcccttttaatggtgaattgtatcagaccctgaaggtatcacaaaacaggggttgaaagtgtacagcacctgattccagcataaacatgtatttggytatgtttgagcatactcaccttccatcaaatttcaatgtacctccatctacgcgatgcttttaaagctgaaaaattatgcacctataaatgaagctgtcattttaaaaatttaagcacataatggctataaaacactttctttgggaggattaaaaacttcatcaattntcttagctctttattaatcaaatgtttcttattttttgaaaaatatttctgtgaccatggctcgtattgagcagaaagtagatttcaagatacccaacanaccagttcccattcttcttcttgctaaaaataaaatttg

SEQ ID NO: 239161 - DNA, 605 bp, Homo sapiens
agctgctttggaaagtgatctggcaattctcaaaggttatacatagatttactatatggcccagaatactattggktatatactcaagagaaatggaaacatacattcacagaaggcttgtacgttaatatttacagcagtgttacccataatagcccaaaagtagaaatgtggtatatccgtacaaaggaatattattcagtaataaaaataaatcaagtatgatacaaggtacaatatggatgaagtttgaaaacattaggctcaatgagaagagtcagacataaaaagataatatattgtacaatttcatttacatgaaatatttagaataggctaatctatgaaaacacaaattatattaatagttgctggagctgggggggtgggtgggatggagagctcactgggcaaatgggtgcaccatttcttttggggtgctgaaaatatcctaaaatttgctttggtgatgattgcatgactctgttaatgcactgaaacatattgaattattcactttcaataggtaaattgtatgctatataaattatacggcaaaaaatctattaaaggaaaagaccaagtggagcactgtttggggactt

SEQ ID NO: 239162 - DNA, 463 bp, Homo sapiens
tacagcacccttatggaaaagtagccagactgtttgttatgtgggtccctgatctcatacttcctcattgggtgggtcctcccagcctgagtctccaaccaccccccagctgggactatggagccagtagcagctctrcaactcctgggagagagctcccaatgggagtggggattgccgtatttgcttacagccttcatgcttgctgtctccacactctggggagtccacggcaaccagaggctggtccagacccccagaacagagcacccacctcacagaaaagtggtcagacggtattccatgcaggtcccagtactctcttctccctactgggcagggtcacctgacatatgactccagtaataccatgctgcccccactttaccactttaatcagagggagcccagcagttaaagcaatatccacacacagagatgagaaagaaccaatgcaagaact

SEQ ID NO: 239163 - DNA, 575 bp, Homo sapiens
ctacaactcctgggagagagctcccaatgggagtggggattgccgtatttgcttacagccttcatgcttgctgtctccacactctggggagtccacggcaaccagaggctggtccagacccccagaacagagcacccacctcacagaaaagtggtcagacggtattccatgcaggtcccagtactctcttctccctactgggcagggtcacctgacatatgactccagtaataccatgctgcccccactttaccactttaatcagagggagcccagcagtyaaagcaatatccacacacagagatgagaaagaaccaatgcaagaacttgagcaactcaagtgggcagagtgtcttatctcctccaaacagctgcactagtctctgacaagggttcttaaccagccttaattggttgaaatgacagaaatagaattcagaatatggataagaatgaagatcaccaagatgcaggagaacagcaaagtgcaatccaaggaaactaagaatcaataaaatgacaaggaggtgacagatgaaatagccagtgtaagagagaacctaactgatctgaaa

SEQ ID NO: 239164 - DNA, 583 bp, Homo sapiens
atttgaagtaaaagcttaaatatttttacagagctctgaatttccaaaagatagcttactggataaggagatggagttataagtctagtatgtctgaaagtggctggaggaaaagagatcacaggacaactttctacagtacacctttcttgtataatcccccttctgagttcattcacctgctcatcctcaaagaactaggcattaggagcacataactcactggagaaataataattaacatataaatggattggggagcttgggaggtgtttttaggtccattatttcatttttcaaccaatcaataaaaatacatagatttattgaatgcctattaggggtaaggtgccawacttgactatgggaaaatggcaataaataagatacctgctcctcctcaggaagacaagaaacaagtggttctgttaaaggatgatcagtattgaagaactgtcagtctatgtgttatgaaataagagtgaaggaaatataaaaaaggaggatttaattcagtcaactctcttactgagaaaatgaccaagatacagaattctgaaggatacaagtcaactacagaaaa

SEQ ID NO: 239165 - DNA, 479 bp, Homo sapiens
cttcatttctgtctaagaactcatcagaaaggccgttacsgtcggtatttcccccaatattctggtcatgactgtttaaataatctataagaagagttaggctctctctactctcctcttcttctgagccttcaccaaaattgcccttaaacactgaaaatctaggcttttttctggcatgtaccctaaaacttttcccacctctacccattacccaattccaaagctgcttccacatttttaggtatttgttatagcaacaccctatttctcagtgtcaatttctgtgttagttcatttgtgctgctgtaacaaaatacttgagactgggtaatttatgaacagaaacatatttctcacagttctagaagaaggggagttcatgatcaagggctcacagatttggtatctggtgagagccttctctctcaccaagatgacgcattgtggcgtgtcttcacatggcagaaggcagaaga

SEQ ID NO: 239166 - DNA, 534 bp, Homo sapiens
aaagaggttgtgagagtttggagaaaaccaaagtatactactgctttaaggctccacaagttttcccaaactacattaagtattcctgttatatgattcctttaaggttactcaaagcctataactgtgtttgctttttaccttgtattcttagtgtctggaatatggtagaatatcaataaataattatttaatgaatgaacaaatgaaacaatgactcatatcaccaatagtaagagcttagttcytaagcaattaatcatgtaaataaaaccaaaagtatgccatagcataaaaggagtctttaagaaaggctaagaaaatatgacagagcacaagatgtctgatttatattgttgaggtgttccctagagtctccgttacttctttgttttgttttgtttcctactgaatttcatgcccagtgaactttttgtaagtttctatcgcctctacttctgtttacttcctacagatcctttttattttctgttgcttttaaaaattacaaattaatcggaagaatagaatcac

SEQ ID NO: 239167 - DNA, 552 bp, Homo sapiens
tttaaccttggcaaaataaacttctaaattgattgaaacttgtctcagatactttttggtttacaatatcaacaacttaggagtcatctttatgcctctcattgtgatatccaacgcaccaccagatcctattgatcttatatatgagatatcataaatacatatacttctcttctttatcactcccaccctattctaaattcctaccatttctcacctgaaccctttattagttaggaaagactagtccattcctctaatctcttttctcctttacagttagagagatcttttttttcctaaaactttgaccwttttttctctttaaacttaactgacagatagtaataatatatatttatgggatataatgtgatgccctgatatatgtataagtcgtggaatgattaaatcaagctaattaatatatctattatggcctatacatttttaattataagaacatttcaaaactactcttttagtaattttgaaatatgtaattcatcattaggtcacttaaaatattattttataatacaaaactaagca

SEQ ID NO: 239168 - DNA, 620 bp, Homo sapiens
taataacccctgggcactatgcagagcacatagccataatcccaccctccattatacagattaggggactgaggcatttgcccaaagttgtacaaatcataaacaatgraactgctccaggcagtctaagcctggagcccacaacaatttaccctaacttatattatacacatcaaatttactttatatttgttattacatattttttctgattataacacacacttaaacagattataaaatgtattaccatagctaaacagacattttagaaactttctggatacaatttatttacacaagaaacaatggttaacaatttaagtttcaattaatttagtagttaaatattatttcataagactttatcatgtgttaagtatcatagaagtgggtgtgatcgacatggaaatgtggcacccagattctccttcatcagtaacagctggatattctccagctgccagctgcttcaatgtctgccttagctgcaaatagccaccttgtgtgaggtcacacctctcccaggacagcctacaacacaaagtttgtatcagtgtccacttctagagaatccaaccagaggcattagcaattaccttttattagatgcctattaa

SEQ ID NO: 239169 - DNA, 620 bp, Homo sapiens
taataacccctgggcactatgcagagcacatagccataatcccaccctccattatacagattaggggactgaggcatttgcccaaagttgtacaaatcataaacaatgaaactgctccaggcagtctaagcctggagcccacaacaatttaccctaacttatattayacacatcaaatttactttatatttgttattacatattttttctgattataacacacacttaaacagattataaaatgtattaccatagctaaacagacattttagaaactttctggatacaatttatttacacaagaaacaatggttaacaatttaagtttcaattaatttagtagttaaatattatttcataagactttatcatgtgttaagtatcatagaagtgggtgtgatcgacatggaaatgtggcacccagattctccttcatcagtaacagctggatattctccagctgccagctgcttcaatgtctgccttagctgcaaatagccaccttgtgtgaggtcacacctctcccaggacagcctacaacacaaagtttgtatcagtgtccacttctagagaatccaaccagaggcattagcaattaccttttattagatgcctattaa

SEQ ID NO: 239170 - DNA, 620 bp, Homo sapiens
taataacccctgggcactatgcagagcacatagccataatcccaccctccattatacagattaggggactgaggcatttgcccaaagttgtacaaatcataaacaatgaaactgctccaggcagtctaagcctggagcccacaacaatttaccctaacttatattatacacatcaaatttactttatatttgttattacatattttttctgattataacacacacttaaacagattataaaatgtattaccatagctaaacagacattytagaaactttctggatacaatttatttacacaagaaacaatggttaacaatttaagtttcaattaatttagtagttaaatattatttcataagactttatcatgtgttaagtatcatagaagtgggtgtgatcgacatggaaatgtggcacccagattctccttcatcagtaacagctggatattctccagctgccagctgcttcaatgtctgccttagctgcaaatagccaccttgtgtgaggtcacacctctcccaggacagcctacaacacaaagtttgtatcagtgtccacttctagagaatccaaccagaggcattagcaattaccttttattagatgcctattaa

SEQ ID NO: 239171 - DNA, 594 bp, Homo sapiens
ttttttttttgagacagagtcttgctctgtcccccaggctggagtgtagtggcgcgatccyggctcactgcaagctctgcttcccgggttcacgccattctcctgcctcagcctcaccagtaggtgggactacaggcacccgccactgtgcccggctaattttttgtatttttagtagaaacgggatctcaccgtgttagccaggataggctcgatctcctgacctcgtgatccgcccgcctaggcctcccaaagtgctgggattacaggcgaaagtcaccccacctggccttctttaccatttcttaaatgttattccataggattctgttttcagggtcccttctgttattttctctccttacactacatttttataggtgatatttactttttttaatgctgttaactattaccctgtactgtgagtcaaaatgtatttttctaaactgtatagagagttcctgatccgcatataaaagtaagagctaaacaactctatttagatatattaacagcatcacgagagcaacacattttagatgaaaaagatggtcttccttccattccctgatctgagctttatcaatttac

SEQ ID NO: 239172 - DNA, 594 bp, Homo sapiens
ttttttttttgagacagagtcttgctctgtcccccaggctggagtgtagtggcgcgatcccggctcactgcaagctctgcttcccgggttcacgccattctcctgcctcagcctcaccagtaggtggractacaggcacccgccactgtgcccggctaattttttgtatttttagtagaaacgggatctcaccgtgttagccaggataggctcgatctcctgacctcgtgatccgcccgcctaggcctcccaaagtgctgggattacaggcgaaagtcaccccacctggccttctttaccatttcttaaatgttattccataggattctgttttcagggtcccttctgttattttctctccttacactacatttttataggtgatatttactttttttaatgctgttaactattaccctgtactgtgagtcaaaatgtatttttctaaactgtatagagagttcctgatccgcatataaaagtaagagctaaacaactctatttagatatattaacagcatcacgagagcaacacattttagatgaaaaagatggtcttccttccattccctgatctgagctttatcaatttac

SEQ ID NO: 239173 - DNA, 594 bp, Homo sapiens
ttttttttttgagacagagtcttgctctgtcccccaggctggagtgtagtggcgcgatcccggctcactgcaagctctgcttcccgggttcacgccattctcctgcctcagcctcaccagtaggtgggactacaggcacccgccactgtgcccggctaattttttgtatttttagtagaaacgggatctcaccgtgttagccaggataggctcgatctcctgacctygtgatccgcccgcctaggcctcccaaagtgctgggattacaggcgaaagtcaccccacctggccttctttaccatttcttaaatgttattccataggattctgttttcagggtcccttctgttattttctctccttacactacatttttataggtgatatttactttttttaatgctgttaactattaccctgtactgtgagtcaaaatgtatttttctaaactgtatagagagttcctgatccgcatataaaagtaagagctaaacaactctatttagatatattaacagcatcacgagagcaacacattttagatgaaaaagatggtcttccttccattccctgatctgagctttatcaatttac

SEQ ID NO: 239174 - DNA, 594 bp, Homo sapiens
ttttttttttgagacagagtcttgctctgtcccccaggctggagtgtagtggcgcgatcccggctcactgcaagctctgcttcccgggttcacgccattctcctgcctcagcctcaccagtaggtgggactacaggcacccgccactgtgcccggctaattttttgtatttttagtagaaacgggatctcaccgtgttagccaggataggctcgatctcctgacctcgtgatccgcccgcctaggcctcccaaagtgctgggattacaggcgaaagtcaccccacctggccttctttaccatttcttaaatgttattccataggattctgttttcagggtcccttctgttattttctctccttacactacatttttataggtgatatttactttttttaatgctgttaactattaccctgtactgtgagtcaaaatrtatttttctaaactgtatagagagttcctgatccgcatataaaagtaagagctaaacaactctatttagatatattaacagcatcacgagagcaacacattttagatgaaaaagatggtcttccttccattccctgatctgagctttatcaatttac

SEQ ID NO: 239175 - DNA, 582 bp, Homo sapiens
tcagaatcttgtccaggatctcacaytgatagacacaggatttggtcccaaccctgaactgattccaaagcccatggcattcccacgagactaggggcttctgataatgaccatacattgtgacaagtaagtgtatatttgagcaggataatgccatatgacattctatttcttttagaatgacagatccagtgctgacaggaattctcagagcagcaggcacatggttaaggcaagaacaggccattagaaggaaatggtaaggacgtttgacatcggttgtcccaaacctgaagaattgaaactacacagacacatttctggaaaggctttcactcacgtctgggttgaaaaaaatcagggttagaatcagcactgatttgtaactcaattttttgtgtttccttccctttttttttgagatagaatctggccctgttccccaggttggagtgcagtggcacaatcatagctcactgaagccacaaactcctgggatcaggtgatcctcctgcttcagtcttctgagtacccgaaactacgggtatgtgccacatgcctggctaattttttaaaaagctt

SEQ ID NO: 239176 - DNA, 582 bp, Homo sapiens
tcagaatcttgtccaggatctcacactgatagacacaggatttggtcccaaccctgaactgattccaaagcccatggcattcccacragactaggggcttctgataatgaccatacattgtgacaagtaagtgtatatttgagcaggataatgccatatgacattctatttcttttagaatgacagatccagtgctgacaggaattctcagagcagcaggcacatggttaaggcaagaacaggccattagaaggaaatggtaaggacgtttgacatcggttgtcccaaacctgaagaattgaaactacacagacacatttctggaaaggctttcactcacgtctgggttgaaaaaaatcagggttagaatcagcactgatttgtaactcaattttttgtgtttccttccctttttttttgagatagaatctggccctgttccccaggttggagtgcagtggcacaatcatagctcactgaagccacaaactcctgggatcaggtgatcctcctgcttcagtcttctgagtacccgaaactacgggtatgtgccacatgcctggctaattttttaaaaagctt

SEQ ID NO: 239177 - DNA, 582 bp, Homo sapiens
tcagaatcttgtccaggatctcacactgatagacacaggatttggtcccaaccctgaactgattccaaagcccatggcattcccacgagactaggggcttctgataatgaccatacattgtgacaagtaagtgtatatttgagcaggataatgccatatgacattctatttcttttagaatgacagatccagtgctgacaggaattctcagagcagcaggcacatggttaaggcaagaacaggccattagaaggaaatggtaaggacgtttgacatcggttgtcccaaacctgaagaattgaaactacacagacacatttctggaaaggctttsactcacgtctgggttgaaaaaaatcagggttagaatcagcactgatttgtaactcaattttttgtgtttccttccctttttttttgagatagaatctggccctgttccccaggttggagtgcagtggcacaatcatagctcactgaagccacaaactcctgggatcaggtgatcctcctgcttcagtcttctgagtacccgaaactacgggtatgtgccacatgcctggctaattttttaaaaagctt

SEQ ID NO: 239178 - DNA, 582 bp, Homo sapiens
tcagaatcttgtccaggatctcacactgatagacacaggatttggtcccaaccctgaactgattccaaagcccatggcattcccacgagactaggggcttctgataatgaccatacattgtgacaagtaagtgtatatttgagcaggataatgccatatgacattctatttcttttagaatgacagatccagtgctgacaggaattctcagagcagcaggcacatggttaaggcaagaacaggccattagaaggaaatggtaaggacgtttgacatcggttgtcccaaacctgaagaattgaaactacacagacacatttctggaaaggctttcactcacgtctgggttgaaaaaaatcagggttagaatcagcactgatttgtaactcaattttttgtgtttccttccctttttttttgagayagaatctggccctgttccccaggttggagtgcagtggcacaatcatagctcactgaagccacaaactcctgggatcaggtgatcctcctgcttcagtcttctgagtacccgaaactacgggtatgtgccacatgcctggctaattttttaaaaagctt

SEQ ID NO: 239179 - DNA, 497 bp, Homo sapiens
attgtcttgtatttttattttgtaatactggcagtgatgggttttcttttattgctgattttagtaatttgagtctcttctctctttttcttgattgacctaagtaaacatttgccaattttgttatcttttcaaacatttaattttggtttattgattttctctgttgtttcatattccctttctgttggcttaactcttattatgaaattttttttgtctttaaaaattttatatttggttaattaaaatttaagttgattttggggtatcarcgcttctcttatatgaaaataagagcatgaatcaagaaataatgggttcccaaatactgcagtggaaacacatttttttgggggggtacaaaacaagtatccatgtacatatagtccttggttccccaagtcattgagtcaacttagtcaaaataagtagcctctcatttcttatctcatgagggtggtcttgccttgcttggagacattataatgaattca

SEQ ID NO: 239180 - DNA, 475 bp, Homo sapiens
gtggagacagtgttggaattggaaaactatcattttgtaatcatcatgggaaagattagttcaggcaagaaatgtcagtggatgctaaatctaggaggaaaatttggatgagaagcatgatatttgcacagtcwtaaaagtatctccccacaaattgcttactaaatatacagggaaaatatagtaaatacatagtggaaagattggacaacagctgaaccaagtgatcagaagcatcatcaccaaagaggggcaaatggttattgtgtgcatccagatgtggtacctcaagaaggactcaacgtcacttacatcagatttctatcaggaacactatctgagactagacatgagaaaacatctaacaaacccaaagggaggaacatttcatttaaaggaagatgactatattctttaaaaatgttagtgtcataagagactgaaaaactatttcagattaaagggtcgtgacaaa

SEQ ID NO: 239181 - DNA, 587 bp, Homo sapiens
gctctgatttgaaataaagatttggggaagggcacttatgcctccactttcaccttatattatagtataacaaaaaggtagctttttggtggaaaatgtagaccattagaaccatgtgataaaatttaaacccactgattatttgcatggcctccaaattgaatttgatttaattataatattcatgtattttggaagtgatttaaaatcattttatatatgtacacgtataattatatatgtgtacatatattatatataaaattatttttatatgtacacatcagatattcaactattttagtgcagataattctgggtattatataarttaatgagacatattttctgccatcaaggagcttataatctttggaaaaagataaagtatatataaaaataatcattccctcattcaacaaatatttagtctgttacttgctatatacttggcactgtctgtgactgaggcctgaggaaggcaacagtacacaacgtaatcctgccttcgtggtatgtaatatacaaaaacctgaataaaaaaagttgtaggagaagaaacaaatatgctaagaaaaattaaagta

SEQ ID NO: 239182 - DNA, 587 bp, Homo sapiens
gctctgatttgaaataaagatttggggaagggcacttatgcctccactttcaccttatattatagtataacaaaaaggtagctttttggtggaaaatgtagaccattagaaccatgtgataaaatttaaacccactgattatttgcatggcctccaaattgaatttgatttaattataatattcatgtattttggaagtgatttaaaatcattttatatatgtacacgtataattatatatgtgtacatatattatatataaaattatttttatatgtacacatcagatattcaactattttagtgcagataattctgggtattatataagttaatgagacatattttctgccatcaaggagcttataatctttggaaaaagataaagtatatataaaaataatcattccytcattcaacaaatatttagtctgttacttgctatatacttggcactgtctgtgactgaggcctgaggaaggcaacagtacacaacgtaatcctgccttcgtggtatgtaatatacaaaaacctgaataaaaaaagttgtaggagaagaaacaaatatgctaagaaaaattaaagta

SEQ ID NO: 239183 - DNA, 587 bp, Homo sapiens
gctctgatttgaaataaagatttggggaagggcacttatgcctccactttcaccttatattatagtataacaaaaaggtagctttttggtggaaaatgtagaccattagaaccatgtgataaaatttaaacccactgattatttgcatggcctccaaattgaatttgatttaattataatattcatgtattttggaagtgatttaaaatcattttatatatgtacacgtataattatatatgtgtacatatattatatataaaattatttttatatgtacacatcagatattcaactattttagtgcagataattctgggtattatataagttaatgagacatattttctgccatcaaggagcttataatctttggaaaaagataaagtatatataaaaataatcattccctcattcaacaaatatttagtctgttacttgctatatacttggcactgtctgtgactgaggcytgaggaaggcaacagtacacaacgtaatcctgccttcgtggtatgtaatatacaaaaacctgaataaaaaaagttgtaggagaagaaacaaatatgctaagaaaaattaaagta

SEQ ID NO: 239184 - DNA, 547 bp, Homo sapiens
gagtaatttgctctagtaacagccaataagtgggaaagccaggactggaggcaaatctctctgtccccagctgtggtcatgagcagcatgaagtcaggggaggcatccaaagaaataaatgcctccgtctcagaaccagtctgttgagttcagaattttaaaagggcatgtataaaatgaaactaggcaaggtatcaagcacaaatacaaagaaacagcatacacttktaagtgtatcctgacctggaaatcccaaaagaaaggctaactcaacagaataaactggtttatagaaaaggccagaattggccaggtgcagtggctcacgcctgtaatctcagcactttgggaggccaaagcaggcagatcacgaggtcaagagatcgagaccatccggcttacgtgctgaatccccgtctctactaaaaatacaaaaattagccgggcatggtggcgcgtgactgtagtcccagctactcgggaggctgaggcaggagaatcgcttgaacctgggaggcggaggttggaatgagctgagatcacacca

SEQ ID NO: 239185 - DNA, 547 bp, Homo sapiens
gagtaatttgctctagtaacagccaataagtgggaaagccaggactggaggcaaatctctctgtccccagctgtggtcatgagcagcatgaagtcaggggaggcatccaaagaaataaatgcctccgtctcagaaccagtctgttgagttcagaattttaaaagggcatgtataaaatgaaactaggcaaggtatcaagcacaaatacaaagaaacagcatacacttttaagtgtatcctgacctggaaatcccaaaagaaaggctaactcaacagaataaactggtttatagaaaaggccagaattggccaggtgcagtggctcacgcctgtaatctcagcactttgggaggccaaagcaggcagatcacgaggtcaagagatcgagaccatccggcttacgtgctgaatccccgtctctactaaaaatacaaaaattagccgggcatggtggcgcgtgactrtagtcccagctactcgggaggctgaggcaggagaatcgcttgaacctgggaggcggaggttggaatgagctgagatcacacca

SEQ ID NO: 239186 - DNA, 575 bp, Homo sapiens
aggtatttttgtccatggatagttgttctaattgatgtatctgtaaggagatgattgctggagagttctattccacctcttgcttttccctcaaccaaaactcaattttttttcaattgcagtggtgaactaggcatcaaaaattagaccttgattactcttaaatccattgaaatatagatactgccattcccatcaggagggtggctttctctggtattcattgtcacttcctctaattaaagactaactccattatttacattcttgatcccataacctcaagtttcttccttacttttttctatttgttatcctccctcttaacttggagtggaagaatatatctcccttctgtctccagtaaagaaaggaggtaatagtagcycttcatgacaggcactgaattccccacaaggctgatgacttgtttctccccagcttccttttacattatttgaagtgagagtgtttgtttctttactggggctgttctgatctgatgctgctctataatctctgtggggaagtgagtctactggcaatgggctctatttagaatgtgagatacttag

SEQ ID NO: 239187 - DNA, 480 bp, Homo sapiens
actttagtgtggcttccacttgcactaggccacattcataagggtgattctaactcccatgcctagtttctactcaagaaaacacactattgccaaactgcaaagtatacattgttccaacacaccttgacaaaccattttcagtaattctccacttaccttccttctgtaattttcatttctccctagttccccagtcccttttcttgttccccgcttttcacttcctcataacccctttttgttctctttttgttctctctttaataaccttggtcacctttgtcttagttggagctgagctcagtttataytggagtttctctcctcttttgcagtagtcttcataaaatctgtcttgctacctttaacaagtgtctggcaatgtttttctttgacactggtttctggttcagcatgtaaggagcttggaagtcatcactctgtcctaacaagtaaaaggtcaaacaaatggaaaat

SEQ ID NO: 239188 - DNA, 595 bp, Homo sapiens
ttaattaaaatgcctgatattagcaataaatgaaccttgattgacataaatacataaacattgttcttcatctaacgatgcttttgtttattgatacttttgtataaataccctttagtaagaatcaaactattttttgtttagtgccatgctatccaaacacattaaaaattgttttataaaacatgataatgctgatgaaacaaagaaagaaaaacaaaagagaaaagaaccttarggtttggtttcagttgtaatttctctggctgaaattatttttaaaaactacaatttcaacttaattgatggctgttatttttcttaaaaaatctgcaataattgacattttaagttcatatcagtttttaaatttattttcatttgttaggccaagattaagttcatagaatttatagtcaccatctctactattttttttttagatttccatgcataaaatagaactcacatgaagtccttcagtgaagctctcctgggagcagaggcatctatatggctggcttgttgtgtcgcagttatcggcatgaccatggcactgacatctgcaaacatgagcatcacacactcctaagga

SEQ ID NO: 239189 - DNA, 422 bp, Homo sapiens
aaatgtagtataatcacacaatggaatattattttacattaaaaagaaagaaattactggtacctgctacaaaatgtgctcaagtctcagaaattagagtagggaaaggaagacggacgaagaatagagaaagcttgttttgttttgtttccaaktgcaaaaatctgttttaaaaatatatggaaggaaagacatgctttaaaatgttaacttttttggttttaaaaacatttttccttttatataaacttttttctctttccaaatctgctttatttataacttttatagtcagaaaaaaaggagaattttcattcaacctgatatatagccagagagaattacacataagaataggaatgtaaataagaatgatagaactgttttctgactttaaacccccacattgtttatctttaaat

SEQ ID NO: 239190 - DNA, 491 bp, Homo sapiens
tgttttgcttctatctttgctctgcctttggttttgtttctaccagttcttctggtaggttttgtatcaggctgtgcagttcaatctacatgccagtagatgatgcttataggtaagagccagttgcagccaatgtagctggatacttgatccttgtttactggcagaagttctctgttgcctcagacaatgggctgatacatagaatgcatagtggtctgagctccctgctcagccccaagggcatggggccagactggtcaggtccacctaaaggtcccctgatacaggcacaagcaccagcactgacagagaatccaatgggtggctaccaagcacccagaggtatgcctaggcatggagctcctcagtatcaagttctctgcacaggaatgggaaacctcttcagcatcaacttctctrcacagggatgggggatgccctaaactccaaatccagaagagctctgcctaggtgtgtagtatagtggg

SEQ ID NO: 239191 - DNA, 461 bp, Homo sapiens
ggatggtaataggtactcaggcatggggtcaggaagcactagatggggaaaggtgtggtggaaacacacctttaagcattagtaatagaagttagtgcaaagaccttgggacacacaataactcagcaggtgaattactggtactgtggcccaaaaaggagcaaaatcaacagtaggctgacttagcgctgagcttttcaggwaccttttgacttctcagccattggacttaccctgaatttcttgcctatcctcactagttggatttactttttcctgcttctgcagaatgcattgttttccaaccatcctgcgagaagctctctttttgtcaataaataataaatggcttcaaaatttggagatgataattgtggcacatagagtaagtttttcacagctttaaatttgaataaattcaagtctgtagaaaaatgttggaagaaaaataaaataaataa

SEQ ID NO: 239192 - DNA, 554 bp, Homo sapiens
acaaagtgtcttagacaagagtggtagcagaggtagtaaaaagtgatcaaatttggggatttatttgagagtagagaacttgcttattataaaatttgtgccaaagttgaaaactcagatcagacattacctttggggttttgagcaaagcaaccagatgaatggagattccatttattgatgtggagaccactagaggaagagcaaatttgggaatgagtgggaattgagaattcagtttaaggaatgccacctgagacacccattcaacaactcagtggagatgttgtatatgccgttggatataccagtctgaatctgagaggagaggtcaggatatatgccacatttcatttattctatgacacactctttttcactattttaacatctttgaaatrgggacatgtctcacaatcaataatatcttacagagaaatggcaaccttttttttctccttagtagtatacaaaataatggtgcatcagaagtcagtttcagaatcagtgtcttagtttctttggattatagaatatgtgaaagataccagcat

SEQ ID NO: 239193 - DNA, 496 bp, Homo sapiens
atggtttgtgttccttccagccaaagtgaaaagaatgcccaatttataggcattgaggacaatcctcagaatggtaatgccttaagagtgagtccaaactggccctagcctaaaaaattcccagatcccaggctaacagagttaaaaagaaagactcaaagaatgaaactaattataagtaatttaattatgttaaccataagcttaaccatatttaaataagcttaatcatatttaaaataatacaacaaaatttagcacccagaaatttaaaattcgaaatttcttacctccaatgaaaaaactatcagacacacacaaaagggagaattgacctagaactaggattaactttaatycgtagaaacagacccagaaatgatagagatgataaaattagtagacaaggatgtcaaaacagcaattataaataaaatctacatgttcaagaagataggagaaaacatgatcatgaaaaggagagaaaacgatgtta

SEQ ID NO: 239194 - DNA, 566 bp, Homo sapiens
tacatcaacaacagtcaaggcaagagccaaatcaggaacaaactcccgttcacaatagctacaaaaagaataaaatacctaggaatacagctaactaaggaggtgaaagatctctacaaggagaactacaagccacaggagaactacaaattgctcaaggaagtcagagataacacaaatgaaaaaacattccatgcttatggataggaagaatcaataktcaaactatactacagggctacagtgatattaactcaagatgaattaaaaacttaaatgtaaagccccaaattataaaagccctggaagacaacctaggcaataccattcatgacataggcatggacaaaaattttatgatggagatgccaaaagcaattgcaacaaaagccaaaattgacatatatgatccaattaaactacgaggttttgcccagcaaaagaaacctttttagagttaagagattaccctccggattgggagaaataattttggctaccttggctttggcaaaagggttaatattcagcattttttagggatcttatttccctgaaaaaactat

SEQ ID NO: 239195 - DNA, 389 bp, Homo sapiens
acaaaacattgaagaagaaacaaataaacaggaagatatcggtgtttatggactggaagacttcacctcrtttaaatttctctactattcaaagtgatctacagattcaatgtaatccctatcaaaatatcagtggcatttttaattatatttaataattatacatatcttgggagtacatgtgatatattgaaacctatataccatgtgtaatgagcaatgcagggtaattgagagacagccatcaccttaaacatttatcttttctttgtgttgggaagattacaattcttctagtgactttgaaatatacaataaattattattgactataaattgtgtgctcagtagcatttttttcaaagtagaaaaatatcctaaaattaata

SEQ ID NO: 239196 - DNA, 595 bp, Homo sapiens
agcaccctatatgtccactgaaggatcttgggcaaggtaggatgatccttatctcatcaagcagcagaattaaaagctatagagctkctcccagagactcctgggatgaaaatctccagtaaaagatactcctgataacactaggggaaaagaacagtaacactgatcactgggaataaaatcagattctttaacatggtcttcaaagtcctgctttatctacctcccccacccctgccctcccctcacataattttctatttcccccttctttaccactctagatgtctttatatttcttgtgtttgccatgcttcctttagccccaagccttttaaagattctaaatctaaatcctttgtatctgatttccatacctccaacacctttcctctggttaaattcaatttattcctcagatttcagttcaaatatccctttcccaagaaagccttctctgactaggtcaactctatcttctatgtttgtattagttttgtattgctgcaaaaccaatgatcataaatttagctgcttaggagaacacaagtttattatctcatagtttccttgggttaagagcctgcacatggct

SEQ ID NO: 239197 - DNA, 502 bp, Homo sapiens
ttaaaatagtgaaataagtgtctagtttcattctgtatttggatatgcattttttgcatcaccatttattgaggaagtagtgcttttcttggtgtatgttcttttcaacttggtcaaacatcagttgactataaatgagtgaatttatatctggactctcaggggttctcttctgtttgtgtgtctgcttttatgccagtaccattctcttttgatgtttaatagcttgtagtatatcgggtagtatgatgcctacatattcattcattttgctcagaattgcattggctatttggagtcttttttgcttccayatgaactttaggattgtttttttctatctctgaagaatatcttttgtattcggatagtgattgccttaattctgtagctctcttttggtagatggacattttaatgatatcaattcttctaatccacgaacatggggaatctttccatttatttgtgatctcttcaatttctttcattagagttgtat

SEQ ID NO: 239198 - DNA, 502 bp, Homo sapiens
ttaaaatagtgaaataagtgtctagtttcattctgtatttggatatgcattttttgcatcaccatttattgaggaagtagtgcttttcttggtgtatgttcttttcaacttggtcaaacatcagttgactataaatgagtgaatttatatctggactctcaggggttctcttctgtttgtgtgtctgcttttatgccagtaccattctcttttgatgtttaatagcttgtagtatatcgggtagtatgatgcctacatattcattcattttgctcagaattgcattggctatttggagtcttttttgcttccatatgaackttaggattgtttttttctatctctgaagaatatcttttgtattcggatagtgattgccttaattctgtagctctcttttggtagatggacattttaatgatatcaattcttctaatccacgaacatggggaatctttccatttatttgtgatctcttcaatttctttcattagagttgtat

SEQ ID NO: 239199 - DNA, 502 bp, Homo sapiens
ttaaaatagtgaaataagtgtctagtttcattctgtatttggatatgcattttttgcatcaccatttattgaggaagtagtgcttttcttggtgtatgttcttttcaacttggtcaaacatcagttgactataaatgagtgaatttatatctggactctcaggggttctcttctgtttgtgtgtctgcttttatgccagtaccattctcttttgatgtttaatagcttgtagtatatcgggtagtatgatgcctacatattcattcattttgctcagaattgcattggctatttggagtcttttttgcttccatatgaactttaggattgtttttttctatctctgaagaatatcttttgtattcggatagtgattgcyttaattctgtagctctcttttggtagatggacattttaatgatatcaattcttctaatccacgaacatggggaatctttccatttatttgtgatctcttcaatttctttcattagagttgtat

SEQ ID NO: 239200 - DNA, 402 bp, Homo sapiens
gttgcccatcaatggtagattggataaagaaaatgtggcaaaaaaaaaaaaaaaaaagaaaatgtggcacatatacaccacgaaatactatgaagccattaaaaaagtatgaaatcctgtcctttgcagcaatatggatagagccagaagccatcatcccacgtgaattaccacaggaacagaaagccaaatactggatgttcctactcacagatgggagctaaacattgaacacctggccacaaagatggcaaccattacatcctagaggtgggaggaagggagggggtaggtgttgaaaaactgctgggtaccatgctcactacttgagtgatgggatcatttataatccaaacctcagcatcacacaatayactcaggcacatgtacgccatgaatctc

SEQ ID NO: 239201 - DNA, 566 bp, Homo sapiens
gatgttagaattctaggatgccacaggtctttctctttccataaatcttaaagtctgtaggtttatgaaagacagttttgtcacagccagttagattcatgggttagcattgtggtgtaaggaggtgaatataatgaatgaactcagcaatgaacaggttttctgatgccagaagaagttttccctgcgtgttctataggtcttgtgccgtgtatcaagtatttcttctcttgatctactgtgcaatgggtataaggtttcagtgacacaagatgaagtcctagagattggctgtgcagcaccgtgcctggagttcacartactgaatcgtgcactgaaaaagtgtaagagggtaaatttcctgttaagtgctctcaccacactaaataaataaaatttatcatgagccaggcactgaactaagctcaggatatattatgatgaacaaatttagacatgacaaacgatctcaataaaacttaaaatgttttgctacaataatcacctggaaaaaaaagtcagtcttctctacagtataatgtggatggacacaaatgagtggtttt

SEQ ID NO: 239202 - DNA, 566 bp, Homo sapiens
gatgttagaattctaggatgccacaggtctttctctttccataaatcttaaagtctgtaggtttatgaaagacagttttgtcacagccagttagattcatgggttagcattgtggtgtaaggaggtgaatataatgaatgaactcagcaatgaacaggttttctgatgccagaagaagttttccctgcgtgttctataggtcttgtgccgtgtatcaagtatttcttctcttgatctactgtgcaatgggtataaggtttcagtgacacaagatgaagtcctagagattggctgtgcagcaccgtgcctggagttcacagtactgaatcgtgcactgaaaaagtgtaagagggtaaatttcctgttaagtgctctcaccacactaaataaataaaatttatcatgagccagrcactgaactaagctcaggatatattatgatgaacaaatttagacatgacaaacgatctcaataaaacttaaaatgttttgctacaataatcacctggaaaaaaaagtcagtcttctctacagtataatgtggatggacacaaatgagtggtttt

SEQ ID NO: 239203 - DNA, 533 bp, Homo sapiens
tacaatcccagctgaccaattaaacttygagagtttcagtggagatttaaggtcctgggattacttctggaaaaaaattaaaaagcttaccgtgcaattggcccaatactcaaaccaaaatctaatggacagaaaatatacaatttacaaacttgtgctttttttaaatgttaattaaaaatatgtttattaaacccacagatttttttagttggaaattttaaaattaaatttgattaatgaaaaaataaaatataaggaaaaatgacatttggaagcaaaatgaagaatttcagaagaaagaaaacattcaactaaatgatcttttgaacatattgaattcagtttgctagtgttgagaatctttacatccatgatcataaaataaattggcctgtaattttcttataccgtccttgtctgacattggtgttagggtaatgcatgaaaaaatgtgttggaaagtgcaccctttttaattgtttggaaaagtttgagaatagcattaatctgtctttagatatttggtagca

SEQ ID NO: 239204 - DNA, 533 bp, Homo sapiens
tacaatcccagctgaccaattaaacttcgagagtttcagtggagatttaaggtcctgggattacttctggaaaaaaattaaaaagcttaccgtgcaattggcccaatactcaaaccaaaatctaatggacagaaaatatacaatttacaaacttgtgctttttttaartgttaattaaaaatatgtttattaaacccacagatttttttagttggaaattttaaaattaaatttgattaatgaaaaaataaaatataaggaaaaatgacatttggaagcaaaatgaagaatttcagaagaaagaaaacattcaactaaatgatcttttgaacatattgaattcagtttgctagtgttgagaatctttacatccatgatcataaaataaattggcctgtaattttcttataccgtccttgtctgacattggtgttagggtaatgcatgaaaaaatgtgttggaaagtgcaccctttttaattgtttggaaaagtttgagaatagcattaatctgtctttagatatttggtagca

SEQ ID NO: 239205 - DNA, 533 bp, Homo sapiens
tacaatcccagctgaccaattaaacttcgagagtttcagtggagatttaaggtcctgggattacttctggaaaaaaattaaaaagcttaccgtgcaattggcccaatactcaaaccaaaatctaatggacagaaaatatacaatttacaaacttgtgctttttttaaatgttaattaaaaatatgtttattaaacccacagatttttttagttggaaattttaaaattaaatttgattaatgaaaaaataaaatataaggaaaaatgacatttggaagcaaaatgaagaatttcagaagaaagaaaacattcaactaaatgatcttttgaacrtattgaattcagtttgctagtgttgagaatctttacatccatgatcataaaataaattggcctgtaattttcttataccgtccttgtctgacattggtgttagggtaatgcatgaaaaaatgtgttggaaagtgcaccctttttaattgtttggaaaagtttgagaatagcattaatctgtctttagatatttggtagca

SEQ ID NO: 239206 - DNA, 533 bp, Homo sapiens
tacaatcccagctgaccaattaaacttcgagagtttcagtggagatttaaggtcctgggattacttctggaaaaaaattaaaaagcttaccgtgcaattggcccaatactcaaaccaaaatctaatggacagaaaatatacaatttacaaacttgtgctttttttaaatgttaattaaaaatatgtttattaaacccacagatttttttagttggaaattttaaaattaaatttgattaatgaaaaaataaaatataaggaaaaatgacatttggaagcaaaatgaagaatttcagaagaaagaaaacattcaactaaatgatcttttgaacatattgaattcagtttgctagtgttgagaatctttacatccatgatcataaaataaattggcctgtaattttcttataccgtccttgtctgacattggtgttagggtaatgcatgaaaaaatgtgttggaaagtgcaccctttttaattgtttggaaaagtttgagaatmgcattaatctgtctttagatatttggtagca

SEQ ID NO: 239207 - DNA, 348 bp, Homo sapiens
atcctaaacaaaggggaaagacccaaagrattttctaaactaccaaaaaacttaaaaaatttcaaccaaccatactaggattgaatcatctcttcttgcttatagaaaatattagagtacatagtaatgtagccagttgttggaaaaaatggtaaaagtggtaagttcaaccagttaagatttaagttgaggtgtttatgtatttcttcgtggtattttgtcagctttctaaaggtgtaattttgttggagtttcactgaagagaatattatacctgtgcaatcatgatttgtagcctgttttcttaagatgccccagattgcataagcttcagcctcagaaaacctg

SEQ ID NO: 239208 - DNA, 348 bp, Homo sapiens
atcctaaacaaaggggaaagacccaaagaattttctaaactaccaaaaaacttaaaaaatttcaaccaaccatactaggattgaatcatctcttcttgcttatagaaaatattagagtacatagtaatgtagccagttgttggaaaaaatggtaaaagtggtaagttcaaccagttaagatttaagttgrggtgtttatgtatttcttcgtggtattttgtcagctttctaaaggtgtaattttgttggagtttcactgaagagaatattatacctgtgcaatcatgatttgtagcctgttttcttaagatgccccagattgcataagcttcagcctcagaaaacctg

SEQ ID NO: 239209 - DNA, 537 bp, Homo sapiens
aactcaaagatcttatatacactgagatyagtaaaatgaatatttttaaatgcttgcaatgctgaaagttttatgtattacaagttacaagaaagacaggatgattacatactaatacttgagtgatggggaatggcccaaaatgtatcttttgcaagacaatacttccttagaaacattgatttctatttcaagagagatgcctgaaagttggaagtgtaaaaagagaaactttcaaaacaatgtcgtgaacaaagtaaaagagaaaaaagcaatttaagttgcagctgccagcaacctgacttatcttgggtgtttactttgtaaattgagaggttacatttttcttaaggagtctgtcacattttatatgaactgtaattgcaggctagggacaaggaccccagagacagtgatgtcaatgtatctcctgaatgggagtactagccatcaccatgatgcaagctctatttgtcactggatctctatcttaacagcctgcataatgcagctgctgtcaactgacattaggcattt

SEQ ID NO: 239210 - DNA, 417 bp, Homo sapiens
aagtttgaaatacagaacatagaatacctccagtttagaaagtctgatgtatgcctcttagttccccatacttactacataaaaggaaatgctgaacaattgcatgtactaccttagttctgtaaggtttytctctaaatattcagatcatcgtgtttggggaagatactgtgtaaggtaagtttgcagtcttgatgctgatcaatcgcaggatgctttaaatagattctggacttactagaaagttttggttcaaaccagagaaatactggagaatgttgaagtttgatacatctgattttgaactgcagatacttgtggatagtactaatatacaaatcttagataattcaatctcgtttcttagtagttatggactcttatcttttctgtacatcagaatgtagcagattactt

SEQ ID NO: 239211 - DNA, 557 bp, Homo sapiens
gtattttaaaaagtctcaataagttagggactgacccttatccttctgccaacaagatgtaattcccacgcctaatccactgtaccttcttgtttgaattcatactctccctgcctgtactcccctgtttcagttcagaaaacaagtttgaaatacagaacatagaatacctccagtttagaaagtctgatgtatgcctcttagttccccatacttactacataaaaggaaatgctgaacaattgcatgtactaccttagttctgtaaggtttctctctaaatattcagatcatcgtgtttggggaagatactgtgtaaggtaagtttgcagtcttgatgctgatcaatcgcaggatgctttaaatagattctggacttmctagaaagttttggttcaaaccagagaaatactggagaatgttgaagtttgatacatctgattttgaactgcagatacttgtggatagtactaatatacaaatcttagataattcaatctcgtttcttagtagttatggactcttatcttttctgtacatcagaatgtagcagatta

SEQ ID NO: 239212 - DNA, 417 bp, Homo sapiens
aagtttgaaatacagaacatagaatacctccagtttagaaagtctgatgtatgcctcttagttccccatacttactacataaaaggaaatgctgaacaattgcatgtactaccttagttctgtaaggtttctctctaaatattcagatcatcgtgtttggggaagatactgtgtaaggtaagtttgcagtcttgatgctgatcaatcgcaggatgctttaaatagattctggacttactagwaagttttggttcaaaccagagaaatactggagaatgttgaagtttgatacatctgattttgaactgcagatacttgtggatagtactaatatacaaatcttagataattcaatctcgtttcttagtagttatggactcttatcttttctgtacatcagaatgtagcagattactt

SEQ ID NO: 239213 - DNA, 556 bp, Homo sapiens
gtattttaaaaagtctcaataagttagggactgacccttatccttctgccaacaagatgtaattcccacgcctaatccactgtaccttcttgtttgaattcatactctccctgcctgtactcccctgtttcagttcagaaaacaagtttgaaatacagaacatagaatacctccagtttagaaagtctgatgtatgcctcttagttccccatacttactacataaaaggaaatgctgaacaattgcatgtactaccttagttctgtaaggtttctctctaaatattcagatcatcgtgtttggggaagatactgtgtaaggtaagtttgcagtcttgatgctgatcaatcgcaggatgctttaaatagattctggacttactagaaagttttggttcaaaccagagaaatactggagaatgttgaagtttgatacatctgaytttgaactgcagatacttgtggatagtactaatatacaaatcttagataattcaatctcgtttcttagtagttatggactcttatcttttctgtacatcagaatgtagcagatt

SEQ ID NO: 239214 - DNA, 433 bp, Homo sapiens
gaattcatactctccctgcctgtactcccctgtttcagttcagaaaacaagtttgaaatacagaacatagaatacctccagtttagaaagtctgatgtatgcctcttagttccccatacttactacataaaaggaaatgctgaacaattgcatgtactaccttagttctgtaaggtttctctctaaatattcagatcatcgtgtttggggaagatactgtgtaaggtaagtttgcagtcttgatgctgatcaatcgcaggatgctttaaatagattctggacttactagaaagttttggttcaaaccagagaaatactggagaatgttgaagtttgatacatctgattttgaactgcagatacttgtggatrgtactaatatacaaatcttagataattcaatctcgtttcttagtagttatggactcttatc

SEQ ID NO: 239215 - DNA, 556 bp, Homo sapiens
gtattttaaaaagtctcaataagttagggactgacccttatccttctgccaacaagatgtaattcccacgcctaatccactgtaccttcttgtttgaattcatactctccctgcctgtactcccctgtttcagttcagaaaacaagtttgaaatacagaacatagaatacctccagtttagaaagtctgatgtatgcctcttagttccccatacttactacataaaaggaaatgctgaacaattgcatgtactaccttagttctgtaaggtttctctctaaatattcagatcatcgtgtttggggaagatactgtgtaaggtaagtttgcagtcttgatgctgatcaatcgcaggatgctttaaatagattctggacttactagaaagttttggttcaaaccagagaaatactggagaatgttgaagtttgatacatctgattttgaactgcagatacttgtggatagtactaatatayaaatcttagataattcaatctcgtttcttagtagttatggactcttatcttttctgtacatcagaatgtagcagatt

SEQ ID NO: 239216 - DNA, 544 bp, Homo sapiens
ttaaagtacaaatttatcatggttgatctcataaaccaatggttgcatrgttttaatgtctagaccaaagattttaagtgcatagaaaattacattaaaaattttaaattgtatattaatcacatacctcgatggaaaatattttttttcaaaaatccagcacacagaatgaaaatgtctgaaatatttcaaaactttttggcctaaacatcaaagttacaattacatgtatgtaactcggggggcaaaatagctgcactaaattgaacaaaagaatagtctatagatttttattttttattaataatcttgacaaatcacctatatagaaaaggtcatgaaaaatcaaaatagccaaaatatacactatgttcaatttttttcataatcaaatccatattgtgagtttcgatactagtgctaaatgctggggcaagcatgatgctgccgcaagtgtgttctcttactgttaagcatttaacaacttggtgataagcttctaaagcatagtaaaccattgtccatgaattatgccagagaattc

SEQ ID NO: 239217 - DNA, 544 bp, Homo sapiens
ttaaagtacaaatttatcatggttgatctcataaaccaatggttgcatagttttaatgtctagaccaaagattttaagtgcatagaaaattacattaaaaattttaaattgtatattaatcacatacctcgatggaaaatattttttttcaaaaatccagcacacagaatgaaaaygtctgaaatatttcaaaactttttggcctaaacatcaaagttacaattacatgtatgtaactcggggggcaaaatagctgcactaaattgaacaaaagaatagtctatagatttttattttttattaataatcttgacaaatcacctatatagaaaaggtcatgaaaaatcaaaatagccaaaatatacactatgttcaatttttttcataatcaaatccatattgtgagtttcgatactagtgctaaatgctggggcaagcatgatgctgccgcaagtgtgttctcttactgttaagcatttaacaacttggtgataagcttctaaagcatagtaaaccattgtccatgaattatgccagagaattc

SEQ ID NO: 239218 - DNA, 541 bp, Homo sapiens
aaagtacaaatttatcatggttgatctcataaaccaatggttgcatagttttaatgtctagaccaaagattttaagtgcatagaaaattacattaaaaattttaaattgtatattaatcacatacctcgatggaaaatattttttttcaaaaatccagcacacagaatgaaaatgtctgaaatatttcaaaactttttggcctaaacatcaaagttacaattacrtgtatgtaactcggggggcaaaatagctgcactaaattgaacaaaagaatagtctatagatttttattttttattaataatcttgacaaatcacctatatagaaaaggtcatgaaaaatcaaaatagccaaaatatacactatgttcaatttttttcataatcaaatccatattgtgagtttcgatactagtgctaaatgctggggcaagcatgatgctgccgcaagtgtgttctcttactgttaagcatttaacaacttggtgataagcttctaaagcatagtaaaccattgtccatgaattatgccagagaatt

SEQ ID NO: 239219 - DNA, 508 bp, Homo sapiens
gaattctaaattttctagtaaccacattaaaaatgtaaaraataggtgaaactaattttaatctatattatccaaatatatctaaaagttaccataatataaagttttaagaagacgtgttgcatatatttttaacaggtgtttgaattgttaactttgtgctgatggcacatcttgatttggagcagtcgtgtttcaggggctccacagcttcataagcctcatggctaccaccctggatagtgcagatctatatgatgcagggagaagctatccaaataactcataagtggtcctaaattgtggtaaaatatttaactgatatggatacatatgcagaatctaacttcaagtttgagagatcccttcttttgggatacactagctctaatacttaaactagtttattttttcataagttaaatgggattctaacattttaacgagttgtatgttaataatcggtagtttgctgctgcaagaaggaaagcaaacaccacttgaccct

SEQ ID NO: 239220 - DNA, 508 bp, Homo sapiens
gaattctaaattttctagtaaccacattaaaaatgtaaagaataggtgaaactaattttaatctatattatccaaatatatctaaaagttaccataatataaagttttaagragacgtgttgcatatatttttaacaggtgtttgaattgttaactttgtgctgatggcacatcttgatttggagcagtcgtgtttcaggggctccacagcttcataagcctcatggctaccaccctggatagtgcagatctatatgatgcagggagaagctatccaaataactcataagtggtcctaaattgtggtaaaatatttaactgatatggatacatatgcagaatctaacttcaagtttgagagatcccttcttttgggatacactagctctaatacttaaactagtttattttttcataagttaaatgggattctaacattttaacgagttgtatgttaataatcggtagtttgctgctgcaagaaggaaagcaaacaccacttgaccct

SEQ ID NO: 239221 - DNA, 489 bp, Homo sapiens
aaatgtaaagaataggtgaaactaattttaatctatattatccaaatatatctaaaagttaccataatataaagttttaagaagacgtgttgcatatatttttaacaggtgtttgaattgttaactttgtgctgatggcacatcttgatttggagcagtcgtgtttcaggggctccacagcttcataagcctcatggctaccaccctggatagtgcagatctatatgatgcagggagaagctatccaaataactcataagtggtcctaaattgtggtaaaatatttaactgatatggatacatatgcagaatctaacttcaagtttgagagatcccttcttttgggatacactagctctaatacttaaactagtttattttttsataagttaaatgggattctaacattttaacgagttgtatgttaataatcggtagtttgctgctgcaagaaggaaagcaaacaccacttgaccctcaacgttttct

SEQ ID NO: 239222 - DNA, 568 bp, Homo sapiens
cctttccaactttatcatatctctttcgtgtaccctacagagctatggagcagagcaattattccgtgtatgccgactttatccttctgggtttgttcagcaaygcccgtttcccctggcttctttgccctcattctcctggtctttgtgacctccatagccagcaacgtggtcaagatcattctcatccacatagactcccgcctccacacccccatgtacttcctgctcagccagctctccctcagggacatcctgtatatttccaccattgtgcccaaaatgctggtcgaccaggtgatgagccagagagccatttcctttgctggatgcactgcccaacacttcctctacttgaccttagcaggggctgagttcttcctcctaggactcatgtcctgtgatcgctacgtagccatctgcaaccctctgcactatcctgacctcatgagccgcaagatctgctggttgattgtggcggcagcctggctgggagggtctatcgatggtttcttgctcacccccgtcaccatgcagttccccttctgtgcctctcgggagatcaacc

SEQ ID NO: 239223 - DNA, 193 bp, Homo sapiens
tgaacccataaggcatccacgtgtgccttaagatctttttttttaataaaactattagaggtctcstagaagccatcttagcatggcatataaaagcctgttgagctgagtaactggagcccagggggagatgtggacatgttggaagctcaggctgtaggggtataataatgagtgcattgtgtttatagtt

SEQ ID NO: 239224 - DNA, 193 bp, Homo sapiens
tgaacccataaggcatccacgtgtgccttaagatctttttttttaataaaactattagaggtctcctagaagccatcttagcatggcatataaaagcctgttgagctgagtaaytggagcccagggggagatgtggacatgttggaagctcaggctgtaggggtataataatgagtgcattgtgtttatagtt

SEQ ID NO: 239225 - DNA, 461 bp, Homo sapiens
gaattcattccattgattcaaggaatgtttgatactgctgtgtcgcgtctgagttcagaaatttctttaccatctatagtttttgttttcttgttttgttttttgagacaaagtcttactcttgtcccccaggctggagtgcaatggcacgatctcagctcactgcaacctccgcctctcaagttcaagcgattctccttcctcagcctcctgagtagctgggattgtacaggcacctgccaccatgcccgattaatctttgtatttttagtagagatgaggtttcaccatgttggccaggctggtctcraagtcctgacctcaagtgatctgcctgcctcggccacccaaagtgctaggatcacgggtgggagccactgcacccgactgtagttatttttacttataaacatgaaggatcagtaaaatggtagagaaataaacttgaggaaaaaacccaa

SEQ ID NO: 239226 - DNA, 461 bp, Homo sapiens
gaattcattccattgattcaaggaatgtttgatactgctgtgtcgcgtctgagttcagaaatttctttaccatctatagtttttgttttcttgttttgttttttgagacaaagtcttactcttgtcccccaggctggagtgcaatggcacgatctcagctcactgcaacctccgcctctcaagttcaagcgattctccttcctcagcctcctgagtagctgggattgtacaggcacctgccaccatgcccgattaatctttgtatttttagtagagatgaggtttcaccatgttggccaggctggtctcgaagtcctgacctcaagtgatctkcctgcctcggccacccaaagtgctaggatcacgggtgggagccactgcacccgactgtagttatttttacttataaacatgaaggatcagtaaaatggtagagaaataaacttgaggaaaaaacccaa

SEQ ID NO: 239227 - DNA, 536 bp, Homo sapiens
ttcaaggaatgtttgatactgctgtgtcgcgtctgagttcagaaatttctttaccatctatagtttttgttttcttgttttgttttttgagacaaagtcttactcttgtcccccaggctggagtgcaatggcacgatctcagctcactgcaacctccgcctctcaagttcaagcgattctccttcctcagcctcctgagtagctgggattgtacaggcacctgccaccatgcccgattaatctttgtatttttagtagagatgaggtttcaccatgttggccaggctggtctcgaagtcctgacctcaagtgatctgcctgcctcggccacccaaagtgctaggatcacgggtgggagccactgcacccractgtagttatttttacttataaacatgaaggatcagtaaaatggtagagaaataaacttgaggaaaaaacccaagtagcagtggattactaggatgatataatattaggacaggttcaggatgccactctgtcagagaaactctaacattttggctaaacaatat

SEQ ID NO: 239228 - DNA, 546 bp, Homo sapiens
tctttttgccttttcatttgtcattaatctctagttttattatattacagccatttcacacacgaggctgagaaagactcagagaggttaagcgagttgcccaggaacacatatttagtaatgactggggctggactggaaacctcaaagtccatcttccttccactgccccaccctgccctgcatggttcataggtagatatgctatttaatcattccgggcaaaattccagcgggtgttattaygagacagtgaagcataattgatgagctcattatgaaatattaaaatttaatttttgtgggtaggaaattaaagtgttgttagaagtagcaattaagtggattttttcttaaagtgactctctgtctaggcagagcctagaaaggctgctgaaggcagagtagatgggggtgtaagcccagcaagcagaagtcagggtgggagatatggtcataaaagccagtacaaagattgttactgaattggccaggcggatccgtttgccaggaccctcagagaaaccttatgaaaatagtctcaga

SEQ ID NO: 239229 - DNA, 516 bp, Homo sapiens
tgaattcatttggctttgtctaaatgaggcactatcagataggacacagtggaaacatcactacttcattgattgatgttttttcatgtggaggctgagactaatgtggtgtcttattgctcctgagtttatctcattcagctattctttcctcaagttttaaccattttgtgtaatatcaacataagctttatgtgataactatatatggttatacttgccattcttaatcccttcaaaatatattgagataatttgtcaaaatgtttatatatctatgaaagggagagttggcaaggggaagaattgttcagaaatagtgttattctgtaaggtttttcaaygaatagactgccacagcttagtttctccctctctaaaataagatgttctgactagaataccttttaagatcctagcttctagcattaatagtcccaaaggatagtccagttctcaactctggctattagttagaaatgaaatagagaatgtcattgcccggtccctaccctc

SEQ ID NO: 239230 - DNA, 516 bp, Homo sapiens
tgaattcatttggctttgtctaaatgaggcactatcagataggacacagtggaaacatcactacttcattgattgatgttttttcatgtggaggctgagactaatgtggtgtcttattgctcctgagtttatctcattcagctattctttcctcaagttttaaccattttgtgtaatatcaacataagctttatgtgataactatatatggttatacttgccattcttaatcccttcaaaatatattgagataatttgtcaaaatgtttatatatctatgaaagggagagttggcaaggggaagaattgttcagaaatagtgttattctgtaaggtttttcaatgaatagactgccacagcttagtttctccytctctaaaataagatgttctgactagaataccttttaagatcctagcttctagcattaatagtcccaaaggatagtccagttctcaactctggctattagttagaaatgaaatagagaatgtcattgcccggtccctaccctc

SEQ ID NO: 239231 - DNA, 485 bp, Homo sapiens
agtggaaacatcactacttcattgattgatgttttttcatgtggaggctgagactaatgtggtgtcttattgctcctgagtttatctcattcagctattctttcctcaagttttaaccattttgtgtaatatcaacataagctttatgtgataactatatatggttatacttgccattcttaatcccttcaaaatatattgagataatttgtcaaaatgtttatatatctatgaaagggagagttggcaaggggaagaattgttcagaaatagtgttattctgtaaggtttttcaatgaatagactgccacagcttagtttctccctctctaaaataagatgttctgactagaataccttttaagatcctagcttctagcattaatagtcccaaaggatagtccagttctcaactctggctattagttagaaatgaaatagagaatgtcattgcccggtccctaccckcagagatactggctgaa

SEQ ID NO: 239232 - DNA, 579 bp, Homo sapiens
ctctatgaccgatttttctctaatatgcctaatgatcttaaataaaacacctgattcaacagtgcyttcctcttttgtgaaatattaatgagatgtttttcctatttcttgagtatatgttgacaattctaagtgatccaaagtatacagtgtgtgtgcattttctagcaggcatataaccacctgctaggagttatataggccaagcaatggttttcaaaaagtagtccattgaacctgtctcagaattgtcaggggtgcttgtcacatgttctgagtatttatttagatgtattaattgaaaacattttggggattaagtccaagaactgttttcaaaagcactttagattatgtgtatgtgccctttagtttaaaaactactgaacaaaattttgataaatcagggataaactatgagatcaccaactctaggattttatgaacaaactggaaagaacaatgagtaaataagtcatgtggtataaaattagtaacttattatctctgtaaacataataattggattatgctagcagagttacacaatttcacatcttcctaaggacacacaatagt

SEQ ID NO: 239233 - DNA, 651 bp, Homo sapiens
cgtgatagataaagatgctttcaaagacatctcaatattctctaggagcaatggacgaaattagtagttgagagaaagtccaactcgggaataagaagaattctgaagcaatgactgggataggtaatgcccaaggagccattcaacatagcatgttattggaagctttgctgagaactgtagcattaatccaaccaagtgaccagtgtcatctgtgcctgccaaaagaaacatgcacctctggttaaataaaccagaaatccaggagaaaagaggttaagtaccaagccattggcgtcaagaattaaaaaaaaaaaaagtctaggatacaaagaggtaagaaccccaagataattactatttccattgtgaggagtatcaaaacttcttcattgatcattgttgtcataaccctccaatatgtatcaggatggtgtttagggtcaagagtagcccaagtcctctagctctcactatttcagagctgggaactggactgtctggcatacctgaggctaaacctgaggtacagagtaaggactcagacctgctttgrggtctgcactttggccactataaagagctgaagacagaaaatgagaaagcaagtgacagtggatacttctagattcctctagatttccatactcc

SEQ ID NO: 239234 - DNA, 549 bp, Homo sapiens
ttagtggagcaataggttaggtaatagacccatgtctgaaagaggcaatgaggaaaatgtgcagacctaaaacatttatttctatttggatgaaccttaaaactgaccacatgatatatattctctgagattccctgaatgtaacagaaagactccacatattctgataaaattggaaaaaaaagtacactcaagttactgagctaaaataaataattktcattccatacattattctgatattaatcttaaataaaggaaaatccagtctaaacataaaatgtttcaaatcaagtaaaggaaagcattatctgaagagagagaatggccaagggcttatccaaaagtcacccacaaagcttctgttaacacttagttctaatgaataattttcatagcattagccctttccacatcactttcctattagcatagacaaatgagatccaaaatcatatggacaaatctgactttcaatctagttttctgtaaggtattcaatcactcagaaaatattgagatttgttttttctgtacaatttcgcttct

SEQ ID NO: 239235 - DNA, 500 bp, Homo sapiens
agggacaggcagcccttggcaggacggagacacccccgctgctctgtgcttccctccaattgtccggagagcagggaggggcgttccccaccggggggcgatgcgacaacttggcgagcgccgggtgtgtccgcggagtggcaagcctcagatgagaggcgaaaagggagcaggaggaacagagagttccttgtttctgccactttggggtagcctctgcctgcttcctacgtgtgcagttgggggcaccggtctgttgttagtcagagcttataattamaactgtgccatctcctcgcagttccggcccctcagcagtgagtcagtcccagcagctagctgtctctgggatccagactttgcagcttggtcagggtgctccttctaccggtctcccctctccccgcaattgatctttccttcctcggtggccttttcctcctcttccctgtcttaggcatacttaagggttctccagcccttcacacactcacatgatt

SEQ ID NO: 239236 - DNA, 338 bp, Homo sapiens
ccttggaggtactcaaatgcctcgccaaacttgagttcccttatactaaattttagtatatgtgactttgcttctgtgctcctkcagcaaccataaaaaattctagtttcaataaatgtgagtcattgccactggggacaattataaaaagaggggccgtgttaggaatagaaaagagaaataaaaggatatcttagctagaagaggaaggttttaaaaagttaaaggaaataaacacagatgttacacaatcctacatctgtcaggaaagagggagtgagataatatgtaagaggtaagctagatgacgagttagtgggtgtagcgcaccagcatgg

SEQ ID NO: 239237 - DNA, 610 bp, Homo sapiens
ctgagatgtataaaatgtcttttatattatttttctttagtaattcttttttttttttttttgtgatgaagtttcgctcttgttgcccaggctggagcacaatggcgcaatctcatctcactgcaacctccgcctcccgagttcaatcaattctcctgcctcagctgcccaaktatctgggattacaggtgtccgccatgatgcctggctaatttttgtatttttagtacagacggggtttcatcatgttgaccaggttggtcttgaacccctgacctcaggtgatccacctgccttggccttccaaagtgctgggattacaggcatgaggtaccacgcccggccaattgattcatttctatagacaaaaataaatatttataatagctttcatttgtttactggacacattgacttttaagtcattaaagattaaaatatgctatgaatatgttctttaggaattctagtgactaaggaaacattccaacaaaacaaacattaggtaccaaatatttacataatggagtacatatttatgttagtacatatatattatattggaactaacataaatattagtacatatatttatgtactattattattg

SEQ ID NO: 239238 - DNA, 610 bp, Homo sapiens
ctgagatgtataaaatgtcttttatattatttttctttagtaattcttttttttttttttttgtgatgaagtttcgctcttgttgcccaggctggagcacaatggcgcaatctcatctcactgcaacctccgcctcccgagttcaatcaattctcctgcctcagctgcccaagyatctgggattacaggtgtccgccatgatgcctggctaatttttgtatttttagtacagacggggtttcatcatgttgaccaggttggtcttgaacccctgacctcaggtgatccacctgccttggccttccaaagtgctgggattacaggcatgaggtaccacgcccggccaattgattcatttctatagacaaaaataaatatttataatagctttcatttgtttactggacacattgacttttaagtcattaaagattaaaatatgctatgaatatgttctttaggaattctagtgactaaggaaacattccaacaaaacaaacattaggtaccaaatatttacataatggagtacatatttatgttagtacatatatattatattggaactaacataaatattagtacatatatttatgtactattattattg

SEQ ID NO: 239239 - DNA, 484 bp, Homo sapiens
attgaggtgcgtggcagatcgagctaaaaaccctcgtcctaaacctgggctgtccattacagtagccaaaagccactgcagctattgagcatttgaaatgtggctagtgcagctaaagaacagaattgtaaacttaattttaattaattaaaatgtaaatttatatagctacacgtggctagcagttacttattaactagcagagcaattaacacgccaagagttaatattcacagtagccagctttgacctaaattactatcagcatttaccaagtaagaatccttaactgtcttcatatctaatttctccatcttgacatggggcaccatgagagtctttgcctaatgccacgtattatgattactgcattctattcayctaccagacgaagaattgagtcaaagaaataaatcacagtaaatcatgtgatttgctcagaacctacgttggtatcatctgattgctgtttcttcttcacgtt

SEQ ID NO: 239240 - DNA, 482 bp, Homo sapiens
tgaggtgcgtggcagatcgagctaaaaaccctcgtcctaaacctgggctgtccattacagtagccaaaagccactgcagctattgagcatttgaaatgtggctagtgcagctaaagaacagaattgtaaacttaattttaattaattaaaatgtaaatttatatagctacacgtggctagcagttacttattaactagcagagcaattaacacgccaagagttaatattcacagtagccagctttgacctaaattactatcagcatttaccaagtaagaatccttaactgtcttcatatctaatttctccatcttgacatggggcaccatgagagtctttgcctaatgccacgtattatgattactgcattctattcacctaccagamgaagaattgagtcaaagaaataaatcacagtaaatcatgtgatttgctcagaacctacgttggtatcatctgattgctgtttcttcttcacgtt

SEQ ID NO: 239241 - DNA, 600 bp, Homo sapiens
atatatcaattaacattgggggtatagttcattgattatgactttacaggaaagtggaggaatttgctagaatagtgagatttgggggaagagtgaatttgaggaagatgctgagattttgttgagaaagggtaatcaatttggttttgacaatttgtttttgtttgaataaattatctataattttaagataatttattttaaaatggtcttagctaattttaaaataatttaatttttcaaatcaaaacaaactcttaaattttcttaaaatagctacttayggtttaatgttaaaaacttaaaggtcaatacatgggacataaattctgtttagaatgtgatgttatatagtggtagtcttaccatgttttcttataaatttccttaaagccaaggttcatttttaactactgaacaactggccatctattactgagcaatcctcatccataatggctataaaatattattattattatttagggacagggtctcactatgttgctcaggcttgagtgcagagtctattcacaggtgcaatcccactacttaccagtacaggaggctataaaatattttaatgtgaagtgcgcagca

SEQ ID NO: 239242 - DNA, 677 bp, Homo sapiens
tcccaaccatcctgagaaaggtgtaacatattaatatgtgatttttttctgttttccttaggaaaaaagattaatgagcaatggttgctttgcaacaatttgcatagcattatgacataaaggtagaagatagaagagaagaataaggcaatcctgattcaatatagatcatcactaatgtgaaaatgaagagctccttataatccctgggagaattaaatcaatcctttaaccaaaacacaagtaaaatccaatgggagcacagagaactgagtgatcctgtctgattggaagaattcaaagaagcatcacagaagtgaagggcaggatttctacaggcagaaatgtggcagatttctaggatgagagaatagctttggttagcaatgacacataaacatatgaaaaaggcagggcatgtttgtggaatcattctgtgtagctggagaaggtcagtaaagaaggaaagtgggagaaaacyggataagcaggacaaacctgcataatggagacactgaacacagcaatgagaaactgaagcactattaatggtttttgcagtggacattagcacattccaacctgtgtttaagggtgatgtccaagtcagcagtgtgatgaatggacaagatgagtagtaagtaaccaggaccctggggccacactgagctgcccta

SEQ ID NO: 239243 - DNA, 609 bp, Homo sapiens
tcatacacagcacttggaatgatatatttaacatgggtctctgaaaattatgaaagaaggcatcatgacatgaagcatccagcaaagtgtgcttccagaccatgggcattaggaagatcatgcaaggctgggagaggtggctcatgcctgtaatcccagcactttgggaggctgaggccggccaatcctttgagcccaggagttcaagaccagcctgagcaacagggtgaaaccctgtctctgcagaaaatacaaaaagtagcccagcatggttgtgcctgcctgtagtcccagctacttgagaggctgaaatgggagggtcacttgagctcaggaggtcaaagcctgcagtgagctgagcatgccattgcacaccagccagggtgacagagtgagaccctccctcaaaaaaaaaaaaaaaaagaaaaaggaaaaaaaaagatcacacatctcagagtcatcctgaggtccaggactctaccacagttccattcaaactgtaactctwtgtgtgtggtctgagagcccacaatttgaacaagatcctcagataaccctcactgaagttccgaagcctctgctcttgtagtcagtttcactgtctctaga

SEQ ID NO: 239244 - DNA, 607 bp, Homo sapiens
acaaatcacttccttgtggccatctgagcagcagagggatccctcatgcaaataggataacatttcctggataacactactaaatattaaatatacttaattatttttgcaaattatttttgtaattttaatcaatttaaatttgttggagcttagggggcatattaatgacaaagaatcattaattatcattaattctgagggtggaaaagctcttgagctataatttatttgactcttctagaaaatatcctaggacaaatccaactcttctaagtacaagaagcataataaataataattctttttcttttaagtaacattggccaacactacatgtgatgtaaacttgaaactgtcaaggttagttggaatgtcctacattcaacattcctttttcrtgaccacagcactaagccaaggcattaagaaagacagcctgccttctacaagagtgcatcctagttggggagataatactcgtgaccggaaatagctttacataaaggctgcataaggatgtgaataagtgctgaagaatagaggacttggggaagaaagaggcatgtgtgggacaaaatgatttcttggtcatttcctacttgca

SEQ ID NO: 239245 - DNA, 518 bp, Homo sapiens
actatgaggcttgacatagttttgccttattgtgagaatagacataacttcctctgttgccaagagatggactcaggtccaggattgctgtctttctttcagtctcttcacttcctgacagccagacaccttctgatgtattcagacatgatcaaagaaggccccattaccccwtccagccacatttttgaatactgtgtctatcatccccagcacagtatggtactacaaagtccatttcctaatcatagcccaggtaaatgatatctcctcactcatcttgtgtattgatctttatccctcattcttcaaaatgtgagtgaacatcccagcataactgaactttctcataatatacctatgattttctgctcatccgtcctatcacatttcaaaggaagacatttaacaacttgcgttgtccccaaatcagaattcatccttctgtattaccaaattgactgagtatctaagcctcacttccaacccagaggttttacctgtttatctaatcccag

SEQ ID NO: 239246 - DNA, 577 bp, Homo sapiens
gacctcttgctcttcactaaagatctatgggggccaggcacagtcccagcactttgggaggccaaggtaggaggattgctggagcccagaagtttgagaccagcctgggtaacataatgagaccctgtctctacaaaacataaaaaattagcaggcatagtggctcctgcctgtagttccagctactctgaagcttgaggtaggaggattgcttgagcccaggagaggtaggttacagtgagccatgatcttgccactgcactccagcctgggtgacagagtgagacctgtctcaaaaaaataaaatcttctcccatggagtttacactaaataagaggagaaacaatgcatgtttggctaagggaacttgcttttcagctgagaggaaaggagacagtattcaggaaattgaaatttattcaaaaagtgaaaaatrtaatccatagttaaaacaatatcaaacatctattttctttggattttcagggaactaccttaacttagtatcattttggggaaaactgagggccaaaaagaagatgagaagaagaataggaaaaggtagctactgtaaaa

SEQ ID NO: 239247 - DNA, 220 bp, Homo sapiens
ataaaatggccccccccatctccctttgctgactctcttttcggactcagcctgcctgcacccacgwgaaataaacagccatgttgctcacccaaagcctgtttggtagtctcttcacatggacatgcatgaaaaccagtatgatatatttaacaaagtataacttgtacctggacctccagtcttgatccactcctatgaattttccacactactgaaa

SEQ ID NO: 239248 - DNA, 599 bp, Homo sapiens
agggtttgcaattctagtttcagacaaaatagactttaaaccaacaaggatcaaaaaaaagaaaaaaaaaagaaggacattacataatattaaaggyttcaattcaacaagaaaagctaattatcctataattatcctaaacatataggcacccaatactggagcatccagattcataaagcaaggtcttagagacctacaaagagacttagactcccacacattagtagtgggagattttaatacccaaatgacaatattagatcattgagacagaaaattaacaaagatactcaggacctgaactcagctctggttccagtggacctgatacatgtctacagaactctccactcccaaaatattgaatatacattcttctctttgccacacagcacttactctaaaattgatcacacaatagaaagtaaaacactcttcagtaaatgctaaaaactaaaatcatataaacagtctctcagacaacagcacaataaacttagaactcaatattaagaaattcattcaaaactacacaactacatggaaattgaacaacctgatcctgaataactcttgggtaaataataaaattaagg

SEQ ID NO: 239249 - DNA, 592 bp, Homo sapiens
ccattacttcggacatttatcttatctgttacaaacaatccagttatactcttttagttattttaaaatgtacaattaaattattattgactatagtcaccctgttgtgctatcaaatactaggtctytttttttttcccttgatggaaatccaggatggagtgcagtggtgtgaccacagctccctgcagcctctgtctcccagctaaggtgatcttcctgcctcggcctcccaggtagctggggttacaggttcgtgccactactcctggctaatttattgtaattttagtagagacggggttttgccatgttgcccaggctggtctcaaactcctgggctcaagtgatccgccctcctcggcctcccaaagtgctgggattacaggtgtgagccaccatgcccagcccaaatactaggtcttaagccttaatttttaatgaggaattcccaggtgaatcagaatcaagtggttcatagattacacttggaattgctagtcttgttcagctggtcttcttcagaaacagcgctgcttctcatccttggctacaccttagaggcacctgggaactttgaaaaaggaagctt

SEQ ID NO: 239250 - DNA, 592 bp, Homo sapiens
ccattacttcggacatttatcttatctgttacaaacaatccagttatactcttttagttattttaaaatgtacaattaaattattattgactatagtcaccctgttgtgctatcaaatactaggtcttttttyttttcccttgatggaaatccaggatggagtgcagtggtgtgaccacagctccctgcagcctctgtctcccagctaaggtgatcttcctgcctcggcctcccaggtagctggggttacaggttcgtgccactactcctggctaatttattgtaattttagtagagacggggttttgccatgttgcccaggctggtctcaaactcctgggctcaagtgatccgccctcctcggcctcccaaagtgctgggattacaggtgtgagccaccatgcccagcccaaatactaggtcttaagccttaatttttaatgaggaattcccaggtgaatcagaatcaagtggttcatagattacacttggaattgctagtcttgttcagctggtcttcttcagaaacagcgctgcttctcatccttggctacaccttagaggcacctgggaactttgaaaaaggaagctt

SEQ ID NO: 239251 - DNA, 491 bp, Homo sapiens
catgcttcatttcactcggcaagtagttaattaggcacccactgtatgcctcagagagatgaccatgggatgtttccaaccccctaaggacacaaaatataatcaagtgatggccagggtctgtgataagtgctaaggtggagacagattctccacagttgggggcccagaaaggtcttactaactaygtggcatttgagcttggccttcagggattagtgtcagatccccagacaccagatgaaaaacagtgtgcaaaggcaaggatgcatgaaaggtgcctggaaacacaaaacctctggaacctcaaattcaagaaagcagctgccaggcagacacagcaacaactgcagaggccccagaaacatgaatggagtggacctgccctaaaaatagaacaagggcaggctgactatgacacatgtttggaagtggagtcactaggaggtgactaagcgaaaggggagttgcctccctccctccctttccta

SEQ ID NO: 239252 - DNA, 466 bp, Homo sapiens
aagaatcccatggctggggccccttgggcaagagctaagccaggctccaggccactggccagctactaagttttcagaaagctggtggggttttcagcagagatccgtgatgctctgaaatcctaccagaggatatcaaaatatgtgcacamctctctctgaagctgcagtttctgtgtttcccctgggtgtctcccagggggttcttaactgacccagagacctgagcctctctccacttctcaccttcctcaaccctgcccctctctcccattgccacccctggctcactggcagcagagtgaagacagggccgagaagcatttcataaggaagaaaatcagtggtgagacccatgggtaccaattttcaaactgcagtatgagaaggagggggagtctgcctggagagtgggtaccacaggtcacacatttggctcctgttcacctgacagtcaactagctgg

SEQ ID NO: 239253 - DNA, 466 bp, Homo sapiens
aagaatcccatggctggggccccttgggcaagagctaagccaggctccaggccactggccagctactaagttttcagaaagctggtggggttttcagcagagatccgtgatgctctgaaatcctaccagaggatatcaaaatatgtgcacaactctctctgaagctgcagtttctgtgtttcccctgggtgtctcccagggrgttcttaactgacccagagacctgagcctctctccacttctcaccttcctcaaccctgcccctctctcccattgccacccctggctcactggcagcagagtgaagacagggccgagaagcatttcataaggaagaaaatcagtggtgagacccatgggtaccaattttcaaactgcagtatgagaaggagggggagtctgcctggagagtgggtaccacaggtcacacatttggctcctgttcacctgacagtcaactagctgg

SEQ ID NO: 239254 - DNA, 549 bp, Homo sapiens
gccagagctcttccccatgcctccaagaaggaggtgaaatcaaacctcccattcattggcaaggtcgggggaaatggtcaggggtgcctgggatgtaatcatacatccgaaaactygcaggaagtgtccactctgtcattcagcagaatttaccggtgggcactggaggccaagccttgcgtcaagaatgaatagaaccgtgacccggtccttgtaaagctcatagacaaaccatgatggcaatgtggagcctgaagaagacgtgcatgccaggggcagcaggaggaggaaggaccagtttctgctaggtggcacagggagtgaggaaaatctctgcagaggtgatatttgaggtgaacgatgaaggctaaacgacgttctgcaggtagagaagggggagggcagtccaggcagaggccatggcaagtgcaaaggccctgaggtgggtgggggatgagtgcagaggaaggaggaggagcacagctgggggcctggggcactattttgtgtgggttttatcctgcttcttattacagccggatatttttg

SEQ ID NO: 239255 - DNA, 549 bp, Homo sapiens
gccagagctcttccccatgcctccaagaaggaggtgaaatcaaacctcccattcattggcaaggtcgggggaaatggtcaggggtgcctgggatgtaatcatacatccgaaaacttgcaggaagtgtccactctgtcattcagcagaatttaccrgtgggcactggaggccaagccttgcgtcaagaatgaatagaaccgtgacccggtccttgtaaagctcatagacaaaccatgatggcaatgtggagcctgaagaagacgtgcatgccaggggcagcaggaggaggaaggaccagtttctgctaggtggcacagggagtgaggaaaatctctgcagaggtgatatttgaggtgaacgatgaaggctaaacgacgttctgcaggtagagaagggggagggcagtccaggcagaggccatggcaagtgcaaaggccctgaggtgggtgggggatgagtgcagaggaaggaggaggagcacagctgggggcctggggcactattttgtgtgggttttatcctgcttcttattacagccggatatttttg

SEQ ID NO: 239256 - DNA, 659 bp, Homo sapiens
cctcagttcaaatcccagctgtgtcacttactaattccatcactgtagatgagttaattaccatctctgagcttaggctccacatctgtgaagtggaaattataataccgaagtcacaggagctttgtagggagtaaaatgacctctggaaagaaccatgttcagctcctggtctgtagcaggtgttcagcaaaagtagctcatggagagaagaagtcagtgtaaggagaaaaagacgatggcagctggagatcctggaccctggagcatcacagaagcccaggagggaaaagccctccagaaggtggatgaacagtgtcaggtattatagaaagttcaggaggaactggattggcaggaattacattactgagtctttagagagtgcgatttggagtacaaaaagaacaggatgtacactgtacaaaaagtacagtgaacagaatgacagaaaaagcaagacagagaaatcactacaaaggccaaagtcaggattttggggctgcaaatagattatcctatgaacatcatttgagcaataaagacatctgattaacataacaagcagtctayagggtggcagctccagaatgagctcactggcccccagtgtccctaagaatccaggcctttttcatcctttctctacatcctgagca

SEQ ID NO: 239257 - DNA, 536 bp, Homo sapiens
atgaaaaatatagatgcaattataagagacctagaagacagagttagaagacttagcacacttttaagagaagtctcaggagagaagaaaaaacatgcagcagagcattccttactctatcctatgggttccttgatgatagtgaggtgtttttttccttaagtaagtagaacactggtcacagccctggtagagaaagcctaaacttttccttctttgtcaaatccctctcctaattttcaacctgcaaaagtctgggcagaggaagacctcattagcctctggctgaagcctgagatggcagagttttgtaagacacaggaaggggcatgggggttggtactctgttaccttgggcagtagagaggagtatatgcaaggaccgggataggaaaccagatgggaaaggtgcaaagaggtayctatgggaggggtctgaggaagcctgggagaacagaattcagatctaagagagatcctaagagcctctgaaggtttcaagtgcacttaactgtttctccccagagtgtctgatt

SEQ ID NO: 239258 - DNA, 601 bp, Homo sapiens
accacattaacaaagcattcaattgcacttagcttgtgttcttcttttcaaatataagtagctattttaaatgcctacgcttgttctctctttctttttagttgtaagaatatctctgccacttacctaatttttgcaaactttttatttttgtgcatatatttgtgtacatatacacaaacacatgcacacatacacacacattctaaagcactcaaggaggcaccttcataaacttgccttgcayggttgttggtttatccgtcaaagaaatcattaccaagagaatgccgtgcttcacatgcttactaaattttttaaaaatgcttttcattatatttatgcaaacataacttggctagctcataatttaccaaatttaagcatttgtcagggttatttccaatcactcagaaaaatgtgcctttgtgtattttgattatttaaagcaatattgtttccattatgcatatctgttgccagaacagcatgactgtcttgactgaatgaggaagtgggaatgctcttaattttcctacacgcatctgcagaagtacttttgattgtttagccaatgcacatataatgatgtaggcataaa

SEQ ID NO: 239259 - DNA, 571 bp, Homo sapiens
agcatgcaggagccatcataagagtcacaaggtattaagcttcctctttggagcctggtagtgtgctaagttctttatgtaaattttatccttaaaatagctttgcagagtttctccatttcacaggaagtgaatgaatgcttagagaagatcaataaatgcccaaattgcacaactgttatatggtggagctaagtttcaaaccaagtttcttaactgttccatgtcacactgctttcttagacgttatagcctttttaaaaaggagatgtggaatgaacatttttaaattcaaagtttaagtatacacacacattttatgcattgggtacaagagtataaatgccatgaatacttactaatcagatatttaatatctgcttctgccctttctcctagaaaagtgatagtatgaagggagacagagtgatttgttccacacccaacataaattattgcccagggtgagttaatttgtgtttatttctgaagtggcagtggttgcttcctgagggtctaaccttgtttgactsttttgtaggctaaatttctgcaggccttctgcagagcc

SEQ ID NO: 239260 - DNA, 427 bp, Homo sapiens
ccggtgacagtgctggtgcatcacaagtaaaccacaatgtcaacacacgatgatcactatgtacgcaaaggggttccagaagccctacttgggtgagtcagggagaatgtcctggagaaggtggcatttcaccatctttgaagagtaaatgacccccaagaatcaaagggaaagaaaaacatcttaagaaagagggaggaacacaggccaagtatgggaggagaagctatgaagactaaaattactggkgtacaaggaagtggtaaaaaagaaaaagatctttcaaagaatattgtgaactgagccaaggatgtggcccttttctcatggcaacaaagggctgctggcagctttaaataggaactgtgatgggggagcttgttcccttcagttccccagagcacctagagcaggcagaataacagga

SEQ ID NO: 239261 - DNA, 427 bp, Homo sapiens
ccggtgacagtgctggtgcatcacaagtaaaccacaatgtcaacacacgatgatcactatgtacgcaaaggggttccagaagccctacttgggtgagtcagggagaatgtcctggagaaggtggcatttcaccatctttgaagagtaaatgacccccaagaatcaaagggaaagaaaaacatcttaagaaagagggaggaacacaggccaagtatgggaggagaagctatgaagactaaaattactggtgtacaaggaagtggtaaaaaagaaaaagatctttcaaagaatattgtgaactgagccaaggatgtggccctttwctcatggcaacaaagggctgctggcagctttaaataggaactgtgatgggggagcttgttcccttcagttccccagagcacctagagcaggcagaataacagga

SEQ ID NO: 239262 - DNA, 596 bp, Homo sapiens
actttgcctctacaaaaatattaaaaaattagccaggtgtgatagtgtgcacctgtagtcccagctacttgggagactgaggtgggagaatcacttgagcccaggaggcagaagtttgtagtgagctgggatcatgccattatactccagcctgggtgacagagtaagatcccgtcttaaaacacacacacacacacacacacacacacacacacaactgtgtaactatagagcaatatttgtactattttaaagaaaaaaacgcaaaattcaacatggcatgtatttgaagatggtaacggttaaaacaatgtatacaagcaacaaaaactaaaaaataataactaaaaatagttgggttagagtagtgggatggtaggtgatcttttctctccaaatatttaaaaaattatattgttgcatgatatactacatttagaggggaggcattcaggctccttgatagcactccagtttaagaatcatttgcagtctccayaaaattatactactgtttgttaaacgaaattctttccttgaagcattcccccatcaattttgccaatgttagcttacattatgcaggacaagagcaa

SEQ ID NO: 239263 - DNA, 540 bp, Homo sapiens
tcctaaaacctttttctttcactatttttacagtaacaaatcagatatctaggctcatatcccacttatggcttgtaagtggtggaactgggctatgggtaggtaagctatcatgggtaagctgctttactggattatacttcaatttctattttgtaaaatgagaatggaagagcatttacttcataggtttgctcatgaaaattaaattggtaaattatgaraattccttaggatttgtctcataataatcaatagccattattaatatgattattattatttaaataggttttcaaatctgaccaatactgtaaagatttagaagcaattaagtagagagtctataagggaaaaagacatataattctagataattatcatgtaaaattctattgaaagatgttatttcccatgagcctaatgctttaaaaataattatactaaataattattgatttgttaaggtggcaggaactctgcctttttctttctaccattatattagtcaattcaggctgctataacaaagaaccatat

SEQ ID NO: 239264 - DNA, 382 bp, Homo sapiens
tcataggtctagttggagaaggtcgagtattaagaaatgattcagtgggtagttagcagggatgatttctgtggytgcattgacattatcattgaaaagcctggtaagtctttctaaccaatctcatccacatcttagctcagccatctgggtctccctttcaggatgcccatttgcttgagagtaatgaatatcatggtaatgactttctctgataaaccaaatcaaagctagatcatgcattttggtcacatcccaagaatatatagtacatttgacaggttacctactattcctgcaggcctatcttccagctaagtaattggatcacagaatatttgggccacaagaatagcattttctaaaatgttatatggaattc

SEQ ID NO: 239265 - DNA, 382 bp, Homo sapiens
tcataggtctagttggagaaggtcgagtattaagaaatgattcagtgggtagttagcagggatgatttctgtggctgcattgacattatcattgaaaagcctggtaagtctttctaaccaatctcatccacatcttagctcagccatctgggtctccctttcaggatgcccatttgcttgagagtaatgaataycatggtaatgactttctctgataaaccaaatcaaagctagatcatgcattttggtcacatcccaagaatatatagtacatttgacaggttacctactattcctgcaggcctatcttccagctaagtaattggatcacagaatatttgggccacaagaatagcattttctaaaatgttatatggaattc

SEQ ID NO: 239266 - DNA, 574 bp, Homo sapiens
gcaggtatagtaaaatgtttgccgtggaagttggccacaaagagctactacataactatatacacctaagaacatgcaccttgttagaaagaaggctcagtgtcctaaggaraaatgggcacttagataaaggattttttgtaaagcaaatttacttttgtgcagaagggtgtctcccatatggctggttgctactagagtacttagaacaaaggagagtagaagtttttatttttaacgtgacttttgcctttgtgtcttttccccagtggtggggttggactgtataatttaaactagacttgactggctaaacatttaagcttttttaaataaggtagacgtgtaatgggagagaggggaaaggaggaaggggtcatctgcagcaaactagagagtcagtctatttttaaataaggaaaggaatgtgagctgctgttgataacgtcactgttgctgtggtatgcctgggcacgtagtaaagtcagaaagcagtaaaggagaagaaaggtggggcagtattgggaattatgggaattaaagaataaaaggttgagcaggctgtttgaagaga

SEQ ID NO: 239267 - DNA, 562 bp, Homo sapiens
cttgggggtttatttgttacagcaggtaatattaccttaactattgtagggatccacagtacttaaggagcttaaatataatgtttcagatcaactcacatgaaccaagtataaaattagttatctaataatgtatacatatatacccagatcacaatcttctgttaaaatacgcaaaacagctttgttatttagtactttaagtttttgcctggaggagtgtgtgtgtgtgtgtgtgtgtgagagagagaragagagagagagagagagagagagagagagagagagaatttccctaaataaaatttcctccttctttctgtctgaaagtggctcagggaatcactgactactatttcatatgaaatactcaacacaaaaaggcaagctagtgcctcctactggtcccgctgataaagtacatatccttgagacagtgtatcacagagctgttaagtggggaatccaggatcagggagttctcatgactttagagcctgtgtaccatctaccatactccaacattctttacaagcattatcatgagggtatttcagcggtc

SEQ ID NO: 239268 - DNA, 531 bp, Homo sapiens
agatataggctaggatcctaaaaaaataggttcaattgtacatactgtttgtaacctcacatctctcctawtttgtcatgaacatctcatacattcatccttctataatattatttttggtgacaacaaagtatttttctgtatcgacatactgtaatttctgtaaccaaatgttaaacatggccttttccccccatttattacagccaaaattacagtgactattcttgaatatcttcataactgtcttaaattcttaaagtaatttacagagtcaaagggcactcacacttttaaacttctacaaggcattgccaattagaaaaggagccctggcttggaacacacatcctgcccttgtcatctgaaagaaatagatgagtttgcttctctacagaaagctgtttgaaaaacagtaaggccaaaatgttagctgttaagctaatgtgctaaggagtcctgggagtttgtaaatggcaatcacatgagcacacctctcagaagctgctgttctttttcattcacactcca

SEQ ID NO: 239269 - DNA, 571 bp, Homo sapiens
ctgggccccaggcctgaaatttccatttcacttagtcaaaatgagaaagaaatttaatactgcttgctctaatatttgcttcctgaagaacagcttttaggattcttaagcacaagaaacttgacctgataaaggaactatatgctttgccacttttctgaactgtactgtgaatgttaatagacaataaaactgccttcttccatttgaccatgatagtacccccatatttaatatttctgaaatcctataaaaactttgaatgtgtgtggtayaaaaggatataacgataaaggcataaagaaaatatgaccttttgaactttaagttttttttgtacttgctaatctgaagctatattatgacaggtaaaattatataatacttgggtttaattgttcagaaagatatttttgaaaactcttttccgtgtctatttaaaagagaaataagagtcaaaaacttaggcactgatactttgcttaaaatactgggaaatctcatatgagattctgggcattctgttgccttttaggttcttccttgcctctgccttaaattctgtgtttgc

SEQ ID NO: 239270 - DNA, 571 bp, Homo sapiens
ctgggccccaggcctgaaatttccatttcacttagtcaaaatgagaaagaaatttaatactgcttgctctaatatttgcttcctgaagaacagcttttaggattcttaagcacaagaaacttgacctgataaaggaactatatgctttgccacttttctgaactgtactgtgaatgttaatagacaataaaactgccttcttccatttgaccatgatagtacccccatatttaatatttctgaaatcctataaaaactttgaatgtgtgtggtacaaaaggatataacgataaaggcataaagaaaatatgaccttttgaactttaagttttttttgyacttgctaatctgaagctatattatgacaggtaaaattatataatacttgggtttaattgttcagaaagatatttttgaaaactcttttccgtgtctatttaaaagagaaataagagtcaaaaacttaggcactgatactttgcttaaaatactgggaaatctcatatgagattctgggcattctgttgccttttaggttcttccttgcctctgccttaaattctgtgtttgc

SEQ ID NO: 239271 - DNA, 447 bp, Homo sapiens
cctgaccctccttccttcacttctcttcagaatcctcatcttcaccwatgccagcgggcattgtctgccattcttaggcaccaagatccagtatttatatgcagtaaaggtgatttgcagctgtctaatctcacattattcagtttggttctgtagccttaatgaatgccatttggggtttctttgttgcactcatcttttcctgcagaatggtagttggtgaagtgcctgctttcacttccatttctgacccaggaaagtaaaagtaggcatgtgtcttttccacatccactggattttgtttgtttcttttgtatttttttaagtccttttctgaatatccgctgtcaaatgaaggcagatattggaattaggctcaacaagtcgggtaaaatgtgttagtttttttgagtttagcaatttgtctgccatcttgttcttgaattc

SEQ ID NO: 239272 - DNA, 511 bp, Homo sapiens
ggaggatgtgcataagttatatgcattttctatacaccattttattgcagggatttgagcaaccacagattttagtgtccacaggagtcctggaaccaattctccactgatactgagggatgactgtatctgttcagtgggtaaatattactcaactcaattcttttcttctggctttacrgaatgacaaatataataaaatgtgttctttgtcccttctgtagtgggcatgcttaaattttgtgctattatgcacaacatacatttttatccatcagctagagaatcaagcttaataatttttagaagaccataatcaatgccagcttccactcatcttttaaatttcagcttaccatgtcactttttcagcaaaacttccctaatccaaggttaggttatgtcgcttaattgcaatcctacaaaaccccatctttcttccttgtgcataattacatttttaattaaatacttcaagtatttacttgtctaatgcctagctctcttctag

SEQ ID NO: 239273 - DNA, 511 bp, Homo sapiens
ggaggatgtgcataagttatatgcattttctatacaccattttattgcagggatttgagcaaccacagattttagtgtccacaggagtcctggaaccaattctccactgatactgagggatgactgtatctgttcagtgggtaaatattactcaactcaattcttttcttctggctttacagaatgacaaatataataaaatgtgttctttgycccttctgtagtgggcatgcttaaattttgtgctattatgcacaacatacatttttatccatcagctagagaatcaagcttaataatttttagaagaccataatcaatgccagcttccactcatcttttaaatttcagcttaccatgtcactttttcagcaaaacttccctaatccaaggttaggttatgtcgcttaattgcaatcctacaaaaccccatctttcttccttgtgcataattacatttttaattaaatacttcaagtatttacttgtctaatgcctagctctcttctag

SEQ ID NO: 239274 - DNA, 482 bp, Homo sapiens
gaggatgtgcataagttatatgcattttctatacaccattttattgcagggatttgagcaaccacagattttagtgtccacaggagtcctggaaccaattctccactgatactgagggatgactgtatctgttcagtgggtaaatattactcaactcaattcttttcttctggctttacagaatgacaaatataataaaatgtgttctttgtcccttctgtagtgggcatgcttaaattttgtgctattatgcacaacatacatttttatccatcagctagagaatcaagcttaataatttttagaagaccataatcaatgccagcttccactcatcttttaaatttcagcttaccatgtcactttttcagcaaaacttccctaatccaaggttaggttatgtcgcttaattgcaatcctacaaaaccccatctttcttccttgtgcataattacrtttttaattaaatacttcaagtattt

SEQ ID NO: 239275 - DNA, 501 bp, Homo sapiens
gtgtaagatgcccatcctgggaaggagatagcaggagcaggacactgtaccacaaccaaagaggcaatccccagaaggagtgactccagrcaaccagtggagacaaaaggggcaaagcaggaaagaaattgttggccccatattccctaccctactcgttcatgagcccttgaggggggctggtcctgagtcgtgccagatggggtcagtgctgccgccctctctggggactggcttggtcccaggtacagaggcagatacaagagcatccagcatgctggcagatgaaacaagagacagaagagacagagggtcgcaggcacaaggccttctcactcaaagcagatgctgatgttttctttgagtagccaaaatattacgcagatatcttttcctctttgaatgtgaaatcatgctgaatttgggagatgctggcccacagaacctaaatatagcttcttgacacgctgaaattgatctgcgatggtaacttgctgtgat

SEQ ID NO: 239276 - DNA, 473 bp, Homo sapiens
atggttcagtgcagtatccctggagtcgagattggtgtttggcacaaagaaggtgctcagtgattgtttgttgaatgaatgaagaaataagaaaaaaagagaagggacaaagtctaacattgtaacctayaattttagaagaaaagagagcaggaacacaaaccagcttcagtatcaatatgcatttttactacttggacaatcaaacaactgctaacttcaagagcaggataagtgctgagaaccttagagaagcccacctggggagaccactgtgtacacactaatttcaatgctagaagaaagacctttggtaaccggtggagcgcctatcctagatgcaaaggggattgcatctcaacagtttgctcgtaattcttccaaggtttgtcaaaactgcaaatagctttacacggaatgatattttggtaataatcactggaaaaatgagtatgagatataaatcaataata

SEQ ID NO: 239277 - DNA, 473 bp, Homo sapiens
atggttcagtgcagtatccctggagtcgagattggtgtttggcacaaagaaggtgctcagtgattgtttgttgaatgaatgaagaaataagaaaaaaagagaagggacaaagtctaacattgtaacctataattttagaagaaaagagagcaggaacacaaaccagcttcagtatcaatatgcatttttactacttggacaatcaaacaactgctaacttcaagagcaggataagtgctgagaaccttagagaagcccacctggggagaccactgtgtacacactaatttcaatgctagaagaaagacctttggtaaccggtggagcgcctatcctagatgcaaaggggattgcatctcaacagtttgctcgtaattcttccaaggtttgtcaaaactgcaaatagctttacacrgaatgatattttggtaataatcactggaaaaatgagtatgagatataaatcaataata

SEQ ID NO: 239278 - DNA, 540 bp, Homo sapiens
cagaatatctggctgcagcttactgtagccatcctgtcatcagttcccaaacgggaggaatgccatggtctcttgacagaggctctcttgcactgttggaggcaagggcctgctgtcctgtcaggttggcccatttatccagttactcgtgaaatatcttgttctctcagagaatcaaccggcggctgtgtgctgacttcacaaagaaaaatccattctctcaccaagtagttgtcaagcataataaagaaaaactggcagaataattggggtggttgctgagtctaactcaatatcrtatgaaagaaaatatatggaacagtggtgtttaaagagaactgcacacctctgtttgtatggcaggctcaaacacagccagtcagacgtatgtagagtcaaagtgaggaagtggaggtcatttagactactggtagacccatatttcgagccaaaacagaagcttttaacagaaatagatgcttcaggatctgtctctctgccaagccaacccagcgattctcatcagaaacctcaacaaac

SEQ ID NO: 239279 - DNA, 610 bp, Homo sapiens
tcatggtggaaggcaaaggaggagcaaagtcatatcttacatggtggcaggcaagagagagcttgtgcagaggaactgccctttataaaaccacatctcatgagacttaytcattatcaggagaacagcatgggaaagacctgcccccatgattcaatgaccttccactgggtccctcccatgacatgtgggaattatgggagctacaattcaagatgagatttgggtggggtcacagccaaaccatatcaggacaccaaggcacaagaataacataagggactctgtgactcagttggggaagagatggatggaggtgagggataaaagtgtacactgctcaggtgataggtgtaccaaaatctaagaagccactatgaaagaacttatccatgtaatcaaaacccacctgtacccccccaaaaactattgaaataaagctttttttttctaatgagaaaaaaaaaatcaggccctctctccttgcttcttctgggaggtgttgacagggttcaacaggaggaaaaagtgaagagaacactggtgcctgagaggcaaggagggaggagagcagccctatgggcagggagggagctgggaaagagaagtg

SEQ ID NO: 239280 - DNA, 523 bp, Homo sapiens
aaaaactaatcaacctccatcatttcatgttggggccaggacaatggctctcatgatgcccaggcttagagactttgagatggtgtttccttgattgcttatgggaaccgtcctgcagaagtataatttcatttattagaagcagakagcttataaagtcctgtgaaacaacaggtgccagaaggaaagccagacactctaatgagcacttggaactggctctgcagaaagcagagatgcaattgatgccgtatgcatttatctttagacacacatcaatcaaagccttccaaccagattatctcagcatgctactgcaaacagttttcatctacagttattgacggttttgttcctaaccaagaaaaaaaatggaatggagaaaaatcatggatagtgcaaagtcttagaacaggtgcgtatatatgaagtagtttaaaggaaaaataaataatcagaatatacctggtgacacttcatttggtttcttggaaaataaaatgttatacataatgaaattttc

SEQ ID NO: 239281 - DNA, 575 bp, Homo sapiens
tatgctaagggagataacctccaaaaaattagaagtacatttgaaatcatattcagtatgtcttacaccctataatgataagggtgtttaatattaaaacaggcaatacctacttagtaaaccgttaacaaacttaattaaataattcatgtaatgtaccaatagattgaaaattttattggatactacttaattaccatattattgcatttcattcatacccatggacatggtatttctatttctacacaagtagaagtagtattttttaattcccatgaataaaaattattaccataggaaggcaaataataagcataagaaaatatatatatgtttttatagaaggataaacacaatgaacttmatatgaaacacaatgaactcttgaaaagaaagcatcttccagtccaggaaacatggcaaaaccccatctctacaaaaacaaaactaccaaaattagccgggcgtggtggcagaacactgtggttccagctactcaggaggctgaggtgtgaggagcacctgagcccaggaggtcaaggctgtggtgagccgagatcgtaccactgcac

SEQ ID NO: 239282 - DNA, 575 bp, Homo sapiens
tatgctaagggagataacctccaaaaaattagaagtacatttgaaatcatattcagtatgtcttacaccctataatgataagggtgtttaatattaaaacaggcaatacctacttagtaaaccgttaacaaacttaattaaataattcatgtaatgtaccaatagattgaaaattttattggatactacttaattaccatattattgcatttcattcatacccatggacatggtatttctatttctacacaagtagaagtagtattttttaattcccatgaataaaaattattaccataggaaggcaaataataagcataagaaaatatatatatgtttttatagaaggataaacacaatgaacttaatatgaaacacaatgaactcttgaaaagaaagcatcttccagtccaggaaacatggcaaaaccccatctctacaaaaacaaaactaccaaaattagccgggsgtggtggcagaacactgtggttccagctactcaggaggctgaggtgtgaggagcacctgagcccaggaggtcaaggctgtggtgagccgagatcgtaccactgcac

SEQ ID NO: 239283 - DNA, 575 bp, Homo sapiens
tatgctaagggagataacctccaaaaaattagaagtacatttgaaatcatattcagtatgtcttacaccctataatgataagggtgtttaatattaaaacaggcaatacctacttagtaaaccgttaacaaacttaattaaataattcatgtaatgtaccaatagattgaaaattttattggatactacttaattaccatattattgcatttcattcatacccatggacatggtatttctatttctacacaagtagaagtagtattttttaattcccatgaataaaaattattaccataggaaggcaaataataagcataagaaaatatatatatgtttttatagaaggataaacacaatgaacttaatatgaaacacaatgaactcttgaaaagaaagcatcttccagtccaggaaacatggcaaaaccccatctctacaaaaacaaaactaccaaaattagccgggcgkggtggcagaacactgtggttccagctactcaggaggctgaggtgtgaggagcacctgagcccaggaggtcaaggctgtggtgagccgagatcgtaccactgcac

SEQ ID NO: 239284 - DNA, 575 bp, Homo sapiens
tatgctaagggagataacctccaaaaaattagaagtacatttgaaatcatattcagtatgtcttacaccctataatgataagggtgtttaatattaaaacaggcaatacctacttagtaaaccgttaacaaacttaattaaataattcatgtaatgtaccaatagattgaaaattttattggatactacttaattaccatattattgcatttcattcatacccatggacatggtatttctatttctacacaagtagaagtagtattttttaattcccatgaataaaaattattaccataggaaggcaaataataagcataagaaaatatatatatgtttttatagaaggataaacacaatgaacttaatatgaaacacaatgaactcttgaaaagaaagcatcttccagtccaggaaacatggcaaaaccccatctctacaaaaacaaaactaccaaaattagccgggcgtggtggcagaacactgtggttccagctactcaggaggctgaggtgtgaggarcacctgagcccaggaggtcaaggctgtggtgagccgagatcgtaccactgcac

SEQ ID NO: 239285 - DNA, 717 bp, Homo sapiens
  misc_feature (1)...(717): n = A,T,C or G
aaaaactcttctttgaactttcatgttttcaggttaagtagtcctagtgaaataaaatccttttcaagatagcattgtcttcctatctagctcacaagtttcaagacggttgggatggtgtgggtcttagtcattgcgataatcctaggttcrgcacagggtctgccatgcaacaaaggtttactgaatttaatattttgaattctccaattattggcattgttcgtttctggacatgttctttttacccattgcatcatcaagactacctatcagtacagctgtgatggcagttacaatattaaaacacttcccaaccccatggtccctctcccagatatcctggtcacctgataggatgattccacctatcatcctctggaccttctagaactttccaccatccagcaactaaagggttaacacccactgcagctgggagcttccaggaccctgctgattggccaatgcctggtgccctgccttgaaacagctttgaagtattttaaatataatcctgactccagtgttattaatacatgaacaagaataacactttaagggagatcaatttaaataataaaccacaagtgttaccaaatgctcctccctttcatctgtaatatcntgaatcaacagttgccgagctgtggccagaggtggcacttcaggacaaaggnnnnnnnnnnnnnnnnnnnnnnnnnnnnnnnnnnnnnn

SEQ ID NO: 239286 - DNA, 717 bp, Homo sapiens
  misc_feature (1)...(717): n = A,T,C or G
aaaaactcttctttgaactttcatgttttcaggttaagtagtcctagtgaaataaaatccttttcaagatagcattgtcttcctatctagctcacaagtttcaagacggttgggatggtgtgggtcttagtcattgcgataatcctaggttcggcacagggtctgccatgcaacaaaggtttactgaatttaatattttgaattctccaattattggcattgttcgtttctggacatgttctttttacccattgcatcatcaagactacctatcagtacagctgtgatggcagttacaatattaaaacacttcccaaccccatggtccctctcccagatatcctggtcacctgataggatgattccacctatcatcctctggaccttctagaactttccaccatccagcaactaaagggttaacacccactgcagctgggagcttccaggaccctgctgattggccaatgcctggtgccctgccttgaaacagctttgaagtattttaaatataatcctgactccagtgttattaatacatgaacaagaataacactttaagggagatcaatttaaataataaaccacaagtgttaycaaatgctcctccctttcatctgtaatatcntgaatcaacagttgccgagctgtggccagaggtggcacttcaggacaaaggnnnnnnnnnnnnnnnnnnnnnnnnnnnnnnnnnnnnnn

SEQ ID NO: 239287 - DNA, 616 bp, Homo sapiens
agtctccctttaatttttttgtgttctctcatctcttggaaaaagcaactaaaggagccaatacaatagctgtacaacttttgttaaaaatgatgtctgtgtgtgtgtgtactttctccagcgagtaaattcgtgtgcatacattctaaacagtttgaaaagacragtctcaaagagggacctctacgtgtttgaattttctacattaaccacctatttatgaataattaaaaatgaatataaacaagagagggtagagtgcccaagcaaatttttagaaaaagcatgcccttgttagttagaaaataaataatcaccaggacaaagctttctgggagacccgatcccatgcagggagggtctgagtcatgaggacaagaaactgctgacaccctgtattagtgtgttcttgaattgctataaaggaatgccagagactgggtcatttataaagaagagaggtttaattggctcattgttccacaggctgtaacaggaagcatgatgctggcatctgctcaggttctggggaggcctcaggaagcttgcagccatggtgggaggagagtctcacatggcaggagcaggagccagagagtcagggcggaggtgctgc

SEQ ID NO: 239288 - DNA, 595 bp, Homo sapiens
taagcgccatcatgcaagtgtatccaatttccattggagaattgctttgcagaaaaatggcatggagcctgctctccttttggccagttgattccctcagctttcaggccctgacttaggatgactgcagagagcactcggaaggtaggatgagagaggcttcgagtaaaacctcattctgttttacaattcagagctgaaattgaagctgagagagaagagcaggggacagactggggaaatggatttgattattgcattaacccacagaacrcttcagatgaaaacttacatagggtaatcaataattcagtcttatcagtttgttattctgggcagatgacatttattttaataggcactccttgggtagagggcatgacattttacttctgctatgcttctttttttgaagcacacaaatgcctttggctgtttatccattgctgtctggtgcttcccaagttcctttatcccttctatgtcatgtaagtttcagttgcctaagtggagagggatatattctcttctctgttcccattcagtctctatcctgcctctaaaaccctgctttaaatctcctttgtctaagaca

SEQ ID NO: 239289 - DNA, 445 bp, Homo sapiens
caaaattacctggttcctgggccccactcctagagattcaatttggggccaatattggttgttggtttgttagtttagtttctcagttgcgtctaatgcacagccagtgttgagaaatgctgcttgcattgacttgcagataccttttaaaattttgcattgcccaggtgcagtggctcagtcctgtaatctcagggatttgggaggctgaagygagaggatcacttgagcccaggaatttgaggctacagtgaggtatggtgacaccactgcactctagcctgggttacagagtgaaaccctgtctctgaaaaaaaataaaaaatgccttgattaccttttctttgtgaggtattttaggcacttttgaaatgttaacgaaaacatcaaaatctaccataataagctagaacaaaaggattccccagagaaactctgacacagg

SEQ ID NO: 239290 - DNA, 567 bp, Homo sapiens
  misc_feature (1)...(567): n = A,T,C or G
ataaaaaaaaaaaaaattagagatttgaagacattaaatagaaccaaggacaaagcaaagcaaaaatgggtgatgtcctcatttttagcttaacatttaaaaagatatgtatattaatactcaggccaaaaagaagggaaaaatcagcaggacctgaatgtgtgggttgatgggggatgggggctctcttgagggaacctgttcacaatgttgcattcatttttttggctctgcattgcagccccagggaacttctcaccatcctgggctttgatttttccactgcaaagtgaggagttgaactaaagtctcrcaaaggtccctagagcttaatgttctacagcaagggtgtccctacttttggcttccctgggccacattggaagaagaagaattgtcttgggtcacacacaaaatatactgacactaacgatagttgatgagctaaaaagcanaaccaccaaaaaatctcagaatgttttaagaaagtttaggaatttgaattgggctgcattcaaagctgtcccgcacagcatgtgtcctgcaggctgcgggttggacaagctt

SEQ ID NO: 239291 - DNA, 579 bp, Homo sapiens
tagaaaatgaagtaggtcagatagtgaaacaaaaaggcagagagacagaaaatagatgaaaaagcaaaacagtcggaggtttaatcagggaacccaatagctgactaacagaatcttcagaaacagaatagaggaaaagaaaggaagaaattattaaatatcacaagaaaattttccagtgctgaaagatacgtgttttcataatgaawaggcccatttcagtgtaataaaaagattcacatgatggcaaattgttataaaatttcagaacaatggggataaaaattcctaaaagcttcttgaatggggtggggcatggatggtggagtctaaacatacaaagtatagggatttgagtagcagaggactttttgccacaataaagctagaagataatgggtaatagcttcagaattttgaggagaagtgatttccaacccacaattttatgcccaaactgtcattcaagtgtgagggtgaactaaactcattttgaggtctgcaaaatcacaaaatattcacctgccttaacgtactttctcgggaagttactgaaggatatgcttctccagaatgagg

SEQ ID NO: 239292 - DNA, 579 bp, Homo sapiens
tagaaaatgaagtaggtcagatagtgaaacaaaaaggcagagagacagaaaatagatgaaaaagcaaaacagtcggaggtttaatcagggaacccaatagctgactaacagaatcttcagaaacagaatagaggaaaagaaaggaagaaattattaaatatcacaagaaaattttccagtgctgaaagatacgtgttttcataatgaataggcccatttcagtgtaataaaaagattcacatgatggcaaattgttataaaatttcagaacaatggggataaaaattcctaaaagcttcttgaatggggtggggcatggatggtggagtctaaacatacaaagtatagggatttgagtagcagaggactttttgccacaataaagctagaagataatgggtaatagcttcagaattttgaggagaagtgatttccaacccacaattttatgcccaaactgtcattcaagtgtgagggtraactaaactcattttgaggtctgcaaaatcacaaaatattcacctgccttaacgtactttctcgggaagttactgaaggatatgcttctccagaatgagg

SEQ ID NO: 239293 - DNA, 215 bp, Homo sapiens
acaactggaagatgaaatttaaaaaacaataccactttacaaaaatagattaaaacatgcacgtcttgtaaattgaacactaaaaaacaytgctactgagagaaactgaaaaagatcttaataaaggaaaattttaacatgttctggattgaatgcttcaactgttgttcagatgtcagttctccccaaattgatctacagattccatgaacctc

SEQ ID NO: 239294 - DNA, 652 bp, Homo sapiens
ttgcagaaaaactctctgacatggcagtgagaatgcaaaatgggagagtgcttcagaaaataggttggcagctgcttacattaagttaaatatacacctagcataaaattcagcaatcccattcctaggtatttatacaagagaatgaaaagatttctccatgcaaatatatgtacaggaatgtttgtaatagatttattcataatcaccaagaactggaagcaaccaaatgtccattaactagtaaataggtaacgaaattatggaacatccatacaacgaatgtacattctgtgataaaaagtggagctggctgactacaacaagacacaagggaatttcatggagcgatggaaatattctatatcttgattgctgtggtcgttacatgattgtatacatttgtcaaaactcataaaattgaatgcccaaaatgggtagattttactgtattcaacttatacctcaataaacttgatgtttttaaaaaaacacactttataggtacaaatttagctcactcaattaatgaaratatatttgccatgtaagtaaatcagcaaagtcagttaggaaaaggtcaattttatctttcagttgaaatggatgtgttaatatgtagctgcatgaaaaccatatctctttttaattc

SEQ ID NO: 239295 - DNA, 652 bp, Homo sapiens
ttgcagaaaaactctctgacatggcagtgagaatgcaaaatgggagagtgcttcagaaaataggttggcagctgcttacattaagttaaatatacacctagcataaaattcagcaatcccattcctaggtatttatacaagagaatgaaaagatttctccatgcaaatatatgtacaggaatgtttgtaatagatttattcataatcaccaagaactggaagcaaccaaatgtccattaactagtaaataggtaacgaaattatggaacatccatacaacgaatgtacattctgtgataaaaagtggagctggctgactacaacaagacacaagggaatttcatggagcgatggaaatattctatatcttgattgctgtggtcgttacatgattgtatacatttgtcaaaactcataaaattgaatgcccaaaatgggtagattttactgtattcaacttatacctcaataaacttgatgtttttaaaaaaacacactttataggtacaaatttagctcactcaattaatgaaaatrtatttgccatgtaagtaaatcagcaaagtcagttaggaaaaggtcaattttatctttcagttgaaatggatgtgttaatatgtagctgcatgaaaaccatatctctttttaattc

SEQ ID NO: 239296 - DNA, 537 bp, Homo sapiens
aaaccgtggctcaatggccagttctagccagcaaagctttagtcaagtcacttaacttctctgagcctcagtttccacgtacataaaatggggtgattacttaatttcaaaaagtagtcacaaaggtcaaatgagatcataaatgtaaaatcactttgtaaaccataaagatggcatgtacattttggccatcatcaaaattagttcatgascaaaacttttcccagtcaccttaacccaacttgattttgttctcccttttctgaagttatagtaaatttgtaatttcacctgtactgtgtagctctggatgtgcaattgcttttcctagtttctctgggtattcccaagaggaaagaaaatgctgtgaggaatcagaagcatgagacagtgtggtgggcatcctccaggcattcaacaggtgattgagggcttaactttaaaatagtatattattcggtgacttcattgagatgaccatcttgctgtacattagcatgcccattaaaacttcaaggcagaaatttctgactcaaa

SEQ ID NO: 239297 - DNA, 537 bp, Homo sapiens
aaaccgtggctcaatggccagttctagccagcaaagctttagtcaagtcacttaacttctctgagcctcagtttccacgtacataaaatggggtgattacttaatttcaaaaagtagtcacaaaggtcaaatgagatcataaatgtaaaatcactttgtaaaccataaagatggcatgtacattttggccatcatcaaaattagttcatgaccaaaacttttcccagtcaccttaacccaacttgattttgttctcccttttctgaagttatagtaaatttgtaatttcacctgtactgtgtagctctggatgtgcaattgcttttcctagtttctctgggtattcccaagaggaaagaaaatgctgtgaggaatcagaagcatgagacagtgtggtgggcatcctccaggcattcaayaggtgattgagggcttaactttaaaatagtatattattcggtgacttcattgagatgaccatcttgctgtacattagcatgcccattaaaacttcaaggcagaaatttctgactcaaa

SEQ ID NO: 239298 - DNA, 477 bp, Homo sapiens
aatgaatcaataaaattgacatataaccaaagtcaggatgcaagggaaaagctccatgatcagagagatatggtaacaagaatgaatctaagtaaatgaagatttagaacaaactgctgactagcttcatagaaaaagaaagtgctattgtccattaattcatgttctaagaagcagaaaacttttcacataccacacacatgtagacatctgtgctgagatctatctatgctgagtttaaagtccatcactcctagtacaacttgtcctggctgattcctataacaatttcttagtaatgtgtacatggartcctttgaatacgtattaaagaatactgtcaaagctgggaggcctcaaatttgtcactgccacccatctctaaagcctacacacacatatcagccatactgggacatctttttttcaaatttgcaaaagttattggatgcctgaaatgtgtaagttaatgctttt

SEQ ID NO: 239299 - DNA, 460 bp, Homo sapiens
gaatcaataaaattgacatataaccaaagtcaggatgcaagggaaaagctccatgatcagagagatatggtaacaagaatgaatctaagtaaatgaagatttagaacaaactgctgactagcttcatagaaaaagaaagtgctattgtccattaattcatgttctaagaagcagaaaacttttcacataccacacacatgtagacatctgtgctgagatctatctatgctgagtttaaagtccatcactcctagtacaacttgtcctggctgattcctataacaatttcttagtaatgtgtacatggaatcctttgaatacgtattaaagaatactgtcaaagctgggaggcctsaaatttgtcactgccacccatctctaaagcctacacacacatatcagccatactgggacatctttttttcaaatttgcaaaagttattggatgcctgaaatgtgt

SEQ ID NO: 239300 - DNA, 470 bp, Homo sapiens
tgacagctgttatgaattagacattcaactgcagtttgtcctaacctgccttgtgttaatcattcatttaatgaatattcactgagaccgattacgtatctggtgttctacaaggcactgcgcatattcagaggcatattcatctttgtcacagctcttaagaagcacacagtccacttctggggatagatgtgtaaacaagtaactatactgggtggctgacaaatgctaaaatagccatttgtatcaagtcctagcaatatgctcaaaacacacaggatggctgggtggtggctcacgcctgtaatcccagcactttgggaggcrgaaacgggtggatcacctgaggtcaggaatcaagaccagcctggggaacatggtgaaaccctgtctctattaaaaatacaaaaattacccgggcatggtggcgggtgcctgtaatcccaactactcaggaggctgagacaggc

SEQ ID NO: 239301 - DNA, 470 bp, Homo sapiens
tgacagctgttatgaattagacattcaactgcagtttgtcctaacctgccttgtgttaatcattcatttaatgaatattcactgagaccgattacgtatctggtgttctacaaggcactgcgcatattcagaggcatattcatctttgtcacagctcttaagaagcacacagtccacttctggggatagatgtgtaaacaagtaactatactgggtggctgacaaatgctaaaatagccatttgtatcaagtcctagcaatatgctcaaaacacacaggatggctgggtggtggctcacgcctgtaatcccagcactttgggaggcagaaacgggtggatcacctgaggtcaggaatcaagaccagcctggggaacatggtgaaaccctgtctctaytaaaaatacaaaaattacccgggcatggtggcgggtgcctgtaatcccaactactcaggaggctgagacaggc

SEQ ID NO: 239302 - DNA, 476 bp, Homo sapiens
ctaagaatgtttggcaccaatcatctttgagaaaaggttacacaaattaaatctttcaccagggacttacagtttaacaatgtgattcttttcccagaagtatttccacattaaaggagaacaaagtgaggacaatgtttgacccaaaagatggttactaatggtggtttctttactcaccaggaagatatttgaatcaaggtccttgccagtgttcatagcttcccattcggatatgactctgaatgtctgctgtagaaaattacagtaattcccattaaggaaatgactgctttcttctgcaccaagattgtgttttcagatctttttccatcttttgtaagccttcacccattttgatcatgtaagatatgtatacagcctgattcatattatttttaacttttctaagggtrttccttattaaagtgttggcattaccctagaagtccccattcagcagggttaatgcccca

SEQ ID NO: 239303 - DNA, 592 bp, Homo sapiens
aataacctatgaattaattgtcccagctgacatttattgagaatttattctaggctgatcacaagccaaagagctttccacttttctgtgaggtcatctggaatttaacctatttataaatgtgaaaaaaatgtggcatcatttaatgaaattacttaatcctgattataagccaaccactctgctggatgggtagcgccttataatattccagtcatcttttggtttacaacaatcttttcatatcatcttttctccctttttttcttcctaaggtggcatctggatgcagattggtttggctctgccctcggaagttaggagtcataaatttgcaaactgattctcctctcccattgtcctctggggtagtaataccttccattatctgccaacaggggctcttctaaacccaayggagattttggagatctacacttgacaccactgccaacatccagcagcctaaccatgccacaccaaagagtttactcagctgcacattccccaggctaatacaaaggacatagcgttgtcccattctagagtgccaagttacaaacagggcaaaatctccctactttggtctttc

SEQ ID NO: 239304 - DNA, 592 bp, Homo sapiens
aataacctatgaattaattgtcccagctgacatttattgagaatttattctaggctgatcacaagccaaagagctttccacttttctgtgaggtcatctggaatttaacctatttataaatgtgaaaaaaatgtggcatcatttaatgaaattacttaatcctgattataagccaaccactctgctggatgggtagcgccttataatattccagtcatcttttggtttacaacaatcttttcatatcatcttttctccctttttttcttcctaaggtggcatctggatgcagattggtttggctctgccctcggaagttaggagtcataaatttgcaaactgattctcctctcccattgtcctctggggtagtaataccttccattatctgccaacaggggctcttctaaacccaacggagattttggagatctacacttgacaccactgccaacatccagcagcctaaccatgccacaccaaagagtttactcagctgcacattccccaggctaatacaaaggacatagcrttgtcccattctagagtgccaagttacaaacagggcaaaatctccctactttggtctttc

SEQ ID NO: 239305 - DNA, 620 bp, Homo sapiens
agattgcaaggaaatgtcaagggctgtcacagataacatgggtgagggtgagaggtgagagggtggagagagaacctgaaagcagtgaattgagggaatgaagagagaagaataacttgagagatactgaagaagaagaaacagaattgcaaacagctgttcaccttcaacacagaaagcagatgtaatagaaataaaagacttagggcccggggcggtggctcatgcctgtaatcctagcactttgggaggccgaggtggrtggatcacctgaggtcaggagttcgagacaagcctggtcaacatggtgaaaccccatctctactaaaaaatacaaaaattagctgagcatggtggaacccacctgtaatcccaactacctgggaggctgaggctggagaatcacttgaacccaggaggcagaggttgcagtgagccaagatcgcatcactgcactccagcctgggcgacagaaagagacactgtctcaaaaaaaaagacttaatgttgatgtttgttcagatagtcaagaaaacttacactatttgattgaccacatgtctatatgccattgcaaatacccttacaaatagttatttaaaataaaatacgtttttatt

SEQ ID NO: 239306 - DNA, 595 bp, Homo sapiens
ttatttgttacaaatatgattagtaataagggtcctactactttatggtactgatgtgattacaaaataatgtcatatgtgtgaaaacatttaaatcacataaagtcactgttgctttagtacatgtggttaataaagaggcactcactagcctagcttcatggggataaaaaaaggaacagtgcggtaggttgtttaaaaagctttctatagttcaaactatcgtgcatgcagtggcatcttagtgcctgctctccaataagcatctctttacttcatcctacatctccacttggcctggcgtgctctgcaaacctgctactgacaacagttttccctgctgatagcccttatctttatctctgttatttagtatttttgaaacttctatctttggcccctgcattctggacatccwttccaggctacctgtgtgtacatgttcaaacaaagtaaccttacacaacataacctcaaaaacatagtaggatgatggaatcaaccaatcctgtagcttgtagaattatgcaaaataatttattttcacatttgtaaacttcagaggatactctaaattcatacaagaaaaaaataa

SEQ ID NO: 239307 - DNA, 558 bp, Homo sapiens
tttaattaccaattgtcctgactgaatgggtgaaaaatgtatcttggcataagatgatggttacgcagcgaaagcagagccataaagagattgttgctttaactttaaaagtacaactagaacaaggatttttttttaaaggagaagctgagaaacaattgaataggccattgaccaataaaaattagcgggggattgcattgttttaaatcctcaagttgattgttaaaaatagtgaaaagtttttaaaggccatatgctttaaaaggaggttagatgcctaattccaataacagaatctgtccacagcactgctttttggtcctatgccccaggagatccatttttgtttgtcagatgttatttgttgaatggatatgatattcctgacattgtaaatgtaagaccaaatcaaaaaggatagaaatataaatgaatagacccattctgcaagagagagagacagaaatggagagagaataggagaataagagaaagaagcttgttataaattattgtgctttcawcttatcacaaaaagctcattcttgtattccc

SEQ ID NO: 239308 - DNA, 549 bp, Homo sapiens
actgctattgggctagaatcaccataagaattgttgctgctattgccagtattcatcagacatttactagatgctaggttcagtactcaacgtgcattctcatttgatcctcacagaatcttatgaggttgacttcattaatgtgcccattttctagatgaggaagccaggggtttgtgacttgattaacccaagatgacactgctagtaaatggcagagctgtggtttcagtctgggttgatcaaatggattgcaatgataattatgttaagatcagtctaagcgctgctcatttatcacattttctcattttcttgtaatctttttttttttatttttccccattttattattattttatttttttgagatggagtcttgccctgttgcccaggctggagtgcagtagcatgatcttggctcactgcaaccttcgcctcctgggtttaagtgattctcttgcctcagcctccagagtagctgggatyacaggcacacaccaccatgcccagctaatttttgtatttttagtagagagggggcttcac

SEQ ID NO: 239309 - DNA, 549 bp, Homo sapiens
actgctattgggctagaatcaccataagaattgttgctgctattgccagtattcatcagacatttactagatgctaggttcagtactcaacgtgcattctcatttgatcctcacagaatcttatgaggttgacttcattaatgtgcccattttctagatgaggaagccaggggtttgtgacttgattaacccaagatgacactgctagtaaatggcagagctgtggtttcagtctgggttgatcaaatggattgcaatgataattatgttaagatcagtctaagcgctgctcatttatcacattttctcattttcttgtaatctttttttttttatttttccccattttattattattttatttttttgagatggagtcttgccctgttgcccaggctggagtgcagtagcatgatcttggctcactgcaaccttcgcctcctgggtttaagtgattctcttgcctcagcctccagagtagctgggatcacaggcacacaccaccaygcccagctaatttttgtatttttagtagagagggggcttcac

SEQ ID NO: 239310 - DNA, 555 bp, Homo sapiens
tatatacaataaaagaatagtaaaacacacctaatgttatcacccagccttaaaaaatatcagtattttgctattctttcttcatctatccttccatgacccccatttttttagtgtatttaaaagcaaatcttagacatcatgtcatttcacccataaatatcataatatgcatcaytaactggtaggcacttttagaatatgtagcagccatcccattattacacccaaaacaattaatggaagttccttaatataatctaatacctattttatactcatattttcaggaaagtctctgaggtactttttatgtaattttgtcctctccacatcattatctaagaggagattgatacactggaaattgcacatcacatttaggtctcttaaagcttctttatagcagtctctataccattcattcgcttttattcaagacattgacttgtcagggaaactgggtcatttgtcctagaatattcattctggattttgctaattgcttcctcatggcaccatttaacttatccttctagtccccacttttcctgt

SEQ ID NO: 239311 - DNA, 557 bp, Homo sapiens
gtagggggtgttcttgactccacacaaagatctgtaggaataaagcaagttctggagagtttcttttggcgttaattatttcacactggaaatcatcacaaaatggcaaattctggaatttccacttttccttcacctgaagagggtatacatttttactttggccagacagagacctcatgttattagagacaggggtgaattggaaagaacagttttccacctcacagttttatggaattggcaggaaaactttactagtctcaaggcaaaatacagactatgatattctcaaatttttctattaggagaaaaggtggcaagaacttcatagaattttgtctgaggagatttggcaaagcatcatatagatgtatatatgaaattaaatttcttatatggagcttttagcwatggagaaaacgaattgcatctcacataaatgggatgagacttagctatttgtaacctcgttacaatgaaataactaaaattgtaaagagacattaaataataatctgcctgcctaaacatgggttttctagtttgaaatgaat

SEQ ID NO: 239312 - DNA, 567 bp, Homo sapiens
tgtcctttccaggatggccactgcacactgccctgaccacagcattctgtgggcccacttggcctggggtgaggggcaaatggtagagaggtctcagccccattgccagagacatttatgctggcagaacttgctcttacaagaaagcaaaccatcctctctactttgtgattccagacatcagccagtggggtcacttagagaaaacaggctcatctcatcaattttaaagctagcctcccaaatcckgacactaggttcataagactgaaatgttcagaacactggagccatgacaccagtgccctgagccaggcatgggcctggcactctgccagttaccattctgaattgttcagtgcacacaactaacctggaaggtggcgcatgaagtcagtgtagccacggggctctggctcctgtaccctgggtccagttaccccaaccccactccactgtcacgtgtgtgtgcacacacatgtgtgtctctatcccttgttctttttttcttattatttccagcacacagaaaaacacaatgcaatgcccatcatttggccactatta

SEQ ID NO: 239313 - DNA, 570 bp, Homo sapiens
gcggtgttccatcttgtatataattctacccctgctattattcctcctccccccactactgaacacttcactggctagcaactactcatcctccaagtctcagcctttgtatttcttcctcagagaggatttccctaatccccaatataagctttcctccctttatcttatatcaccctggtctttgccttcttaacactttgggtatgaatctatgcatatatgtctgtaatgaacataattttacacaaaaatttgtgtagttccatgtttgtttctatgtatatacagtgaatatccacttttaaccaacctgttggctacctgaatgcaaaagccctggctaattctactcacccaagggtgcatttgttgaatgaatgtgagactaaacaccaggtcctgggctaggtgtattatattcattaaccaatttcaacttaatagcawtcctgtggtattcatataattagcaatcttgtggtattcatataatttacagatatgaaaactgagaatgagaaagtttgagtaactggtcaaaggctacttagctaataaggaactata

SEQ ID NO: 239314 - DNA, 641 bp, Homo sapiens
aactgggcaagtgaaggtgctgacaggagccagagtcccagtcagaaacagaatgtatctcagccagttaacaatcatcaggactggcagcaacatggtcctatcagccatcttcagtggctcacacttaagcattcagcaagccccatgagttatggttgattgggtttctagtcttgttgttacagacactctttgtttccaaccaaaaacaatgcttcacagtttgattactctctttctctgtaaaatgagatggttggaatcaatgatctcaaaagtccctgccatccccaacattctatgcatctgatcaagctccaaatggcttctggctccttccaaaatgcagatctatgctccaaagatgcagatctgtcaccactgagagkccactgaggtcctgcaaaaactgcctaagtgagggcaatgtctctggagtaagcattcagctgttcaaaggtttgccagcctctgcatcacctaatctaggcaccagtgggaatactgtcagaaagaataatatggtcttagggagacaagaccatctctcactagataactagaaagcaaggcatgagcaaagcctgaaagccaagggctgaaaaacatcattttaaatctaattacaagaccaccag

SEQ ID NO: 239315 - DNA, 641 bp, Homo sapiens
aactgggcaagtgaaggtgctgacaggagccagagtcccagtcagaaacagaatgtatctcagccagttaacaatcatcaggactggcagcaacatggtcctatcagccatcttcagtggctcacacttaagcattcagcaagccccatgagttatggttgattgggtttctagtcttgttgttacagacactctttgtttccaaccaaaaacaatgcttcacagtttgattactctctttctctgtaaaatgagatggttggaatcaatgatctcaaaagtccctgccatccccaacattctatgcatctgatcaagctccaaatggcttctggctccttccaaaatgcagatctatgctccaaagatgcagatctgtcaccactgagaggccactgaggtcctgcaaaaactgcctaagtgagggcaatgtctctggagtaagcattcagctgttcaaaggtttgccagcctctgcatcacctaatctaggcaccagtgggaayactgtcagaaagaataatatggtcttagggagacaagaccatctctcactagataactagaaagcaaggcatgagcaaagcctgaaagccaagggctgaaaaacatcattttaaatctaattacaagaccaccag

SEQ ID NO: 239316 - DNA, 392 bp, Homo sapiens
gaataaaactttatgataatagtaaaacatttcttatttaggatagaactatagaaaaaatattaactcatttataatgaaatatttaatgtattttcctcattattctatgctaaaccttagaggatacagtgactatccaaggcagtgtatgtaatataaaaatacggttgcgtttaacatgaaaagaaaaagcrattgtacataaaatgaatctgttgtttaagctaaggtttgaatagttacttttgtagagataatggttaattttgttagtacaattttctaatgtgtaaaatgcaagtcggaaaaaaattttttttgccctgtggaaatgaaaataagtaagtaacaattatattattataatctttcagtggatttttgcataa

SEQ ID NO: 239317 - DNA, 392 bp, Homo sapiens
gaataaaactttatgataatagtaaaacatttcttatttaggatagaactatagaaaaaatattaactcatttataatgaaatatttaatgtattttcctcattattctatgctaaaccttagaggatacagtgactatccaaggcagtgtatgtaatataaaaatacggttgcgtttaacatgaaaagaaaaagcaattgtacataaaatgaatctgttgtttaagctaaggtttgaatagttacttttgtagagataatggttaattttgttagtacaattttctaaygtgtaaaatgcaagtcggaaaaaaattttttttgccctgtggaaatgaaaataagtaagtaacaattatattattataatctttcagtggatttttgcataa

SEQ ID NO: 239318 - DNA, 642 bp, Homo sapiens
gcttttacaaccttttgaaattccaattaagatttatactgtaaaaaaaattacagtttatatgcccgagaatgtttaattttcactcttgagtgaaagttttaatttatataaaagcctaagtggatatatacctatcaaaatactttgaatatattaattcaggtccttcagctgttacttttacttataaacatgtgttatcaccctaatgttgtttctttgtggttaattttgaccttctacctggtaatttttatgatttgtcattcaggttctgcaatttgggcacaatgtttctgttatatgtttattatatttatgcttgccatgtttttcttctattgacacatcattattaaccaaaaatattcatagactttgcttttatgtgtgcatctttttgaatgtctataatttacttaaggagacttaatcatatatrccttgtttttactttatatgaagtagtttttaaataattaaaaaaagttacttgatgaatacaccttcataacaatgtgcatgacatttgcatttaaactaccataaccagcacacatttacatacttacttacacacacacacagaaaatatccacaccctggaagtttcttttgttctcatagaaagcccaaaag

SEQ ID NO: 239319 - DNA, 608 bp, Homo sapiens
ttattagctgaaattctgagtggtttgcccgtttcagtgctactgtgttcagattaaaatcaactttgttcttgctagcatcttacatctctgatactgcttaattctctagccttccagggattacagccttctgagcatcttactttgtcttgacttctgtatgcaaagttttgaattttgcaaaggatttgtaaaagtatataaaaatatttccgctcgcttctgtgaggattctttgatgtcarttttgtctttcagatcacagccactttggaggatctgaactccaattctgtttgcacactagaggccctgttgctgtctgctatgattcaacagccctgttccctaactgtcctcagggtgctcagttttcttctcttggagattgagtacctcaggtctcatcagctttctaaagcctttacacacatacacacacacacacaaacacacacatccttgcatgttttatttcagccttcaatgggtaagctactataattaggaacattctatcctagacagtgccagcattccctatgttaacacttaaaacataaatatatttaagtttttcagaatgctctatttttttatagtca

SEQ ID NO: 239320 - DNA, 601 bp, Homo sapiens
gtgaaattttggccagattaggaaaaatatccttatctgcctctgatatccagatttayttggtatcagtgcctatttatcaaccttatttgagctccctttttgctttaagacatcaagcaattttattcttgattagggattcaataacatatggaacaataattttttatatattatttgacaaaatgatgattattgtaaagtagtattaagtttgatcactatttctgttgagtaaactagattaaatcgaagtcctggtatctgataaaagtagttacacccaagtatgcttctttatagttatcatacaaaaattataatagttccctattcctagttatcactctaaatttatatattaataaataacaaatcacttctgcaataacactagtgcttagtcattaaaccaaagacaatattccttattattatatttttctttaaaggtaagcagaattgataaacatgtcttgattaacattagtgacattttgctcttgggatctattgaaattcttcattgaattccttgagagacagttattcattatttcttattcaataaatatttattgcttcctggccttttgat

SEQ ID NO: 239321 - DNA, 601 bp, Homo sapiens
gtgaaattttggccagattaggaaaaatatccttatctgcctctgatatccagatttacttggtatcagtgcctatttatcaaccttatttgagctccctttttgctttaagacatcaagcaattttattcttgattagggattcaataacatatggaacaataattttttatatattatttgacaaaatgatgattattgtaaagtagtattaagtttgatcactatttctgttgagtaaactagattaaatcgaagtcctgrtatctgataaaagtagttacacccaagtatgcttctttatagttatcatacaaaaattataatagttccctattcctagttatcactctaaatttatatattaataaataacaaatcacttctgcaataacactagtgcttagtcattaaaccaaagacaatattccttattattatatttttctttaaaggtaagcagaattgataaacatgtcttgattaacattagtgacattttgctcttgggatctattgaaattcttcattgaattccttgagagacagttattcattatttcttattcaataaatatttattgcttcctggccttttgat

SEQ ID NO: 239322 - DNA, 546 bp, Homo sapiens
tcaataacatatggaacaataattttttatatattatttgacaaaatgatgattattgtaaagtagtattaagtttgatcactatttctgttgagtaaactagattaaatcgaagtcctggtatctgataaaagtagttacacccaagtatgcttctttatagttatcatacaaaaattataatagttccctattcctagttatcactctaaatttatatattaataaataacaaatcacttctgyaataacactagtgcttagtcattaaaccaaagacaatattccttattattatatttttctttaaaggtaagcagaattgataaacatgtcttgattaacattagtgacattttgctcttgggatctattgaaattcttcattgaattccttgagagacagttattcattatttcttattcaataaatatttattgcttcctggccttttgattattatacactagatataaaaaatgtggttctacatatgaagtttataataataaagtaagaaaaacagaaagtaataagaaaacaac

SEQ ID NO: 239323 - DNA, 437 bp, Homo sapiens
acatatggaacaataattttttatatattatttgacaaaatgatgattattgtaaagtagtattaagtttgatcactatttctgttgagtaaactagattaaatcgaagtcctggtatctgataaaagtagttacacccaagtatgcttctttatagttatcatacaaaaattataatagttccctattcctagttatcactctaaatttatatattaataaataacaaatcacttctgcaataayactagtgcttagtcattaaaccaaagacaatattccttattattatatttttctttaaaggtaagcagaattgataaacatgtcttgattaacattagtgacattttgctcttgggatctattgaaattcttcattgaattccttgagagacagttattcattatttcttattcaataaatatttattgct

SEQ ID NO: 239324 - DNA, 548 bp, Homo sapiens
gattaacattagtgacattttgctcttgggatctattgaaattcttcattgaattccttgagagacagttattcattatttcttattcaataaatatttattgcttcctggccttttgattattatacactagatataaaaartgtggttctacatatgaagtttataataataaagtaagaaaaacagaaagtaataagaaaacaactacataaatatacagtgtaagagaacattatagtgagactttctcagttttggccaaagaatgtgtatttcatagctaaagaaaagagtaagaacacctagtcagatcatgcttagagatcatatgaacacacatgataatacagtatgtcaattacaattatcttttgagattgctatgtgttcgaactcagggtcaagggctgccttttttaataaagtaaaatatgtcgaagtaaaaaggttattttcaataggaaagactgagactaacacagaaacagagataatggaggatatggctgataaatttgcatctctgaataaaatgagttcatgga

SEQ ID NO: 239325 - DNA, 429 bp, Homo sapiens
aaagtctgccttattactgctttgtgcatgcataagaaaaaaactacttcaggccagagaaagaattattgtaaagcattasactgaaccattctcagagctcacacagaagctgaggataatatatgtttcaaatattcagaattagaagaccttgcaatcatgcagcatcaagtagagtccttggaagggcaaagtcttagtatgggggctaaatgagctctggaatgaaagatggaaataatctgctttaacaaagataagaagcacacctcaaaatgattcaactaaactcaaggactttgcataccagagcaaagttcaccattatttaaagaaatataacaaaatccagcacctagcaatgtaaagttcacaatatctgtcacccaattaaaagttaaaaagcaggaaaaaaaaaaaaccgaa

SEQ ID NO: 239326 - DNA, 539 bp, Homo sapiens
tctaatcttgggacagagcccctggggggaggggtggtcatggtctccacagatcagtggatttagtctttacccctgtttgcactgaagaatccaggcagtccagatgagtgggattcctcccagtgcagtgcactccctcagcaaaggggcagccagagtacttcattaagcgggtccctgatcctgtgcctcctgactgtgtcagactcccaacaggggttgccagataccttacacaggagcattgttgcaggcatcaggttgatgcccctctgggacggagctcccagaggaaggaacaggcagccatctttgttgttctgcagcctctactagtgacccctccaggtgtggaagggacccaggcaaatagagtctggattggacccccagaaaaccacagcagcccaacggaaaaggggcytgactattaaaagaaagacaaatgaacagaaagcaacaacagcaacagcatcaaaaaagaagtccccacaaaaactccatccagagttcagcagcctcaaagactgaagcta

SEQ ID NO: 239327 - DNA, 559 bp, Homo sapiens
tatgtttaaaactctaagcaaatttggcatacaagggacataccttaatgtaactaaagcccatgacaaacccacagccaacataatactgcatggggaaaagttgaaagcattccctctgagaatgggaacaagacaaggatgcccactctcaccactccttttcaacatagcactggaggtcctagcgagagcaatcagacaagagaaaraaatgaagggcatccaactcagtaaagaggaagtcaaactgtccctgtttgctgatcatttatcttgaaaaccctaacggctcccccagaaaactcctagaactgataaaataattcagcaaagtttctgaatacaagattaatgtacacacatcagtagctcttctatacaccaacagcgaccaagcagagaatcacatcaagaactcagcccgttttacacttgctgcaaaaaacaaaacaaaacaaaacaaaacaaaaacttaggaatatatctaagcaaggagttgaaagacctctacaagcaaaactacaaaatactgctgaaagaaatcataaaagacaca

SEQ ID NO: 239328 - DNA, 559 bp, Homo sapiens
tatgtttaaaactctaagcaaatttggcatacaagggacataccttaatgtaactaaagcccatgacaaacccacagccaacataatactgcatggggaaaagttgaaagcattccctctgagaatgggaacaagacaaggatgcccactctcaccactccttttcaacatagcactggaggtcctagcgagagcaatcagacaagagaaaaaaatgaagggcatccaactcagtaaagaggaagtcaaactgtccctgtttgctgatcatttatcttgaaaaccctaacggctcccccagaaaactcctagaactgataaaataattcagcaaagtttctgaatacaagattaatgtacacacatcagtagctcttctatacaccaacagcgaccaagcagagaatcacatcaagaactcagcccrttttacacttgctgcaaaaaacaaaacaaaacaaaacaaaacaaaaacttaggaatatatctaagcaaggagttgaaagacctctacaagcaaaactacaaaatactgctgaaagaaatcataaaagacaca

SEQ ID NO: 239329 - DNA, 574 bp, Homo sapiens
accctggagcttgtttgaggagaggcttggagatgttctgaaggaaagacgccagtaataactgcaggcattttccccaacctgggatggaaagcaggatcccagttttaacccaggcacatacaaaatcacccattctttggtgacctggcagcatgactgtgcaagcattttagtctcaggccagacattggagtctctacttttgaatgagttaggggcctctacaaccagaactatggaaagtgcctcagcagtaggcaccggaattgtactatctccyattgcagacccgtagtgggaggagagctgctacagctacagtttctcctggatgatgagacttgcagccagggccagcttggtgacctggaactggcctgtgtgtgtcattgccaggtgcctagcctgcttccctgagatcatgatgctacaaggccctatctgccctacccccaaacaaaaattcaggcactcagaatgcctgattgcctggaacagcagcctgagcggcttcacccattatggacatggattgtggtaccacaagccctctctactccatgcccaggta

SEQ ID NO: 239330 - DNA, 574 bp, Homo sapiens
accctggagcttgtttgaggagaggcttggagatgttctgaaggaaagacgccagtaataactgcaggcattttccccaacctgggatggaaagcaggatcccagttttaacccaggcacatacaaaatcacccattctttggtgacctggcagcatgactgtgcaagcattttagtctcaggccagacattggagtctctacttttgaatgagttaggggcctctacaaccagaactatggaaagtgcctcagcagtaggcaccggaattgtactatctcctattgcagacccgtagtgggaggagagctgctacagctacagtttctcctggatgatgagacttgcagccagggccagcttggtgacctggaactggcctgtgtgtgtcattgccaggtgcctagcctgcttccctgagatcatgatgctacaaggccctatctgccctacccccaaacaaaaattcaggcactcagaatgcctgattgcctggaacagcagcctgagcggcttcacccattatggacatggattgtggtacmacaagccctctctactccatgcccaggta

SEQ ID NO: 239331 - DNA, 594 bp, Homo sapiens
aagcttttttttccaagcgtttgaaatgctaaaccaattactacacatggtcagtgcaataattagtcactaacagggatatcttctgtaatagaacagttggccattaacagatgaacttagtcacactatgcaggactcaagaatagaatctaaatattaatcacatgaaatataaaatcctttccttttttaatttttaaattttatgggtacatagtaggtgtacatatttatggagtrtatgagatattttgatataggcaggcaatgtgtaataatcacatcagggtaaatggggtatccatcgcctcaaggatttatcatttgtgttacttttttaataagtaacatgcccatatattttaatttaaagcatatgtcaatttattaaatttacttatttgatttttattattgtgactacatacctattacttatgcttaagtaatttttaaaataaattaggtgcttgtgcctcagggtatagagcagttaacatagttaaacacagccaatccaataaaaacatactgcagtgtgtaagtattaaaattctacatggaacctgttttgttctcaggagtgaggta

SEQ ID NO: 239332 - DNA, 624 bp, Homo sapiens
tgtgaggtgtgtttcttgtaggcaatagatcaatgggtcgtgcttttaaaaaaactgttcagccactccatttcttttaattggagggtttagtcaatttacacttaatggtatttttgataagtaaggacttattcttgccattttaaaatttgttttccggttgttttgtggtcttttcttccttctgtctgtatttcctgtcttccttagtgaaggtgattttctctggtgatacgatttggttgtttgctttttattttttctgtatccattgtatgttttttggtttgaggttgccatgaagcttgaaaatgccatcttataactcattattttacctaacaacttcacactatttgcataataaaagaagcaacaagaaaactaataaaaattctgtgccttaacttcatttccctgcttttaactttttgytgtttctcttttttcacagaatttttttaacttttattttaagttcaggggtacgtgtggatgtttgttatataggtaaacttgtgtcatgggagattgttatacagattactttgttaccaaggtattaagcctactaattgttagtgatttctcctgatcctcttcctccttccatcctccata

SEQ ID NO: 239333 - DNA, 505 bp, Homo sapiens
atttggaatgggtgtcagctgagtttggtccagttttactttctgctataacaaggtctgcactgagttcaatgcctcacaattggtgtgttctcttgcccctagcattcagaaatgctctctgcaccatgccaccacttctggaaaatgggggagtgtttagccagtaatttaagagtttttcccaccacttcagtgatrtgaagttaatctacctaccaaggggtggagagggaatgattggcggagctttctattctgcattgttgccccacccctcctctaatttgtcttaaaatgtttagtgcactggctaggacttccagtaaaatgctgaatagaaatattaaaactaggaattattgttttgatcctgattatgaagagtataatattccactcttaagtttgttctaagcttagttattgtagatattttcatcagttaaaaatgtttccttctcttcctaccctaattttttgtgaacagatgttcaatgttttt

SEQ ID NO: 239334 - DNA, 541 bp, Homo sapiens
aattacagtttgctctttaattattctgcctctcattttcaatttatggttaagaccaacagcatgccccagagatcaaaagtgctgaggtggacaggaacagaacagaggacagcrattcctttagcctctggcatatgtggcccaaacagattcttttttatttttttttaactgattgttccaaaataaatatgaagatcgttctaggaaatcagcgtgtagctcctcaaatgcaggccaaagcaatattttatagcattttaaatatattttattgtgtgactagcattgaataaacccatggatcttgggctataacacagtttatctaatgccaactctgcaatttactggcttcatgccattgtagaagtttcttgagctatgtttcagtcaccacgagtttaggaatgacaacatagcaccagttacaagagttgttttgttgactacctcaattaatatgtacaaattattttgaacaatgtgtagtacattgtaagccctcaaatttatgtaaaatattaccattattttt

SEQ ID NO: 239335 - DNA, 569 bp, Homo sapiens
ccaatcacctcacaccaggcccctcctccaacattgaggattccaattagacatgagatttgggtggggacacagatccaaaccatatcagtcatctttatatcccttaagctacttagaaggagagcatcctgagcatgaaagaaagtgaatcagtaaaaataaaagaacatatctgtacaaagatgtaattctttatagcctttgaaatttatcagctcttaacaactcaccaaaatacaagtgactctgagttgaaaaatctcagatggagaaataaattttgagtgagaaacagctgtgttgcttccttatgtcttacmgagttgtaggctgatttttgtcttggaggatattgaaggaaaggagataattcagtgttttgacttcagaagaatatggaaagaagaagagggaatatggatttcaaagagaagtggaatgaaagagaacatggcaacagcttggggaaaagtgaataaatacaaagtcaggaattataataagaatttcagccagtcatagttggcttgttctctccaatatcactactgcacacttggacaagt

SEQ ID NO: 239336 - DNA, 381 bp, Homo sapiens
gctggtttgtgtatgtttccccaacccaaagagattattgagttctctaaaaataaactctgggacagttattctaatgatgagataaatactttgagattcaatgtagtttgaagaatgaactgtcagcccagtccgaaaaaatgataggaaagacgtggtgttccagtgcatagaaccattagacaatggtccaagttaartgtaagatccagaatttcattcaagaagaagtgatttgtgaatcagccattactggtatttagtttgacagcacagatttgttcacagtgaggttctcagataagttattcacgcaacaaaggaggtaggttacctaataagagcccaatgcattcaaactattctataaggcagaca

SEQ ID NO: 239337 - DNA, 417 bp, Homo sapiens
ccaatatgagataaaaaggtattttattaaaagtgcaaggtttttatgcctggggtatatagctgcagtgatggcttcagaaattttcttttcttttcttttttttttttttttttacaatactccttatgctggattcatttatcttgaaatggtgtgctatcccagctgcagatatcaatctgcaatacatctcargcaattcaacttttgcttgttatgtcatgacttcgcttctacattactagcaacactttttatgggtctcatgatgttattcaaggttgataatattactctaaacatggctaaaaatacacaataaccatgagaaatcactttttactatggcaggcaaattactggagagacaaaatggtcatgcagagatgatgagtatcacaagatgttttaagc

SEQ ID NO: 239338 - DNA, 417 bp, Homo sapiens
ccaatatgagataaaaaggtattttattaaaagtgcaaggtttttatgcctggggtatatagctgcagtgatggcttcagaaattttcttttcttttcttttttttttttttttttacaatactccttatgctggattcatttatcttgaaatggtgtgctatcccagctgcagatatcaatctgcaatacatctcaggcaattcaacttttgcttgttatgtcatgacttcgcttctacattactagcaacactttktatgggtctcatgatgttattcaaggttgataatattactctaaacatggctaaaaatacacaataaccatgagaaatcactttttactatggcaggcaaattactggagagacaaaatggtcatgcagagatgatgagtatcacaagatgttttaagc

SEQ ID NO: 239339 - DNA, 398 bp, Homo sapiens
gggtgacagagcaagactccatctcaaaaaaaaaaagtcttatgtattttattaatatttttatgtatatgagagtatcaccaaaagaagaaaaaacctacagaagtatttgactcagaaacatatataccattttaacaaaaagtgataaactgtggagaattgactagagaaaagaaagggaagtttgaacttctgaggttagtaaattgtgggaaggtcaatatatgtggaaaccaattaaagaaaaggattattttaataatctttctttgtgcagactaattccagtactagcttcctgtcttctcatggtcacrcacctccttgtagacaggatttgtggcagtcctcatttcctagaagtttctgcttttagtaagacaaggaaggtccca

SEQ ID NO: 239340 - DNA, 618 bp, Homo sapiens
gctgttttcaatgtttcctccaaaattaatgtgttggaactttaatccccaaagcaacagtgttgattggtgggacccttgagaggtgatgaaaatcatgagggctctgccaccatgaacagattaatgcctttattgtggagatgctttgttataaaaagtaagttcattcccctcctcttatgcatgttcactctcttgactttcccttatgggatgatgcagcaagaaggccctcgccaaatgtgcccctctgatcttggacttgccatcctcmagaaccataagaaatcgatctctgttctttatatattactctgtctcagggattttgttatagcagcacagagtaagacatattgtttgggacatttggggtttgcaatgtctttgtaactattggatagtttatctagcaaaacattgaaattattgggtttaatgctcaatagactctcacaactagagatgaagaattttcaaggaattgcatgatgatggttgaaactgagggaggtaataatatttcagacaaattgtgaagaattagaaaaagaaagggcaaagaccaacacttaggatacatgcagtcgaagtcctagaagacgataaaacccc

SEQ ID NO: 239341 - DNA, 618 bp, Homo sapiens
gctgttttcaatgtttcctccaaaattaatgtgttggaactttaatccccaaagcaacagtgttgattggtgggacccttgagaggtgatgaaaatcatgagggctctgccaccatgaacagattaatgcctttattgtggagatgctttgttataaaaagtaagttcattcccctcctcttatgcatgttcactctcttgactttcccttatgggatgatgcagcaagaaggccctcgccaaatgtgcccctctgatcttggacttgccatcctccagaaccataagaaatcgatctctgttctttatatattactctgtctcagggattttgttatagcagcacagagtaagacatattgtttgggacatttggggtttgcaatgtctttgtaactattggatagtttatctagcaaaacattgaaattattgggtttaatgctcaatagactstcacaactagagatgaagaattttcaaggaattgcatgatgatggttgaaactgagggaggtaataatatttcagacaaattgtgaagaattagaaaaagaaagggcaaagaccaacacttaggatacatgcagtcgaagtcctagaagacgataaaacccc

SEQ ID NO: 239342 - DNA, 618 bp, Homo sapiens
gctgttttcaatgtttcctccaaaattaatgtgttggaactttaatccccaaagcaacagtgttgattggtgggacccttgagaggtgatgaaaatcatgagggctctgccaccatgaacagattaatgcctttattgtggagatgctttgttataaaaagtaagttcattcccctcctcttatgcatgttcactctcttgactttcccttatgggatgatgcagcaagaaggccctcgccaaatgtgcccctctgatcttggacttgccatcctccagaaccataagaaatcgatctctgttctttatatattactctgtctcagggattttgttatagcagcacagagtaagacatattgtttgggacatttggggtttgcaatgtctttgtaactattggatagtttatctagcaaaacattgaaattattgggtttaatgctcaatagactctcacaactagagatgaagaattttcaaggaattgcatgatgatggttgaaactgagggaggtaataatatttcagacaaattgtgargaattagaaaaagaaagggcaaagaccaacacttaggatacatgcagtcgaagtcctagaagacgataaaacccc

SEQ ID NO: 239343 - DNA, 553 bp, Homo sapiens
caagcatagtgctcaacaccagggttatgtaaattagtttcctccttcattaatgttttctttatactacccaattggcaactcttgctggaaaacctaagggaaaacacccatggaccttaatacagccacagtcccataggtcctctctctctctggctctcactctctcattttctctctcctcactcactggctgagctctctgccagcctcagcctttctattggcctcctgtcagtactcccatctctgtgagacccatgagtaatacattttgtctgcttcatgcattttgattttactttctcattgtgtctcatgtgacacacgctctgaacctaaatctctcaacagagctctcttaygtagtgccgatcttagcttatggttgtcttcaagagaatgctccatatatcctcagaaagtatgtgcattctatcattttggggtagtgagttctataagtgtcattagtcaattttgttgacagtatttttttttcttttctgtaatactgagtttttatttgttctattaattattgagagat

SEQ ID NO: 239344 - DNA, 589 bp, Homo sapiens
ctgtcttcccaagtgatccatttgcttcagaaactgtttttgttcgccttttgagatctgtcaccggtgagatgctgaacgttgtattacttttcctctcatgtctctaagtattttcccttttttcaatctcagcccawctcatagcagttctaaataaagtggagtgctcttattttagagtgtacattttctggaaacttacgacatcttcctctactagaccctttctcttcttcaaattcttttctgactcaatatcactgctttggtttattgctttatgagttcttacccagccctgatggtcttaatagctttatatagcattttcatatagttcgtattttttgtttttttctgttctgtaatttggccaatcaagcagtttgtggtttactattcactgtgtggttttccctcattatcatacatggtttccctgtgaaaaggcagaaaaattcttaaataacttataagttgatcttgctggaagctggtaatattttttaagttgttttgatcattacaaaattaagaatggagttgcatatgatgattgatggttcggtgattctcaaaactgata

SEQ ID NO: 239345 - DNA, 541 bp, Homo sapiens
tatggtgaaattaagttggttgattttggaatggtaartcaaccttgcattctagaatgaatcccacttggtgataatatgtcattctttctaaatattgtatgattcaatttgctaaaatgctgttcaaatgtttacatcctatgttcatgagaaagatggatctgtatttttcttcttttgtaatatttttatccagttttcatattaggacaatgcaggttgcacagaataagttggaaatattccttcctcatcaattttctggaaaaatttatgcagatttagtattatttcttctttaaatatttgattgaatttacccatgaagccatctgtgcctgtaagtttccttgtgaaaatggttttaactacaaatttaatttcttcaatatatatagctatctgaacaatttatttcttaaggggtgaaattgggtaatgtatgtactttaaggaatttattacatccaaattttcaaatatattgaaataaatgtgtttatgatattttattatccatttggtatttttagaatct

SEQ ID NO: 239346 - DNA, 541 bp, Homo sapiens
tatggtgaaattaagttggttgattttggaatggtaagtcaaccttgcattctagaatgaatcccacttggtgataatatgtcattctttctaaatattgtatgattcaatttgctaaaatgctgttcaaatgtttacatcctatgttcatgagaaagatggatctgtatttttcttcttttgtaatatttttatccagttttcatattaggacaatgcaggttgcacagaataagttggaaatattccttcctcatcaattttctggaaaaatttawgcagatttagtattatttcttctttaaatatttgattgaatttacccatgaagccatctgtgcctgtaagtttccttgtgaaaatggttttaactacaaatttaatttcttcaatatatatagctatctgaacaatttatttcttaaggggtgaaattgggtaatgtatgtactttaaggaatttattacatccaaattttcaaatatattgaaataaatgtgtttatgatattttattatccatttggtatttttagaatct

SEQ ID NO: 239347 - DNA, 638 bp, Homo sapiens
tgacaatatggtaagcaaaggtttgtcatgtcattcataagttggctggcttcagaattaaaaagtagtacttatctaaaaacagttaagaaaatgaaacaaaccagagactgggagaaaatattttcaaaacacatacctggcacagaagttctatctattatacatttaaaaactcttataagtcaacaataagacagacaatctgataaagagatggcaaaatatttgarttgctacttcaccaaagaagatatatgaatgggaatttgtacatgaaaatatgctcaatatcttcagttacaagtgaaatgccattaggatcaaaggaagataccactacacagacactagaaaggctaaaattaaaattctgagagtaccacatgctggcaggcttgtgtaggaattggggatgcaaaatggtgcagctgtttttttaaaaaacagattggcagatttttgtgaaaatcaacatacacttaccatatgacccaccaattttattccttgatataggatttcccaggggaaataaaaacatatttccctacaaaataatctgtgcacaaatatttgtagtagctttgttaacactgtcccaaatctagaaacaacacaaatgttcaataggtgaa

SEQ ID NO: 239348 - DNA, 638 bp, Homo sapiens
tgacaatatggtaagcaaaggtttgtcatgtcattcataagttggctggcttcagaattaaaaagtagtacttatctaaaaacagttaagaaaatgaaacaaaccagagactgggagaaaatattttcaaaacacatacctggcacagaagttctatctattatacatttaaaaactcttataagtcaacaataagacagacaatctgataaagagatggcaaaatatttgaattgctacttcaccaaagaagatatatgaatgggaatttgtacatgaaaatatgctcaatatcttcagttacaagtgaaatgccattaggatcaaaggaagataccactasacagacactagaaaggctaaaattaaaattctgagagtaccacatgctggcaggcttgtgtaggaattggggatgcaaaatggtgcagctgtttttttaaaaaacagattggcagatttttgtgaaaatcaacatacacttaccatatgacccaccaattttattccttgatataggatttcccaggggaaataaaaacatatttccctacaaaataatctgtgcacaaatatttgtagtagctttgttaacactgtcccaaatctagaaacaacacaaatgttcaataggtgaa

SEQ ID NO: 239349 - DNA, 590 bp, Homo sapiens
tggtaggaaataaaaatgaaacagtaatattaacatactataggagataccatgaatttaggaaataatataaaggaaacaatattagcaaagtaactggccacaagtacatctgtgcctggaattgtttgtaatatcgtgtccggagttggtgtgttcatggtcttgctgacttcaagattgaagctgcggacctttgccatgagtgttacagttcttaaagatggcatggacggacccaaagagtgagcagcagcaaggtttactgtgaagagcgaaaggacaaagcttccatagcaccragcgggttgctgctgcagggtgaggtgaccagcttttactcccttattgtcccctcccatgttccatttctgtcctatcagagtgcccttttttcagtcctccctgcgattggctacttttaggatcctgctgattggtgctttttacagagtgctaactggtgtgttttacagagtgctgattggtgcgttttaaaatcctctggtaagaaggaaagttccccaagtccccattcaacccagcaagtccagctagcctcacctctcaatattcacactgtgagtcag

SEQ ID NO: 239350 - DNA, 590 bp, Homo sapiens
tggtaggaaataaaaatgaaacagtaatattaacatactataggagataccatgaatttaggaaataatataaaggaaacaatattagcaaagtaactggccacaagtacatctgtgcctggaattgtttgtaatatcgtgtccggagttggtgtgttcatggtcttgctgacttcaagattgaagctgcggacctttgccatgagtgttacagttcttaaagatggcatggacggacccaaagagtgagcagcagcaaggtttactgtgaagagcgaaaggacaaagcttccatagcaccgagcgggttgctgctgcagggtgaggtgaccagcttttactcccttattgtcccctcccatgttccatttctgtcctatcagagtgcccttttttcagtcctccctgcgattggctacttttaggatcctgctgattggtgctttttacagagtgctaactggtgtrttttacagagtgctgattggtgcgttttaaaatcctctggtaagaaggaaagttccccaagtccccattcaacccagcaagtccagctagcctcacctctcaatattcacactgtgagtcag

SEQ ID NO: 239351 - DNA, 562 bp, Homo sapiens
gagtttgaagttccccagaaaatctcatacgaagtgcaatgttactatttgacctgtctcacagttccctggaaaaattctgttgttttacacaacttgactcagtgctgttttttcagggaaacctttatcctcaaagctttgggggaaacaatcagtagtgatcattcatcatcctgcttcccggggctgcaatgccagtcagggcaaacaagagctaaaaaacctggccaaaactttaaaaagggagacctgtggaatgayaaatttaaccaaaaaaaagtcattcttgtgcactaacaactacaaaacatggttaaaagaaataaaaagacttaaataaaatgaataaaaagacatcatctgttcatggatcagaagagttagtattattaaatagcagttctccccaaattgacccataattcagtgctcttcctattgaaatcctagtctttttgtttttttgttttttattttgcagaatttgacaaactagtcctttatggaaatgcagtgacccagaatagccaaaacaaccttgaaaaagacaaaattggaa

SEQ ID NO: 239352 - DNA, 597 bp, Homo sapiens
ttgtaagtttcctgaggcctccccagccatgagaactcactatcatgagaacagcataagggtaactgcttccatgattcaattacctcccaccagatccctcctatgacatgtgcggattatgggaactgcaattcaagatgagatttgggtgggggcacagctaaaccatatcaawgcaatttgtaaaataaacaacttaaatgtaagacaagtaaatattataagttaaaatgtagaaaaaaatacatataaggaaaacaagcaaagataaactggtaaaattatattactatcaggcaaaataatttttaaagcaaaggcactaaatatttaaagatgtttccacataatagccaaaatttagcttcatgttttttctgaacttccatgtatcggaaaacttagtgtcaaatatattgagtgaagaaaaaagaaattttaaatgtctgtcatcatagcagaagatttgaatacagtactctaagtagatcaaataaacagaaaaccttgggggatatagaaaacagaagccatacaattaccaaactcatctggtgacaatatctctacaacagtgcagtcaacaaatgaaga

SEQ ID NO: 239353 - DNA, 597 bp, Homo sapiens
ttgtaagtttcctgaggcctccccagccatgagaactcactatcatgagaacagcataagggtaactgcttccatgattcaattacctcccaccagatccctcctatgacatgtgcggattatgggaactgcaattcaagatgagatttgggtgggggcacagctaaaccatatcaatgcaatttgtaaaataaacaacttaaatrtaagacaagtaaatattataagttaaaatgtagaaaaaaatacatataaggaaaacaagcaaagataaactggtaaaattatattactatcaggcaaaataatttttaaagcaaaggcactaaatatttaaagatgtttccacataatagccaaaatttagcttcatgttttttctgaacttccatgtatcggaaaacttagtgtcaaatatattgagtgaagaaaaaagaaattttaaatgtctgtcatcatagcagaagatttgaatacagtactctaagtagatcaaataaacagaaaaccttgggggatatagaaaacagaagccatacaattaccaaactcatctggtgacaatatctctacaacagtgcagtcaacaaatgaaga

SEQ ID NO: 239354 - DNA, 597 bp, Homo sapiens
ttgtaagtttcctgaggcctccccagccatgagaactcactatcatgagaacagcataagggtaactgcttccatgattcaattacctcccaccagatccctcctatgacatgtgcggattatgggaactgcaattcaagatgagatttgggtgggggcacagctaaaccatatcaatgcaatttgtaaaataaacaacttaaatgtaagacaagtaaatattataagttaaaatgtagaaaaaaatacatataaggaaracaagcaaagataaactggtaaaattatattactatcaggcaaaataatttttaaagcaaaggcactaaatatttaaagatgtttccacataatagccaaaatttagcttcatgttttttctgaacttccatgtatcggaaaacttagtgtcaaatatattgagtgaagaaaaaagaaattttaaatgtctgtcatcatagcagaagatttgaatacagtactctaagtagatcaaataaacagaaaaccttgggggatatagaaaacagaagccatacaattaccaaactcatctggtgacaatatctctacaacagtgcagtcaacaaatgaaga

SEQ ID NO: 239355 - DNA, 597 bp, Homo sapiens
ttgtaagtttcctgaggcctccccagccatgagaactcactatcatgagaacagcataagggtaactgcttccatgattcaattacctcccaccagatccctcctatgacatgtgcggattatgggaactgcaattcaagatgagatttgggtgggggcacagctaaaccatatcaatgcaatttgtaaaataaacaacttaaatgtaagacaagtaaatattataagttaaaatgtagaaaaaaatacatataaggaaaacaagcaaagataaactggtaaaattatattactatcaggcaaaataatttttaaagcaaaggcactaaatatttaaagatgtttccacataatagccaaaatttagcttcatgttttttctgaacttccatgtatcrgaaaacttagtgtcaaatatattgagtgaagaaaaaagaaattttaaatgtctgtcatcatagcagaagatttgaatacagtactctaagtagatcaaataaacagaaaaccttgggggatatagaaaacagaagccatacaattaccaaactcatctggtgacaatatctctacaacagtgcagtcaacaaatgaaga

SEQ ID NO: 239356 - DNA, 526 bp, Homo sapiens
catatatacacacatgtgtatgtttgtatatagatgtatacatcatatgcataggtagtaaacatgtatatgcatgtgtatcctataaatcaatagaaaatacaaaacagcccaattaaaaatgaacaatagactgactcagaaactttgcagagtaggaaacaggaaaggccaataatattttatataccagataagtgaaaatttaaaactctgccaattttaagggttgggggatacmaccactttgggaaagattctagcagcatctagtaaagtttagaatacacatatcttctaaattatcattctattttttaagaaatttacacatgagcaacaagagatggatgtaatatttataacagcattgtttaataatacccaaacatgtaacatcggccaacagaaatgtactatacttataaagtggaatattatatagcagtaataattaatgaatacagctaaaacattcccacctagatgtgtgtgggttatgctattgagaatttagtagacaatt

SEQ ID NO: 239357 - DNA, 526 bp, Homo sapiens
catatatacacacatgtgtatgtttgtatatagatgtatacatcatatgcataggtagtaaacatgtatatgcatgtgtatcctataaatcaatagaaaatacaaaacagcccaattaaaaatgaacaatagactgactcagaaactttgcagagtaggaaacaggaaaggccaataatattttatataccagataagtgaaaatttaaaactctgccaattttaagggttgggggataccaccactttgggaaagattctagcagcatctagtaaagtttagaatacacrtatcttctaaattatcattctattttttaagaaatttacacatgagcaacaagagatggatgtaatatttataacagcattgtttaataatacccaaacatgtaacatcggccaacagaaatgtactatacttataaagtggaatattatatagcagtaataattaatgaatacagctaaaacattcccacctagatgtgtgtgggttatgctattgagaatttagtagacaatt

SEQ ID NO: 239358 - DNA, 510 bp, Homo sapiens
gatgtctgagaactagctgggcctgtgagtatctcagctattagagatcaagagaaaagggacattgcaaaggaggctgtgaagmaatagtcaatagattcagaggaaaagcagtggaccttggttttctggataccaaataaaaaataattaagtaaaagattccaggaggaaggagtggtaaagtgtccaatattgctaatacatcaaataatgagtctttgaaaaatgactgttggatttaacaacagggttttagaaaaattgttggattttttttaatgtggcaggtacataataactctactttttgttaactgtcttcccttttcaaaaagtttgttcccataactcttctgagtgtacattaatttttatagtcctaaatgtctagccaaggtgactggaccaggggtagatcgtcagcactgagtggaccaatcagttcatccctcctgggaagtcagaaatccccaaatttgggatacttgagatgagagttgaatgtga

SEQ ID NO: 239359 - DNA, 510 bp, Homo sapiens
agcagtaaatcttcattgtcatacaagatgctttcatatacttgacataaaaacttacttgttgcagttcattacatggctaatttttcaacactgccataaattcttctggacacagtaacactgctcaaaagaaaagtaaaaaaaaattatttgcattttttccatgatgattttactaaattcttgcatagctagtaaagttagcttttctccaatattgtgtagcttaccacaatttagcaatcatttctattgctaagattcatcctttttttgattaaaagactatttgtgagtattccagggacaagatcccttggaaatgtgacacacttttgacaacttgattacgatgtttctttgtaaaatgtttctttaatcttcatgastttgttacttcattagaaaaaacacatcgggagagaaggcatttccataacttctcttttaagggcaaagctatataatccaatttcaaattgtcagctgaatcttgttgctattatc

SEQ ID NO: 239360 - DNA, 411 bp, Homo sapiens
tgaatttgaatcttagcccttctaccacctgtgtgaatgaccctccttaaactccaactacttcactcaatgcggataatactagctacaatgtgagtgactcccatgcatccctttttgaaggtgtcttaacccaaatgtgtagatactaatccaaaggccccagatgtagttcagatgttgacctcctgaaccctcatggggtctcttccagacaacctgaagccagtacctcagacacccgtaaggcaaatgagaacagaactggactcgcccargctacttgttgtgttagagtaaatactgtgttatttagaggaaacaggctacttgatgtgcaaacagaacaaataaaaacattgcagaagaagaaatgttctgtgatttaaaattgtcagaaaataatagctc

SEQ ID NO: 239361 - DNA, 587 bp, Homo sapiens
tgattctattgaggtcgaaactcaaactcaaagaggtgggcgatttgtctgaaggtctcagctcacgagtagaccaactaggactyccacattgattttatgcttcctaaattacttaccatgatgctgctcttggtgctgaactgaaaggaagagagcattcactcttactttgccaaacaatcatatgatggaggcatacggaacacgaggaaagagcatattctgatagtctgatgcaaggatcactttacggcttacaggatgagcacccgatatagccaaaccgatcagaaccctttgcctgggtatttgaataaagaatagggtaaaatcttttttgttattaaaagctgttagctatgatgctttgatgcttaggactggccagaaggcatgtttcttgccttgtggaggaaatttaaagaaagaagttgacatacagagaaaagcaacataagagacacagaaaatcctcactgtttgaaactctggttgcatttatttttgagggctagcagcattctcgtccttccaatgaattggttatttaacccttcatttgataatgtgagatgcttcattat

SEQ ID NO: 239362 - DNA, 587 bp, Homo sapiens
tgattctattgaggtcgaaactcaaactcaaagaggtgggcgatttgtctgaaggtctcagctcacgagtagaccaactaggactcccacattgattttatgcttcctaaattacttaccatgatgctgctcttggtgctgaactgaaaggaagagagcattcactcttactttgccaaacaatcatatgatggaggcatacggaacacgaggaaagagcatattctgatagtctgatgcaaggatcactttacggcttacaggatgagcacccgatatagccaaaccgatcagaaccctttgcctgggtatttgaataaagaatagggtaaaatcttttttgttattaaaagctgttagctatgatgctttgatgcttaggactggccagaaggcatgtttcttgccttgtggaggaaatttaaagaaagaagttgacatacagagaaaagcaacataagagacacagaaaatcctcactgtttgaaactctggttgcatttatttttgagggctagcagcattctcgtccttccartgaattggttatttaacccttcatttgataatgtgagatgcttcattat

SEQ ID NO: 239363 - DNA, 593 bp, Homo sapiens
aacaggcaccaggctgaatttgacccaggggccatagtttgccaacccttgctctgtatgacaagaaacaaatgtcagatcaaagaggaaacaaaagtaataaactgtagaagatgaagacatgagaacccagcatcagctctgatatggtttagctgtgtccccacccaaatctcatcttgaattgtagctcccataattcccacgcatcatgagagggaccgggtgggaggtaaatgaatcatggggtgggttttcgcatgctgttcctgtgatagtgaataagtctcatgagatccgatggttttataaagggggcactcctgcacatgctctcttgcctgctgccatgtaagaagtccctttcctcttcctccatcttttgccatgattgtgagscctccccagctgtgcgaaactgtgagtccattcaaccttcttcctttataaattacccagtctcaagtaggtctttattagcaacatgagaatggactaacacaagcccaatcagcccattttcttcacaacaatttcttggctgtcatgtagactcacataaggtctctattttctatccaagagaaaactca

SEQ ID NO: 239364 - DNA, 479 bp, Homo sapiens
aaattccacctctgatattgctttcaaatttattccctctatctattttaaccatcatcactagcctaacccaagccatacaaaccagtgctatcactttctaacaaatattcctgtatctatcccctaatccactattttaacaatgcagacctgatcataccatttctctgctttaaatctttgatgactgttatgataaatttccatattctttttatggtctcaaaatcctgcataatctggacactgcttatctctccagtctctcttccccttctcccccacatgctcctctgtccaaatataacattttacattctttcctgccttggggycttcattcagctgctcctgcctggcatgctctctgactacacttacctacctaattattaatgttcatattgcattttaaagctataagtctcatttttgttaaaataaaatgtaggtagaaaaattttatatgtacatgt

SEQ ID NO: 239365 - DNA, 580 bp, Homo sapiens
aagctgtctcccctcacctgtaactgctgtgtttacacagatggtgtgctctgaaaagccttgctttcagttgataaggaaactaaaatttaaccaagacctttgattagctgatttatcaagttgaagccagttccccttaagatgaaatctaattcttgctctgtatcccatgtggcaagcttcagttttctataattttcgttcatccaacatagagataataactctcctgaggtcaaattatttttacgaaggttgtcttcaacacctgaaatgttgctttaaattctgagtttggaaaaaattcacagatgcttagaatcatgaatcactgggatgtgatggtggggaatatgtctgttgctcttcactttcattttaaatgacattcccactcttggttttctttctttgttcttctaactgtctaaattacctgtgaaaatttatgagtggaaacagaatggtttaatatgcttctttcccagaagtatttgrtatttacagttgaaaaatgacctagattcggttctaattcacacacaggtgatgcttgctatttctgtacttttctcca

SEQ ID NO: 239366 - DNA, 604 bp, Homo sapiens
taaaattgatctctgataataaacaatattcccaagatctttcttggagataaaatatctatataaataaaataaaactaactcagataccttttatataatctaagataatctttgaaaaataaagctagtttttaaattgttggaaaaataaaataagaatgtcctcagaatttaatttaggtatttttgcttgggtctattggtcagacagatttatactttctctgctagatattttaaggtcataaaactgttgcttctgtgatatttttgatacttgcttaatttttctgagctaaagctgtaagggttggttactgggctcccctaaagccttgcacatatcttatggcgggattatgtctttggttttgagcctctggattctggagtctkaacagatggccatgaagaggcctggggacatatcaatgtccatagtacctgggccaccaggtgcaaggcagattcaagcccaaaatggccttgtctttggcccagctctatctgctggtcatactggaagaggtcagatcctccaggcattatcttcatagttctgtcctctgtcctgggctctgtacctcatatgtaaacacag

SEQ ID NO: 239367 - DNA, 557 bp, Homo sapiens
gatagctagaagactaagcccaaaataaaaaagatggaacaaccagtttctcctttgctctatttttttttcccaagggaatttttcttcaatgacaatttgctgttggagatgttaaaaaaaaaaagaaagacaaagaggtaaaactaattctcctaccctagttctctgagactccaaaatccgttgccagtgccgccaagaacatcatcagcttcttaggtaaaatgatttctcagagccactttggccctcacacttgcttttggactctacttgtctcttgaacctttgccattgacaaaatcataagctcaggacagaacaaggcgcccattggactaagaacgaaattctgccaaaaggaagacattaggcatgggacatggggggccactattttcttcacacttgatgtttaataggccacrtgatattggtctgaactgtgatggaaaagaaggtctagttcaacatgataaggttctgaaaacattgctctgacaaatggtgaaaattaagtttgacactcggaagaatactgaagcatcagatct

SEQ ID NO: 239368 - DNA, 489 bp, Homo sapiens
cttcaaaaattgagctgaaacgaacattctgatatttttcttagattcacaagatgtgaagaagaaggaaatacaataaaaaacaatttgtgtttgtttgtttatcatgaaaccctatgctgaacccagattttgtaacccatgcttttagggattatgtcttatttgtaccttgaaattggtacaatgtcaagaacatagcagttgtataaatctatatcataaatagaaaaaaaamccctgcatttactattatgtgtcattccctgacttatgtgttcttcctttaagtgaaattcaccttacaaggtaaattagtggggagtgtgttcagctgcaagtggtataaaatgagaaggatcttaactcaaagagtacctcaaatataactgaatctggaggcagacaactgtgagcatgaattcaaaggcatgatggttgacatctctgcaattgttttgatctttccttaatgatgttgtttcacat

SEQ ID NO: 239369 - DNA, 369 bp, Homo sapiens
ctgggaagcccaccattaagaccccagcagattcagtttctggggaggagccacttcaggttgcagatgaccaacttcttgctgtgtcctcacatggcagaaacaggatgagagagctctctggggtctcttttataaggacactaatccattcatgaagacttcaccttcatgatctatttacctcccaaaggcctcacctcccaatgcgaacacattggggcttggaatttcaacatayggattggaggggaacacaaacattcactctataacaacatgtcaggtgtttacatctactattctgggttagagggactccttaagcagatggagtcttatcatctctcccaataaccactcttaaag

SEQ ID NO: 239370 - DNA, 645 bp, Homo sapiens
cagtacctggggtgaaatccatgcctagtaaaacagcccttttgtatccaggccaggatgcatctctgagacttgaatgcttttgctttctctcctgttttttgttttgttttgttttgttttgttttggttttgttttgttttgtttctcttctctgcctgatcaatactttcccatctgaagaagcaaaacattctctctcttctgtttcccttgctgctgattctggctcaaggggatgggggcaggagtggaggaaagagggtcagagtctatatttaaccacaaagataattcctccttgacagcagctccagagagaatttgacatttgaggggactgagtagcaagagtaatttgcatttatctggctatagaaacagaagrgattgggagcaacaagtgatctgtggaggtaaaaatgagtcaggggtttggaagagggaatatagggcaggtgaagaagaagaaattatttgccaacaatgatggaaggataaagaacaagactcctgaaactatttccttaaatgtcacactaaagcaactccaagaggattgtaatagctttggagtgggacaagtggcacagatgggaaggctgacatgtcccggctgcttaaatactctgaattctagatct

SEQ ID NO: 239371 - DNA, 508 bp, Homo sapiens
tatcaccaagtagtttataaaaaatgacaaatatacaaatagccaaagcaccagagagactattttagtggggtccttctttataactcccccaggtctagctgggaagggcttaataaatgcctgttgcttgattgaacacaaycatagtatctactaccataaaggtgcttggagagagttaattggattcaattttatttattaattttaattatttgaaacttactatattgactcctcctatgatcaggccatggactaggctctataaaagcataaggatctctcagttctttgcttcatggagcttgtaggaagaactctgcttacaaaaaaaatgctgtcactaaagaatggatgacataaacaagaaccagaagtgcaaataaaaacataagctgagaagaggaaggaatatatcaattctgacagtggtaatagggaggaggaggtggcctctgagcaaaaggggaacccaaggaacagtgcaggtgaggggccagtt

SEQ ID NO: 239372 - DNA, 653 bp, Homo sapiens
tagtattgagaaactaacttttgtctagttggctagactggatccttttattctgtgtagacgagaaagtttatttacatttttctttacttctatcatttattcctycatttttcctctttctttcctcttctttgtcgagaaatggggcttctacatctgtgaagcaaagtaatggcttcaaattgataaatgtgtggcctagtcaattcatgtccacgtccccttttaagaaagtgaagactcggcttgtaggtagaagaaccagtgtgaactgtgggagtgggctagggggtgtccgtttctcaggtgagaactcaaatcaagccttcagtaacactcgtagctcctgttctgtttttgtgatgcattcggttatttatggcacatttctatgtctctgctggactgacagtcatccagatagacagacctgatggaagaacacaggaaatgcttgctgagtgaaatgagtcagatgaaaattaatcactttgtgctctctgagaaagaactagagtgacagccctcctcattgtctgaagctcacaggactagaagttgagagtcaagttcaagtctaactgtggccctatccagagcatgctgcttctcctttctagccttcttttttttttcgtctctaaagacaa

SEQ ID NO: 239373 - DNA, 653 bp, Homo sapiens
tagtattgagaaactaacttttgtctagttggctagactggatccttttattctgtgtagacgagaaagtttatttacatttttctttacttctatcatttattccttcatttttcctctttctttcctcttctttgtcgagaaatggggcttctacatctgtgaagcaaagtaatggcttcaaattgataaatgtgtggcctagtcaattcatgtccacgtccccttttaagaaagtgaagactcggcttgtaggtagaagaaccagtgtgaactgtgggagtgggctagggggtgtccgtttctcaggtgagaactcaaatcaagccttcagtaacactcrtagctcctgttctgtttttgtgatgcattcggttatttatggcacatttctatgtctctgctggactgacagtcatccagatagacagacctgatggaagaacacaggaaatgcttgctgagtgaaatgagtcagatgaaaattaatcactttgtgctctctgagaaagaactagagtgacagccctcctcattgtctgaagctcacaggactagaagttgagagtcaagttcaagtctaactgtggccctatccagagcatgctgcttctcctttctagccttcttttttttttcgtctctaaagacaa

SEQ ID NO: 239374 - DNA, 633 bp, Homo sapiens
tatttatggcagacttttctgagtatttattgatactgctaattcttggcaaccagaagggagagttggcaggttcagtaatccaaagagtggcgctatgaagctccatcctcagaatagcaccaaggaagcaaatgatttgtggtgctcagaagcaattgtgaatattcaactagagtttaggctgaggtgatttcccaaacaaatcattatagaggaaatgtttaaagagagagaatgtagggaaataaggaaaggtgttgctagataatatttaccccagccctgaggccaggctgagttcatgcaaccctaaaaataaagcagttcagatggtgagtttgggcctactgaatcagagggaattctgtgatttggatgtcacatcatatttacaaggcttgtccctgtggtgccattcactatatggaatttttaatttaaaaattaagaaataaattattaacatagactctgacacatgggtggtagcaaccatccaggttggcatattaatgtctgcaactgttggttgctggactataacacctaytggcaaagtttgggattacatctcatcacagaccacttattattcgtgcagtcagtatagttcctcaatagttattaagc

SEQ ID NO: 239375 - DNA, 605 bp, Homo sapiens
gatagcattttcaagcctcatggtaacttcagaccaaaaaacatacaatggactcacaaaaaataaaaagccgggaactactttatatgatcagagaaaatcacctctgctagaggaagatagaaaggaaagaaagaagaaagagaagaccaaaaaacaaccagaaatcaaataacaaaatggcaggagtatgtccttacttaccagtaataacattgaatgtaaatagactaaactctcccatcaaaagacatagaccggctgaatagatttaaaaaaaaaaacaagacccattgatatgttgcctacaagaaacacagcctacaaatacacacaaaggcttaaaacaaagcaatagaaaaagaaaccccatgccaatggaaaccaaaaaagagcagaagtcactatattatatcagacaaaatagatttcaagaaaaaactataagaagagacaaataaggtcactatataatgataaaggggtaaattcagcaagaagatataacarttttaaatatatatgcacccaacagtggatcacccagatatataaaggaaacattattagagctaaagagagagctaggcccaaatacaataata

SEQ ID NO: 239376 - DNA, 384 bp, Homo sapiens
tcttcaccctggtccaaactacctttattccttgggaacgtaacaatagttttctaattattctccttctgcttccattcttatcagcctctaatcctttcttcccacagcaaaatgaactttaaaacatatgtcagaacatgtccctcccatgttaaaacccttctgtaggtttccttttcagaaagctttggatattctgccatcacctcccctccccttscagtccctatcttcatctcttattgctattctcttggtgtctctgtcacattgcctttctttcaatccctaaaacactccaacttcttttctatctctgggcttcccataggtggggctctgccaaaaagactcctctccctcctttgcctggatagccct

SEQ ID NO: 239377 - DNA, 398 bp, Homo sapiens
atgatcttctccatcacacatcttcaccctggtccaaactacctttattccttgggaacgtaacaatagttttctaattattctccttctgcttccattcttatcagcctctaatcctttcttcccacagcaaaatgaactttaaaacatatgtcagaacatgtccctcccatgttaaaacccttctgtaggtttccttttcagaaagctttggatattctgccatcacctcccctccccttccagtccctatcttcatctcttattgctattctcttggtgyctctgtcacattgcctttctttcaatccctaaaacactccaacttcttttctatctctgggcttcccataggtggggctctgccaaaaagactcctctccctcctttgcctggat

SEQ ID NO: 239378 - DNA, 584 bp, Homo sapiens
attcatttcaactactcctcccaattacgattaaaacaacgaagacattacatgccaattgcacgttttaggtactggcctgccttggagtcatcttcaaaccggtttcctctgtatgtatttatttttctttaartatcctgagaagtgcacattattatcttctgtggacatctttagtaaacagggagcttaggcatgtttgcattgttctggcttgttgcagttggtgacctgattggatcatggactgcttttgatcacttaaaatgaaagcagtttttactgcaaattgtgctgggatgatttgaaaaccaaacaaaccaaaaggacatgttctatttattctttattactcacacatttaaagaacaacacagaccttcctcccctcaatccccaaaatatgaatgtgtttagaagatacatttaaaaccaccttttcttttagccttgcaggcaaaagcctctggagggtgcttcgtaaaaagggtctacagcttggcaatttcgatttggaaaagtacactttaaattatttctccccactctcaccgaagtcctgttttacaggcttgggagtt

SEQ ID NO: 239379 - DNA, 584 bp, Homo sapiens
attcatttcaactactcctcccaattacgattaaaacaacgaagacattacatgccaattgcacgttttaggtactggcctgccttggagtcatcttcaaaccggtttcctctgtatgtatttatttttctttaagtatcctgagaagtgcacattattatcttctgtggacatcttyagtaaacagggagcttaggcatgtttgcattgttctggcttgttgcagttggtgacctgattggatcatggactgcttttgatcacttaaaatgaaagcagtttttactgcaaattgtgctgggatgatttgaaaaccaaacaaaccaaaaggacatgttctatttattctttattactcacacatttaaagaacaacacagaccttcctcccctcaatccccaaaatatgaatgtgtttagaagatacatttaaaaccaccttttcttttagccttgcaggcaaaagcctctggagggtgcttcgtaaaaagggtctacagcttggcaatttcgatttggaaaagtacactttaaattatttctccccactctcaccgaagtcctgttttacaggcttgggagtt

SEQ ID NO: 239380 - DNA, 631 bp, Homo sapiens
ggatattcttatagtcttgatgtgctgtaccctaagaaacagtttttccaccatattttgcaagcagaaattatyatattactttgtgaatccttccatttgaatttaactttttgaaggttctagtctacttttcccattgtaaatatgctcatgcagatttatatgaagtaatatatatgaaagtgctgtacactatagtatatacactaatatattggattattgttgtaagtaaagaaagcaaaataaaggccaggcacggtgcctcatgcttctaatcccagcactttgggaggcagaggtgtgtggatcactttagctcaggagtttgagaccagcctgggcaacatggtgaaaccctgtctctatcaaaaatacaaaaattagccggacacgaaggcacacgcctgtggtcccagctactctggaggctgaggtaggaggattgctttagcctgggaagccaaggcttcagtgagctgtgatcaccccagtgcactgaagcctgggtgacagagtgagacctggtctcaaaataaataaatttttttttaaaaaaagcaaaataaaatatgatcttttaaagtaaaagctattgatgatattcctatctaatcaccttccatca

SEQ ID NO: 239381 - DNA, 577 bp, Homo sapiens
aaaattcctttgtctttaggtatttctcacatcattttgatcatacatatatgttgggaaaaatcaagatgaataatctccgtttactctgggaacaaggagtatcttcttccctctactgtggctaagtatggaaaagcttaattgtaaatcagcattcaaagacaaccaaacatttatttatgtcagtaggaaagaggaaggtgtgtgagagagacaagtaggaggaggaagaagaggaggggagggagagagaagagaaataaaatgtaaagcaggcagctggcaaggcttgctctgacacactggctgaggaaagagctattggtagaacttggatgtcttagtaatcagagtaatcaggttctctgaccggttccaccttgttctgtgcaggctgaaagtaagctctctagagaaagtaattttctttctctsctccttctgacatcccacttttccctcccatccttcctttctattttccctgcctctcccctctggtagaactgagtataaccgtggtaacattggttacagtgttttctagacttgagaactgaaatgatttgacctt

SEQ ID NO: 239382 - DNA, 445 bp, Homo sapiens
aaccatcctcccatctatgttaagatagagagaactggacagaaaactcattattgaaaaagattcaggacatcaatgctaaagagagtgacaaatttcttaacttgtctggttaggtagaggtttgttgccagctgcctcaatgtttagtggtgaagactgccaagctatctttgtgttgggatgtcccttcttatcttgatggataaaaggaatgtaggtaccygttgcctttttgtggggagggaacttggcttgggagtgcagtggacaaatttgcataggtactaaggaggcttctgggacaaaataactgtccttattgaaacgctacattatttgaatgctttgagattatccctaattaagtctgcaggcaagaaggagcactgaagctttctcttccctcccggagattatggtgcagacacagtggtgtatgtgg

SEQ ID NO: 239383 - DNA, 588 bp, Homo sapiens
caaaagaaactgaattttattttgtagcttcctccctaaaagtatatgacaattttgaatgtttacgataacaatggatacaaacaatatgaatatatttaatacaacattaagtactaacttctcttctactaaaacttttcatcagatctattatcaagtaacaaaatatcagatttgaagttcactttattttcttcccaacctctctctctaagcagtgcttatgtccaataaaatggataaagacaagagaagggacagtaagcaaagcaaaactcatgaaaatccatatgcctacaaaccaggacctggaaaactgggaggcagttataatttgcaaagcccacaaagcccctaccactgcaatgaggtaggggataagtgaggggagaggaatagaaatgtatttccacaaactgtgaaaaacaggtaactttaagcaaattaataataaaatatgcaccaastaagtgcacccagacacacaacacacttagcaggaaattgctggagagcttctcctggcctacacacagtctgtgccaggctggatggtatctttaattaccgaggtccaggcaaaag

SEQ ID NO: 239384 - DNA, 562 bp, Homo sapiens
ctccaaactagtttaaaaacactgtaaatttttactgaagcctttaataaaaacaccaaagaaggaatatatccagaaaatctttggaaatattatctttccagtcttgtcaacctcttccagatgtggcaactgcccccaaagtccctatagtttcaactccccaaaagtctcttccagcctggtataccatctcttgtatcctccctcacctgtctctggtgcagcttctttaatatgtggctcattttaacctttctgacttgtttcactttycctgttcctcctttaccaagattctgtgcagcaaaacaatgcctaggaactcatacagcaagcaacaaaacaaaacaaacaaacaaaaacaaaaacaaaaatcctctccgttttccaagattgttgatggtcagagatgtttaaaatactttgtaatttattttatcttctcccacaaatagcatataaggtctgtccttttaaagtagcagtttgtcaaggagtaaagttaaaaaggaaaaggactttgtcttcaatttacagaaggcaggcaaagctttcattt

SEQ ID NO: 239385 - DNA, 595 bp, Homo sapiens
taagctcatactaaaaggtacacaactgatactggagcctttctgggcaacaacagtgttgagtggaaatggtccacacactgcaggagaggggatagttgggaggactgtatacctgagataactcagttcctaaggacaggaagcaggtgaaactcggaagtgagaacagggtgaagagaaggggcatacataccaaaaagagctaaaagcagggtttcaaagaactatttggacatccttgttcatggcastattatttaaaatatctgaaagctggattcaacccaagtgtctatcaacagattaccagataaacaaaaatgtatgtgtgtgtatgcactgtatgtgtatgtatgtgtgtatatatacatataaacacatgtgtatgtatgtatatatgtctacatgtacaccgtttacactcatacgcacagtattccactgtgtttgtgtgtgtatttatgtatgtgtgtgtctgtgtgtatatatatacatatatatagtgtgtgtgtatatatatgtataacatatatatacagtgtgtgtatataacttacctaattgattagtttggagtcggaaaagtacctta

SEQ ID NO: 239386 - DNA, 595 bp, Homo sapiens
taagctcatactaaaaggtacacaactgatactggagcctttctgggcaacaacagtgttgagtggaaatggtccacacactgcaggagaggggatagttgggaggactgtatacctgagataactcagttcctaaggacaggaagcaggtgaaactcggaagtgagaacagggtgaagagaaggggcatacataccaaaaagagctaaaagcagggtttcaaagaactatttggacatccttgttcatggcactattatttaaaatatctgaaagctggattcaacccaagtgtctatcaacagattaccagataaacaaaaatgtatgtgtgtgtatgcactgtatgtgtatgtatgtgtgtatatatacatataaacacatgtgtatgtatgtatatatgtctacatgtacaccgtttacactcatacgcacagtattccactgtgtttgtgtgtgtatttatgtatgtgtgtgtctgtgtgtatatatatacatatatatagtgtgtgtgtatatatatgtataacatatatatacagtgtgtgtatataacttamctaattgattagtttggagtcggaaaagtacctta

SEQ ID NO: 239387 - DNA, 595 bp, Homo sapiens
taagctcatactaaaaggtacacaactgatactggagcctttctgggcaacaacagtgttgagtggaaatggtccacacactgcaggagaggggatagttgggaggactgtatacctgagataactcagttcctaaggacaggaagcaggtgaaactcggaagtgagaacagggtgaagagaaggggcatacataccaaaaagagctaaaagcagggtttcaaagaactatttggacatccttgttcatggcactattatttaaaatatctgaaagctggattcaacccaagtgtctatcaacagattaccagataaacaaaaatgtatgtgtgtgtatgcactgtatgtgtatgtatgtgtgtatatatacatataaacacatgtgtatgtatgtatatatgtctacatgtacaccgtttacactcatacgcacagtattccactgtgtttgtgtgtgtatttatgtatgtgtgtgtctgtgtgtatatatatacatatatatagtgtgtgtgtatatatatgtataacatatatatacagtgtgtgtatataacttacctaattgatkagtttggagtcggaaaagtacctta

SEQ ID NO: 239388 - DNA, 644 bp, Homo sapiens
ccctggttggggtataaggctgaatgcgccccttctttctcttccctttttgcataccatgttaatataaacaaaaaaggcttcttccctttgcttctcggttgaactctgtaagtgggggagtaagtttgatgggtgcattatcacttagtttcacaagcagcagggaaactaatctgcagctacagtaggaccagactgtgagcccagattctcagactcccgggccagtgctcccccaacctctgacatgctgyagaaggatgcttgcttggctctgttccttttgagagttaaaaaattggcctactattattttgtgaattgtgtgtacattatgttttacataaaatttagagggaaagaggtaatgttgcataaatatgtactttctgttaagttcacctagtttttaaagtatgctatttgccagtgcttgcaaaggttgtgatagttgtatcaacgaggaagcactgataatttacctgattccatctataggatctttcatttaatttacctgatgccatctataggttctttcatttacagtgattggccagttctctctacaatacgcaaagtgcagagctagcccccttcaaaaccgatactcgattttaaagctgataactaagatatgg

SEQ ID NO: 239389 - DNA, 572 bp, Homo sapiens
aatgccttgttaattttatttaattttaaattaattttaatttaaacggccacacgtagcaatggctaccatactggacaatgcagttgtgggcaattttacatggtgcgaaggcatttggtgccttggttgggggctaatcttgggagttgtcgtctaccacgctggaaatctgaaaatggtttttgattccattgagatatcattgatccccacagactcttgagtcttctccagttcctgaccccatggctcttgaggggtggctccctcttagccacctcttcacacttcattggctctggggctacattgtctaatgtggtagccactggccacatgtgccgactgagtacttgaaatgtagctagtcagaactgagatgtgctgccagcataaaatagacaagggattttgaagacttagtgtgtatatatatatgtgtgtgtgtgtgtgtgtgtgtgtgtgtgtgtgtgtgtrtatatatatatgtatatatatatttatacacacatacatataattttatttatataagacttggtattttatatatataaatatatgtatat

SEQ ID NO: 239390 - DNA, 539 bp, Homo sapiens
tctactttttttcttcttattctttttactatttgtgaccttttgaatttttataggtattttgaaatcagcttgtcagtaatcataaaaatcctactgggagtttaaatgtgattgcactgcagcagaccaatcaatttgggaaaaattgatttcttaataatgttgagtagtcaacctacgaacatagtatgtctttccacttatctggaaggttagaggatacaatgataggtaagacacattcctgccttccaggaactcagtctcaaacaggatttctgaaagtgtgtatgcattgacgcttacaaggaactatgtgaagaacagcttcaaaatatgaggcagcgggtctagttttcacactacatcaaaaaccagtaacttagaatcttcatcagaatctctctgagtggtcccagtgatctttatmcaggtccttctggtgattcttatgtataagttaaatcataagcattttaatttcaaagaattagtaaataattttttaaaaaattttgtctcatacatgacttatg

SEQ ID NO: 239391 - DNA, 328 bp, Homo sapiens
atactgtcgtagcttcagacttgttcatatgtctgagctcctgaacgttatgggatgtgcaaccctatgaaataccagcatgtgtggttatgccaagtggacaagtgrgacacagaaatagaacaatataacatatgtgctctgtaaaatcatagcccacatgtccacgaaaataaacaagctgagcccggtcagttttcaggtttttcattaactttcactcacttattgaatgatttaattgcattgccatttgttatcaggtgaacagtcataagcaacaaacagtaaagaaaatgtatggaagaagaacttaaatgagagaatt

SEQ ID NO: 239392 - DNA, 566 bp, Homo sapiens
gaactttattaaagtggcaattttagtatgtattaaataaggcttaaaaattagctttcaccttcagaggtaaagacagggaggactccatatgtgtcatttggaatataagaaatatggtggaaactcactgctgcctcttggttgatgtttttcttttgtgtaggggccaaaggggtaagtgaaacagaagacatcaaagacctgatttagcaggacagcctcgggaaatagattgggttggaacagtaatgtggaaaaagtagaaggcaaatgctgcctgtctgagtggggaagagaagggctatggagctggggaggctaggggaagtcatccaaagctgggaggagacccacaagcgttcacatccatgtctatggtgggtgctgtgaagtaastaaagctcaggagaagcctggaaggattgagttcatgaagcatgagactgagaattatatcaaacagtcatgagtaacagtggaagttaagaatagtggagtcagttgttgaaacaaaggtcatatttacaccgtatgctgggattcaccaaatcccatctgcgatg

SEQ ID NO: 239393 - DNA, 595 bp, Homo sapiens
aggggggacatctttgtattattctgatcttagcgagaaagcatccaatttctcatcagtaggtttgatgtgtatagattctgtataggtgttccctgtcaagtggagtaaatttctctctattcttagttagagaattttattatgaatgagtgttggattttatataatgctttttctttgctaattgatgtgatcatttgctttttcttctttaggctattgatgtggtaaattacactgattgatttccaaatgttgaaccaaccttgcttacacgaaataaatcacaattggtcrtggtgtataattattttatacattataggttctgtttgttaatttttttagtatttttatgtttatacctataagagatactggtttgtagttttcctttcttgtatttttttttttgaagggggcctgcccctccatacctgtgggtatttctcacaaggtgaagatgagagactgcgaaaagaaataagacacagagacaaagcatagaggaagaaaagtgggcccaggggactggtgctcagcaagtaaggacctgtaccagcactagtctctgagttccctcagtatttat

SEQ ID NO: 239394 - DNA, 467 bp, Homo sapiens
gacagggtttcgccatgttggccaggctggtctcaaactcctgacctcaggtgatccacccacctcagcctcccaaagtgattacaggcatgagccaccattagagccgttagcatattcatcatagttattttaaattgcctgtgtaataactcctattttgtgtcaaatctgagtctkattctgatgttttgtgtgataggaattgaggtcaataagtcttaagtgtgagatttttattcatctggtttggattgggcttcatgttttctgtagctttatatactagatattgcaaattcctcttccttcttgattttgtgtatctctaagtactcctactcagaaagaatctgtcttggagcacttttagctgtaatctactgttagtatatgggagtcctattggtgtgggaataaatatggaagagaaggattattctataatattccaattaaatatcagc

SEQ ID NO: 239395 - DNA, 467 bp, Homo sapiens
gacagggtttcgccatgttggccaggctggtctcaaactcctgacctcaggtgatccacccacctcagcctcccaaagtgattacaggcatgagccaccattagagccgttagcatattcatcatagttattttaaattgcctgtgtaataactcctattttgtgtcaaatctgagtctgattctgatgttttgtgtgataggaaytgaggtcaataagtcttaagtgtgagatttttattcatctggtttggattgggcttcatgttttctgtagctttatatactagatattgcaaattcctcttccttcttgattttgtgtatctctaagtactcctactcagaaagaatctgtcttggagcacttttagctgtaatctactgttagtatatgggagtcctattggtgtgggaataaatatggaagagaaggattattctataatattccaattaaatatcagc

SEQ ID NO: 239396 - DNA, 549 bp, Homo sapiens
tacagcaacactaaacaaactaagataccagggttgccataacaaggtaaaacagactggatggcttaaacagcagagatttattttttgaaattctggagcctggaagtctaagatcaaggtgtgggcatggttggtttcttgtggagcctgtttccttgacttatagatggccatcttcttcctgtatctttcttttgtgtgtgtcagtgccctaatcttttcctttaaggacatcagtaatgttggttagggcccaccctaatgacctcattttaaattaattacctcttcaaagactctatctctaaatacagccacattctaaggtactaggggttaggagttcaacatataaatttggggggaacattgtgaattatagggagacacaaatcatcctgtaacatatagattactcctgycttcccatagatgtgacagaagagctagaggagactggaatgagaggaatgtcctcccccatggctcttgaataggctctgatgaattcttttaacctggagagtaggcttttgttatggagaa

SEQ ID NO: 239397 - DNA, 600 bp, Homo sapiens
tgccatgatctgtgggagtattagacttagaggttttaaagattagggtctgaggttttaatgtcaatgtagtgatagacaatgtagccttagcacccaagagaatgatctggaaataatatcccttcagtaacgttagaatagttagttgctcctttgtggatcagggactataaaagcatttaaattagagaacaaaaattttgccttaagattatgggtaaaaaataacagtacccttagagtaattgaaacctcaaacatgtggcatattcrctatggagtctgaatttacaatgacatcatagttcaaaaattcgaacttgagaaattaacataaaactggtttttgtccagggaacttctagggtcagctggcaaaggcatatgtaaactcactctgttgggacatttccatagaaactgttttagaaactttagactccttctaacaaagcagactttggaaacaacaacattaactttcaaagaatttgaggtaagagaacaacctgaaaaagactttcagaagagctttaaaaatgtttaggctggggatggtggcttatgtctgtaatcccagcattttgggagcctgag

SEQ ID NO: 239398 - DNA, 550 bp, Homo sapiens
gctactgtcatatcaatcctattttaaaacaccaaaaatgagacctgacatagttgcataatgattattggtttatgtcaatctgagtatgggactgttagggaaggtgggtctattgtttactaagagccttttagttccacacacagcaggttcctatccctttcccaaggcacaccagcccacattcagaattgcagccattgggtaatatgttctggggcagtgcagtctgcttgtctctacaccaagagggtcaaagtggagattgctgcccctactccggcccccccccccgcccccctcattcatagcactctagggacactttgttcactaaccacttgaaacatgattcacatgcgcaaratcaccttttcaatggtgtgttagttttctattgctgctgtaaaaaaatggccataagtttagtggcttaaaacaacacaaacttatgattttatagttctggaggccaaaagtcccaaatcagtttcactgggataagttgaaggtgacagcaaggcttcgttctccctggaggcaatga

SEQ ID NO: 239399 - DNA, 554 bp, Homo sapiens
aagaaaagtcaaagaattagaaaacaacagatcagagtgggaataggtagctagaaaaataaaaagaaaactgagttaataattttaggaatatacaaaaaatgaatgatgacaagacccagagaagactgctgaaattaaagagagagatcgcaaaacaatacagggtggagttacccagagaaattagatttaaagacaaggacttcaggacttcatggcgcatatgcagaagtcctgtgcatataaagccaaggttttctggtggaggggacattctaygactctctaagtgtatcccggaatcccacaaaggaggcttttccttggttgacagtttgataatgttaaataactataaagaagccctttgtctttatctctgacagtagttggcattctcctaaaacaatccacaatttctgccaaaatatgttcaggaaatatgagctgttgcagctgtgaccccttttgataaccgcaaactgaatcatggaatacagttcagctgagtaataaaatataatcagattggcagacggcatcagactggg

SEQ ID NO: 239400 - DNA, 554 bp, Homo sapiens
aagaaaagtcaaagaattagaaaacaacagatcagagtgggaataggtagctagaaaaataaaaagaaaactgagttaataattttaggaatatacaaaaaatgaatgatgacaagacccagagaagactgctgaaattaaagagagagatcgcaaaacaatacagggtggagttacccagagaaattagatttaaagacaaggacttcaggacttcatggcgcatatgcagaagtcctgtgcatataaagccaaggttttctggtggaggggacattctatgactctctaagtgtatcccggaatcccacaaaggaggcytttccttggttgacagtttgataatgttaaataactataaagaagccctttgtctttatctctgacagtagttggcattctcctaaaacaatccacaatttctgccaaaatatgttcaggaaatatgagctgttgcagctgtgaccccttttgataaccgcaaactgaatcatggaatacagttcagctgagtaataaaatataatcagattggcagacggcatcagactggg

SEQ ID NO: 239401 - DNA, 593 bp, Homo sapiens
agtcccaaacctgaagaacctggggtccaatgtttgagggcaggaagcatccagcacaggagaaagatagaggccagaagactgaaccagtctagtctttcctcattcttctgcctgtttttattctggccatgctggcagctaattagatggtacccacccaaactgagggtgagtctgcctctcccagtccactgactcaaatgttaatctccttcggcaacaccctcacagacacacccaggarcaatattttgcatccttcagtgcaatcaagttgacaatcagtattaaccacaacagataccaagcctactaaattcttacataatctgtataagcagaaaagttctaggtcaggtgggcaaaagtataacttgaatcataaaaacagagagtcatagccccttaatgaattctcagacttgagccagtttacagacacagaatcacttgaatgaagagaaggaaaggtgcccttgaggaaagtctctgatatactactgataaatgtacatactattcatctttttcccacttttccccaaatttacctatttttgccagggactgcatttaggcaaagaaaataa

SEQ ID NO: 239402 - DNA, 335 bp, Homo sapiens
gagagaaagttctgcaacaggtccatgctgctatgccagctgctctgccacttgggccacgtgaccccacagatatgatggggcttaaagtatcagtcataggtagggatgctgtttggtgcctttggctggcacctrtgggtgaaatgcagcacagacttttaggatttggaagtgaggccctgacatcatctgcagatttaaaaatactttcaagagacagctcttggcttgctacgaagccttaactgactagtttcaggagacccaaatcatcatctgaccctccaatcagagtaggggcttatagaggtcaggtaatcaatggattttaa

SEQ ID NO: 239403 - DNA, 652 bp, Homo sapiens
gccacccctaacacccctgtttgcttcttgacctataactaaagtcccagatgggccmctagaggtgaggttgggagtgtgacccgtgaggagatgtgcctacactagaaaaaagctgcttgagttttcttatttatataaacggaaatctggagaacaggcatgggaatggttattaagggtatgagatgatggtggaaggaacacagagttggatcaggctaaatttattgatttgggcccactaactagggagtctgtatttaatgctgcagctcgggagttaaaaaaaggttctaatagtttatttgcttggttagctgaaatatggattagaaaatgttccactgtgagcgagctggaaatgcctgatctcccttggtttaatatagaagaagggatccaaagacttagggagattgagatggtggagtgaattagtcactttagacctattcatcccagctgggagggtgcagaagatatacccttgacctatgccttgtgaaatagatttgtgagggcagcacctgaatctttgaacagccctgtatttgctcttctctgtatgtcagatctaacagtggaaactgcactcactcagctacaaaatttaaatgcaatgggaataattggatctcgaagtggcagg

SEQ ID NO: 239404 - DNA, 652 bp, Homo sapiens
gccacccctaacacccctgtttgcttcttgacctataactaaagtcccagatgggcccctagaggtgaggttgggagtgtgacccgtgaggagatgtgcctacactagaaaaaagctgcttgagttttcttatttatataaayggaaatctggagaacaggcatgggaatggttattaagggtatgagatgatggtggaaggaacacagagttggatcaggctaaatttattgatttgggcccactaactagggagtctgtatttaatgctgcagctcgggagttaaaaaaaggttctaatagtttatttgcttggttagctgaaatatggattagaaaatgttccactgtgagcgagctggaaatgcctgatctcccttggtttaatatagaagaagggatccaaagacttagggagattgagatggtggagtgaattagtcactttagacctattcatcccagctgggagggtgcagaagatatacccttgacctatgccttgtgaaatagatttgtgagggcagcacctgaatctttgaacagccctgtatttgctcttctctgtatgtcagatctaacagtggaaactgcactcactcagctacaaaatttaaatgcaatgggaataattggatctcgaagtggcagg

SEQ ID NO: 239405 - DNA, 652 bp, Homo sapiens
gccacccctaacacccctgtttgcttcttgacctataactaaagtcccagatgggcccctagaggtgaggttgggagtgtgacccgtgaggagatgtgcctacactagaaaaaagctgcttgagttttcttatttatataaacggaaatctggagaacaggcatgggaatggttattaagggtatgagatgatggtggaaggaacacagagttggatcaggctaaatttattgatttgggcccactaactagggagtctgtatttaatgctgcagctcgggagttaaaaaaaggttctaatagtttrtttgcttggttagctgaaatatggattagaaaatgttccactgtgagcgagctggaaatgcctgatctcccttggtttaatatagaagaagggatccaaagacttagggagattgagatggtggagtgaattagtcactttagacctattcatcccagctgggagggtgcagaagatatacccttgacctatgccttgtgaaatagatttgtgagggcagcacctgaatctttgaacagccctgtatttgctcttctctgtatgtcagatctaacagtggaaactgcactcactcagctacaaaatttaaatgcaatgggaataattggatctcgaagtggcagg

SEQ ID NO: 239406 - DNA, 652 bp, Homo sapiens
gccacccctaacacccctgtttgcttcttgacctataactaaagtcccagatgggcccctagaggtgaggttgggagtgtgacccgtgaggagatgtgcctacactagaaaaaagctgcttgagttttcttatttatataaacggaaatctggagaacaggcatgggaatggttattaagggtatgagatgatggtggaaggaacacagagttggatcaggctaaatttattgatttgggcccactaactagggagtctgtatttaatgctgcagctcgggagttaaaaaaaggttctaatagtttatttgcttggttagctgaaatatggattagaaaatgttccactgtgagcgagctggaaatgcctgatctcccttggtttaatatagaagaagggatccaaagacttagggagattgagatggtggagtgaattagtcactttagacctattcatcccagctgggagggtgcagaagatatacccttgacctatgccttgtgaaatagatttgtgaggrcagcacctgaatctttgaacagccctgtatttgctcttctctgtatgtcagatctaacagtggaaactgcactcactcagctacaaaatttaaatgcaatgggaataattggatctcgaagtggcagg

SEQ ID NO: 239407 - DNA, 536 bp, Homo sapiens
ttctgggtctagcttttcttggggtatggcagagagaagaaaagggaaactaaagaatcttcaggttttacagacctggccgtgtattggtggtggggaggcaactctggtgccatgcaggcttcatctagagaccccagtcctactccggcacaaactcttcttttctgctgctagtggtgtcatcaccttagatgtttccctgctgctgatgtggatggcttccttagggtgatctttagaacattcttagtgagacacagacacatctccctataacccacctatgccttaggctcattcaygggcctttatcttactttgtctacttatctcctgggtggggaccttgtctcctgccctctcccctaaactcatgtttcttcacataaaaacacagaaataggaactcttttacactgctggtgggagtgtaaattagttcaaccattgtggaagacaatgtggcaattcctcaagaattgcccgaaataatatttgaaccagaaataatatttgacccagcaataccatta

SEQ ID NO: 239408 - DNA, 508 bp, Homo sapiens
acagggtgtcattttaggtggagcagccagggtagacctcaatgagaaacttacatataagcaaaagacctgaaattaaccatacagatagctgaggaaataattttaggaatagattacaaccagggatgggccctaagtcaggagccagcccatctgatgtacttaaggaatggtgaggggggaagtgcagacagagctcagtgacccaaaggaagagtagaggagatgggctcagataattgggagcctatcaagtagggacttttaggatattcttaggcatttgtttttactctgggagaagtggaggatttagaacagaagattgatatgatttgacttacattttawaatgttctctctgactactgcattgagcacattgttggggtgtgagggatatggcaaggacagaagcaggaagaccatattccaggtcacagatgtgggaatgtggccacttggatcagtgaagtcgcagagtgggtagtgagaagttgaattc

SEQ ID NO: 239409 - DNA, 488 bp, Homo sapiens
cattttcaaacataaagaatataaaagacaagcagagaaaaccagaaatcctagttcaagaactaagatgctcctgtgctgtaaactataaaattaatgtttcagaaagctcatttataccctctttccataaaaaaattaagctacttttcagcttctatataaaatagtggatgttcagttttagaattacacctggtattaggagataaatggaaagaaatataaatctggctttggctcagggtttattcccaacrtcttttacatcttcatcttgtgtcttttttatcttcagcttatgggaggagagtaaaaaattctcagaaaaaaataaaaaggtttgttaatttctccaaaacatattggactatagtagctttaacagcatggataatcttgcaaatattcctaacatcattctttgcatgacctaatcaaagaactgctgacattttgagacaaataatactgagactagcttccaa

SEQ ID NO: 239410 - DNA, 610 bp, Homo sapiens
aatcctggcatgtcattgttattctttctcctttgtcatctttaatgagaagtccttttatatcacgatgttatgttttagaatattgaaaacatatcagacaatagataaaatatcatctggctctacagtgaatcttttagaatttttatttttaatgtgctwagattctgcatctgttaattcccagttgattactcagaattgtttctcctgccaaataccaactaccaagtctttatttttatttctaagtcctgacggttcctctcctaataaactaagaatatgaaaacctacagaaggaattacaattgccctaccttacaggattgtgtcaaagttaatgaaataatcaactattaagttcattaatagttcatgactttcataagacaggtatgacaataaatgcaaagttttactcatcacaccaaagtgtcatcatttatgctttgtcaaaaattaaaaatatggcataaaaactttcctgaaatcagctgattgttcctaaaagaatgactgttgctttcatttcttgtactgaagtatatccatttactatgacctttaataatggagactttttattgggtcacataatatacta

SEQ ID NO: 239411 - DNA, 555 bp, Homo sapiens
atacccccatccaccctcacctcacatacattgtgatataataatgttttatgtggtacaacaaaaaaataaaatattgtcctaccaaaaaacagagttgtgtttaataaaaaatgttatttgcattgcttcagattctaaattcggagataaattaattaaaactaaataaaataacaaactcgatgtctcagtcataggaaccacatttctagtgctcagtagcctcaggtggtgagcagcctcccaactgaacagtgcaggtgtaggctgtgcattccccaagattacgggttaaacataacatttttgttgtccaccatacccagcrcataaacaattatggattgaatttggtatcctattgccatacatgattaaagtgagaacaaacatgtgtttgcaaatgcttcaagttcctaaagaagacttcgcaaaagaattgagactttaactggtattaaatatttaaaggcaaaaagcaacagagaaagtgcactttaagcagctaagtaacaaaccaaaacagagcacagatgggagaagagtgaggaa

SEQ ID NO: 239412 - DNA, 576 bp, Homo sapiens
ttccttgctctacagtaaaatgaggcccccagaggcaatctggttggttacagttgttcttgctctgaagactttcttgacacacctgaagggaccctgggggtgggggagtggggagtcaggggcagagggatgggggatgattctcttctggggctgcatgsctttaggacctttcttccttttggcatacttggaagagctgatgattgcttttgattataagcactcaagactctctttttagattttggcatttcctagcaataagtcccttaaaaattcaatttgatgatgaactttaattcattccacaaatatttactgagtgcgtatgattgtctaggctttattctagatacttgggatatatcagggaacaaaacaaatgtaaatactaaacccaaggagattgtgttctggagggagcaggctgagattcaacaaacaacacaataataagtaaattatatgctgtagaaggtaattagtgccggtaataaagaagaagtaaagcatgacctaccatagaaaggaaggttggaattggaggacagcaagatggtggaaggggaa

SEQ ID NO: 239413 - DNA, 613 bp, Homo sapiens
atcccaacacactcaaagtaccaccttcaaagataacaatatcctcatcataataagagcttcccttgaaaaatagagaagaggaagagccgcagagtgctgattggtctgtgatactcatccccgtgggaaggaagggtaatgattccttgctctacagtaaaatgaggcccccagaggcaatctggttggttacagttgttcttgctctgaagactttcttgacacacctgaagggaccctgggggtgggggagtggggagtcaggggcagagggatgggggatgattctcttctggggctgcatgcctttaggacctttcttccttttggcatacttggaagagctgatgattgcttttgattataagcactcaagactctctttttagattttggcatttcctagcaataagtcccttaaaaattcaatttgatgatgaactttaattcattccacaaatatttactgagtgcrtatgattgtctaggctttattctagatacttgggatatatcagggaacaaaacaaatgtaaatactaaacccaaggagattgtgttctggagggagcaggctgagattcaacaaacaacacaataataagtaaat

SEQ ID NO: 239414 - DNA, 631 bp, Homo sapiens
agtgttaagagggaaattgatagcactaaatgcccacatcaaaaagctagaaagatctcaaagtgataccctaacatcacaactaaaagaactagagagccatgagcaaacaaaccccaaagatagcagaggccaagaaataatcaaaagcagagatgaactgaaggagataaggacatgaaaacccgttcaaaaaatcagygaatccaggagctggtttttttgaaaaaataaaataaaatagaccattaactagactaataaagaagaaaagagagaaaaatcaagtagacacaacaaaaaataataaagggaatatcaccactgatcccaagaaaatacaaacaaccatcagagaacactataaacatctctatgtaaataaactaaaaaatcaagaagaaatggataaattcctggacacatacaccctcccaggactgaaccaggaagaagttgaatctctgaataggccaataataaggtctgaaattgaagcagtaatgtataaccttccaaccaaaaaaaacaaaaaaagcccaggatcagatggatttacagctgaattctaccagaggtacaaagaggagctggtaccatttcttttgaaactattccaaacaattgaaaa

SEQ ID NO: 239415 - DNA, 631 bp, Homo sapiens
agtgttaagagggaaattgatagcactaaatgcccacatcaaaaagctagaaagatctcaaagtgataccctaacatcacaactaaaagaactagagagccatgagcaaacaaaccccaaagatagcagaggccaagaaataatcaaaagcagagatgaactgaaggagataaggacatgaaaacccgttcaaaaaatcagcgaatccaggagctggtttttttgaaaaaataaaataaaatagaccattaactagactaataaagaagaaaagagagaaaaatcaagtagacacaacaaaaaataataaagggaatatcaccactgaycccaagaaaatacaaacaaccatcagagaacactataaacatctctatgtaaataaactaaaaaatcaagaagaaatggataaattcctggacacatacaccctcccaggactgaaccaggaagaagttgaatctctgaataggccaataataaggtctgaaattgaagcagtaatgtataaccttccaaccaaaaaaaacaaaaaaagcccaggatcagatggatttacagctgaattctaccagaggtacaaagaggagctggtaccatttcttttgaaactattccaaacaattgaaaa

SEQ ID NO: 239416 - DNA, 649 bp, Homo sapiens
cctctggggcagggcatagctgaacaaaaggcagcagaaacttctgcagacttaaatgtccctgwctgacagctctgaagagagcagtggttctcccagcatggcatttgaactcagagaatggacagactgcctccttaagtgggtctgtgacccctgtgtagcctaactgggagacacctcccagtagtggccaactgccacttcacacaggtgggtgcccctctgggacaaagcttccagaggaaggatcaggcagcaatatttgctgttctgcaatatttgctgttctgcagcctctgctgatgatacccaggcaaacagggtctacagtggacctccagcaaattccaacggacctgcagctgaggtacctgactcttagaaggaaaactaacaaacagaaaggaatagcatcaacatcaacaaaaaggacatccacaccaaaagcccacaggtcaccagcatcaaagaccaaaggtagataaaaccacaaagatggggagaaaccagaggagaaagctgaaaattctaaaaaccagagcacctcttctcctccaaaggatcacagctccttgccagcaacagaacaaagctggacagagaatgaccttgatgagctgacagaagtaggcttcagaaggtcggt

SEQ ID NO: 239417 - DNA, 649 bp, Homo sapiens
cctctggggcagggcatagctgaacaaaaggcagcagaaacttctgcagacttaaatgtccctgactgacagctctgaagagagcagtggttctcccagcatggcrtttgaactcagagaatggacagactgcctccttaagtgggtctgtgacccctgtgtagcctaactgggagacacctcccagtagtggccaactgccacttcacacaggtgggtgcccctctgggacaaagcttccagaggaaggatcaggcagcaatatttgctgttctgcaatatttgctgttctgcagcctctgctgatgatacccaggcaaacagggtctacagtggacctccagcaaattccaacggacctgcagctgaggtacctgactcttagaaggaaaactaacaaacagaaaggaatagcatcaacatcaacaaaaaggacatccacaccaaaagcccacaggtcaccagcatcaaagaccaaaggtagataaaaccacaaagatggggagaaaccagaggagaaagctgaaaattctaaaaaccagagcacctcttctcctccaaaggatcacagctccttgccagcaacagaacaaagctggacagagaatgaccttgatgagctgacagaagtaggcttcagaaggtcggt

SEQ ID NO: 239418 - DNA, 649 bp, Homo sapiens
cctctggggcagggcatagctgaacaaaaggcagcagaaacttctgcagacttaaatgtccctgactgacagctctgaagagagcagtggttctcccagcatggcatttgaactcagagaatggacagactgcctccttaagtgggtctgtgacccctgtgtagcctaactgggagacacctcccagtagtggccaactgccacttcacacaggtgggtgcccctctgggacaaagcttccagaggaaggatcaggcagcaatatttgctgttctgcaatatttgctgttctgcagcctctgctgatgatacccaggcaaacagggtctacagtggacctccagcaaattccaacggacctgcagctgaggtacctgactcttagaaggaaaactaacaaacagaaaggaatagcatcaacatcaacaaaaaggacatccacaccaaaagcccacaggtcaccagcatcaaagaccaaaggtagataaaaccacaaagatggggagaaaccagaggagaaagctgaaaattctaaaaaccagagcacctcttctcctccaaaggatcacagctcctygccagcaacagaacaaagctggacagagaatgaccttgatgagctgacagaagtaggcttcagaaggtcggt

SEQ ID NO: 239419 - DNA, 462 bp, Homo sapiens
attaggaagagaagagcagaaatcctctggggcatttaaccatctggcagaattgttgctgcacccttatcccagttataagacagtcaaaatgactatttcctaaatattgtgagtgtatgaaatgtgaaattaaagcaaaaactggagacttttaatgtatttctttaatttgaaatgttttgtggattgtgaaataaaaataaatttatgtcaagttttattcaaaattcatttatgaaataatgccaacactgttctaaaaagcaaggagtcaagaaattataaaattcagattaaatcaggaaaacacattagatggaaaattatactatagaatttgagcttattaaaatttattgcataagaaaagtctcctttttactttgktatttaaacctaacctagactatttgtaaatgaatggactgagacacaaatcctttttcatataaaaatgta

SEQ ID NO: 239420 - DNA, 562 bp, Homo sapiens
tattttgtatttttgaataaaaagacatttgtatattcctgatactgrgtacaagagccacgtacaatgtactgctttcaacttaaatcgctgaggtatttttactactattttcttaaaatcaggattttggtgcttgccaccaccagatgagaagttaagcagcctttctgtggagagtgagaataatcgtgtacaaagtagacaaatatccaattatgtgacaacttttgtgtaataaaagtttgtttaaagttaaaaatactaccttttattattataaagctggatgttgttagatgattttgcctaattttaggctaatgtaagtattgtgtgcatatttaaggtaggctaagctaagctatgaagtttggttaaaagttaggggtattaaatgcatttttgacttatggtattttcaatgtacgatggatttatctaaatccaacctcatcataagtctaagagcatctgaaatataacatttccattatagaaaccatatatgtgtgtgtgtgtgtgtgtgtgtgtgtatgcatatatatgtcaccatatttat

SEQ ID NO: 239421 - DNA, 562 bp, Homo sapiens
tattttgtatttttgaataaaaagacatttgtatattcctgatactgagtacaagagccacgtacaatgtactgctttcaacttaaatcgctgaggtatttttactactattttcttaaaatcaggattttggtgcttgccaccaccagatgagaagttaagcwgcctttctgtggagagtgagaataatcgtgtacaaagtagacaaatatccaattatgtgacaacttttgtgtaataaaagtttgtttaaagttaaaaatactaccttttattattataaagctggatgttgttagatgattttgcctaattttaggctaatgtaagtattgtgtgcatatttaaggtaggctaagctaagctatgaagtttggttaaaagttaggggtattaaatgcatttttgacttatggtattttcaatgtacgatggatttatctaaatccaacctcatcataagtctaagagcatctgaaatataacatttccattatagaaaccatatatgtgtgtgtgtgtgtgtgtgtgtgtgtatgcatatatatgtcaccatatttat

SEQ ID NO: 239422 - DNA, 562 bp, Homo sapiens
tattttgtatttttgaataaaaagacatttgtatattcctgatactgagtacaagagccacgtacaatgtactgctttcaacttaaatcgctgaggtatttttactactattttcttaaaatcaggattttggtgcttgccaccaccagatgagaagttaagcagcctttctgtggagagtgagaataatcgtgtacaaagtagacaaatatccaattatgtgacaacttttgtgtaataaaagtttgtttaaagttaaaaatactaccttttattattataaagctggatgttgttagatgattttgcctaattttaggctaatgtaagtattgtgtgcatatttaaggtaggctaagctaagctatgaagtttggttaaaagttaggggtattaaatgcatttttgacttatggtattttcaatgtaygatggatttatctaaatccaacctcatcataagtctaagagcatctgaaatataacatttccattatagaaaccatatatgtgtgtgtgtgtgtgtgtgtgtgtgtatgcatatatatgtcaccatatttat

SEQ ID NO: 239423 - DNA, 396 bp, Homo sapiens
gaaaacaagtgaagaagatctttcaaggaagagggtatcattaacagagycaaatcctgctgcagagtagattacaattcatttatttaattcttctgcaagaatttataaggaacttactatctacccagcaccattttaagttctgatgatatagtagtgaataatacagatcaaaattcctgccctcatggagcttgcattctttgatttgaaacagataataaaatagtcaagtaaaatatagtcaagtaaaatatatattgttttagaaagtgataaatgcaaaggagacaaattatgtacttacagttccatatggctggggaggcctcacaatcatgacagaaggcaaggaggagcaagtcatatcttacgaggatggcagcaggcaaa

SEQ ID NO: 239424 - DNA, 604 bp, Homo sapiens
gtaatgaatatgtgattgcatgtgtctttttgatagaatgaattattttcctttgggtatatacccagtagtggcactgctgggttgaatggtagttctgctttaagttctttgagaaatctccaaactgcttatacagtggctgaactagtttgcattcctatcaaaagcatttcttttctatgcagctttgtcagcatctgtttgtttgttttttttttgactttttagtaatagccattctgactggtgtgagatagcatctctttgtggttctcatttacatttctctgataattagttatgttgagcattttttcatatgtttattggttgcttgtaggtcttcttttgagaagtatctgttcatgtcctttgcctwtttttaaattggattattgttttgcttgttgatttgtttaagtttcttgtagattctagattctggatattagatctttgtcaaatgtatagtttgcaaatatttcctcccattctgtaggctgtctgttcattctgttggtaattttttttttttttttttttgctatgcagaactctttagtctaattaggtgccacttgtcaatttttgtttttgttgc

SEQ ID NO: 239425 - DNA, 581 bp, Homo sapiens
gcccacaccaccagcaccttgggttccaagcacagagctatgcagaccctatttggccgatccactggagattgcctaagactactgagttcctgggaggatgggacagccgccatcactgtggctacctgctgcctaagaccactgagtttttcaggggaggagtggcagccatcactgcagctccagtttgccgttttcccctgctggtgcggggagactgagcagtttggacccaggaagcattccccacagcacagcacagcacagcgactgtggcagatcacggccaggctgcctgtttaggccgaagttggacccatctctcctcattgagtgggrcctccctgtgggaatttcagcaactccagcctaggggtttacagacagaactctgatatgcctgggatggaatccctggggtgaggggtgcccgtggtctctgtggatcagtgaacttagtcttttcccctgctggctctgaggaatctgggcaatcctgataagcaagatgccccccagtgcagtgcacctcctctaccaaggggcagccagactgctttgttaagagggtccctgat

SEQ ID NO: 239426 - DNA, 396 bp, Homo sapiens
gcaaactaatgcaagaacagaaaaccaaacgctgcatgttgtcacttataagtgggagctgaacaataagaacacatagacactgggaggggaaaaacacacacttgggcctgttgtggcagagktgtgtgtggggagggagaacatcaggaaaaataggtgatgggttgacaggtgcagcaaaccaccatggcacatgtttacctatgtaataaacatgtacatcctgcacatgtatcctggaacttaaaataaaatagaaaaaagagttggaacaactattcaaactaggcaaggagaacaggagaccctgccatgccctgagtgaccacacttgccagcatgaacatgcatagagggcacacacaggcctgcacttgccagcaccccacccct

SEQ ID NO: 239427 - DNA, 549 bp, Homo sapiens
ttttattactgtttaaattttggaacttgtaattttgaccactctcttgatctctttcatgagcttgtcttcctctgtccgtcccttaactgccacttgtccacttttagtcctctggaattcttgccacctatttattttcttgagcaatattatcttccctgaggttttaaattaccatttatatgctcacaaactcccaaatatctattctgagcctagttctttctcctgatattcagatgcataggtcccattatctgctgaacatctccatctaggtgtcccaggtatacctcaaactcaacgtgttcaaaaggtcrtcatcttctttattacactgggtctctgttcatgttctctatcacagcagatggcaccatctagatactttagttataagttactcttgacttctctctctcctttgctctccacagccaactaatcatcaagttctgctggctatacctctcaaatagttctgacttttgtctctccctctttatgtttattactgataatgggtcgagtgatagttcttaaaag

SEQ ID NO: 239428 - DNA, 608 bp, Homo sapiens
tttactaatcaatatttaccaaatattttctgaattcagaattattttaagtttggaattaattgattccttgaagctagtgctccttgagtctagagcttcctggtccatgctggactcaaagaaggagaaatacattcctggaagtacatttaagggcccttcaccatccctcatggctatgtggatggtgcctggtgttactgatggagcatgtgctctggattgaggaagatctgactccaaatcttagtttagttgcttatgagctttggtgagacctgagacaacttttcctacatggcagagcttcagttttcttattcatttaagctaagaggagtttgcctccttacagtgttgtcataaggactaaaatacataacgtctactaaatgccaaaaaataaatatttttccctccccaatccttcataaaagaggcagtagaatgttatctctataagcatgaagatttacacacaaggggctgacagatttcttaaagcatgtgcccggaacacaaacacgcaaagcttccacatacacagtgctgcycccctagtggactgtctgtggaagtacttcacaattatgcaacggtttaaa

SEQ ID NO: 239429 - DNA, 573 bp, Homo sapiens
ggaatccttgcatttggagttgtccagaagtggcattcctgacctttgatccccagccttccaacagtggtgtacatcttcatttctctatgttaaagattttcttattaaaaaattgagtgtggtagaggactgacttggtaaaggatggggggacattatgtattttggttcatttagcagatatttttgagctcctactaactgctagacatggtgctagatcttgcataaacatgacgaacaaagtagcaaggtacttactagcctcatggggctagtgtggaagtgagttaagcaaataaactcatatgggatatatctttgtaaagagtgrccaatgctttgaaggcaaagaagagggtgcagtaggagagcatagtgtgggagatgggcttgacattagtggtcaagtaaggcctctccaagaagtaacactcttaggctgggaccggctggatgaggagacagctgagcaggggatgtgctggggagactgaggcagatggagtgaagggttcaacctgagaaaaaactggcacatttgaggaaccaaaataaggtcactgcagc

SEQ ID NO: 239430 - DNA, 614 bp, Homo sapiens
gctgggaccggctggatgaggagacagctgagcaggggatgtgctggggagactgaggcagatggagtgaagggttyaacctgagaaaaaactggcacatttgaggaaccaaaataaggtcactgcagctggaatgttggagtgagtggacttttttcttttttcttttcttttctttttttttttttttagtggcttgcaataaatcaaggtagtcaggtggttggggaggggagttggggagaagaggcaagtcataggtagctcgaagctagattaagaagcacagatttatatattaaaaatccgactctttctcgaacataattttccccctcatgtaaattttgtttgtgttactatctgtcatttgatcaaggaaaataaatactttctgtaggtaagtattcaaagattatctgaagtcaaaatgctttctctgattaatcttgttctgttatctgattgtagcagaacattttgtgttgcacagttatttgcatgctagtcacctttggactgggttatttaatattcacagaaacgaatgcaggacagtttgtgtgcttgaagaaagtaagtgggaaaaaatgttacaattttataattaactc

SEQ ID NO: 239431 - DNA, 614 bp, Homo sapiens
gctgggaccggctggatgaggagacagctgagcaggggatgtgctggggagactgaggcagatggagtgaagggttcaacctgagaaaaaactggcacatttgaggaaccaaaataaggtcactgcagctggaatgttggagtgagtggacttttttcttttttcttttcttttctttttttttttttttagtggcttgcaataaatcaaggtagtcaggtggttggggaggggagttggggagaagaggcaagtcataggtagctcgaagctagattaagaagcacagatttatatattaaaaatccgactctttctcgaacataattttccccctcatgtaaattttgtttgtgttactatctgtcatttgatcaaggaaaataaatactttctgtaggtaagtattcaaagattatctgaagtcaaaatgctttctctgattaatcttgttctgttatctgattgtagcagaacattttgtgttgcacagttatttgcatgctagtcacctttggactgggttatttaatattcacagaaacgaatgcaggacagtttgtgtgcttgaaraaagtaagtgggaaaaaatgttacaattttataattaactc

SEQ ID NO: 239432 - DNA, 552 bp, Homo sapiens
tcattgttttaaatgttgacttgaagttgtgtcccttgttttgagtgtgcctggtttttaacatgtatttggtattcattttgttaggtttgactgggcaatggcctgtattctggctttattcttccatttgaccctggaagtctctgggactacttttgaggctgcccttgatgttaattttaaacggacgctctcaggktaacaatgttggagagaagagattacttttacccttggctctgtgtttctatagtatggccctgacagtggatgcaagactcagctagaagatgttggggtggagacggatttcacataccataaacttgacagtgtaaaaatgaaacctctccttccctctctaactaaaaatgtctagcctgaacccctattctgtctgaggcagaaatcttaatccaacaacttagcaatagtgtcaagcacttttgacattttttctcacatatttcaggtttaaacttagttaactttaagatttttaacactgctttcttcaattttcttgcttctggggttgatgccaagctt

SEQ ID NO: 239433 - DNA, 552 bp, Homo sapiens
tcattgttttaaatgttgacttgaagttgtgtcccttgttttgagtgtgcctggtttttaacatgtatttggtattcattttgttaggtttgactgggcaatggcctgtattctggctttattcttccatttgaccctggaagtctctgggactacttttgaggctgcccttgatgttaattttaaacggacgctctcaggttaacaatgttggagagaagagattacttttacccttggctctgtgtttctayagtatggccctgacagtggatgcaagactcagctagaagatgttggggtggagacggatttcacataccataaacttgacagtgtaaaaatgaaacctctccttccctctctaactaaaaatgtctagcctgaacccctattctgtctgaggcagaaatcttaatccaacaacttagcaatagtgtcaagcacttttgacattttttctcacatatttcaggtttaaacttagttaactttaagatttttaacactgctttcttcaattttcttgcttctggggttgatgccaagctt

SEQ ID NO: 239434 - DNA, 586 bp, Homo sapiens
aataactgtaaaatatgataaatgcttgttagggaagcagagattgctatgggagccgtcaagggaacatttatagtctttatagagctttcacatacaaatacctcatttgagcctcattaagccatgttcagtgagtagtgcagggattattcttctcatttacagataaggaattagrctcagaaaggttagcaagatgcaaagtccccatagacccagaattgagcttttgactccaaacccaatgcactcaccaatactccagacagcagctggagtgccagggagtgtgaggtctgtggctccgctgcatctgcttcctgtctttatgatgttctagtcccaagcctgtataataaccccattggcatcaattaattaattcttggcatccaatgaagctgcctggaagccatgagggtgttctgcctagcatggctccaagccgtgggcagcttatccagtgttcatgctgggaacagcctcttcaattaggagaggggccaagggatcttttaggctgatacagaaccgacagaagctcagctcagccataaagtcttattagaaggagcccccatgc

SEQ ID NO: 239435 - DNA, 569 bp, Homo sapiens
taaggcatcagtatttattcattcagttcgttcagtgaatattgttgttgcctcctaccatgtgccaagtgctatgcatggtgtctctcctcaagaagctcaaaacagtgaggagatgaatgtatgaataagcaattttgggacaatgtgatatggattactttggtgttattcagaagtgctttgagagcatagacagctgagatgggatggagtggagtcttgctgtrttgcccaggctcatctgagatgaaatggagtctcactctgtcccccaggctggagtgcaggggcacgatctcagctcactgcaacctccgcctcccgggttcaagagattctcctgcctcagcctcccaagtatctgggattacagatgcacaccaccacacctggctattccttgataggtttttaagctctatgaggacagagtccttgtcttgattatcatggaatcccctttatttagcattttatgaggctgaaatcaaggtgtcagcctggctgaatttttccctgaaggaaagttttttttctgaaggaaaagtccagttccaagctcattt

SEQ ID NO: 239436 - DNA, 436 bp, Homo sapiens
ccacgtcgttatcattgagcaaaagatcttatttttatgtagccaaaccatctattattttcctttatggcttctgttctggagttattatataagcagtactctctgcacctccagccaaagtcacaaaaaaattttayattttctttcaatggcttttcaaaatgagcaaagacaggcactagttatagtagcaagaacagattttagtcagtgatactgttgcaatagggaagaggatccagtgtgaactgaactcaactttgccaaaacagaagcctgaagacttttgaaaggctagggtgtactaagggaaaggcactatggggtgtgcaggagagttagctcatgggagtaggacatctggacttgttagcttgtgtttctcaggaggaaaaacacacttctccaatacttatgataccatgcagtggtg

SEQ ID NO: 239437 - DNA, 359 bp, Homo sapiens
taaacaatggccctgcaaatgacacagccagtcctcatctcaaagtgatgttwagtataacatgcctacatcaactttctcccctaaaacttctcctttttcaatgtctcccctgcaccaggtcaataaaggacagcttttcattcagattcccttgctagcacacaggactaatcccccttggtccctgcctattcctcatataacagactatcaatcttcaggaattctgaatttttcctaagcaactctatgcatctgcttctttgttaccacctacatcaaatgagcttcttctatagtctaaactgcagtaactgcatacctcacctcctcacctgtacttctagtgccctgtt

SEQ ID NO: 239438 - DNA, 407 bp, Homo sapiens
gtaacattctgtattaaccactgcatattcaagaaaaatgccctgctcattttcatggctaactctccatgggctgttctctatcctggagtgtctttcttatctttatctatctggcaagctcctactgtcttttaaattttttctcttgcaccacatttctctctgcctctctcagccatcacccacctgaggaaacaaattgctccttcaatgatgttctataatattatactaatatctcgattatagtatttattatattgcatattgtcaattttaagatgtgctttttaaaattttacattttaacatctctgaaatcaagaggtctcttataatggcaaaagtgttattatttggyataatttttcagtgtcaaataaaataatgatgcatcttacaat

SEQ ID NO: 239439 - DNA, 589 bp, Homo sapiens
gagatttcaatataaatagatggtaggtaatattagtaacttgtttctttggtttgtcatgtgcaataatggcattgtggctaattttttctaaacatctttatatgttacagacatattaagcatttatgtgaaatgtctgagatttgtgaaatatactataggaaaaaaagtgaaagtatagctgtccttgaatcagaaaggggataataattattgaagctgggtgatgaatatctgggagtttatattattctctttacctttgcatatatttcaaattttccataacaaaacattttttaactattttaagcatacayaggagaaacgcattaaatgtaacttttcttcccctttcataaatttatatatattttggaaacagtaaatagcctttcatttctattaaagagaaaaatttccccccccaaaaaataaatttttgttcaacatgtattactgtcacccactgagtaaccagcatgccattcaaagtttttcaaatgctttagcaaaattttctcaaaacacacttatatgggaaaatgcagcctgaaaataagaaaggttgtcacccacatattag

SEQ ID NO: 239440 - DNA, 589 bp, Homo sapiens
gagatttcaatataaatagatggtaggtaatattagtaacttgtttctttggtttgtcatgtgcaataatggcattgtggctaattttttctaaacatctttatatgttacagacatattaagcatttatgtgaaatgtctgagatttgtgaaatatactataggaaaaaaagtgaaagtatagctgtccttgaatcagaaaggggataataattattgaagctgggtgatgaatatctgggagtttatattattctctttacctttgcatatatttcaaattttccataacaaaacattttttaactattttaagcatacacaggagaaacgyattaaatgtaacttttcttcccctttcataaatttatatatattttggaaacagtaaatagcctttcatttctattaaagagaaaaatttccccccccaaaaaataaatttttgttcaacatgtattactgtcacccactgagtaaccagcatgccattcaaagtttttcaaatgctttagcaaaattttctcaaaacacacttatatgggaaaatgcagcctgaaaataagaaaggttgtcacccacatattag

SEQ ID NO: 239441 - DNA, 648 bp, Homo sapiens
agtctcctagtttcttctcttatgagagagaaacatgcccaggaagtaaagggagggaactctaactaagccctgtgagtgccccaccactcaggggaagaaaggattgtagtgagccacacagaaacaataacaaagacaaaccactttccaaactaggatctagcaaagaatatactgtattaggaaaggaatgaaaagtccctgtggctgatgcctggagtacatgacatttgaaactgmcagttcattttatagctttaaaagttatacgtatttagtatagaaaatttagagagatatacccggttacaaagaagaaagtaaaagtcacctataattttataccctagaaataaccacgagtaatgttttatggatattacttttagcccttttgtttacttatgtagagctcaaatatatggaactattttcaatgaaattaagattatactacagaaaacatttatatattgcagttagcaagtaattttaatggctgtataatattctattgttaaaaataatgtagaacagggagtagagaatgatgtgaacttgagcacatgattacttccccaatcaccaacccctcccccaattctaaaaacaataattttaataagataaaatgggaggactgca

SEQ ID NO: 239442 - DNA, 550 bp, Homo sapiens
tccaccctcaccaaccacacyatgattttatgattaacttacatggatgatcttaatgattctatttaaggtttactgctatagacaactttaaccaattggtccccacaaggcacagttactcactccacccgttgtagtctcacaggaatggatacagattgccattatgttattcataatgttgactgcaattattaaacatgtctttttctcatattttattgcattctctattaagtcatttatctatatttctccaacagctagcacagtgtttggcatggaataggcagtcaattgttggtagagggtaaaaatcttgcatgccaatatcatttgcagactacaaattccactgccaagttatctttccttgttcctttcttccttcagtcaacaggtatgtatttggtaatgaagaatatttctttcttctataattgaggtatatttaaccactttataccactcctacattccttttcccatatcactaatatttaatctattggtaacttttatgactttaaataatatgcagatagct

SEQ ID NO: 239443 - DNA, 550 bp, Homo sapiens
tccaccctcaccaaccacaccatgattttatgattaacttacatggatgatcttaatgattctatttaaggtttactgctatagacaactttaaccaattggtccccacaaggcacagttactcactccacccgttgtagtctcacaggaatggatacagaytgccattatgttattcataatgttgactgcaattattaaacatgtctttttctcatattttattgcattctctattaagtcatttatctatatttctccaacagctagcacagtgtttggcatggaataggcagtcaattgttggtagagggtaaaaatcttgcatgccaatatcatttgcagactacaaattccactgccaagttatctttccttgttcctttcttccttcagtcaacaggtatgtatttggtaatgaagaatatttctttcttctataattgaggtatatttaaccactttataccactcctacattccttttcccatatcactaatatttaatctattggtaacttttatgactttaaataatatgcagatagct

SEQ ID NO: 239444 - DNA, 560 bp, Homo sapiens
cagctagcacagtgtttggcatggaataggcagtcaattgttggtagagggtaaaaatcttgcatgccaatatcatttgcagactacaaattccactgccaagttatctttccttgttcctttcttccttcagtcaacaggtatgtatttggtaatgaagaatatttctttcttctataattgaggtatatttaaccactttataccactcctacattccttttcccatatcactaatatttaatctattggtaacttttatgactttaaataatatgcagatagctttacttgtttcatcagatcattttcctgacttaattcagagaacaataaggatgccaaaccctctttctttacctgtaactttccttttcttctttcaatcccaaattcagccatgcttgctttccytttaataagagtaatggcatttatgttctgtactgtaatgcataattatgtttctcagcatttcttgtataaaatgacaatgcttcactgttatgactgtgtgaaaattatgtactgaataaccactagtgtaatataattacatt

SEQ ID NO: 239445 - DNA, 428 bp, Homo sapiens
tcataccttgtgcatttaaacaagcactcatcctatggcctcattcttagcaaagcaaaaggtatgaattattatgtaataactcatgctttgtcacatattattacttaattatggaagaagaggagaatttcaactaatttcaggcttggaaaaaatttaacattttatccttggaaaaaaaaaaagctcaaatgcttatttgacacaatagaaccactttaagcctttcccatttggaccaggtccattcagaccactctagactaactttttatagcmcctttgtccttctatttcttcctgagaatcttagaaagtttctgacagagaaattgaaaatccaatatagtcctctagtctatatttcacagaattattcatttggatctccaaaacaaacagctgtattacctcaaagaagtttc

SEQ ID NO: 239446 - DNA, 453 bp, Homo sapiens
actaagtcttcttcaattcacatacaagattaaactcatgactcgacccacactccataggagaattttctctctcacagaggatgaaaagacatttgcagtgcagagcaaaatcatttcaatgaatttggggaggactattgccacagagtccaaaactgcttaatcccagtgtctctcattcccatctgagaggactctttgtctccaaattcctgtrttagaatattctaaatggtagtttatgtgaagtatccacaagtcagctagctagcttcaataccgaaggtaagctgaaggagtgacaagtgtttgcaactatctgggtactgcttgaacatataaagaaaacaactagcttgctttcaatccaaaataagcaaaatcatacctcatattcttttatctaagcttgtctagtttcttattttgcactatttagatgtgggtgtc

SEQ ID NO: 239447 - DNA, 364 bp, Homo sapiens
agaaacatttcaattaagtatataaactggtccactgattatgccctatctctggactcaaaaacttactatacttccccacaacatatagaayaaaatgcaaatatcttagcctaacacattggtccattacacacacaccccaaaatccgtactcttcatttagcaatcttagtctttggctctttcatacagtccctcttccaagttagcctgctactggtgcaatttatgcaagtacttacttcttaactcacatcatccctaagatgttaaaaaaatctgtccaatatgggtataatttggattatgttcttatgttttctctacagcttagtgtcttggacatagcaggtgcccaata

SEQ ID NO: 239448 - DNA, 503 bp, Homo sapiens
atgataacacatggacacagggaggggaacatcacgcactggggcctgttggggcatgtgggggctaggcgagggagagcattaggagaaatacctaatttagatgacgggttgatgggtgcagcaaaccaccatggcacgtgtatagctatgtaacaaacctgcacgttctgcacatgtatcycagaacttaaagtataataataaaaagttagaagtctttatttgtgacactgtattttcaaaataaaatgttaatctacctgcaaaaaaaaagaaaaaatatcgaatgtgatcattcttatggccaaaaggatacatgtgtggaatttatatttttaacagactgccatatttgaaaattccaatctttcatctgtatttgctctacctggtattgtgcgagtgagtagagacacatggatggacaaaacatggtttcttccgttagactcatagcctagtgggagaaaacagttaagaacacaaattacaataaaaca

SEQ ID NO: 239449 - DNA, 461 bp, Homo sapiens
gctacttccattattaaatcaaaatttaacctaagaacccgttcaacaacatatttactatcttttacaagatataattaaataatgcttttaaaaaaatagtttacaaaatttaaagttcttataactttcaagatttcactgattatttggtaccctaaaataatatttaaaataacaatctrttctataaattaagtttctgtatgatacctgataataacatggaaatatagacagagatagttttactggatgtaagtaaggctattattcattaattggataggttgtaaaactgtttcttagtgaaactaactagtttgggaggatagtatatcttaatggattttaaaggagactttagaatttaggaattacattgtccaaaactaattgtgtatctaatggatgagtaggatctctttctcagcaactcactctatggcacaaagaactca

SEQ ID NO: 239450 - DNA, 505 bp, Homo sapiens
catgtatatactaacggtgactaacaaaattgaacacacaatagaatatctagtttaggagtagatattcagttttacattatatataaagaggagttttagagctgaaattctgttttaaagygatactagaggacagtaatttttaaatagaaagaccagggggaaagtgcatccttcccagagaagtagatcaaaagtggagaggaatttttcagacttcactcaccctgcctttacctgcctacaatgctaacatatttctccttgggcacctcccaccacccatctcaaagtaccatcattgttactaatgggagtctgtgctgacctcaagcgtgatgatgtagaagaaaagttgaatccactgcactttggcacgcattgtacacttaaaggacccaaacactagacgcaaaatctaaatgaactactgggagatgtgaaggaacaattttttttttctctgaaatatgctttattcccccctaattttgaaagacca

SEQ ID NO: 239451 - DNA, 505 bp, Homo sapiens
catgtatatactaacggtgactaacaaaattgaacacacaatagaatatctagtttaggagtagatattcagttttacattatatataaagaggagttttagagctgaaattctgttttaaagtgatactagaggacagtaatttttaaatagaaagaccagggggaaagtgcatccttcccagagaagtagatcaaaagtggagaggaatttttcagacttcactcaccctgcctttacctgcctacaatgctaacatatttctccttgggcacctcccaccacccatctcaaagtaccatcattgttactaatgggagtctgtgctgacctcaagcgtgatgatgtagaagaaaagttgaatccactgcactttggcacgcattgtacacttaaaggacccaaacactagacgcaaaatctaaatgaactactgggagatgtgaaggaacaattttttttttctctgaaatatgctttattyccccctaattttgaaagacca

SEQ ID NO: 239452 - DNA, 640 bp, Homo sapiens
accagctttggcaacatagggagatcacatctctataacaaataaaaaattagctggatgtggtggtgcatgcctgtagtcccaactactctagaggctgaggtgggaggatcacttgagcccaggagattgaggctgcagtgagccttgattgcaccactaygctccagcctggacaacagagtaagaccccaacaaaaaagaagaaagcaagaaagcaaaataaaagaaaagaaaagaaagaaaggaccggcatggaactaagcaaaactaattcactgaaccacccacacaagcaaacagagagagagagagagagagagagacagagaagaagacattacacaccagtcgataatataagccagaaagcaaaaggaaaattcaaacagaccctaagttatttccaaaaagttaaataagcagcaatatgtagtggtttgacgctcatctagactgcatagattccattctagttttgcagtttattggctggatgacctggaagattgctttcatttctatgtttcaattttctcattggcaaaatgaggaagacaataataggttcttaagaagtaaatgatttgataaaagtaaagtgcttggcacagtagccagtaaatattatgtccaatgt

SEQ ID NO: 239453 - DNA, 610 bp, Homo sapiens
tgattagtatgcagaaagacctttccacggtgtcatttgtttatttagctgcctctgcactccgctctgattgtgtatacctaattaatgtatacaaagctaaaagaaataaatccatgggtccacaatcataggcatgtcgcctgtcaccatggggtgggagacactacaattgtattacctgtataccaaataaagcatgttgacatgcgaaacaacaatgaaaatataagaatttttctcatcaaagttcttcttggctatttataaactcagataggygagaatgaacctgtttaaaaaggaaagggatgtactttcttttctgtcttggtatttgaatttttattcaaagcagttgttgagtctttatgaaaagtacttgtgatttcttccagaggtcaaagtactttgtaaaacatcctgtgagacctgaatcatcccgttcttcaaggcctcactgttcagatgcttggaaattttagctgagaatgagtttaaagtgaaaagcaaagactctagagaccttcatgtcaataatgaatgatcaatagaagtcacacacttgaaaattgacattcagtcagcagttccctgttattcatgcaca

SEQ ID NO: 239454 - DNA, 635 bp, Homo sapiens
ttaattcatatacgccacggtggtaggcaggtgctaatggtaaaagctggaacaaaagagtcaaggtcctgtctttaagctacaaattaagatatcaattcctgccaggactcgggtcacagagagaaaaactatctagactgactaatgagcctcaatttacctttctgttgactctttattttggcaattgtctccactttgaatttcacaagattgttctttacttcatcgagtcagcttcatttcattcaacccctctaccctcgcctttataacatgaataaayagagccctgagaatttaaacactatcccccatggtggcagttttaacatacataagatctgaatgagaatttaggcttcctgatttccattaatttttttcccactgtatcacttggtttcatgttaacacactttaaggccaggcagaaagcataataattaatgtcagaaataaaacagtaaacaattttacaattttgttaatctgttaatttttcacttttctctaccttctatttggagttaatttacagacaaagcatatattttaagcaattcataactcctgtaatttgagggaggcaatgttttgtaggaggaaaacagtgacataagaaaaaaaga

SEQ ID NO: 239455 - DNA, 580 bp, Homo sapiens
agtatttaaataaaaactactcatcaattatcaaaaaccttcctatatttaaaaaatgaacagcaaatccccttttcctaaacataaataccaagagcaaatcctagatagtgtgggggatgaacagtgtctttccttctcatctgaggttcttggctgaggtccctataataaaagacagattaacaagataaaagcatatgaatgtatttaatrtaagttttataaggaaatgaagacctgaagaaacgtgtaaaccaatgtattttttatgctagacttaataaagaaattgatagtccatggagaagtatgactggacaaagggggtatgatctaatggtaaaaagctagggaaaacttagcaaatcgtgttcgttcagactttttcctatcttcagagataaggatgttcctttataggcataggtaggtgcctctcgaatgagggtcttatgatcagtttcagggaaaggccagaaaaaaaatctttcctaggttttataacctgcttcaaggaaaaaggggaaagggcagagtggccttcctgcttctgctgttttctgacatgccatggtgc

SEQ ID NO: 239456 - DNA, 481 bp, Homo sapiens
gcctcctggccacatttcctggaaaagttgatccttctgatagtgtagactatgtgatctgccaaatactatcctattgtatattcttttcaatattacaaataactttataccaacaggtaatctttccaagaaaacagtgctcatgtagtgatcacattgtgaaggaaaaatattgttttccataaaagacatcattaattggccattaatttattccaayatttggaacaccatgtgggaattatttttaaattagtttgaaaacacaggagcatggcttcaattccacttgcaatttacaagcacctcctctacacctaatttaaaaaacaaaatttcttgtagttacatttcagggtttgttcaattttaactgcccagtgtggaagctaaaggggtcctctaaaaatcaaaactggcagaagagatgaaaaacattttctggctaccagagatgatccctactgggggagagggc

SEQ ID NO: 239457 - DNA, 641 bp, Homo sapiens
atgattccttcaatagaagctgaaaaagcatttgataaagttcaacatctgtttatgataaaaaccttcattaaaccggatatagaaggaacatacatcacaataataaagaccgcatatgccaaacccacaactaatatcatactgaatggggaaaaattgaaggccttttttttctgagagctggaacaagatataatccccactttcaccacttttattcaacatagcactggaagtcctggacagaagaattagacaagagaaaaaaataaaggtcatcttaattggaaaggaaaaggtcaaattagccttgcttgcagataacatgatcttatacttagaaagaaaacacaaagactccaccaaaaactcttataactgatcaacaaatttgggaaaattgcaagatacaaaatcagtatataaaaatcagtagcacttacctataccaacagcagacaacctgaaaaatcaagaaaacaatgccatttacaagagctacaaagaatataaaatacctacaaatatatttaacccagaaagtaaaagatctttaccaggaaaayggtaaaacactaatgaaagaaattaaacaggacacacgaaaaatgaaaagaacatttcatgctcatgaattg

SEQ ID NO: 239458 - DNA, 435 bp, Homo sapiens
ctatattttcattttcattgcagatttattttgtatttacatttcaggttttgggttacacatttttggtttgggtgcaatagtgagcataaaatgttggaggtttattaaatatcatttttcttgtgttttcctacatagaaaaaaattaaaaatttgggttgtcagaaatggttatataccttgtgatacgccgggttagccccakgcaacaaaaaatatgaggtgatttttctttttcttttttatttttctgagacagagtcttgctctgtcgcccagactggagtgcagtgacgccatttcggcttactgcaaactccgcctcccgggttcacgccattctcctgcctcagcctcccgagtagctgggactacaggcgccagccgccacgcctggctaatttttgtattttttagtagagatggagtttc

SEQ ID NO: 239459 - DNA, 558 bp, Homo sapiens
actgggttacagccaactgcattgtgatatcatgattattatgttaggagactttaaaccctattgaaaccttttattttagcaggtgtgtatcctgtttaggtttagcttataggttttggactaattatgggggctttagttccaatggaagttattgttttgattgtactataatgctaatgctgatctggtctgcttcattcttctggcactgtcggagcttatgctgaaactctgctggtgtcatccgmtagagttaaaagtgctgctctggattctctaatattcctaggtaaacctctgggaaagcacagaagccaatgagcctgggtctctttatgacactgggtgaaagataggaagacacagggctttactgctgccaccattaccaccagataggtctgcccaccagggagagcatagcaaggatggcctggggccttactgttctgtttctgcaggtgaattgaactgcctgtggattgggattatagaataagatatcggaggctctcttccaaacctcagttgtttttctctctctcggtcctc

SEQ ID NO: 239460 - DNA, 576 bp, Homo sapiens
cgcgggcctccttcagcctcttggtggcgctggagaaggtctcccggcctgagccgaggtagtagaaggcgcagacggccagcgccgcggccagcagcagggcgcagtagtgggagcgcacagcgcccaggcgcgccatggcccgagcgcatgggagcccgcctcggaggaggcccatgcgctacgagaccgcggcgccagcggtgccagcaacgcgggagagccctcgggtacccggacgccggcggccacttagccccggcgccaggcggcggccatgaaaggggcggggccgcgccgcctggagccaatcgcgggcgccggtgcgcggaggggcggggccgggcgtgccgaaaccgctrggtcctaggttccaagggtattagaggaggggttagggtgggatccggcgcccggcgttgggagggggggattccggactccagcgtgctgagggctggcccgctgtcccggctgagaaatggcgccctacgtggagagccccagaggatatccaagctgagtgttgaagggaatggaggcgcccgaacagaggaacttaggttagccaaaagc

SEQ ID NO: 239461 - DNA, 576 bp, Homo sapiens
cgcgggcctccttcagcctcttggtggcgctggagaaggtctcccggcctgagccgaggtagtagaaggcgcagacggccagcgccgcggccagcagcagggcgcagtagtgggagcgcacagcgcccaggcgcgccatggcccgagcgcatgggagcccgcctcggaggaggcccatgcgctacgagaccgcggcgccagcggtgccagcaacgcgggagagccctcgggtacccggacgccggcggccacttagccccggcgccaggcggcggccatgaaaggggcggggccgcgccgcctggagccaatcgcgggcgccggtgcgcggaggggcggggccgggcgtgccgaaaccgctgggtcctaggttccaagggtattagaggaggggttagggtgggatccggcgcccggcgttgggaggggsggattccggactccagcgtgctgagggctggcccgctgtcccggctgagaaatggcgccctacgtggagagccccagaggatatccaagctgagtgttgaagggaatggaggcgcccgaacagaggaacttaggttagccaaaagc

SEQ ID NO: 239462 - DNA, 609 bp, Homo sapiens
ttacagatatgtatggacttattaaacaaaaatcttcaaaatgttaagcatcttctatttaacaagtccaggaaaaaataaaatccctaaaagtttcataaataaagagtatttggacaaagaattggacaaaaagaaatgtccaatattccaaaagttaatatgagtgttttgtgaactcacaaagtagcattctaggacactaaaaacaggtagacagacagagatagatgacagatggakagatagatagatagatagatagatagatagatagatgacagagtctgataatagattcataatacttagatatgttgataatatacagtggctgaagtattatggaaagacttcatcaaaacatttatacatatgtaacttacctgcacattgtgtacatgtaccctaaaacttaaagtataataataataaataaataaataaaacaaatctactccaaaaaaaaatactgtgtctttctgcaacaaagaacatagctcaagcatcaaccttcctactacctcattagaaccatcacatcttcagaaacttgctatgatatggaaatccaactcatagaaaaaaatcatctgacaaagtattttt

SEQ ID NO: 239463 - DNA, 431 bp, Homo sapiens
aaagttctgagatcacaagcgtgtgctaccaagcccagccccagatattcgtattaactagatattcttattcataaaagaatgagtttggacccaccccctgactccatctcaaaaattatatgaaaattaatttttcacagtttttatggttttatttcaacacaaaacatgcacatgagctgtctattccctttctttgctgtgctgcctggcattgcgactggtgactctgatggccagctgggctgccctttccatgatggctttgcagttccagaggacacattgtgagctatctcaggacagtaagattttctgcatgtcagcagcccttccaagtccttgacaatgcgtaccagaaacttccagaagccgctgggcagcatgtgctttgtgttttcattgctyctctataaccaatgttgggc

SEQ ID NO: 239464 - DNA, 519 bp, Homo sapiens
cccatcaacactctaaacttattatgtcccaaaatgattcatcccccctttcctctccccactcccagtgctcactaaagctgtagataaataccatcattcacacagccgctccagccagaaacctgggagtcatcttttgacttcttcctttcctcaaaccctgacacccacccaatcaatcaccagcacccattgattgtatggtctaaatatctctcatatttgtccacctctcccaatcctcgctaccatcaaagctatcaacaccatttcacactsggacaatcaggacaacctaattgatcctaactcatcttattaccctcgatttttctaccctagtgttccccaaagtgggtcccatatcctaaaggatgggtaaagtgattcactggggtatggaaagataataatcaaactcttatctatactaatctatttatataaaccaatattaaaaaactacagtttttgaatttttaatatatagataaaattaaagccaacaggttctac

SEQ ID NO: 239465 - DNA, 519 bp, Homo sapiens
cccatcaacactctaaacttattatgtcccaaaatgattcatcccccctttcctctccccactcccagtgctcactaaagctgtagataaataccatcattcacacagccgctccagccagaaacctgggagtcatcttttgacttcttcctttcctcaaaccctgacacccacccaatcaatcaccagcacccattgattgtatggtctaaatatctctcatatttgtccacctctcccaatcctcgctaccatcaaagctatcaacaccatttcacactcggacaatcaggacaacctaattgatcctaactcatcttattaccctcgatttttctaccctagtgttccccaaagtgggtcccatatcctaawggatgggtaaagtgattcactggggtatggaaagataataatcaaactcttatctatactaatctatttatataaaccaatattaaaaaactacagtttttgaatttttaatatatagataaaattaaagccaacaggttctac

SEQ ID NO: 239466 - DNA, 519 bp, Homo sapiens
cccatcaacactctaaacttattatgtcccaaaatgattcatcccccctttcctctccccactcccagtgctcactaaagctgtagataaataccatcattcacacagccgctccagccagaaacctgggagtcatcttttgacttcttcctttcctcaaaccctgacacccacccaatcaatcaccagcacccattgattgtatggtctaaatatctctcatatttgtccacctctcccaatcctcgctaccatcaaagctatcaacaccatttcacactcggacaatcaggacaacctaattgatcctaactcatcttattaccctcgatttttctaccctagtgttccccaaagtgggtcccatatcctaaaggatgggtaaagtgattcactgggstatggaaagataataatcaaactcttatctatactaatctatttatataaaccaatattaaaaaactacagtttttgaatttttaatatatagataaaattaaagccaacaggttctac

SEQ ID NO: 239467 - DNA, 575 bp, Homo sapiens
aagcttttctgaaagccatattttagtgttttggcactgtgtggtagcattaccttcccgtgccatgttgaaagcaagaaacatgttctacaaagcacatttttttcaaatagcatttgagtttttaaatgaaaacagaagctgaggtaaggctatattgtattcttgcaaaatacatttttgttttattgtgacctgtgtgtaggttcattttttctaggatgtttgaaaagtttctttcttttttttttctttttcctgagacagaactgtctcagaaaagtgatagatgtcagttcttgctcagtggtccaggctgcagtgcagtggtgcgaactcggctcaytgcaacctctgcctcctgggttcaagcgattctcccacttcagcctcccagatagctgggactacaggtgtgtgtgccaccatgtccggctaatttttgtaattttagtagagttggggtttcaccatgttggccaggctggtctcaaactcctgacctcgagtgatccgcccaccttggcctcccaaaatgctgggattacagtacaggtgtgagccgctgtgcctgg

SEQ ID NO: 239468 - DNA, 499 bp, Homo sapiens
gcctactgccatccatctaagatgggacttgctcctccttgccttccaccattattgtgaggcttccccagccacatggaactgtaagtccaattaaacctctttattttgtaaattgcccagtctcaggtatgtctttatcagcagcatgaaaatggactaatacaatagtatatgtaaaatgctatttcttttctatactttatataattgctataataggtaaatcaagtagttaaactacagaatttctcagtttagccttaggaattcagctactacgtattcggaaatggctttttttttttttttttttttttatgaagmgacaagattttcaacattctccaattaaggttaataaattgggataatatttaggccaaattaatttgaaaaagccattcacaagtattctggaaatacaaggggactccaaaaagtttgtggaaaaaatggaattagatgaaaatagaaagtataaactttatttctcaac

SEQ ID NO: 239469 - DNA, 499 bp, Homo sapiens
gcctactgccatccatctaagatgggacttgctcctccttgccttccaccattattgtgaggcttccccagccacatggaactgtaagtccaattaaacctctttattttgtaaattgcccagtctcaggtatgtctttatcagcagcatgaaaatggactaatacaatagtatatgtaaaatgctatttcttttctatactttatataattgctataataggtaaatcaagtagttaaactacagaatttctcagtttagccttaggaattcagctactacgtattcggaaatggctttttttttttttttttttttttatgaagagacaagattttcaacattctccaattaaggttaataaattgggataatatttaggccaaattaatttgaaaaagccattcacaagtwttctggaaatacaaggggactccaaaaagtttgtggaaaaaatggaattagatgaaaatagaaagtataaactttatttctcaac

SEQ ID NO: 239470 - DNA, 589 bp, Homo sapiens
ctgggtacctcttgtttacatttctggacccctgtttatttcccccatcattctgctgtatcttgctttcttggctctaaaggatccatcttgtatccttactgcttgattcatagtagatgctcaataaatggtggttttcatttgaatttgagaagactttctgaatgtctcttgaaccaccttctagctatccttgttagggttccasgattcctagaaatgtggacctcatgactagtagggcatggaggggccagtgggatggtctgtgtgttgggcctgatgtgtgggctcaaggccagtgccagggcagcaaggtcacaatgatttccttgagtagcacccttgggctggagatgggttaggtggggtgcccctttcttgggacatgttctggataatcagatatcttgtgttcttgatgcaggtaatatagctgctgctggaagtgacgagaagtgcaagctggcgatgcagaggggtgcgcagtccagcgtgaactacagtcagggcagcctgaaggatgcagtaaggaagctggtgggcgagggcggggtgaatgtggccatcgacatggtgggaggag

SEQ ID NO: 239471 - DNA, 589 bp, Homo sapiens
ctgggtacctcttgtttacatttctggacccctgtttatttcccccatcattctgctgtatcttgctttcttggctctaaaggatccatcttgtatccttactgcttgattcatagtagatgctcaataaatggtggttttcatttgaatttgagaagactttctgaatgtctcttgaaccaccttctagctatccttgttagggttccacgattcctagaaatgtggacctcatgactagtagggcatggaggggccagtgggatggtctgtgtgttgggcctgatgtgtgggctcaaggccagtgccagggcagcaaggtcacaatgatttccttgagtagcacccttkggctggagatgggttaggtggggtgcccctttcttgggacatgttctggataatcagatatcttgtgttcttgatgcaggtaatatagctgctgctggaagtgacgagaagtgcaagctggcgatgcagaggggtgcgcagtccagcgtgaactacagtcagggcagcctgaaggatgcagtaaggaagctggtgggcgagggcggggtgaatgtggccatcgacatggtgggaggag

SEQ ID NO: 239472 - DNA, 584 bp, Homo sapiens
gggggcggtggctcacgcctgtaatcccagcactttgggaggctgaggcaggcctctactaaaaatacaaaaaataaaattagccgggcatagtggcacgcgcctgtagtcccrgctgctcgggaggccgaggcagaagaatcactttaacctgggaggcggaggttgcagtgagctgagatcgcgccactgcactctagcctgggtgacagagtgagactctgtctcaaaaacaaacaaacaacaacaacaacaaaaaacaagtagtgggtggaggggagtactcttgatagggtagtttcatttgtccttcttgagctttgcttgatctgctgagaactaaaaaaaaaaaaggaggggaaaccagttaagattgcatacgcattcgttgaattgactgaaaaaagaaaaagaggccattgcaatagtcgtggaaaaagatgatggtggcttggactagggttgtggcatttgaagagatatagtcaagatatattttggaggtagacccatagtaatatttgctggtggattatatatatgggatgtgaaaaacaaaatcagggataacttctatgtgtgtg

SEQ ID NO: 239473 - DNA, 506 bp, Homo sapiens
gaattctgaaacactaatatgactattttactccttagtgttctaaacacttcccttagtgtctacccattgtcctcagaataaaatctgagtcgtttaatcagcctgtcctttattttctgatttccttctacatttcagcctcatgtatttctacaccctctcacattctctgtcctctaaccatactgaattacatgctacacctgacagagctccagtgcacctgcagtccaacgttaatgaagcatttattcataaacaccaaaaagcaaatgtgacgggcaagacactatattaaaacatgagcatagcacaagagacaaaggcatgggtttgtgggtctggtcatattttttatgtggaacatgagttttactagatgtatgtgttatttcacaagtttcttacgtcctragatagtaaaaaggcaaaatagacatgacttcagaggatagtttggctgaagaagatttttcccaggcccaattaactacaggacagat

SEQ ID NO: 239474 - DNA, 563 bp, Homo sapiens
agggctgagaatcgtccccgagtaccagatataaatgtagttccaggcactaaggtctgctaagggtttcccaactgtaagacaggctctacatttgacactctgaactcattttcccacaggaaaaaattatgtagatcaggtttagttctcagactgggcttagaaaattcatatagtgacwcacgtactacaagaagcataatgccaaacaatcttgaaagctgtttatagcaatattttctaggagaaatgtaggtgaagctctaatttgaaatactggcaagtttggtatggaattcaggggaacatgtgtaataaagaaccacagatatctatgactgctcaaaaatgtactttctctgcctccttgtcatttccagcatcaatctgctaacctaattggaatacttttaggactagataaatgtaaactagaaaagagttctgatagctatttctattactctccatttccttctccttattcctagctgtaggactttggtgagtgttggttcttattaatatttttatcacctgggtgtcactttttaacagag

SEQ ID NO: 239475 - DNA, 563 bp, Homo sapiens
agggctgagaatcgtccccgagtaccagatataaatgtagttccaggcactaaggtctgctaagggtttcccaactgtaagacaggctctacatttgacactctgaactcattttcccacaggaaaaaattatgtagatcaggtttagttctcagactgggcttagaaaattcatatagtgactcaygtactacaagaagcataatgccaaacaatcttgaaagctgtttatagcaatattttctaggagaaatgtaggtgaagctctaatttgaaatactggcaagtttggtatggaattcaggggaacatgtgtaataaagaaccacagatatctatgactgctcaaaaatgtactttctctgcctccttgtcatttccagcatcaatctgctaacctaattggaatacttttaggactagataaatgtaaactagaaaagagttctgatagctatttctattactctccatttccttctccttattcctagctgtaggactttggtgagtgttggttcttattaatatttttatcacctgggtgtcactttttaacagag

SEQ ID NO: 239476 - DNA, 623 bp, Homo sapiens
  misc_feature (1)...(623): n = A,T,C or G
cacttatgcaaataactatatggccataagttaagaatactcacaagtactttccaaattttggagaaataaagcagagagaaacaaatatgctccaaattttgtccacaggagcataacttaactcaattgttaaagctgtcgatagctcaaaaaaaaaaaaaaaaaaaaattttttcccagctccaaaaagacaaaacaaagaatcrgcaaccttttaaacaaagagtcagaaaagattacttcggttttctgttcattcagtatatgcagttaaatcctgttccacttgatattcatgaatatttcagctctctatgagagtcctaaaagtttttccctatactctaatgtaacaatctccaaagttatcagaaacttgcattcaaaagcacctgtcagagtcctatagctgataacaaaccattttttgaataggatcaaaacaagacaacaattgtctgtggatgacaaaaagccttaggatagccactattaaagccacaattgactaggaattttggttacttctgtggcatacaacaattatacataacaattaaaactattaataacatacactaaattcatatcagaattaaaggagtttcgtataattttgn

SEQ ID NO: 239477 - DNA, 598 bp, Homo sapiens
gacatgacactaccaaccaaggatatctggctctaaagcaacagaaaaggtttatcatctccagctatgagtgagctggcacaccatttccttttttatttcagtcattcttatggttgatatatgggttaacaaaaaaaaaatgtttatccactgtataccatcaggaaccagactagcaggaagaaacttctgagtccacaaggaaaaggaaattttcaatctgrgtaaggtagttaaatctggcctgtatgtgcagatgtgttataagagacagcccatttaagcatgcactggataactgttcaaaacatttttcatgtaaactaaagacatctttggcaaccagaaaagtcaattactcatattccccttctctggttcaggaatttattgagagaagactaaggaagtctgctatccaaaaatacatacacctaggccaagtgaaatgctctgcctgaaaatacctagagaaatatctgttgtcttagtctgtttggactatttacaataccataaaatgggtagctcacaaataacaaatttatttctcatagttctggaggccaggaagtccaagattaaggagccagca

SEQ ID NO: 239478 - DNA, 538 bp, Homo sapiens
atttggagatagtgcctttaaaaaaggtaattagggtaaaatgaggtcatatgggtgggtcctaatccaatatgaccagtgtcctcataagaagagattacagtccagggcgcggtggctcaygcctgtaatcccagcactttgggaggctgaggcatgtggatcacctgaggtcaggagttcaagactaggctggccaatatggtgaaaccctgtctctactaaaagtacaaaaattagccaggtgtggtggcaggtgcctgcaatctcagctactcgggaggctgaggcaggagaattgcttgaacctgggaggtggaggttgctgtgagctaagatcgtgccattacactccagcctgggtgacagagcaagactccaactaaaaagaaaaaaacaataagaagaagagattacaacacagacagacacagaggaaaaaaccctacaaagacattgggagaagatagccactcaccagtggaaaagagaggccctcagaagaaaccaaccctgccaaaaccttgagtttagaatt

SEQ ID NO: 239479 - DNA, 550 bp, Homo sapiens
tcacttctctttacaattgcaggaaaaaaaaaagaacaaaatgaatattcttctgatctagatcaggatcttcctagatgtcttttgtagagaaggtacttgtaaatgctccactaagaaagtttggttaaaaatttaggagatgtagtatataatatatccccttggtggtttcccatgtgtattattggaatatgaaggacctgagtggcccctacagacaaaaaacatgccattgtttatccagtgttccccaaacttatttagcaagtgattctttttttagtaacagtttgtattctgcaaaatactttaagaatcacaaccttatgtcacttcctgctcctggagactagacrgtagactatttacaagtttatttctcatttgacatgaagaatatatggagtagaattatccccatattccagatgagaaaaaaaaatgattgctaggtctcatagggtctagatccaagaataaactttccccattggatatttgggtgtcagcccagcattagccctacttttgagtttagaccaagctt

SEQ ID NO: 239480 - DNA, 581 bp, Homo sapiens
ctaggactttggagtatgtcaaagctgtgttctagatttgactctgctgctcggtagctctgtggccttggccaaggcccttaacctctccacctccgttttggcatcggtaaaatgaaagtaagtcttctaagattgttgtatgatttttaaaatttttaaaatataacaaaaactcacatcgtacttcttttatgccatgaactatgaaaatcactttgtaaactgttratttaaacaaatcctcataagaactgtattgttccaattatatccattttagagatgggacactgaggcacagaaaagttagataacttactcaaggatacattctcattcggtgacagagccaggattcaaatccaagcagtttggctctagaatttatagtcttagccagcacactcagctatcctttgctcactcgctccctcccacagaaggccgactgacaggagatgccccgtggggaggagccacccttatgaatgggagtagtcatagtggtatcagcaacaggaccaggggcaggacatgcacatgtactcactcgtgcctccacatggtgatttagccca

SEQ ID NO: 239481 - DNA, 581 bp, Homo sapiens
ctaggactttggagtatgtcaaagctgtgttctagatttgactctgctgctcggtagctctgtggccttggccaaggcccttaacctctccacctccgttttggcatcggtaaaatgaaagtaagtcttctaagattgttgtatgatttttaaaatttttaaaatataacaaaaactcacatcgtacttcttttatgccatgaactatgaaaatcactttgtaaactgttaatttaaacaaatcctcatwagaactgtattgttccaattatatccattttagagatgggacactgaggcacagaaaagttagataacttactcaaggatacattctcattcggtgacagagccaggattcaaatccaagcagtttggctctagaatttatagtcttagccagcacactcagctatcctttgctcactcgctccctcccacagaaggccgactgacaggagatgccccgtggggaggagccacccttatgaatgggagtagtcatagtggtatcagcaacaggaccaggggcaggacatgcacatgtactcactcgtgcctccacatggtgatttagccca

SEQ ID NO: 239482 - DNA, 562 bp, Homo sapiens
ggactttgttcaaagttctgcggtccttgggcctgacgggtgctcagcccagagcagatgcgtgggagcgcatgttgactgagtggctgaccacgtggccacataccaggaagagcttccaacagcacaggactgtcatcacaggacatttatgagaasagggtgctgatcatctgtgatctttgaaatacaggaaaccaggaaagctgacaggaggaacactgtgattgtcagcggcctgttttgatgcctttcaagtctcttccattgtttcctgatgagctaggactcagatgttgacatccttccctctttttctttcacttagtcccttcatgctaaagttttatcatagggaaattgggaaaggtgagttaagccagatgctagatgttgaatgaaatttcataagaagctttattttgcagttgcacttaaagcatcacaaagaaaaaatataagcacttgaagacattcgatgatgaattctatacagactttggatgctgtggatttcactgacttgcagttttgatatatgtggttacatgaaatgaaaggt

SEQ ID NO: 239483 - DNA, 488 bp, Homo sapiens
tgcacgtagtttgaggcccagaaggagaggagactatgagtagggcagaaaaacatatctgaaatgacactagctgagaattttccaaaatttatgaaaacatcaacctacttatccaagaaactcagtgactaaagcaaaatacatacaaaaacaaaacaaaacccaactatacccggacacattggtttcacactggtgagagcacagagaaaaaagaaatattaaaagcagccagaggaaagaggcatattacatgcagacagtgacaagaccaatggatgacttcttggcagaaacgaaggaggccagaaaacaaaggaaaaatgtctttaaagtgttaaagggggagaaaaaacaaaaayaaaaaccctgccaatctaaaagtctgcacccagctagataggcagccagcaaaagcagcatagagtcacctgtctttcatcactttccaccaatgcctcccactcacgaaacaaccagaaaac

SEQ ID NO: 239484 - DNA, 580 bp, Homo sapiens
gagatctccacttggcaatgtggccaagaaaaatcctgtttattttctgggggcttgtccaggatataagaaatgatgagcaaatgtggcatctttcttctttctttcatggtcatgatggcacctatctattcttttacaatattgggggtgttgttgcaaactacagcaatattactgggtagaatgagcatttggcccagccatcagatatgcaattaagaaygatgcaatttccatgtattagaagcagaaaggaggcagcaaataaaagttatttgttgctgttattgttgaaggaacccatttacataaagtaagaggctttttcgcccaggcccctctccatcccctgctcttaagctgttttttttcttttctccaccatgtcaggtgttagtacagccctgcaaatacagggagcttttctatgggaggggtatttttttcattttggaaggcctcttactaggccaggacgccaattcatgggactccttttcctctcccttttttgaggagatcccagttccacagcttcaacttagcatttggcttatgataaggagggccacctggg

SEQ ID NO: 239485 - DNA, 580 bp, Homo sapiens
gagatctccacttggcaatgtggccaagaaaaatcctgtttattttctgggggcttgtccaggatataagaaatgatgagcaaatgtggcatctttcttctttctttcatggtcatgatggcacctatctattcttttacaatattgggggtgttgttgcaaactacagcaatattactgggtagaatgagcatttggcccagccatcagatatgcaattaagaatgatgcaatttccatgtattagaagcagaaaggaggcagcaaatraaagttatttgttgctgttattgttgaaggaacccatttacataaagtaagaggctttttcgcccaggcccctctccatcccctgctcttaagctgttttttttcttttctccaccatgtcaggtgttagtacagccctgcaaatacagggagcttttctatgggaggggtatttttttcattttggaaggcctcttactaggccaggacgccaattcatgggactccttttcctctcccttttttgaggagatcccagttccacagcttcaacttagcatttggcttatgataaggagggccacctggg

SEQ ID NO: 239486 - DNA, 598 bp, Homo sapiens
attcattttgatttgatttttgtatatggtgagagatagggtgtctagtttcctgcttctgtatgtggatacccaggcttctcagattatttattgaagagtctgtcgttttctcagactatgttcttggcacgtttgtctaaaatgtgtttaatgtaggtgcgtggatttgtttctgggtcctttattctgttccattcatctatgtatctgtttttatgcctgtactatgctgctttggttactacagctctgtattataatttgaagccaggtaacgtgattcctccaattttgcttttttttgcttaggatagtgatatggtttggctgtgtcctcacccaaatctcatcttgaattgtagctcccataattcccacttatkgtgggagggacctggtgaaagataatcgaatcatgggggcaaattttcccatacagttttcacagtagtgaatatgtctcatgagatctgatggttttattaggtgtttcccctttcacttggctctcattctgtcttgcctgctgccatgtaagatgtgcctttcacattgttcactgttggaatatagaaatgctactgaaatttgtatg

SEQ ID NO: 239487 - DNA, 554 bp, Homo sapiens
taattgtcctgttaaggtcaaaaatcatttctttttttttttttttttttttttttttttggagataagagtcttgstctgtcacccaggctggagcacagtggcatgatctcggctcactgcaacctctgcctcccggattcaagcgattctcctgcctcagcttactgagtagctgggattacaggcacacaccaccacgcccagctaatttttgtatttttagtagagacggggtttcaccatgttggtcaggttggtctggaactcctgacctcatgatccgcctgcctcagcctcccaaagtgctgggattacaagcgtgagccaccgcgccaagcccaacaatcatttctttagtgtctatcagttcttgtcaagttgctagaaacctaaatgctaaaatataaacactgcatagttaatacctttgcaagttataatctagaaacacaggcctgtttgctgacttgtttctctctatcctttgtttcctttctatctgtctcctttcctccctctcttcctttgtccttttgtccttctttccaagc

SEQ ID NO: 239488 - DNA, 502 bp, Homo sapiens
tgctgggctcctccttcgactcatggggattatgaaaattataatttgagatgagatttgggtgaggacacagagcaaaaccrtatcaccaatctatccaaaccacgaatctaccaatactacttcctatgtcttgatacttttgatttctccaagatattatcaattccctggattactaaaaaatcaatgtattctagctggtcttggccgtcttccttttaccctagttcctataccacagagatctagagattaaacataaatcttactatcggctgggtgcggtggctcacacctgtaatccttgcactttgggaggccaaggcaggtggatcacgaggtcaggagttcaagatctccctggccaacatggtgaaaccccgtctctactaaaaatacaaaaattcgctgggcatggtggcacgtgcctgtagtcccagctactcgagaggctgagacaggagaatcgctggaacccaaaaggcgagggttgcagtga

SEQ ID NO: 239489 - DNA, 502 bp, Homo sapiens
tgctgggctcctccttcgactcatggggattatgaaaattataatttgagatgagatttgggtgaggacacagagcaaaaccatatcaccaatctatccaaaccacgaatctaccaatactacttcctatgtcttgatacttttgatttctccaagatattatcaattccctggattactaaaaaatcaatgtattctagctggtcttggccgtcttccttttaccctagttcctataccacagagatctagagattaaacataaatcttactatcggctgggtgcggtggctcacacctgtaatccttgcactttgggaggccaaggcaggtggatcacgaggtcaggagttcaagatctccctggccaacatggtgaaaccccgtctctactaaaaatacaaaaattcgctgggcrtggtggcacgtgcctgtagtcccagctactcgagaggctgagacaggagaatcgctggaacccaaaaggcgagggttgcagtga

SEQ ID NO: 239490 - DNA, 439 bp, Homo sapiens
attttgggtgacctccatccaagtcctctgtctagaattagtacccaattcaaataccaactacaaccagtttttttctctcgaatgatatatgctcagttcatttttattaactggagttttgaaacaagcatctaatttattacatratgaatagagctagaaaaaaatagcagagaaaagaaaagcctccgttaattttctcttctatcccctacagcagaaaggccataaatgaactattttaacctgcattcaagactagagcactaactctgcctggtccccgttcgaccttgcatggcctattaaagtcaaggatatctttcagaaatgatgttacactaaacaggtctactatgtgatctcatggtgaaaaagtatgtactcttacgccccaagacccagtcttaagcaaaatccttcatcatgtcctctt

SEQ ID NO: 239491 - DNA, 542 bp, Homo sapiens
atctttttgctttcaggcttgttgtgttactttcatttacacatttgtattatgtaacttgaagctagattgttgctgtttcatttatttataagtgagtgatattgtttgtctcttgtccctaccccratctcctgttgaattatgatctccagtgttggaggaaaagcctggtgggaggtgattggatcatggaggcagatttccccatttttctcttgtgatagtgagtgagttctcatcagatccatgagatccggttgtttaaaagtgtatagcacttccccttcactttctgtctcctgctgccatgggaagatgtagttgcctctcctttgcccttctacgatgattgtaagtttcctgaggcctactcagccatgcctcccgtacagcttgtggaactatgagtcatttaaaccactgtttaaaataaattacccaatctcaggtagttatttatagtagtgtgagaatggatgaatacagaaacttgataccagggaagtgggacattgttataaagataactgaaaatgtgg

SEQ ID NO: 239492 - DNA, 542 bp, Homo sapiens
atctttttgctttcaggcttgttgtgttactttcatttacacatttgtattatgtaacttgaagctagattgttgctgtttcatttatttataagtgagtgatattgtttgtctcttgtccctaccccgatctcctgttgaattatgatctccagtgttggaggaaaagcctggtgggaggtgattggatcatggaggcagatttccccatttttctcttgtgatagtgagtgagttctcatcagatccatgagatccggttgtttaaaagtgtatagcacttccccttcactttctgtctcctgctgccatgggaagatgtagttgcctctcctttgcccttctacgatgattgtaagtttcctgaggcctactcagccatgcctcccgtacagcttgtggaactatgagtcatttaaaccactktttaaaataaattacccaatctcaggtagttatttatagtagtgtgagaatggatgaatacagaaacttgataccagggaagtgggacattgttataaagataactgaaaatgtgg

SEQ ID NO: 239493 - DNA, 572 bp, Homo sapiens
caaggggcaactgggttttaaatttaagcatattgatcatttggttgtatctccaacttaattttcaaaggcagggactctgctgtttttgctcacactctagatcatgtgcatgaaaagaaatacttggtgaaggcttgagtatactagtgattatttgaaaatagcatagtcagtaatattcctttatttttccatagcatgtatatatactcttcagtatcctcatatgtgtttatatttacatatgattttgagtattttaagttatgctctctgttactttaatgttgttgaaattctctaggccaagacawaattgagttgaggatcacttgactctcaagatgctatgcagaaaaagcaatcctgaatattgaattctgtgtatagtacatggaacccttgaaatcatctttctgcctaaaatctctcagcactcttctctttatttctagcagctatgctgccctcctgctgaggtaattatggatcaatgccactgggacttctttttaccctgtattcccatgtgaaggcatcatttcccatatatacacactataaaattc

SEQ ID NO: 239494 - DNA, 508 bp, Homo sapiens
ttatgtgttgttagaaaaaagcccacagtaagcttgcagtgagccaagatcgcgccactgcactccagcctcggtgacacagcgagactctgtctcaaaaaaaaaaaaaaaaaaaaaagaaaaagaaaagtctacagtagccatgagccatgtatcgttttcatcatcattttgtatgaaatgtacatattatcaacatgacttataagtcttgatattgatattggccttgaactttttgcygagatggtgtttgtaagatttctccatttgaaagatactcttttataacgctttccatactgtactctttggaacaaagtcactgtgtgtagcccacacttaagaaatggaaagtatgttccatctacacttctaattagtgtgattttacctcagcagcaatgacaaaaaaaaaatggatgtccagtattttcctcctattggtataagaaatttaggccaggctgatgttcttccatctcactcatataaccacacataatgt

SEQ ID NO: 239495 - DNA, 567 bp, Homo sapiens
aatgcttcctttgggattcaggtctggcataaagaaatatgctgtaaaaattaagtacaattttatatcttaaaatatcatcaaggcccaattaaattattctaatattgtatacatggtgcaattatttccctcagatgtattcaaatccctcagatgtattattcaaatccatcagatgtattatttccctcagatgtattcaaagtaattcacccacactactacaaagtaatttgtttcctggttttcargtttgttttcattacaaactgagtaatggaacttctctattaaaaaaaaaaaacaataaaatagtcacatgaacaaaaagaacaaattgatttccccttattgttttaaaaatacacttttattaaattaagcttgcctaaatttttagccccatattcactataaaaatatttctgactaactgattctccaggaaatgtgtggatactgaacacactggagtgcattgttccctcactttaaatttatcctcaaaacttgaaatgcatgttttagaactctactttctaaaattgtagttaatattttaga

SEQ ID NO: 239496 - DNA, 585 bp, Homo sapiens
gaatgctaatttttgactagaaagaaatatatcaaatgtcatcrtctcctcttattcatgttgattctgtttgattctcctgcagcttccaataatagagattgtgatctcatttgtgaaacatctatttctcattaatcatttgttaatatactattgattaccaatttggcaatgctctgtctaatgaggagaagacgaggaggagaaataaaaaaaaagagaaatttcctcctggagtttacatagtatagagagcttaacattccctttccttgacttttttcaaagaaatcctacctggatcaatcgcttagctttgaaatgttttattttacttcattgagagaaacatgctttggatcataatttatcaaatatattttacccttcatttatacgtacaaacctatagtgccaagttgttttatttctgatactgttgttgagtcacgtagggttaatttagtgggaagaatagtttcaaaacagtaaataaacattagtctctgtcctaagtcaataattacttttttaaaaagttctaagtagagagctttttccctttttactgaaaaataaaaa

SEQ ID NO: 239497 - DNA, 606 bp, Homo sapiens
tttcaaatgtaaaatcttaatgtttctcataaaacaccaagtacggatgctgacaggtatgaaattcaaaagttatttgggatttgatgctcagaaggtaattgcatgctgtgtatgttgaactctaaattgggttgggctcatctgtatagattcacagacaagaattaaagtcttgaaggtaaactcattgtcctctatcaataaccagaaatatgccttctttgaatctgatattccctgacattctcctgcattaatgtgttgaagtcagataaatctttaggttatttrttttgaactgttggattctagagtactgcttcagatttcattttttttaaccatagttctttttttatcagaaggttattttcttagaaaaatatatgcaagcattgtcctttgaaatttttctcgggtgttgaatgttaagtacatatttttaaactaataaagctgttactaataaaagtatagcagaagatgttattccaattaaaaggaataaaattgatttggagaaaagtcaaagtttaaggaaggtttgattttgttggaattagaaacaaacaaagtacttcatatctgtaaatgtgttatata

SEQ ID NO: 239498 - DNA, 606 bp, Homo sapiens
ctttgtgaattaatctctctgaaatctaaacttgtatctgaggactgcagaagcacttataatacagatcttacctttgtttaggcatgcttcattctggtttgaaaaatgtccattttgtcataagagtaatactctctctaggacagcttgcatgtccaaagctggaaaatacatccggtaaacactattaactggaagcttattaatcagagttgtattctaaccagagttactttcattcattaagcttttaggaagtaagcaaatcacaagaaaaaagttggtttcaggaactttagttttagtttttaaaagcttttcctaatgtgggtcccttttgttttatgatgtattctaccatcaacgtcatggccctgtatgcatgccaggactgtttgtcttgttcaccttgaccccaggtcattgccaggcacatagcagatacacaagagatattcagtgaataaatgaaggtatgggaaaactgaaacctgggtcattgtagaattcttactcatcaagtaaaggttagttgtgatcaatctattctccttagttgagaaaacggatrcacctgtgttcaaggtttttggcaaggcatac

SEQ ID NO: 239499 - DNA, 260 bp, Homo sapiens
taaattgctttacctccctgaatctcagccttcaaagctgaaaccagttcaggaggtatacttcagtagaactattttgacatttaatgaaataatatatggaaactgcctagcactgtgtctgggcattcctttgtttcttrtaagtgtgagcctcaattcagttgactgtaatttacacatacacaccagcctgaacaattccttctgatgtttattgagcacaaccctgtaagaggcattctcctaggtaccagctg

SEQ ID NO: 239500 - DNA, 609 bp, Homo sapiens
ctgacaatgaatttctttatgagcaaattgtgaagaagacccccagggaggtatgtagccttctatctttgcagctatctattcaggaacaaaatgaaaggcactttgtgtgacacaattcccaagctcgacttttccccttgccatagtgagtttggggtcttgagatttttattttcctttcatttcagtcataatcattatgataatacatgctatagtgagatcaatggaaaaggtttttggaagctcagaaaatggaacatctaacagtcatgggtggcaactatcgaaggcttcacagagaaaggattttgaagtggaatcttaatgaagttcacttggtraataatggtgaaaagattatgtcatctaggaaatataatatgtgtatattacacagaatcatgaagcttcaattcaggtctaaaatttcatcaatttacttaacttattttaataatgactagcatttatttattattgatatggtttggctgtgtccccaccaaaatctcatcttcaattgtagttcccataatccccacatgtcatggaggaaccccatagtaggtaattgaatcatgggagtggttacccccatgatgc

SEQ ID NO: 239501 - DNA, 605 bp, Homo sapiens
caatgaatttctttatgagcaaattgtgaagaagacccccagggaggtatgtagccttctatctttgcagctatctattcaggaacaaaatgaaaggcactttgtgtgacacaattcccaagctcgacttttccccttgccatagtgagtttggggtcttgagatttttattttcctttcatttcagtcataatcattatgataatacatgctatagtgagatcaatggaaaaggtttttggaagctcagaaaatggaacatctaacagtcatgggtggcaactatcgaaggcttcacagagaaaggattttgaagtggaatcttaatgaagttcacttggtaaataatggtgaaaagattatgtcatctaggaaatataatatgtgtatattacacagaatcatgaagcttcaattcaggtctaaaatktcatcaatttacttaacttattttaataatgactagcatttatttattattgatatggtttggctgtgtccccaccaaaatctcatcttcaattgtagttcccataatccccacatgtcatggaggaaccccatagtaggtaattgaatcatgggagtggttacccccatgatgc

SEQ ID NO: 239502 - DNA, 609 bp, Homo sapiens
ctgacaatgaatttctttatgagcaaattgtgaagaagacccccagggaggtatgtagccttctatctttgcagctatctattcaggaacaaaatgaaaggcactttgtgtgacacaattcccaagctcgacttttccccttgccatagtgagtttggggtcttgagatttttattttcctttcatttcagtcataatcattatgataatacatgctatagtgagatcaatggaaaaggtttttggaagctcagaaaatggaacatctaacagtcatgggtggcaactatcgaaggcttcacagagaaaggattttgaagtggaatcttaatgaagttcacttggtaaataatggtgaaaagattatgtcatctaggaaatataatatgtgtatattacacagaatcatgaagcttcaattcaggtctaaaatttcatcaatttacttaacttattttaataatgactarcatttatttattattgatatggtttggctgtgtccccaccaaaatctcatcttcaattgtagttcccataatccccacatgtcatggaggaaccccatagtaggtaattgaatcatgggagtggttacccccatgatgc

SEQ ID NO: 239503 - DNA, 616 bp, Homo sapiens
cttgagactgacaatgaatttctttatgagcaaattgtgaagaagacccccagggaggtatgtagccttctatctttgcagctatctattcaggaacaaaatgaaaggcactttgtgtgacacaattcccaagctcgacttttccccttgccatagtgagtttggggtcttgagatttttattttcctttcatttcagtcataatcattatgataatacatgctatagtgagatcaatggaaaaggtttttggaagctcagaaaatggaacatctaacagtcatgggtggcaactatcgaaggcttcacagagaaaggattttgaagtggaatcttaatgaagttcacttggtaaataatggtgaaaagattatgtcatctaggaaatataatatgtgtatattacacagaatcatgaagcttcaattcaggtctaaaatttcatcaatttacttaacttattttaataatgactagcatttatttattattgatatggtttggctgtgtccccaccaaaatctcatcttcaattgtagttcccataatccccacatgtcatggaggaaccccatagkaggtaattgaatcatgggagtggttacccccatgatgc

SEQ ID NO: 239504 - DNA, 620 bp, Homo sapiens
agacagcattgtgtcaaatattactttaaaagttgactggtcaatttgtatttttaaaaaggagttaccaaaactaaatttaagattcactgtaaaatactctaattctgaacataattgcacggaaaatatcaaaccctaaagtaaatgttagaacaagtgtgtgtgatcattcattcatttaaatagacatgctttggttctcttctatatgcttaataaaagagcagcattcagtgtatgtattggtgacccagcatctaccaagrttgataggataaattacgctgacatatcaaaggatctgcacattggaggaggttagaaaaataaagctttatttcacattcatgctaaaattccatcatgactggggactctgctctatatttcttcactctgggatccaggctgacaaaataaacatcatcttgaacattcttatttactgagccagaggccaaatatgtgttcagaagagtttccagtctaaaaatgatatatcacgctttaatcacaactatttgaccaggcctagtcccatggtccaatacagccacatgggagccaggatgtgttcagaagaaaagagaacctgaactatttagcaaatagcacaa

SEQ ID NO: 239505 - DNA, 481 bp, Homo sapiens
atatgggttgcctttctttcagcctcaaatatcagtttccttgaaagctacaaacagctccccaccttaagctaataccacacaatttaatattttatttgttcagtatcaycccactcctcatatcaatttctgaagcatttaggatgtgctagtttgagccaaataacaaaccagccctagcccccaaatctcaataactgataatataaagactccatgttctttataggagaataatatagcactcttcctttcccttttgccctgaccttggtccttggtttagaaaattcacataatttttttccttaggtcatttcaaaagtctccctctctcaagtcttgaactcatataccacaaactgctgtgaggatgacctatatatgatgtgaatctggttatcatccaatttttttttttgccaattatattgagaaaaagaagataaacttttttttttttttttggttggcatgt

SEQ ID NO: 239506 - DNA, 481 bp, Homo sapiens
atatgggttgcctttctttcagcctcaaatatcagtttccttgaaagctacaaacagctccccaccttaagctaataccacacaatttaatattttatttgttcagtatcaccccactcctcatatcaatttctgaagcatttaggatgtgctagtttgagccaaataacaaaccagccctagcccccaaatctcaataactgataatataaagactccatgttctttataggagaataatatagcactcttcctttcccttttgccctgaccttggtccttggtttagaaaattcacataatttttttccttaggtcatttcaaaagtctccctctctcaagtcttgaactcatataccacaaactgctgtgaggatgacctatatatgatgtgaatctggttatcatccaatttttttttttgccaattatattgagmaaaagaagataaacttttttttttttttttggttggcatgt

SEQ ID NO: 239507 - DNA, 556 bp, Homo sapiens
cataagtttaaattatttaatagccacattaaagtaaaagttaaaattaggaaataaaaatacttactaatctattatatttatattatttatatatttaaatgtatatgtaatttattctattcatattatatatttatatttgtgcttaaatctattttagtaaaaaaataaaagaaataatataaatcagataatcaatataaaaattattaattagatacttatatggtaaccagcttccaaaatgatcctcattgatctctgccaatgttcacaccctgtgtagtcccttcccacactgtcagggttggttggtgcaatcartagaatatggcagatggtatgtcactttttaggctagattgtaaaagaccttgtggcttctgccttgcatcattgattctaggggaagccagctgccttgtagtgagtgcacttaggagggcctgtggagaggcccatgtagagagaagctgaggatttctgccaacaaccaggaaggtactgaggtcttctgccaatagatgcaaaattgatccatcatggagcagat

SEQ ID NO: 239508 - DNA, 574 bp, Homo sapiens
acatgtttgttggatacatgaatggtaaacactggacaactacttggcagtgttgatggggaaggggttcttgtactgcatgaataattcatcttcgagatccctaaaaattgccagtattctataaaatgcatcatagagaamtatagttcctccctaagaaccttcaaaaacatatgacacactcttcaccctcacatgagcgtgtgcagatttgttctgtgtaacataaatgattgattgaggaggattggccattactacctggattctgtttctgtgaagaaagtcctgtttcacaattccatttatttgtgcctaggtaagggcccttgcacaccatgaaaattgacctttaggtgctcctatgagctgaaacttctactaagcatgttcaatattttattatagatgcttgaggtaggaatcaaacagcacagatcctaggtacataacgaattactctcttctttggtttatgagaaaaagagctattttttttcctgtgagtgggtattcttcaaatgcagggataatttataagagcaaggtaaagaaaaacacaatgtttcac

SEQ ID NO: 239509 - DNA, 592 bp, Homo sapiens
ttgaaactgatatatatatatatatatatagaaataatatttataaaggtcatgggttgtgaagtcagaaagattggggttttaatgcaggctttgcctcttactagctgtataattagccaatattcaattttgtaaggatactactggtcatcctgtggatattgttaatactgaatttaaaaacttgtacatagtcccaaggtaatcactaaactttagcttcaccccgttatgtccatgttctgttgctattttcatcctattttgctgagaggcctacccagacaacttgctaaatccttgccatcccycttcccaggtagttagacctgttcatgtatctccagccaactatttaggtcttcttaaaattcaattgtcctggggtgcctcatagcttagcaagaattttctttgtctttaaatccttacttttgacttctttcacaacactgaactcacaggtcattgttcactcagctcattctgaagttagctgtatttcttgaactttgtgattttgaatattccccacctttctccctagccacaaggaaaagttctttcataatgctagtgaagtccagca

SEQ ID NO: 239510 - DNA, 592 bp, Homo sapiens
ttgaaactgatatatatatatatatatatagaaataatatttataaaggtcatgggttgtgaagtcagaaagattggggttttaatgcaggctttgcctcttactagctgtataattagccaatattcaattttgtaaggatactactggtcatcctgtggatattgttaatactgaatttaaaaacttgtacatagtcccaaggtaatcactaaactttagcttcaccccgttatgtccatgttctgttgctattttcatcctattttgctgagaggcctacccagacaacttgctaaatccttgccatccctcttcccaggtagttagacctgttcatgtatctccagccaactatttaggtcttcttaaaattcaattgtcctggggtgcctcatagcttagcaagaattttctttgtcyttaaatccttacttttgacttctttcacaacactgaactcacaggtcattgttcactcagctcattctgaagttagctgtatttcttgaactttgtgattttgaatattccccacctttctccctagccacaaggaaaagttctttcataatgctagtgaagtccagca

SEQ ID NO: 239511 - DNA, 509 bp, Homo sapiens
ccatagtgtaattccagtctgagtccaaagacctgagaaccaggcgagccaaaggtgtaagttccagactgaaagctggccgactcaagacccgagacaagctgatgtttcagtttgagatgaaaggcataaataatgcttaaccaaatatctgagcagttcctgatccaatcaagttgacataaagttaaccatcacaagcccatgccttgtcaactttgcacccatacacatctccttatatcatacttaatgtcaaaataaagacaataacaaggttattctgccttacgtggtatgactattctatatacaaccaaacatactaacctctttcccagaagaggagataaagtttttaagtgacatttactcttctctttgatatttcataacttaaataytatgatgtaaaatgaacaaggcttaaacactatagggtcaatatgtcttatgttacgtgataaggaagtaagagaggaaagagatttgcttaatatatacacaca

SEQ ID NO: 239512 - DNA, 631 bp, Homo sapiens
aactaccaggccaggtggtaaagcaacctagaggtcaaacaagcaaattgacataacattttaaaatatgctattttgtcagggtgaatgacagttatgctatgtgcataaaatcacagatttatctgaatgttaagttacttgtcaaggaatcattttacaattccttttttttcttgccttgtgtcatgtaagattccttgaagcaactaaaaaaacagtcataatccatttgattttctgccttcccatgagaaaaactttttacagatgataaatagcaactgctgacaatcatcaatgcaaagctatcatgcttttacattaaatacaaaaacagagttgtaaagtcacaagggataagacttttgacacataaaagacaaatatataatcctcagaactaaatcactrttgggatctaagcaagtgcaacaaagcacagctgcttttagaatctcacaaagtcaaactaaagctaactttgatatctggaacctaatgcatgttccaacccaatgtgccacgctcttatccggaagctcacgttaaacttgcaaacatcagggaatgtgcatgcacaaagaaaatagccattttatcatactgtcccttttaattaaggccaaaa

SEQ ID NO: 239513 - DNA, 540 bp, Homo sapiens
atataaatgctcaaagtatatagggtcatgtaacacattaaatgaagaatgacattttaagcagtagttaaaattatttactttattttacctattttactaaataatgtctattattatattaacaaacttattttaatgaaaatatacatrataaagtgatatttagttttccatgcaaaccatccatgaaattcctctctcaaactctgaaatctgagacagttaaagcaattaattagaatttaagtaggtctaactatgtaagtgagataaagacattaaggagcacaaatctccacagttagtttaagtaaagggaaatgacttggattaacattaatttgaagtagactacaggatcctaagaaacttcaacgcactgaaagcctagataaaaaacattttcaaaatgaaatacacttatttatattcacatgtaaatagaaaaacatacaatgactttcatattaaactgctatcttttaagcaaaataagacatatggttaggatcaatgtcaaccagaattgatactcaa

SEQ ID NO: 239514 - DNA, 596 bp, Homo sapiens
ggttttagcttcattgatttatttgtttgtttattgtgagaattaattttacatgtcaacttggttgaatcagggaatgtccatatatctggagcaccctgattaatacatttatttatttattccctttcccaccctcaattttacattcattcactagttataattgtgcccttctgtgtcttcaaaagtcagttcattctcaactctccccaacctactggagattcctaataagttgtctctgtgtatttaacaaacttcaatctgccagtatctttattatcaactgtcagtctactcttctctctttgatttagaacaggatgagatcttcccagtgacagcttcattttcttttcagcctgcccaagygcaatgctcacaagcaaccatcctgctcccataccatccctgttctcaccagcagatgaaggcaatcatctaccatcttgccacttctgcagcattaaatacaactctcctgcaaaaccttagtagcattccttttttttccttttattatactttaggttctggggtacatgggcagaacatgcaggtttgttacataggtatacatgtgccatggtggt

SEQ ID NO: 239515 - DNA, 517 bp, Homo sapiens
  misc_feature (1)...(517): n = A,T,C or G
ctacctgtggggccctcagggctcctgtgcctgacagacaatgatgtctcctatctttgtcctttggggctgctataatgaaatactatagactgagaaatttataaacaataggatttatttctcactgttctggaggctgggaagtttagatcaaagtgccggcagattcagtgcctggtggggcccacttcctgcaatcatagatggtgccttcttgccatgtcctcactggtggaaggggctagctagctctagggggtagctttaatccgatcattaatcattaacaaaattaatcattaacagcattaatyctatcgtgagggcagagccctcatgacctaattgcctcccaaaggccccaccctaataccatcaccttgaaggtcaagatttcaacatgtgaattntggggggatagaaacatctggaccatagcacctcccatgcttagagcccagaacctgagtgagggatgaagctggtgtgtggctcacccaagtaccagtaaggg

SEQ ID NO: 239516 - DNA, 546 bp, Homo sapiens
catgtagctgcatgggggaggcagacggcagaaagtctgccaagctgctgcagtgtcagcacattcttggaacaaatgcactgaaaggctggtcctccgattccacttccaagtgagaatcaggaccttgctgtcccagcaggttcgtgcctgggtcactgactggggctggaggcttctgggggaagaggagaggcttcagagctctgccagctgccattctacagaggcaagcccctccggccccatctggcctccctgacccagggygctggcctctgattgcattcccctagtgacagggagctcattagggcctggggctttggggaaggttgttcctctgtaggcatgcctggttctagagaatggatatgtgtgtttgctggggctgtcagagcagggggaggtgcagacaaatggggaggagagaggcacatccttgctacagactgagaatggggtggtgagagagaggccttcagcccggctgaacaggaaggcagagactttgttacagagcagcagcatccaggcagccgaggc

SEQ ID NO: 239517 - DNA, 664 bp, Homo sapiens
atttacaaatttaaatggctataattcttccttcctctctccctttcacagtcttctgcaggtgctgaagggctgcactgtgactatcaggaaaccctagttaagtcccaataattttataatagtagggactaacattacttgagcacctgctgtctacaagtcytgacgctgggtgctaggggcacagagaagaatctggtagtttctttgttctttttatatttggtgtggttagggagacacagttgcaaatagtcactagctatttggggctctcagagtggggcagggggaggcacgggagcttgtgaggacctgggaaggcacctaactctgctttgaggagctgggaaggctttgtaactccctgaaaaagtgaccctccacctggctgtcacagtcataggctcctagtctcagagggtccttatttaataagatcctcctgtttattttacagccatagaaattcagaccatataaattgtgtggtaagtggcagaattcattaggattgactcccaggcttgtaaccccttgaaacttgtattttagcaaatcagaattcatttaaacacagatgcttggaccaggcaatgatgtagtcagcactgatgactggaatcccaggctctgtgggggatggtggcagagaggttct

SEQ ID NO: 239518 - DNA, 589 bp, Homo sapiens
cagcccggtgggaatcatgtcagcagagaagccaggggaggcacaagccagggactaatgagctcagcttggggaggggcaaggtggaggaaaggcaggttcccagagccaggggcaaccagttgagcagtctttctggacaggtcttgcarggatgacccaaccttctccttttcttttctttttcttttttttttttttttgagacagagtctcgctctgtcatgcaatggtgtgatttcagctcactgcaacctctgcttcctggattcaaacagttctctgcctcagcttcctgagtagctgggattacaggcacctgccaccatgcctggctaatttttttgtatttttagtagagatggggtttcacgaccgtggccaggctggtcttgagctcccaacctcgtgatccacccgcctcagcctcccaaagtgctgggattacaggcatgaaccactgcgcctggccgaaaccaaccttctcctttgccttgtttgataacaaagctggctcctgtgaaaatttagacaaaaggtttgtagaaagtgccgggcacaatgtagctctttgattttagcttccctt

SEQ ID NO: 239519 - DNA, 547 bp, Homo sapiens
ggattcataggctttcgaatggttaaaatggctctgagtagagagttctttgtgtggcttaaaatcttaaaattgttgaatggttctcctctataaaataccaataggcatttcaggatttcttgcttcctagatttatatagaatatgccagggaaggtgtattttttatggtgaaaaaatttttgttggaaaaaataatttttgtctaattcagaagttactaaaaggaaggatcaaaataggagaaaaccagtcagtagaaaagagagatgtgaggaaagttataggtggaagatatattttttgcagggagagatgaggaaaaacatgatttaatatgaagacagatcttgtgtggtagattcttgttttaaaataaagtgactggttgtttgggaggtaggtggtacgggacaggttggagggtccagccatktcatcgaatcgtctttgtgggcgataatagggataattgtgaaagggaatttgcaacaggaattttgtgtgtgattaagctggctgtgattaaagggagattgtttgtg

SEQ ID NO: 239520 - DNA, 558 bp, Homo sapiens
aagctttcttcttcccacttgtgatgtgtttgagaaaatgttttctctcttgatttaaattctacttttatccatcttgtaaaaacaattttgtctcagcagttaaattttgatagcattaattatgatggctagacttgagatttgtcttgaatatcaaaactgctcatttctagaactwtctgataaaacatacagatgatagctttcacagtactggcctaggaaactgcagacctcggcaaacaaggtgacagggtagaaaaagcatgggaacaggtgtgtgagagctgtgctaggattaacttcactggcatgtgtcttttatttttaagttccagcaatccaattagatacaaacaactccaatccttcctttagttacttggaacctgggatgaatctgttaattactccatgcctcagttgcttctgataaaaataatggtagtgacacaggattttcttctcagtcattttgcaagatgcaacaccccacccaggcctcactcaaccacactacctgctgcaggacacagcctgcccactcagcctgcc

SEQ ID NO: 239521 - DNA, 394 bp, Homo sapiens
gaattcctttttctggaacagtattctctcctctacggccctgcagcccatgccctgctgggcactgggtagaaggctaatatcaatcagccctggccactggccacctctgcagaagctaattgtccagaggagggaaaatacaagtttataaataactaaamtatcaggtcaagcacattgcaggaagcaaaagtggaatagaataatggggctgggagctccaggaggaagaacaacaacaaaaattccctagccgtgcaaccagcaaagtgttcaggaaagaggcagtgtctgagctagacttggaaggattagtaagctatacgtgtgatgtgatgggaaggacatcggcagtggaggcttaagacatggatttcaggtaaaccaaacc

SEQ ID NO: 239522 - DNA, 394 bp, Homo sapiens
gaattcctttttctggaacagtattctctcctctacggccctgcagcccatgccctgctgggcactgggtagaaggctaatatcaatcagccctggccactggccacctctgcagaagctaattgtccagaggagggaaaatacaagtttataaataactaaaatatcaggtcaagcacattgcaggragcaaaagtggaatagaataatggggctgggagctccaggaggaagaacaacaacaaaaattccctagccgtgcaaccagcaaagtgttcaggaaagaggcagtgtctgagctagacttggaaggattagtaagctatacgtgtgatgtgatgggaaggacatcggcagtggaggcttaagacatggatttcaggtaaaccaaacc

SEQ ID NO: 239523 - DNA, 394 bp, Homo sapiens
gaattcctttttctggaacagtattctctcctctacggccctgcagcccatgccctgctgggcactgggtagaaggctaatatcaatcagccctggccactggccacctctgcagaagctaattgtccagaggagggaaaatacaagtttataaataactaaaatatcaggtcaagcacattgcaggaagcaaaagtggaatagaataatggggctgggagctccaggaggaasaacaacaacaaaaattccctagccgtgcaaccagcaaagtgttcaggaaagaggcagtgtctgagctagacttggaaggattagtaagctatacgtgtgatgtgatgggaaggacatcggcagtggaggcttaagacatggatttcaggtaaaccaaacc

SEQ ID NO: 239524 - DNA, 518 bp, Homo sapiens
aaattgtcaaaatatttttagttatgtgaggtattctatatctgaagccaggttttaatgttcttctttcccaaaattacataccccctttctatctatttaataacccctcaggaagcaaatactccaagtcaccatctgcaagtaggaaatcaattactccttctttgcgacgggctggatggaacaatgtaaaaaaggctattttattmaagcttaatacctagttttcaaaatagagataataatacccaacctcctgtccctctcatggctgagaagatgagaaaatgctggcaaaagtactttgtaaacagtaaagtgatctgcaaatatcagctaggtccttctccgagattccacagcccccatgtacgctgtcatcagtatttatcatggagcacttcaacgtccagttatccatctaatcctgaacccctctggtgggggaggagagttaggggtaaagttctgtccctctctgtccctagaacttagagcagtgccaagctgtgtac

SEQ ID NO: 239525 - DNA, 518 bp, Homo sapiens
aaattgtcaaaatatttttagttatgtgaggtattctatatctgaagccaggttttaatgttcttctttcccaaaattacataccccctttctatctatttaataacccctcaggaagcaaatactccaagtcaccatctgcaagtaggaaatcaattactccttctttgcgacgggctggatggaacaatgtaaaaaaggctattttattcaagcttaatacctagttttcaaaatagagataataatacccaacctcctgtccctctcatggctgagaagatgagaaaatgctggcaaaagtactttgtaaacagtaaagtgatctgcaaatatcagctaggtccttctccgagattccacagcccccatgtacgctgtcatcagtatttatcatggagcacttcaacgtccagttatccatctaatcctgaacccctctggtgggggaggagagktaggggtaaagttctgtccctctctgtccctagaacttagagcagtgccaagctgtgtac

SEQ ID NO: 239526 - DNA, 513 bp, Homo sapiens
ttctctgggtgctaagagtttgggaacactggtccttagatatcactgttgatttgttcactagactagaaattccatgatgagaggaatcatgttttgcctgctgatttgttttatccgtttccagagtgcctagcatgagagctggagacacagtaaatagtagttcaaccaattccttaacttaattacaacatcaatatgggaaatatagccaattcctgacaggcagtcaygaaaatatcaaagtgatcattttcattgcttctaagcagtgaaacatattgcttgctctcagaaaatgaattttaagaggaaaacagctaagaaatggcctttctggggcactaaattttatagattatgtcctgaaaaaaaaatgcatggttcaaaactaccagtttagtgtctttttaacagtacagttgagaccatcaaaattatgttacattggtcactcatatgcccatctttgtcttttttttctacaatctggaaacagaattagtaaac

SEQ ID NO: 239527 - DNA, 566 bp, Homo sapiens
tctcttctggagtgatttgtttccccaactttcagtctttgtcaccctaggacatagactcatggatctttgagacttatcccacccctgggtccatctctagtcctctgaagtctagtctgggcccagcacctggactcctattccttgggaggagggttgagtctataggaagctcaaaacagtgttggacctgtataaagtgcttgggatgctggagtcacacagatgtggattcaaatcccttgctgcctcttactggcttatggacttagycatgttctgtagattttccatctttagtttgttaataacgccacattataaaatgagataaagtatgcaaaacaactatacacaatggtgctcagtaaactgttacttcttcgctgttagttatttgctttattaaaggaaaaactttaataaaacaaattcaatttaacagagtttaattcagcaaagaacaattcacagatcagacagtccccagaaccagattagtttcagagggactccagggccaccacacggtcagaaaacatcgatggacagagaaaggaaag

SEQ ID NO: 239528 - DNA, 566 bp, Homo sapiens
tctcttctggagtgatttgtttccccaactttcagtctttgtcaccctaggacatagactcatggatctttgagacttatcccacccctgggtccatctctagtcctctgaagtctagtctgggcccagcacctggactcctattccttgggaggagggttgagtctataggaagctcaaaacagtgttggacctgtataaagtgcttgggatgctggagtcacacagatgtggattcaaatcccttgctgcctcttactggcttatggacttagccatgttctgtagattttccatctttagtttgttaataacgccacattawaaaatgagataaagtatgcaaaacaactatacacaatggtgctcagtaaactgttacttcttcgctgttagttatttgctttattaaaggaaaaactttaataaaacaaattcaatttaacagagtttaattcagcaaagaacaattcacagatcagacagtccccagaaccagattagtttcagagggactccagggccaccacacggtcagaaaacatcgatggacagagaaaggaaag

SEQ ID NO: 239529 - DNA, 403 bp, Homo sapiens
gaattcagagtcacagtggrcttcaaatctccttcttatcacatactagttatttcttaaacagttggagtaagagctagattttctgttatttgtgacgggtgcctgagccgtttgggaaaaggtgaccctagaaggccagaggaattgggaatgcctgggttgcctgtggagagttgagtaacagtctccatgtgctgggcacctgaagaaattactcctgaaggttaatcctaaagtgtttcacttcattatttcccatgggaggagaaactctagctgaacttagcgacctatgtaggacttggggaagggcttagcagacgtttagggtctttgcaatgaatctgaccctataagtcagctgcagcttctcattggtctatacatacctgtctgggta

SEQ ID NO: 239530 - DNA, 403 bp, Homo sapiens
gaattcagagtcacagtggacttcaaatctccttcttatcacatactagttatttcttaaacagttggagtaagagctarattttctgttatttgtgacgggtgcctgagccgtttgggaaaaggtgaccctagaaggccagaggaattgggaatgcctgggttgcctgtggagagttgagtaacagtctccatgtgctgggcacctgaagaaattactcctgaaggttaatcctaaagtgtttcacttcattatttcccatgggaggagaaactctagctgaacttagcgacctatgtaggacttggggaagggcttagcagacgtttagggtctttgcaatgaatctgaccctataagtcagctgcagcttctcattggtctatacatacctgtctgggta

SEQ ID NO: 239531 - DNA, 403 bp, Homo sapiens
gaattcagagtcacagtggacttcaaatctccttcttatcacatactagttatttcttaaacagttggagtaagagctagattttctgttatttgtgacgggtgcctgagccgtttgggaaaaggtgaccctagaaggccagaggaattgggaatgcctgggttgcctgtggagagttgagtaacagtctccatgtgctgggcacctgaagaaattactcctgaaggttaatcctaaagtgtttcacttcattatttcccatgggaggagaaactctagctgaacttmgcgacctatgtaggacttggggaagggcttagcagacgtttagggtctttgcaatgaatctgaccctataagtcagctgcagcttctcattggtctatacatacctgtctgggta

SEQ ID NO: 239532 - DNA, 561 bp, Homo sapiens
tacttcataaacttgttttcatattcatttttcttttcttctttatttctttggattattttgctgttttttttaacattttcagtggggtgcttatttcgtgtactttcactatttattttttcattgatatgagaaccggtgtggttcgaatgatatctcccctccagatctcatattgaaaagtgatccctggaaggtgtttgggccacaggggtgagcccctcataaatgggttggtgccttcctgcactaatgagtgagttctcactctatgagttagcactagatctggtttgaaagatctggcatctctctcttgctccctctctcaccaaatgataccctggctcccctttgccttctgccatgattggaagwttcctgaggccttcccagaagcagatgccagccctatgcttcctgtacagcctgcacaaccatgagccaaatttttttcttttctttataaattatccagtctcaggtattcctttacagcaacacaagcagactaacacaagaacttaaggcttttaactttcatctcaacacagctta

SEQ ID NO: 239533 - DNA, 533 bp, Homo sapiens
cccatttttccccaagtcagaaatcatcagaagccacaagaacaagcccagatccaaaactgaacccaaacaagtatttttgttttctaagayatataaccttgaatatacccccaggcttttcaactatctttcacctatctcttcaaacaaatatgtccacctaatattgttaaccgtttatatatagcttttaatttgttatttcttcaaaccaggaattattttaaatctttttttttccaaaaggatagttttatttttgggatacccttttactttgttgtcatttttattctattgcattataagaaaagtgtgagaccttatggcttctgcttattgggcaatatgcaatataatattgtgtgttgttaaaatttatgcatagtatattatattacatttgccatctactatttgcttttcatgttccttattttgtcctctaaatttatctatctaatgtgtgtatgtctgatttgttttaccttctatttaagatttttatttataaatataccacaggtgat

SEQ ID NO: 239534 - DNA, 533 bp, Homo sapiens
cccatttttccccaagtcagaaatcatcagaagccacaagaacaagcccagatccaaaactgaacccaaacaagtatttttgttttctaagatatataaccttgaatatacccccaggcttttcaactatctttcacctatctcttcaaacaaatatgtccacctaatattgttaaccgtttatatatagcttttaatttgttatttcttcaaaccaggaattattttaaatctttttttttccaaaaggatagttttatttttgggatacccttttactttgttgtcatttttattctattgcattataagaaaagtgtgagaccttatggcttctgcttattgggcaatatgcaatataatattgtgtgttgttaaaatttatgcatagtatattatattacatttgccatctactatttgcttttcatgttccttattttgtcctctaaatttatctatctaatgtgtgtatgtctgatttgttttaccttctatttaakatttttatttataaatataccacaggtgat

SEQ ID NO: 239535 - DNA, 534 bp, Homo sapiens
cagccacaagtattccttttttcttttctttttttttttttttgacacagggtctcattctgtcactgcagtctcaacctcccaggctcaagtgatcctcctgcctcagcctccccacaagcatgtgccaccaygcctggctgattttttaaatttttcttttgtagagacgtggtcttgctatgttgaccaggctggtttcaaactcctggcctcaagtgatcctcatgcctttgcctccaaaagtgctgggattataggcgtgagcaatcaggtattcctttatggcaacacaatggactaagacagtgacatggagcaaactggtcagtcttctcaaaactattttagatgaagctaaaatgacctgtctgagaaggtagatatctttaagtcaaatagtaatgcatactagggcctagttaacatgaccataacttatttataagaatctagtgagttagttgaatcaacctgaacacagaaacttttgattgattggtaagttagcatcctggtactggaagaagagat

SEQ ID NO: 239536 - DNA, 557 bp, Homo sapiens
ggcttccttcctttcagatattggtgctaacatgaagctgaccaaagaattgatgggatctgcacactgtaaagccggtttcaggatggctgagctgacggtcaagaaagaagagaagatatgagccgcctgcattttggggtggtggcagtgaaatttagacttgtgatttggtatgacaatatatggctttttgtgattgttaacattaatgaaaacaagaaaaattagttgctcaaaagttgaaaaatggattcataaactttttattacagtaaggcaaaagaacatattaaaatagaggtaaattagaaatgtcaataagaacccatggacattttttataaggagactttatctgttctgtycctacagtgatttatgctcttggatatttttgctgtcatcctgacaaattctagttggaatatggaacaagcttatttgtagacctagtgcctgtggcttctaaagcaattttctgaaaagagaaaccactgcctgttggaagaatagttgattccatacctcaagctagggaaaaaaaaaatcagaat

SEQ ID NO: 239537 - DNA, 303 bp, Homo sapiens
  misc_feature (1)...(303): n = A,T,C or G
nnnnacttgtttctgttgagttacagattcagctggctatttctcccaatgttagttatttggagaaaaaaacatgatggtaattttggggtaacaaatacaatatttgatgaaagcaaatttattgagggttagacaaactacaagatacttcaggctgcaaagtcaacacgagacttctggcccaaattgtgcagactttaggtccagctgcaaagttcaaaggaagaggccatataagacgattctcrcttttgacaccaactgccagttcaggggtttccccagaacacactcagtttc

SEQ ID NO: 239538 - DNA, 303 bp, Homo sapiens
  misc_feature (1)...(303): n = A,T,C or G
nnnnacttgtttctgttgagttacagattcagctggctatttctcccaatgttagttatttggagaaaaaaacatgatggtaattttggggtaacaaatacaatatttgatgaaagcaaatttattgagggttagacaaactacaagatacttcaggctgcaaagtcaacacgagacttctggcccaaattgtgcagactttaggtccagctgcaaagttcaaaggaagaggccatataagacgattctcgcttytgacaccaactgccagttcaggggtttccccagaacacactcagtttc

SEQ ID NO: 239539 - DNA, 513 bp, Homo sapiens
atagattcagaaaagacatttaacaaaatccaaatgctttaatgattaaaaataaaaataaaaactcaatgaaccaggaatagagaactttctacaccagaaacatggtacctgtgaaaaaccaacarcaaacattcaacttagtggtgaaagaaaggatactttcccgctatggtcagagataagaataagatatatactttgacctcttctagtcaacactgtactaaagattttatgcagggcaaattggcaagtaaagaaataagagtcacccatattgaacaggaagaaataaaactttatgtgcaaataacattcttgtatatagaaaattttaaggaatccactgaacgatagaactagtaaattatttcagcaatattacagcatacaagataaatatacaaaaatcagttgcacacatctacaatgaaaaccccaaaatgaaattaagaaaacaatttacaatagcatcaaaaaaagaaataataattaatttggaaaatgtgg

SEQ ID NO: 239540 - DNA, 513 bp, Homo sapiens
atagattcagaaaagacatttaacaaaatccaaatgctttaatgattaaaaataaaaataaaaactcaatgaaccaggaatagagaactttctacaccagaaacatggtacctgtgaaaaaccaacagcaaacattcaacttagtggtgaaagaaaggatactttcccgctatggtcagagataagaataagatatatactttgacctcttctagtcaacactgtactaaagattttatgcagggcaaattggcaagtaaagaaataagagtcacccatattgaacaggaagaaataaaactttatktgcaaataacattcttgtatatagaaaattttaaggaatccactgaacgatagaactagtaaattatttcagcaatattacagcatacaagataaatatacaaaaatcagttgcacacatctacaatgaaaaccccaaaatgaaattaagaaaacaatttacaatagcatcaaaaaaagaaataataattaatttggaaaatgtgg

SEQ ID NO: 239541 - DNA, 460 bp, Homo sapiens
aaatgaattaaagacatacatgcagagctagaataaagcatatgggaaaatcttcaggattttggatctagaaaagatatagctgtaacaccaaaaacatgagcaacaaaataaaaaatagatatttaaaattccttaaaaattagacattggtgtttcaaaggacaaacaagcaagtcaaaaggcagctcaaaaattgtgagaagatatttgaaaaacacatatctgtatgtctgtatatatatgtaacttgaatatagaaaaattgttttaactcagtaacaaataycccaactcaaaactgataaatgataggaatagatgtgtttcccaagaagatacacgaacggtcaataatcccataaaaagatactcaatagcatcactcatcaggcaactacaaatcaaaaccacagttagatactctatggctagaactgaccactttggaaaatagttt

SEQ ID NO: 239542 - DNA, 430 bp, Homo sapiens
ttaaagacatacatgcagagctagaataaagcatatgggaaaatcttcaggattttggatctagaaaagatatagctgtaacaccaaaaacatgagcaacaaaataaaaaatagatatttaaaattccttaaaaattagacattggtgtttcaaaggacaaacaagcaagtcaaaaggcagctcaaaaattgtgagaagatatttgaaaaacacatatctgtatgtctgtatatatatgtaacttgaatatagaaaaattgttttaactcagtaacaaataccccaactcaaaactgataaatgataggaatagatgtgtttcccaagaagatacacgaacggtcaataatcccataaaaagatactcartagcatcactcatcaggcaactacaaatcaaaaccacagttagatactctatggctagaa

SEQ ID NO: 239543 - DNA, 588 bp, Homo sapiens
gttcacaattttataagtgaatatactctatgtgtatatgtatgtacattcacatctttacgtctataagtagtaaaatattttttccaggagtgggtgtactttaatttcctttgtgtttttctatgtttcaaaattatctacaatgattaaccagaaaagcaataattatcatacataaaatagaactcttaaagaatatctttcctaggctcgggccaagaaaaaaatatcatattatttttggccagagactaccagaattaagaaattaaagagaaggattttgcagaataacctcaaaggtagtctcaaaatccacaattatactaactgaacacagagaaagagagagagtatacatcacctacctatgtcatgtgtttttctttttctctttgtaaaccagattgaaaaggaagatcaggccaaccccaaagaagaagtgaccaaggaggagtttaaactgaatgaacaacctyggctcctggactcattgcttcacaacccatctacccctggatgaagttatctggcttcaaatattatgcaggggcaaacacctgctgatgtggcaactgctgatgc

SEQ ID NO: 239544 - DNA, 555 bp, Homo sapiens
ctttttgtttcacctgcagtcctttcttctccaggatatgcacaggcctccagggtctttcatggctcagggtcagggtggctcaagtgccaacccacatgttgtcctccaaatattcccttctatccctggcatgctgttgctgagctcaacttttaatttttgactttctcctttgtaattaatctctatctgggtttctctctttctctgtgccatttggtttccttaattagttccctgtgccagcccatagtcagagccataattggctctggggaagatccaagttattttctgagtaagatattaggctkccatatgatccagagatgcaaagaaatccctagagagtgtaggagttgtctaaatccatgtgtcagatgtagccaacgaattgtgtcagaagcagagagaaaaggcctgaaaagcagctctctcccactcctcaggcccttgtctccaaccttacatgaggctttttgaacatctcctcctggcccagctggggtgagagcaagtcctcgaaggcactgcctttgagccttgctcagc

SEQ ID NO: 239545 - DNA, 555 bp, Homo sapiens
ctttttgtttcacctgcagtcctttcttctccaggatatgcacaggcctccagggtctttcatggctcagggtcagggtggctcaagtgccaacccacatgttgtcctccaaatattcccttctatccctggcatgctgttgctgagctcaacttttaatttttgactttctcctttgtaattaatctctatctgggtttctctctttctctgtgccatttggtttccttaattagttccctgtgccagcccatagtcagagccataattggctctggggaagatccaagttattttctgagtaagatattaggctgccatatgatccagagatgcaaagaaatccctagagagtgtaggagttgtctaaatccatgtgtcagatgtagccaacgaattrtgtcagaagcagagagaaaaggcctgaaaagcagctctctcccactcctcaggcccttgtctccaaccttacatgaggctttttgaacatctcctcctggcccagctggggtgagagcaagtcctcgaaggcactgcctttgagccttgctcagc

SEQ ID NO: 239546 - DNA, 579 bp, Homo sapiens
aatccatccagcccaggaagccagcctactctcaatatgtcagactctcaaggaagtaagatcactatcactagcaatcagccccggaagcaataacacctttaacaattggctccaaatgggcaggacttgattaataattgacagcttctctaatttttgtccctgcttccaacttaggataggccagagaaagtcaaaaatataaaccccaatcacataggatgcccacttctagtcagcatgcctacagcttctccatgcaaacagcctccattcaggggatacctgaagcttttctttatccaagtctaaagctttcctactcctctgcctgccttgacatctctgccaaaatgcaggtgatgatggctgactccctcgctagargaagctctgaataaatagccttgcttgttctcatttgggtggttttcaattatttccacactgcatttgtaaaatgacagggttggaatagatgattctgggttctagaaactagatgtgttaccactgtctcagggaaccagatgtagctgctgccacaattgccttccattagcgaaaaggaacctg

SEQ ID NO: 239547 - DNA, 557 bp, Homo sapiens
cttgtaggagggcgcattctgctaaaaggagactacagtttttgctaaatccttgacawacccagctcacagaagttgaagaaagggctgagaagggaagagggagggagggaatgagcactgatcatagggcaggcgtgcacgacttcactgactcctcacatttcttccatcctacagcagaggactgaggctctgcttctttgcctgaagtcacacagctggagtgcagcacgccagaagtcacccctgcacctggactccactcctaacagctcgttgggatgtggttggtgtatccctcaattgagacctcagggggcggagcacgtgctcaagcagcttgtgctctggactgaggagagcaggtttcaaaatgcccatggacaggcaggctgccggagtgacggggacactgttcctgcgctctggtgctgggttgactcacatggggggccaagctgcctccccctcatctcacctgtcccagtccccagctgccttcccaagtcccaaccagaaaccagcttggagtgaataacaggctggaccattag

SEQ ID NO: 239548 - DNA, 557 bp, Homo sapiens
cttgtaggagggcgcattctgctaaaaggagactacagtttttgctaaatccttgacaaacccagctcacagaagttgaagaaagggctgagaagggaagagggagggagggaatgagcactgatcatagggcaggcgtgcacgacttcactgactcctcacatttcttccatcctacagcagaggactgaggctctgcttctttgcctgaagtcacacagctggagtgcagcacgccagaagtcacccctgcacctggactccactcctaacagctcgttgggatgtggttggygtatccctcaattgagacctcagggggcggagcacgtgctcaagcagcttgtgctctggactgaggagagcaggtttcaaaatgcccatggacaggcaggctgccggagtgacggggacactgttcctgcgctctggtgctgggttgactcacatggggggccaagctgcctccccctcatctcacctgtcccagtccccagctgccttcccaagtcccaaccagaaaccagcttggagtgaataacaggctggaccattag

SEQ ID NO: 239549 - DNA, 513 bp, Homo sapiens
attgttatgaatttctgtactatggagaaaataaagtgcagtggttaacagcagggactctggcatgtcagtgtctgggttgaaatcccaactttgcaacttactcgctgtgcgactcagcttcctcctgtgtgaaacggggagaccattggaccttccacaatgtgtgtcacaggaccccagtgtgggctaaagttaatayatgtaaaacactcggaggaacactgcaaggaagaagttctgttctaggtgcttcacatatattaacccttagtccacacaaagtcctactattattactatactgcagaaagcccagaagtagcctggactaaagctttttgagaaatcttccacctctcatcttccccatgtttgctgtttctgtgcccccggctgttccatcctatgaggctgagagggaaatgtacctccaatgctacagcccagcgtgagaggcacagtcgcaggacaagttctgagaggccagcattcccaggccactgatgccca

SEQ ID NO: 239550 - DNA, 555 bp, Homo sapiens
ctgccagcagctaacatgctgctctgttttacccgtgcaaatgacaggggcacagaccagctcccagaggaggaggaggacagrctgttccccacctccacccaggccgggagttgaggagaggggctggtcttgcagttggaggaagtgtgttagactcctgtgagaaccacctaattaagtggcttgagatatcggggctgagtggttgaggcgggaccttcgagtggagaccctgagcattctgtagaaggcccctcagctgtgactgttgggagcagagctctgctgcctgccaggggggatgttgttgttgagatgagcaagaaggctcagaatggcttcctcttaccagtttctcctactttcttcacatttaaggtgattattgcaatagttggcttaatctctgccatgtttataactgttttctagtcattatatttgttttcttttttttttgcttctctttttctgcctctctggttttaatcgagcattttatatgatttcatttccttccccaaatattattgagtgcttactgtgtgccag

SEQ ID NO: 239551 - DNA, 595 bp, Homo sapiens
ttgcaggtccttgagcaatcatttctgaataagtggatgtatggtttcattaatccatttttacatgtatttattcattcattcaacaaatagttattgagcactgatataggtactggggatgcagtggttaacatgccaaaggttctgtcctactggggcttacattctactggagcactggagagaaactaataataaatgtatagatagatagatagttagataggggggaagagagggtgtgagagagagggaggagggagagrgtcaggaaatgctatcaggaaaattaaatatggcaagaggagacagtgatagagactatttttcaggagagtcaggaatcttcccttaggacctgacatctgagtggagacctgaatgaacggagaatgaaccttcccagacatttcaggaaatgaacaggaagtgcaaagcccctgaggtaggagagtgccccaggtatgtaaacaaaggagtgtccactagcatggtgatagtagagtggagttcagggagagtgaagtggagtttaaggtaaggggatgggcccttcagggaaagaagggtcaaggagactgggggaatgaca

SEQ ID NO: 239552 - DNA, 418 bp, Homo sapiens
aatagaagcctgttttatctacattgaaaagctgttgtttagtgtagccaccttcatcaatgatcttagctagatcttctggataacttgctgcagcttctacatcaacacttgcacttttatgttatggagatggcttcttcccttaaacctcatgaaccaacttctgctagcttcaaacttttcttctgcagcttcctgacctctctcagccttcctccatagtacagaagagagttagccttgttctgaattaggctttggctttgggaatgtcgtggctggtttgatctatccagaccactcaaactttctccacatcagcaataaagtggttttrctttatgtgttcactggagtagcacttttaattttcttcaagaaatttttctttgcatttaaaacttggctgtttggt

SEQ ID NO: 239553 - DNA, 444 bp, Homo sapiens
tttgttcaagaaggtgccgtacttgtacacagacaactacagaacattgctcgaggagattcaggaagacctaaatcaatggacagacatcttgtgtccatgggttggaagttgtaacatggttaagataaaaatacaactcaaagcaacccacagattcaatacaatcctatcaagaagtggccttttttacaggaatgcctaagaagaacttcatattcctaaaaaatagtgtgtccccccaaaacaaaagcaatcttgaaatgcaagaagaaacattttctattccaaaggtctttaactgctctaagcagtacttggtagtcttcaatatataggctttcayatctctttttttcttcttttgtttctgcacaggatctcactctttcacccaggctggagtacagtggcacaatcacagctcactgcagcatggaattc

SEQ ID NO: 239554 - DNA, 589 bp, Homo sapiens
atagtaaaagaatattcaaataatatgtttaaaaatcagaaaatgagatgcttaaaaaaagtgtaactggtataaaagaaggcaaaaaaggaggaaaaggggaaaataatacagatggggaagggaaaattaatgcaaaaataatatataaatctaacattacttaattacactatatataaatggatgaaatgctcaattaagaagcttgtcagactggatgaaagaaaaatacaactatatgttgtattataagaggcacaccttaagtataaagacacagaaagcatgaaaataaaaggatggaaataggtattccatgcaaatactagccaaaagattaagagaaacttttcatattgattaaggaatagaccaacaggaaagayatcatgattataaatctgtatgcccccaataacacagcttcaaaatctataaggcatgattaatgaatctttaatattttttaaattctaccagaacctctcatgagtaaaaatgtaaaacagtttctcttgtgccaaccaacatgtttagaacatagcattttgccgtgatccttttgaagcatctttctgtaacaaaa

SEQ ID NO: 239555 - DNA, 478 bp, Homo sapiens
cctgcttagtttattatgaaaatattgtcagctttctgcatttcttccattgtcgtgtagagccccaggcccctgacgctcaggcaactttcctgaccagcatgcggattgaactggggtgaagattaattgaatttgaggccccccaagctgaggttggcacacagatgcagarggtttgtcttccttctggggcactgtccccagggagcaggcttccccatctctttccattctaaccatcacatggcgccatttccatctggctttcttagagaggagctgtgttgaaataagctattctgtaatctcagtaaatacagctgatgggtgagttctgccctccaagaggcacattttttgattcccttaaaaataatttcctgatttgaaatgaactgtattttcttgccttaaatcttacccagaattcttccttatgaggagtttttgctgctttttgtgtatttatttccgg

SEQ ID NO: 239556 - DNA, 710 bp, Homo sapiens
gaaaaaacaacaagctagtatttgacagataagttaaaaagaaaccttagtcacagataataagaatctgtgaaagtcactgctggctgttccagactcagggactggtcttttagtgtgcgttgaggctcatgtactttttaaatgtattaatgattttatatataggtatcttatctccaatcttgctctctcctggagatagcaactggaagatttctgagcctgagttttggaatggctgagaagccgatccaatagctcagctaccagccaggcaggctttccaatagtttcaggccagaatctgaaggagacccagaagagcaacctgtaagtctcaaaatctggaagacaaagtagccaattaattcccccaaccataaagttttagagctggccagtatcttagaaatctcctctgctcggcaggttcctacatattcaacagggcatttttattgagccttatccaaggccctcaaggcttcataaaactgtgagttttatagtattcctgctaatcccatacatttattggaactaactctattggcctgacatgaacaagccacttacttttctgggccttagttctccatgggtagggcaagggggttacattacggttgatttttttaaatyccttatttttctgataccctttaatcagtggacagaccaggatttattgcccaagtgtgcattgc

SEQ ID NO: 239557 - DNA, 452 bp, Homo sapiens
ttagaaattatttttctagggtaatacatgtaaccaccaataattatacctactatattcctgattaagattcagaaagctgtttgtttttaaactgtttccaattagctggtttcaaaaaaagtttaatcttataagcactgccggcttgacatagttgtagatctcaagcttctttttggcttttcttatcaaagttgggtcatgatggaaagataactctttcctgttaatgagtcactgtrtctcatgccatcttgcaccaaaagtgcaccctttccacaacttattccaatcagaagaatgaactaggtttcacttccagaacaaagtggcagagcatccaaggacacagatgctgtaaaactgcaaacttagaccacacattttctgtatattttccatatattatggttttaatatcaatgctgaaatggatgagcaattgatca

SEQ ID NO: 239558 - DNA, 452 bp, Homo sapiens
ttagaaattatttttctagggtaatacatgtaaccaccaataattatacctactatattcctgattaagattcagaaagctgtttgtttttaaactgtttccaattagctggtttcaaaaaaagtttaatcttataagcactgccggcttgacatagttgtagatctcaagcttctttttggcttttcttatcaaagttgggtcatgatggaaagataactctttcctgttaatgagtcactgtatctcatgccatcttgcaccaaaagtgcaccctttccacaacttattccaatcagaagaatgaactaggtttcacttccagaacaaagtggcagagcatccaaggacacagatgctgtaaaactgcraacttagaccacacattttctgtatattttccatatattatggttttaatatcaatgctgaaatggatgagcaattgatca

SEQ ID NO: 239559 - DNA, 292 bp, Homo sapiens
aaaggctcctcaaacttaacaagtccaaaatcaaccgatctgcttccctccctaaatctcccatgatcatccctatctcagttaaagataacccccctccttccaggtgcatgaaccaaaccttaaagttacctctgacacttctgtctctatacctcatatgcaattcaggtctacctatgtttagatagccwgaatccaaccagctatcccaacttctaccactggatattaagtagaaagaccagacagaaggctacagcagtgccctcaattctaagaggtttggtct

SEQ ID NO: 239560 - DNA, 508 bp, Homo sapiens
attcactatttgaatgtctaaaaggctcctcaaacttaacaagtccaaaatcaaccgatctgcttccctccctaaatctcccatgatcatccctatctcagttaaagataacccccctccttccaggtgcatgaaccaaaccttaaagttacctctgacacttctgtctctatacctcatatgcaattcaggtctacctatgtttagatagccagaatccaaccagctatcccaacttctaccactggatattaagtagaaagaccagacagaaggctacrgcagtgccctcaattctaagaggtttggtcttccaacttccactccttgttccccttcaatctattctccacatagcatttagggattctattaaaacataagtcagaccctatcactcctctactcaaaagcatcctttcagtggcctccaaggtcctaaacaatctagcccccatttctccatcacagtctcttctcttcttcctcttcactccactccatccac

SEQ ID NO: 239561 - DNA, 483 bp, Homo sapiens
gtgaaatgagtcccagtcgctgaaccatcatgggactgctggtgaccactagattgttgcagctgccttttccaatggacttgcactgaggcccaaagccaagagcccctaaaaacaaatgaatcaggttagctttcatgtcccttacatcagaaatcagtaaatacagacatgtgcacgcttatatcaggacccatctttagagacagtcctcagatcatttttttttttagtattggtgatagcaaaaggctttctccaattccaatgacaaagccataacgctataatagaaacctttccataatcagcactcatacaaaatgtgcttaaattttactccttctatgtagaartgtccagttatattaaaaatcatattttataatatccttacctaaagggttaaggtggtaagtagatgggattgcctgtatcaaaccaagttttttcctagaatagctaatatcttgaatcacccag

SEQ ID NO: 239562 - DNA, 569 bp, Homo sapiens
gggcctgggaatctgaactttatggaagtttccagaagattttcaatgcatgttaaagtctgggagctatttggtgaaagctgctgtggaagagattcctgtctttctcacctgctggggtagtagcggtaacagaagttgtagccaccattagctgagggcayacatgcattgtcatgtgatcctcccagcagccttatgaagtattacttttcctcttacagatgaggaaactgaggttctgacaagttattgaacttgccccatgtcatgcagctaaaaggtagcatagtcaggaccgaagtccagcttgtatatatcacactgtactactctgctagttccttctgcttttctggtgagatgttcccccttgtggctaactcaggtctcccttactgtcctcagaacccagccccttgtcctgaccccaggaggagagagctgtcacctcaactggcaatgggcattgctccagcctgtgttttgatggaaatacacgaagcagaggggacagagattcttgggcagagaatcagtttgttttcattgaaggacctccgtgccaa

SEQ ID NO: 239563 - DNA, 581 bp, Homo sapiens
  misc_feature (1)...(581): n = A,T,C or G
agggcttaagttttcatggccagagagtgaagtcagcttagaagcccatctggttttgttctgcatgtaagggatgagcccctttggggtcgattctaaagcaataggtagtttatcaaaggcctgccttggtggattctggacattattgactttcgtttctctaggcctgggaggctgccaaaagtgagcccagccaagctgaatttctcagcagtttcctcctgagsgacaaatgccctcagggcaaaagcgacttccagctctgggtttttgttgtcttctagatttgggcccagcatttcctcactagcttgtctttgacactgtttaggtgctttttgtatttcatcaaacttttttcctcagtgggagggtcgatcttgacggcctaaattccctcgctaaaaatgggtctctccgccttggcccatgcacagttggctgccctggtgctgtgctagggactggcctacaccgccatgagcttgtaccatgcaggcaggagtggcagcactatcctctggctccaactccaagggcttgacagatcangggctgcctctggttctcatgctttt

SEQ ID NO: 239564 - DNA, 608 bp, Homo sapiens
ttttttctttaaattcttgtgctgtatgcatcctactctattatttccagcttgttttaatttaaaaatactgtaaattgccattcagtaaaacggatgcctcagggagttgtgctgtttattcttgcatcctggaatacctgtgggtgtatgctgctatgttccctcagaggagcycagtcaacaaatacccagagtgcccgctgtgtgcttggcacaaggggtgctgttgccaacacaggatctgccctcatgggactttcagttgagaaataagtgcatagccctgaggagcagaaagagcttggtggagaggacagaattatggggggcagagtttgtaagctcgtaagaacattgccttaaatgaagaccaacatttatgctcagtgttttactaggaaaaagttgaaaactgcctaaatgtctaccagtggaatggctaaaaaaattatggtgttaccatatagtaggatattatgtagctatttaataataaaaaacaataaaggaaaaggcttatgatgaaattttatgtaaaaaatcttgaaaaaaaactatacatagtatggtctcaacatgtaaaacatactcagaaaaaataccag

SEQ ID NO: 239565 - DNA, 608 bp, Homo sapiens
ttttttctttaaattcttgtgctgtatgcatcctactctattatttccagcttgttttaatttaaaaatactgtaaattgccattcagtaaaacggatgcctcagggagttgtgctgtttattcttgcatcctggaatacctgtgggtgtatgctgctatgttccctcagaggagcccagtcaacaaatacccagagtgcccgctgtgtgcttggcacaaggggtgctgttgccaacacaggatctgccctcatgggactttcagttgagaaataagtgcatagccctgaggagcagaaagagcttggtggagaggacagaattatggggggcagagtttgtaagctcgtaagaacattgccttaaatgaagaccaacatttatgctcagtgttttactaggaaaaagttgaaaactgcctaaatgtctamcagtggaatggctaaaaaaattatggtgttaccatatagtaggatattatgtagctatttaataataaaaaacaataaaggaaaaggcttatgatgaaattttatgtaaaaaatcttgaaaaaaaactatacatagtatggtctcaacatgtaaaacatactcagaaaaaataccag

SEQ ID NO: 239566 - DNA, 378 bp, Homo sapiens
ccatgcccatgggtgaaagctgtggtagcaggggtccctgtgacacaayaatagaaagctggacctaatgacctctgggtcttgccactctaaacttccatgactctcatcaatgggttgaaagtacttcattccattaaacctctattaagtgccatttcccctattaatttctaagaaagtaaatctctctgctaaatctaaccactggaaataatcaaattcaccactattctcacagcccagtaggctgctatcttccatcttctttgtcacaatgttgcaagtggcctcagatacttgactttcgccatatgtgtctttccagcctgcttccacttcctagtccatctctcaacaatctcccctccccacctc

SEQ ID NO: 239567 - DNA, 238 bp, Homo sapiens
gactctaagtgtcttaaatcctgccccaactttagattgttattttgaactgttcgtttagacatcatcatttaaaaatcgtattacttcagtaatcactaaaatctgtaaattaacatattcgctttctactttggcttgagtrtcaaattgtgaatctgtcaagagaagtctagttttcaaaatgatattcatttggaagagtgttggtttctgtcatagctatcagtaagcagag

SEQ ID NO: 239568 - DNA, 600 bp, Homo sapiens
agaacttcagatcctggatcaggttcaaaacactcttcatggtcagtatggaagcctttattgggcctcacctttccccagggtgtactgagatctccattaagcccagggtccatacagccggtaggttatctacatatatatttgcttctttctctcttctatgccatcattgttctcataacctcaacaagaaacctgctaaagcccatcaagcaaacttaataaattgacaagtattaattgatcatctataaaagtgcaaggatctcattgttaattagctgattcacaacatgatttgagtcagccatggatkgtgaggctgagtgaatgggtaatgatgagggtccctgagtgtaagtctcatcatcttcagtgatggcaaagccctatctacataaatcatcacagactcagctctattaccaagatgccttgattaagccctgtaaatggcagaatgcagagtccaatccaattagccttacattggtctttattacatatcaggaagcccatgatttccaaaaaacatttgacaaattatactttcttgtcttctgataataaggaaaggaaatgtgaaatgcccatttt

SEQ ID NO: 239569 - DNA, 583 bp, Homo sapiens
atctgtgggaaaaacattcagcaaagggagaggccagtccaccaccatgcagaggcaagaatggtcaggagaatctgcctcacatcttgcagcccttaccctgccttgtcggaagatgataattgtgctgccatttatacggtgactctcttaggggtcaggtagyggtgttaatttgacattttatttctgaatctcacaacacatttttaggcagttatgattgctcccatttcacagatgaggtaactgaggcctgagcatcacagataataagtagaaaagccaggattttggctccagagcctgcatttaaacaattattctatttttattatatggtttttgggaaggcacgtaaactttttgaggatcagtaccctcttaagcaagacagagataagaattctgttttgcaataagcacagagaaagatgttcaggtcagagaaatgcaaatgaaggaatccttgccagagcaatcaggcaagagaaagaaaggacatccaaactggaaaagaagtcaaactatctctgtgtgctgatgatatgattgtaaacctagaaaaccccaaagacttctc

SEQ ID NO: 239570 - DNA, 275 bp, Homo sapiens
agtttccacccttccctctctggtatctgaaccccggcaatgactgatttgtttttatcactataattttgtcatttaaagaatgttacatgaatgggatcagaaattaactgaccttttgagattgccttttccactcagcatcatgctgactttgagatctgctacagtctaaatactgtgtcctctcaaaattcatatgttgaaatcctaaccaccaaggttaggrtggaagtattaagaggcaggcttttggagagtgattagatcacaag

SEQ ID NO: 239571 - DNA, 527 bp, Homo sapiens
gaagcaccataccttaaaaccatcagctcttgtgagaacgcattcactctcatgcgaacaaaaatgggggaaactgccctcatgatccaatcacctaaaaccaggtccttcctgcaacatgtggagattacaatttgaggtgagatttgggtggggacactgagccaaatcgtattatattttaatagagaaaagttaaaagtgccttttaaattattacttttaaaaataattgctgctgagcatggtggcttatgcttgtaatctcagcacattgggaggccaagtcaggcagatcacctgaggtcaggagtttgagaccagcctggccaacatggtgaaaccccgtctctactaaaaatacaaaarttagccaggcatggtggtgtgtgcctgtaatcccagccattcaggaggtagaggcaggagaattgcttgaacccaggaggcagaggttgcagggagccgagatcatttcattacactccagcctggatgacaagagtaaaactcagactcaaaaaaaa

SEQ ID NO: 239572 - DNA, 434 bp, Homo sapiens
tatgtcactcccacctacatgccattggccaaccctacgtgtatggtcctgtctcactccaaaaggactaaagtaactgggacatcagagggcattttttggtgaggaccactgtttctgtaaaagtccattyttcttgtcattaaatatccctttgctccattctaaacttataacacactccgtcctctccaagggattctcatcaaccccaagtcaacccagttggcattctgagctcaaagtcaaggacatctgggtgatgtgcgttgttttctgcagcaaatttggaagtggcatctctaagtctagaaactaataaaccccaaagagttgtctgcccattgggtagtgaacactgtaaagtgacagtacaaggactagatccacaggaaacattacaatgtgggaagaggaagaatgagtgtcacaaa

SEQ ID NO: 239573 - DNA, 545 bp, Homo sapiens
aagacactaagtttgggcttattagttacatctctatttattgattatctactatatgtcagaygctgtgttagaaaattcctatatatcattcctaattattaaaatgatataacttatctctatcttatgtttcagaaagttaagtttcaaagtgtttaaggcagtgttttcaaggcatgcaactgcatagttgaagaattaggatttgaactcacctttgccttaccaagtgctcacgagcacactattttatggagccctaccgagtatgggaaagtggagaagagaggatgatgttttcagggaaaaggtcttttttcaaggactaacaatacctaatgcctcagaaattcactttctcctaatatctgagaaataaaaataaatccaaagcccctaaaacaactgaatggaccttttccctgcccagggaaccccatagtaaccttgaaaactgtattctcagccatgacaggaggcctcattatacaccaacctctcactaactgcctttagacttttttccctaaagaagacagccc

SEQ ID NO: 239574 - DNA, 567 bp, Homo sapiens
tattagtatctatttaatcattcattcagtataatctatttaatagatatctaaaatgttccaggtgttgttctatgtcataaagatgaaaaggctaaaaagatatgatatctactcttaaggaacttaatggtctcatgagagagatagaaaagtaaataggtaagtatacgccaagtsacaaggaaatagcctttgaatttggtgcccagccttggctacacattaaaattaaaataaacttaaattttttacaattaaaatgcaattaaaattacaaaactgaggtctgggccttacccccagaaattctgatctaatgcatctgagcactaccttagcatcattatttaaaaatgaaacaaagcaaaaaacaacttcctatgtgattataacgtgcagttgggccagattcatggggacgtgacctgtgctgtggtacagggcccaacgtttcaaaggactctgcttttgggttttctgctctgctagtgtccttttgaaattcttagtacttgttcaacaagagatccctcattttcattttgcacatgggatagaaattat

SEQ ID NO: 239575 - DNA, 567 bp, Homo sapiens
agactaaataaaaatgtgcatcagcctaaaattaattccccagactattttccctttttctttttttccagctttattgaggtataattcagagataaaaactgcatatatttagggcwtatgaaacaatgtttggtatatatatacattatgaaatgattaacacaatcaaagttgactaacatatccatcacctcacagttaacctcttagtgtgtgtggtaagaatagttaagatctaatctctcaacaggtttcaaatttgcaatatactatcattagcaatactcatcatgttgtagcttagatctccagaacttactcatcacacgactgcaagttagacaatcagtagaatcatgtagggagatttcagacaatactgtctgggtttcatcaacctgaatgtctggatgtgagacctggacatcaatgtttaaaacaaacagaatctatctattgtttacatggtacttggaagtctaaccgtcagatgaccaatactcagtgatacagacaatgagaaatgatggaaaggaaattaccatgttaactaatgttaagaaa

SEQ ID NO: 239576 - DNA, 567 bp, Homo sapiens
agactaaataaaaatgtgcatcagcctaaaattaattccccagactattttccctttttctttttttccagctttattgaggtataattcagagataaaaactgcatatatttagggcttatgaaacaatgtttggtatatatatacattatgaaatgattaacacaatcaaagttgactaacatatccatcacctcacagttaacctcttagtgtgtgtggtaagaatagttaagatctaatctctcaacaggtttcaaatttgcaatatactatcattagcaatactcatcatgttgtagctyagatctccagaacttactcatcacacgactgcaagttagacaatcagtagaatcatgtagggagatttcagacaatactgtctgggtttcatcaacctgaatgtctggatgtgagacctggacatcaatgtttaaaacaaacagaatctatctattgtttacatggtacttggaagtctaaccgtcagatgaccaatactcagtgatacagacaatgagaaatgatggaaaggaaattaccatgttaactaatgttaagaaa

SEQ ID NO: 239577 - DNA, 485 bp, Homo sapiens
aaggaaaacatgatgtgtttgtgatgacggaaatgttacctgtcttttctctaacaatgccaacatcgttgtgataatgtcctattgcttttcatgatattacattgtgggactcttaaaggctatgtattagttacttctcatgctgctatgaagaaataccccagactgggtgtaaagaaaaagagstttaatggactcatagttccacttggctggggaggcttcacaatcatggtggaagacaaaagaagagcaaaacatgtctaacatggcagcaggcaagaaagtatgtgcaggggaactactctttataaaatcatcagatctcatgagacttattcactatcaccagaacagcatgggaaaaatctgcccacatgattcaattacttgccactgggccactggttccctcccatgacacgtggggattatgagagctacaattcaagatgagatttggatgggaacacagctaaacc

SEQ ID NO: 239578 - DNA, 585 bp, Homo sapiens
caaccattctatcaccactgccatataaaacttaactccgttttcctgtttgttcttgtatttaaaaataatgtatttgtaaaacttctctaaaaagtcaatttaaaggtaataggaatattttccaaacaaataaactgaaaaataaaataagtgtaaattcaaactgagattagaggccattttttaaaaataaacatttgtcaaatattccaaggtttctacattttggtaaacgttcacacagacttcattccaatatgaagactgccaagcactcattagacctaatcaggtattacctgaaataattattaataaaaacaacattctcctagttggggttaagcatgtctgacaaatatcaaagcataaagtgtsgatgtaggtgctcagaattatagtcatttaacacacctactaatgtctgaaagattactttctgaacatgtgtattgaaatataacatttgggatcatggtgcggacctctcatgtctaattaatgcctttgttataataagaggcaggctttcagtatccaacacattatatccaaaattatatgcatgttttaagaggtatc

SEQ ID NO: 239579 - DNA, 668 bp, Homo sapiens
caaccaaaagtacatgctcatgggttagatatgagaggtgagcaacagcattgatggcattgccctctgttagaatggagaataatcatggaatgatgaaactgggaacaaataaagactccattttgaatttactggattttaagtgactatgagacattctcaatataaaaattattagagagatgtttcacattattttagttttgwaatccaacgtaaattttacactgaaaacatatctcaattcagacactaaattttcatttaagacgcttaagttgtattgattgcataaacctaaaaagctaaaaaaaaatcagttaaaatactagttccatatacccaagttgtttcaaacaaatttccaataattgaactaagtactaaaagcaattttcctgtaatatacacaacatgttggtaaaacttgttcatctttcttaactttttaagaattaatttggcttcaaagcacatattcttgttcaaaagttatgtctgtttatctttccaagtgaagtaatttactaatgcttacatcaactaagaattattaacactgaagtcaaaggaaaattgtataaactgaaaatctctaaatttatcaatctcaaaacaaagtttttaaattttacatgtagtttttgaaactacaagtttgctat

SEQ ID NO: 239580 - DNA, 565 bp, Homo sapiens
ttaaataaatctgtattgaktgaggaatgtaggatttcacgccacaacctggtctatgcctttaataattatgttaaactattatattgactcaacaataaattatatccattagtaatactgtttcccaattctttggcttttattaaattgtttttgtaataaattgaaatgaaccataagctcatagtgttctgaaaacagtcaagggacctacaaagcaaactaatataatgtgtagcttctaattagctgtaattacaatacttaataaatgaaacacctacctttagagataatcaaatcttttcactgaactcacttgtgctatggtgtatacaataggctaatgacaatcagaagcataattcaaatactatcaggaaatgtaaaagtacattttatcgccaaccctgaactattctttctctaaatagatttaagatggaaactgggtatagaaaaatgaattatataaccatccataatttaactcaaattaagaaagcataccttatttttacagaacacactcttcatgtacatacacacacagacacattca

SEQ ID NO: 239581 - DNA, 565 bp, Homo sapiens
ttaaataaatctgtattgagtgaggaatgtaggatttcacgccacaacytggtctatgcctttaataattatgttaaactattatattgactcaacaataaattatatccattagtaatactgtttcccaattctttggcttttattaaattgtttttgtaataaattgaaatgaaccataagctcatagtgttctgaaaacagtcaagggacctacaaagcaaactaatataatgtgtagcttctaattagctgtaattacaatacttaataaatgaaacacctacctttagagataatcaaatcttttcactgaactcacttgtgctatggtgtatacaataggctaatgacaatcagaagcataattcaaatactatcaggaaatgtaaaagtacattttatcgccaaccctgaactattctttctctaaatagatttaagatggaaactgggtatagaaaaatgaattatataaccatccataatttaactcaaattaagaaagcataccttatttttacagaacacactcttcatgtacatacacacacagacacattca

SEQ ID NO: 239582 - DNA, 565 bp, Homo sapiens
ttaaataaatctgtattgagtgaggaatgtaggatttcacgccacaacctggtctatgcctttaataattatgttaaactattatattgactcaacaataaattatatccattagtaatrctgtttcccaattctttggcttttattaaattgtttttgtaataaattgaaatgaaccataagctcatagtgttctgaaaacagtcaagggacctacaaagcaaactaatataatgtgtagcttctaattagctgtaattacaatacttaataaatgaaacacctacctttagagataatcaaatcttttcactgaactcacttgtgctatggtgtatacaataggctaatgacaatcagaagcataattcaaatactatcaggaaatgtaaaagtacattttatcgccaaccctgaactattctttctctaaatagatttaagatggaaactgggtatagaaaaatgaattatataaccatccataatttaactcaaattaagaaagcataccttatttttacagaacacactcttcatgtacatacacacacagacacattca

SEQ ID NO: 239583 - DNA, 565 bp, Homo sapiens
ttaaataaatctgtattgagtgaggaatgtaggatttcacgccacaacctggtctatgcctttaataattatgttaaactattatattgactcaacaataaattatatccattagtaatactgtttcccaattctttggcttttattaaattgtttttgtaataaattgaaatgaaccataagctcatagtgttctgaaaacagtcaagggacctacaaagcaaactaatataatgtgtagcttctaattagctgtaattacaatacttaataaatgaaacacctacctttagagataatcaaatcttttcastgaactcacttgtgctatggtgtatacaataggctaatgacaatcagaagcataattcaaatactatcaggaaatgtaaaagtacattttatcgccaaccctgaactattctttctctaaatagatttaagatggaaactgggtatagaaaaatgaattatataaccatccataatttaactcaaattaagaaagcataccttatttttacagaacacactcttcatgtacatacacacacagacacattca

SEQ ID NO: 239584 - DNA, 531 bp, Homo sapiens
agtggcagggcctcatgcacatgttttccaaggcaattaaaacattgtttctcagattttacacttcagtcaagcatacaacttctttattcagttaaagcgcccaaagctgcgttaatacatattgcaaatgtagcaattagaaaaggattaaacttctgtcccttagatattttagagaggctactttcgaagataaaagttgctgctccttccaagtttaaatacgctaaaaacctaatcacttcttataattccyaaaatggtgttattgctttctttttaaccattgaattcactctggcagagcaagagtaataaaactcatcatattctaattttcagacagcttgataaacccaatgttctcactatagataaagtgtaatgaagcactttctttcccataggaaagtctttgactcatatgctttcatgccaactagccttcacatctgctgtttcaccattgatggctttaacttggcatgctgaactagtgtctgatgaagcagctttactcaaaggcac

SEQ ID NO: 239585 - DNA, 640 bp, Homo sapiens
aaagcaatatgtaaattagaattgtgtactaatttacttttgccagttaaaatagcgctttttttcacaacaaggaaaggagcagaagtagttcactaaatattatagggtagtaaaataagctcaggcaagaaaactacatgaacacaaatctcaaagctcttgctcagaacccaattcaatataaatctatagagtaggccaattaataccatgtccttaatatcacttaaaagtcatctcttcttaattcagtctccattaggtaaacacaaagtctcatgtacaattctcccaagtctcaaatatggacctttatgctttcaatccccatgatagaaaaacctacgataaaggtttacaaagaaaagrtgaatgttcattcctcaggtccctgagaacatgtattttctcaattttcacttagacatacaaaataaaatacaactctgagaaacacaagtgctcaaaagggaaaagactccctattcaactcaaaataaataaaaatgacatgagaaaaagctatgtggctagttaatagcacctaaataaacaagccaactcaagtgagtagctatttacgcatcctccctatacttactgaagtaccataaagaatttctaattgtcatattgt

SEQ ID NO: 239586 - DNA, 640 bp, Homo sapiens
aaagcaatatgtaaattagaattgtgtactaatttacttttgccagttaaaatagcgctttttttcacaacaaggaaaggagcagaagtagttcactaaatattatagggtagtaaaataagctcaggcaagaaaactacatgaacacaaatctcaaagctcttgctcagaacccaattcaatataaatctatagagtaggccaattaataccatgtccttaatatcacttaaaagtcatctcttcttaattcagtctccattaggtaaacacaaagtctcatgtacaattctcccaagtctcaaatatggacctttatgctttcaatccccatgatagaaaaacctacgataaaggtttacaaagaaaaggtgaatgttcattcctcaggtccctgagaacatgtattttctcaattttcacttagacatacaaaataaaatacawctctgagaaacacaagtgctcaaaagggaaaagactccctattcaactcaaaataaataaaaatgacatgagaaaaagctatgtggctagttaatagcacctaaataaacaagccaactcaagtgagtagctatttacgcatcctccctatacttactgaagtaccataaagaatttctaattgtcatattgt

SEQ ID NO: 239587 - DNA, 640 bp, Homo sapiens
aaagcaatatgtaaattagaattgtgtactaatttacttttgccagttaaaatagcgctttttttcacaacaaggaaaggagcagaagtagttcactaaatattatagggtagtaaaataagctcaggcaagaaaactacatgaacacaaatctcaaagctcttgctcagaacccaattcaatataaatctatagagtaggccaattaataccatgtccttaatatcacttaaaagtcatctcttcttaattcagtctccattaggtaaacacaaagtctcatgtacaattctcccaagtctcaaatatggacctttatgctttcaatccccatgatagaaaaacctacgataaaggtttacaaagaaaaggtgaatgttcattcctcaggtccctgagaacatgtattttctcaattttcacttagacatacaaaataaaatacaactctgagaaacacaagtgctcaaaagggaaaagactccctattcaactcaaaataaataaaaatgacatgagaaaaagctatgtggctagttaatagcacctaaataaacaagccaactcaagtgagtagctatttacrcatcctccctatacttactgaagtaccataaagaatttctaattgtcatattgt

SEQ ID NO: 239588 - DNA, 418 bp, Homo sapiens
tcctcaaatctactttttaaccatttttgaacttctaataccattattattgaatgatgccttccctttgaacttctgacatgcacccttgtttctcactctctgccccactaacagataatctgtcatggctctgtttcagctctcaaaactttccttcttccttaatcacttaacacactcatgactttaacttctatactgatgattacaaaactctcttaatttacagccataaattctccctcaatgratttccatccatctctgtaacttcctacctaggtagctcaccattacctcatgcttaaaatgtttaaaattgaaccaaataacttcccccatattatctctgtttcccaatttctccttttctaaattgatgtgtcacttctctgagctcttgagacttaaagtg

SEQ ID NO: 239589 - DNA, 568 bp, Homo sapiens
cttgtcttgcttgacatctcagcaggacgtaacattcttgatcacaacacttttcttacaacaagcccttttcttggtttccctgatatcacactccacattacctatgtatttggctgctctctcaatctccttttttgggttattttcctattaaatcttggtgaattaagtgccacaggtcactgactaaatacctgtctcktcaccctacacttccccaggtgatttcatctattcccaagatttagattacttgagttaacaacaccaaacctaatctctctaggcccatattcttatattcttactagatatctctgtgtggagggctcataggtatttcaaagttaacagaccccaaactgaaactacgatttttctctactatttttctttttgtggttctataactcactctgtggaatcaaaaaatcatccttgactccttcctttttttgtgcttcctatataaaagaaagaaacaaaataatcagcactattcttttcatgtttgaatatttctatataagattttttgtcttcttgatcctaccttaccctataa

SEQ ID NO: 239590 - DNA, 575 bp, Homo sapiens
gctcataggtatttcaaagttaacagaccccaaactgaaactacgatttttctctactatktttctttttgtggttctataactcactctgtggaatcaaaaaatcatccttgactccttcctttttttgtgcttcctatataaaagaaagaaacaaaataatcagcactattcttttcatgtttgaatatttctatataagattttttgtcttcttgatcctaccttaccctataatttacccttaatttttacctaactctatttttatttcaagtctcagttaaattcaattcgatttttaaataaaacctatcttgagcttcccagtttgattgattaactgttttatatatgcccccttatatattgctgtgatagttagttttatgtatcaatctggctaggttagtacccagctatttaatcaaacacaaatctaggtgatgcttgaagctattttgtatgtgtggctaacatctacaatcaactgactttaagtaaaggagattgtccttgatgatgtggatgagcttcgaccaatcagttgaaaggcattgagagcaaaatctaag

SEQ ID NO: 239591 - DNA, 556 bp, Homo sapiens
ttactctctttctcttccctggatcttttttatggtaacattaacttataggtcctaaaatttttatataaatatagcattataggtaaatatatttatctgtaatgtactaaaaagataataatcaaggaataggtaaattgactacaacaaaaatctttcctccttcaagttagcttagatataaacattcatatattatctaagctgcatgaaggataataaggaaaaagttcmataaatactagtatgtaaaaatattaggctggtggtttttgcctaattttttttttgcctaaaaataattttgcctaaaaaaataattgtggtttttgccattaattttaatgtacttttggcaaaaccgtaattatttttgcaccaacttactagctgcacataataaaatgactcaacaatttcttattaaatctagtccagcttcaaatttttatttatattttaaaacaaccaaatacaatataataaataaaattttcttctaaatttaatctttactaaatgacagctcggacagaatgatgtaggactgaaa

SEQ ID NO: 239592 - DNA, 612 bp, Homo sapiens
aaatacataatcttaatgaaaaataaatatgatttagtcttaaatggataactaaaaacaataaaataatcaactttagaatttatgacttctaacttccacttaaaatttatatttgttataggaaattaacttcatcaataagctgattacagatccttatgacttattcttattacttaaagttataatggtatactgtattttagtttatttaatgtagccaagattattccttattgttatgagattattattttatgagattgttatgggattacaaattattataatcatctattgatcattttataataaratttctgaagaaaagtcataatattgtttgccatgaattcaggcaattttacaaatgtcaaagtaaaataaaaactataattagacattcaaaactggattctattttttaatatacaatggctatcatgtagttccattcactggctatcaatatatattttttttctaaaacacccaattgtccaatcaaattaagagtggctttaaattgagaatagtaaggaaaatggctcacatataatattacataaaaaaacataggtttgtcttgtaaaaaattatttcttacca

SEQ ID NO: 239593 - DNA, 612 bp, Homo sapiens
aaatacataatcttaatgaaaaataaatatgatttagtcttaaatggataactaaaaacaataaaataatcaactttagaatttatgacttctaacttccacttaaaatttatatttgttataggaaattaacttcatcaataagctgattacagatccttatgacttattcttattacttaaagttataatggtatactgtattttagtttatttaatgtagccaagattattccttattgttatgagattattattttatgagattgttatgggattacaaattattataatcatctattgatcattttataataagatttctgaagaaaagtcataatattgtttgccatgaattcaggcaattttacaaatgtcaaagtaaaataaaaactataattagacattcaaaactggattctattttttaatatacaatggctatcatgtagttccattcactggctatcaatatayattttttttctaaaacacccaattgtccaatcaaattaagagtggctttaaattgagaatagtaaggaaaatggctcacatataatattacataaaaaaacataggtttgtcttgtaaaaaattatttcttacca

SEQ ID NO: 239594 - DNA, 574 bp, Homo sapiens
tcacccaaatcttacattgaattttaatctgcacgtgttgaaggtcgggcttggygggaggtgattgcatcatggaggtggtttctgatggtttagcaccagtcttctactgctgtctcctgatagagttctcaggagacctggttgtttaaaagtgtgtagcacttctcccttcccccttccccctctcccatgctctgccacgtgaggagggtgcttgcttcccctctccttccgccaggattgtaagtttcctgaggcttccatagccatgcttcctatacagcttacagaactgtaagtcaattgaacctcttttcttcataaattacccagtctcaggtagttctttatagcagtgtgagaatggactaatgcagtggtattttaagaaatatagacttcaggtaaaaaatgaacataaagtagtagtttgtctgtgtttggagggttgactacacagcacaatttatgtatgtgttacttcattctgtaacctcctttctcttaggcacatgaaaagcaaaattttgtcacatacaaaccatataagcgaatatgctataaagtggta

SEQ ID NO: 239595 - DNA, 574 bp, Homo sapiens
tcacccaaatcttacattgaattttaatctgcacgtgttgaaggtcgggcttggcgggaggtgattgcatcatggaggtggtttctgatggtttagcaccagtcttctactgctgtctcctgatagagttctcaggagacctggttgtttaaaagtgtgtagcacttctcccttcccccttccccctctcccatgctctgccacgtgaggagggtgcttgcttcccctctccttccgccaggattgtaagtttcctgaggcttccatagccatgcttcctatacagcttacagaactgtaagtcaattgaacctcttttcttcataaattacccagtctcaggtagttctttatagcagtgtgagaatggactaatgcagtggtattttaagaaatatagacttcaggtaaaaaatgaacataaagtagtagtttgtctgtgtttggagggttgactacacagcacaatttatgtatgtgttacttcattctgtaacctcctttctcttaggcacatgaaaagcaaaattttgtcacatacaaaccatataagygaatatgctataaagtggta

SEQ ID NO: 239596 - DNA, 644 bp, Homo sapiens
ctttgctgtgtttgcagccctggactgggaaggtggaaggggaaagaaaaatgaatatcatagtaatagctagcattaatgtgtctattatgagggaaaaatgtgctatattatttggaagattttcacctctattgatactcactacaaccctacaaaatttgtagtgtgatttcctttttacaaatgaaaaacaaaaccagaatagctaaccygaaacctgagatcttaaggaaagtatggctccaaagatgacttaacaatgctcatttcccactatttttctgtacaaccattcaaatatatcatatccatttctgttgttttactggctttgttatttccctgcccaaaatgatattcttttttctctagtattcgaattctataagacacatctctggttcttttcctcctgaatactctatccacattaatttctcttcagtgaatttgtatataatttataaacagaatcatgtaatttaacatgtagcaataatttatgttgtgttatttctggttatttcacatataagtcaaccaataagatatgagaaatttgaatgcacatattattgtaactgtattgtctcagttcctgtgagagtaaaaacacttgaaagccggcaggcatacccttc

SEQ ID NO: 239597 - DNA, 458 bp, Homo sapiens
tacattcatcacagtgctgttcacaatagcaaagacatagaatcaacacagatgccaatcaatggtggaacrgataaagaaaatatggtgcatatataccttggaatactatgatgccaaaaaaagaacaaaatcatgtcctttgcagcaacatgcatgcagctggaggccataatcctcggtgaattaatgcaagaacagaaggccaaatactgtatgttctcactgatgactgagagctaaactttgagtatacatggtcataaagatgggaataatagacaatgtgaactactagaaggggaaggaatggagacaggcaatgggtgaaaaactacctattggacactattctcaatacctgggtgacaggatcataccccaaacttcagttacaattaaaactatttgtatctaccactgaacaaatgtcacaaatatacccatgtaacagatct

SEQ ID NO: 239598 - DNA, 452 bp, Homo sapiens
agcttaagaatacctaattcttctctctgtactttcgatttgtaaaagcactaaaccccttactttattcccataagtaaaaggtcaaataaactgcaatatttttcttccacataaaatgctgagagattagccttctcaccctccatctcccagcatgggtaaagatccacatgctggcacattctcagygtttaatgcctaactaagcaggcaagctatttagttttgctggtagtaagcactggagctcagagtagtaaaataataaaagttaaaaggatgacaaggttggaatagcaacaggcatgaagacataggaagaaatgcctgtgagacaagttctagcattcctaacaccagtctcagagaaggcacaatcacatattatttttgttactcgtctgtattttttaatagcaatttccaaagacagaggtgaaaagaaaaac

SEQ ID NO: 239599 - DNA, 550 bp, Homo sapiens
gaattctactgcatctcataaaaaaaacacacacaaaattataaaacaatcactttataaagtaaaaaacaaaaatttcatatatactgtggtcagcatttgtcattccttgagcagtcagcaacctacatcccttctttgggtaacagcaccctgacttgcttytgaaaactcagcactccttatctctcccaaggctggataacatgacttgggactggctaatcagagtatcatacttccctatttcagtgacttgttcagccatggacatgatatccagtcagggccagagagacccactgacaccggtgataggggcctctcttccactggactgacagctacaaggatgtaggctgaaggtctggcagccaccttgcgaccatgaggtaagcctgcctgaaaatggagttgtcacagaagacatgaattgagagatagaaataaacagcctatgagcccctcttagcagccttgccctaatgccagtttcacctccctggactcctcaggcaccagaaccaacaatgccaatgacaattggagt

SEQ ID NO: 239600 - DNA, 550 bp, Homo sapiens
gaattctactgcatctcataaaaaaaacacacacaaaattataaaacaatcactttataaagtaaaaaacaaaaatttcatatatactgtggtcagcatttgtcattccttgagcagtcagcaacctacatcccttctttgggtaacagcaccctgacttgcttctgaaaactcagcactccttatctctcccaaggctggataacatgacttgggactggctaatcagagtatcatacttccctatttcagtgacttgttcagccatggacatgatatccagtcagggccagagagacccactgacaccggtgataggggcctctyttccactggactgacagctacaaggatgtaggctgaaggtctggcagccaccttgcgaccatgaggtaagcctgcctgaaaatggagttgtcacagaagacatgaattgagagatagaaataaacagcctatgagcccctcttagcagccttgccctaatgccagtttcacctccctggactcctcaggcaccagaaccaacaatgccaatgacaattggagt

SEQ ID NO: 239601 - DNA, 469 bp, Homo sapiens
gctgcctcccaaatctatttcaagcatctcagtctatactaggatccatctgagactgaagggattatagcaatgcggggcattttctttagagcataagaccaaggctaacttctgcatggtgaggaagaactgcaatgaacaagtactcaggaataaatggaaggagattttccagggytccttctgtaccagcaccccttatttttccactcactccttttaatacttcaacaatcctctgacatcactaggacttccactgactccacctactggaattgcccaccagtctccacagcttcatttctttcacatgaaacttatattccatggtacagcattatggttacttccttatgagatgatataccatcttcatggactggaaaactggataaatatgtcaagtcttcctcaaattgatatatggttcaatgtaacaccaatcaaaatcaattatcctcaa

SEQ ID NO: 239602 - DNA, 589 bp, Homo sapiens
ttggtcttgaactagtttttgatacaggctaaattaatggtatcacatatcctgttcaccaacaaaataccaaaaagaaattgcctcaagcatgctgaacwtggaaaccacaactctaagattacagccatatcatgctggcccagtgtagtggattccacaaggacattccttgtatattttatttgttccgtaaaaggaaagaatgtgtgcattccaattatttccctcaagtcctctgctggccagaagactattctaatattctatagatctattacattatctttatttggaaatagggaggagtaatttctgtaaacttgtcttgcaaatttctaggagagtagggagaaaatcttgccaaaactgcctgagacacaccttttggctcatatttgaggagacagtactggtgttactcagggtgacacctattccccaaggtgaattaccttcatcaggcttgcagtgcagttatttctcatttcccatcacgtaatatgttcttagggactcttcactgtgctgcaagaaaataagctgttgagatttaatgcacaaacttttgaaaacaaaaaccaaacac

SEQ ID NO: 239603 - DNA, 403 bp, Homo sapiens
gagcttcagtgctgtgtgctcttggcctccacactgggggtgccaccaactcccactgtccagggcttctggtggactctccgaggcaccgatgtagaaacttacccattcagtgcaccaagagcagcytcacatggtgtgggccgacatgaagagctgccagatccaacaggtaaaaatcctgaggcattgccagctcgatggggtcagagagtcctctttctattatgactcagatgtgaagggaagatgccaagggccctaaacatcacagggccttgcgtggcatcaaacagatattaaataaatatttgttaaatgaatgaacaaatattcacagcatgtgccaccctggacttgtagtgccatggtcgggtgaaagtgattttacttcaggagagga

SEQ ID NO: 239604 - DNA, 403 bp, Homo sapiens
gagcttcagtgctgtgtgctcttggcctccacactgggggtgccaccaactcccactgtccagggcttctggtggactctccgaggcaccgatgtagaaacttacccattcagtgcaccaagagcagcctcacatggtgtgggccgacatgaagagctgccagatccaacaggtaaaaatcctgaggcattgccagctcgatggggtcagagagtcctctttctattatgactcagatgtgaagggaagatgccaagggccctaaacatcacagggccttgcstggcatcaaacagatattaaataaatatttgttaaatgaatgaacaaatattcacagcatgtgccaccctggacttgtagtgccatggtcgggtgaaagtgattttacttcaggagagga

SEQ ID NO: 239605 - DNA, 403 bp, Homo sapiens
gagcttcagtgctgtgtgctcttggcctccacactgggggtgccaccaactcccactgtccagggcttctggtggactctccgaggcaccgatgtagaaacttacccattcagtgcaccaagagcagcctcacatggtgtgggccgacatgaagagctgccagatccaacaggtaaaaatcctgaggcattgccagctcgatggggtcagagagtcctctttctattatgactcagatgtgaagggaagatgccaagggccctaaacatcacagggccttgcgtggcatcaaacagatattaaataaatatwtgttaaatgaatgaacaaatattcacagcatgtgccaccctggacttgtagtgccatggtcgggtgaaagtgattttacttcaggagagga

SEQ ID NO: 239606 - DNA, 403 bp, Homo sapiens
gagcttcagtgctgtgtgctcttggcctccacactgggggtgccaccaactcccactgtccagggcttctggtggactctccgaggcaccgatgtagaaacttacccattcagtgcaccaagagcagcctcacatggtgtgggccgacatgaagagctgccagatccaacaggtaaaaatcctgaggcattgccagctcgatggggtcagagagtcctctttctattatgactcagatgtgaagggaagatgccaagggccctaaacatcacagggccttgcgtggcatcaaacagatattaaataaatatttgttaaatgaatgaacaaatattcacagcrtgtgccaccctggacttgtagtgccatggtcgggtgaaagtgattttacttcaggagagga

SEQ ID NO: 239607 - DNA, 566 bp, Homo sapiens
tcaaagcaggcttccttgagaatgtaatgtttcagatgagagctgaagaatggaaaggaataaaccaaatgaagaggggagaatgaatattccagcagtggaaacggtgtattcacaggcctcgtggagggagggggcaggcctgcmtgtttgaaggaggcctggctgagttcacttgctggggtcactcctgccactgggccaccccgggcagcagctactaacctcttttactgcaggtggtcccacgcagactccagacagggttagactcagaggactgcctccctggatgtagcagagaatgtttttacaaaggctctcctttcccacctcggtgggatggtaggtcacttcaaaagaaacctccatgcctgaggtaatatagccttcttctgggctaatggagaaatgaggctcaaattttttgatgtcccatttaaaccttttccaagacaaaagaagacaagaaagagagtttatggatgttgtaagggtgtcctcaatgctactgagaacaagagactgcctgggctgaggttcacctcccttgagtctatcctagc

SEQ ID NO: 239608 - DNA, 566 bp, Homo sapiens
tcaaagcaggcttccttgagaatgtaatgtttcagatgagagctgaagaatggaaaggaataaaccaaatgaagaggggagaatgaatattccagcagtggaaacggtgtattcacaggcctcgtggagggagggggcaggcctgcatgtttgaaggaggcctggctgagttcacttgctggggtcactcctgccactgggccaccccgggcagcagctactaacctcttttacygcaggtggtcccacgcagactccagacagggttagactcagaggactgcctccctggatgtagcagagaatgtttttacaaaggctctcctttcccacctcggtgggatggtaggtcacttcaaaagaaacctccatgcctgaggtaatatagccttcttctgggctaatggagaaatgaggctcaaattttttgatgtcccatttaaaccttttccaagacaaaagaagacaagaaagagagtttatggatgttgtaagggtgtcctcaatgctactgagaacaagagactgcctgggctgaggttcacctcccttgagtctatcctagc

SEQ ID NO: 239609 - DNA, 585 bp, Homo sapiens
tcaaagcaggcttccttgagaatgtaatgtttcagatgagagctgaagaatggaaaggaataaaccaaatgaagaggggagaatgaatattccagcagtggaaacggtgtattcacaggcctcgtggagggagggggcaggcctgcatgtttgaaggaggcctggctgagttcacttgctggggtcactcctgccactgggccaccccgggcagcagctactaacctcttttactgcaggtggtcccacgcagactccagacagggttagactcagaggactgcctccctggatgtagcagagaatgtttttacaaaggctctcctttcccacctcggtgggatggtaggtcacttcaaaagaaacctccatgcctgaggtaatatagccttcttctgggctaatggagaaatgaggctcaaattttttgatgtcccatttaaaccttttccaagacaaaagaagamaagaaagagagtttatggatgttgtaagggtgtcctcaatgctactgagaacaagagactgcctgggctgaggttcacctcccttgagtctatcctagcacctatgaggagaaagatc

SEQ ID NO: 239610 - DNA, 585 bp, Homo sapiens
tcaaagcaggcttccttgagaatgtaatgtttcagatgagagctgaagaatggaaaggaataaaccaaatgaagaggggagaatgaatattccagcagtggaaacggtgtattcacaggcctcgtggagggagggggcaggcctgcatgtttgaaggaggcctggctgagttcacttgctggggtcactcctgccactgggccaccccgggcagcagctactaacctcttttactgcaggtggtcccacgcagactccagacagggttagactcagaggactgcctccctggatgtagcagagaatgtttttacaaaggctctcctttcccacctcggtgggatggtaggtcacttcaaaagaaacctccatgcctgaggtaatatagccttcttctgggctaatggagaaatgaggctcaaattttttgatgtcccatttaaaccttttccaagacaaaagaagacaagaaagagagtttatggatgttgtaagggtgtcctcaatgctactgagaacaagagactgcctrggctgaggttcacctcccttgagtctatcctagcacctatgaggagaaagatc

SEQ ID NO: 239611 - DNA, 419 bp, Homo sapiens
gaagactcaattttgttagcatattacatcaacacaattctgattaatatttctagtaggagattttagagaaatttgaaagctagtttcaaaatgtatttgaaaatcaaagaacctagaataagcaagtcggtcttgaagaagcaataagttggaggacttgctctgctagatttcaaacctgattttaaagctacartaatttaaaaacagtagtaatggtgtaagtattcataaatatatcaaagtaaaagaatacagattcaaacaatatgcccacatatgtacagttattgattttttttagtagaatcttttttattcataaaaaatccatcaaaacaaaaaagttttccagccacacacaggaggggtatgggtgggggaaggtgtctgtccatctatccctggcccccagc

SEQ ID NO: 239612 - DNA, 617 bp, Homo sapiens
ctggcttaaaacatcattttattatgtctcactatttttttggtcaatagtttgaatagggctcagctgggtgattcctttgttccatgtggagtcagcagagataacttgatgatacccagctgccaaatgagctggtctggagattccaagatggcttcatttacaaatttagtgatggggatggctgaaaagctggtcttgkctgggactggcaactagagtgcctacatgtagcctttccaacatgatattagggtagtcagggactcagtgttccaagagaacttaagtggaagttgttggttcttaaggcctggatccaacaactggcccagcatcactgctgccgttttctgttgatcaaagcaagtcatggagcccacccagatttgaggggagggaatatctgccctacctcttaatggaagggtatcagagaatttgtagcaacctttaatctgtcacagtgcacattttggccattgattatgttccttgcctatgggaaaatacattcaccctttctaaaacccctagactctcaactcctgatggcatcagaacacaggcagcatcaagatcaggctcaagatgcaggattttatcatccaaat

SEQ ID NO: 239613 - DNA, 403 bp, Homo sapiens
  misc_feature (1)...(403): n = A,T,C or G
cccacggcctgtcctctgagactcttccagaatcctgttgttctgacagcagggagggcaaatccatgcagcatctcccgccatgacccccagcctgtagaggagaggcgccacaggacctttacakgcacgccgctgttcccctcacccatgcatttcttaatgccttggtgaggagaatgcctctgggtcttccttggtgggagctaaaggaacaaaggtaaataatgctatgggacccactgagaattggggctgtggaagagtggccactgaagtaatagacagatgcagctattgccagatactcagtgccagagcagggagggagagggaagaaatacggacctcaccttcctctcacttccagatncatcaaggtgcccacattgctaaacctaac

SEQ ID NO: 239614 - DNA, 403 bp, Homo sapiens
  misc_feature (1)...(403): n = A,T,C or G
cccacggcctgtcctctgagactcttccagaatcctgttgttctgacagcagggagggcaaatccatgcagcatctcccgccatgacccccagcctgtagaggagaggcgccacaggacctttacaggcaygccgctgttcccctcacccatgcatttcttaatgccttggtgaggagaatgcctctgggtcttccttggtgggagctaaaggaacaaaggtaaataatgctatgggacccactgagaattggggctgtggaagagtggccactgaagtaatagacagatgcagctattgccagatactcagtgccagagcagggagggagagggaagaaatacggacctcaccttcctctcacttccagatncatcaaggtgcccacattgctaaacctaac

SEQ ID NO: 239615 - DNA, 403 bp, Homo sapiens
  misc_feature (1)...(403): n = A,T,C or G
cccacggcctgtcctctgagactcttccagaatcctgttgttctgacagcagggagggcaaatccatgcagcatctcccgccatgacccccagcctgtagaggagaggcgccacaggacctttacaggcacgccgctgttcccctcacccatgcatttcttaatgccttggtgaggagaatgcctctgggtcttccttggtgggagctaaaggaacaaaggtaaataatgctatgggacccactgagaattggggctgtggaagagtggccactgaagtaatagacagatgcagctattgycagatactcagtgccagagcagggagggagagggaagaaatacggacctcaccttcctctcacttccagatncatcaaggtgcccacattgctaaacctaac

SEQ ID NO: 239616 - DNA, 331 bp, Homo sapiens
taaaataaaattaaaaagctcttttgggcatatctcgctaatttgaggatattctaacagaaaataagtaacccataacaaagactcatagattattgatgttggaaggatcttataggtcacctgttatttacatatactcctcattgcagaaagaattcaggctgctagagatcatstgatccactttttataatacatccctacatttctgcattcctctacctttcactcacagatcccttgaacccacacaaaatatgtctttatagataacttttcaaatattcatctgttcaacttattttatagcattactgattacaaacaa

SEQ ID NO: 239617 - DNA, 651 bp, Homo sapiens
tccaacaatgtattaaaagaattatataccaggtacgaaagactggctcaacattcaaaaaccaatcaatgtcaccctacatatcaataggctaaagaaaaatcataatcatgtcaattgaaatgcatttgacaaaatccaacatccactcataaaacaaaacaaaacaaaaactctcagtaaactagcaattgaggggaatttcctccaataaataaatttacaaaacatcacacttaataatcacgaagcagacactttccccctaagattggaagaaataaaacrtatacagattggaaaggaagaaatcaaactgtctttatttacagattacatgattgtcaatgtggaaaacctaaagattcaaaaagagaaaaaaaaaaccctcagaactaataagcaagtacagtaaggttggaggatacaaggtcaatatacaaaagtcactatcctccctacatacaatggacaataggaatttgaaagttagaaaagcagtatcatttacaatagcaagggaaaaattgaaatacttaggtataaatctaacaaaatatgcatagggtctgtaagcagaaatctaaaaaacactgaggaaggaaattaaatcagatctaattaatgtagagatattcaatgttcatggat

SEQ ID NO: 239618 - DNA, 557 bp, Homo sapiens
accattcctacagaaactattccaaaaaactgaggaggagggactcctccccaactcattctatgaggccagcaccatcctgataaacacaacaataaaagaaaactgcaggctaatatccttgatgaacatcaacgcaaaaatcctcaacaaaatacttgaaaaccgaatccggcaacacatcaaaaagctaatccaccacaatcaagcagccttcatctccaggatgtgaagttggttaaacatacacaaatcaataaatgtgactcatcacaaaaacagaactaaagacaaaaaccacgtgattatctcaagagaagcagaaaaggcctttattagtccattctcacattgctataaagaactacccatgactgggtaatttatgaagaaaggagatttcactgactcacagttccacaggctgtacagaaagcatggctggkaggcctcagaaaacttaacaatcatagcagaaggcgaagggcaaagaagcacatcttaccatggaggagcaggaaagagagagagagtgaagggggaagtactacactcca

SEQ ID NO: 239619 - DNA, 529 bp, Homo sapiens
ctctttttctgagaaattattatatagtaaagcactattctaagtgataattaatagaatcctggcaatcctagaaagtatgtattattataccaaatattctgatgaaatacttagacacaaagaaattaattaaactcagaaatgaataacctctgagttacatcttctaagtcagagaacagtaattaacatccaaacaatcagcatatgaaagctgttcttttaatttaactgctattttagattttatttatgaggtaacatagcaaatgcaagcaactctgtaacattgtcagtaaaacttgtaactgaatctcatataatattataytgttttcaattacatatttattttcagtatattatgtcattgggcagctttattaagtaggtgctaatgttttcttcttttcctatttaagcaaactgaggcacatcagattaaatcattctgcaaatgtcatgccattaggagcacagtatgtggaaacatttctttccttcattaagaatgttgtccaagaat

SEQ ID NO: 239620 - DNA, 421 bp, Homo sapiens
gcactttggggggccaaggtgggcagactacttgaagccaggagtttgagactagcctggccaacatggtgaaactccctctctaaaaaagcaaaaattagccaggtgtggtggcatgtacctgtaagcccagctactcagggggctgaggcaggaaaattgactgaacccaggagggagatgttgcagtgaygtgagatcatgccactgcactccagcctgtgtgacagagtgagcagagtgagatcatgtctccaaacccctcccccaacctaaaaaaatgccattctactgttctatcaatccagctgcttcaggatgaagggaagcacggtaaaaccactgaattccatgagcataagcccacatccacacttctttagccattaagtgagtgccttggtcagaggaaatgctctgt

SEQ ID NO: 239621 - DNA, 443 bp, Homo sapiens
cattcttcaagatgcatctgtcttctgcaaagggcaaatggaagagttgaatgggggatgtggtgggaattgccgtccctgcatcttttaagtcattgatggtggcactaatctatgcaactcctccagggatgcaatattgttttttctgggtagagtcagctctaatggcttccattgggcctttcccaccaaaacggcccttatcttactagtcagggagccaatgtgagggttctgctagctgttaagtatgtctatgycaattatgcattctgacaatgggaaaatgacaacagaatgagtccggggacccactgaacctactctaagtcagacctgagctaaaactccattaattacctgacctccataagcccctactttaactggagaaccacaatgatgttgtgggccccctggaatcaatgtcagctcagagc

SEQ ID NO: 239622 - DNA, 537 bp, Homo sapiens
gatacaagaagctgatagatcaccaagtagagtgaacccaaagaagaccaccttaagacagttaataatcaaactctgaaaggtcaagcataaataaagggtcctaaaagcagcaagagtaaagaaacaaataatatacaaaggagctccaattcttctggcagcagacttctcagtggaaacgttacaggccaggagagagtggtatgacatatttaaagtgctaaaggaaaaaaagcaaaacaaaacccttttatcctagaatagtatatccagtgaaaatacccttcaaacatgaaagagaaataaagacttccacagacaaacaaaaactgacaaatttcatcaacaccagctatgkcctacaaaaaatgctaatgggagttctttaatctgaaagaaaaaagacgttagtgagtagtaagaagtcatctgaaggtacaaagctcactggtaataggaagtacacagaaaaactgaatattgtaagattgtaattgtggtgtgtaaactactcttatcttaactagaaaggct

SEQ ID NO: 239623 - DNA, 565 bp, Homo sapiens
tagccttggaagcatcagagaattcaaaagcagttgctgggtgaatcacaataatgaagtcacaaagaatggaaagaaaaatattctttttttggtgataccctatctctacaaaaaatttaaaaagtacttggttgtggtggcatgtgcctgtagtccaagctacttggcaagctgagttgggaggatctcccaagcccagggaggttgaggctgcagtgagccatcatcatcgtaccactacactccagtctgggtgacagagtgagatcttgtctatatatgaatatttatgtaaatataaatatatgaatatttatgtaaatataaatatgtgaatatttatgtaaatataaataaatgaatatttatgtaaatataaataaatgaatatctatgtaaatataaataaatgaatatctatgtaaatataaatatatgaatatctatgtaaatataaayatatgaatatttatgtaaatataaatatatgaatatataaatataaatatatatgaatataaatatatataaatatataaatatatatatatatataattaac

SEQ ID NO: 239624 - DNA, 574 bp, Homo sapiens
tgaacgagtaaataccagatagttggataaactagaatagatgagtaaattcctagacacttacaccctaataagattgaataaaaaattaaaagttcaatacaccaataatgtgtaaggagattgaatccctaataaaaagtgtcttatcaaagcccagaacctggtgayttcatgaatgctttttagccaatatttaacaaataattaatattaatgcttgtaaaaatcttccaaaatattgaggagcaaggaatactgaagtattcattttacaaaatcagcattactcaaatacaaaatccagacaagaacactacaaaaaaaattataggcaaatatctctgataaatacagatgcaaaattctcaacaaaatgctagtgcagtaaactaaatagcaatttaatatatcatacactatgctcaagtgggatttatgcatgggatgcaaaaatgtttcaatattgaaaattaaaaatgtgataaatcacattaataaaatgaatttaaaaatatgaacatctcaatagatgtagagaaggtattggcaagatgtaacatcattttatggt

SEQ ID NO: 239625 - DNA, 607 bp, Homo sapiens
acctgtcattctcattatataacactcattgaaatacgttcagttatgaacttaatctataggtgtctagtataattttcttattttctctttgcctgactatattcttttattctgacacttactaaagaagatggaagtgaaaacatataaacttataaataatagtcatcacatgttttattgattatataacattaaaatgtaaatayatcaggcaaaaacctttatgtataaggttaaaagtgaatagtgtattaattgcctggtattttttactgaagtgattgatggttgcagggcatatgatttctccacaaaaagtttttaataggactcattgatttttgtcttgtgatttcagctttcctagacttcgacatggacatattatataattaaattactaacttcaatgtgcatagaggcttattttcctcttttaactcaaatgtattgaataaaacacacagggtaaaattagcacgacatttcatatgatcatacagaaaaaaagcttttaataattccagaacagaggaatattattttcatgtatgaaattgatatttgacaccagcaccacaagtaataatacagaaaacat

SEQ ID NO: 239626 - DNA, 532 bp, Homo sapiens
aaggcaagtagccagtgagaaaatttagaaagttattgcatgattttgaacccaaaaataagcaagggcctttaaaagaaatctaggtaattaccataggaatagaggggatgatgtgaacgatattttataaactatattaggaagcttgtggaaaaaaaacatactctgaaggtctagataattattattttctctcctagatacatattttcaccaagggcaaaggtgtttaaattgtactgtttgggacactagtggtcctgaggaacttctgacatcaaacacatatgtatatatatacatgcatwcatatttacatatatgcacacacaaatacatgcattagatacttacatatttacatagtatgcttcaaagtataaattttgttaaaaaatcctgatatagccaattaggcaatgttttttacagctgcagcttattaagttgcaagattcttcataaggagtaattattctattcttcataataatttaaattttgtgttgtctgtttctataggcacaca

SEQ ID NO: 239627 - DNA, 588 bp, Homo sapiens
gtatgtgttccagttgacaaggagtaaacttgtgatgcttaatactgagtgtcaaattgattggattgaaggatgcaaagtattgatcctgggtgtgtctgtgagggtgttgccaaaggagattaacatttgaatcggtgggctgggaaaggcaaacccacccttaatctgagtgggcaccatataaatagctgtcagtgcagtcaggatataaagcaggcagaaaaacgtgaaaaggctagactggcttagcctcctagcctatatctttctcccatgctgaatgcttcctgcccttgaacatcaaactccaaggttttcagcctttgtctcagactggcttccttgctcctcagctagcagacagcctattgtgggaccttgtgattgcgtgagttaatattacttaataaactcccgtgtgtgtgtgtgtatcctattagctctgtctttctagagaaccttgactaatacactcattgygcaacccttgcctacattaaggcaacaaaatgtctagaaatgtcatcatttatcatacaaactacacttgagctcctgctttaaggtccataaatgctcctaagg

SEQ ID NO: 239628 - DNA, 489 bp, Homo sapiens
ggcactgtttgaatattgacttttaaaacagtgatagtaatatatcgtgaggtctaaaatatatgtggaaattgaaatcattgtaaaaattacaaccaggaaaattatgttatcatgttttaatattccagcattattgaaaggtagtaaaggtataatttgggttaaattgtattactttaaaaataaactctacaatctattggagaactaataaaataatagaaaatgaatgtgtaagtacatttcaaccacaatgcaatatactacacactcaaaagaatgactaaatgaaaaagacaaaaaatgccaagacaataaggatgttaargactttcttcactcttacaatccaccagtttggaaaaattctttggcaagagatctactaaagctgaacataggcaggcataccctatgaaccaaaatttatactcctaggaatacagccaggaaatacacatacatttatgcatcataaactagtca

SEQ ID NO: 239629 - DNA, 576 bp, Homo sapiens
  misc_feature (1)...(576): n = A,T,C or G
attgtttatgttgagagacattataacttgtaaaaacagaaaatagtatgtttacttggaagcagtctagggtcactgaagcagcagtatcgttgtctgagatattacctggagttctttgtctcacaaccaagaaaattaaggagcatggccaccaagggtgaggttggagtgaaagtttaataagtgaaagacgaaaggtctccacagtggagagggggcctgagagggttgccatcacacagtcgaatgcannnnnnnnnnnnnnnnnnnnnnnnnnnnnnnnnnnnnnnnnnnnnnnnnnnnnnnnnnnnnnnnnnnnnnnnnnnnnnnnnnnnnnnnnnnnnnnnnnnnatccctctagtgtgtatgcaggctcttagcctgagttactccatattgtttcacctctcttactgtgcatgcatcagatgctggaattttmcactccagacatgcctggttctgtgtaacttatctatacagctgcagacctgtcttaggcaagaactctgtgcaagttcccttatctgagtatgcccaaaaaggaaaggaatgtcctcactgaagtccact

SEQ ID NO: 239630 - DNA, 663 bp, Homo sapiens
atgaaaatgttgatagtgttggctaatgtttccactgttcatcttcagtcctcttcaattagagtacaaacaaaatgaattttttcttgaaaattgatgtggatattctgcccctgaaagcttcatcttcaacattgtcttgtcccttcttaaaatgagttatctttttgtaaattgctaaattcctgcaggcattgtcttgataaactttatgtagagcatcaatgagttatcgttttattagtttgttttcacagtgctacaaagaaatacccaagactgggtcttttayaaaggaaagagacttaattgacttacagatccacatggctgggagacctcaggaaacttacaatcatggtggaaggggaagcaaacaccttcttcacaaggtggcaggagagtgaagcaaacaagagaagaaccacaaaacacttataaaaccatcagatcttgtgagaactcactcactatcataagaacagtatggggagaaccatctccatgatccaatcacctcccaccaggtcctcctcaacacttggggattacaattcaaaagagatttagctggggacacaaagcctaaccatatcattctgaccctggcccactccaaatctcatgtcttttcacatttcaaaaccaattatgtcttaccaa

SEQ ID NO: 239631 - DNA, 632 bp, Homo sapiens
accgtctgtttaacattatcctccaatcagttgggggttactagaatatcagttttcctaatattcatattttttaagttcttgaggattttctagtgatgtattcaaaggccttcttgaagtacatataaatttaaatgattgctacttataatttcatctgtgaattaagatttcagactgattctttttcataaaacatcttgattataacagagaatctcttgctattcaatttaattacaaatgaatacaatgaaataatatatatattgcttcttaaaatctgttagttgcacatttaattttctagtttattgcagtgttcctattgttattaaaagtatagaatagacaacatgrcacttataaatatcttcaatattttaagttatacattataaagctctggtaatttaaaaatgtatttaaaatattttatgttttgggggctttagttttccaaatttttataataaatactgcttgttcttaaagttctaacttagatttacttcccctgtttagcgaactatatatcttttaggtttcctgatacaacctgtacacaatttggtatattttattagtttgtgtcaaatattttgtgatcttcatataaatgaaatact

SEQ ID NO: 239632 - DNA, 309 bp, Homo sapiens
atagtaaagagaaacaatgcaggtctgtgtattataaaataaagacagttaaattcacacacacacacrcatgcacatacacaaacacacatgaagtgttggtgaaatatgatttacacaactgaccaaaaacaaaaattaaaaaatgccaaatacttataagggagatacactcactctaccgtgagatttgtttcctgctcacccaacacaacttgaagagaagaactttacgtaggcttgtttggaaaataagagattggactggagagaagccaataatttgcatgatcaaagtgagcattgttg

SEQ ID NO: 239633 - DNA, 593 bp, Homo sapiens
agaaaagaagagggaaaagtaaagrggattttaacttgcaccttaggtactaacttgaccagaggggatagagcaccaaggaggctcttgggatccatgatcctagacactgtctcttggatggcatttctggacctgccctcggccagaggggaacccgcttccctaaagattgagacctatggtagggagcattcaccacaagctgacttaagagcacttgcaccttaaaggaaagttggtggtagcctgacagcactctctatgggcctgtgcttgtggtggccatggggtgagattcctctgtctgttgaaagaggagtaaagaattggaagatttgaatcctgtggtttgagtgtcagctcagccacagtacaataggaaaccaggtcgactattaaggttttcacttcagccctggctcctggatatcacccctggacccacccagggcctagaggatcttgccatcctgaaatgaaggacacaagcctggctggcttcaccacctgatgattgtagagccccagggccttgagaaaacataggtggcagccaagtagtgattacagcaagacatgggtgagaccca

SEQ ID NO: 239634 - DNA, 593 bp, Homo sapiens
agaaaagaagagggaaaagtaaagaggattttaacttgcaccttaggtactaacttgaccagaggggatagagcaccaaggaggctcttgggatccatgatcctagacactgtctcttggatggcatttctggacctgccctcggccagaggggaacccgcttccctaaagattgagacctatggtagggagcattcaccacaagctgacttaagagcacttgcaccttaaaggaaagttggtggtagcctgacagcactctctaygggcctgtgcttgtggtggccatggggtgagattcctctgtctgttgaaagaggagtaaagaattggaagatttgaatcctgtggtttgagtgtcagctcagccacagtacaataggaaaccaggtcgactattaaggttttcacttcagccctggctcctggatatcacccctggacccacccagggcctagaggatcttgccatcctgaaatgaaggacacaagcctggctggcttcaccacctgatgattgtagagccccagggccttgagaaaacataggtggcagccaagtagtgattacagcaagacatgggtgagaccca

SEQ ID NO: 239635 - DNA, 598 bp, Homo sapiens
aatatgtttataaaatctagagatatgccatacaaagagactgggagactcaatagtgctaagatatcagttctcctcaaattggtctatagattcaacagcattccaatcaaaattgaaacactgatctcaaaattcatatgcaatgcaaatggctagaatagccaaaacaattttgagaaagaacaacagagttggaagacttattacatttgatttgaagactcattgaaaagatgcagaaatccaggaactatggtattagcataaatataactatatagtgatcgatggaacagagtagacagccctaaaatagacacaaaaatgctatttggaacagtaccatggcatttcaatattgaaagggtaatcttttcaataagtggtcttgggagaactgsctattcacatagacacagataaactttgatgtctacctcatatctatgatgtatatgaaaattaactcaagatagattatagaccataaatataaatgctaaaagcatcaaacattttggagaaaaaatatagtaaatattttgacaaccttggcataggaaagatatccagtgacccaacaggcattaagctt

SEQ ID NO: 239636 - DNA, 575 bp, Homo sapiens
attgctttgccctggaaaatctcggggctgggggaagcctggaggacagagccaggagggtcggctgtgcctgcacctcactgatcatgaaaacaagtgatatgtggtgtttttctggaccaaaagtgagtcttgtagaaagagtcccatacaaagatgtcttgagtcctgcccacttagaggggagagtaattcttaaaaaaatgaggctgtaagtttaccttcaacatgcaggactgagggtggggcattagagactacccaaagtagagaagtgtccactcaggttaggggaattgcagcatccattgatagtcaaattgagtggttggccaggccttcctcaccagtggaatcagtggccaagaccagtgagcagaaaaccacccagccaggaaggaattgtgttgcccctttacctttattccctgcccaagcgtggatcttggagaagtcctaaagaaaggcaagcacagaggagaagggaaaacgggtggagaagagacagccatagggttatyccaccatccctacccacgggttcacaaccagaggaatgtcgaactgcagaaggg

SEQ ID NO: 239637 - DNA, 402 bp, Homo sapiens
tataagcaactctggtggaatcaaaatgtcaaagagtgaacaggctgaaatcagaggtgtgttaagcccaggatgctgaagcaggtattgagggcttggctctttcagagtgaaggaaactaaaagtgctccatatgaaataggaataggatttagtgaaggataagartaatgggagttggagtcattgcttaaatctgggggctcagctccgcccatcttcaactaaaaggtgtgcttattgtgcatccttacccacagttgttataaaagctgatcagaagaacactaagagcctcatactcatgaatggaatagtactaggtggtcctgcaatttgttctgtggtcatctcaggtagaagcctcaaagctaaattacaagacttggtatttgtttggg

SEQ ID NO: 239638 - DNA, 402 bp, Homo sapiens
tataagcaactctggtggaatcaaaatgtcaaagagtgaacaggctgaaatcagaggtgtgttaagcccaggatgctgaagcaggtattgagggcttggctctttcagagtgaaggaaactaaaagtgctccatatgaaataggaataggatttagtgaaggataagagtaatgggagttggagtcattgcttaaatctgggggctcagctccrcccatcttcaactaaaaggtgtgcttattgtgcatccttacccacagttgttataaaagctgatcagaagaacactaagagcctcatactcatgaatggaatagtactaggtggtcctgcaatttgttctgtggtcatctcaggtagaagcctcaaagctaaattacaagacttggtatttgtttggg

SEQ ID NO: 239639 - DNA, 405 bp, Homo sapiens
gaaaaatgacattgcctattatgggatttggcctcaagtccctctttagtctcctatggagaagacgtacagtatatttaaaccacagagactatttctccctagaaagaggcaggcgtgggaactctggctctagttgtgccccttcaatcctatctgttccagctaggcatgctaaggaaatttgaaggggatcaagggcaaaagatgttattttttcttcccaaatggtaaccaatctgtgaactatcttacagtaccaaccccataggaggaaaaaaatgaaaagtgactgtgatggttaattttatgtggcaacttgacygggccatgggctgcccagatatttggttaaatattatcctggatttgtctgtgagggtatttttaaaagagattaaagtt

SEQ ID NO: 239640 - DNA, 504 bp, Homo sapiens
ctcgctaattctcgaaatgaatgatataactcctggtatcactttcaaaagattcctctttactcctgtctatattctcagcagacgtgaaatcctttctacacatctcgcagggtcagaaggctggaatkattcctgtctcttctctgagccagagtttccatcactgggtattgagacacatgtatttgctattgtcacttcctggctacttccactcattctttaggcctagctttgacatcaccttctctagatgggtaacatggcccttcagtttactctccaggtaccctatacttccctgcttatcacttattacccagatttgatattgtctaatttcatgttggtatccactccccaggtgctaagcatttaaggagtaagacggtgactctccaggactttgcccagtgcatgacacttagccaggacttggtaaatatttatggaactagtgaatgcagaaatatgtgaatgaattaaagtcataatgtaact

SEQ ID NO: 239641 - DNA, 504 bp, Homo sapiens
ctcgctaattctcgaaatgaatgatataactcctggtatcactttcaaaagattcctctttactcctgtctatattctcagcagacgtgaaatcctttctacacatctcgcagggtcagaaggctggaatgattcctgtctcttctctgagccagagtttccatcactgggtattgaracacatgtatttgctattgtcacttcctggctacttccactcattctttaggcctagctttgacatcaccttctctagatgggtaacatggcccttcagtttactctccaggtaccctatacttccctgcttatcacttattacccagatttgatattgtctaatttcatgttggtatccactccccaggtgctaagcatttaaggagtaagacggtgactctccaggactttgcccagtgcatgacacttagccaggacttggtaaatatttatggaactagtgaatgcagaaatatgtgaatgaattaaagtcataatgtaact

SEQ ID NO: 239642 - DNA, 504 bp, Homo sapiens
ctcgctaattctcgaaatgaatgatataactcctggtatcactttcaaaagattcctctttactcctgtctatattctcagcagacgtgaaatcctttctacacatctcgcagggtcagaaggctggaatgattcctgtctcttctctgagccagagtttccatcactgggtattgagacacatgtatttgctattgtcacttcctggctacttccactcattctttaggcctagctttgacatcaccttctctagatgggtaacatggcccttcagtttactctccaggtaccctatacttccctgcttatcacttattacccagatttgatattgtctaatttcatgttggtatccactccccaggtgctaagcatttaaggagtaagacggtgactctccaggactttgcccagtgcatgacacttagccaggasttggtaaatatttatggaactagtgaatgcagaaatatgtgaatgaattaaagtcataatgtaact

SEQ ID NO: 239643 - DNA, 524 bp, Homo sapiens
gttaagtgacttgatgcagttatataaatcaatagtggcaaagccaggacaatagccaggattttttgctcttagaccagagctttctttacttgccctagttgcttcactcattatagtccatgaggcatacacccagggagacagacaagatgtcactaaaaagccaagatgtgccctcacagtaasagtgggaaagagctagttaggaaatacatttcagaaaacatggaaatgtatgtggcctaaagcagaagaatggagccagatactctattcaccatacaacttcagctccagggatttacaacaagtgtgacagctaagataactttttaaataaaaactgtcagtgattataaaccctggagatgttataaacagattatcaactttaattatttgaaatcatttcctagaatttgatcttttaatcttgcacaaaaatggaagatacaggtgtacaatttgttttttgtgcttcttttactatttgtgaatcatcataacactgatgtaacttg

SEQ ID NO: 239644 - DNA, 597 bp, Homo sapiens
tccccagggggtggcacactcactcactgcctcctttggcgggggtgctggggttcccctgctccctgtggctctcaggtgggctgctgcaccacactgctcttccttcctctctgtggatcatgccagctgcctagtcagttctgatgagagaacctggatacctaggttgttggtgcaggattcacatgctattatggttctttttgacaggagcctcgattgtggctgcttctagtcagctgtcttgctccccaccctcttatggaattttcattgtcaaactgttcagaataagagttctgcctgacccaggtgaccatcgctacagaagagggctcccttccacatgaaccttggtctttgctttggcatggccatccatccttcttatgccttttctgcccaggagcatgctggtccagccaactgagaaatggattaacagctcctgggtggtgagagaaaaagctgctggccrcctgccacttgccatgtgaccttacttaagtcactcaccccctgtgattagacttcttcatctggaatagggagcaggtgacataaaccgtgtggctagtgcaccattttgcaaat

SEQ ID NO: 239645 - DNA, 544 bp, Homo sapiens
caagtaaagtgcttggcatggtctgaccctcaataagtactcaataaaatatttcagctacttgaccaggcatggtggctgatgtctgcaatcccagcactctggaaggccaaggcaggaggaccacttgaggccaggagttcaaggccagcctgggaaacatagcaagattccatccttacaaaatttttcaaaagtagccaagtgtggtggcacgcacctgtagtcctagctactcaggaggctgggggaggaggatcacttgagttcaagagtataagcctgcagtgagtgagctatgatcacgccaccgtactccagcctaggtgacggagtgagactytgtctttttgaaacaggatagctgtctcaaaatagtagctggaatattactttgaaataataatattccagctactattattatcgatcccagtttacaggtaaagctcaggtaacttgcctagtttacacagtagcagagcagaatttaaactgaggtctaactcttagaactgtgttattttacagcactacactgcca

SEQ ID NO: 239646 - DNA, 619 bp, Homo sapiens
ttttttttttttttctccaggttgtagcaatgaaagagcaagaggtgagaaggttcaattctctccctccctttacaaattagatcttccttcatggcataaccttgacattgctctcaaycctgaatttcttctttttgagcatggaaatcatataattgacattaactaaaagaaaacatggttttagcatataagtaactcatatgggagacaatgtcctttgaaaattcttttagtcttttaatttcatttaaagaactctagtatgttgctttcaaacacaatatctagacctgtttctcagttacttgcttaaccacaattattttaaaaataaaaaagataaaacaatgatttgtatggctgaagggaaaaccttccattattcaatactaagaaatcctattttatttcaagtatttaaaaaattaaaatggttacaaagaacattgagatgtggtcaagaaactaaacaggagcaatttataattgaagaatgaaacactttgaatattaaataatgaagggagatgaaatcagatgcaaaaaatgcaaaatacttaaaacctttcaatatgacagtatgtcttccccagagaaaagtatgaatattaaa

SEQ ID NO: 239647 - DNA, 577 bp, Homo sapiens
aaaaatgcaatgccaagtttattcataaatgtacgaaacaagcctgtttaatattcagttctcttcaaatttcagttcgtgatagatctttgcttgtttcatgatcagcgtaccaccaagtgacatgtgttcactgcaaccctaacagatccactctttcaatacatgattgaaatcttcatttttaactttatgcagcatttttttctttaaaaaattcattaatttctgttcatcatttttagcattgaacttcaacagcttatccttctgtttctgtgggtgatatacagtggtcattctgacaccatattcttttgtaagatgtttcacactaacactgctgtccagcttctccaagagcttgactttctgtgctatggagtaacataaatgcttcttctttttcttatcactgttacccatggggtatctgcagscctttttaacattttcaacaatatttttgcaccacagagaataaatagaaatacacagggagtaaagcatgtgggtcttggccccatgtgggaaattgtgggaaacctgtcattcacaaccagttggcacatatggc

SEQ ID NO: 239648 - DNA, 407 bp, Homo sapiens
agtatctggaacatttcctaggattttttttttttytaatgacttactctcttattaatatgtcagagaaaagaaaagctcctggctaagaaataaaacagtccctcatcccagaaatcacagccaggaatatggattcttaagtgtcaaaaaagtactctgaataaggaaagaaacgcagatgcactacttctattataataagcgcttgatttcttttaatcccctgagtccaattattttcttggcaaatttaagggtactgactgcttctgtgaatctattgttacacttgataatggatctgagttgggggtaatatttgcctatcaatttggatacttaaaaatctctctctctttcttcatataccctctatctcacaactttccatttaatgagggaag

SEQ ID NO: 239649 - DNA, 532 bp, Homo sapiens
tgacctcaggtgatccatctgcctaggcctctcaaagtgcagggattatgggtgtgagccactgcgcccggccctagttggttatttcaaacaaaatactaacactcttcagcccaaaccatgtgtcagagagctgggtgtggccagtgggcccctggtgtgcaactagtcttcagtgatgctactgtatgctagtgacagcacaactgaccactgaaaatatggtgcacgatggtgaacagattggatttcccrtatctctagaaccccagggctttgaggcaattctgatagatggagggggagcgagagagagaaagaggagggagaggtatcacatgaaagagatactggactttctgctaataaatgggtgggtatttgggtgagtagataggaaattaaaaagaaatatgagagatgggcgtggtggcttgtgcctgtaatcccagtgacttgggaggctgaggtgggagtattgtttgagaccaggagtttgagatcagtctgggcagcatagtaaaaaaagtcc

SEQ ID NO: 239650 - DNA, 488 bp, Homo sapiens
atttgtagttccaacaagttcccaggtggtgctgatgctgctggtctgagaaccccacgaggagaaccactgtgctaaaccaaagagtgatgaggggttgtcatcagctcacacctggcccggggagagaaagtgagggcttcatctgctgctgttccakttgaggcctcaggaaccggaaagtctttaatgaagctaatgcattgtggacactcactcaaccttccttgaaaatgatcacagattcagggcagggcctttgcattttaagtgccaagctcatcttcttcaccacgccccaaggttggcgcctggtggctttactcctcacttgtgtctttcccacctgctcccttcagctgaggcccaacaccatcaatattgaggagggaggagggacaggggcgggggcgagacagtgaggctgaggggcaagtctcaaggcatgcgtgcgatgacaggctggaaggcgctgtgatctcaccccc

SEQ ID NO: 239651 - DNA, 439 bp, Homo sapiens
ccattaggatgactattatcaaaaaacaaaaaattagctgggtgcagtggtacactcctgtaggcccagctacttgggargctgaggcgtgaagatcacttgagctcaggagttctaaactgtagtgcacaactgtgtagtgtagtttagaactgtgcactacagtttagtgtagccactgcactccagcctggtcaacacagcaagacaaccatctctgaaaaataaaataaaataataagtgttggtaaggaaatggagaaattgtcagccttgtacattgctagtgggaatataaaatggtgcagctacaatggaaaacagtacggcagttcctcaaaaaattaaacataaaattaccatattatccaggaactccacacctaggtatacactcaaaagaattgatagcagagactcaaacaggtatttatagacc

SEQ ID NO: 239652 - DNA, 592 bp, Homo sapiens
tagtgcttggttcgtggtgcaggggtaggcgcactgcggtcagcacctacaggggtgggggcactagatgttactctgccaaggaggagctgggaaggggccccttgcctgggggaatagcaaggcttggttctggctgccagggctggggagggcaggaaggcagagtgtctcgtggtagagggtgggtgtcccccgtgagytgggaaggtggcacacagaagccactggtgtgaaccaggaagctctgcctcgagtgctggaggacagcagtgaggggtgggaggcccagagctagcatcctggccccgtctgtgctgggtccgcatatacttctcagacttggccttcctcacctctaaacagctgggctcctcacgtctgcttaccaaagggcttgatttgagggttgtgatagcagatggtcctggttgcctctggaatagctcccccactcaacaagctaccttacctgcagtttcaccatttgaggttcatttatttgagccaagtattttaaagggcaccttcctgaagtgctcatttaaaatgcacattcttctgggaggtgaaggtgtagcggaaccttgct

SEQ ID NO: 239653 - DNA, 592 bp, Homo sapiens
tagtgcttggttcgtggtgcaggggtaggcgcactgcggtcagcacctacaggggtgggggcactagatgttactctgccaaggaggagctgggaaggggccccttgcctgggggaatagcaaggcttggttctggctgccagggctggggagggcaggaaggcagagtgtctcgtggtagagggtgggtgtcccccgtgagttgggaaggtggcacacagaagccactggtgtgaaccaggaagctctgcctcgagtgctggaggacagcagtgaggggtgggaggcccagagctagcatcctggccccgtctgtgctgggtccgcatatacttctcrgacttggccttcctcacctctaaacagctgggctcctcacgtctgcttaccaaagggcttgatttgagggttgtgatagcagatggtcctggttgcctctggaatagctcccccactcaacaagctaccttacctgcagtttcaccatttgaggttcatttatttgagccaagtattttaaagggcaccttcctgaagtgctcatttaaaatgcacattcttctgggaggtgaaggtgtagcggaaccttgct

SEQ ID NO: 239654 - DNA, 636 bp, Homo sapiens
gggctcccagctccctttgccttttctccatccatccatccttccatccattcatccacccatccatccatccatccaacaattactcaccaaggacctagtaggcctcacgcaagctctcatgaggctcccaacccagtggagggagatacacatttaacaataatcacataccaaagaattattgttcattttttagatttaataacaggagctttgctcttttgattttattttttaagacttaacttttttagagtagttttaagttcacaggaaaattgagaagatggtacagagactgcccccacgttgtgcacagcctgccacagtatcaacatyccccagcagagcagagcatttgatacagtagtgagcctgcactgacacaccatcatcaccccaagtccatagctcacattagggttcactcttggtgttgtacattctgtgggtttggataaatgtataatgacatgtatttgtggttatgttttatacaagagcccttatttttagcaatacctaccaaaacatttacaaatgtgttgcctcaaattaatactaggaggcaggagtgagtaggggtagagataaaacaagattgacctcgagttgatcattgttgaagctggg

SEQ ID NO: 239655 - DNA, 488 bp, Homo sapiens
gctgttacctcttttcaggtaactacttagtttgggtttagtgccatggaactttagcatgggtgactccctttggatttttagcctggtctgctggggcctaattcagaaacttagtccaaaacaatggcctcctacaattttcatttaacgcttgcctgctctgagaagaggaggaatgacaagagagcaaaacatgggctggccctctgccctcactggtaaggagctcaccttttggactcagacctggattcaaattcttgggcaagccacttaaatcctccaaaccctagtttccccgttggggggcaacatctccctctcaactgaggcattgtgagggtgaagcagacaatgagagcaaagcatttrgcagagcatttggtcctccctgaagccagccatcgtcctcctcctcactgggcaatgacacctcccctagatgttctcatctaaggtggtgtttctctagaagctgatcccag

SEQ ID NO: 239656 - DNA, 572 bp, Homo sapiens
gaatttgatttgctctgacacagctctacagggccagatttccaacccaggctagtcaagtccagagcctgcaattttcacttcaagtcttcctgtgaggattgacaagaggatgttcagtcttagccaggtgcctggcagctactgagggcccagtggaggttagtgggcaaatcatcatagtagtttcaataagcaatagttctatcagtatcaaagagtggctgtggtcagagctttgtaagagacacattgcygtgtttacttaggacaggaacaatctggagtttgtttccaccactccctggagtttcaagtccttaaaaatgttcaagctggtttggctttgtgtcttctatttcctgtttacactttgccccacctctatttttgccccttcttccccctcttctagttatacctaacaccactgctgacgctcttcgcttctgaaaaatggccagctttctgccctcaatttaaagggatcaatcagtggccccagaagttcttatttttcttggctaaaatgaaaatggtgaaaacaccaaccacaaaaggcagactcttgt

SEQ ID NO: 239657 - DNA, 423 bp, Homo sapiens
cagtaacacaatccaagggagtcagcctctcagaacagaaaaaagaacatgaaaagacaaagacttgattgaggtcagaaggcaaaataagaaacccaacacatccatattcccaacacaaaggcttgaccacaaagaattaatagctggtcaattttgcctacagctatttaacaaaaaataaatatcactctatttckatatgcatggtaaattcctgcatataccatgcatatggattttcaaagatgtaaaaaatgcataaaatcacaaataggaagaaacaattattccaaatatttacacatgaaagtgagcatcactgtgatggttaatattgagtgtcaacttgattggattgaaggatacgaagtattattcctgggtgtgtctgtgagggggttaccaaaggagattaacact

SEQ ID NO: 239658 - DNA, 423 bp, Homo sapiens
cagtaacacaatccaagggagtcagcctctcagaacagaaaaaagaacatgaaaagacaaagacttgattgaggtcagaaggcaaaataagaaacccaacacatccatattcccaacacaaaggcttgaccacaaagaattaatagctggtcaattttgcctacagctatttaacaaaaaataaatatcactctatttctatatgcatggtaaattcctgcatatrccatgcatatggattttcaaagatgtaaaaaatgcataaaatcacaaataggaagaaacaattattccaaatatttacacatgaaagtgagcatcactgtgatggttaatattgagtgtcaacttgattggattgaaggatacgaagtattattcctgggtgtgtctgtgagggggttaccaaaggagattaacact

SEQ ID NO: 239659 - DNA, 552 bp, Homo sapiens
atatgataaaagcagtttgagcccaattttccccaatgaaatcaaacaacaaattgtgttgatttaattgtgaacttatacttatggattataacatgaaggaatgaatttttcactttcctgttacaccattgcctttatttcccatccagaattacagaggagttgtaaggcaattaarggtgttacacagggcttttgggtgcagcactggaattttaaaacaggtttaatggcaatttttgataagtaatatactgtaatataccttttaaactctacatggactttaaaatcttttatggaaaattctcaagtttccataataaaaaaacgctctgctttctttggggaatatttttgggaaaaataacttagttcaattttcatggaaaaaatacctaaatagtagtattgctgttcaaattttgtcacatttctttttgtgggtcttttgaagtaaatcaacaggtttatgtaaacattatgatttggcttctcctagatgttagaaagaagcagtgtgtaagtagtgacgtacttgggctttac

SEQ ID NO: 239660 - DNA, 609 bp, Homo sapiens
  misc_feature (1)...(609): n = A,T,C or G
nnnnntgcacacactctttcttgcctgctgccacgtaagacgtgtttgcttctcctttgctttccaccatgattgtggcgccttctccagccatgtggatctgtgagtcaattaaacctcttacctttataaattacccartcccaagtatgtctttattagcagcctgagaacagactaatacaacaggattgtgggaatttctccaggcattcagagcacccaccttcctgaattaggagtagggaaaccaactgcaccaagatctctgcacagaagaggtggggtgattcaggctgctgaaccaggcaagcagaagcttggaatgcctggagatctacctgagcatgtagcagcaaaggcccctgcaccaagacctctacccaggaagagtggggcatatcaagctgctgatccaggcaagttggtgctctgaatgtctggaggtctgtctgagtgtggagtagagagggccattctgtaccatcatctatgtccaggaaggctgggtggctccggcctgctgaaccataagaacaggtgctttaactggctgaagatctggccaggcatgaagtagagaaggcctacctggaccagtagctaaca

SEQ ID NO: 239661 - DNA, 609 bp, Homo sapiens
  misc_feature (1)...(609): n = A,T,C or G
nnnnntgcacacactctttcttgcctgctgccacgtaagacgtgtttgcttctcctttgctttccaccatgattgtggcgccttctccagccatgtggatctgtgagtcaattaaacctcttacctttataaattacccagtcccaagtatgtctttattagcagcctgagaacagactaatacaacaggattgtgggaakttctccaggcattcagagcacccaccttcctgaattaggagtagggaaaccaactgcaccaagatctctgcacagaagaggtggggtgattcaggctgctgaaccaggcaagcagaagcttggaatgcctggagatctacctgagcatgtagcagcaaaggcccctgcaccaagacctctacccaggaagagtggggcatatcaagctgctgatccaggcaagttggtgctctgaatgtctggaggtctgtctgagtgtggagtagagagggccattctgtaccatcatctatgtccaggaaggctgggtggctccggcctgctgaaccataagaacaggtgctttaactggctgaagatctggccaggcatgaagtagagaaggcctacctggaccagtagctaaca

SEQ ID NO: 239662 - DNA, 552 bp, Homo sapiens
ggatctctgtacaggatgggagcatcaggctgagctctgaacccatcgaacagatgctcctaatgcctggagatctgccttggcataaagtgtagggggctgctctgcaccacaatctatgttcatgaagcagtagagtggctaaggctgatagtccaggaaagcggctgcgccaaatgcctgaatatttggctgcggttagagcagaagacctcactgcactattatcttggtagagcagatggagacatctagaaatggcacacacagaccaattccaggtcactaggctggccttggctgcaaatctcaccacccagaagaaactgcagctgtagcagcactcctcctgccccaggcttgtgacaagggaaagcacaatttcagtgtctgctctggatgtgctttccatagctctcgttgtggaggcccttatcccactctagagcaggcccccycaatctctgcctcaagaataaaattcctgagtggtcatgctgccaagttgccaaagaatgcctgactttgtatgcctggattaaaaatggtatg

SEQ ID NO: 239663 - DNA, 605 bp, Homo sapiens
gggaaaatgtctgcagcttttcccagtgtctttccctcacaacatctccaagcctctccccatgctggctctagggcttgggagaaagacagtgctgtttctcgacctggrtcccttgagttcccactggaaaaatgagtcacatagggaggctctctgcttctctcatatcctcctggagcttcagtcatgtttaccagacagataccatcatacggactgtctgtcagtgttctttctcctccacaggatctggagtgcccttcacaattctgatggtttcccagtttcttcttgaactaaagctcacagagttgaactttatgcactatcttactacttccaagtggctgaggcatcataaaagcttctaatctgccaccttgggaaaaacaaatagggattcttaatttgttttacttgtgacatatttgtctggttttactagtcttataaaaagacttggaaaataatccctccttttctattttttgagtgtgtttgtgaagaattagtgtaaactcttctaaacatttggtagaatgtatcagtaaagccatctattctagggattatgtgtgtattggtggagggaaattttatat

SEQ ID NO: 239664 - DNA, 483 bp, Homo sapiens
gaaatcaccagtgaaacatctgatactgggctttggttgttgttgaggaggagttttgattgccggtctattctccgtactttttataggtctgttaagaatttcttcttcttcttgaatcacattaggtaatttttgcgtggctaaaaatttgtccatttcatttaggttatctaattttgaggtgtacagtccatttcacctaggctgtctaactttggggtgttcatagtatttcttcacatttctttctgtcgttagagacaagtataattaatacgtataaaatatggtattctcctatttccacaatgatcaagaacaaattcttcaattttatgtttttattatgtcctctctcccgaacttcactcctatcattttcctttcttgggaatcttggtgaaggaattttgcaaacaacatcaaatttcaraatctgattttggaaattgttgacaagattctggctagtttcagaca

SEQ ID NO: 239665 - DNA, 494 bp, Homo sapiens
ctcaaaccttccacattcccaagaaatatctattttccggactagtccctggctggctcatggaagcttaagcactgggcttctcagagtcatgaaaataaggtcactccactttttactctttggttcttggactcatacagtctatcttaatggttaaatgacygtcgggtcaacacacattctgcatctcaaaggacaacactacaatcccatgcatattatttccaagtttatgcttagcttcactttaaattttctcaggcctcacctttttgggtgatatggggtttagtatgcaatcgtcttgtgtccattaacacacctctttcaccataaaacaggtttctttgcctgtgagtatataatacagggtcccatgtcaatatatctgtgaacaatactatccttaactagtagtgtggtcctagccattgttagcaagaaaagcaaattttacatgagccttactcaaaaccaactgctcccctttt

SEQ ID NO: 239666 - DNA, 494 bp, Homo sapiens
ctcaaaccttccacattcccaagaaatatctattttccggactagtccctggctggctcatggaagcttaagcactgggcttctcagagtcatgaaaataaggtcactccactttttactctttggttcttggactcatacagtctatcttaatggttaaatgactgtcrggtcaacacacattctgcatctcaaaggacaacactacaatcccatgcatattatttccaagtttatgcttagcttcactttaaattttctcaggcctcacctttttgggtgatatggggtttagtatgcaatcgtcttgtgtccattaacacacctctttcaccataaaacaggtttctttgcctgtgagtatataatacagggtcccatgtcaatatatctgtgaacaatactatccttaactagtagtgtggtcctagccattgttagcaagaaaagcaaattttacatgagccttactcaaaaccaactgctcccctttt

SEQ ID NO: 239667 - DNA, 589 bp, Homo sapiens
cttcactttaaattttctcagscctcacctttttgggtgatatggggtttagtatgcaatcgtcttgtgtccattaacacacctctttcaccataaaacaggtttctttgcctgtgagtatataatacagggtcccatgtcaatatatctgtgaacaatactatccttaactagtagtgtggtcctagccattgttagcaagaaaagcaaattttacatgagccttactcaaaaccaactgctcccctttttggaatgatcctaaatgctcaacttgcaaccaagtggctggttggcctccccatagaacagtgtcctgttgaggtcatagtttctgatgatgacaggatggatattctgcagccacaatagaaacctggatgagagggagcctatgctgttggcttgccagcagccaccttggctacatccactatgagtgcctccactatgagcagctaaggagagatactagctggcatttgctggataaaagacatcccatccactttgttgtttagtgtctgctcttcagtgggtgttctctgatgggcattgatgtaagataacaatacatcttctttctacc

SEQ ID NO: 239668 - DNA, 400 bp, Homo sapiens
acacagccaaaccatatcattccagcccgacacctagaaatctcatgtcctcacatttcagaaccaatcatgcctttccaaactttcccacattttcctgtctttttctgagccctccaaactgttccaacctctgcctgttatgcagttccaaagtmgcttacatattttgggtatcttttcagcaacactccactctactgatacaattcaagttgcgatttgggtggggacacagtcaaaccatatcaatcatcaaaaacaggaaacctctaagaaattgtcatggcccacagtagcctaaggagacatgacagaaaaatgtaattttattcttgatgggatcctgggacagaaatccaaagccaaggaaacctgaataaagtgtagactgctgtta

SEQ ID NO: 239669 - DNA, 400 bp, Homo sapiens
acacagccaaaccatatcattccagcccgacacctagaaatctcatgtcctcacatttcagaaccaatcatgcctttccaaactttcccacattttcctgtctttttctgagccctccaaactgttccaacctctgcctgttatgcagttccaaagtcgyttacatattttgggtatcttttcagcaacactccactctactgatacaattcaagttgcgatttgggtggggacacagtcaaaccatatcaatcatcaaaaacaggaaacctctaagaaattgtcatggcccacagtagcctaaggagacatgacagaaaaatgtaattttattcttgatgggatcctgggacagaaatccaaagccaaggaaacctgaataaagtgtagactgctgtta

SEQ ID NO: 239670 - DNA, 400 bp, Homo sapiens
acacagccaaaccatatcattccagcccgacacctagaaatctcatgtcctcacatttcagaaccaatcatgcctttccaaactttcccacattttcctgtctttttctgagccctccaaactgttccaacctctgcctgttatgcagttccaaagtcgcttacatattttgggtatcttttcagcaacactccactctactgatacaattcaagttgcgatttgggtggggacacagtcaaaccatatcartcatcaaaaacaggaaacctctaagaaattgtcatggcccacagtagcctaaggagacatgacagaaaaatgtaattttattcttgatgggatcctgggacagaaatccaaagccaaggaaacctgaataaagtgtagactgctgtta

SEQ ID NO: 239671 - DNA, 400 bp, Homo sapiens
acacagccaaaccatatcattccagcccgacacctagaaatctcatgtcctcacatttcagaaccaatcatgcctttccaaactttcccacattttcctgtctttttctgagccctccaaactgttccaacctctgcctgttatgcagttccaaagtcgcttacatattttgggtatcttttcagcaacactccactctactgatacaattcaagttgcgatttgggtggggacacagtcaaaccatatcaatcatcaaaaacaggaaacctctaagaaattgtcatggcccacagtagcctaaggagacatgacagaaaaatgtaattwtattcttgatgggatcctgggacagaaatccaaagccaaggaaacctgaataaagtgtagactgctgtta

SEQ ID NO: 239672 - DNA, 449 bp, Homo sapiens
catatttgacagttcatagaatagaattggtttctgcaaaggataactcttgttaattctattcatattttttcacttatttttagttgacatgtaataatcttattatgttggtgcaaacgtaattgcggctttttcactgctggaatttgccatttgataytggaatacattcttaaattaatgtgcttatgttatatagtgttctaatgggcattttttgcttcatgttttcttgctaatgacttattacttgctgtttgtttgatatttattttagactgtggaaatgatgttagacaaaaagcaaattccagtagttttcttattcgagttcaaagtgggtcataaagcagcagagacaacttgcaaactcaacaatgcatttggcccagaaactgctaacgaacatacagtgcagtggtggttcaagacattttgcaaaggag

SEQ ID NO: 239673 - DNA, 449 bp, Homo sapiens
catatttgacagttcatagaatagaattggtttctgcaaaggataactcttgttaattctattcatattttttcacttatttttagttgacatgtaataatcttattatgttggtgcaaacgtaattgcggctttttcactgctggaatttgccatttgatattggaatacattcttaaattaatgtgcttatgttatatagtgttctaatgggcattttttgcttyatgttttcttgctaatgacttattacttgctgtttgtttgatatttattttagactgtggaaatgatgttagacaaaaagcaaattccagtagttttcttattcgagttcaaagtgggtcataaagcagcagagacaacttgcaaactcaacaatgcatttggcccagaaactgctaacgaacatacagtgcagtggtggttcaagacattttgcaaaggag

SEQ ID NO: 239674 - DNA, 423 bp, Homo sapiens
cattctctttctgcctacttgaactgagacatcaatcttttattgcccttggaccttctgtttctcaagctttcaaactcagacagaaatctataccattggctctctggctttcaggcttttgaactacaccactgactgtccartgtctccatcttgcacagatgggatttctcagactttataattccataagcctatacctcataataaatcatatatatatataaatcataatatatattatatatatatagctctagccagatcatagatagatagatagatagatagatagatagatagatagataattagtttgttcttaggctgctgtagagaaatacctgaggctaggtaatttataaagaaaagaggtttaattgactcacagttccacatggctggaaagtcctcaggaaa

SEQ ID NO: 239675 - DNA, 423 bp, Homo sapiens
cattctctttctgcctacttgaactgagacatcaatcttttattgcccttggaccttctgtttctcaagctttcaaactcagacagaaatctataccattggctctctggctttcaggcttttgaactacaccactgactgtccagtgtctccatcttgcacagatgggatttctcagactttataattccataagcctatacctcataataaatcatatatatatawaaatcataatatatattatatatatatagctctagccagatcatagatagatagatagatagatagatagatagatagatagataattagtttgttcttaggctgctgtagagaaatacctgaggctaggtaatttataaagaaaagaggtttaattgactcacagttccacatggctggaaagtcctcaggaaa

SEQ ID NO: 239676 - DNA, 468 bp, Homo sapiens
acatacaggccaatggaataaaattgagagttcagaaataaacctatacatctatggaaaaycgatttttaacaagagcactcaccttgcttaatgagtttctatctgagttgagaatttctccctgggatgataaaaagttttgcaaataatgatgatgggttgcatagcattagcaaatgtaatcgacaccactaaatgatatatgtaaaataattaagagatcaaattttattttatgtgcattataacccaaggaaaaaaaataaaaaggaaataaaacagaatgtatgaaatatagattttaattgatcaatatgccattccaagtagttttgattttatcctgatgaattaatcctgtttttttctaattatatcatcataattacatttaataaaaatattaaaaaaattaaaaatttagagattggcagaatggataaaagtaggttaactacatgctct

SEQ ID NO: 239677 - DNA, 468 bp, Homo sapiens
acatacaggccaatggaataaaattgagagttcagaaataaacctatacatctatggaaaatcgatttttaacaagagcactcaccttgcttaatgagtttctatctgagttgagaatttctccctgggatgataaaaagttttgcaaataatgatgatgggttgcatagcattagcaaatgtaatcgacaccactaaatgatatatgtaaaataattaagakatcaaattttattttatgtgcattataacccaaggaaaaaaaataaaaaggaaataaaacagaatgtatgaaatatagattttaattgatcaatatgccattccaagtagttttgattttatcctgatgaattaatcctgtttttttctaattatatcatcataattacatttaataaaaatattaaaaaaattaaaaatttagagattggcagaatggataaaagtaggttaactacatgctct

SEQ ID NO: 239678 - DNA, 468 bp, Homo sapiens
acatacaggccaatggaataaaattgagagttcagaaataaacctatacatctatggaaaatcgatttttaacaagagcactcaccttgcttaatgagtttctatctgagttgagaatttctccctgggatgataaaaagttttgcaaataatgatgatgggttgcatagcattagcaaatgtaatcgacaccactaaatgatatatgtaaaataattaagagatcaaattttattttatgtgcattatamcccaaggaaaaaaaataaaaaggaaataaaacagaatgtatgaaatatagattttaattgatcaatatgccattccaagtagttttgattttatcctgatgaattaatcctgtttttttctaattatatcatcataattacatttaataaaaatattaaaaaaattaaaaatttagagattggcagaatggataaaagtaggttaactacatgctct

SEQ ID NO: 239679 - DNA, 584 bp, Homo sapiens
ttagcaaatgtaatcgacaccactaaatgatatatgtaaaataattaagagatcaaattttattttatgtgcattataacccaaggaaaaaaaataaaaaggaaataaaacagaatgtatgaaatatagattttaattgatcaatatgccattccaagtagttttgattttatcctgatgaattaatcctgtttttttctaattatatcatcataattacatttaataaaaatattamaaaaattaaaaatttagagattggcagaatggataaaagtaggttaactacatgctctctaaaagagatactttatattcaaagacacaatacgttgaaattaaagtgaaggaaggggatatgccatgagtagccaaaatagagctagatatactaatacagacacatatattttaagccaaatttgttactgaagtcaaagacattataaaatgatgagtgattcaactcatcaggaagttataacaattataaatgtatatatgcccagctacagaaatcagaaacacaataatcaatctaacaatgcaccttacggactagaaaagcacgaataaacaaaacc

SEQ ID NO: 239680 - DNA, 584 bp, Homo sapiens
ttagcaaatgtaatcgacaccactaaatgatatatgtaaaataattaagagatcaaattttattttatgtgcattataacccaaggaaaaaaaataaaaaggaaataaaacagaatgtatgaaatatagattttaattgatcaatatgccattccaagtagttttgattttatcctgatgaattaatcctgtttttttctaattatatcatcataattacatttaataaaaatattaaaaaaattaaaaatttagagattggcagaatggataaaagtaggttaactacatgctctctaaaagagatactttatattcaaagacacaatacgttgaaattaaagtgaaggaaggggatatrccatgagtagccaaaatagagctagatatactaatacagacacatatattttaagccaaatttgttactgaagtcaaagacattataaaatgatgagtgattcaactcatcaggaagttataacaattataaatgtatatatgcccagctacagaaatcagaaacacaataatcaatctaacaatgcaccttacggactagaaaagcacgaataaacaaaacc

SEQ ID NO: 239681 - DNA, 584 bp, Homo sapiens
ttagcaaatgtaatcgacaccactaaatgatatatgtaaaataattaagagatcaaattttattttatgtgcattataacccaaggaaaaaaaataaaaaggaaataaaacagaatgtatgaaatatagattttaattgatcaatatgccattccaagtagttttgattttatcctgatgaattaatcctgtttttttctaattatatcatcataattacatttaataaaaatattaaaaaaattaaaaatttagagattggcagaatggataaaagtaggttaactacatgctctctaaaagagatactttatattcaaagacacaatacgttgaaattaaagtgaaggaaggggatatgccatgagtagccaaaatagagctagatatactaatacagacacatatattttaagccaaatttgttactgaagtcaaagacattataaaatgatgagtgattcaactcatcaggaagttataacaattataaatgtatatatgcccagctacaraaatcagaaacacaataatcaatctaacaatgcaccttacggactagaaaagcacgaataaacaaaacc

SEQ ID NO: 239682 - DNA, 610 bp, Homo sapiens
agctcactcacttattaatcattatttcctggggagaaatatggaatgaatttgattttcatctacatttgattgtttcctagtaaaaccacattttgctaaattcaaaatgtatcatgtgaaacttcttggctttctttgmtcctttttatctacctcaatgatgtcattaacatattttacaacttaatttttttatggagggaaacatatgccaaaggagcatgtatgcaagtccatattacatccatattacacccccttgcaccttattttcagtctgagtagttctgattcctttgtctactgacagagtgtggacagtacctctaagatttcattttaggcaatgtgtctgctctctgagaaacaggacagtttgaagcactacactagaagcaggcagaagtgctattagacaggcactggctgctgattgccaagaatcaccaggggcaggggatgagacatgtggaattgacagtggtgagagattattgttgttctgcaaagcaagacgtcaaaagatattcctaggtgtttgccagatgacagacccccttggggatattttctgtgaaaagattaatctcagtcacattcagaactt

SEQ ID NO: 239683 - DNA, 610 bp, Homo sapiens
agctcactcacttattaatcattatttcctggggagaaatatggaatgaatttgattttcatctacatttgattgtttcctagtaaaaccacattttgctaaattcaaaatgtatcatgtgaaacttcttggctttctttgctcctttttatctacctcaatgatgtcattaacatattttacaacttaatttttttatrgagggaaacatatgccaaaggagcatgtatgcaagtccatattacatccatattacacccccttgcaccttattttcagtctgagtagttctgattcctttgtctactgacagagtgtggacagtacctctaagatttcattttaggcaatgtgtctgctctctgagaaacaggacagtttgaagcactacactagaagcaggcagaagtgctattagacaggcactggctgctgattgccaagaatcaccaggggcaggggatgagacatgtggaattgacagtggtgagagattattgttgttctgcaaagcaagacgtcaaaagatattcctaggtgtttgccagatgacagacccccttggggatattttctgtgaaaagattaatctcagtcacattcagaactt

SEQ ID NO: 239684 - DNA, 610 bp, Homo sapiens
agctcactcacttattaatcattatttcctggggagaaatatggaatgaatttgattttcatctacatttgattgtttcctagtaaaaccacattttgctaaattcaaaatgtatcatgtgaaacttcttggctttctttgctcctttttatctacctcaatgatgtcattaacatattttacaacttaatttttttatggagggaaacatatgccaaaggagcatgyatgcaagtccatattacatccatattacacccccttgcaccttattttcagtctgagtagttctgattcctttgtctactgacagagtgtggacagtacctctaagatttcattttaggcaatgtgtctgctctctgagaaacaggacagtttgaagcactacactagaagcaggcagaagtgctattagacaggcactggctgctgattgccaagaatcaccaggggcaggggatgagacatgtggaattgacagtggtgagagattattgttgttctgcaaagcaagacgtcaaaagatattcctaggtgtttgccagatgacagacccccttggggatattttctgtgaaaagattaatctcagtcacattcagaactt

SEQ ID NO: 239685 - DNA, 610 bp, Homo sapiens
agctcactcacttattaatcattatttcctggggagaaatatggaatgaatttgattttcatctacatttgattgtttcctagtaaaaccacattttgctaaattcaaaatgtatcatgtgaaacttcttggctttctttgctcctttttatctacctcaatgatgtcattaacatattttacaacttaatttttttatggagggaaacatatgccaaaggagcatgtatgcaagtccatattacatccatattacacccccttgcaccttattttcagtctgagtagttctgattcctttgtctactgacagagtgtggacagtacctctaagatttcattttaggcaatgtgtctgctctctgagaaacaggacagyttgaagcactacactagaagcaggcagaagtgctattagacaggcactggctgctgattgccaagaatcaccaggggcaggggatgagacatgtggaattgacagtggtgagagattattgttgttctgcaaagcaagacgtcaaaagatattcctaggtgtttgccagatgacagacccccttggggatattttctgtgaaaagattaatctcagtcacattcagaactt

SEQ ID NO: 239686 - DNA, 619 bp, Homo sapiens
ctgggtgtttggcaagtgtgctatctatgtggtatctaattatttttataagcttattgaaataaataggggtccatgagagaggcccttcttaaaattgacacttggacagtggtgtacattttttggggtccaaagacttgtacccaacatccctaaaactaaactgtcttctactctaaaactgtctatatcgcttgatatcaytatctacttatgcctgaaatctagacacaatcttaatgttccccttccttttagtacatactcacaatttttcatcaagtcctgtgattttacttactaaatatttggaaacttctctgatttccacctctctaccgccacccttgtttaggttctcctttttttctccacaggcagcaataacctcctaacaggtgccctttcttctgggctttgccttctgagttttgttctgcactcgttcccaacgttatctgtccaaacaaaatctgactgtgtggttcacatgctgcaaacccgccattggcttcctgttgcccacgggacaaagcccattatcttcaactttgcactcaagtttatgttctgactcttttgtatcatcttccagcacttcctaagctgggcttga

SEQ ID NO: 239687 - DNA, 613 bp, Homo sapiens
tgcatacatagccatttccttttgaagcgcagggctctggttctttgtatctttagagtctaagaagcagtggcagtggttggtacagagttggtgctcrgagaatgaacagctgaatgaatgaatggatgaatgaatgaattaatgaatgaacgaatgaactgatgaaagtgtttataaactgcaaagctggatagagagcccattcccggtgaactctggtgatgccagttttacaccacctctgactgtcagggagaaaactttcctgaatcttccttttttttttctgtcttgagagggttggcgggaatctgtgcgcctggtgggcatctgcagttgatccagattgtcacaatcctcagtgttaagagaaagaccaaggatgaggtcaaggtcattagaaatagaaactttcacttttatttcccattgatgggaaagctcggcacactgaagtttaagaacagtttgaactgttaagccctttcagatatgtaatggtcatagacatctgctctctgcatcaattgtacttttctttgtaagtaccattttggtggttacactggccaaagtggcaactgttgttagctgcagatcctcagacaca

SEQ ID NO: 239688 - DNA, 573 bp, Homo sapiens
aaaacaaaactgacagataaaatggtatgtattttatcttttctaaaatacagcatacatacatttttattatagatagagaacaaatctacaagtcatgacatgaaaagaacacagaatctggtggatgctcartcaatatctgttgttggagcaaccttaatccaagtgaaaaaaatgctggctggtttgttttgatctattttgaatcttcttccttgataattttgtaataaatagtactattttatggctcatttgaatatttcctatcattaattgaggctactgagatctcttttcccattgatttgatatttcatgtttgattctctcaaattgggcactaaattaacatatagtcattttgtatctgagtacaaaagttgtgtttgtgtcaattgctgatatatgggcatatttgtgttaggtcatcatcttaaaatggagtccaatagaattgcttaaaagggcttatgttaggctgtttaaataaaatttggaacatgatagatattgcagggaaatgtatcttacggaaaatttgtttttatctgccttttattggcagca

SEQ ID NO: 239689 - DNA, 560 bp, Homo sapiens
taaactagaaatagggaagaatttgcccaacttggtgaaaaatattaacaaaaatcctacggctaacatcatacaaaatggtgagaaactggcagctttcccactaagatwagaaacaaggcaaggatgttctctttcattgctcttattcagcatagtactagaagtcctagctaattcaatgagacaatgaaaggatataaagttatacttattgggaacaaaacataaatttgtctttgtttgcagatgacatgaatgtttatgtagaaaatacaaactatcatcaaaaaaaaaaacttgaggaactaataagcaattatatcaagagggaaatgtacaaggttaacattcaaaattcaatcacttccttatgtaccagcaatgaacaagtcaaatttgaaattaaaaagacaatatcatttacattagcatcaccaaagtgaaatacttaagtataaatctaacacaatatgtacaaaatctatatgagaaaaattacaaattctaataaaaaaatgtaaaataactaaatggagaagtagtccatgttcatgaac

SEQ ID NO: 239690 - DNA, 559 bp, Homo sapiens
caatattaaccgcaaaataaaatgctattgttaatattcattgcaacatggaattactgtctatagaaaaatggtcttcatgtgagtatatgtcaaaattcaggacaattatttgatatttctagatttcatttattaattttattgtattagaaatgttagaaatgttgcttatcttgataagattataaagatgatttggtagtcactgtgggctatcrtgttaagtgaatggaagtcaggtaaaaagtgtgtttgtgtgtgcatgtgtttgcttatttttgataagcaaagataacaccttacttacaccatctggatgcttttaattaaatttaattaaacataaccttcaactaacttgtttttcttagaaaacacacagacataaaccacatacattttcttttaacttattttgtaataattcataatcattttttatggtacataattttttgtaaatttcccattaaattaaattacccagttttcctgaatttggagttttttgtatatttttttccgaaatacctggtagcattggctgtcactttgc

SEQ ID NO: 239691 - DNA, 470 bp, Homo sapiens
taattaaacataaccttcaactaacttgtttttcttagaaaacacacagacataaaccacatacattttcttttaacttattttgtaataattcataatcattttttatggtacayaattttttgtaaatttcccattaaattaaattacccagttttcctgaatttggagttttttgtatatttttttccgaaatacctggtagcattggctgtcactttgcattttgagttagttgtgtttgaaaactcaaaacttctttcccctcacagatcctttccagctatttcgttgttagtaatttgaatagataatttatagggtccgtttttgacataagattcatgtgaaatattctggtaatgccaatttttagaatattttattcaaggatgaatgtcttctaaacaatgatgcaactttaaataaaatggctgaatgttaagttaccatatttgtacaactttaaa

SEQ ID NO: 239692 - DNA, 558 bp, Homo sapiens
aggggtagaaatcttattcagagaaataatgatagaaaacttttcaaaatgtgtgaaatatataaaagtccaaatacaagaaagtcagagagcaccaaacagattaaactaaaatgaaactatcccaaggcaaataaccaatctcaagggtcaagaacaaacagaagatcctaaaggtagcaaaagaagagaagttaataacctataaagaagctccaatttatctggcaacaggcttctcaaccgaaattatacaggccagcagagagagggatggcatatttcarttgctgaaaggaaacaattgacaacccacaattttgtaccctgcacagctattatttcaagcatgaagaaacaacaaaatatttcttagacaaacaaaagctgaggggatacatgatcaccaacctgtcttataagaaatgctaaaggaaattgttcaatatgaaaaaaataccgctaatgtgcagaaagaaaacatttgaaggtataaaacttaatgataagagtaagtacacagaaaaagtcaggacacttgaacacaataattgtggc

SEQ ID NO: 239693 - DNA, 514 bp, Homo sapiens
cagtaggacatcataattataaatatctatccatttaacataggcctaccaaagtttataaaacaggaatagrtttaaagggagagatagactacaatccaataatgggagatgatttcaacacttcattcacagtaataaacagatcatcctgacaaaaaaaaaaaatcaacaaataaacatcagagttaaactacatactagaccaaatcagcctaactgatattttgagaacatttaacccaactgccacaggatacagatttttctcattaacacatggaacattcttcagaatagaccatatgccaggcaagaaaacacaagtctcaacaaattcaagagtgaaattataccacatctgtatcttgattacaatggaataaaactagaaatcaatagaaacaggaaatttggaaaccataaaaacacatagaagttaaacaacatgcccctgaacaatcaatgagtcaatgaagcaatcaagaagaaaatttgttattgaaacaaatga

SEQ ID NO: 239694 - DNA, 498 bp, Homo sapiens
tttgctttacatgattaacatttcacccagcctaatctatatatttggttttaaacttctgggatggtctgtgatgcatgctttgaatgaaaaacaacagcctcaactscgagaagatgattttcttatggtcttaccaccagaactgatccatctgctttcaatttcttgcactttaaaattcacttgtatatttgtatgtgtgtgattcattcacattttggcccctgcaaaaagctttggttacctatcaaacacaatatgaaatgctgtcagtttattcatctgtcccttcatgtagagaattgagaaggaggctgtggaaagcagctataaactgctgtggaaaacagctatttctgaaaaattcctagtattgaatttcaaaaactcaaagcagcataagatcagcccagagtgcagtatttctctgtggtttaagaaccatattacgtagtacatatatgttcttttattaggttaaaatttcaatataac

SEQ ID NO: 239695 - DNA, 550 bp, Homo sapiens
atgcggtaaatttctaactaggtagttaatgtagtatctgaatagcagttctggttcataaaagagctagataaaacccaaaaatcttcctatgtctgctgcataaattattcattttgaggactcaagaaagcagagaaagttgctggtaagtgttttgtactaattatcagaagaacgatgattggagaaagctttctaaaaatgtaggatgccataacctaaatcttttcatggagatagtccctggcaaagcaaatgaataattgcaacaaaaagaatgcagggaacaatgggaaaaaatgggaaggctaacatatgaaatagaacaattggaaagggtgtgtgattttagcataaagaaggtgaggaataataacaaagctagagaaaattgtgagacatttgtaatatcakggttaaacaaagttagggagcacggaaataagtgagaaatgctgaagggtatgagatatattatggcgataatggaataaaactggaggattcaaaattcaatgtgaatatggttatctgtgatattaaaaca

SEQ ID NO: 239696 - DNA, 540 bp, Homo sapiens
tcctttgtgtggaatcttcttttcttatatatttgtttgacttgctccatcaccttcttcaggtctgtgctcagtgacattttctctatggcttttgtggccaccstacataaaattccaaaccaccctccatcgagaagcgcacaaacaccaggagcaaacaccatcaccatttgaaagaatatatttgtttacctctttctactagaatataaactctatcttagcagaaatatttgtctgttttattcactctttgaattaatttggcaaaatattgtctggtatagagtaggggtttgataattatttctgggctggttggttatgctaatggcaatgtagtccacttgccatgtattaaacaaagtgtatatttgaagccacaccataaataaggttttttggtattaattttctatgcattgtttatttacccaaatattccatgcttgagcttgcttactttgagtaagattttattgccaataaataactaaaaaggaacattttgaattttggttttatgagttgtatgca

SEQ ID NO: 239697 - DNA, 312 bp, Homo sapiens
ttccagtgtgtttcttaagtgtgtctatttgtatgcattcttgagaaacgtgcttttctctrtaatgtgtcatgtttcattgtattgcccacctagtgtcttctcagggtataggttctgtctcaaacaggactgtgaggccctttggcctcatcctcccctcccctccccgccacattctgggtcttcctggcaccccagatcagctttgtctgcccgtgagacacgggggccacacaggctttgcctcaggctgcaccaggacattccccagagctgagtcctgtccacacagcctgcttgccggaaacc

SEQ ID NO: 239698 - DNA, 595 bp, Homo sapiens
gaaggcaagccccgcctatttaacatgaggccataggaccagcctccctggatccgaaagggccactcactccctccaaatgcaytcagcctgcaggggatacaagggaccagggaaagagaaagacttgagggcctctgtctaaggggctggccatctgtgctaggacaagttgctgcttctgctccaggaagcccagataggactggactggacttagaccacttaccccagaagtccaaaaacccaatctctgcatgtctctgagtggtcagggggctgggattctaaagctgctggtcagtccctaactccagcctaccctgatgggccaggtaagccaactcaccctcagtcatcttctgggacacatgaagcaaacaaaatagccctgtggttctgtcttcacttttcagacaattgcccacggctcaacaagagctagtgggttaatcccctaatttccagtaacctcaggccttcaggacagagtccatggcctcatttctgaatctgctttgtcattgtttgagcctgttactggcatgagacaacggtgggggagggggtatgtcacaggctcctgagtcaaagc

SEQ ID NO: 239699 - DNA, 634 bp, Homo sapiens
gtttgagcatcactgcactaggagaaaatcaagagcccttttgatactgtcactcagaagcccagctgtatgcctgacacaactattaaacatactgaacaaatacagtgtacatgaactatccagacagactccccaagccagggtcctctgaccctgagaggtacacagagtctggggcaaatggaaaagccacctgccctttcccatctacaaagctgaggcacagggtgcaggcctgctacacctagcacgcgaggcactggtttggggaagtctggactagcagtagctcagccctgggagtcccatgaggaaactgctatgcaccgagaccgtgcgcacctcctcacagctgtgctgggctcagtcacagggactgtgagaataagggactgaatacatggacgcccccaccacaaggtcaagcatagtgacacactcactctccaaacccccacagccatcttcyttcccatctattctcctacccacacagcctgaaagggcttacagagaaaacacacagatccaagctgctgtttctgtacaagcttcaggtggggatctactgccaaggaataaaactgaagcttttcagtctgacacagcccttgctcctgggactccttga

SEQ ID NO: 239700 - DNA, 543 bp, Homo sapiens
acctcaagtgcctcccttctgccggccttttaccgccccgacgcccgggcgctaaggggccaaaccgcccggcccggagggtcccaggggcgggccccgcgcttgcgcagcctctagcctgtgctgcatcgcgcgctaccgcgccaccgccatgtgacccgccccgccccccgtgggaggagctccgggcctgcccccgactcgccgacctccgggccgcggtctcctagctccggtggcgctcgggygtgtgccccagcggtccttttacgcacagcgctcggtcggtccactcctcaagtccgcgaaccgaggccccgacgcgttcttcagggcgctgcctagggcaaaagaaggcgctggacacccctaatggagcctggaagcacctgtcctgcagccgaggctggccaacttccttccaatcttcagcctggttttgaatagctcttttgataggttttttttttttttttaacctccatgggcagggggaatctaaaggaccgacacattcgatgagccccttcaagctgtatgtac

SEQ ID NO: 239701 - DNA, 604 bp, Homo sapiens
gactgagtttatagctactatctcttaatcaaatgtttctccccctttttattccataattaaagctgaaaaaagaagcaggttttatagacaatgttcattatgtttattgatgcttagatgagagaatcatttattaaagcaatatttaaaaagtgtgaatggtgaattaaatcaaaaagtgagattttttttaaaaggataaaagccctatacatagttttaaaaaatacagatgctgatgcggtcttagtctgagtgtagtgtgagcacagggatatgcctgtatgcacacatacacaagcagcccctttctctttaagattcacaaagaaataatgtttaaggtgatggatatctcaaatatcctgatttgatcattacatattgtatgcttgtatcaaaatatcacatgtacatcgtaaatatgtacagctatttatatcagtaaaaattaaaaattaaagaaattttgaaaaagattcayggatctaaactgaaagagaaaatacaggaacatatcaagaaggcagtgatcaaaataaaggaatttaaagtatttttaatcaaagtgacctgatagctacattaaagtgcttcaaag

SEQ ID NO: 239702 - DNA, 547 bp, Homo sapiens
tctacaattatagttggaattttcaatagcccattttcaataatggatagaacaattacacagaagaatattatcgaaataaaggtcttagatgacataaactaaacctaaccaacacatagaaaactctacccaccaacagcagaaatacacaagtacacacggaacattctccaggacataccatacaacaggctacaaaacaagtctcagtaaattgtaaaggactgaaatcayacaaagtatcttctcttaccacaatggaatgaggctagaaatcactaacaggaggaacactgttgcaaaatatgtgaaataagcaaatacatggaaattaagctacacactcataaacaatcaatgggtcaagaagaaattacaagggaaattttaaaatacttaagagatgaataaaaatggaaacagaacatagcaaaacctatgggatgcagagaaagcagcattcaaatggataggtatagctataaatgctagtattaaataaagaaaagagatccaaatcaataacttaactttacactttagg

SEQ ID NO: 239703 - DNA, 667 bp, Homo sapiens
gttgcagtgagccatgaccatgccactgcattccggcctggacaaagactgagataagaaaattwaaaaaaaatttttttaattaaaaaaatgagtagaggtaaatgaaacatagaaaagttaataaagccaaaagtgattctttgaaaaagatcaataaaactaaaattttttttgaactgattgaaaaaagaaagaaggttcaaacaaataaaatcagaaatgaaactggggacattactacagatcttgcagaaataaaaataatcacaaaagaatactatgggttgggtatggtggctcacacctgtaattccagcactttgggaggctaaggcaggtggatcacttgaggtcagaaagtttgagaccggcctggccaacatggcaaaatgttatctataataaaaatacaaaaattagccaggcgtggtggcatgcacctgtaatcccagctacccaggaggctgaggcacaagaattgcttgagctcaggaggcagaggttgcagtgagctgagatcgcaccactgcactccagcctgggtgatacagtgagactctgttcaaaacaaaaaaaagaataatctgaacaattacatgccaataagataaccaacatgaaatggtcaaattcctagaaagatataaactaccaaaattgactc

SEQ ID NO: 239704 - DNA, 667 bp, Homo sapiens
gttgcagtgagccatgaccatgccactgcattccggcctggacaaagactgagataagaaaatttaaaaaaaatttttttaattaaaaaaatgagtagaggtaaatgaaacatagaaaagttaataaagccaaaagtgattctttgaaaaagatcaataaaactaaaattttttttgaactgattraaaaaagaaagaaggttcaaacaaataaaatcagaaatgaaactggggacattactacagatcttgcagaaataaaaataatcacaaaagaatactatgggttgggtatggtggctcacacctgtaattccagcactttgggaggctaaggcaggtggatcacttgaggtcagaaagtttgagaccggcctggccaacatggcaaaatgttatctataataaaaatacaaaaattagccaggcgtggtggcatgcacctgtaatcccagctacccaggaggctgaggcacaagaattgcttgagctcaggaggcagaggttgcagtgagctgagatcgcaccactgcactccagcctgggtgatacagtgagactctgttcaaaacaaaaaaaagaataatctgaacaattacatgccaataagataaccaacatgaaatggtcaaattcctagaaagatataaactaccaaaattgactc

SEQ ID NO: 239705 - DNA, 533 bp, Homo sapiens
aatactaacattaaaacttatctcctatcacattaaaattccatacttgaaatcattaacatgatgggtttggctaattttctttaacagtcttgattttaaaataatcaaaagttgtgattttggccacaaatagtttttctcattatttattattcttacattgattgcttccacgttcagttgyagtttttagatttaatatatatttaacagggaaaaattaaagaaatttggagtttcatcctttataaaatagtttgaaatattgtgctgtatgggaataatagaagtgtgtaaatagcttgatagaaatagaagtaaaggtggtaacattttttacgacacagtagaaaataaacccagagtttgattgttataatgctgcttaacaatgtggctttagaatctggtttgtatctaagctctagggcatactaattttatgaatttactaatttacttaatttctgtaaactttaatttgctaatacctaagttggaaacaataatagtattcatccctcataatt

SEQ ID NO: 239706 - DNA, 681 bp, Homo sapiens
cttttctcttgaggaaaacccctgcaaacattataagttcatcatgtaaattgctgttctagctcttcctaaatgtgtctcctttgtatcattcaccaaagtaactatgcgatagaaaacggagagtctcagacaatctggaagttattatgctctggatctaagtttatatattttcctggagaaacataacatcacttctacgcatcaaaatgataagtagagtgccaagacataaatgcagtatttatttttatcaaatttgcttcatggtaggtcggtgagaacagaactttcctcagttccagagtttaatggcaggaaaatcaattacatttgtaacttgactcccaaaggaagggctatactgttcaagaaaagctcatgaaattatctttctctgtcaaagaaaaaaacaaaacaataaacatacctgaaataattataaagttaaataccatcaccaagatgaaatattaacagtgggtgagtcttatcaaatcttcatttacttgccagttttacaattactgaagattgattgattcagcacaatgacaatgaattattaaagccttaatcaggtggtgactcccattacagctgctattctaggtttagttttctttggaaaagcaaatcagcacatctcctggcrttaggaatgcaactattgaattg

SEQ ID NO: 239707 - DNA, 495 bp, Homo sapiens
tcaatgtgtcattagaaaaaactcaattgggaggcctggcataatgtgaaggctactttatttaatattgctatttgacatttaagaaagtcacaaatatcatgttgggcacctaacattattttttagaatgcaaagaccgtgtaaatacatagtaattgggaacagtgaaacattttaacttcttattgytaccttgagattaaacgtgaggtgagcagtataggtaagatttgctggtgctagttatagaattagcttttgtgttcaatcgaatgccagtcagctggaaaaaaatgtactaggttccattgaaatagagtagtccaattggtggaaattatgctggaggagttatttaactttagtgaaacaacccaagaattgacagacaattaacaaaaaaggagaattcccatgtttcttttcctctatatcataatctgatttgagaaatatcattaatttaattacaaattgcaaagaaaattaatt

SEQ ID NO: 239708 - DNA, 649 bp, Homo sapiens
aacaccaaacaagcaaacaaacaaatacactttcacttgcaagatcttttccacaggcatctaacttttgctcatgacaaacattgtggtaagtgttggagatgggacagagccattttaagtggtacacaggcagaaaagcaatgcccatttctagactcatctgtcatcaaagtgaaaggcttaactgaaggaaaacaacctgccccgaagtcccaaagycaaggaaatgattgggtggctatagaagcaaaatgtatatatatatttttaggacaagatagcaaatctccctgtcccaatataagtctagtcttgtaaggatccacagcaacctgggctgactgctgagggacagacagaaagcactccagctcccaatcagagaaacacactctgcttccacagaagtaatagacccaaaaggagtgtgtgcctgggaaggagaaaaaagaagactacctataaggttataaacttgacatccagataataccaatttctatttgttgagctctctgcaatgacagatagaatatattgggattttcatgtaaatgattgcaatcaatacaagaacatgggtagatgataccccattttgtaaattaattagctaaggatcagaaaagataagtagctttattgt

SEQ ID NO: 239709 - DNA, 649 bp, Homo sapiens
aacaccaaacaagcaaacaaacaaatacactttcacttgcaagatcttttccacaggcatctaacttttgctcatgacaaacattgtggtaagtgttggagatgggacagagccattttaagtggtacacaggcagaaaagcaatgcccatttctagactcatctgtcatcaaagtgaaaggcttaactgaaggaaaacaacctgccccgaagtcccaaagccaaggaaatgattgggtggctatagaagcaaaatgtatatatatatttttaggacaagatagcaaatctccctgtcccaatataagtctagtcttgtaaggatccacagcaacctgggctgactgctgagggacagacagaaagcactccagctcccaatcagagaaacacactctgcttccacagaagtaatagacccaaaaggagtgtgtgcctgggaaggagaaaaaagaagactacctataaggttataaacttgacatccagataataccaatttctatttgttgagctctctgcaatgacagatagaatatattgggattttcatgtaaatgattgcaatcaatacaagaacatgggtagatgatacyccattttgtaaattaattagctaaggatcagaaaagataagtagctttattgt

SEQ ID NO: 239710 - DNA, 575 bp, Homo sapiens
aagacctttgtctggtttttccattggacattctgtccttgtgtatattcataaagaatgatatttcaaaatccaaaattaatatgttaccttgctacctctttttcagcttcattttttaataatgtttttrttttcacttttaatgctttacttaaacatgtttatattgttgtataattatatatagtaatatacacagaagagtgctttttaatgaaattcgccaaatgtatacattcatgttccaccacagtcaacttacagaatatttcccgcatcctgggaagttcactggtgctttttttcagacaatcccccacccaactataagcaagcaccactctgatttctattcacaaagacaagtatatcctttatgtgtcaggcttatttttctcacctattatatgctgaatcttgtatattttagcatacattatcagtttcttcctttgtattgctgagctgtatctcgctacatgtatataccacaatttgcttataacttctcctattgatggacattgccttgttttttattttttgttattaaaaataaggctaaacaataa

SEQ ID NO: 239711 - DNA, 535 bp, Homo sapiens
ctctctttggttggtttgggagcgggggtggactctgttcctagaaaatcacagacaccttctcttgagctatatccctggttagtacaacatttcttaatcttgccaaacaagattatgtccccgaactgtaaaacttcccacacattgaatacatagaaaggatgagaaatacgatggccctggacaggtaaggaagaaattacaaaaggaaagttggagagcccattgccaacaccgcactggggccattggaggctgggrtaagtacagaagcctttggataataccgaggggtagccctgattggaaatcctcagttgtcccaggacttcttccagtaccacatgatgtctaagtcctccatgaaagaaaactggtttaaacatggctcactgagaactcccatacccttgctatctgcctaagtgattactttttaactcctatatcacagttacctcccacaaggtcccttcctcaacacgtggggattacggtttgagatgagatttgagtgggaacagagagccaa

SEQ ID NO: 239712 - DNA, 414 bp, Homo sapiens
atcaaggtggagatgatacttagtagtaccattaaagctgatctgctcagttcctgctagagatgctgtacttagggaaaatttattaacatataaataaatcattacactgtgatctggagtttgttaaaawttttttttctataatccaaatctgtctttcattctgcaaatgcatagacataaacactaatgtaagtctttgggaaattaaagtagctacaaatataaatacctaatatcttttgggaaaaaatattaaaaatactcattttaaatttgtgctttcatccagaagccaaaaaaagctgtccagcttttaaagaaagtgtagaatagtcttttacacagataatttttctcacattatgcttgggaggcaggaaatgttaaaagcagataataaagttgtat

SEQ ID NO: 239713 - DNA, 558 bp, Homo sapiens
tttacatgtgtgtagttcagtcttatttgatcaaggtggagatgatacttagtagtaccattaaagctgatctgctcagttcctgctagagatgctgtacttagggaaaatttattaacatataaataaatcattacactgtgatctggagtttgttaaaaattttttttctataatccaaatctgtctttcattctgcaaatgcatagacataaacactaatgtaagtctttgggaaattaaagtagctacaaatataaatacctaatatcttttgggaaaaaatattaaaaatactcattttaaatttgtgctttcatccagaagccaaaaaaagctgtccagcttttaaagaaagtgtagaatagtcttttacacagataatttttctcacattatgcttgggaggcaggaaatgttaaaagcagataataaagttgtatgataatatatggagtttattcaacaacatttttgacacaggcatttattaatcactcactatgtyctaacctttgtattggtcactagagagctagaggtaaaaggtacagagag

SEQ ID NO: 239714 - DNA, 433 bp, Homo sapiens
aaacatctcatatgtggtgaaatgtattggtctacatttctaactgaatgttagtaaattttttaagggcagtggccatcagcctgaggtttttmgagaactagcatggtacacattctgaaaactttactgaggacagcaaaaaaaaatgttaagaaattgttacagttcttacaaagaagatcctgggattctggggcaaagttgtttggacattcacctgaatgagaaacaacatctgttccagggctgaaatagatctaaatctctctgtaaggagttggctggaacacggttggattccactggtaatgagatctactcatagtgttgtgaagcccagtagcttctggtagccaggagaaatcagacctagagacctgtttttatattacctaagtttctggaaaaattaccagaagtcagacaaact

SEQ ID NO: 239715 - DNA, 433 bp, Homo sapiens
aaacatctcatatgtggtgaaatgtattggtctacatttctaactgaatgttagtaaattttttaagggcagtggccatcagcctgaggtttttagagaactagcatggtacacattctgaaaactttactgaggacagcaaaaaaaaatgttaagaaattgttacagttcttacaaagaagatcctgggmttctggggcaaagttgtttggacattcacctgaatgagaaacaacatctgttccagggctgaaatagatctaaatctctctgtaaggagttggctggaacacggttggattccactggtaatgagatctactcatagtgttgtgaagcccagtagcttctggtagccaggagaaatcagacctagagacctgtttttatattacctaagtttctggaaaaattaccagaagtcagacaaact

SEQ ID NO: 239716 - DNA, 561 bp, Homo sapiens
atgtcattttatcacatatgtaaattcatataaccaccacctcaattaagatataaaaccattgcatcaccacaaagatttccctgtactatccctttgttagtcacaacctcacactcctcatcctcaatccctgataactattccttttcccatccctataaygttgtcactttgaggatgtcatatcaatagaatcatagttagtgatattttgagattggcttttttcaggacacatatggccttggcatttatgctaattgttgcatataccaatatatcatttctttttattgctgaatagtattccacggtataactataccatcatttgtctaattattcatctcttgagagatatttttattgtttccagcttctggctattacaatttttgctactataaacaattgtgtacaggtttttctgtggacataattttcaattctctgaaatatattctgagctgataagcccagtacatgttcagtttttcaaggaaactgacaagttgttttccagagtgtttgtatcactttacatcgccacaggcaata

SEQ ID NO: 239717 - DNA, 561 bp, Homo sapiens
atgtcattttatcacatatgtaaattcatataaccaccacctcaattaagatataaaaccattgcatcaccacaaagatttccctgtactatccctttgttagtcacaacctcacactcctcatcctcaatccctgataactattccttttcccatccctataacgttgtcactttgaggatgtcatatcaatagaatcatagttagtgatattttgagaytggcttttttcaggacacatatggccttggcatttatgctaattgttgcatataccaatatatcatttctttttattgctgaatagtattccacggtataactataccatcatttgtctaattattcatctcttgagagatatttttattgtttccagcttctggctattacaatttttgctactataaacaattgtgtacaggtttttctgtggacataattttcaattctctgaaatatattctgagctgataagcccagtacatgttcagtttttcaaggaaactgacaagttgttttccagagtgtttgtatcactttacatcgccacaggcaata

SEQ ID NO: 239718 - DNA, 573 bp, Homo sapiens
atcttccctatcaagtatcaaacatatcattctccagcaatcaccttcaattttccaactcacctccttgtgtactccactcagaaaacaagtttgtctctaccaggacctaaaacccattgatctatgcttcaacctcattatatccccatcaatstgctttatacagctttgattcaatggcccttcattaaaaccattccaatgtgtatattttttttattttcatcaagaaacttttattgtgttaagctcctgtagtgttgcatttttcttaacttctttattcttattttcctttagagacagagattagtactgtataattccaattatctgttctcctcttcacatacagctgaatgaagggggaaagaaacacacaagcatgctgttcagtctcactttaaattcatgaccattagcttttaaggggaacttcgtactacctagcaatcttactacatgttattaatccattcagtatggttcttttctagaagagctttcacactttcttctctttcaaccattttccttattcagtttttttttcctattttactaacaaaa

SEQ ID NO: 239719 - DNA, 573 bp, Homo sapiens
atcttccctatcaagtatcaaacatatcattctccagcaatcaccttcaattttccaactcacctccttgtgtactccactcagaaaacaagtttgtctctaccaggacctaaaacccattgatctatgcttcaacctcattatatccccatcaatgtgctttatacagctttgattcaatggcccttcattaaaaccattccaatgtgtatattttttttattttcatcaagaaacttttattgtgttaagctcctgtagtgttgcatttttcttaacttctttattcttattttcctttagagacagagattagtactgtataattccaattmtctgttctcctcttcacatacagctgaatgaagggggaaagaaacacacaagcatgctgttcagtctcactttaaattcatgaccattagcttttaaggggaacttcgtactacctagcaatcttactacatgttattaatccattcagtatggttcttttctagaagagctttcacactttcttctctttcaaccattttccttattcagtttttttttcctattttactaacaaaa

SEQ ID NO: 239720 - DNA, 573 bp, Homo sapiens
atcttccctatcaagtatcaaacatatcattctccagcaatcaccttcaattttccaactcacctccttgtgtactccactcagaaaacaagtttgtctctaccaggacctaaaacccattgatctatgcttcaacctcattatatccccatcaatgtgctttatacagctttgattcaatggcccttcattaaaaccattccaatgtgtatattttttttattttcatcaagaaacttttattgtgttaagctcctgtagtgttgcatttttcttaacttctttattcttattttcctttagagacagagattagtactgtataattccaattatctgttctcctcttcacatacagctgaatgaagggggaaagaaacacmcaagcatgctgttcagtctcactttaaattcatgaccattagcttttaaggggaacttcgtactacctagcaatcttactacatgttattaatccattcagtatggttcttttctagaagagctttcacactttcttctctttcaaccattttccttattcagtttttttttcctattttactaacaaaa

SEQ ID NO: 239721 - DNA, 532 bp, Homo sapiens
gcatattatggtaatggtcatataacattctaatggagcatatataaaaaactgatatatagcacttgatattgacattgaagattaagcagtggaaattattgctagtaatggtgctagtacatytgattttccatatgaaaaagtgtatatatgaacacatatatcatctacgtatatttatgtacactctataatgttcacacaagggaattgtttatgcatttctcagaatgtattgtaatcattaacggggcatgactctatatataaacataaaaactggtgtgcgcttttcacctggagggttctaaagtttggaaacaatacagaactgctaccaatgtctggttgagaagaaaggacaatggagaaagcatgcattgttcctttttagcatgaccggatgaatacagcagacattagccaggcttgagccctagagagatgagaggagtcaggctgaaaaagaatttcaggaggacagatggagaacatagactgtgctcatgtcagggacttgcagtgtgaa

SEQ ID NO: 239722 - DNA, 545 bp, Homo sapiens
tgacatttatataagttgtgacagactctagccaagattttaccaaggatggtgcaaagtaagttcaaaaaagaaaatgaacagaagsaatccatttcctttatcattatgtatttactcataagaaaaccaatcttcaggaagtgaatcatgcaccttgaaaaggagtagtgaatcccaatagttatgttcttaactctgctaaaatgtcttttcgccttgataattttacttcctttgctgaaaccaaactggataggcacaagaaaacccaagtatagcatattcttttggctgccattatttccagactgattaaatatagagttgactgattaaatctaggcgagtttccttattactacttttaagtaattaattgatttcttgatatccgctcttcttctacaatgcatataagagttcactttttgtcacattatcctactaaaggggtgacacatgtttcagagatgtttttatgtagcaggatgcattgtcttctggctattttcccagtattatgccacacattaaaaacaagg

SEQ ID NO: 239723 - DNA, 634 bp, Homo sapiens
aaggcctgcaacaagtcacaagaagaacaattttagaataactattctcaagcgcacaagctctagactgggatcctgggaacgtggttaaattagatattgttagagaagatgggtagtacaacactcctacctttcaggtctgaagtttataacaggctagaacctccaggcaccagccataaccgtagagcagaatgggtaagtgccctgacttttgacctttctgattgtgattactacacttggtatttcctgaatttctattagttttttcttaaaatattgctggaaattttcacatactttctttggttttatgttttcatttctattctggtgtatttaatcaagtttctcacattattagtgtgcaccyatgcttttttatttatcacttatagatttattacttcatgtgtaattgtggattacaaagctatctttaacagaaattgtatttgaaataattctgcatagtctgagtagagcacctgtttgtccaagaaaggttagatttacttctgtaggctcctgggagtttatcactggaatgttaaattttcaatttgatgaacaaaatctatacttattataggaccctttatattcactcttaatttatatgacaatg

SEQ ID NO: 239724 - DNA, 539 bp, Homo sapiens
tgaataattttatcagtaaaactgaattaactattgccgtgcagataagcccattttgcatctatttgcaaatttattgtagcttgactcttttacactcttaaaatttgttgagtattttaggagctttaaaatgtgtgggctataagtgtttatgtttattatgttgaaaatagaaataagaaatcttaaaacgtttattggttcattttaaggtaacagtaatgaacacatcacatgatagcagaaataacacttcaatgttatgggtagacaggcatgagtggagcaagagagggctctctccccacacacgagaaatgttgggtgayggtttggcaattaccacattgcttctctaaaagtgataaattggcagtcagcacctgggagacgacagctcttgatggcctacatctgttatattaaagttttaattaaagcaggttcccaaagagaagcaacttcctgggcatgcacgttaagagacgaaattggtgaagtatgatcttctaggtacactccactggaaaaaggaa

SEQ ID NO: 239725 - DNA, 539 bp, Homo sapiens
tgaataattttatcagtaaaactgaattaactattgccgtgcagataagcccattttgcatctatttgcaaatttattgtagcttgactcttttacactcttaaaatttgttgagtattttaggagctttaaaatgtgtgggctataagtgtttatgtttattatgttgaaaatagaaataagaaatcttaaaacgtttattggttcattttaaggtaacagtaatgaacacatcacatgatagcagaaataacacttcaatgttatgggtagacaggcatgagtggagcaagagagggctctctccccacacacgagaaatgttgggtgatggtttggcaattaccacattgcttctctaaaagtgataaattggcagtcagcacctgggagacgacagctcttgatggcctacatctgttatattaaagttttaattaaagcagkttcccaaagagaagcaacttcctgggcatgcacgttaagagacgaaattggtgaagtatgatcttctaggtacactccactggaaaaaggaa

SEQ ID NO: 239726 - DNA, 539 bp, Homo sapiens
tgaataattttatcagtaaaactgaattaactattgccgtgcagataagcccattttgcatctatttgcaaatttattgtagcttgactcttttacactcttaaaatttgttgagtattttaggagctttaaaatgtgtgggctataagtgtttatgtttattatgttgaaaatagaaataagaaatcttaaaacgtttattggttcattttaaggtaacagtaatgaacacatcacatgatagcagaaataacacttcaatgttatgggtagacaggcatgagtggagcaagagagggctctctccccacacacgagaaatgttgggtgatggtttggcaattaccacattgcttctctaaaagtgataaattggcagtcagcacctgggagacgacagctcttgatggcctacatctgttatattaaagttttaattaaagcaggwtcccaaagagaagcaacttcctgggcatgcacgttaagagacgaaattggtgaagtatgatcttctaggtacactccactggaaaaaggaa

SEQ ID NO: 239727 - DNA, 538 bp, Homo sapiens
tcactaaccactgctggttctgactctaactctctttactttctctaaatgacaatatatttatttatttcaaagatttttaagtctttttgagaatctgttcttatatttgccaggatataattggacaagttgattgggcaaccaaggttttagctggaatttcatatttgaggataatttacattgactcagatatgaccaagatacttttaatgatgtaagactacttaaataakggatctaatgtctacaaaattctgccatgaaaatgaatctagtgcaggtgtattgagtcccagactacgggtagtcaagaaagtaactcctggaaatcctggaactgtgacagatttgtgggagcgggcttcaaaaagagaagaacacatataaatttatatgtattgcagatgaaatgttacagagtagttcttcaacttggttttctagcctggagatatcaaatatggcttttaaaagttcaataatatattccttgtgaaaacttatggactaaaatgaatgttatgtccctagt

SEQ ID NO: 239728 - DNA, 538 bp, Homo sapiens
tcactaaccactgctggttctgactctaactctctttactttctctaaatgacaatatatttatttatttcaaagatttttaagtctttttgagaatctgttcttatatttgccaggatataattggacaagttgattgggcaaccaaggttttagctggaatttcatatttgaggataatttacattgactcagatatgaccaagatacttttaatgatgtaagactacttaaataatggatctaatgtctacaaaattctgccatgaaaatgaatctagtgcaggtgtattgagtcccagactacgggtagtcaagaaagtaactcctggaaatcctggaactgtgacagatttgtgggagcgggcttcwaaaagagaagaacacatataaatttatatgtattgcagatgaaatgttacagagtagttcttcaacttggttttctagcctggagatatcaaatatggcttttaaaagttcaataatatattccttgtgaaaacttatggactaaaatgaatgttatgtccctagt

SEQ ID NO: 239729 - DNA, 554 bp, Homo sapiens
atatattcatgggcttacttctgggctgtctagtctgttccattggtctatgtgtctatttttaggctaataccatgctgttttgattgctatagctttgaggtagtttttgaaattaagcagtgtaatgtttctagctttgtttgttttattcaagatttatttgactattcagggtcttttgtggttccacacaatatttaagattgctacttctatttatgtgaaaaatgccattggccattttataagaattgcrctgaatctgtaatcactttgagtagtaaggactttttcacaatattaattttttaatctattaacagaagatacctttttattatttgtgtctttaatttttttcatcaatgttttatagttttgagcatacaggtctttaatctcttttgttaaatatattcctaagtaatttttgtagcgattatgaatgaaattttttcgtgattttttaaggtagttcgtcattagtgtatttaaaaagctactgatttttgtaggttgatttgtatgctgcatcttcctgaattcatgtt

SEQ ID NO: 239730 - DNA, 598 bp, Homo sapiens
gataaccacctccaagccacaaaactgggacaactgtaaggctgacctgttgtttcacttattttaggaatcacagttttataatacytgttatctgtagcctggaaaccactgtttctcatattttgtctagttttctagttatttacagaaggaaagtagttcctttaagatggaagcagaagtcttcctcggactatttttaatgtaataagtttattctttcttttcaattttgtaaacaatgtggcagtggctctcttaggttatagtcacacatgcacatacacatatgtatatttagaaatgtttacttacttgtttaaaaatgttgctatttcctaagtccatgaaacttttcaactttattttttgtttcttgaaattacttaacacatttgtagattcaattctcaaattatacaatccattgtgaatgttttagcataatttatgtttaaaaatttgcattttaagctttatttgcatggcatgaaggcatgaatatccaacagtaattagtaagtatatgaacataaatttagtttccagttgatgtctgtatatacatcaattttgactgattagagatgtagca

SEQ ID NO: 239731 - DNA, 577 bp, Homo sapiens
agtaacgttacataaaataaaaatatgacataaaaaatcactataatttctttctaaagataaagaatgaaagggaagcaatgatcactgtgttttctccataatagcactttaactaacatcacataatattggagtgtaattaagcattattcctcaataagtagatttcttataaataatgcagaaattacyttattattaggttatttttgcattatttataagaaatctacttattgatttattattagtcttagtatttgtaaattattctgaagcctgcttggaattgttcagatttaactcctcctgctatggcttccaaaaataacttctaaattacctaccattttttaaattatcttagatattgaggtgaatcaagtaaaatatatgatgcataaaagataaaacatatgtaaaatatatatgaccttatcccttaaattttatatagcgacatttatatgcagaattgtttaattaaattgggatttggcaaacaaagagtagcaataaaaataatataaatggagaaacaggagggagccattatgttggaaaagcatattaa

SEQ ID NO: 239732 - DNA, 595 bp, Homo sapiens
atgagtatgcattatgttgtaattttgaactagaaaaatcagatgtctaagtttgctttgactaaatagaattatagtctatctttaccaaatggttcatatgctgaatatttttcataaaattagataaayatgaaatttcatttttgacaaaatattgaaggaagtaacaattaaaagtatatgtaaaatgttttattgacaaaggcatgatgaaatccgtattatttccatttttgtaacatttggtctatcagggataaaagatgcttgtaaacacaatcagttaccgacttctttgttccatctccactcccaatgctttatttgactagaaaaaaaagaagaaaaagaaaagaaaaataggggaaaaggtacctgtaagtttaaaaagtataattaataataatttgattatattggtgatattttggaatatctttttctcagaatgtgttacagtcaacgattctaatgacagggttatgtactttccaaaagtaaagtagtttcaaattatcttccttctactctctgtaactaaaaataaaactccttttatattatattcaatacaaacttagaatgagtttta

SEQ ID NO: 239733 - DNA, 595 bp, Homo sapiens
atgagtatgcattatgttgtaattttgaactagaaaaatcagatgtctaagtttgctttgactaaatagaattatagtctatctttaccaaatggttcatatgctgaatatttttcataaaattagataaatatgaaatttcatttttgacaaaatattgaaggaagtaacaattaaaagtatatgtaaaatgttttattgacaaaggcatgatgaaatccgtattatttccatttttgtaacatttggtctatcagggataaaagatgcttgtaaacamaatcagttaccgacttctttgttccatctccactcccaatgctttatttgactagaaaaaaaagaagaaaaagaaaagaaaaataggggaaaaggtacctgtaagtttaaaaagtataattaataataatttgattatattggtgatattttggaatatctttttctcagaatgtgttacagtcaacgattctaatgacagggttatgtactttccaaaagtaaagtagtttcaaattatcttccttctactctctgtaactaaaaataaaactccttttatattatattcaatacaaacttagaatgagtttta

SEQ ID NO: 239734 - DNA, 575 bp, Homo sapiens
aaaaaaagaagaaaaagaaaagaaaaataggggaaaaggtacctgtaagtttaaaaagtataattaataataatttgattatattggtgatattttggaatatctttttctcagaatgtgttacagtcaacgattctaatgacagggttaygtactttccaaaagtaaagtagtttcaaattatcttccttctactctctgtaactaaaaataaaactccttttatattatattcaatacaaacttagaatgagttttaaaaatagatacattgttataaaaattttctacaattccaattgacttatttttgcgaattttttataattaacatcttcaattgttgaaaacattagaaaatgaattgatatcaaatattgtctttttctagccataatttattttacaaatgcatgcactgattaagaagcaaaacaaagcaaaacaaaacaaccttagtcatctcattaagcaaatcacttcagatactactttgttttttatgtttaataattaccaaattatacagtatttacattttaccaaattagacactaataataattgtagtatca

SEQ ID NO: 239735 - DNA, 575 bp, Homo sapiens
aaaaaaagaagaaaaagaaaagaaaaataggggaaaaggtacctgtaagtttaaaaagtataattaataataatttgattatattggtgatattttggaatatctttttctcagaatgtgttacagtcaacgattctaatgacagggttatgtactttccaaaagtaaagtagtttcaaattatcttccttctactctctgtaactaaaaataaaactccttttatattatattcaatacaaacttagaatgagttttaaaaatagatacattgttataaaaattttctacaattccaattgacttatttttgcgaattttttataattaacatcttcaattgttgaaaacattagaaaatgaattgatatcaaatattgtctttttctagccataatttattttacaaatgcatgcactgattaagaagcaaaacaaagcaaaacaaaacaaccttagtcatctcattaagcaaatmacttcagatactactttgttttttatgtttaataattaccaaattatacagtatttacattttaccaaattagacactaataataattgtagtatca

SEQ ID NO: 239736 - DNA, 616 bp, Homo sapiens
gagttaattaaattggatgatcaattaacttaggatttcctctaatgaatcagagggcaagaattcttgggaaagacttctataagcctaatttttgctatcagtaatatggacttctaccatagaagaatacaagataattgggattattcactgtccatagtgtccatgttgttaaaatgtattgaaattacaattacaatgtgttagataaatgtatgttattacgctaaaactggtggggtctttctgtacaatgttaataatttgacaatattatacytctggtacagatttctgggattttgtccaagaatatgaattagccctaattctatacatattaaatccttatgtgtcttgtattaaatagatggttttttgaatttaataacatcaaaacttctttattatatgtgctacatattttaggtaattacattttgaaattggcattagatttatttcatgttcaatatttgtggaattaagaagatttatgtaatgtgatccacttgtctaaagatatttcctgaatttaaaagggcaactcttttcaatatcatttattattacatttttataagattaaactttattccattggagaggcaga

SEQ ID NO: 239737 - DNA, 465 bp, Homo sapiens
attcttcagcatgccaattgtattttttatctccagaatttctgcttgatgctttttaatgatattagtctttttgttaaatttatctgatagaattctgaattccttttatgtgttaccttgaatttctttgagtttccttaacacagctattttgaattctctgtttgaaaagtcacatgtttctgtttctacaggattggtccctggtcatttatcagaaggtagcaaagctagccagtcctgtgtccttccctgcagggcagtgactttccctaacccctaagtgggtccagagatgctttctaggagtcagagactagggtcaagatcttgtaagtctgtctacctggtgttctattgtagtgtgactgagctggcactcaaaccrcaagatgcagtctttcccactctctcctaccctttacaaaggcagaggagcctcaccccatagcaaccaccata

SEQ ID NO: 239738 - DNA, 409 bp, Homo sapiens
atagctgtcaagatctaataattccaaagggatataactgttcttgactaaaaatgcacagggaaggtcctcttggcaatttgaaatgcaatataatcgctcagatataaatgataaaaaagattacgagtctatattttaactttcagttatccttgaaaaatgatactttgaacttgaagcaataattaaccagtaagattataytgcttagcaaatttatgtaatctgtttatttgccacaaaatgttaaataaatgtgtgatttggagtttataatcagtgttggagacattagattgtttagattttaagattccttctgtctaatatttctttcagcaccttgcaactcagtccttttcaatcaatatttgaagggcaattttcacacaaagcatcatgttta

SEQ ID NO: 239739 - DNA, 646 bp, Homo sapiens
tgtctgtgtctggtgaaaataataagcctggcaactctgttagtcacagacatgtctgcaatgaagggtgcaacgagcttcaggtttaaaatagacctttctatttgaagcaaatagggtttcaaacactcatactggattttcttttctttttatttttgcatcaggtggcattttaaaattataaagatataccacaaatctagaattgtctttttaatattatttttatctcattcagaaaaacaaaacaaaaccagcaatacatattaccccrtgaaatgttagcctcaggaggcttcaaaaaagtcacacattgtttaaatgtaatctgtaatctgtcgagaattttcctagttgaggtcagaggttagaaatccaaatagttaagcagtaagcagtagtgaattttctaagatcttgtttaaatatattgtaatatatggtagtttaaaaatgtatttgaaagcaataaaaataacattctaatattattatactgaacagattattattctattttgtgtgtgtatatgtgtgggtattttactgtcctgaaaaagcccttagcttgtttagacccaaattaatccttttagatttgaattatgttgttaggaaaatatgtcttctgaatttagtctgt

SEQ ID NO: 239740 - DNA, 404 bp, Homo sapiens
cagaacacagacaaaatcctttgcagaataagtacctctattttgcaagatagtcatyagcattaacatcacttaacattttattgacttttcctaaaatttggtgttttaaatgaaacatacaattttatatatataacaaatccaaatgttaattattcatagcatagatttgtaaataagcaatctcagagataaacatataatatatgacagaactgatatttaaacacaattctgacatccgatatttcctggttgtagtctaagaaagaaatttaattacattattttcacctatttaataatcttgcaacaaaagagaaattttaacgaaccactgtcttgtttttgtaacttctaataacaatgatttgttatttcttatggaaacaattttaata

SEQ ID NO: 239741 - DNA, 538 bp, Homo sapiens
tgttattatctctttataaaaaaacttacacttttttttaaaggaatcaatgaaagaaamatatccccctatttcaaagctcccattacatatttgtttttttctacccatgatttgggatatatgggatttgagccatatattctcctgatctaggttgacctttaagcttaatggtttttatatgtgtttaaaaactgacagcatttctctaatgagctatgcaccttaggacaattatgtatttattgagaccaataatcacatagtcacattatgaaaagtatttatttcatgctgttcatgatactgtaatttctttcagcttttaaagtagaaaactgttgtctgcagcaagactctgaagttattgctttcatattggacatactggctatgttgtatatattattttatctacttaaaaaaatccaaaaatttcttaaaaacctatcttgacgcataaaattcatgacgttcaagggaaaccttagcaaaataaattattttgcaacatagtcatgtaattgggcccata

SEQ ID NO: 239742 - DNA, 544 bp, Homo sapiens
agtatcaattttcaacaatcatccttgatgttagytgacagaaatcacattttaagactagataactcaaaatcaaatgcattatgtcacatcaatgttttagagttaattaaaaatattggcaagttctattgtgttttacgttttttttttttcagtaaacatattttggaaagaaaatttcaagagccttcaataatattacatgctcttcattttcattagagttgtgattttttctctcttttcctttaatcaacattaacttgttgaaagataatttgcaacaattctgtgaagtttttctatagcagtggcctgtggggcagtgggcctaccttggctggcaaattttttgaaaccaaagttttatttaaacacagacactcccatttattcacgtattgtttatggatgctttaatgctccaatgtcagtgttgagtgattatgacagagactgtatggtctacaaagcagaaagcatttactatcttgtgttctaaaaaagagtttggcaaccctgttctgtaataactaatatg

SEQ ID NO: 239743 - DNA, 544 bp, Homo sapiens
agtatcaattttcaacaatcatccttgatgttagctgacagaaatcacattttaagactagataactcaaaatcaaatgcattatgtcacatcaatgttttakagttaattaaaaatattggcaagttctattgtgttttacgttttttttttttcagtaaacatattttggaaagaaaatttcaagagccttcaataatattacatgctcttcattttcattagagttgtgattttttctctcttttcctttaatcaacattaacttgttgaaagataatttgcaacaattctgtgaagtttttctatagcagtggcctgtggggcagtgggcctaccttggctggcaaattttttgaaaccaaagttttatttaaacacagacactcccatttattcacgtattgtttatggatgctttaatgctccaatgtcagtgttgagtgattatgacagagactgtatggtctacaaagcagaaagcatttactatcttgtgttctaaaaaagagtttggcaaccctgttctgtaataactaatatg

SEQ ID NO: 239744 - DNA, 544 bp, Homo sapiens
agtatcaattttcaacaatcatccttgatgttagctgacagaaatcacattttaagactagataactcaaaatcaaatgcattatgtcacatcaatgttttagagttaattaaaaatattggcaagttctattgtgttttaygttttttttttttcagtaaacatattttggaaagaaaatttcaagagccttcaataatattacatgctcttcattttcattagagttgtgattttttctctcttttcctttaatcaacattaacttgttgaaagataatttgcaacaattctgtgaagtttttctatagcagtggcctgtggggcagtgggcctaccttggctggcaaattttttgaaaccaaagttttatttaaacacagacactcccatttattcacgtattgtttatggatgctttaatgctccaatgtcagtgttgagtgattatgacagagactgtatggtctacaaagcagaaagcatttactatcttgtgttctaaaaaagagtttggcaaccctgttctgtaataactaatatg

SEQ ID NO: 239745 - DNA, 566 bp, Homo sapiens
tttggcaaccctgttctgtaataactaatatgatcaagcaatctatactacatttctaactattaaacccaagttgaataagcaggtgggatgaaaacattttaaatgaagctatggctgcaggggtcataacatattttttaagtcaagatgagtgaactttgagtcacaggtctaacattagactaatttttctatctattttattttcttgtttgatttctcctaaatttcattacttcactattagatagaatagcatttatttttcatccyaggtatttaaggataaataggttaaaaagaagagagaaagaaacaaatcattccagtcagaaagaagagcctatgtaaacacatgtaagaataaggaaacatatcgatattgctggagcaaaggatatgtagcgaaacacttaaaattaatttagggttagtgtgtaacttctcagcatatgcccattacaggtgacaattttttcaccatctcccccctagaggtaggagctatagctttcctgttagaatattggcagactattgactactttgactaatataagaaa

SEQ ID NO: 239746 - DNA, 425 bp, Homo sapiens
ggtgcagccacaaaccctgctgccagtagagattccttttcctcccacactgcctcatcccagagttcttgttgctcaccctaccttaactgttcatgaaacaagtctattatccactttcctgtggaggtcctgttttccttcccctctctccagagcatggagcaggtgtaggagcttccactgaaccttccacctctgctttgggcactgaagcagatgcctytcttgcctctaccactgaggacattgactagagcagtggaaagaaaggaggaaggaattctttttgagatgagaaggaaggggaatcttttctgcagactgctttctactgagaaagattacattgttccacattacaataagaaactgaggtagttcagctgcattggtgcttaagtaggtttttctcagtcagctaa

SEQ ID NO: 239747 - DNA, 565 bp, Homo sapiens
gggtggctgccaaggggagaagagcactaaaaggggcaggaaaagcaaggaagggagcagagggagaaaagagttggacagagagttcaggtctctcagcagaatcacgaatgctttgttattggcagttaaagaarggaaaaaaaaaaaaagacaatcttagaaaacttcaaaaggcctttgagcttgctttttgagacagaaagggaggttccaatctgttatacagtgagcatgggaagagaagaaaagctggcacaaagcattaagtagccataatggatagtgaaatgcctatataggccaatgcctaacaccctgacaatgctgatcctaactggaaagtattacgggaaattaaactggtaagaaaaggtcctggtctctctctagctccccattcataatctctcctttacttccacgtctcttctttttcgtcaatactcactctttgctgacccattatgttcagagtcaagacaactatttgtggaagtccctaattctgtcactagatctatggtggagaagcagggagaaggagaaaagagatgttttactg

SEQ ID NO: 239748 - DNA, 526 bp, Homo sapiens
actggcttgggggatgatttaatattttctgactccctagagtgtcaccagtggtgttctatgcctcagtgaggtagtagctgatatgggtttcctaaatgacatttagtgaaaatattggcctcgtgcttaatataggcacatgagtgtcaccactttctaccaaacgacttatgaaaatagtggcacagtaaagtaatctgatgtatggaaatacctcccaattttacaggctcktcacgtattaaataaagggagggctctggagaagctaaaagtctcaaaggtagtatgtcgtactgagcagggatccccaacctccgggttgagcttggcctgttaggaactgggccgcacagcaggaggtgagtggccagcgagtgggcattaccgcctgagctccacctcctgtcagagcagcggaggcttagattctcataggaatgagaactattgtgaactgtgcatgcgagggatctaggctgagtgctccttatgagaaattaactagtgcttgatgatctga

SEQ ID NO: 239749 - DNA, 526 bp, Homo sapiens
actggcttgggggatgatttaatattttctgactccctagagtgtcaccagtggtgttctatgcctcagtgaggtagtagctgatatgggtttcctaaatgacatttagtgaaaatattggcctcgtgcttaatataggcacatgagtgtcaccactttctaccaaacgacttatgaaaatagtggcacagtaaagtaatctgatgtatggaaatacctcccaattttacaggctcttcamgtattaaataaagggagggctctggagaagctaaaagtctcaaaggtagtatgtcgtactgagcagggatccccaacctccgggttgagcttggcctgttaggaactgggccgcacagcaggaggtgagtggccagcgagtgggcattaccgcctgagctccacctcctgtcagagcagcggaggcttagattctcataggaatgagaactattgtgaactgtgcatgcgagggatctaggctgagtgctccttatgagaaattaactagtgcttgatgatctga

SEQ ID NO: 239750 - DNA, 276 bp, Homo sapiens
ttgaaaagacagagtgacacttacttttaaagaaggtaagtgagaaaacaattcctaatccaaaaccagtacctacaaagagggagaaaaaacatgctaaatctcatagcagtaacttcacaaagataacattaacatttcttaaatgtgaacatcatyaaacagattttttttcataatttggtagagaattaattttctaatttctaaccgtctttatttgtcagaggttttacagatgcctttggttctcctgcccaacatgaaataaaaact

SEQ ID NO: 239751 - DNA, 562 bp, Homo sapiens
gaacaagaacttgtatctacacaagtttgaacttcagctttctaactacttttctggtgcattaaaaaaacatgaaagataaagctatatctcatgttttcaagtcttgtgtttaataaaaatcaaatgaaactctgccaattgggtgagtgggagtcagatgtataattaaatctccttctggaagatctgccactcagagatcaaatgttagcatcaaatggggctttccaaatatgatcgaggggcccatggaaagctgtcaatagtttttgccctggaaatttaaaaggaatagattttttaaaggaagggttctgactcatttaagaatctaagcmcaaatttagagaaagagaaaatgactaaaaatataaatcatgcttagaacaagttatgtctctctttctatgtagattgcatgttaggtttcttttagatttaaggccacaaatgagttatctctaggttttccttttaagacctctcccaataatgattttcaataaatggatggctatagccatgtgatgaatgacattttatatgaaaacactggata

SEQ ID NO: 239752 - DNA, 569 bp, Homo sapiens
ctttactactaccagaactatttatccagatccagctgtggagaaacaggatggatctatttattgccccaaccaaagcaagatcaaagctggagaaattagccttatgtgggatgatcaaaattctagtgggtagaatcatagtagtgagtctgaactaaagtcccagagtatgagacccaagccagaaacgcaggatcagtcaacaagtccaaaggtcagtttcagggtccaaacaagaagactgaaacagcagtaagtttgccagcagtgatgagaaaccacagaggttagaagcagcacaggaaacattctggactgtcttaagtggaattgtaatgacattaacatcgtgcttactgttagagtatatttaacgcyacacacagtaaatgtttagaagtgcataacttctaaacatttattgatctagtatatattccttttgttgtataaaggaaaaacctctggtataaaaagaaaaaaagaatttattacaagaacaccgaagtagctaatataatcaaacgaataactatgacttgagataaaaaggcagcagacaggcc

SEQ ID NO: 239753 - DNA, 594 bp, Homo sapiens
gccatgtaacatctaagggcaaatatcttaaatcctcaatcagtgtcttgtaaaagactgtatgctcttcaaaatagctgtgaactactgggagccttgcatggtcaacctgcagcttagaattcctgctttccttaattctctgctttttttcttgagactatttccttatcttagtgcagtttcgacatctgacaaaacctgggactctttgccttgtccccagcctcctctttcacccatcaacagaaagtaaaccacagataaaagtctgcagcagaaattttactggagatttgtggatcatggtgaagagtttacaccattgaaacacaaagaatacaaatgtaaatcatatacagtggattcttgttacagctttgttcaataaagtctgtacaaatcctgaattagcaatactgaaacatkggtcctggggggaagaaaggttagtctcctgtgaaactccggtgacaacattccatcaccaaattaataaataaatttgttttatgtgtgtttctgtttaaaaacaccttttaaaaatatatattggtgattcatgaacatgaaactcacaaccaacagcactgt

SEQ ID NO: 239754 - DNA, 335 bp, Homo sapiens
tatttatttattttgacttaatgtacactgttatttttgcttgccaggttaggtgtttgaaagagcacggaccacacagtatattaacatttccactctgcatgtttctgtgtgtgtgtgagtgtccaccctctatattatattttctttatttaactacagctattttctaattcttggatgatgaaagaagattgctggaaacattctgtaaagtgtctgactagaccataagctccgtaagagcaagagcttctattttccttatsaggcctcagtgcttagcatactactgagtttagaatagtgctcagctaatagttattcaatgaata

SEQ ID NO: 239755 - DNA, 190 bp, Homo sapiens
attgaccttcctgtttcgtggagggtatttcttttgctcttttttagataccrgctctcttgggttttctcttactgttgtggctgctgcttctcagttccatttattttttctatacctagaccttaaattctagtttcagtgttatactctcctctcttcttcctgtacgcaatcttctttggagatc

SEQ ID NO: 239756 - DNA, 590 bp, Homo sapiens
accttgtcacctaagagctctatgaagatgtacaaggatataaatgttgttttgatgcctgctaacacatctattctgtagcccatccatggatcaaggagtaattttctttcacatcctaagctgtacctgccatagatagtaatttctcttatggatctgggcaaggtaaattgaaaatcttctggaaacgatttatcactctagatgtcattaagaacatttgtgattaatgagaggaaagcaaaatatcaacattaacaggagtttggaagaaagtgattcctatcctcatggatgactttcaggaaatcaagacttctttgtataaagtaacttcagatttatggaaacaggaagaaaactagaattagaagtggagcacgaagatgctcctgaatcgctgcaatgtcatgatcaaacttgaaaacatgaggagttcttacagttgagcaaaaacagttgtttcttgagatggaatctactctttgtgaggatgctatgcacattgttgaaatgaaaacamgggatttagaatattacataatcttagttgataaagcagaggcagggtttcaaataattgcctt

SEQ ID NO: 239757 - DNA, 476 bp, Homo sapiens
gactgttctttaccaatgagtggtcttggtacccctgtcaaaaatcattttcatgtatgtgaaggtttatttctgtgctatctattcyattccattgttctatacatctgtcattatgtcaataccacactatttgactaatttagcattgtagtaagtttgaaatcagaaagtgtgagtcctccaactttattctttttcaaggctgttgtggctatttaggatctcctgagagtccatatgaattttggagtggggttttctatttctgcaaaaaatattattggggttttaatgggattgcattgaagctatagattgctttgggtaatactgatatcctaacaatattgccttccaattaatgaacatgagaggtagttccatttatttttgtgtttttaaatttatttctgcaatgtatttatgttttcattgtacaagtttttctctccctttgttaagttcatttctaa

SEQ ID NO: 239758 - DNA, 438 bp, Homo sapiens
aatctctgtgcattcatatgggtgatacaacccaggaaagaatgcttgctgttgatgggcattctcctttaggggccttgcttttcctgtgcttataatctttgcagagtatgaatccaggcgtcctctggatgcaaatgatttatgaaggttaattcttaggaggagggctgattttacaatctgttttgtgcgaggtcaccccatatcctttgaattctatgtgtgtgttaattgcagcaatttgaattattttatttaaattgccagtgaaattgtagcaattataacagcatgaactgtttctgtttctttttttttctctgctgcatatgccattttggactctaccaggttaactttattagtgctataatttactyctcaacatttatatctgcagattttacagaggattgttgtcagcaacatgagatt

SEQ ID NO: 239759 - DNA, 477 bp, Homo sapiens
caatcttcaatcacacttaggtaaaatagttaattcaaggacatataattacatgaaaataaaattcctattttgttctggaaatataaacatttacaaacaaaatatgtaaataaaattgattttaaatgagataaacttaatttatagtgaagtgttttgtttcctggatgttgaataattcctcagtcttttctttaaagccaaccataagactcattctccaatgctgacatgactgatagattctctaaaatctatctatttttttgcaaattggtgttaaaggtcactastgagcaagttttcaatacctctctctggaaatcaaggccattcaacccagacaaactccatctagagaaggggatcattgctagacctaatagactaattgtaacttgactgtcggaactaacattctatgtattcacattgaagctctgtaatgcttgatagaaaaacacaggaacagcc

SEQ ID NO: 239760 - DNA, 443 bp, Homo sapiens
tctaaacaacggtttaaggtctacacaagatagtagaagtgaacctgcaggattaggagggtaaggattcccacctaggtgggctcacttgctctgccatacctgggtaggatcccagcctgcttctgtgattgtcaggaggcaccaaaaaggctaccctaggttttctagtcattcggcccaaacatttcctctgatgggcaaatgtggaaaagaggmattaagctggtgctcccacaactgaaaggaaagcaattctctttctagttgtggttccttcctctttggactcttttcttccattccagcctatccccttcttggaaaagctgttctaccaatagcagggaagaaacagcgccgtgtacctgatacgctaccctgggcacaggcgatcagaccagggatagacacctgaactgatctgggcagatgccctcttc

SEQ ID NO: 239761 - DNA, 407 bp, Homo sapiens
ggagggtaaggattcccacctaggtgggctcacttgctctgccatacctgggtaggatcccagcctgcttctgtgattgtcaggaggcaccaaaaaggctaccctaggttttctagtcattcggcccaaacatttcctctgatgggcaaatgtggaaaagaggcattaagctggtgctcccacaactgaaaggaaagcaattctctttctagttgtggttccttcctctttggactcttttcttccattccagcctatccccttcttggaaaagctgttctaccaatagcagggaagaaacagcrccgtgtacctgatacgctaccctgggcacaggcgatcagaccagggatagacacctgaactgatctgggcagatgccctcttctggccattgagaattgaca

SEQ ID NO: 239762 - DNA, 430 bp, Homo sapiens
aaacaacggtttaaggtctacacaagatagtagaagtgaacctgcaggattaggagggtaaggattcccacctaggtgggctcacttgctctgccatacctgggtaggatcccagcctgcttctgtgattgtcaggaggcaccaaaaaggctaccctaggttttctagtcattcggcccaaacatttcctctgatgggcaaatgtggaaaagaggcattaagctggtgctcccacaactgaaaggaaagcaattctctttctagttgtggttccttcctctttggactcttttcttccattccagcctatccccttcttggaaaagctgttctaccaatagcagggaagaaacagcgccgtgtacctgatacgytaccctgggcacaggcgatcagaccagggatagacacctgaactgatctgggcaga

SEQ ID NO: 239763 - DNA, 456 bp, Homo sapiens
aaacaacggtttaaggtctacacaagatagtagaagtgaacctgcaggattaggagggtaaggattcccacctaggtgggctcacttgctctgccatacctgggtaggatcccagcctgcttctgtgattgtcaggaggcaccaaaaaggctaccctaggttttctagtcattcggcccaaacatttcctctgatgggcaaatgtggaaaagaggcattaagctggtgctcccacaactgaaaggaaagcaattctctttctagttgtggttccttcctctttggactcttttcttccattccagcctatccccttcttggaaaagctgttctaccaatagcagggaagaaacagcgccgtgtacctgatacgctaccstgggcacaggcgatcagaccagggatagacacctgaactgatctgggcagatgccctcttctggccattgagaattg

SEQ ID NO: 239764 - DNA, 605 bp, Homo sapiens
cttcttcagcatcaattgaaatgattatatggttattttacatgttgttaatatgatgtatcaaattaattgattaacaaatattgaaccattcttgcacctcggggataaatcctacttagtcataatgaataatctttctaatgtattgtagaatttggtttgctagtattttattgagaatttttgcataagtgtatatcagagatatttacctatagttttcttgttttgatgcatgtttgtctagttgggtatcagggtaatgccggccatgtagaattagtctggaagcattccttcttcctctatttttttggaatagtttaaatagaagtagtatcaattctttaaacatttggtagaattcagcagggaagctatcaagtattgagcttttctttactgggagactttttattatggcttcaatgtcatcacttgttattggtctgttgagttgttggatttcttcctggttcaatctgtgtaggttttatgtgtctaggtatttgtccatttgttttctagattttccaatttatcagcatatagttgcatatagtggccactaatgatcckttgaatttctgcaatatcagttg

SEQ ID NO: 239765 - DNA, 599 bp, Homo sapiens
tgcagtgtctggttttttgtccttgcgatagtttgctgagaatgatggtttccagtttcatccatgtccctacaaaggacatgaactcatcatttttatggctgcatagtattccatcatttacctgatctcttaatatgattctatactttgtgaattgcctcttcttttaaattgtttattcccttattttctatgaaagcatatttgcctratttttttttatttttcaattttatttaagattatttggtaaactcttctttcttttgttggcattctcccaaattctgatttcacttttatacttgctctgcatacttttgttatttcatttatgctcatggtctctcttaaacttaaatatgtatgatttttttttcttacttgttgcccaggattttatcttgagctttagattccaattacccccaacccccaccattgcatttggttgtcccaaggataacattaacttccttctgtccccttactttcttcccaccaaaacgctagtttcttctgggttttacagtttcagcaaatgtaatatccattcattcagctatctcagttagatacatgagtaagctttgaca

SEQ ID NO: 239766 - DNA, 599 bp, Homo sapiens
tgcagtgtctggttttttgtccttgcgatagtttgctgagaatgatggtttccagtttcatccatgtccctacaaaggacatgaactcatcatttttatggctgcatagtattccatcatttacctgatctcttaatatgattctatactttgtgaattgcctcttcttttaaattgtttattcccttattttctatgaaagcatatttgcctgatttttttttatttttcaattttatttaagattatttggtaaactcttctttcttttgttggcattctcccaaattctgatttcacttttatacttgctctgcatacttttgttatttcatttatgctcatggtctctcttaaacttaaatatgtatgatttttttttcttacttgttgcccaggattttatcttgagctttagattccaattaccccsaacccccaccattgcatttggttgtcccaaggataacattaacttccttctgtccccttactttcttcccaccaaaacgctagtttcttctgggttttacagtttcagcaaatgtaatatccattcattcagctatctcagttagatacatgagtaagctttgaca

SEQ ID NO: 239767 - DNA, 575 bp, Homo sapiens
aaaactttattgcagctgttgttgttttcttttgccataacatcaaagcatacatttgtagcctggttactggtttattctatatgtatgaaattgatctaatgaatatcaatactaaattttagaatatcgtattggctaaacatgggaactttgtatccaaatgtacctgttttgatatctctctgtattgctgactaattctgtgaccatatcccattayccagtctctctgcatcagtttctatatgcataaaactagagaaaacaatggcacttaatcttagagttgttgtgagaataacataaattaatgtctgcaatttacttagaagggtctgtggtagatggtaaataattggaacatcctagcagagatagtatacaggctatgaaaaggaaaaagtcaacagtatcactttaattactaagtatttgcaaactctttattttgttgtcaattttaagtccttcttttcatttcgtaggataaaactgttgtagcatatttagtttcaaacaatgtattttttatgaaaacaaaatatgaggggaaagtttgtactagtgaacaa

SEQ ID NO: 239768 - DNA, 543 bp, Homo sapiens
ttttttcattttgttaaagtaaaagctgcttgattcaaaatttaaaaataaatgattttttaaaggacactttaaaatgctgacaacagctgattaagtctgcgacagaaaccttttccttatttttatttggaaaactcagaaatcactatatttcattggtaagaatgctgatgttaaagtctttttttttagtgttttgtagaattactttacctgagtgaccccactccacagtgatttacagactcaccagttttataaatttataataacatacatacacacagtgatgttatcggtcatccctttcttggaaaaatatttatgaaaactgcaggtcaataacgttaatgaaaatttctacattcattgagaaaactatttttgatttcaaataatatatactctagtccatatctaattcatcttttctatctacaacttacagatttataaaaataaataatctcaaatcatttaaatgaaaggcaatgtatgtatgcccatatctgtrtgtattctggggcagatgactgtcaa

SEQ ID NO: 239769 - DNA, 546 bp, Homo sapiens
taatcaactctcagctgtaattcttttttttttttttttaatttttttttattattatactttaagttttagggtacttgtgcacattgtgcaggttagttacatacgtatacatgtgccatgctggtgtgctgcacccactaactcgtcatctagcattaggtatatctcccaaaattctttgtatttttcctgtctgctgatttcagggtggtggttttccctgcaaggtcaattctctaatgggtacaaagaaagactttttttttttwaaaaaaaaaaaaaaagctttttccttgtgataaagataggattgatgacttccaaagtctctttttctcagagctgaaatgagaagtcatttttaataaataaattatataaaataacaaaaattttgactgtttttctatacttttgcatttcatttgcatacatttcaagtgttttcctatagttattccaccagttgtgtaattggtttttcataacaaaattgtaagacagatagccttatagtatattttttccctttcatcctaagct

SEQ ID NO: 239770 - DNA, 317 bp, Homo sapiens
tgccaattctaaatctgttaaccctgcattgcttgttccttccctgggaaatcacaataaagactgttagctacattttccccttgctccctcgtctcctgactgatgctggtagttccctgggtagccctgtgtggtgtggtgtgcctcttgtttccagggatctgtgaactttttttttaaagacccttcttccccctataatcccagtgctttgggaggccgagscaagaagatggcttgaggtcaggagttcaagaccagcctagttaacacagtgagaccctatctcttttttaaaagaaaaagaaaaacaa

SEQ ID NO: 239771 - DNA, 655 bp, Homo sapiens
ggaggtgggaggattgcttgagcccaggagtctgaggctgaagcgagccatgactgcaacactgcactccagtctgggtgacagagggagaccctgactgtcttcctctttttttcgacctgtcagaaaaaaaaaagaaaagatagaaagaaraaggaaatacatccatacggcctcataacttaggcaggaaatagtgttctacttctcatgagcccagtgggccatattaatgttctaaataatatttgcttcttccctgcttccacttgagtgcctactagaataaaagtgtgggaactttttaccctatccatgtcagcttcctgtttctaatgagaaacttaacaatggctgttctaccaaaggctagactgaggtcttagaaggggtctttcattcttattagttgatatctgggaatggagaattccagtaacagaaacatttttctcctgtcccccacaaaagatgtaaactaagttccatctcattattgtgtgcctcggacatgtttctttctacccttgccctctgattatttattttcaacaaacctgctagaatgattctttctttttaaataaactttgctaagctacaatttttatacaaatatatacatttaagtgtatagttgaatgagttttgacaa

SEQ ID NO: 239772 - DNA, 655 bp, Homo sapiens
ggaggtgggaggattgcttgagcccaggagtctgaggctgaagcgagccatgactgcaacactgcactccagtctgggtgacagagggagaccctgactgtcttcctctttttttcgacctgtcagaaaaaaaaaagaaaagatagaaagaaaaaggaaatacatccatacggcctcataacttaggcaggaaatagtgttctacttctcatgagcccagtgggccatattaatgttctaaataatatttgcttcttccctgcttccacttgagtgcctactagaataaaagtgtgggaactttttaccctatccatgtcagcttcctrtttctaatgagaaacttaacaatggctgttctaccaaaggctagactgaggtcttagaaggggtctttcattcttattagttgatatctgggaatggagaattccagtaacagaaacatttttctcctgtcccccacaaaagatgtaaactaagttccatctcattattgtgtgcctcggacatgtttctttctacccttgccctctgattatttattttcaacaaacctgctagaatgattctttctttttaaataaactttgctaagctacaatttttatacaaatatatacatttaagtgtatagttgaatgagttttgacaa

SEQ ID NO: 239773 - DNA, 620 bp, Homo sapiens
  misc_feature (1)...(620): n = A,T,C or G
aagaacagtagggatatacagaggactttcattctaaaaatgtttcctggattcttaggagtgacattggcaagacagccaactagagttgaatgacacttgtcccccaaacaaaaggaatcagaacaaaaactaaacaactataatttgactgcagtaactgaggaagtatgctgaagagcactggggagtggnggaagtttccgtatagcacgaaaacataataaaatgaggaatatccagtgccgtaacagtgctactatgtaaatctctcagtcctctagtatgaaggttaaatgtttcaaaaatagtcaaaacaacaacagctacagttagtggctaaggaacagataattgataaagatgtaaattaagtaataaaaatataaattgtgggctataggggaaaagtctagggtagtatttttatgtaaccaaagttaagttgtaatcagcttaaaatagtctatagtactacaaaactctttttgctagctcctggtaaccacaaagcaagaaattacaacacatacacaaccaagaaagagaaaggaaacaaagcttagaaccacagaaaatcaccaaacccarcagtaaacaacaagaaagaagggaacaaa

SEQ ID NO: 239774 - DNA, 592 bp, Homo sapiens
gtggtcacataatccataatattaaccatatgtagacattcttagaaacattgcattttatattagtacatttcaagatataacttctgtataagcaaactgtgccttagattatcatagataataaagctgcamtatggtaatagaatatatatcttttgaaattagttaatttaatggcctaatggaggtcattaggctgggtcaagtatagtgccttgggttcctgcctaatcaaaccaaagcccaatgtaaacagtaaaatgaaacttaagtttaaccaatcagaaatcaccaactcatctctaactaggaactttccacattaaccaatcaaatatatttgctttatcttgcttccatgaacatcttataaaaatttctctcttgcctcttccaccagtgtagcgctgaaccacttgcagtctggtgctgcccaattcatgaatcattgtctgctcaaataaactcttcaaaattttaatgtgcctaagtttatcttttaacgtatataatgtttgtagacacttctatgtgccagccactctcataaagctgaataagtattatgcaatttaatgctacactcatc

SEQ ID NO: 239775 - DNA, 592 bp, Homo sapiens
gtggtcacataatccataatattaaccatatgtagacattcttagaaacattgcattttatattagtacatttcaagatataacttctgtataagcaaactgtgccttagattatcatagataataaagctgcaatatggtaatagaatatatatcttttgaaattagttaatttaatggcctaatggaggtcattaggctgggtcaagtatagtgccttgggttcctgcctaatcaaaccaaagcccaatgtaaacagtaaaatgaaacttaagtttaaccaatcagaaatcaccaactcatctctaactaggaactttccacattaaccaatcaaatatatttgctttatcttgcttccatgaacatcttataaaaatttctctcttgcctcttccaccagtgtagcgctgaaccacttgcagtctggtgctgcccaattcatgaatcattrtctgctcaaataaactcttcaaaattttaatgtgcctaagtttatcttttaacgtatataatgtttgtagacacttctatgtgccagccactctcataaagctgaataagtattatgcaatttaatgctacactcatc

SEQ ID NO: 239776 - DNA, 582 bp, Homo sapiens
atatgtttttcgtaagaagatgacagctggaatcagacccaaatgtgaattcctgcatcaccatttgctagagctgttagtgtagacaagcctcttactccttttcagcttcagcttactcatctgttccccacgggactgctgtgaagactaaatggtctaaagactatgaagccaaagcacagtggtggtggtggcagtggttaaaaattagcaggactggccgggcgtggtggttcacgcctgtaatcttggcactttgggaggctgaggcgggtggatcacctgaggtcaggagttcgagaccagcctggccaacacggagaaaccccatctctactaaaaataaaaaactagccggccatggtggtgcatgcctgtaatcccagctacttgggagctgtggcaggagaaatgyttgaacccgggaggtggaggttgcagtgagccgagatcgtgccactgcactccagcctgagcaacggagggagactccatctcaacaacaaccacaacaaattagcaggactgatctctacttccttcctaggaaacatgatgtaaggacaattctgttgtttt

SEQ ID NO: 239777 - DNA, 588 bp, Homo sapiens
aatgaaacatcccagggaccttggagtagattaataaatttctcactgtgcaaagagttacacctgggagaaacagtctcctgaagttattttgattcatgttaaggaacataaatgaaaatatgtaaagccaataaattgtgataaaataatgggaagtgacttggttaagatcagtcttcacggaaaccatgaacaagtggatattttcttcctgtgtactgtaagactggaataaagtgttcatgatgattttaacaacacagacatatttcagtttacactgccaatatcttaaccaagaaagtaggacagagacacgctggtttccatagaatctagaaccctgaagaattgtgatgcaattcaaaaaaacatttatttaaagcctactaggttgcaagcatatcatttattcagctaagatattgagagactgccacacagattactttatgctaaatgctttggagaaataaagaacaaagcaccttttgttttcttggagtatttttaattattttgtatgaggaaataagtagaggagaagtttggtgraaaaaaaacttaaatattacaagaagaaaa

SEQ ID NO: 239778 - DNA, 427 bp, Homo sapiens
agttcgaaaccaccctgaccatcgtggagaaaccctatctctactaaaaatactaaattagccaggcatggtggcacatgcctgtagtcccagctactcaggaggctgaggcaggagaatcgcttgaatctgggaggtggaggttgctgtgagcygagatttcgccattgcactccagtctgggcaacaagagcaaaactcagtctcaaaacaaacaaacaaacaaacaaaaatctcctagcaaaatccagtaaagttaagagctagccccaggcaacttgtttgtgtggctcccatctctgccttgctatttcaaatgcctcttggtaagcaggctccttgggaattatctgtgatatgttttcaatcatcatcccatgcagtgtcagcaaggtaatggaattaattttccttcattttgggaaaa

SEQ ID NO: 239779 - DNA, 647 bp, Homo sapiens
ttttgacccaaaatgtcagtatgctaaggtgaatccattctgcaaacatggctcaggcatcatcttagcaaatcctcttctcttgagaaggaagaggtggagcaagaaggacaatagccagaggtatagaaacgtgtgcatctcctacagtcagatccatatccagaaacgcacaagagccaagtctatgaccaatcatgataaaggctgccccactacggaggagctgcagagtcaatcccrcctgaccaccatgtggttacctcctcagtgctgctgttcggtatgtacatcctccgggcagtggtgagatgggagctcagtactggtctaaaaaattattgttaatttgaaggccacactatcaactaggctgaaaattcaatccatcatctatttctatcttaaagcatacctagctctgttgtccaatataacaactcaagatgactctaaacacgagaaaatctaagcactacatagttgccccaaattagtaaaatataaacccctgacattaaatttcaacacagagaataaaaattctaaaaatggaagctccattttcttttttcaaaagtgagaaaaagatccttaactaaaatattttatccactgaggacattaaattcccaagtaaattaaag

SEQ ID NO: 239780 - DNA, 617 bp, Homo sapiens
tcaaccgttttacttgtttatttatttatttatttatttattttgccttggaattatcaggactaatgacataatgccatttttgtctgcttatattaattgctataaaaataatcaacttctggaatgagggagtgaagacctcggtggtggactagtctcttgcaaaacagtaaaaatgctgagaaaactaaaattaaccatttttgaaatcttaaaattaaacaaagccagagaacacactgaaaaaaacatatatgcaaaacaaattactgaaccttcgtaagacagtggggtctttgacattttgacacgtggctatttccatytctcctccttcccaagctcggtggcctgacagcctgatgaaaaacaagcaatctcagagctaacagacaagattgaccctgtttggtactccattaaaagcagcatttccacagcatagtcaatattttgtctcaacttcaagctactcacaaaatctctattcctggggtgttgtggctatttgacttaactcggagtccagctcagctgaaattctcaaaagccctactcccagggcattgccaaaacaataacaatttactgacaacattgcagctgccttgagc

SEQ ID NO: 239781 - DNA, 617 bp, Homo sapiens
tcaaccgttttacttgtttatttatttatttatttatttattttgccttggaattatcaggactaatgacataatgccatttttgtctgcttatattaattgctataaaaataatcaacttctggaatgagggagtgaagacctcggtggtggactagtctcttgcaaaacagtaaaaatgctgagaaaactaaaattaaccatttttgaaatcttaaaattaaacaaagccagagaacacactgaaaaaaacatatatgcaaaacaaattactgaaccttcgtaagacagtggggtctttgacattttgacacgtggctatttccattwctcctccttcccaagctcggtggcctgacagcctgatgaaaaacaagcaatctcagagctaacagacaagattgaccctgtttggtactccattaaaagcagcatttccacagcatagtcaatattttgtctcaacttcaagctactcacaaaatctctattcctggggtgttgtggctatttgacttaactcggagtccagctcagctgaaattctcaaaagccctactcccagggcattgccaaaacaataacaatttactgacaacattgcagctgccttgagc

SEQ ID NO: 239782 - DNA, 591 bp, Homo sapiens
tattgaggaccagtgttaagtctaaagtagggtagttaatcaaatatactttctgttattgaaagtaagatcgttattagatcattcccagtcttctgataacttttccttctctatgagctcaaagatctatcagtaagtgcacacattctctttcccttcttgcattacatataacagaaaagcccatttctttacttttgcagcttgtgtaagcctcagttcctttagagctttaaactttttgwtcatctttctgtagatttgttcccctgtcatatatgtaccctttgtcatgaattcttcttttctaaaaacatggaaggaaatatttttataaaatgtggcaagcaatgacagccagatacatgaaaaaggataattaggagaaacgaagaaaatatatttctaaaaggagctaactagctgtctacttaatttctgaccctttacgtttcatgagtttataaattaactgtatttgtgatagagtttggatatctcaaatttgacagattttttttggggggggttcttgtttttttcaggggaatctaaaggtgtaagtactagtggaaacaggatcactga

SEQ ID NO: 239783 - DNA, 192 bp, Homo sapiens
tcttatttggagtttgttgatatccttaaatgtgtagaatacagtttttcaacaaatttggaaagtaactattttttcaatagtttttctttcccttttgtctcttttcttcacctagttctcccattacatttggctacttaatattttcatatatttctccaagacttkgttcactgtacttacaatcaa

SEQ ID NO: 239784 - DNA, 578 bp, Homo sapiens
aagcttctagtattatcatgagtaaaaattagggaagttggggagaagtccttgttggggttgagggagtgttgagtatgaaatgatgaagtggtgtctatgtgtggacagttggaaataagagacagggatgaatgagcagtttggactagatatggagatgtgaattcctccacatggagatgaatatagattatttctctatgggagtgagagaatagagagccaagtggagggccaagaactcagtcatgagggattggcacagtccgcaggcaggaagaagttccagcaaaagaaactgaaattcacagaataggaagaaaacagaaatgatctagcccacctctcccatctaactgatgaggaaatggttgtccagataaaaatgaatcagtgactaaggcagctatgaaaatatagagttgcataagtcctgaggggttgggggagtggctttcaagaaataggaggtggtccacagggccaaatacttctgatcaatcaaaaaaggtgaggaaactaacgatggtacttgaaattgattaatgtrttggtctcccagagtgtagctatgg

SEQ ID NO: 239785 - DNA, 488 bp, Homo sapiens
aagctttatgtggggactgtgttggtaggtaaacacagaagaacaaaaaagagactactttgatttttgagccttgtaatggagatattccttgactaaaactaagaccaagacagaaaaacaggtggaaagctgatttcagttttggacatttggagacacctcctttgtgttcccagtgctcccagcatattgccttaattgatatctgttgtctctgctttatcacattgaaactcctttaaaggcaagactgaattatccatccttgtagttccagtgtccaccacagggcctgacacaaagctccacagggccattcagcctcactaagaaatctgttaggcacattcaccaagagaggacccttggcgtctcctaggagtctggagtccaggtcacrtcaagtctaaagtacagttttcagattttcaagaatggatgatacatcagtttcatataatagtgtccaccccacatacacactc

SEQ ID NO: 239786 - DNA, 536 bp, Homo sapiens
ggaatgtactaaagtgtttagtaaagcattcttaagattgtggatttttctcattatgtgttagaggttttcaaatctgccctgccaccttttttataaacaaagtttcattggaatgcagccatattctttcatggaagtattggctatgactgcatttatgctacaacagagttacatgtttgtgacaaagactgtatcctccataaagcctaagatatttattatctggccctgacagaaacagtcagcaatctcttccatatataatgggaagttactgcaagatatatgcatgggaaacacatgataatatggtttggctattttgtcctctctaaatctcatgctgaaatgtgacctccagcattgcagctgggccaagtgggaggttgatattatttggctctgtgtmcccacccaaatctcaccttgaattttaataatccccacatatcaagggcaggtccaggtggagataattgaatcataggggcactttcccctgtactgttctcatgatagtgagtgaattc

SEQ ID NO: 239787 - DNA, 633 bp, Homo sapiens
gtttgcaatcattttttaagtgtcagtaacataaacatacttgatctctgtgtataagaattttcctatacagatgattatcagatcttctgtagttctttcatttgtagtagaagcatttacagactaacttaaataacctgtagatttaccagataatcactcactggaaaacgaactgtaacatgagtgagcaattaaaaatggtattgatgaatgcatggtattcatgattgcatggtaatggagtaaaatgtatatacgttgtatgcaaaaagattaagagttgtcatgatgagactgtcattgtagaagatatgccagttattcttatctacaaattaaaaaatattgtatacatatctactgtgtttgaatagagtatcttccctcagtagagggatactaagtttcagagaaataagatttatagttttcaaattggcttataaaatcacaagaatgtacacttacaaacagaaactgacaacttaataagacgtcgggtctcagtacgtgtaccaaagcaccccggggtacttcagcatagtcacaggggmacagcatgatataataaatgctcctggggaacatggaaatgcttaacatctgtaggaaagcttgtgaaatatt

SEQ ID NO: 239788 - DNA, 576 bp, Homo sapiens
gatgtcactattgaagtacgttcagattgcacatcttgtgttcattgcaggtagcaagcaagagtgatatttaccacacactgtcctgccaaaatatgctgaacctggccaaggatgagcttattctcacagactgacgtcaatagttatcggaagagagcacaacagcatatggtggattaaaaaaaaaaaaaacctgtgcagtgatttgtagttaatgccttagcacattagaaacaagccactgacggctgaagtatggcagtaaagaagatggaggatgaacgaggtgtataatyctcccttctgggcacagctctagggtatatacacttgaatctctatttttctaggtatggtatacttttctctgtggattaatttacctatttagtggcacacaagctagctacagagttgctctatcattctgcaaattagggcttctttattgttttttaatatttagaaatattcaactgaaagcaaattgcatttttaacattagaagtcaataaaattaaaaagatatagttttcataacataactttaatcattgctaatattgtaatggt

SEQ ID NO: 239789 - DNA, 427 bp, Homo sapiens
acaaaaaaccaaaaaagaaaaaaattaaaaaagcaaaatgaaatcttttgtgctacacagaaacattggccactcatggggtaaaaatctcagggccaagccttgctttatagaaacktataagcaagaaaagtgtagaagtgtttatgtcctggtttaaaggtgactgcatagctaagacaagttgacttaaaggagatcaagactggagatgacaagagtgaaaccagggaaacatcatcttcgaataagtacacaaggctgccagtgacatccctcagtcctgattaagcctatttcatttcatcagtttttaacccatcatgtgtttgcctttcttctccccagtccctggccccacctcttctgccacaaacgtcagcatggtggtatcagccggccctttgtccagcgagaaggcagagat

SEQ ID NO: 239790 - DNA, 427 bp, Homo sapiens
acaaaaaaccaaaaaagaaaaaaattaaaaaagcaaaatgaaatcttttgtgctacacagaaacattggccactcatggggtaaaaatctcagggccaagccttgctttatagaaacgtataagcaagaaaagtgtagaagtgtttatgtcctggtttaaaggtgactgcatagctragacaagttgacttaaaggagatcaagactggagatgacaagagtgaaaccagggaaacatcatcttcgaataagtacacaaggctgccagtgacatccctcagtcctgattaagcctatttcatttcatcagtttttaacccatcatgtgtttgcctttcttctccccagtccctggccccacctcttctgccacaaacgtcagcatggtggtatcagccggccctttgtccagcgagaaggcagagat

SEQ ID NO: 239791 - DNA, 427 bp, Homo sapiens
acaaaaaaccaaaaaagaaaaaaattaaaaaagcaaaatgaaatcttttgtgctacacagaaacattggccactcatggggtaaaaatctcagggccaagccttgctttatagaaacgtataagcaagaaaagtgtagaagtgtttatgtcctggtttaaaggtgactgcatagctaagacaagttgacttaaaggagatcaagactggagatgacaagagtgaaaccagggaaacatcatcttcraataagtacacaaggctgccagtgacatccctcagtcctgattaagcctatttcatttcatcagtttttaacccatcatgtgtttgcctttcttctccccagtccctggccccacctcttctgccacaaacgtcagcatggtggtatcagccggccctttgtccagcgagaaggcagagat

SEQ ID NO: 239792 - DNA, 427 bp, Homo sapiens
acaaaaaaccaaaaaagaaaaaaattaaaaaagcaaaatgaaatcttttgtgctacacagaaacattggccactcatggggtaaaaatctcagggccaagccttgctttatagaaacgtataagcaagaaaagtgtagaagtgtttatgtcctggtttaaaggtgactgcatagctaagacaagttgacttaaaggagatcaagactggagatgacaagagtgaaaccagggaaacatcatcttcgaataagtamacaaggctgccagtgacatccctcagtcctgattaagcctatttcatttcatcagtttttaacccatcatgtgtttgcctttcttctccccagtccctggccccacctcttctgccacaaacgtcagcatggtggtatcagccggccctttgtccagcgagaaggcagagat

SEQ ID NO: 239793 - DNA, 229 bp, Homo sapiens
  misc_feature (1)...(229): n = A,T,C or G
tcattcttttccatttggccctgttctgtcccaacatgaaggcaataatttgttacctcattaatggatctatccttttasttttttaaccacttccttatgctacccatgaaacctagttggggctctgttgtgtctgatttcccctggcttttcnttactttttcctcctttttcaggctcagcagggagctgctggaggtagtagagcctgaagtcttgcaggact

SEQ ID NO: 239794 - DNA, 229 bp, Homo sapiens
  misc_feature (1)...(229): n = A,T,C or G
tcattcttttccatttggccctgttctgtcccaacatgaaggcaataatttgttacctcattaatggatctatccttttacttttttaaccacttccytatgctacccatgaaacctagttggggctctgttgtgtctgatttcccctggcttttcnttactttttcctcctttttcaggctcagcagggagctgctggaggtagtagagcctgaagtcttgcaggact

SEQ ID NO: 239795 - DNA, 568 bp, Homo sapiens
tggtaatactaacagatgccttaatggattttctgtattacatgaatacttttccttacctccgttatggagtagtagactgatttcatcttgatartctggatcaatagtcctggccaacactgtaactcccttcttagcctgctgacttcaaggtaggaggagcccaaactatccaggtggcaatcttaacttccagcttaatggaataattgttggctcccctggaatcaacatcagctcagagccagtgtccagtagtccccaaaatgtctgatcatttccctttctccagtgcacagttaccctggtaaaaggccagaggtctccttggggaaggataggagaacaattcactgcataaattgttggtaatgtagtggggtccttcctcaaggggatccagcctccccttcattcaatgggctgtgggtctgtaaactgcctcaagtctggaagttaattgaggggctttgattctctgttttcttaattcaaatcagtcttctgtccatttaacctagaagtttctcttcatatatattgtaagtaggaatgcagtaggctt

SEQ ID NO: 239796 - DNA, 588 bp, Homo sapiens
cttataattttgaggtttctctcctacgacgcaaaatttactgcatgttcagataaacatctggcccttactgggtcactatgtggggggaattgaggaataaggagacaatgcaagmtgtatgaagcctttattttagaatgttctattcctggattccagagctgtagccacaggtcaataattgcttgacttttccaaagtaattgattgacttatttttctggttggttttatcatatctattaaatattcgaattctttgaagaacagtttttaactgtatttcttcataaatcctattgcattgccttattaactatattaactaattaatgaattgctgaatttttttagacattgaggcagaatatattcgcctatatattagaaaaccattacaacagacaagtgagaatgcatgaattagagcaaagtcttcagaaatagacatagatagaaaaattttatttagtgatataatatatataattattcattaaatgtatattatagacaaagactaaaattggagcttagttttttattttaggttattgtagtgtcatttataaaagtagttgttta

SEQ ID NO: 239797 - DNA, 588 bp, Homo sapiens
cttataattttgaggtttctctcctacgacgcaaaatttactgcatgttcagataaacatctggcccttactgggtcactatgtggggggaattgaggaataaggagacaatgcaagctgtatgaagcctttattttagaatgttctattcctggattccagagctgtagccacaggtcaataattgcttgacttttccaaagtaattgattgacttatttttctggttggttttatcatatctattaaatattygaattctttgaagaacagtttttaactgtatttcttcataaatcctattgcattgccttattaactatattaactaattaatgaattgctgaatttttttagacattgaggcagaatatattcgcctatatattagaaaaccattacaacagacaagtgagaatgcatgaattagagcaaagtcttcagaaatagacatagatagaaaaattttatttagtgatataatatatataattattcattaaatgtatattatagacaaagactaaaattggagcttagttttttattttaggttattgtagtgtcatttataaaagtagttgttta

SEQ ID NO: 239798 - DNA, 588 bp, Homo sapiens
cttataattttgaggtttctctcctacgacgcaaaatttactgcatgttcagataaacatctggcccttactgggtcactatgtggggggaattgaggaataaggagacaatgcaagctgtatgaagcctttattttagaatgttctattcctggattccagagctgtagccacaggtcaataattgcttgacttttccaaagtaattgattgacttatttttctggttggttttatcatatctattaaatattcgaattmtttgaagaacagtttttaactgtatttcttcataaatcctattgcattgccttattaactatattaactaattaatgaattgctgaatttttttagacattgaggcagaatatattcgcctatatattagaaaaccattacaacagacaagtgagaatgcatgaattagagcaaagtcttcagaaatagacatagatagaaaaattttatttagtgatataatatatataattattcattaaatgtatattatagacaaagactaaaattggagcttagttttttattttaggttattgtagtgtcatttataaaagtagttgttta

SEQ ID NO: 239799 - DNA, 507 bp, Homo sapiens
ttgagttgttttattatactgtcaaactgacagactaagacatgcttcatacataggacgatttatttaatagttctctccttgaacaataaataaaatcaactatgtgcatgtcttacctataaaaagtactttcaagttaaaggtatttagtcagtatattcagttgatagtcatatgaagatgactataacagaaattcactccctggtgcaagataaatagacygtactaaggtatcttccctagactggtaaataagttttcagcatcctgattaaaacaaaatttgatttgtggtttgaatgaactatagttttctctatctgcccaagctctcctccattagcatggatattcaagagacattagcatggatattcaacgacattataattgcaaaaaatgtttagctgaagttcaaatcaatgtgtttaaataagacctacctcatgagggtggactggtgaagtatctatttatgagtagtcaaggggtataaatcaa

SEQ ID NO: 239800 - DNA, 463 bp, Homo sapiens
tctctttccaaacaatatttttgagagatgttactgataaaaatataggtttatttaaacagattaagtatttattaaataataattcttgttcatgtgaacccagtttatatcttatcataagcagcaagaaataatcatctggggaatgyaagcttcagatactaagcagaaactaatgtgaataattactgagaatgctaaatagtggctaagaataagattttcctttcaattgcttcaactgagggagagaagggaattgaacaaataagataggggaggatatgtgtgtttattgggtagaatatacaccaaatattcaaaaggatttgtttgtgtcatcttgttccttgtatttcaccaagttcacgttgtcttttctaggtctaattgctaccatgcaatgcatcattaatttttttttgaaaaaatacgattgtcacattatggggaaatctat

SEQ ID NO: 239801 - DNA, 463 bp, Homo sapiens
tctctttccaaacaatatttttgagagatgttactgataaaaatataggtttatttaaacagattaagtatttattaaataataattcttgttcatgtgaacccagtttatatcttatcataagcagcaagaaataatcatctggggaatgtaagcttcagatactaagcagaaactaatgtgaataattactgagaatgctaaatagtggctaagaataagattttcctttcaattgcttcaactgagggagagaagggaattgaacaaataagataggggaggatatgtgtgtttattgggtagaatatacaccaaatattcaaaaggatttgtttgtgtcatcttgttccttgtatttcaccaagttcacgttgtcttttctaggtctaattgctaccatgcaatgcatcattaatttttttttgaaaaaataygattgtcacattatggggaaatctat

SEQ ID NO: 239802 - DNA, 609 bp, Homo sapiens
tgttctcagattctttaagttttaaaagggtttttcttttgtggtttttatctaaatttatttgacaaagtgactttttcccccttaaagcattttgagaaatgtaaacataatgaatacttcaaaaggagacactatgttcattaccaatatraaataataaaggaaaaaggtaagataatgttaaatagtattcttgtagtgttaaattgtatcccatggtgaaatcacctgctaaaatctttcagatacttgaaaatgatgcaaagcagtcaaggcttggttataaagcatgcacttggtcaacaccaaattacataatatataaaatttggttcttcccaacttaaaataaaaaatgtatgtgtagaatacataagtgcaaaacataaaagctatgtttcatatttttatatttgaaaagaagtgatgaaattacagtggattttgtgaatttctggagagttccatagtcacatctgcaatactgcaatgtttaagttgtctattgcaacactatgctcaagtacctgcaccctctctctgtgacagatgccaaaaaatggggaactattgttgtaactataaaagattttcatatcatttatt

SEQ ID NO: 239803 - DNA, 613 bp, Homo sapiens
tgtacacgtttccattcccctcaccattatgtgagaatgaaccttttcccatgcccccactaacagtatgttatcaacctttagactgtttgtatctgaaaggtgaaaagtgatatctcagtttggtttcatttgcttttgtcttaatatgcatgaggctaagtgtattgtatattgcctacaacctgattacctttccatattttctctacccctatcttttgctgcttttcctgttgaattgttctcttactaattgttgaaactgtctctatattagggagatagacttttgttatggtaagagctatacacttttgcccagtttgtcttttaccttccctgtggtgctttttttttttttttttggccatgtcgttcacattatttttatgtagttaaattagtcaaagtttctaaatcatctttttggtttgwattatacttagatacaatcttgcactctgagattagtgttaaacatctctcatatttcttaaagtacctttacatttaaatatctgattcattcgttctgacctaagacatgagaaatggcttcagctttattttttttccagttggttgttgttccaaccaatgtgttccaaaa

SEQ ID NO: 239804 - DNA, 597 bp, Homo sapiens
ctgccgcagatttctaagctggccgtccttcagtgggttcatcacatctagtacgttccatggccagagacagagcattgccctctcccctaagtgcacgggtgcaccagagcatgcatagttcacccatgcacttcatacacatcctccttctctatggacagtgaactcaggaaagagcaggaatatgccaataatatcaacaaatggcaacagaagaatacgtacatatcctggatgcttcgagaataaaacaatccaaacagctttgcttatcagtctaggtttcaacacaacatttgcrtaatttttaaacaactgggcaataaaaagaattttaattgaagtttcagtcaccttatccagctgcctaaccttagaaaaacatgcaactgaaaaacatttcagttaaaagaaaaaaagaggcagtttagtattttcatttaagttataaaatataaacatgtagtatatatttaacattatttttcaccaaaaaagaataagttagatgctaatttttatgtaaagatacattctaatcattattcttttattacatagccccctcttctccaccaccaccaactttcatgt

SEQ ID NO: 239805 - DNA, 597 bp, Homo sapiens
ctgccgcagatttctaagctggccgtccttcagtgggttcatcacatctagtacgttccatggccagagacagagcattgccctctcccctaagtgcacgggtgcaccagagcatgcatagttcacccatgcacttcatacacatcctccttctctatggacagtgaactcaggaaagagcaggaatatgccaataatatcaacaaatggcaacagaagaatacgtacatatcctggatgcttcgagaataaaacaatccaaacagctttgcttatcagtctaggtttcaacacaacatttgcgtaatttttaaacaactgggcaataaaaagaattttaattgaagtttcagtcaccttatccagctgcctaaccttagaaaaacatgcaactgaaaaacatttcagttaaaagaaaaaaagaggcagtttagtattttcatttaagttataaaatataaacatgtagtatatatttaacattatttttcaccaaaaaagaataagttagatgctaatttttatgtaaagatacattctaatyattattcttttattacatagccccctcttctccaccaccaccaactttcatgt

SEQ ID NO: 239806 - DNA, 629 bp, Homo sapiens
caccacacagtcccaccgccctggattcctggctggtacctgcagactgagcctccaggattgctccagtgtcaggccatctctcagcctcaagactagctcaagtgtcaggtcagtacccacatccttagactccagaccagcacccacggagccagcctccaagtctgcctcaacagtagccagcatttgcagtcccagactccaggctcactccagagccaagacaacccccacagacccaggcttcaagctggtcccctggtctaggatgtagagcagcacttgtggactgggtttcatgcctgccctagtgaaccctgggtacaggtctaccatagaagaccctggcattgggccaactcccacagaccaaacatccaggaacatccctgtggatgcagttgacaggaccacaccagtggaatgttggtgccaagctggccccygtgaacccaagatcctggcctaactcagtagacccaagcttcagttcttacatggtggacttaggctccagatccaaccccatgaacccaggtaccaggccagctcacatactgacgcagacacaaggccggaggattccaggagcaagcctacccttggaccatgccagatggcctgcc

SEQ ID NO: 239807 - DNA, 528 bp, Homo sapiens
tgatacaagtgtagctactccagctcttttttgcttttgtcgccatggaatatctttttttcatctgcttattttcagcctatgtgtgtctttataagtgaaatgtgtttcttgtagacaacagataattgggtcttgtttttttatccattcagagccactctgtgtcttttgatttgagagtttagtgcgtttccattgttattaagaagtaaggatatgttctgccattgtattgtttgtcttttgcttgttttgtggtcttctcttcctttcttcattccttcatttcttttattgaaggtgattttgtcttgtggtatgatttaatttcttcctttttattttttaggtatatgttatatggtttttgatttgaggttatgatgagtcttgcaaatattatcttacaacctattattttaagctgayaaccacttaacattgcataggcaaaaacacacagaggcaaaaagaaaaccaataaaagctctacactttagcctcttgctttttaactttttgttg

SEQ ID NO: 239808 - DNA, 409 bp, Homo sapiens
tactaggtgtgtggactaggttctctggactgctaggttctctgtgtcacagctttcctttgatgacagtgtcaatttaaaattataccaggttcatttcatgatggttccctctgggagaattttataccctgaaatttgaggggtgtacctctaccatttccccctccgctgtctttctttttgaacttctcagagatagaccttcatgtaattcctgatggttttaattttagaatgaaaaatcaggatctctgagaatatttagatgaatggtaatgacttttgttatgtgggtctggtcatcatgtggtattttcttttccccccaggaatgctgtctctgcaatttgagaggaggtgctcttaagcaaacgaagaacaatargtaagtaatacattaattgtg

SEQ ID NO: 239809 - DNA, 645 bp, Homo sapiens
tcccttctcttaaccgagaatggagaggaagaattcaggaaatgaatgtcaactagtagggaggaattatggggaagtgaagatttctttgatttgagggtgccaatggggctgggcagaggcagagccagaagaatcctggttagtttaactctgwccagtttgatcccaatgttcttggcttggggagtccttggtgacttgtgcgtagattatccatggatatttcaagggggtgggaagtgagagctgaaattaagtggtctcaggaatgcagtaaaaaaaaccccatgcgtgtaatgacacacacaccagttaaactgggtggaaattttaaatctcggttttctgctaattatcttgaaatggaaaaaacttgcccattacacaacgcgcaccatgtctaggagattaaaacaagccacttgtttaggagaagcgccattctccattccaggatcagtatgaagttctcctggcactcctcctggagcgctctgctggtagagatgttgatggattatgggacgttagggtcaagtgaggcctgcgaaaggataattttctatccattcctgagtaaccactccgtgaacgttagcaagcaccaagaggccaaatgtaatatgtgcctctcatgtcaac

SEQ ID NO: 239810 - DNA, 645 bp, Homo sapiens
tcccttctcttaaccgagaatggagaggaagaattcaggaaatgaatgtcaactagtagggaggaattatggggaagtgaagatttctttgatttgagggtgccaatggggctgggcagaggcagagccagaagaatcctggttagtttaactctgaccmgtttgatcccaatgttcttggcttggggagtccttggtgacttgtgcgtagattatccatggatatttcaagggggtgggaagtgagagctgaaattaagtggtctcaggaatgcagtaaaaaaaaccccatgcgtgtaatgacacacacaccagttaaactgggtggaaattttaaatctcggttttctgctaattatcttgaaatggaaaaaacttgcccattacacaacgcgcaccatgtctaggagattaaaacaagccacttgtttaggagaagcgccattctccattccaggatcagtatgaagttctcctggcactcctcctggagcgctctgctggtagagatgttgatggattatgggacgttagggtcaagtgaggcctgcgaaaggataattttctatccattcctgagtaaccactccgtgaacgttagcaagcaccaagaggccaaatgtaatatgtgcctctcatgtcaac

SEQ ID NO: 239811 - DNA, 571 bp, Homo sapiens
caagaaataaattactgtaacattgcctgaaatacactcttaatctaatcctcaaggcatgcagacattacagagatagggatcagggtgtaagctgtctttaatttcaaaaagatgcttaacagctcattacagtagtgcacttgctgaactgatgactgatgaaaagttatttggaaaattcagattagagaaaatcagacccaaaaccagggctttaatctgaatattgccaatatccaaacttgtattaacagatgaggctgcctctgcacttgactaaacacagtacacttggttatctgcatctttccaactttctgtgttgattattctagaaaacataaaattatagttgaagagttataagtaaaastttagattaatggcaatcagctctttggaaaagcagccttcaacctgtcaccacatgctatttcaggggattcaaaatgcccaaaatccatatatgaacttacaggttaggaacacttatcattcatgaccaagcctcacattttacacaggaggaaagaggccagagagagggcttacccaaagtcaaaaaaca

SEQ ID NO: 239812 - DNA, 517 bp, Homo sapiens
tcttttatttttttgctttacttttaagagcatctataggttcacagcaaaattcagaggaaagtatagagattccccatattccccttctccccacatgtgcatagccccccacattatcaatatccttaaccagagaggtgcatttgttacaaataaagaacctacaatgatgcatcattatcccccaatgtccatagatttttttaaacttttattttttaaggaaacccaggcaaccagaccaaagtccrtagtttacattagggctcactctgggtgttgtacattcagtgatgtttgatacaaatatacaatgacaggcatctgacattgtagtatcatacagagtggtttcactgccctatgagtcctctgtgccttttccatgggggtgtgtgtgtgtgtgtgtgtgtgtgtgttaacgtgctagctcatgagaaacctctacctctggagagagtgttcacacatctggaagaagtattaagagatatgaagaacatagtcacattat

SEQ ID NO: 239813 - DNA, 631 bp, Homo sapiens
aagcagtttttatttatttttttttctatttgaggtagggtctccctctgttgtccaggctatagcacagtggcacaaacatggctcactgcagcctcgagctcctgagttcaagctattctcccacctcagcctcccgagtagctgagaccacaggtgctcaccatcatgcccagctaattttttaaatttgtcaagaaagtgtctcatcatgttgcccaggctggtctcggattcctgggctcaagcagtcctccctccttcatctcccaaagtgctggaattacaggcatgagccaccatgccaggccagccagttttaaaagttaaaaaaaagtggccaccaaggcccacactttgtatagggctgctaagaaatttccagagaaaagggtttgaccgtggcccctagataactaatatcttcttctgtccctccggtttactgaacttaaagcctagttgttgcttacaatttagggttgaaaagaaaaaagatcagggtatgatggaataatcaaagaaatcctcatagaggagaaaagacataagcckggtgtttaggctaagtgaaatttgtagagacaaacgtatgtaaaagagaaaaataacttaaggaaaggcataagat

SEQ ID NO: 239814 - DNA, 561 bp, Homo sapiens
ctgataagtgctttcttgtttatcactatgtaaatctgaaatattttgtacttcatttgtttttatccattctgaattttcaaagcataaaaatgtcaaagaaaaattgagataaacattttgttcaccattaaatgtttgcatctgcagtctatgatgagaaacaatgaaattatgactaaaatttaacaaatagtattttcttatagaagcaatgtattaaatgattagatacacaggacagttcacagcaaattgtttacttacatggcataattgaaatactgttatttgtaaagagttctatactgcctaccttagctaaccagaattgttcatagacttgtgataatatggtgttatgggaaaacacattttgtgcgcatgatgaagagagcaccgtgaatctagtcttgactgcccctggtggaacatttgaaagcccttgggactccaggagagakgtttttgcagcatgtatgctaaatttgtgagttagcaagaccctgctgtgattactatgttgtacagatcttcaaagtatattgcctaatatgagtc

SEQ ID NO: 239815 - DNA, 497 bp, Homo sapiens
gtcctctcttttgcagttagatgtggccaggtgacaaagttctgtacagtggaatgtaaacagaagtatcatgtgagagtttccaagaactttttcaggagggaggaaacacatgtcctttgccctccctttttgtttgctgccttctccatcctatagcctggaatacagacatgatggctaccatcttggactatgaacatkaggatcacacccaagggaaggagaggcagcaagctggaaggtactatggagcagaactgccacagcctgagtacctacctctggaactttctgtgagaaatgaaatgggcccaacagttccataaacagttgttttgggataaacatagaaatggcccctagcttgaaatttgcatttgttttatctgagttccctcctcaggaaaggaccttcaggcctctcaaaaaagtatcaagagaactgacaccagatgcctccttgcccctccctagttcctgttttcttaaacatt

SEQ ID NO: 239816 - DNA, 518 bp, Homo sapiens
ctacaggtcactccatgcttatgtttttctttctttatgttcataagaattcaagaagctagccaaccccactatctttgaattattcactcttgccatgaagatttattaccatagccacttggccttccagcgttttgatttccatggatactttttctcccaggtgactacaagtgacaatktatttattttgagatggattttcactcttcttgcccaggctggagtgcaatggtgcgatcttggctcactgcaacttctggctcctgggttcgagagattctcctgcctcagcctcctgagtagctgggattacaggcatctgcaaccactcctggctaatttttgtatttttagtagagacggggtttcagcatgttggccaggctggtctcaaattcctgacctcaggtgatccaccctcctcggcctcccaaagtgctgggattacaggcatgaaccaccatgcctggcctacaagtgataatttaaataactgttctgccactgcatac

SEQ ID NO: 239817 - DNA, 490 bp, Homo sapiens
gcactgccctacccaccttagtaaccaccacgattarcacaggaacacagcaggttctcaataagagctggatgggaggatggatgcatgggaaaatgggcaggctcagggtaagaggtggctcatgcctgtaatcccagcactttggggggctgaggtgggagggtcacttgaggccaggaatttgagatcagcctgggcaacatagactcttctctaaaaaagaaggagaaggagcaagaaggagaaggagaaggagggagaaggagaagagtaagaaggtaagatatgtgggaaaaccaatgctgataagtgagcctcctgcagaatcctagtgacatcatctcaaagataaatcattctcaagttctgagaacaggtggcacttcttatccatgggctccacagccatgaattttgggtcagctatattcatgacatccccaataaagaatagccatacaacaataaaaaatatacaaataaagaa

SEQ ID NO: 239818 - DNA, 646 bp, Homo sapiens
accccaaaaaggttgatggcatcttggacaagcatgggaacttacctgaaagagtggccagaatgggaamaatttatgcagcaaaataaataaccatagcattggattataatttatagagtaaaattaatatctatgaatcaataattgtataaataaacaatataataaaatagagaaaagacaaatcttcctttctgaagaattacaactaaaaaggaatgcaaatcgtataaaatcacctttagagtaccataagcaagatccacagatggatgctaatattagtgggcagaagtttgaagggaaatagaatatttgaatagcctcaaagtatctctcctaagacacttactaattataaagggaaaaagtaatgacttaacagtgggaaaaccagcaggcagcaccttaacccactgctcagggtcaacatcaccataataagacatattgccctcatgtacgcctgccacgatgagctgagtgcatcactttcatggcattcctgccaaaaatgcatgatctcaatctaatcatgagaaaacatcagacaaacccaatgtaagagacattctacaaaaatacctagcaatactcttcaagaaaagtgtcaatgtcatgaaagactaggaaagactgagga

SEQ ID NO: 239819 - DNA, 646 bp, Homo sapiens
accccaaaaaggttgatggcatcttggacaagcatgggaacttacctgaaagagtggccagaatgggaacaatttatgcagcaaaataaataaccatagcattggattataatttatagartaaaattaatatctatgaatcaataattgtataaataaacaatataataaaatagagaaaagacaaatcttcctttctgaagaattacaactaaaaaggaatgcaaatcgtataaaatcacctttagagtaccataagcaagatccacagatggatgctaatattagtgggcagaagtttgaagggaaatagaatatttgaatagcctcaaagtatctctcctaagacacttactaattataaagggaaaaagtaatgacttaacagtgggaaaaccagcaggcagcaccttaacccactgctcagggtcaacatcaccataataagacatattgccctcatgtacgcctgccacgatgagctgagtgcatcactttcatggcattcctgccaaaaatgcatgatctcaatctaatcatgagaaaacatcagacaaacccaatgtaagagacattctacaaaaatacctagcaatactcttcaagaaaagtgtcaatgtcatgaaagactaggaaagactgagga

SEQ ID NO: 239820 - DNA, 646 bp, Homo sapiens
accccaaaaaggttgatggcatcttggacaagcatgggaacttacctgaaagagtggccagaatgggaacaatttatgcagcaaaataaataaccatagcattggattataatttatagagtaaaattaatatctatgaatcaataattgtataaataaacaatataataaaatagagaaaagacaaatcttcctttctgaagaattacaactaaaaaggaatgcaaawcgtataaaatcacctttagagtaccataagcaagatccacagatggatgctaatattagtgggcagaagtttgaagggaaatagaatatttgaatagcctcaaagtatctctcctaagacacttactaattataaagggaaaaagtaatgacttaacagtgggaaaaccagcaggcagcaccttaacccactgctcagggtcaacatcaccataataagacatattgccctcatgtacgcctgccacgatgagctgagtgcatcactttcatggcattcctgccaaaaatgcatgatctcaatctaatcatgagaaaacatcagacaaacccaatgtaagagacattctacaaaaatacctagcaatactcttcaagaaaagtgtcaatgtcatgaaagactaggaaagactgagga

SEQ ID NO: 239821 - DNA, 646 bp, Homo sapiens
accccaaaaaggttgatggcatcttggacaagcatgggaacttacctgaaagagtggccagaatgggaacaatttatgcagcaaaataaataaccatagcattggattataatttatagagtaaaattaatatctatgaatcaataattgtataaataaacaatataataaaatagagaaaagacaaatcttcctttctgaagaattacaactaaaaaggaatgcaaatcgtataaaatcacctttagartaccataagcaagatccacagatggatgctaatattagtgggcagaagtttgaagggaaatagaatatttgaatagcctcaaagtatctctcctaagacacttactaattataaagggaaaaagtaatgacttaacagtgggaaaaccagcaggcagcaccttaacccactgctcagggtcaacatcaccataataagacatattgccctcatgtacgcctgccacgatgagctgagtgcatcactttcatggcattcctgccaaaaatgcatgatctcaatctaatcatgagaaaacatcagacaaacccaatgtaagagacattctacaaaaatacctagcaatactcttcaagaaaagtgtcaatgtcatgaaagactaggaaagactgagga

SEQ ID NO: 239822 - DNA, 528 bp, Homo sapiens
caagccccatcctccttagaaagtgattatggctgtaaatcccaatgctttccttccttgtagtcaaatggccacatgccgacttgcccacgaacatgkggccactaccaaatgggtgccacttttctgcatttgctcttctttagacaaacatacctcaggaaaatgtttcatggatatagctggctgcagcaagaggatggaaatttaagttcatgctttcctttctcataatctaaaagaagagactgatgcttacatgagtgatgggtctagatacaaatgtggaatttgaaaagatgagtaaaaagttctatatcgcatcactgcacagtagccaagtactcaccctcgccagacaatttagaactttgaagttgggggccatattttgttcatgtctccaacaccctagcatggtatctgtactaaacagattcttaattcattttgattgataaaattagtagatacagtgtaggccaggcatgatggctcacacctataatcccagcactttgggaggct

SEQ ID NO: 239823 - DNA, 591 bp, Homo sapiens
ctgttcctggtctatgtgtctattttaatgccagtcccatacagttttgattactataactttgtaatataatttgaaactagctagtatgatcccttcaactctgcttttcttcctcaggactgctgtgtctattctggttttttggcagatccatacaaatttrgagttttttttctatttctgtgaaaaatgctattggaattttgatagggattgccttgaatttgtagatcactttagggcagtatgaacattttaacaatatttattcttccataccataaacatgggattcctttccatttatttgtaccttcaatttcttttaacaacattttataattttcagtgtatagatctttgcctccttggttaaacttattgctgattttattctttttaatattatcataaataggatttaaaattttttattgaataggtcattattggtgtacagaaatgcaactgatttttattagttgattttatatcctacaactttactgaattcatttattagttctaacagggttttcttgcagagtctttagaggtttctacatataggatcatattatctgcaaa

SEQ ID NO: 239824 - DNA, 591 bp, Homo sapiens
ctgttcctggtctatgtgtctattttaatgccagtcccatacagttttgattactataactttgtaatataatttgaaactagctagtatgatcccttcaactctgcttttcttcctcaggactgctgtgtctattctggttttttggcagatccatacaaatttagagttttttttctatttctgtgaaaaatgctattggaattttgatagggaytgccttgaatttgtagatcactttagggcagtatgaacattttaacaatatttattcttccataccataaacatgggattcctttccatttatttgtaccttcaatttcttttaacaacattttataattttcagtgtatagatctttgcctccttggttaaacttattgctgattttattctttttaatattatcataaataggatttaaaattttttattgaataggtcattattggtgtacagaaatgcaactgatttttattagttgattttatatcctacaactttactgaattcatttattagttctaacagggttttcttgcagagtctttagaggtttctacatataggatcatattatctgcaaa

SEQ ID NO: 239825 - DNA, 347 bp, Homo sapiens
gtttatgaagtgtgggccacagaccagcagcatcagtgtcacttgggagcttgtcagaaataatctcaggcctgcccaagcccactaagtaagaattgcacttatacaagaaccctggatgagcatttcataaagtttgaraagcacagctagtatgaagcaaaccactcgaagtgcaacctgttacctgtctgcaatgagtcagacattgagaggaaggatttagaaactttatagcaatttgataaagtaattttgttatatctaataataaaactcagagcttgtctttttaatttcaattttctagtattgcatttttactgtattttacgacactatgtctg

SEQ ID NO: 239826 - DNA, 596 bp, Homo sapiens
tagaacatattggtaggggactgaggatgtgagaaagggaatagcgaaagctgataaagtatgtgttactaagcaagctgcaatgatatgcaactggggcttaatcttgttaagaacttctggggaataatatagaccatagacttcagaattatcctacccaagtgaacaagggcattagggtattcatctactaatgcccatcacttattagtgaaagctgctcccaggggccttcattccctatcatttccagcctgccatttccagaaacagaacaggctccagaggccagaggaagaccttaggcaaatagattttagatgctggaaggtaaaagtcaggtcacctttcactgatatggtaaagcccaaggatacataggtgagcacttatatatatggtattttactgcatagtggtaacagtgaatggggtaatgatagcaaacaaaaagagagaagaacaaagcaactaaaagttcagattcctcagggataaaagcccatgttacccaccraacaaaaaactagccaaagtactggccaaatgagataacaaatatcaagtatagctttgagaacagttacaatagt

SEQ ID NO: 239827 - DNA, 549 bp, Homo sapiens
tgtgtatatacatatgtattgtattgaattatttacttccttcctagctgcaacaccatcttagtagtacaataatcacaatctatagttcccagccatttcggcttccattaatctcttcaacttctcctccaagggacctgcataaggctgaatggttaactgaaaaccgtaataaagaaccctctcgtgctggcccctgacttaaaccaagacaacaattaagagtggattctttgctttaggttcaagatgatgaacaaatggaacacgagaaggtgccactcaaacctgagtcaaggaacacagctaagtcctcgaggcaggccaagattcatacctgaagatttctccagaaataggacctcaaggcaaagccaaaggcatgagtggaaccatagagcccaaatgggtggttatggatgggtctttttaaaagattattaattatcatagtaaaattatacatgacataaattttatcaytttaaccagagtacagtttcatggcattaagtatattgacagtgttgttttatcattaacaat

SEQ ID NO: 239828 - DNA, 530 bp, Homo sapiens
gattggcagtcccagaggtggttcatgtactgtttccacggcgtcagggcccgcgatcggctgctcttggctttcctttttctggtgccagctctgtgcagctgcagcacatagcaccaagtcctcacaagacaacgtccaagctaggaggcggggagagctctctccttctatcacggaggagtatctttccccaagtgttctggatctctgttgaatcacatgcctgcctcaaaggagcaaagaaggaatgaratttccgtgattcatttagctcaaccgtgattcattcctgggcgccggacataaagccagatgcgacatgaacacaactggccttgaaagaggtgtagaatggctgtggggaaagcaaaccatggcctctgtcacccatttgctctctgggtacttcagaattggcattcaaatgataataccagtgctctatatctcacagcacttcacagtttgcagagcgttcatgcacagtgtttcattcgattctcaccaccaccatgtgagatgcaaga

SEQ ID NO: 239829 - DNA, 583 bp, Homo sapiens
caggaagtacccaggatattgtcataaaatttcaggataccagagacaaacaatggagcagaaatcaaaatggcatcagaaagagaaggcaatgcgagaatgtctctaaaatataaaaggtatattatttccaacatagaacacttgatccagtcaaatgatgaatcagatttcaggacatattagagttctccagagagacagaaccaatagaatatatatgtagagagagagcgataaaagaggatctattagaggaatttgctcatgcaattatggaggctgagaagtcccatgaaagggcatcaacaagctggagaagcaaggaagccagcagcatggctcagtccaagtctgaaagccctgagaactggggaggcccctggtgcaagtcctggagtccaagggcctaacgctctgacgtgcagggtcatgagaagggcattccagctccagaagacggagggtgaatttgcctttcctctgcctctttattctacccaggcccccarctgactggatggtgctacccacactgaggttggatcttctccccttagtccactgactaacatgccaacat

SEQ ID NO: 239830 - DNA, 562 bp, Homo sapiens
gaagggcccatacattgatgattaagaatgtaaaatagtgcagccattttgaaaaccagttggaagttcctcaaaaagtcaaccataaatccagccgttgtactcctaaatatatacccaagagaaatgaaaacagctgtgtaaacaaagacttggacataagtgtttatagcagcattattcatcattgccaaaaggtgtaaacaacccagacatctatcagtagctgaatagataaacaaaatgtggtatatttgtacaatgagacattattcagccataaaaggcaaaagagatctgaatagaaatcagagtattcaaccatgaaagaatgaagttctgatatacactgccacatggatgaaccttgtygacagtatgctaagtgaaagaagccaacaacaaaggaccacgtgttgaatgattgcattcttatgaagcatccagaacaggcaaatgtatggagacagagaatcaattagtgtttgccaggagctgggaataggggagaatgggaaaagactcctaatgggtatgggatttctttttggggtgatgaaaa

SEQ ID NO: 239831 - DNA, 548 bp, Homo sapiens
ataaaatggtcttcaattgtgcagatgctgtacagtctcctgtggtttaatgtctttttgtatatttattggccatatgtggttcctcttctgtgaaatgcatttatctggtttttgctcatttttctatattgagttgtcttttttctagtgatatgtagaaactctttattattcttgagtgatctttgttggttatttgtgttgcaaatatcctttctctcatctctccsaaggacatacaattattctcagaaacaatttattctgaatacatattgaagaaaacttgagatgaagatgagaagggatgaagagctccaaagcccaccctcaacattcctgacaaaacctgggactttgggaaacggaccatggcaagtgattttgtaccgagattgctgatgggaagagaagtggggaatactaaacagaaaccaatcttcatggaaacagggacaggagagggtgttgacaacgggagggtaaaaaccagactgctctcatgaaagcaaagagggttgactgtgagttaaagcggcaggcta

SEQ ID NO: 239832 - DNA, 361 bp, Homo sapiens
aaggtcccacagtaggccaccgcaggctaaggagcaaggagagccagtctgagttccaaaactgaagaatttggagtccagtgttcgagggcaggaagcatccagcacgggagaaagatgtaggctgggaggctacgccagtctctctcttttcacatttttctgcctgcttatattctagccatgccggcagctgattggaytgtgcccacccaagggtgggtctgcctttcccactccactgactcaaatgtcaatctcctttggcaacaccctcacagacacatccaggatcaatactttgtatccttcaatccaatcaagttgacactcagtattagccatcacactaatattaaac

SEQ ID NO: 239833 - DNA, 603 bp, Homo sapiens
tttatatatttgtaatattgctgctgtggtttggatatgatttatttgtccccaccaaaactcatgttgaaattcgctcccctgatgtggtggtattggagggtggagcctagtgaggggtatttgggtcatgggggcagatccctcatgaatgacttggtgccattctcatgctagcaagttcttgctctggcgagackggattggttccagcagaaattgattagttcctgcaagagtgggttgttgtaaagccacgatgcccctcaggttgtgtttctttgcatgtgttctttgcatgcttcccctttgactttctccaccatgttctgatgcaaactgaaagtttcaccagaagccaggccatgcccttgaatttcccagtctgcagaaacatgagccaaataaacctcttctctttacaaaattacccagtctcaggtattctgttacagcaacacaaaacagatgaagacaattgctttaatgctctgtgtcctagttaactttattagcaaagaaacatgaaaaaatatttgtctgaagcataatggaagtacaagtctcactagaatgataattgcctgcaagcagccattcaag

SEQ ID NO: 239834 - DNA, 603 bp, Homo sapiens
tttatatatttgtaatattgctgctgtggtttggatatgatttatttgtccccaccaaaactcatgttgaaattcgctcccctgatgtggtggtattggagggtggagcctagtgaggggtatttgggtcatgggggcagatccctcatgaatgacttggtgccattctcatgctagcaagttcttgctctggcgagactggattggttccagcagaaattgattagttcctgcaagagtgggttgttgtaaagccacgatgcccctcaggttgtgtttctttgmatgtgttctttgcatgcttcccctttgactttctccaccatgttctgatgcaaactgaaagtttcaccagaagccaggccatgcccttgaatttcccagtctgcagaaacatgagccaaataaacctcttctctttacaaaattacccagtctcaggtattctgttacagcaacacaaaacagatgaagacaattgctttaatgctctgtgtcctagttaactttattagcaaagaaacatgaaaaaatatttgtctgaagcataatggaagtacaagtctcactagaatgataattgcctgcaagcagccattcaag

SEQ ID NO: 239835 - DNA, 322 bp, Homo sapiens
tgtgttattttaagcaccatgttagtggtgatgtgttatagcgcaataggaaattaatatacttgcttaatcaccccttgggcttctcttcccctgtaagacctgtatttttttgttgtttttattttgtttgtttgtttttgtttttgttttgagacaggatctcactctgtcccccaggctggaacgcgtgtcatcatcatggcttgactcactgcagcctcaaacacctgggctgaagcaatcctcctgccttcgcrtctcgtagctaggacaacaggcacatgtcactaaatatggctctttttttttttaaagtaga

SEQ ID NO: 239836 - DNA, 418 bp, Homo sapiens
tatgtgtccatgtgttctcatcatttagctcccacttacaagtragaacatgcagtatttggtttactattcctgtgttagttcgctaaggataatggcctccagctccttctgtattcccgcaaaagacacgatctcattttttgttatggctgcatagtatttcatggtgtatatgtaccacattttctttatccagcctgccatggatggacatttaggttgattccatgtttttgctcttgtgaatagaaaatattctttaaaaaataccctcagcccttctcatggcctccagtgcccatgtgatctggcccctgctcccttgctgaccgcatgtcaatcattcgccttgctccctaatttccacacaccatggtttttctattccttgaacaaaaccaaattttcactcact

SEQ ID NO: 239837 - DNA, 589 bp, Homo sapiens
aagctttaacactcagtgttcaatataaattaaggtatgttcttgtccttctgcctcagtgtcacaacagagcctccatcagcctagttactggatgatcataagaygccaagagatggagcttccagctaatctgtgaggcctgttaacatgcataagaaatgaacttgggttgttttaacttgtgtcatacttgttgtcacactatgacacaacctatccagacacatgtccctttgacttgctttttcagtctccttgtcaccattcacctcctatttcaatccaaactccaggagacctttgctatcttgctttcttttgggcagcagaatcttcctttccctttagaatcttttctatatctgttcttgtgtcctattcctctttgctgaaggtggtgatgccctttattcccaagaatgtcccttttatctgtttcctttgttccagacagctggcagctttacacagccatgaaagtcttttcagcaaatgactaaaaagcatgtcctagggaaacatctacctccctcatctctctgactatgtgaatcccagccttccctgatttcatcagtacaggtct

SEQ ID NO: 239838 - DNA, 555 bp, Homo sapiens
accttgccaagagcagctgatttgaaaactgcctgcctgccgcctcayggggaattgctcttaattgtttggtttccatgcgtgtcgtatatccactcccaacgtagaggctttgctttgggtaagaagaaatgcaaatggaagtaggggcattacatccaggattctttctggaggttagactaaatgacctcttaagattcctgctagaatctgttataaataactcaaaacctgattaaaaattctacctgaaaactgtctgagatcgacagcacgtaatccatatagacacgtgcaaattgtgaatgagtctagtaagaggaccacagctaacgtttattgagcactaactatgtgccgggcactgcgctaattgcacaatctcattgaatcctcatgacagcccaggaggaatgtttctaaatatttctgtgttacaggtgaggaaatctgtagagtttcagtcagcgacttgccaagtgacacagccagtaaacaaaagagcgggactggatccccactccatacccatctgacagtctcaacaggatg

SEQ ID NO: 239839 - DNA, 593 bp, Homo sapiens
cttgctgctcaggctgaggtgcaatggtgtgatcttagctcaccgcaacctctgcctcccgggtccagtgattctcctgcctcagccttctgaatagctgggattacaggtgcccacgaccacacctggctaattttttgtatttttggtagagacaggggtttcaccatgtcgaccaggctggtcttgaactcctgacctcaggtgatatgcccgcctcggcctcccaaagtgctgggattacaggtgtgagccaccgcgcccrgccgatccccttcaattatgaagactccttttaaacatcaagaacttttatggagcctgtcttcagcaactagctgttgtgcctttggtattcatgcttcattcgttcaacaggcacttttttaaactctaataaagtacagaaggaccaaacgctactgtgacatctattactcttgtgaaagggtgtatatatatttcttatgatagcatctattgaaaacaatggtgtttctagagatagaaataaaaatgattttcaaatgtatgaaaaggtgctaaacctcgctcacaggaataagaatgcaaattaaaagacattaaaatgc

SEQ ID NO: 239840 - DNA, 593 bp, Homo sapiens
cttgctgctcaggctgaggtgcaatggtgtgatcttagctcaccgcaacctctgcctcccgggtccagtgattctcctgcctcagccttctgaatagctgggattacaggtgcccacgaccacacctggctaattttttgtatttttggtagagacaggggtttcaccatgtcgaccaggctggtcttgaactcctgacctcaggtgatatgcccgcctcggcctcccaaagtgctgggattacaggtgtgagccaccgcgcccagccgatccccttcaattatgaagactccttttaaacatcaagaacttttatggagcctgtcttcagcaactagctgttgtgcctttggtattcatgcttcattcgttcaacaggcacttttttaaactctaataaagtacagaaggaccaaacgctactgtgacatctattactcttgtgaaagggtgtatatatatttcttatgatagcatctattgaaaacaatggtgtttctagmgatagaaataaaaatgattttcaaatgtatgaaaaggtgctaaacctcgctcacaggaataagaatgcaaattaaaagacattaaaatgc

SEQ ID NO: 239841 - DNA, 429 bp, Homo sapiens
cgatgaagccatgaacaatgctgttttaggcctctttggcgtagagaatatcaagcctttggtataataacaatggaaatgaaaatagtttggggcttcaaatcctaatgtatctgaattcctgggatccctggagwcccaagttccattaaagcatcatgggtggtatgtgtttggtggccctcttagtttgttttttgttgcttataacagaatactgaaactggggaatctataaagaaagagaatttatttcttacaattatggaggctgaaaagtccaaggtcaaggggctgcatctggcaagggccttcttgctggtgaggactctctgcagagtccctaggcagtgcaggacatcgcttgggaagggggctgagtgtgctaggtcaagtctctctgcttcttcttataaagctaccagttaa

SEQ ID NO: 239842 - DNA, 429 bp, Homo sapiens
cgatgaagccatgaacaatgctgttttaggcctctttggcgtagagaatatcaagcctttggtataataacaatggaaatgaaaatagtttggggcttcaaatcctaatgtatctgaattcctgggatccctggagacccaagttccattaaagcatcatgggtggtatgtgtttggtggccctcttagtttgttttttgttgcttataacagaatactgaaactggggaatctataaagaaagagaatttatttcttacaattatggaggctgaaaagtccaaggtcaaggggctgcatctggcaagggccttcttgctggtgaggactctctgcagagtccctaggcagtgcaggacatcrcttgggaagggggctgagtgtgctaggtcaagtctctctgcttcttcttataaagctaccagttaa

SEQ ID NO: 239843 - DNA, 392 bp, Homo sapiens
aagatctttagcagtactcaacctctaaagattatgctacaagtatttcttgccccacacaaatcatcatagataacataaaataaaacaatctaaatcctaaaaataagtatgtccttatcaaaatatcaatgatgttacttatgaaaatggaaaaaaaaatctacaattcatatggaacccaggagactccaaatagccaaagcaagtttgaacaaaaagaacaaaactgaaggcatcacactacctgacttcaaaatttactacaaagctgtagtatggtwctggcataaaaagagacacatagatcactggaacagaatagagaactcagatataaatcgacacatttgtagccaactcatttcgacaaaggtgccaggagcaaacac

SEQ ID NO: 239844 - DNA, 560 bp, Homo sapiens
atattggaagtctgtactccaaagggtgagaacgtaaacctcacaaagattcaggggcttgcacattagtggactggtaaggaccctggtcctaaccartccacctacctcagcctcccaaaatgctgggattacaggtgtgagccaccatgcctggcccattgtatatctttaaactgtcccttttgcccatctttatattgttttcttaatgtctttttcccctcgatttttagagctctttataaattagggagattagacctttgataaagatggtgtattatttgtcttttcttattgttttacttgtttgtcttttcttattgtttttgccatgccaatgttatttttatatagtaaaatttatcaattgtttcttctgttgcacctgcattttgaatcggaattagaaaaagcttctaaacactgagattattttttaaattctcatgttttttgtagcatctgtatggtttaatttttttacacttagatgtctgattcatttggagttcattctggtgcacagtgtgaggcatggatccaattttatcttc

SEQ ID NO: 239845 - DNA, 636 bp, Homo sapiens
tttcagtggtgccaggataattcaatgggagaaatacaatctttttaacaaatggtattgaatccaatggatagcttcatgaaaaataattaaaccttgggccgagcgcagtggctcatgcctgtaatcccagcaatttgggaggccaaagtgggcagatctcttgaagtcaggagttcaagaccagcctggccaacatggtgaaaccctgagtccactaaaaatacaaaacttagccaggtgtggtggcaggcacctgtaaytccagctacttgggagtctgaggcaggagaatcacttgaacctgagaggcagagattgtgacactgcactccagacagagtgagactccatctcaataaaataaaataaaataaaataaaataaaataaaataaaataaaataaaataaaataaattttgaccctcacttcacaccatacacaaaaattaactgaaaatgaatcatagacctaaatgtaaatgctgattataaaatttcaaataaaaaatagaaaaaaaatctttgcacaaactttaaagattaataaattagagttcattaaaattagaacttctgctcttcaaaagccaccattaagaaaatgaaaaggtaagacacaaactggaagaaaa

SEQ ID NO: 239846 - DNA, 636 bp, Homo sapiens
tttcagtggtgccaggataattcaatgggagaaatacaatctttttaacaaatggtattgaatccaatggatagcttcatgaaaaataattaaaccttgggccgagcgcagtggctcatgcctgtaatcccagcaatttgggaggccaaagtgggcagatctcttgaagtcaggagttcaagaccagcctggccaacatggtgaaaccctgagtccactaaaaatacaaaacttagccaggtgtggtggcaggcacctgtaattccagctacttgggagtctgaggcaggagaatcacttgaacctgagaggcagagattgtgacactgcactccagacagagtgagactccatctcaataaaataaaataaaataaaataaaataaaataaaataaaataaaataaaataaaataaattttgaccctcacttcacaccatacacaaaaattaactgaaaatgaatcatagacctaaatgtaaatgcygattataaaatttcaaataaaaaatagaaaaaaaatctttgcacaaactttaaagattaataaattagagttcattaaaattagaacttctgctcttcaaaagccaccattaagaaaatgaaaaggtaagacacaaactggaagaaaa

SEQ ID NO: 239847 - DNA, 473 bp, Homo sapiens
  misc_feature (1)...(473): n = A,T,C or G
tcctgtatgccggacagccggtaaggtctactgggcggccgctttctctggtctttctctgctccgtagacatttctgtgtcaggtgcctcgcatattcgcacccacgcgccagggcattaagccgaaccttgcktggtggctctcagccttgaaaggccgcaggatgtccgcgtccacagctgtgaaccggtgagtgcaggtggacgggcgcacgcgggcgccagggtaattaacagggcttcagagggcgtgacggtgaccgtacgttgtcggcgaactctcttttcatcctttacatttccacggagatttggccaataaataacaagaataaaatgtacgcatggttttgtctttgcgctcgtggggtcgtggcggggtcttttaagtgaagagaaaaagaaaccagaaacccacggtggccccaccggctgcttccggggacacctgaaatcagcagctggaactgan

SEQ ID NO: 239848 - DNA, 520 bp, Homo sapiens
accccgaaaagttgagacaggtctcagttaatttaraaagtttattttgccaaggttgagaacttgctcgtgacacagcctcaggaagtcctgagacatgtgcccaaggtggtcagagcacaacttggttttatgcattgaaggagacatgagacgtcaatcaatatatgttagaagtacattggttcggtctggaaaggtgggataacttgaagcaaaggcaggaagactggaagcagagagggagcttccaggtcacagatgggtgatacataaatggttatattcttttgagtttctcattagtctttccaaaggaggcaatcagatacgcacctgtctcagtgagcagaggagtgactttgaatagaatgggaggcaagtttgccctaagcagttcccagcttgagttttctttagtgattttgggggcccaagatattctcctttaacatttccccccttttttaaaaaaatcttttggagaaagcattttacaagaaaatgaatctctggtctc

SEQ ID NO: 239849 - DNA, 520 bp, Homo sapiens
accccgaaaagttgagacaggtctcagttaatttagaaagtttattttgccaaggttgagaacttgctcgtgacacagcctcaggaagtcctgagacatgtgcccaaggtggtcagagcacaacttggttttatrcattgaaggagacatgagacgtcaatcaatatatgttagaagtacattggttcggtctggaaaggtgggataacttgaagcaaaggcaggaagactggaagcagagagggagcttccaggtcacagatgggtgatacataaatggttatattcttttgagtttctcattagtctttccaaaggaggcaatcagatacgcacctgtctcagtgagcagaggagtgactttgaatagaatgggaggcaagtttgccctaagcagttcccagcttgagttttctttagtgattttgggggcccaagatattctcctttaacatttccccccttttttaaaaaaatcttttggagaaagcattttacaagaaaatgaatctctggtctc

SEQ ID NO: 239850 - DNA, 539 bp, Homo sapiens
aaccccgaaaagttgagacaggtctcagttaatttagaaagtttattttgccaaggttgagaacttgctcgtgacacagcctcaggaagtcctgagacatgtgcccaaggtggtcagagcacaacttggttttatgcattgaaggagacatgagacgtcaatcaatatatgttagaagtacattggttcggtctggaaaggtgggataacttgaagcaaaggcaggaagactggaagcagagagggagcttccaggtcacagatgggtgatacataaatggttatattcttttgagtttctsattagtctttccaaaggaggcaatcagatacgcacctgtctcagtgagcagaggagtgactttgaatagaatgggaggcaagtttgccctaagcagttcccagcttgagttttctttagtgattttgggggcccaagatattctcctttaacatttccccccttttttaaaaaaatcttttggagaaagcattttacaagaaaatgaatctctggtctcaggtttcatctgatctct

SEQ ID NO: 239851 - DNA, 520 bp, Homo sapiens
accccgaaaagttgagacaggtctcagttaatttagaaagtttattttgccaaggttgagaacttgctcgtgacacagcctcaggaagtcctgagacatgtgcccaaggtggtcagagcacaacttggttttatgcattgaaggagacatgagacgtcaatcaatatatgttagaagtacattggttcggtctggaaaggtgggataacttgaagcaaaggcaggaagactggaagcagagagggagcttccaggtcacagatgggtgatacataaatggttatattcttttgagtttctcattagtctttccaaaggaggcaatcagataygcacctgtctcagtgagcagaggagtgactttgaatagaatgggaggcaagtttgccctaagcagttcccagcttgagttttctttagtgattttgggggcccaagatattctcctttaacatttccccccttttttaaaaaaatcttttggagaaagcattttacaagaaaatgaatctctggtctc

SEQ ID NO: 239852 - DNA, 580 bp, Homo sapiens
agtgggacaactcaaaatctccaggaaaccctgtgattaggggagataagtcattctcctcttaaaatgataattctccaagtaggttttcacagaagtcttaaaaaccatgaaaaagactaataaacagtaacaacttcaagcattataaattaaaaataaaataaatttaaaaaatcacaggtttagctccactgaactagatatacaataggcctctggcacagcacagcaaggattcctattaatttaaatagggtaaaatgagaaagaaaattcacatcagaacattcatgaaataaaaatgcaggttctgagcaaagtcaacacaagtttactgtcagggctcaaagcctcctgtacctactcccaatggggtgccaccttaatgctttctgctcagtgtccyattgtgtttgagttttgccagtttgatctttaactgtgaatttcctcttcctgattgcactaaggcagaatgcaatctctttttgaagtcacttttgctgggtgaatattttaaatctaggtctgtgttatatagaatatacagaacatttgtaccagtttacagaaaagc

SEQ ID NO: 239853 - DNA, 628 bp, Homo sapiens
tgatgaagtctaataatttgagaatttctattaaccaaaaggtgctaaaaagggagactaaagagaaaaatccataaactgtggtgttttggcaagttatatgcaaaggcttagtatcaacactagatagaggactactataagtagagtaaacacaaataacttggaagaagaaaagggcagaaatcttgttcttagaagaaaataaatggcctttaagcgtttgaaaatgttatcaaccttatttggaaacaaaaaaatgcaaattaaaaccacaatgatattgccacaacatgggcaaaaaaatttaaaaatgcacatccaattttaatatgaatgaagaacaacaggaaatttcatctgataattctcatacaaagctggtagagatattaatacatacaacctattttgaaaacaattgagcattgtataaatgaagtggaagatctataaactctaagaaccaccaattctacttgcatgtgtgtgccaagaaatagatacagaaatttttrtagtagcattgtttaaaatagcagaaaaagacagtaacctaaaagtcttcatagtaacatggaaaaataaaaatggaacatggaaaaaaacgcactatacagtaatgttt

SEQ ID NO: 239854 - DNA, 412 bp, Homo sapiens
tccccatgttggccaggatggtctcgatcttttgaccccgtgatgcccctacctcggcctcccaaagtgctgggattacaggcatgagccacagcgcccgggcaggggttttttgttttagtatttttcttcatttttgtttttgcaaaggcattctaaatgatagtctataaattcagaaggaaaggcatgatacctgatcccaaaagtatttaccstatctactaatgggtagccgaaagaaaacacgtttagcttaaactttttatctcattaaaatgtataatgccctgaagtagatagtactttaagtaatcagtaactgtatttaaaggcagatgattttttatccctttcttaggaaaaggaagacaatgagaaaacttgaaatagagagtgagaatatctaaag

SEQ ID NO: 239855 - DNA, 388 bp, Homo sapiens
ccccgtgatgcccctacctcggcctcccaaagtgctgggattacaggcatgagccacagcgcccgggcaggggttttttgttttagtatttttcttcatttttgtttttgcaaaggcattctaaatgatagtctataaattcagaaggaaaggcatgatacctgatcccaaaagtatttaccctatctactaatgggtagccgaaagaaaacacgtttagcttaaactttttatctcattaaaatgtataatgccctgaagtagayagtactttaagtaatcagtaactgtatttaaaggcagatgattttttatccctttcttaggaaaaggaagacaatgagaaaacttgaaatagagagtgagaatatctaaaggaaaagtggga

SEQ ID NO: 239856 - DNA, 481 bp, Homo sapiens
tttggttttgaaatagtgtcatttgttaactaagatattaagatgcaaagtttcttgttgtaactaagcatctagttcagcctcaacaactcatatgcatatttgcagatatgtttatatgtattacatttattcattcatttttccatttagtgcatatttattgtctgctttcccttgcatcaggcacactgcacttggcactacagatrttgaagtgagacagaaacccacatgcctttgtccatccagccatcagattaaagtaataaattccatcatggtgattgttttaaaacgttgatttcagttttaataaatttgctctttagttacaagtcttcaactaacttttctttgtgcataggagggtattatttgccaatctgcacataataggtccatcagcaagcatatactgtttcttatatgagcatgtcaccaagatagaaaagtttctcaacaggactgtatgccccta

SEQ ID NO: 239857 - DNA, 364 bp, Homo sapiens
cagcagagagaagaaagtgaagaatggctgctaagttaacaaatgtagatctgtcagaaagaacattcaggtcacacatacagagagaagcatgataatatcatataactaaacctattgagtaaagagacagccagcacattgagatggtattacaaaggagtggcaaagactgtaagctaggcttaatataaaatgtgagaatttgtggttaccaagtaagtggtctaaaatatcctagggctgatcaacatagaaaaggcattagaagactattccctatccacttacrcaacttgtgcatttatccactcggtccttttcatttaccacagacagccatgattcaagtttgcctcacatt

SEQ ID NO: 239858 - DNA, 660 bp, Homo sapiens
ctataaatgacactggagtcaatgggaacagcaaataattcctttgaaaaccttgttagcaaacgtgacttcacatccccggttactctaatcacccaccacacagcatatcttcccacacagaaatatcttcaggtatctgtgccgtcccatattcttgtccaataataatctgtgtttcctctctcctaaccttgccttacagtgttcttcctccctaacctttgcacttggaccttggtttcactgaaaattttaacatcttgccttaagcaaaaatgttttctccttaaatacgctactrgcgctgaagcacccacaagtaaaagctatctgtgacgaagacttggtacctgttcatcaaaacctgtttctgtttttgtttttgtttttgtttttccacttggcctagcagccctcacaaataagtgtgaccatgtgccaatgtgtgtaaggaaaaatgtgagtgctgcttccagttatggcccataaaaacttcttatgtgcaatcttgtaaaggatcttcccttttcctgctggctttactggagaccaccccagggaagccttgggaaccacctatggagatgacagtagagccaaggtcagaacgaacctgggtccttaaatcatttcttggacgagagccagtcagaagag

SEQ ID NO: 239859 - DNA, 660 bp, Homo sapiens
ctataaatgacactggagtcaatgggaacagcaaataattcctttgaaaaccttgttagcaaacgtgacttcacatccccggttactctaatcacccaccacacagcatatcttcccacacagaaatatcttcaggtatctgtgccgtcccatattcttgtccaataataatctgtgtttcctctctcctaaccttgccttacagtgttcttcctccctaacctttgcacttggaccttggtttcactgaaaattttaacatcttgccttaagcaaaaatgttttctccttaaatacgctactagcgctgaagcacccacaagtaaaagctatctgtgacgaagacttggtacctgttcatcaaaacctgtttctgtttttgtttttgtttttgtttttccacttggcctagcagccctcacaartaagtgtgaccatgtgccaatgtgtgtaaggaaaaatgtgagtgctgcttccagttatggcccataaaaacttcttatgtgcaatcttgtaaaggatcttcccttttcctgctggctttactggagaccaccccagggaagccttgggaaccacctatggagatgacagtagagccaaggtcagaacgaacctgggtccttaaatcatttcttggacgagagccagtcagaagag

SEQ ID NO: 239860 - DNA, 498 bp, Homo sapiens
gcacattattcagctcaccagtttttgttctggtagcttctattttcctcaattaaaaaaaaagtgagatcatccaatgaaagtgagaatagggagacagattataagaggttcaaagaaagaagagaaggtgtgaaaacatcaactcagagagtggaaaaggaattgacctagtgaacagagtaaaaatacttgttgtttcaaggaccacctcaaattagaatcattaatttaaaatagggccattaccacagtgtaataggcctccagcctyactaatcttcttgaatgctggtgaatagtcaggagacagctgggcttaacaggattggagtttaccagattaatgctgcagaaggaaagggatgctaaactgaatttaaaagaaaaggaatagataggacatatagacagtgggaaagtaatagggtcagtcagtgatcacaattggtgggagatggttggaatgtggggccatcaaagatgaactatgcaaaa

SEQ ID NO: 239861 - DNA, 579 bp, Homo sapiens
tattaaagttttgatcatgatgaggtctaagttatagccatgcaaaagaagataactactctacccctaggctttgcatatctgaagtatatgttaatagccatgtaccataactgccattataaaaaccataaacaaaaatacctgtggaaaagcagtgactttaggagaatgatttgaaatacaaaaaaaaaaaaaaaaaaaaaaaaccagattaatggaatgtttacggaataaattatgtatataggtttcaaaggctgggatttgttttccaacaatacctatgttgaagtcctaacccccaggacctcaraatgtgattgcatttgaagataggatttttaaagaggtaattaagttaaaacgaaatcgttattgtgggccccgattcagtatgattagcacctttattagaagaggaaatttggatacagttatagagagaagaccatgtgaagagacaggaagaagatggccatctataagctaaggaaaaaggcctcagaagaaatcagtttggaaacaccttgatctcagatttctagcctccagaattgagggaaaaaagattgatgt

SEQ ID NO: 239862 - DNA, 464 bp, Homo sapiens
actcaaagaataggagatgccagcaatcacagagacccaaggggtgttacagctcttactcagggagtcctgaggtttgagcccccaagagatgttgcagctcttcgttctcgtagtgtggcaacctggcatgtgtcttacagctctttttgcacccactgttcaacaggttctgggtccttgtcccacaaccaagyggaatgaaatattggacacgggaaagtgagcaaggcagacaagaattttactgagtgacagaaaagctctcaacatgtgaagggacctgaagcaggtagccatctgtgaggctgagtctggagtgattatgggcttagaataggggagtgtatactgataaatccgtgattgggctttggaaaaacaccattccattggttaaaaggcatcatccagaaggaaccaatacaatagagagaaagggtaagacagggatagagtttccc

SEQ ID NO: 239863 - DNA, 477 bp, Homo sapiens
actcaaagaataggagatgccagcaatcacagagacccaaggggtgttacagctcttactcagggagtcctgaggtttgagcccccaagagatgttgcagctcttcgttctcgtagtgtggcaacctggcatgtgtcttacagctctttttgcacccactgttcaacaggttctgggtccttgtcccacaaccaagtggaatgaaatattggacacgggaaagtgagcaaggcagacaagaattttactgagtgacagaaaagctctcaacatgtgargggacctgaagcaggtagccatctgtgaggctgagtctggagtgattatgggcttagaataggggagtgtatactgataaatccgtgattgggctttggaaaaacaccattccattggttaaaaggcatcatccagaaggaaccaatacaatagagagaaagggtaagacagggatagagtttcccactctctctcgtc

SEQ ID NO: 239864 - DNA, 477 bp, Homo sapiens
actcaaagaataggagatgccagcaatcacagagacccaaggggtgttacagctcttactcagggagtcctgaggtttgagcccccaagagatgttgcagctcttcgttctcgtagtgtggcaacctggcatgtgtcttacagctctttttgcacccactgttcaacaggttctgggtccttgtcccacaaccaagtggaatgaaatattggacacgggaaagtgagcaaggcagacaagaattttactgagtgacagaaaagctctcaacatgtgaagggacctgaagcaggtagccatctgtgaggctgagtctggagtgattatgggcttagaataggggagtgtatactgataaatccrtgattgggctttggaaaaacaccattccattggttaaaaggcatcatccagaaggaaccaatacaatagagagaaagggtaagacagggatagagtttcccactctctctcgtc

SEQ ID NO: 239865 - DNA, 464 bp, Homo sapiens
actcaaagaataggagatgccagcaatcacagagacccaaggggtgttacagctcttactcagggagtcctgaggtttgagcccccaagagatgttgcagctcttcgttctcgtagtgtggcaacctggcatgtgtcttacagctctttttgcacccactgttcaacaggttctgggtccttgtcccacaaccaagtggaatgaaatattggacacgggaaagtgagcaaggcagacaagaattttactgagtgacagaaaagctctcaacatgtgaagggacctgaagcaggtagccatctgtgaggctgagtctggagtgattatgggcttagaataggggagtgtatactgataaatccgtgaktgggctttggaaaaacaccattccattggttaaaaggcatcatccagaaggaaccaatacaatagagagaaagggtaagacagggatagagtttccc

SEQ ID NO: 239866 - DNA, 432 bp, Homo sapiens
agcatattttaactatgaatgatacactcaaaatatcctccccagctgccttaagtgtcatcctttgcatccacctggaatcatctcaaagcatatgaatacagaaagaagtaaatattggttgaacactttcctatgctacaggtatggcagtaggtgctggagatgcagaaataagacaytttcctgaaacctacaacccagtaagacacattcaattgctccattcatttagtggtgtgatctcactatccttctttttccttacagtggatgctgacgaaaattgtacaagagaatttatgaacaaaaacaaaagagacaaatggcgaaaaatatttgaagtactttttcttgggctggctcttctccaaatgacaactgataattaggtaagtaaatgagaacttactgaaacaaatgactttctct

SEQ ID NO: 239867 - DNA, 490 bp, Homo sapiens
tgtctttgatgtttaagggaggaaacaagccttctgaaaactactattctcactcctcaggaaaaagagaaaagaaaaggaaaaaaaaaaaactaatccaaacactagtcttttgaaagagaaaaattcttttgggtgtactaaagcctattttaccattgaattttgaacatattctcaagttatattaraacataatgtattttcattttagtgttaggccaaatattatattaagtaatgcctttaccaattcagttatgaattctacagtctataatcctcctttgtatgttttagtaactcaaaatctgctctatttcttctaagaataattttctaatattcttctttttccactaaagcagactatttctttttattgaagttccattttgcaatgttcattagatgttgaatgtctgtcaatatccacaagtctccatgttccccatcctttatgcctttcaactttcattttcctcagtgc

SEQ ID NO: 239868 - DNA, 558 bp, Homo sapiens
aggagatagagaccatcctggccaacatggtgaaaccccatctctgctaaaaatacaaaaaattagctggatgtggtggcatgtggctgtagtcccagctactcaggaggctgaggcaggagaatcacttgaacccaggaggtggaggctgcattcagccgagattgtgccactgcactccagcctggcaacagagcaagactccgtctcaaaaaaaaaaaaaaaaaaaaaaaaaagtaagctggtatgatgatgataatgatgatattgtattagcatacggaacccaattcctaaatattaatgaacaaaatttcattacataaaatttcaaatttttctaattgatttgatatgatactacctattaaaaataagaaagacaatataaacaaatcatgaagttaaataatataaaccaggtatgataaagttatatgtaatctgttttacctcaatttatatgaagagtttttyaatacatattcttatatttagtcacatttttgctctgaatgatgtaatctgtgaataggaatgatacagtattcaataaag

SEQ ID NO: 239869 - DNA, 531 bp, Homo sapiens
gtgggttcaaatgtgcttctgtaagtcaggaactagagtcagaaacattagctgtttacctggtattttactgtactatgtgtgagctggtactcaaaccacaggatgcagttctttccactcttccctcccctatccaaaggcagaggcgctacaccccatagttgccaccaccccaggctacaaggagtactgctagacttacactgatgtyccttaaaagcccaagggctctaaagtcagcttggaatgaatgctgcctggcctgggactcacctttcagggcagtggtctcccctctggccttatatgcaagtccagaaatgccagccaagagtcaagtcctggagtcagggacttcaagagctcgcttggtgctctatcctcctgtggtggtgttggtatctaaggtgcaagacaaagtcccctttacttttccccttgcttttctcaagctgaaggagttttgccttatagccactacagctagtaatgtgctgagtctcacctgaagccaacaggtctcagagg

SEQ ID NO: 239870 - DNA, 547 bp, Homo sapiens
actgatgtcccttaaaagcccaagggctctaaagtcagcttggartgaatgctgcctggcctgggactcacctttcagggcagtggtctcccctctggccttatatgcaagtccagaaatgccagccaagagtcaagtcctggagtcagggacttcaagagctcgcttggtgctctatcctcctgtggtggtgttggtatctaaggtgcaagacaaagtcccctttacttttccccttgcttttctcaagctgaaggagttttgccttatagccactacagctagtaatgtgctgagtctcacctgaagccaacaggtctcagaggcacacccaatgccctcgatgtagtacctgggtatagctgttggttgtttagaacccaaggtctcctcagttatgaatgctgcctgaagtggataatttttttcaaatgcagtgtgttctcctctggcccagggttttatagaaacatcatctaggatctagcgtttggaacaggggcctcacaacactgactggtgccctatcctgttgtggctgagctgg

SEQ ID NO: 239871 - DNA, 531 bp, Homo sapiens
gtgggttcaaatgtgcttctgtaagtcaggaactagagtcagaaacattagctgtttacctggtattttactgtactatgtgtgagctggtactcaaaccacaggatgcagttctttccactcttccctcccctatccaaaggcagaggcgctacaccccatagttgccaccaccccaggctacaaggagtactgctagacttacactgatgtcccttaaaagcccaagggctctaaagtcagcttggaatgaatgctgcctggcctgggactcacctttcagggcagtggtctcccctctggccttayatgcaagtccagaaatgccagccaagagtcaagtcctggagtcagggacttcaagagctcgcttggtgctctatcctcctgtggtggtgttggtatctaaggtgcaagacaaagtcccctttacttttccccttgcttttctcaagctgaaggagttttgccttatagccactacagctagtaatgtgctgagtctcacctgaagccaacaggtctcagagg

SEQ ID NO: 239872 - DNA, 531 bp, Homo sapiens
gtgggttcaaatgtgcttctgtaagtcaggaactagagtcagaaacattagctgtttacctggtattttactgtactatgtgtgagctggtactcaaaccacaggatgcagttctttccactcttccctcccctatccaaaggcagaggcgctacaccccatagttgccaccaccccaggctacaaggagtactgctagacttacactgatgtcccttaaaagcccaagggctctaaagtcagcttggaatgaatgctgcctggcctgggactcacctttcagggcagtggtctcccctctggccttatatgcaagtccagaaatgccagccaagagtcaagtcctggagtcagggacttcaagagctcgcttggtgctctatcctcctgtggtggtgttggtatctaaggtgcaagacaaastcccctttacttttccccttgcttttctcaagctgaaggagttttgccttatagccactacagctagtaatgtgctgagtctcacctgaagccaacaggtctcagagg

SEQ ID NO: 239873 - DNA, 531 bp, Homo sapiens
gtgggttcaaatgtgcttctgtaagtcaggaactagagtcagaaacattagctgtttacctggtattttactgtactatgtgtgagctggtactcaaaccacaggatgcagttctttccactcttccctcccctatccaaaggcagaggcgctacaccccatagttgccaccaccccaggctacaaggagtactgctagacttacactgatgtcccttaaaagcccaagggctctaaagtcagcttggaatgaatgctgcctggcctgggactcacctttcagggcagtggtctcccctctggccttatatgcaagtccagaaatgccagccaagagtcaagtcctggagtcagggacttcaagagctcgcttggtgctctatcctcctgtggtggtgttggtatctaaggtgcaagacaaagtccyctttacttttccccttgcttttctcaagctgaaggagttttgccttatagccactacagctagtaatgtgctgagtctcacctgaagccaacaggtctcagagg

SEQ ID NO: 239874 - DNA, 516 bp, Homo sapiens
tgatttttttcagtttttttccttttgctcaggagagcttggctattctgggtttttgtggtttcatataaattttaggatttttttttttctgtttctgtgaaaaataccattggtactttgttarggattgcattgaatctttaggatcgctttgagtagtatggacatgttaacaatattgattcttccaatctatcaacataaaatatttttccatttttggtgtcctcttcaatttatttcatcagtgttttatagtttttattacagagacctttcactttggtaaattctagatatgtaattttagttgtggctattgtaaattgaatttcttttttatttctttttcaggtttttcactattggcctatacaaatgctactgatttttatacattgatttcatatcctgcatctttgctgaaattgttttatcacttctaatagttttcttatgaagtctttaagatttttcaaacataagatcatgttatttgcaaacaagtataat

SEQ ID NO: 239875 - DNA, 595 bp, Homo sapiens
tcttattatccaaacttaggtatgccaaaatggccaattgaaccatggagaggtagagaatatagttatttttatcattcctgcaaccagtttgcacagggagagagaagccagaagtctgaatggtaaaaacttttacacctttgctggcatgtcaggctgctgggttcccttaccccaagacatggattcttaatgaccctggagccctgtgatttaggatgcactcaagaaatgcaggctgaacatgattggtttgttacccatctggaaagaggggataaaggcatctctttattcatctctctttccagtgaatacctggcgtatgtgacagagagaataaaaratgtcctttcttcttccaaacttatatccctgagtcctggcaacctgtgcaggtgttaactgtgggtgcaagtgtaacattcagccatgaagcaggaggcatagctgacaggaatatttgcactcatctgagcggagcctaagcccacctgctgtcagtaaccattgaattctctagaccttatccacgccgtagatgcaagcatgacctttattcatgaaacaggagggcctaatcagcaggaat

SEQ ID NO: 239876 - DNA, 594 bp, Homo sapiens
tattactacattttaatatctctctcattcatctcacagtatgctgcatatttcacatgwgtggtgatttaaattttactgataccttaccttcttattatttacactctgatctctcttttataaaaaaaaattctctactcacagtatacttcattattttctgacatttatgtcttttttctggactcaaggcttagtttatccatcaattaatttacacttcattgttcctttgagtttaattattttttataatgcagaaaaaggttttcctcatttattagtcatctgtgtttccaattctgtgaattgccagttgacaacatgaactcaataactctctctttagtttgaatcatggcttcattatttaatttatcagtagtttgtaggttccatgggatagcttctcatatattatacttacagttttattttaaccaatatgctctgtgatgttatggagatgtatttgtattcctagattactaactgcttttttttttaaagaaagtttttaatttttgttggaatgtagtgtgtatatatgtttataaggtacaaaatatattttaatacaggcatgcaatg

SEQ ID NO: 239877 - DNA, 576 bp, Homo sapiens
gcagcctgcactacatcatcawcaacaacaacaacaacaacaacaacaaagatttcttccagtataccttgcctgtgaaacccaatgcaggaatttagccacaaataaagatcccatgcagagtcttggccctctgaaagcacccagaagtgaagccaatagaccattctcaacttacaccaaagtcaaactcagggaaataaggtagataaaaacaaaaagccccatccaaaagacagcaattcaaaatgataaaggaatgccagcactttcagatgagaaagaatcagcctgagaacaatgccaatttaaaaagtcagggtcctcttacctccaaatgatggtactaactccctagaaatagttcttaacctaattgaaatgacatccatagaatttagaatctagatggcaaggaagacattcaggagaaagttgaaacctgatatggtttggatattttgtcctctccaaatctcatgttgacatgtgacctccaatattggaggtgaatctagttaaaggttttgggtcatgggggcagatccctcatgaatggcttggtacttttctcac

SEQ ID NO: 239878 - DNA, 576 bp, Homo sapiens
gcagcctgcactacatcatcatcaacaacaacaacaacaacaacaacaaagatttcttccagtataccttgcctgtgaaacccaaygcaggaatttagccacaaataaagatcccatgcagagtcttggccctctgaaagcacccagaagtgaagccaatagaccattctcaacttacaccaaagtcaaactcagggaaataaggtagataaaaacaaaaagccccatccaaaagacagcaattcaaaatgataaaggaatgccagcactttcagatgagaaagaatcagcctgagaacaatgccaatttaaaaagtcagggtcctcttacctccaaatgatggtactaactccctagaaatagttcttaacctaattgaaatgacatccatagaatttagaatctagatggcaaggaagacattcaggagaaagttgaaacctgatatggtttggatattttgtcctctccaaatctcatgttgacatgtgacctccaatattggaggtgaatctagttaaaggttttgggtcatgggggcagatccctcatgaatggcttggtacttttctcac

SEQ ID NO: 239879 - DNA, 576 bp, Homo sapiens
gcagcctgcactacatcatcatcaacaacaacaacaacaacaacaacaaagatttcttccagtataccttgcctgtgaaacccaatgcaggaatttagccacaaataaagatcccatgcagagtcttggccctctgaaagcacccagaagtgaagccaatagaccattctcaacttacaccaaagtcaaactcagggaaataargtagataaaaacaaaaagccccatccaaaagacagcaattcaaaatgataaaggaatgccagcactttcagatgagaaagaatcagcctgagaacaatgccaatttaaaaagtcagggtcctcttacctccaaatgatggtactaactccctagaaatagttcttaacctaattgaaatgacatccatagaatttagaatctagatggcaaggaagacattcaggagaaagttgaaacctgatatggtttggatattttgtcctctccaaatctcatgttgacatgtgacctccaatattggaggtgaatctagttaaaggttttgggtcatgggggcagatccctcatgaatggcttggtacttttctcac

SEQ ID NO: 239880 - DNA, 309 bp, Homo sapiens
aggcaaaaaaaaaaaaaaaaaaatgtggaagaaatgtacctagagtcttgggtgagattttggacatttaagttaatgcttggaactagttaagactttgggagattattggtaagggataattttatattgcaatctaagaagaacataaaatttggggggccagrgatggaatgatatggtttgggtgttttatcctctccaaatctgatgttaaaatatgacctccaatattggaggtaggcacagtagtaggtgtttgtatcactggggcagatccctcatgaatggcttggtgttgtcctcatg

SEQ ID NO: 239881 - DNA, 555 bp, Homo sapiens
cttcctaactcattccatgaatccagagtcatcctaataccaaaatcaggtagagatgcaatgaaaaaaaaagaacatttcaggccaaaatccctaatgaacacaaaagcaaaaattctcaacaaagtacaagcacaccaattccagtagcacrtcaaaaattaattcactataatgaagtaggctttattccttggatgcaagttggttaaacatacacatatcattcaatatcattcactacataacagaattaaaaaccttatgatcattttaatagagagaaaatgctttcaatgaaatccaacattccttcatgataaaaatcctcagtaaactagacattgaagaaacatacatcaaaataagaaagccatctatgacaaagccacagacagcatcatactgaataggcaacagctggaactattccttttgagaactggatcaagagaaagatgcccactttcactactcctatttaacatagtactgaaaatcctcttcatagcaattagacaagagaaaaaaataagtcaaattgtctttctccac

SEQ ID NO: 239882 - DNA, 384 bp, Homo sapiens
tgaatttctttgagtttcttcaacagagcggttttgaattatctgactgaaaagtcacgtatctctgttttttcaggactggtccctggtggcttttttagctcatttggtaggatcatttttttcccagatagtgttgacactggtagatgttcttcagttctgggcattragacattagttatttattatagtcttcactgtctgggcttgtgtgtacccatccttcttgggaaggctttccagatatttgaaagacttgggtgttgtgatctaatctttatctgctttaaaggggggcacccaaagcctagtaatgctgttgttcttgcagacatgtataggtaccaacttgctagtctttgataagatctgggggaattc

SEQ ID NO: 239883 - DNA, 565 bp, Homo sapiens
tgagggtgtgagatttcaaaggggtttaataatcattgattgttctgctgaaggtttataaaatatttgaccatgaaaataattggaccacttgtaccaattttggacttgtttctgggccatattttmatccatgcttccttttttgtagtttaaaatgcacactgaatctcaatcagcaatgtggatgatgataaaacactctagatgtaattgccaacatctcttgcaaattaaaatgttttgatgagactggtggcaacagagtagcccttttctacttagaactaaacatccccaagtcaattttcactattgcatttttggtgagattatcacagcatattctctattatcacattgcattcccagggacaatatagctatagagatcacagctaaagaaagttgtcaaattcttactatatactgaaatgctgaaccatcaccttaagatatacagaatcactttcattttttgctggcacctctttgaggcacaatattttcaaaagatttaaacttaatggagtatttctacaaaagttcgtgaccacaaggagag

SEQ ID NO: 239884 - DNA, 565 bp, Homo sapiens
tgagggtgtgagatttcaaaggggtttaataatcattgattgttctgctgaaggtttataaaatatttgaccatgaaaataattggaccacttgtaccaattttggacttgtttctgggccatattttcatccatgcttccttttttgtagtttaaaatgcacactgaatctcaatcagcaatgtggatgatgataaaacactctagatgtaattgccaacatctcttgcaaattaaaatgttttgatgagactggtggcaacagagtagccctyttctacttagaactaaacatccccaagtcaattttcactattgcatttttggtgagattatcacagcatattctctattatcacattgcattcccagggacaatatagctatagagatcacagctaaagaaagttgtcaaattcttactatatactgaaatgctgaaccatcaccttaagatatacagaatcactttcattttttgctggcacctctttgaggcacaatattttcaaaagatttaaacttaatggagtatttctacaaaagttcgtgaccacaaggagag

SEQ ID NO: 239885 - DNA, 583 bp, Homo sapiens
aaactccatctcaaaaaaaaagaaaaaaagaaactgccaaactgtcttccaaagtggctgttccattttgcattcccaccagcaatgaaygtgagttcctgttgttcctcatccttgccagcatttggtgttgccagtgttttgaattttggcccttctaataggtgttatttttatttataatctctagtgcatatcatattgaacatctttttgtatgcttatttgccatctttatatcatctttggtgaggtgtctgttcatgactttttgcccatttttaaattgggtagtttcttttctcactgttgagttttaggagttctttatttattgtggatagcagtcctttatcggatgtgactcttgcaaatattttctgttgattatctttttattctcttgaccttgtctttcacgagtagaagctttaaatttcaatgaagtccagcttatcaatttttttctttccaggaccataccctgagtatatctaaaaagtcattgccatgcccagggtcacctagattttctcctaagttatcttccgggagtgttatagtttagtgttttacatttagg

SEQ ID NO: 239886 - DNA, 583 bp, Homo sapiens
aaactccatctcaaaaaaaaagaaaaaaagaaactgccaaactgtcttccaaagtggctgttccattttgcattcccaccagcaatgaacgtgagttcctgttgttcctcatccttgccagcatttggtgttgccagtgttttgaattttggcccttctaataggtgttatttttatttataatctctagtgcatatcatattgaacatctttttgtatgcttatttgccatctttatatcatctttggtgaggtgtctgttcatgactttttgcccatttttaaattgggtagtttcttttctcactgttgagttttaggagttctttatttattgtggatagcagtcctttatcggatgtgactcttgcaaatattttctgttgattatctttttattctcttgaccttgtctttcacgagtagaagctttaaatttcaatgaagtccagcttatcaatttttttctttccaggaccataccctgagtatatctaaaaagtcattgccatgcccagggtcacctagattttytcctaagttatcttccgggagtgttatagtttagtgttttacatttagg

SEQ ID NO: 239887 - DNA, 561 bp, Homo sapiens
tcacacgtaagtcttctgttcatcctgtttgtttccacagtttaatccttatattagattttcattataattatattgaaacaaagttaaaagttcctgacatcctttgcacactgatctagcaccatacgtacccattatctgatttgcttactaagcacaagaatattcattgtcctgtatgatatctgacataaagctcaataaaatctacttcaactgtaaaaaaaaaaaaaaaaaaaaaaaattctaatgaactatttgtttaatcaaagaagaccaagggattcattagagaattttcttggtttattctttaaaaattcatccttttgttaaaccccatgtatgtacattcaatagcaattagatgcaagagtccgtcataagctgttcaratgtcgatccctaacatagacccattcattcagtaatgccaggggctgtgctaaatattgggaatgtaaagtgcaacaagcaaatacagctgacctttgaacaatgcaggggttagggccactgatccgctatactgtcaaaaatccacagataatttttgac

SEQ ID NO: 239888 - DNA, 579 bp, Homo sapiens
ttactcatattttcttccttactgtttcatgtatatatttacctattctaactttccctgctttcctgttgcctttcatactttatttgcagtgagcaaagtttacaaaatagtgcataactgaaagactgtccagatggaattgcaaaagatgtagaggaagaatagacctttcagagctcttggatttgggcctggaggcagtggcagttaacgatttatctcccttttactgatgtcttctataaggggtatatttggtggcagtattttgcattgcatagttgctaaatctgttgctgcttaattgtaagcatggaaaaagtatgtgtatgtgagtgtttggcagtcaagtcctcgagtggacatttgtcatgttattcataataagcccctctcacccatacctgggtttacstgaatcaagtggctctggatgggcccctagatagcttcaggatgggggctggttgctagaggcaccaaccatgtaatagagggctggacctttcagccccaccctgcaacctcctgggagattgagttaatcaccaaaggccaataatttaattaatcatg

SEQ ID NO: 239889 - DNA, 577 bp, Homo sapiens
ttgaacctaacaacgggatgtgggaacccctgatttgtaaccaagtcatacagaagtgtgggtaacctgtggatcaactatttgtggctgacatcttaaggtggggagcaatcttaagggactgagctcttgatgtatggcgtctgtgctaagttggttttaatgtcagaattgaattacattataggacaccatcttgtgtccacagacaaccggagaatttcttggtgcagaaaacccacacatttggtgtcagaagtkttgtgagtagagaagcagttttttcctttagcacttctattatgtaattattttaactacccagaagggatgggaggagaacttgtcacaactgagattatgttacaaccgcataagttcattgttgtcagaatgtatcaatattcactagacaaattggtttatccccagtacacctgctactgtgatggatcagctacttaccatcacaggagcattaattcttagaggacatcagagatctcttctaagtatttcctataatatatgactggagtctttcctgctcatcctttccaagactgaagggaggaat

SEQ ID NO: 239890 - DNA, 583 bp, Homo sapiens
gttttataattttgtgtctattaagtttttaatctgtttgagttgatttttgtgtatgatgagagatagttgtctagtttcatttttctgcatgtggatacccagttttcccagcaccatttattgaatagactatcttttctccagttaatgtttttagtgtctttgtcaaaaatcatttgtctgtaaatacatggatttatttctgggctccctattctgtttcattggtctatgtgtctgtttttatgccagtaccatgctgttttgattactataactttgtagtatattttgaagtcaagtattgtaatgctgcaagcctttggttttgttgttgttgttayagttttgctcagaattgctttggctatttggagtcttcacctgaggtcaggagttcatgaccagcctggccaacatggcaaaaccctgtctctactaaaaatacaaaaattagccgggcgtggtggtgcatgcctgtaatcccagctacttggaaggcttgaggcaggagaattgcttgaacctgagaggtggaggttgcagtgagccaaaattgtgccattacactccagcctga

SEQ ID NO: 239891 - DNA, 637 bp, Homo sapiens
gtgacctgaagatagatttgggggaaggacagacaaggaagagagagaaaaaaacaactggtttcaaaggttgagtgtcctctgattctaaaaggcatacttcccctgttcaaattacacatcagagcactcatttgactaagtgacaagtcatatacatattaaaacataggtctaaaatttttacactggccaaatgatttttagtgcttggatatatttgtaaaacatraaacactgacggttgatagcaaagtagccagcatatggtaggtgccagatacatgtttttgaatagacagaaggacactgtgaacggtagttgtgtttagatattacagctggctgagtcccccagtgggagctggtgatagcctacacaataccttcctttggctcatcaaatagtgtgaatgaagatacggtaatacttccagggattatggtccatttatgatggaaactatttgttttctagaaggaaaaaaaaatttgctgtctctatgagattgggttaggtagaagtttctctctttggggctctcaggggtacaactgtgttgctacatgagccctacatgggctaaaatgtgaatatagtcagacactgcataatgacgttttggtcaatgacagg

SEQ ID NO: 239892 - DNA, 570 bp, Homo sapiens
tgattattatgcgttgcatggctgtattaaagtatctcatgtrccccacaaatatatacacttactatgtactcacaaaaattaaaaattaaactctacataggacttttgcactttcagtaagacaagaacaaaagagaagtccccctttccaaaaaccatctcaatttgctctttttaaagtaagaatgtgttgatataaagtttggaagacaataaacctactatcaatggcatattttgctataaaagctaagcccagagcaaatgtgagaataaactctggcaactttgatcaacgaatactaataatgttgtatgtttataagtgttttcaatatttctaaacttcttctacttctttcatatcatttgatagtaacaatccagtaaggcagtagagaagacagaaatgttattcctacttgaaaataagaagcaaagagacagggagcttatagggcttcctcaacatcaactgactagttagtggaagagcagaggaggtaaagctcacctgcagtccctgtgtgtttccctcaacacaagatactgtccgttcatattcac

SEQ ID NO: 239893 - DNA, 570 bp, Homo sapiens
tgattattatgcgttgcatggctgtattaaagtatctcatgtaccccacaaatatatacacttactatgtactcacaaaaattaaaaattaaactctacataggacttttgcactttcagtaagacaagaacaaaagagaagtccccctttccaaaaaccatctcaatttgctctttttaaagtaagaatgtgttgatataaagtttggaagacaataaacctactatcaatggcatattttgctataaaagctaagcccagagcaaatgtgagaataaactctggcaactttgatcaacgaatactaataatgttgtatgtttataagtgttttcaatatttctaaacttcttctacttctttcatatcatttgatagtaacaatccagtaaggcagtagagaagacagaaatgttattcctacttgaaaataagaagcaaagagacagggagcttatagggcttcctcaacrtcaactgactagttagtggaagagcagaggaggtaaagctcacctgcagtccctgtgtgtttccctcaacacaagatactgtccgttcatattcac

SEQ ID NO: 239894 - DNA, 469 bp, Homo sapiens
  misc_feature (1)...(469): n = A,T,C or G
aaagtcttctgtaccaccagtgccatcgccctttaggtttctgatatatatttgtgtaggaaacaaaaatcccaagcaaatagtcacccccaatctcttttcattatcaacctcgacagttcaagcactgttcagtgaggacagacatgtggtatggaatacgacacttccctcttcagcacccatcaccacagtcatcactaaatgagcaccatgttctttccaattsagcattttccaacccagtgctcaaagaagtgaataccaaccaatgagttgttgggaggagacagtttcttatttggcccaggccagaatctatggcatgattagtatggaaaccagcttgtcatcacatatacacaccctacgcattcccagtatgcatgcccaattggctaatacatacatgccttcagaaatctggttgatttaagattataattaggcatnnnnnnnnnnnnnnnnn

SEQ ID NO: 239895 - DNA, 469 bp, Homo sapiens
  misc_feature (1)...(469): n = A,T,C or G
aaagtcttctgtaccaccagtgccatcgccctttaggtttctgatatatatttgtgtaggaaacaaaaatcccaagcaaatagtcacccccaatctcttttcattatcaacctcgacagttcaagcactgttcagtgaggacagacatgtggtatggaatacgacacttccctcttcagcacccatcaccacagtcatcactaaatgagcaccatgttctttccaattcagcattttccaacccagtgctcaaagaagtgaataccaaccaatgagttgttgggaggagacagtttcttatttggcccaggccagaatctatggcatgattagtatggaaaccagcttgtcatcacatayacacaccctacgcattcccagtatgcatgcccaattggctaatacatacatgccttcagaaatctggttgatttaagattataattaggcatnnnnnnnnnnnnnnnnn

SEQ ID NO: 239896 - DNA, 391 bp, Homo sapiens
cacagtttattactacatgaacatggtcagatttctatgcaygtaggtactacaaaagtgactaaaatgtctaggcagactttcacataatttatttagcaaagcagaagtaagaataacttctcatctcctcaagagacaaagggctacatcctaagatagtcctcttgtgaaaaactcccaagtaagttttggaggcatttgtttacacttccagggtcagaaagtccccattcttccactgcaaaatcaaaagcataaacctgttatttggacctattaagatttcaaggaaatactctaaggaagacaggatggagagatagtgacctccaacctcaaaaaagtcatcattttacccttatggtgtgttttgcttggtatatgcata

SEQ ID NO: 239897 - DNA, 391 bp, Homo sapiens
cacagtttattactacatgaacatggtcagatttctatgcacgtaggtactacaaaagtgactaaaatgwctaggcagactttcacataatttatttagcaaagcagaagtaagaataacttctcatctcctcaagagacaaagggctacatcctaagatagtcctcttgtgaaaaactcccaagtaagttttggaggcatttgtttacacttccagggtcagaaagtccccattcttccactgcaaaatcaaaagcataaacctgttatttggacctattaagatttcaaggaaatactctaaggaagacaggatggagagatagtgacctccaacctcaaaaaagtcatcattttacccttatggtgtgttttgcttggtatatgcata

SEQ ID NO: 239898 - DNA, 391 bp, Homo sapiens
cacagtttattactacatgaacatggtcagatttctatgcacgtaggtactacaaaagtgactaaaatgtmtaggcagactttcacataatttatttagcaaagcagaagtaagaataacttctcatctcctcaagagacaaagggctacatcctaagatagtcctcttgtgaaaaactcccaagtaagttttggaggcatttgtttacacttccagggtcagaaagtccccattcttccactgcaaaatcaaaagcataaacctgttatttggacctattaagatttcaaggaaatactctaaggaagacaggatggagagatagtgacctccaacctcaaaaaagtcatcattttacccttatggtgtgttttgcttggtatatgcata

SEQ ID NO: 239899 - DNA, 391 bp, Homo sapiens
cacagtttattactacatgaacatggtcagatttctatgcacgtaggtactacaaaagtgactaaaatgtctaggcagactttcacataatttatttagcaaagcagaagtaagaataacttctcatctcctcaagagacaaagggctacatcctaagatagtcctcttgtgaaaaactcccaagtaagttttggaggcatttgtttacacttccagggtcagaaagtccccattcttccactgcaaaatcaaaagcrtaaacctgttatttggacctattaagatttcaaggaaatactctaaggaagacaggatggagagatagtgacctccaacctcaaaaaagtcatcattttacccttatggtgtgttttgcttggtatatgcata

SEQ ID NO: 239900 - DNA, 605 bp, Homo sapiens
aagctggaatgaaaacttgttcctcycaacactgagcttattagagcacaccgttttgcttgaataaagcagccctggagtctctcagggaagggtgtttgtaacatctgctcaggcacggtttcatttgctatatacccagagactagcactgtacaagttgttgggagatactcatgtgagttggcagacttttggtcaaatattttccctaaatccaggtctctatggcattctacagaacactctgcatccttctaagggacactggaagagcaaatggattgtacagtgagttacaaataaaatggctaatctcagcatgaaaggctgagggtgttacctgaatgaggatgcagaccctccatctacatacaagcaaacctaagtgaccatgagcctgccggaaagaaatcacatgctatgtaaaggcttagtaacagtgatgaatatttgaacctgaactccagctccagagcagttcagttgcatctcttccaggaacagaagccaaagcagctcaggattcttgaaggctctgaaaggtcaatgagaatcctggtatatgtcaagactatcccaccaaagaagggctccatgtgtag

SEQ ID NO: 239901 - DNA, 605 bp, Homo sapiens
aagctggaatgaaaacttgttcctctcaacactgagcttattagagcacaccgttttgcttgaataaagcagccctggagtctctcagggaagggtgtttgtaacatctgctcaggcacggtttcatttrctatatacccagagactagcactgtacaagttgttgggagatactcatgtgagttggcagacttttggtcaaatattttccctaaatccaggtctctatggcattctacagaacactctgcatccttctaagggacactggaagagcaaatggattgtacagtgagttacaaataaaatggctaatctcagcatgaaaggctgagggtgttacctgaatgaggatgcagaccctccatctacatacaagcaaacctaagtgaccatgagcctgccggaaagaaatcacatgctatgtaaaggcttagtaacagtgatgaatatttgaacctgaactccagctccagagcagttcagttgcatctcttccaggaacagaagccaaagcagctcaggattcttgaaggctctgaaaggtcaatgagaatcctggtatatgtcaagactatcccaccaaagaagggctccatgtgtag

SEQ ID NO: 239902 - DNA, 605 bp, Homo sapiens
aagctggaatgaaaacttgttcctctcaacactgagcttattagagcacaccgttttgcttgaataaagcagccctggagtctctcagggaagggtgtttgtaacatctgctcaggcacggtttcatttgctatatacccagagactagcactgtacaagttgtkgggagatactcatgtgagttggcagacttttggtcaaatattttccctaaatccaggtctctatggcattctacagaacactctgcatccttctaagggacactggaagagcaaatggattgtacagtgagttacaaataaaatggctaatctcagcatgaaaggctgagggtgttacctgaatgaggatgcagaccctccatctacatacaagcaaacctaagtgaccatgagcctgccggaaagaaatcacatgctatgtaaaggcttagtaacagtgatgaatatttgaacctgaactccagctccagagcagttcagttgcatctcttccaggaacagaagccaaagcagctcaggattcttgaaggctctgaaaggtcaatgagaatcctggtatatgtcaagactatcccaccaaagaagggctccatgtgtag

SEQ ID NO: 239903 - DNA, 594 bp, Homo sapiens
cagtagctgcaacattggataatgstgtggaattaagcaccctagtcattttaatgttttacatttgaaacatcatttgtggtttcttagaagccattccagggcccaatttgaaataacttttttcctttgtaatgtaattgatcaaagttgtgaaaagggttgccttaacttaaaggccatcctaccccaaaaaagcaatgacaaaatctcccattttctaaatcactttcaatacatcactgtcttctggctgtagcagataatgaaagctactaaaatatcaacaatgcttctactttagaatggcagcaaacataacctcaggaataatttaagcatggagggatggaggggagactaggtagcattgctgccattaagggactaagaataccttgggcagagaagtttcttcactttgaacacagtgtgattaatcagggtagtaagaaaatgtcagctccaagggatttggaaaatgtgagcagttttcacaaataaaccacatgcctaaaaatcaatgcaattccttgcagctgagcccagctgaaggctattgcccttatctagttatcaggagttgctgcctgc

SEQ ID NO: 239904 - DNA, 416 bp, Homo sapiens
aggatctaaaggaaaaataaaaatattaatgcttctatgtagtattaaaagttgtgaccataagatagcaagtataatcacacaccaaaaaatgacttttctgtcccaagtgagtggtgggcttcaatgtagtcacccagaaaacattaaatatttgtcatatgttcaagatacattttgaaacatctaaggaaatagaaattatcactttgttacatgtgcatgtaggtgcacacacasagtattactcagcgaattttttcagctttattctatataattatatattttttccagccttattctgcctgactatccagattttacactgtttagatctggctgtttccaaattgcacaaactgtcttgaactgaaatggacagaaggcaggcaaatactggtagaaaagggcag

SEQ ID NO: 239905 - DNA, 416 bp, Homo sapiens
aggatctaaaggaaaaataaaaatattaatgcttctatgtagtattaaaagttgtgaccataagatagcaagtataatcacacaccaaaaaatgacttttctgtcccaagtgagtggtgggcttcaatgtagtcacccagaaaacattaaatatttgtcatatgttcaagatacattttgaaacatctaaggaaatagaaattatcactttgttacatgtgcatgtaggtgcacacacagagtattactcagygaattttttcagctttattctatataattatatattttttccagccttattctgcctgactatccagattttacactgtttagatctggctgtttccaaattgcacaaactgtcttgaactgaaatggacagaaggcaggcaaatactggtagaaaagggcag

SEQ ID NO: 239906 - DNA, 606 bp, Homo sapiens
  misc_feature (1)...(606): n = A,T,C or G
tcagtttagggaagctgtgacaaaatcttcacttaaatctttgtccacttcagataagtggccctagcattgtttcttgcccatcaaaggactttaaattagtagcttctgctatgcaataccccactgagattgnatggtcctttttgtcctttccttttaaccgtggtggtattttacaaagatgaactcttgagcacccaagatgcttctgtcttttagtgcatgtaaatgtttgattctgcatggacaggcaagatgttaaattggtaaagtatatcaaattagcttttaaaataactttattacagttcctaaaggagaaattatctctgtaattytagaactgccctcatacttgctgtatgttgtggatcagcaagtatagtcaatcttctacttgagcaaaatgttgatgtatcttctcaagatctatctggacagacggccagagagtatgctgtttctagtcatcatcatgtgtaagtgtttacatgaaaaggctagttaatgctaaattgaggtttaaaataattataacaattgcatcttacatatcaggtgagatgtcatagtttggttcaggtagttttagattggccgtga

SEQ ID NO: 239907 - DNA, 606 bp, Homo sapiens
  misc_feature (1)...(606): n = A,T,C or G
tcagtttagggaagctgtgacaaaatcttcacttaaatctttgtccacttcagataagtggccctagcattgtttcttgcccatcaaaggactttaaattagtagcttctgctatgcaataccccactgagattgnatggtcctttttgtcctttccttttaaccgtggtggtattttacaaagatgaactcttgagcacccaagatgcttctgtcttttagtgcatgtaaatgtttgattctgcatggacaggcaagatgttaaattggtaaagtatatcaaattagcttttaaaataactttattacagttcctaaaggagaaattatctctgtaattttagaactgccctcatacttgctgtatgttgtggatcagcaagyatagtcaatcttctacttgagcaaaatgttgatgtatcttctcaagatctatctggacagacggccagagagtatgctgtttctagtcatcatcatgtgtaagtgtttacatgaaaaggctagttaatgctaaattgaggtttaaaataattataacaattgcatcttacatatcaggtgagatgtcatagtttggttcaggtagttttagattggccgtga

SEQ ID NO: 239908 - DNA, 555 bp, Homo sapiens
gctggctcagagtttgagtctgtagagaaggatcattgctccaagccaggtcttaacatccattggtttttctgcccttagcacaacaaattggtcaactccgtaatagtggacaatcacattatctactttaatgagagatttatgaaaaaatttagttacaaactatgacacagttgagatgccctgaatkataagccataaggagtaggacaactaagaagcaaaattaggacttaataacattttctgaaaactacagcatttgcatattagaacctgtgaacaaaatacacatggggttttatttgggattccaagataattttagtcataaagtttaggaacagattattccattgctttactatttctctgagcatttaaaaaatgttaccttgttaaatatttgtaacaacctagtgaaataaggcagcaaagtcctcactttgtagaagaagacattgagcctaagagaagaaatttgtccaagaactaatagctgttcattatggagctaggacttatgcagagttgggacactttctattatgt

SEQ ID NO: 239909 - DNA, 555 bp, Homo sapiens
gctggctcagagtttgagtctgtagagaaggatcattgctccaagccaggtcttaacatccattggtttttctgcccttagcacaacaaattggtcaactccgtaatagtggacaatcacattatctactttaatgagagatttatgaaaaaatttagttacaaactatgacacagttgagatgccctgaattataagccataaggagtaggacaactaagaagcaaaattaggacttaataacattttctgaaaactacagcatttgcatattagaacctrtgaacaaaatacacatggggttttatttgggattccaagataattttagtcataaagtttaggaacagattattccattgctttactatttctctgagcatttaaaaaatgttaccttgttaaatatttgtaacaacctagtgaaataaggcagcaaagtcctcactttgtagaagaagacattgagcctaagagaagaaatttgtccaagaactaatagctgttcattatggagctaggacttatgcagagttgggacactttctattatgt

SEQ ID NO: 239910 - DNA, 555 bp, Homo sapiens
gctggctcagagtttgagtctgtagagaaggatcattgctccaagccaggtcttaacatccattggtttttctgcccttagcacaacaaattggtcaactccgtaatagtggacaatcacattatctactttaatgagagatttatgaaaaaatttagttacaaactatgacacagttgagatgccctgaattataagccataaggagtaggacaactaagaagcaaaattaggacttaataacattttctgaaaactacagcatttgcatattagaacctgtgaacaaaatacacatggggttttatttgggattccaagataattttagtcataaagtttaggaacagattattccattgctttactatttctctgagcatttaaaaaatgttaccttgttaaatmtttgtaacaacctagtgaaataaggcagcaaagtcctcactttgtagaagaagacattgagcctaagagaagaaatttgtccaagaactaatagctgttcattatggagctaggacttatgcagagttgggacactttctattatgt

SEQ ID NO: 239911 - DNA, 570 bp, Homo sapiens
tgacatcgtctgtccagcaggagttgtactacttgtgaatttccattggcagaggccaaatgtagagcagtcctatgagagtgagaagacttgaggaaattgtagttcactagctaatgccacattaatgattcatgtagttgcaaacactgaatagcctattactctgccttcaaaacaaactcaattttcctttgaagaaagcacactacttattacctctcattactcactgtattaatgaaagagcagcctatttgaatagaaagagcatagctcttggatgacattcaacttgggctggaatcctacttgaagctctgtcrcttcctagctgttgcttagcctttttgtgtctcaatttcctcatcaataaaatgggaatgaaaatagtcagtttctcagaggaaaccactgtaatgcttaaataagactctacacaaaatatagaatagttcctaacacaaataacagctcaaaaattgtaagatattataatttttactaataccactaaagacaacatttgaattaagtgaaacgatacaattatacctacactttcaggta

SEQ ID NO: 239912 - DNA, 633 bp, Homo sapiens
agcctattactctgccttcaaaacaaactcaattttcctttgaagaaagcacactacttattacctctcattactcactgtattaatgaaagagcagcctatttgaatagaaagagcatagctcttggatgacattcaacttgggctggaatcctacttgaagctctgtcacttcctagctgttgcttagcctttttgtgtctcaatttcctcatcaataaaatgggaatgaaaatagtcagtttctcagaggaaaccactgtaatgcttaaataagactctacacaaaatatagaatagttcctaacacaaataacagctcaaaamttgtaagatattataatttttactaataccactaaagacaacatttgaattaagtgaaacgatacaattatacctacactttcaggtacattttaaagattacaggtagcgttgtactgtattttattgagtctaagatgatcattgtctccatgttttaacatttcttacactgaaataccacttataattcatgatttactataattataattggcagcatttaaataattttcttagtgagacataaaataatggggcatcatacaatccctggtgccttatactaagtagaatatgttataa

SEQ ID NO: 239913 - DNA, 632 bp, Homo sapiens
  misc_feature (1)...(632): n = A,T,C or G
nnnnnnnnnnnnnnnnnnnnnnnnnnnnnnnnnnnnnnnnnnnttgttcattccctttcattcttttttcccccattcttgtttgcctgtttcatttcacagagccagtttycaagctctgggattctttcctcttcttggtctattctgttggatggtcttgcacataagatggagctggtctgacctcagccctccctagtctgcttgcctctcccaggaccccagcctggccacacctgcttacagggcactctcaggtgcccacacatacaataatattcataatgcaatcacacacaatcaccatgtgactgcattatgaaaattcttctagtgtgatttacagctctgtcaggtcagttattttcttctttatacttgctcttttgtctgttacttcctgcaatgttttacaatgatttttagcttccttgtattggattacaacatacttctttcacgcaatgaactttgttcctacccatatcctgaactctgcttgtatcatttcagacatctcagcctcagcccagttctgaacacttgctggagagttgatgcagtcatttggagaaaagaaggcatgctgaatttttgagtttttagtgttcttgcacagagtctttttc

SEQ ID NO: 239914 - DNA, 582 bp, Homo sapiens
gctctccagcatctacagaaaaggcttttattataaaggggaaataacttcattgctcatccctaaggcagaaggaaaccaggtagaaaggagactgggatctgagccaaggaagagatggggacgcctcccagtgcttcccagcaacgccatggctgggttctttttatcagtttgggtaagtcatgaattatcaaaatgccttcaggcatcgcaagccagaattgcatattggtttggataattaaaagctgtttccatcaaaaaaatttgtattcaagcccttggtagtcttcaggtgaaaatagttttcctgtcattaaagttaattagtaagtgtgtatgtgtgtttatgaatctgcagataatggtttcacaagccgtgagattgggagttggaagggaggggaaagtgataaagartcaccatcggtgtctagtagtcagctacgcttctgagtacactgtatcctaaacaggcctgatcctaaggttcatttggggtatagattctcagggctcttagagattctgattcaggagttctgaggtagagcctggagtctagatgtttaacaagta

SEQ ID NO: 239915 - DNA, 335 bp, Homo sapiens
ggtatcgaactcctgagctctggcaatctgcctgcctcagtttcctgaagtgctaggattacaggcgtgagacactgcacctggccagagaacaaagaattakgaacacacaatacaatctaccacaatattcatggcctagatcaaccatggctcatcctctcagattgagagaggaatccattgtctgtgaacttgttgcaacaatacaaatttcttattcattgtgaacaagaaataaggaattgtggctattgagtagacaacagttcaatgttgacttctcactatttaaacaaattagactttttttctaattgagaaaacacacaaac

SEQ ID NO: 239916 - DNA, 335 bp, Homo sapiens
ggtatcgaactcctgagctctggcaatctgcctgcctcagtttcctgaagtgctaggattacaggcgtgagacactgcacctggccagagaacaaagaattaggaacacacaatacaatctaccacaatattcatggcctagaycaaccatggctcatcctctcagattgagagaggaatccattgtctgtgaacttgttgcaacaatacaaatttcttattcattgtgaacaagaaataaggaattgtggctattgagtagacaacagttcaatgttgacttctcactatttaaacaaattagactttttttctaattgagaaaacacacaaac

SEQ ID NO: 239917 - DNA, 335 bp, Homo sapiens
ggtatcgaactcctgagctctggcaatctgcctgcctcagtttcctgaagtgctaggattacaggcgtgagacactgcacctggccagagaacaaagaattaggaacacacaatacaatctaccacaatattcatggcctagatcaaccatggctcatcctctcagattgrgagaggaatccattgtctgtgaacttgttgcaacaatacaaatttcttattcattgtgaacaagaaataaggaattgtggctattgagtagacaacagttcaatgttgacttctcactatttaaacaaattagactttttttctaattgagaaaacacacaaac

SEQ ID NO: 239918 - DNA, 335 bp, Homo sapiens
ggtatcgaactcctgagctctggcaatctgcctgcctcagtttcctgaagtgctaggattacaggcgtgagacactgcacctggccagagaacaaagaattaggaacacacaatacaatctaccacaatattcatggcctagatcaaccatggctcatcctctcagattgagagaggaatccattgtctgtgaacttgttgcaacaatacaaatttcttattcattgtraacaagaaataaggaattgtggctattgagtagacaacagttcaatgttgacttctcactatttaaacaaattagactttttttctaattgagaaaacacacaaac

SEQ ID NO: 239919 - DNA, 446 bp, Homo sapiens
aaaaaccctccacggttatggtacagattgccttctaaagtgcatgccagccttttttctcaaggaagatctgaggtgttaagatgctccctagtaactgtgcattgtttttctgcttactcaaatgtgtccttctcagatacttgagtaatctcatctgttcagtgcattgtcagaaaatytgggttctattctagctctacatcaatatttcaccaactaacctggtgaccttgggaaaattgctttgactctctgtgcatgaagattggatggcatcagtatttttgtttaccttttttaataacccacctatattttcaaaaacattaaaatttcatgcccttctctaatttttttaaatcacaaaatgtccgtggtaactataatcaaaatggcattcatattggataatgttcttttgaaagatatctgacactaacttg

SEQ ID NO: 239920 - DNA, 597 bp, Homo sapiens
  misc_feature (1)...(597): n = A,T,C or G
acaattttgttctcaattaaaaacactttattcacacaactgatgattatctgcatttgatttagtgctgaactgtcaaagggggactaacaaaaacaaaayattagagttgcaagcagtgtaagtggaaaataatgatcatattgaactcatcattactgaaataagaaaacaaagcaaaaaataaataagaaaaaaattgactacctgaacatttgcttctctcctaagaatcaaaaccctgaatttgctgtggcttaaaagcatttgggtccctgaacccatgcaaaagtctactgggcctgggagatatgatttagccaaacacatcagctttcagagaagattaagaaacctctcataccctaccctaccccacctgataccaggcaaaggatcactgcttctgggagagggatgcaagaaaaatactcctccatcaggagaggaacaaggattgttttggggcccaggattttgcactaatgcagagtcgtgctactgtggtaaaggtttagaaaagtctccccccaaaaaccacagacnaaggtatatagttcctatggaaggagaaataaaagagtttgtccttattgt

SEQ ID NO: 239921 - DNA, 597 bp, Homo sapiens
  misc_feature (1)...(597): n = A,T,C or G
acaattttgttctcaattaaaaacactttattcacacaactgatgattatctgcatttgatttagtgctgaactgtcaaagggggactaacaaaaacaaaacattagagttgcaagcagtgtaagtggaaaataatgatcatattgaactcatcattactgaaataagaaaacaaagcaaaaaataaataagaaaaaaattgactacctgaacatttgcttctctcctaagaatcaaaaccctgaatttgctgtggcttaaaagcatttgggtccctgaacccatgcaaaagtctactgggcctgggagatatgatttagccaaacacatcagctttcagagaagattaagaaacctctcataccctaccctaccccacctgayaccaggcaaaggatcactgcttctgggagagggatgcaagaaaaatactcctccatcaggagaggaacaaggattgttttggggcccaggattttgcactaatgcagagtcgtgctactgtggtaaaggtttagaaaagtctccccccaaaaaccacagacnaaggtatatagttcctatggaaggagaaataaaagagtttgtccttattgt

SEQ ID NO: 239922 - DNA, 565 bp, Homo sapiens
agtactatgtaaaccatttccattttatcatggaactcttttgggccctgttatttccattagcatacgggtagcttcagttagcatcccataccaaggtggtaaatgcccctcaagtggacattctctagtccaaartcccagtagtcatcactgggaggtgttcataggcttttgccatgagccccagtatgggctctacaaagggcagtcaagtggagaatttgtccctaccagcactccagcttctactctacactctgtgggctcagacagtcttacttgttcccatttagtgtgcccaattaacattgctcaaagggcagatgaacatgccttctgtttcacagtagtaggtagggaaagcatcccctagtcagatacaatattcattatcaaaaaacatttaggtaaagaggttaaagctaccttacataaagcctgtttaaacttttcaactttcattttagctattactgataaaaataaccaagagattgaatatttagctttgtgcttattggtttgcatctccttgtgcatctaatgaaccaacttcccagaa

SEQ ID NO: 239923 - DNA, 416 bp, Homo sapiens
tttttctttttttaattagctgggcttggtaatttttgaccatatgataatttttygcaggcatggcacacacctgtagtcctagctacttggcagtctgaggcgagaggatcacttaagcccaggaggttgaggctgcagtgagctgtgattgcaccactacactccagcatgaggaacagagtgagatcctgtctcaaatgacagtgaataaaattgaattcactgccatttgaaaaattgaaaaagtgaataaaaataatttttaagaaaagatttttcatttgccagttttcagtttcttcctcactttaggctagtaatatcttgcatacctgttccactccctaaacaattgttagagaggcaactccaaatttgcatcttcaaaagaggactcaggcaaaagaaagtag

SEQ ID NO: 239924 - DNA, 446 bp, Homo sapiens
tttataaaagtaagacctgctcaacaaaggaaaaaaacatcaaccctagttcaccacccaaaagcaaccttcattaacactttggtggggttcttgtcggagtttatgtcagagcttttcatctcttttctaaataagtataatcgtagttgtacaatacataattccaaatcatgcatacactttatgaacatttctcccattagtatatactttacacaaacatacttrcaacttttattaagatataattcccatatcatataattcatgcatttaaagtatataatgtaatggtttttagtagaaacacagaattgtgtgaccatcaccacgatcaattttagatcatttttgtaaccctgcaaagaaacctcacacccattagcagccacgctccactcccatcctgccctacccccagtcccaggcaaccactaatctat

SEQ ID NO: 239925 - DNA, 619 bp, Homo sapiens
gagagacaatttctcttcctggcttttgtaagagccaaaattcattaagaagacartgcagtgtgtcctggagtgggggagagagacttaagtggcagaggcagattctctgaggcacagaggtgatagtgatctgaggggccaccagggcactgaagcgtcctttcctggcagtgccacatagagtggccattgcacacctagcatggctgactacactcaccttctcatgcaatagagcactgggacctcaaagcatacatgatgcacattttagctactgccagcggggatccacgcctgcagcgaccactaagaagtttttctctgcttatggaccctagaactgatactgcttctagagatgcagttagcatcaatgacagctgagaccgaatctcccatcagcccagagagatagagggcttatgttggattgagctgatcttaaagctaaaaagaaagcaatgcgatatttttgcacgcccaaatgtgtgcattaagagtcaaattgaccaggcttgatttttagaattgggctaccaaaacacagggcagaagccaattcaaaacaaagctgaaaacatgtttttcagcaagagagacaatgagccaggag

SEQ ID NO: 239926 - DNA, 619 bp, Homo sapiens
gagagacaatttctcttcctggcttttgtaagagccaaaattcattaagaagacaatgcagtgtgtcctggagtgggggagagagacttaagtggcagaggcagattctctgaggcacagaggtgatagtgatctgaggggccaccagggcactgaagcgtcctttcctggcagtgccacatagagtggccattgcacacctagcatggctgactacactcaccttctcatgcaatagagcactgggacctcaaagcatacatgatgcacattttagctactgccagcggggatccacgcctgcagcgaccactaagaagtttttctctgcttatggrccctagaactgatactgcttctagagatgcagttagcatcaatgacagctgagaccgaatctcccatcagcccagagagatagagggcttatgttggattgagctgatcttaaagctaaaaagaaagcaatgcgatatttttgcacgcccaaatgtgtgcattaagagtcaaattgaccaggcttgatttttagaattgggctaccaaaacacagggcagaagccaattcaaaacaaagctgaaaacatgtttttcagcaagagagacaatgagccaggag

SEQ ID NO: 239927 - DNA, 359 bp, Homo sapiens
gaattctagcaaaattacccatcagacttgctcaaatggggtatgtaaacctagctttccaaatttggagctgagaaccagcatatcctaatgacattctctggcagtcggttaaactggttgttacaaagactaaatagagcagctatggtgttaaccaccaccccctccataaaaatggatgcrgaagatccagttagaaggcttatgtagtagtctaggcaggagactccggggtcttggactagggtgctggtggtgaaaatgcagagcaatgtgcatagggagaactcttcaggaggcattgaactggcagaacttgatgattatccagtgaggcagtgggagggagtgcagag

SEQ ID NO: 239928 - DNA, 547 bp, Homo sapiens
taaaatcccatttcttccaagagaccctgccttgtttatccagcccagactgatcttgttttctgatctcccattcatttctcaaccacatactgaccctccactctgtaccagtcttaggtacacattgtgatgggccccagagatacaaatccagtaggccctggtcctgcccccaggttcctgtggtgtacaggggagagggagctgagtgacccgagcaagtttgatgtcctgctgggggcctgggcctactccaaatcacgcacatctgtcatgtatgtcccctctgtggccctaaattggattttcagtactatgttttattttctcatggattccactgcaactcacatttgttatcaggaatagggattaagccctactggcctatgcgtgcctcagttctgtcatctgtgaagtggtatattggccccaactgttcagtcctcattcaggagcycccacggtgaactcttcctctagcctcatcacccagcgtcactctcctcacaactcactcttgctgggtctggactgaagactc

SEQ ID NO: 239929 - DNA, 539 bp, Homo sapiens
gagatcgtcacttcttccttgtattccctttgcactctgcacacactttaatcactgatcttatcactctgaagtgtcattatttatacacttgtgtttttttctgccagattgtgaattccatgaaagcagggactgtgctttctgagtctctagccaagcacctgccacatggtaagatcaataaatatttgttaaatttagctgattatatgtgcctaacactccattggcccsctcacaagttttaaaggcatggtttccctctctctgtctctctctttctctctcctataccaagtcacacatataataaacatacaatgtgtatgctcccatagagaaactaaactatcctgtaaaatgcttgaatttaccagtgattagaaaagacatgaatggagtctttttttctgtctaaaggagttgttgtttactctctgtattagtttcccagggctgctgtaaccaggtaccacaaactgggtggcttaaacaacagaaacttattgtttcacagttctggagcctggaagtct

SEQ ID NO: 239930 - DNA, 585 bp, Homo sapiens
aagcttgattccctctgatggctgtgagggagggatctgtgaaggatgcagcctctcttggtggcttgtagagggccttctcsctgtgtctctttcctctcttcctgtctgtccacatttcctcttcttgtaaggacaccagccatagtagattagggtccatcctaatgacctcattttaacttgattacctttgtaaagatactttctctaataacattctgaggtactgaggaaattcaacataggaatattttgagggggtcacaattcatcccaagaacactgtccttctgaaaattgttttaaaatcacatcaaggaaccgccgatcagcaggagtctcctgggactataaaaatgaaaaagaaatgtctttgggtatgtgactgacagttggccaaggcgggtgaaacatttccttcccagtcagaagtttgagggtcacccttgcccccatcctgggcccagcatctggagctcaagttctctctgccctggaaagtagaaggtgctctactcactgctaattacactgcctgccattccctgaggcctttaaaatatttctctgatgatatggaat

SEQ ID NO: 239931 - DNA, 585 bp, Homo sapiens
aagcttgattccctctgatggctgtgagggagggatctgtgaaggatgcagcctctcttggtggcttgtagagggccttctcgctgtgtctctttcctctcttcctgtctgtccacatttcctcttcttgtaaggacaccagccatagtagattagggtccatcctaatgacctcattttaacttgattacctttgtaaagatactttctctaataacattctgaggtactgaggaaattcaacataggaatattttgagggggtcacaattcatcccaagaacactgtccttctgaaaattgttttaaaatcacatcaaggaaccgccgatcagcaggagtctcctgggactataaaaaygaaaaagaaatgtctttgggtatgtgactgacagttggccaaggcgggtgaaacatttccttcccagtcagaagtttgagggtcacccttgcccccatcctgggcccagcatctggagctcaagttctctctgccctggaaagtagaaggtgctctactcactgctaattacactgcctgccattccctgaggcctttaaaatatttctctgatgatatggaat

SEQ ID NO: 239932 - DNA, 609 bp, Homo sapiens
ccatcagtctttaccatttccctttctggtcccctccaactcacacatagtgtggcagggggtgaaaggaagggtgttaaccttggctaagaacctcctctctgtagacatgactttggttgctgcagttttcagtctttatcttacttagttctcaacactctataaagcagttattttaatgtaggtgacttttaatcatttgcccatagtcacatggctagaaactgtcacaggtggaatttaaactcagcaccacattatgagatcccatgcttttcttcctgctttttggatcacttcccatctatgcaatggttcctccttcctttgaccctttccccatttgtgttctatacgtggcctttccaggagacaaggttgccaccttctattcacagcgtgctttaaggacctcagatagagccccctgcctgaaaaataccatctccattggtcagaaacagagattgaataatcatttttagagttggctcctatgtatctaaaaacctttgtattcmttaaacatttcctattgaaatgcaaataaatatcccttaaagaagtgactccttaagcctttgtaaggtactatgataatctact

SEQ ID NO: 239933 - DNA, 546 bp, Homo sapiens
aagctttgggtaactcttacagtggagggtaagtccatcccctgtttaatcaatacggggactacctactccacattaccttcttttcaagggcctgtttcccttgcccccataactggtgtgggggtattgatggccaagtttcaaaaccccttaaaactccccaactctggtgccaatttggacaacattcttttatgccctcttttttagttatccccacctgcccagttcccttattagaccaagacattttaaccaaattttctgcttccctgactattcctaggctacagccacatctcattgccaccttttcccccagttcaaagcctccttcacatcctctccttgtatctccccaccttaatccacaagtataggacacctctactcccttcttggtgatggatgatgcaccccttaccatcccattaaaacctaatcacccttaccctgctcaatgccaatatcccatcccatagcacgctttaraaggattaaagcctgttatcacttgcctgttacagcatggtgttttaaagc

SEQ ID NO: 239934 - DNA, 602 bp, Homo sapiens
tttctaatcacaaatcatgaccctaggaataagacagagggataatgtcttagtccattttgtgttgctataaaggaacagtggagtctgggtaatttataaagaaaataagcttctttagctcatagttctgctgatcatacaaggagcatggcactggcttctgtcttctaatgatggtttttgtgctgcatcagaacatgagagagaaggtcaaaaggaaagtgatcatawgcaaggaggggcccaaccccagaggtgtcctggcattatatcaacccactcttggggaaactaatttatgccctcaagaaccaattgattctcatgagagtaagaactcactcactgccaccagaataccaccaggctgttcatgaggcatcaccctccacaacccaaacacctcccactaggtcgcacctcccaacaacatgactctggggattaaatttcaacatgatatttggaggggacaaatacccaaactatagcagagcagaaaaggacacaggaaaacattgttaaacctaatcccaactgcttgtgaatggggtgaaaagtaaaggccaaaagtgtttttaaaaaaatatctgtcccat

SEQ ID NO: 239935 - DNA, 448 bp, Homo sapiens
atttgctatcacgagaacaacacaggaaatacccgcctccatgattcaattacctcccacmgggtccttcccttgacacctgagaattatgggagctacaattcaagatgaaatttgggtgggggcacagcaaaaccatatcactacttgatctaaaattcgaaaacttcccatttctcctcctctctcttccatttttttcccttagcacatttctatttaacaagacttagcattttctaagagcaaatcactgtcctaaacactgatgaaatactaactttttaaataataataacaatgctttgaactcaacatcattagttccattttacagatgagaaaagtgaaacccagagaggttaaatgacttgcccaatgtcaagatggattcaaactctgtaggttgtgctcttaactatcacattaggcagtctctcaccatgca

SEQ ID NO: 239936 - DNA, 448 bp, Homo sapiens
atttgctatcacgagaacaacacaggaaatacccgcctccatgattcaattacctcccaccgggtccttcccttgacacctgagaattatgggagctacaattcaagatgaaatttgggtgggggcacagcaaaaccatatcactacttgatctaaaattckaaaacttcccatttctcctcctctctcttccatttttttcccttagcacatttctatttaacaagacttagcattttctaagagcaaatcactgtcctaaacactgatgaaatactaactttttaaataataataacaatgctttgaactcaacatcattagttccattttacagatgagaaaagtgaaacccagagaggttaaatgacttgcccaatgtcaagatggattcaaactctgtaggttgtgctcttaactatcacattaggcagtctctcaccatgca

SEQ ID NO: 239937 - DNA, 448 bp, Homo sapiens
atttgctatcacgagaacaacacaggaaatacccgcctccatgattcaattacctcccaccgggtccttcccttgacacctgagaattatgggagctacaattcaagatgaaatttgggtgggggcacagcaaaaccatatcactacttgatctaaaattcgaaaacttcccatttctcctcctctctcttccatttttttcccttagcacatttctatttaacaagactyagcattttctaagagcaaatcactgtcctaaacactgatgaaatactaactttttaaataataataacaatgctttgaactcaacatcattagttccattttacagatgagaaaagtgaaacccagagaggttaaatgacttgcccaatgtcaagatggattcaaactctgtaggttgtgctcttaactatcacattaggcagtctctcaccatgca

SEQ ID NO: 239938 - DNA, 456 bp, Homo sapiens
acccaaagccttggcagaatgggttcacgaggggaactcctgatctgcaggttgcaaagaccattgggaaagtgtggttttcaggattgggtagcacaatccttcaccaccttccttggctgggggagggagctccctttgccctgtgcagctcctggtgggccctcactccaccctgcttttcttcactctccatgagtcatgccaaccacctagtcagtcccagtgaaagaatctggatatctcaattgaagatgccaaattctcttgctattttcattcttctctatgggagccacagagtggagctgtttctatttgaccgtcttgggctacagaccagagcsgttcctattttgccattttggctgctcccagcagatggattcttagcaaaaacctagaggtcagctttttccttatagagtgcagtggatcttagggtgttctggataa

SEQ ID NO: 239939 - DNA, 456 bp, Homo sapiens
acccaaagccttggcagaatgggttcacgaggggaactcctgatctgcaggttgcaaagaccattgggaaagtgtggttttcaggattgggtagcacaatccttcaccaccttccttggctgggggagggagctccctttgccctgtgcagctcctggtgggccctcactccaccctgcttttcttcactctccatgagtcatgccaaccacctagtcagtcccagtgaaagaatctggatatctcaattgaagatgccaaattctcttgctattttcattcttctctatgggagccacagagtggagctgtttctatttgaccgtcttgggctacagaccagagccgttcctattttgccattttggctgctcccagcagayggattcttagcaaaaacctagaggtcagctttttccttatagagtgcagtggatcttagggtgttctggataa

SEQ ID NO: 239940 - DNA, 391 bp, Homo sapiens
tatagaagcagatgtcacacaaagattaartgttattttttatatgtctctaaagtctgtgtctcaaattaatacaatggattgtcagatttttccattgttccacttcaaagcatgcaattatattgccttaattggaagcactgatgtgttttcaccaaggatgtttatttgtattctgactactgagatataaatatgggactatttgctatttttagttttctactaacatggattttttttaaaacaactttttatctttataaacagacacattgagtttatcgtcagttcaaaactctgaatttatggtcaatcttaaaatcttactagtttttgtactgaaatggatctttattcaagaggcctgataatacatagcagaaag

SEQ ID NO: 239941 - DNA, 562 bp, Homo sapiens
gttggtcaccacaaattatcagtgactagaacagtgaaagccttaaaacactggtcagaaaacagggtcatgtttctcacctgtcattaagttsctgtgttgccctgagaaagttttttaatctttttggacttcacttttattattagtgaaatgaagacctcaaagtctctttttacagttcgaaggcttttggttttataacttttaaattattataagagaggtaacaatgcaagatactaataaggatctttaatatttaatcagtgcttatcatgtacaaagcatacttcaatgcatttcacattactaaatgtcttagtccattttgtgctcctgtaacaagatgcctgagacttagtaatttataaacaatagaagtttatttggctcatggttctgaagactgggaagtccaacatggaggggctgcatgtggcgagggctttcttgctgtatttcccatggaagaaggcagaagggcaaaataatctgcatgagaaagaaaagcaaagatggctgaacccttccttttatcagaaacctcttcctacgataa

SEQ ID NO: 239942 - DNA, 562 bp, Homo sapiens
gttggtcaccacaaattatcagtgactagaacagtgaaagccttaaaacactggtcagaaaacagggtcatgtttctcacctgtcattaagttgctgtgttgccctgagaaagttttttaatctttttggacttcacttttattattagtgaaatgaagacctcaaagtctctttttacagttsgaaggcttttggttttataacttttaaattattataagagaggtaacaatgcaagatactaataaggatctttaatatttaatcagtgcttatcatgtacaaagcatacttcaatgcatttcacattactaaatgtcttagtccattttgtgctcctgtaacaagatgcctgagacttagtaatttataaacaatagaagtttatttggctcatggttctgaagactgggaagtccaacatggaggggctgcatgtggcgagggctttcttgctgtatttcccatggaagaaggcagaagggcaaaataatctgcatgagaaagaaaagcaaagatggctgaacccttccttttatcagaaacctcttcctacgataa

SEQ ID NO: 239943 - DNA, 562 bp, Homo sapiens
gttggtcaccacaaattatcagtgactagaacagtgaaagccttaaaacactggtcagaaaacagggtcatgtttctcacctgtcattaagttgctgtgttgccctgagaaagttttttaatctttttggacttcacttttattattagtgaaatgaagacctcaaagtctctttttacagttckaaggcttttggttttataacttttaaattattataagagaggtaacaatgcaagatactaataaggatctttaatatttaatcagtgcttatcatgtacaaagcatacttcaatgcatttcacattactaaatgtcttagtccattttgtgctcctgtaacaagatgcctgagacttagtaatttataaacaatagaagtttatttggctcatggttctgaagactgggaagtccaacatggaggggctgcatgtggcgagggctttcttgctgtatttcccatggaagaaggcagaagggcaaaataatctgcatgagaaagaaaagcaaagatggctgaacccttccttttatcagaaacctcttcctacgataa

SEQ ID NO: 239944 - DNA, 534 bp, Homo sapiens
tgttacattggagaataagcttccaacacatgaactttaggagacacattcaaattttagcactaagtcatttaattatcatccagtctctgtggtaattaccagtcactttattttataaatgcggaaattgaaggactggcaggttgagtaacttgttcaaatcactcagcaagtaaaagacagacacagtttgaatccacatatctctccacagaagccatgctcttasttcctccactgcctgggaaagtgaaacgaaagacttagtagaaatgaccttgaatgtctgaaggaagaatcttttatgcagtttgtggataaacaggaagttattgaaagatgtagagtagcagaatgttatcactcaatctgcaactgaaggaatagttggaaagagtattccaaatgagaaaatggagaagagacagaaaaagcagttagaagagtatcacagcaatgcagctcagcaaaaactaggtagttcaattaaaatatggaaaacagaagtgaaaataaggggctagactttcc

SEQ ID NO: 239945 - DNA, 411 bp, Homo sapiens
aacacagaagatttatttcaaacttttaaaaataaggtggtcagcacctgaacaaaggccttgtagaagaagtgaaaagaagagaactgagagaactggtgaaggaagactcaactggatacaaaagtcaagggcaaaggagaaggaaagaaggaaaagtgaaatacaaatttcatgcagtgatcaatgctactatgaatatgtacagggaactctatggggtggaaacatatacagaatgacaggaattaaaaaccaactagagcagtacctaagttgacaatttcacttagatttggagataacagatttttgctttatttttaattctgagttttatctttacttctttacttactgatttgtccagcttcactcctgtcatctayatttcatttcttgattatccac

SEQ ID NO: 239946 - DNA, 381 bp, Homo sapiens
tgagggggcaggcaggaggcctatctcaccacccagccatactgcaacaacrccctctccttctgggaatacggcccaggcactcctctggaatcctgaacacactccaggcacctctcttcttgctgaacaccacctatgctcagagcacgatgctgggggagcacactgtgagaggacacctctggtatcaggcaacttaagatatattcagagagactgaaaactgcaaggattcaaggcatagcagatgatatacaggcaagaaaaaagacatttagagagggggatagagcctgaaggtttgaatggtcctacaagactttctcaaaagtcatcaccctggacctgaaacatcagagctctttccagagtaagtct

SEQ ID NO: 239947 - DNA, 381 bp, Homo sapiens
tgagggggcaggcaggaggcctatctcaccacccagccatactgcaacaacgccctctccttctgggaatacggcccaggcactcctctggaatcctgaacacactccaggcacctctcttcttrctgaacaccacctatgctcagagcacgatgctgggggagcacactgtgagaggacacctctggtatcaggcaacttaagatatattcagagagactgaaaactgcaaggattcaaggcatagcagatgatatacaggcaagaaaaaagacatttagagagggggatagagcctgaaggtttgaatggtcctacaagactttctcaaaagtcatcaccctggacctgaaacatcagagctctttccagagtaagtct

SEQ ID NO: 239948 - DNA, 614 bp, Homo sapiens
ttgactagcatcagccaaataaactttccatgtattatgtaactctatctccttgtttttttccatgctttttttccctcctggagtgtctttccatcttggggccatacacatggaktgtgacatttatggtgctgtttagagttgtttatgtacaacctgcacaaccacactaggaagccctcttcctctttacttatttaagtcttcccactcctcaaaggtcagctcaagcccaatctcctatgtgaatgagcctttcctgactttatggcacctaggatttcactcagaatttctcatgactcatatgaactatttcatgcctctgttgtctggcaccttccatcttgcattactatttgaattttcatgtaagtccaccagataagttccttaagggaactctccaagtcttctacttctttgcacctccattaccaaccataatgccatgagtatagcacaatccatttggggctccttggaaagaaacaccttatgacaagttgagagcagctgtgttctcagggtttcctcagcacatgatctccagcccattggtcaactctacctaagtctcaccttgaggtgaatgtatcacaagaaaaaca

SEQ ID NO: 239949 - DNA, 614 bp, Homo sapiens
ttgactagcatcagccaaataaactttccatgtattatgtaactctatctccttgtttttttccatgctttttttccctcctggagtgtctttccatcttggggccatacacatggattrtgacatttatggtgctgtttagagttgtttatgtacaacctgcacaaccacactaggaagccctcttcctctttacttatttaagtcttcccactcctcaaaggtcagctcaagcccaatctcctatgtgaatgagcctttcctgactttatggcacctaggatttcactcagaatttctcatgactcatatgaactatttcatgcctctgttgtctggcaccttccatcttgcattactatttgaattttcatgtaagtccaccagataagttccttaagggaactctccaagtcttctacttctttgcacctccattaccaaccataatgccatgagtatagcacaatccatttggggctccttggaaagaaacaccttatgacaagttgagagcagctgtgttctcagggtttcctcagcacatgatctccagcccattggtcaactctacctaagtctcaccttgaggtgaatgtatcacaagaaaaaca

SEQ ID NO: 239950 - DNA, 491 bp, Homo sapiens
ttttttctccctatttccctagtgcctaggacagtgcttggcatgtaatagatgctcagttaataaacacagaaagaatgaaggaatgaacaaagaaactaataaagaaaaaatgagtggttcttcagctgtgctccttctcctctcagtaccatctgaatcttggctaaagaggaccaacaatcacgcctgtatcctcaaatgcaacacttctcctttcaggctttcaatgcatttatcacatcacttaggtgagtctacacatwtaattgaaatgcatcactctcaaagccctccatgtgacaccagccactgcagggccagtgctgcaattcctagaggtgcctggctaatttgagtggcatggcctcaagacaacctttacatctcaaatgaggagtgactgcactcatcaaccttgcctccctcccctccttcctgctgcctcccacagctggtgagaactgcagagtgtcctccagggctttctg

SEQ ID NO: 239951 - DNA, 491 bp, Homo sapiens
ttttttctccctatttccctagtgcctaggacagtgcttggcatgtaatagatgctcagttaataaacacagaaagaatgaaggaatgaacaaagaaactaataaagaaaaaatgagtggttcttcagctgtgctccttctcctctcagtaccatctgaatcttggctaaagaggaccaacaatcacgcctgtatcctcaaatgcaacacttctcctttcaggctttcaatgcatttatcacatcacttaggtgagtctacacatataattgaaatgcatcactctcaaagccctccatgtgacaccagccactgcagggccagtgctgcaattcctagaggtgcctggctaatttgagtggcatggcctcaagacaacctttacatctcaaatgaggagtgactgcactcatcaaccttgcctccctcccctccttcctgctgcytcccacagctggtgagaactgcagagtgtcctccagggctttctg

SEQ ID NO: 239952 - DNA, 403 bp, Homo sapiens
aacaaatccccatgtgatgcagcagaaacaccaccattctattttcagagctggggatctaggtatcctctgctgcttacaaactggacagtcaccttgctgtctcaatttcttcatcagtaagagttgacattaggacccacataaaccctaggctcataaccagaggcagggatagatctggttgactctgagagtcctgamtagattcccataagagattgtacagtgacacaaatccaagtcgtgtttcattcccgatacttctccttacccaattctgtcatccttaattttaggttgctcctccagccccaaacctggctcctctgagggaggataacctgtaggtcccctcacatacggctcttgcatacagggaagtaaggtgaattggagttaa

SEQ ID NO: 239953 - DNA, 399 bp, Homo sapiens
atccccatgtgatgcagcagaaacaccaccattctattttcagagctggggatctaggtatcctctgctgcttacaaactggacagtcaccttgctgtctcaatttcttcatcagtaagagttgacattaggacccacataaaccctaggctcataaccagaggcagggatagatctggttgactctgagagtcctgactagattcccataagagattgtacagtgacacaaatccaagtcgtgtttcattcccgatacttctccttacccaattctgtcatccttaattttaggttgctcctccagccccaaacctggctcctctgagggaggataacctgtaggtcccctcacatacrgctcttgcatacagggaagtaaggtgaattggagttaag

SEQ ID NO: 239954 - DNA, 406 bp, Homo sapiens
aattgtcatgtctcagcctcccgagtagctgggactacaggcagacaccaccacacctgggttatttttgtattttttgtagagatggggtttcgccatgttggctggtctcgaactcctgacctcaagtgattcgcccacctcagcctcccaaagtgggattacaggcatgagccaccacacccagctgtagattcacttttttwatatgaatatacagtggatatagcaaaatttattaaaagactttcctttccccctctaaattgaacttgcatctttgccacaaatcaaccaccaatatacatgaggggctctctaatctgttccagtggtctatttgtctgttgacagcaataccatattgtcttgattacagtagctttacagtggatcttaaaatcaa

SEQ ID NO: 239955 - DNA, 478 bp, Homo sapiens
atgtattgctaggtatttattttttgtggccattgtaaaggggattgtgttcttgatttggctctcagtttgaacactactgatgtatagaaatgctactgaattttatatkgattttgtatcctgaaacttcactgaagttgttcatcagttccaggaaacttttcgtgaagtctttagagttttctagatgtagaattgttattgttagcaaagagagatagtttgacttcttttgctatttgaatacctttcatttggttctcttacctgattattccaggtaggacttccagtagtatgttcagtgcaagtggtgagagtgggcatccttgtcttgtatcagttctcaagaggaatgcttccagcttttgcccattcagtaggatgttgcctgtgagtttgtcacagctggatgttattattttgaggtatgtttatttgatgtctagtttgttgagggtttttattataaagc

SEQ ID NO: 239956 - DNA, 436 bp, Homo sapiens
acaaaccatatgtaatatatatatattcttttgtgtatatgaaatatttcagacaaaatgatgtttggaagtcaatgaaccataagtcacgaaaacacaatgcttcatggttatgagggaattgagttatattgaataataagagaaaaaacactgagccagaaggaataaaggtggtttcaagttctgactctggcatattctatgtgattctagttaaatcatcaataagcctttgtttattaattgaaataatgggggaaataatgtcttttaaagttatagtaggaaaaaaaataaaatatatatayggaaaatgccctggaatctgtaacaaaccatatactattgtagatgaatacaatgaccctaaaagcaaacaggttataatttttcttccagtccaaagaactgcgtgtccattggctgtatcctt

SEQ ID NO: 239957 - DNA, 570 bp, Homo sapiens
aatcctatatttccatttagtgataaatctattcatattacaccacaatgcaaaagtgcatcctgaaatgtactctggttttaaacgtaggacgagctttaaatacataaaagacaaaatatacactcagataagcctgtttcaaaagtaaataggcagtgagaaaagggaaagtgtaggctgcctttcctaaaccacatcattggacttcagggtaacaaattagttcatgaagggaacttgctctgtttcaaagttgtcaatctaataaatgaagaaaaattgatacaatgttgccattttgaaataatggatctaggcaaaaatcaccagtggcttctaacatcagtgacagacaaacggacctacagcctytgatcaagtatacaccaccacctatgattttattcatgttagagttcttagaaaaataaaacctgtgtctgaccagcctcaagatttgattgccaatttccaggaattatagaaaacaaagaagcatgttaaataacaccatggggatgcaatcaacaaaatccagactgtgggaagctacaggacaaaggcccc

SEQ ID NO: 239958 - DNA, 626 bp, Homo sapiens
gggattacaggtgtgacaccacacctgaacttgacttgcatttttcctcccttggaaatacaagatgggatgcctaattctgattgaagtgcaaggagaaacactgggtttgtcatctttccctctgcaccaggaatatcttggcaggtgcagaaagtgggagtgaataagctgagggtatgtcagcaggcagacccttgcctgtccagggacatacagtagttaaagggaggcagcaagagtgtggtcaggattaggagaggggctggatctaggcagataggagctaaactgccaaaaactagaatgattgataaaatccagtgaagcaagggtgtgggggaatcagtacttttggtgggattgtaagttgacatgtctctttgatgagcaatttgagattatcaaagcctgaaactatatatatatgtgtatatgcatataatatatatgtatatatgcatatgtgtataccaactttgaaatacatgtgtgtatgtacataggcatataatgtggatatatatacacacacatatatatatttcaaagttggtatacatmtatacatatataaatgtatatatatttaacctaacagttccacttctgaaactctaacatat

SEQ ID NO: 239959 - DNA, 568 bp, Homo sapiens
tgtttccctcttgctccctctctcctttgctcttttgttaccagcatttcaycattgatctcatctgtaggttccgtatagccaaatacatacatcctcaaacacagttactcacatgaggccttcagtctcaaaagcattagcatgtggcactgggcgccgtggctcacacctgtaatcccagcactttgagaggctgaggcaggcagatcacgaggtcaggagttcgagaccagcttgacccacatggagaaaccctgtctctactaaaaatacaaaataagccgggcatggtggcacatacctgtaatcccagctactcgggaggctgaggcaggagaatcacttgaacctgggaggcggaggttatggtgagccgagattgtgccattgcactccatcctgggcaacaagagcgaaactccatctcaaaaaaaaaaaaaaaaaaaaagcattagcatgtggaaatattgtaatgtgctgcattagcaaataaattaacattatcactcattgataaatactaattagtgcaataaaagcagaggatctcatttcaaaacatgtt

SEQ ID NO: 239960 - DNA, 622 bp, Homo sapiens
acagttattcattgattaacaattaattgaacagcttctatgttatagtccctaggcatatggcaatgaactagattgttatacaaagtccctgctgccatggagattacattctacaggagtggacatagacaataaatgaataaacaaataaataaatgagataatttcagataatgataaagccttgaagcccaggtgatagacaaaaagtgacaatggatgtgggtgtagttttttaaacatttttcttcttaaatttggtttaaatgtaaacatttaccaaagtgataaatatctgcagtttagtcagatagtaccataagtatttattaayagcatttattacaaaaaaacccagaaatctccatctgcttcttccccttattctcagagcaggctgttcagaagcaggctctttgaagtgacatttgagcagagaagcgaatgacaaaaaggaactgcttaagtaacatctggataaagagctttccagacaggggcaatggcaagagcagagagcctcagacagcaatgagggtccccagtgttgctagagccagggagcaagggagaaggcctaggaaatgatgcagtatatctttttcatagtagcttccat

SEQ ID NO: 239961 - DNA, 585 bp, Homo sapiens
acggttactagtgtgctctacactaaacaccaaagtacttcacacttggtcccatgcagtgtggggtgagagtagcaggggttactaaaatctaagaaaattttgaaatttaaatgcagtgtcctttatagaatgtcaaattaaacacatatttcttttaactctgaaattacatcagagataattaggaaaatatttgtcagtctttagttattgattgaaataaggattggataagaaagatggaaaggtcaagggtaattcccaatttaagctgagataatttgactaatgaccatgaatgcagttaaagacgtaaagaagaattgatttaaggggaaaaatgaattctgctttataccggttgaactaaaaatgagaagagtaaataaattagtgtttattgagtctctattacatgtcaagagctacactgagcacaytacatacacaatttttaaaaatcctaataaaaatctataaacatattattaaatccatatgacaaaagatgatacaaggctctaagacgttaagaaaccaacccaaggtcagattgctaataagtggcacaaccaggattta

SEQ ID NO: 239962 - DNA, 409 bp, Homo sapiens
catttctcctattttcccttctattctaaggaacaacagataaagttaggctaaggctggttctgaagacctacctatccttctctctctctcctacaggcatagctgaggatgctggtctgaagattttggagagggggtgaatggaaaggataaggaggaaaaaacgaggggaggggcttttstttgtcttaaagttaagccatgtacaccaacacagttgttgtatctaaaaaatactaaaaggagacacaccaaaatgttaattatagctgcctctggatattgatgattgcaattttatattcttcttttctgtatcttttcaatatttctataatgaacaaatattattgtaataatattttaacaatacaattaaaaaaacttcagtgagtattcatgcttg

SEQ ID NO: 239963 - DNA, 520 bp, Homo sapiens
gagggggtgaggtggacactgacttagtgaaatgaagagagagagaaaacaataaagatggcaaaatgttaataattgacgaatctgggtgaagggtgtgtgggaattccttatacccttcttataacttttctataagtttgaaatgatttctaggtaaaaattttacaaaaataagatttttttgattatgttggagagaaattcatgtagcctttgaatagtggtcaatatcagttgtctaggataaagaaaattcaatgtmtataatttaaatataaaataatatcctaacatcattgtcacagagacacacttttgacctgttgtggcccatatttgctcttctttgacctaatctttagtattgaattttcttttaatatattaggacatatcctaaaaatgctactacgcaatattatccaagagaattctcagaagaggaaaaagagacactcaaacaatcaaagcctttggttgattttcttaacaatgcatccataaggtaaaaaattgc

SEQ ID NO: 239964 - DNA, 514 bp, Homo sapiens
tgacaaaggaccccttgatgagtgatcagaggtggattgattggagcaggagggctcaaagatgactcctcagagttgcccctggtactttaggactatttctctacccttgtgcctataaccacataatttttttttcatttttagtttttgtgggtacatagtaagtgtatatatttatagaatacatgagatattttgatacaggcatataatgtgtaataattgcatcagggtaaatggggtatctttcacctcaagcatttatccttcctttgtgttacaaacaatccaattattttcttttagttattttttaatgtacaataaagtagtgttgactgtagtcaccctgttgtgctatgaaatactagatcttattcattctatctaactgtatttttgtatccatkaatataaccatattctgccaggctttttcctccttgcctgctccatggtaatatcaccagaagctttgtttggtgctacaaaggctaacaattgaaaatac

SEQ ID NO: 239965 - DNA, 516 bp, Homo sapiens
tgggattcagttcccactttatttccagtgttcaggaaacttacaaatttctttttgttatttcttaaaagccaygacatagaacaaccaggaaactggaaaatgaaattggattactttcatgccaaaatctgtctctccatctagtttctgtctacctctatctatctctaatttgttttctgcataggatttaaaagaattcagttaggcacagggtgaagtcatccaggtttatttataaatgtgctatgagagcgccaaattatctacaacgccgtgtaggttttgaagaatgattcattatttgggctgactggaaatatattaatacatggagaaatatgcctttgggtttcttgagattttggcattgttcatagtgtattgacatgactgtggttccgttctttgcagagctttggatgtagtcgatggaaaatatgtggttcgagactcccaggaatttccactgcactgtggggaatcccagttcttccacaccaccagtgaggc

SEQ ID NO: 239966 - DNA, 516 bp, Homo sapiens
tgggattcagttcccactttatttccagtgttcaggaaacttacaaatttctttttgttatttcttaaaagccacgacatagaacaaccaggaaactggaaaatgaaattggattactttcatgccaaaatctgtctctccatctagtttctgtctacctctatctatctctaatttgttttctgcataggatttaaaagaattcagttaggcacagggtgaagtcatccaggtttatttataaatgtgctatgagagcrccaaattatctacaacgccgtgtaggttttgaagaatgattcattatttgggctgactggaaatatattaatacatggagaaatatgcctttgggtttcttgagattttggcattgttcatagtgtattgacatgactgtggttccgttctttgcagagctttggatgtagtcgatggaaaatatgtggttcgagactcccaggaatttccactgcactgtggggaatcccagttcttccacaccaccagtgaggc

SEQ ID NO: 239967 - DNA, 555 bp, Homo sapiens
ggagatcaagcccgagcacaagaggggcccgctccccaaccacttcaacggccgggcagagggaggtcgaagcagagagctgggcagagcggccggagcgcctggagcttctgacgccgacggcttgaagcccaggaaccatttcggcgtgggcaggtcgacagtgaccactaaagtgaccctgtaagtagccgcgcaagtcccggccgagttgctgtccgcacacgtgctgggggtccgctctgagaggctcggggtatctgcattgtggaagaaacgtctggtcactgaactttcccctccatgctgaacttaagatagtgaagggccagtttacacagtcaagatttaagatgacacctgtggcagcctcctcagttaattccctttttaacacaagatttaagtttaacgaatgtaaaaataggatatccgttgaagctcaacgtttatgtagatgagagataagacctcatggcctgacatgagctgattctattctttattcaaaatgtacaagggwgttccaaggtgggatgttcttaaaatgcatgt

SEQ ID NO: 239968 - DNA, 513 bp, Homo sapiens
aaatgtcaccggctttacatttgatgcagaaccttgacacaaaatccaaactgagacccaaacgtgcatctgctgaacagagygtcctcttcaagtccctgcacaccaacactaatgggaacagtgagcctctggtgatgccggaaatcaatgacaaagagaacagggacgtcacaaatggtggcattaagagatcgagactagaaaaaagtgcacttttctcaagcttgttatcttctttaccacaagacaaaatcttttctccttctgtgacatcagtcaacactatgaccacggctttcagtacttctcagaacggttccctatctcagtcttcagtgtcacagcccacgactgagggtgccccgccctgtggtttgaacaaagaacagtcaaatcttctgcccgacaactccttaaaggtcttcaatttcaactcgtcaagtacatcacactccagtttgaaaagtccaagccacatggaaaaatacccgcaaaaagagaaaaccaaag

SEQ ID NO: 239969 - DNA, 267 bp, Homo sapiens
taccacaatttgtttatctgttcacaagccatgtccggtgactttgagctgtttccagtttttagctattatgaatgaatgaagccactatgaacattcatgtatttttaggaaattcagcagtctggctggtgataaacaggctgcccctctgaggggrggaggagtcaagtagttgagccaagttgaagagcaagcaaccagttttgtaaaaagcatctaatagccaaaaaaaaaaaaaaaaaaattgttttaatgcctatacta

SEQ ID NO: 239970 - DNA, 485 bp, Homo sapiens
aatacatatacttagttggtttattttgacagggaatggaattaagccaagactcaaacctattttccctggctactacttcaagatacgtttgaaggcctgtccagacagcagagacacagagctctatgtcagagtcagactttacctgtggtgggaccttggacaaacgggcactaaaaaaagactacctacctagctgttgggaakataaaatgaaagtgtgtgaatcacaagggcctgacccataaggatagctcagtaaacatgtattatgatttaaaaatcatgtcatacctttgacttgtaaaataatccaaatgtttccttaggaagttacaatattttaattttttcccttaaatcatacttcgaattcttcctatattatttatataaccattgaagaatcggattaatcaaaatctggttagattttaaaatcgtatgacgtcgggtacaagagctccgagcggctgcaccat

SEQ ID NO: 239971 - DNA, 579 bp, Homo sapiens
ttttccctggctactacttcaagatacgtttgaaggcctgtccagacagcagagacacagagctctatgtcagagtcagactttacctgtggtgggaccttggacaaacgggcactaaaaaaagactacctacctagctgttgggaagataaaatgaaagtgtgtgaatcacaagggcctgacccataaggatagctcagtaaacatgtattatgatttaaaaatcatgtcatacctttgacttgtaaaataatccaaatgtttccttaggaagttacaatattttaattttttcccttaaatcatacttcgaattcttcctatattatttatataaccattgaagaatcggattaatcaaaatctggttagattttaaaatcgtatgacgtcgggtacaagagctccgagcggctgcaccattggttcatcgcagcagcagcagctgtctagtcccaaagcgcccaccaggcgcttctaagaccaggagagtcttagaacmttgagagcaaatctgattcatgcgcacttccccgggagctgactctggggggtgggtgacccgtagtctgttcctac

SEQ ID NO: 239972 - DNA, 579 bp, Homo sapiens
ttttccctggctactacttcaagatacgtttgaaggcctgtccagacagcagagacacagagctctatgtcagagtcagactttacctgtggtgggaccttggacaaacgggcactaaaaaaagactacctacctagctgttgggaagataaaatgaaagtgtgtgaatcacaagggcctgacccataaggatagctcagtaaacatgtattatgatttaaaaatcatgtcatacctttgacttgtaaaataatccaaatgtttccttaggaagttacaatattttaattttttcccttaaatcatacttcgaattcttcctatattatttatataaccattgaagaatcggattaatcaaaatctggttagattttaaaatcgtatgacgtcgggtacaagagctccgagcggctgcaccattggttcatcgcagcagcagcagctgtctagtcccaaagcgcccaccaggcgcttctaagaccaggagagtcttagaaccttgagagcaaatctgattcatgcgcacttccycgggagctgactctggggggtgggtgacccgtagtctgttcctac

SEQ ID NO: 239973 - DNA, 496 bp, Homo sapiens
tctagataaatacatttggagtatgagtagatgacctacatgaggaaaattacatagtgattagaaaataaatatttrtaagatagactaaatgggtagaattaagcaacacaaatctatgcagactgctgaaattttgaaaatgaaatcaaaggagagagaaaaacatgggattaagtttctcagttatatatttccaaatttatttcaagaatataattttatttatataggtaaatatttatttctgaaatattttttgcaatatgcatctttgaattgaatgaaaacatttaattctaaaacaagattctgcaaaatgacctttataaaaaccttgaaatttttaattgtacaagagaaatgcttacccatagaattataaggcatttttaagtactactataaagtgagatagaaatgtgaaactctgttttaaaattcacatgcttttcttatgaaacaatataatactagctcaaattgcctatttaca

SEQ ID NO: 239974 - DNA, 429 bp, Homo sapiens
gggtgaaaaacgaaatcacgatggaaatgtaaaaaatttcttcgaactggatgacacaacctatcaagacctctgggatacagcaaaggcagtgctaagaggaaagtttgtagccctaaacactgatgtcaaaaagtctgaaagagcacaaasagacaatctaagttcacatctcagggaaccagagaagcaggaacaagccaaacccaatcccagcaaacaaaggaaataaccaagatcagagcagaactaaatgaaattgacacaagaacaacaacaacaaatacaaaacataaataaagcaaaaagttggttatttgaaaagataaataaaatcgatagaccattagcaagattaaccaagaaaagaagagagaaaatccaaataacctcactaagaaatgaaacaggggatattacaactgacac

SEQ ID NO: 239975 - DNA, 429 bp, Homo sapiens
gggtgaaaaacgaaatcacgatggaaatgtaaaaaatttcttcgaactggatgacacaacctatcaagacctctgggatacagcaaaggcagtgctaagaggaaagtttgtagccctaaacactgatgtcaaaaagtctgaaagagcacaaacagacaatctaagttcacatctcagggaaccagagaagcaggaacaagccaaacccaatcccagcaaacaaaggaaataaccaagrtcagagcagaactaaatgaaattgacacaagaacaacaacaacaaatacaaaacataaataaagcaaaaagttggttatttgaaaagataaataaaatcgatagaccattagcaagattaaccaagaaaagaagagagaaaatccaaataacctcactaagaaatgaaacaggggatattacaactgacac

SEQ ID NO: 239976 - DNA, 506 bp, Homo sapiens
aagcttgattgtaaatggctgaaatgctccactgaatagacacaaagtggcaaactggataaaaaaaagaagacacttctgctgcctttgagagayccatctcatgtgtaatgataccaacaggctcaaagtaaatggatggaaaaatattcatcacataaatgaaaaacaaaaaaggagaggtattgctattcttgtatcagataaaacagacattaaactaacaacagtaaaaagaaatacaaagaatgacattatataatgatggagtgttcaattcaacgagaagacttaactgtcttaaatatatatgcagccaacattagagcacccagatttttagaataaatattactagacctaagaaaagagatacacagctgtacaataatcatgaaggacttcaacaccccaccgacagcagtaagcagattagttaggcagattattaggcagaaaactaacaatgaaactgtggactcaaactgggctcttgaccaaacaga

SEQ ID NO: 239977 - DNA, 506 bp, Homo sapiens
aagcttgattgtaaatggctgaaatgctccactgaatagacacaaagtggcaaactggataaaaaaaagaagacacttctgctgcctttgagagatccatctcatgtgtaatgataccaacaggctcaaagtaaatggatggaaaaatattcatcacataaatgaaaaacaaaaaaggagaggtattgctattcttgtatcagataaaacagacattaaactaacaacagtaaaaagaaatacaaagaatgacattatataatgatggagtgttcaattcaacgagaagacttaactgtcttaaatatatatgcagccaacattagagcacccagatttttagaataaatattactagacctaagaaaagagatacacagctgtacaataatcatgraggacttcaacaccccaccgacagcagtaagcagattagttaggcagattattaggcagaaaactaacaatgaaactgtggactcaaactgggctcttgaccaaacaga

SEQ ID NO: 239978 - DNA, 424 bp, Homo sapiens
tgaatggaaagtttctgatgaagtctcagattttcaatgattgcttcatcttttacagcctctctcccatccctggccctgggcaccctccctccacccaggctagaacttcacacagacttcaatcacaaacatcacaaaagtgtctcacaaaaatgttacctgcttccacggtaaaggatttctcagagtgaaagtcccggggtgcaggagtggcctgaagtgcgagcccgaatcctcgggctgactcaggaggaaacagctccaatgggaagggccctccctgatcacttgctccctcactttctgtggtcactgctcacatggcagtcacatggtggggcaaggagcsgagcctcaggaaagttaaagaggtagggcttgactccagtccggctccttagtagctgtgtgatcctggaca

SEQ ID NO: 239979 - DNA, 519 bp, Homo sapiens
tttaattttaaaatctttactctgccagaaatattagtaatagcagtaaaattaatgtaggagcktattaatatcttataggacatgaaaaccttttcttatgccccacagaagaataggcataagagtgaattcaaagctgttaggacaggctccccgactccaggcacagaaggccaaataggccctccccatgagatatcccaatatccaggctctagggatgtatgtcttcctgaggccactggaagtcacaatgaaggcacccagggaatgcagtggaggacaacatcaggcccctcatcaagaaaaaaactgtaaatatacaggaactgggaaccaagatttatcaatgcagtgaagactatggtctcatgattgcttgaaagtaaacaacctattatttatttcctaaggtctgaatgtttgtgacccattcaaaattcctaatttgaaacccaaccccctagtgcgatagtgttgggaggtggggcctttatgaggtagctaagtcatgag

SEQ ID NO: 239980 - DNA, 404 bp, Homo sapiens
tcttctgtcacttcctgttgtgcactgtgtcatttttttttctgacttccttcaagattttttttaatcctttatcatatccagtttgactatgatgcgcaaaggtagggctgtgtgtgtgtgtgtgtgtgtgtgtgtrtgtgtgtgtctttatctgtaagttatattgtgtgaggttcactgggcttctttgatctctatgtcaatgtttttgaccaaattttgaaatttttcagtaaatcttccttcaactgtttcctcactctctccttttcttacctgttctagaactctaattaaacatatattagagtttttatatttccctacaggtttcagaggcactctgcattttttactgttgttaatcctgtactctcttcttgaggttggataatttgtat

SEQ ID NO: 239981 - DNA, 552 bp, Homo sapiens
ttttcttttgcataatgcctattcattttggataaaactcaacttttagacagctatgggacctaggcaattatttgaatctctgtagaactggctttattgaggtgcactttggctttagttcatctgcctamactgaggggcatactgagatgttgtcctggaagctctaattattaaattaattgaaggactgatattgaggaagtgttcactacagaccacttttctcttcatgaagactcagggagaaatttttgctgagtgtcagtatcaagaaaactgtgattcttttgggtaacaagtatgtttttattttatagacactttaacattttatgaatactatacattatgtcctctgtgtcagcagatagaagagtcagattttaagtcacctgacctgagaatcccagcatgcaatttatttgctaacctctttcctggcttaattgttctcaaacactttatttcgccatcgtcacacctatttaattaatataaagtttcctattccagtgtatgcattttataaattggagtacattccta

SEQ ID NO: 239982 - DNA, 393 bp, Homo sapiens
aaaagttgcctggatttataggaagtcaaaaaccttggagtcagcgtgggtatttggatcttaggttaaaacagctgagagatcaatttgtgttccccattattaggaaacccagggtggttaatcgtttaatacgggtcctagcgggagatgggcttagcaagcacayggagtctggtggataaattggaaagagcaacttacaggtacagaggtataacccgtctctctccacaatgatcattttcataaaaataggacaaaacaaacaaacaaacaaaacacacatccatggaaagttgacctattatgcaaaatgtccaagaggcataatgactagcagcaacggcaacagaaaatgttctggtatctgttctcactatagttgaattc

SEQ ID NO: 239983 - DNA, 448 bp, Homo sapiens
aattaaatgagttaatttttgtaaaatccttcaaagagtcccagccatatgttaagttccatgtaaatactttgctaataaaaataaaattttggagttataagcgcagagtttcttggataatactgttctatgtcctaaggaattacaacacatatacttagtgtttcaatgaacaccaagatmaataagtgaagagctagtccgctgtgagtctcctcagtgacacagggctggatcaccatcgacggcactttctgagtactcagtgcagcaaagaaagactacagacatctcaatggcaggggtgagttacatggtagaacgaagaatagaccagaagccagaagtgctggcctttaaccatatacctgctattcgctagctgtgtaccctctgcaaatgtcctgggtcttagattggtgtctatgaattagacaatctttaa

SEQ ID NO: 239984 - DNA, 623 bp, Homo sapiens
ggtgcatggataagcaagcccagatgaaaggagggaccttttacagcttaaagcttttgaaactggtagtaaattaaaactaactaaagctataaacccaaccccaacttagctcaattcctgatttgatcagagagatcagcccttgtggaggagaaatattttccactccagtctctgtaattggcttatatacaatatctggcatataatacacaactgtgagacattcatagaaggaggmaaatgtgatgcatgaacaaaagaaaaccaatcaatgaaactgacccacaaatggccagatgttggaattaactaagatcataaacaatcattataaataggacccaaaattagaggaaaagatagaaatagctggtaaaagttttcaatagctaagaagagaactttaaaaatgtttagaacagaaatctaaagtatttgaaataataaaattattaaatgggcataacagcggaaatggacacaacagaaaaaggacaggtgaacagaggtcaatagaaattattccaactgaggcataaagtcaaaaagaataaaaaagtaaaatacgctacagcatgaaagacttgtggggcaataataaacagtctagcgcacat

SEQ ID NO: 239985 - DNA, 623 bp, Homo sapiens
ggtgcatggataagcaagcccagatgaaaggagggaccttttacagcttaaagcttttgaaactggtagtaaattaaaactaactaaagctataaacccaaccccaacttagctcaattcctgatttgatcagagagatcagcccttgtggaggagaaatattttccactccagtctctgtaattggcttatatacaatatctggcatataatacacaactgtgagacattcatagaaggaggcaaatgtgatgcatgaacaaaagaaaaccaatcaatgaaactgacccacaaatggccagatgttggaattaactaagatcataaacaatcattataaataggacccaaaattagaggaaaagatagaaatagctggtaaaagttttcaatagctaagaagagaactttaaaaatgtttagaacagaaatctaaagtatttgaaataataaaattattaaatgggcataacagcrgaaatggacacaacagaaaaaggacaggtgaacagaggtcaatagaaattattccaactgaggcataaagtcaaaaagaataaaaaagtaaaatacgctacagcatgaaagacttgtggggcaataataaacagtctagcgcacat

SEQ ID NO: 239986 - DNA, 623 bp, Homo sapiens
ggtgcatggataagcaagcccagatgaaaggagggaccttttacagcttaaagcttttgaaactggtagtaaattaaaactaactaaagctataaacccaaccccaacttagctcaattcctgatttgatcagagagatcagcccttgtggaggagaaatattttccactccagtctctgtaattggcttatatacaatatctggcatataatacacaactgtgagacattcatagaaggaggcaaatgtgatgcatgaacaaaagaaaaccaatcaatgaaactgacccacaaatggccagatgttggaattaactaagatcataaacaatcattataaataggacccaaaattagaggaaaagatagaaatagctggtaaaagttttcaatagctaagaagagaactttaaaaatgtttagaacagaaatctaaagtatttgaaataataaaattattaaatgggcataacagcggaaatggacacaacagaaaaaggacaggtraacagaggtcaatagaaattattccaactgaggcataaagtcaaaaagaataaaaaagtaaaatacgctacagcatgaaagacttgtggggcaataataaacagtctagcgcacat

SEQ ID NO: 239987 - DNA, 599 bp, Homo sapiens
aatatcacttgaacccctaaaacatatacaaatattatgtatcaattaaaaataagtacataaaaataaaaaggtaaaaaatgcaagccaaaaatgaatccgaaccttaagatcaacaagactgattatatgttttcccctctcccaggcagcaacagccccagtttactcattttcctctctagtttttaatttcctcttcattcctggtacccaaggagatcccattcactgttragtgtttatgaatttaaaatctttttggttatatcttatctagaatttccaggtgcttatagaacaaaatcagaaaataaaatatgacttttggctcctgatcccggcaggatgggaaaataagataacctcaacacttacgtcatcatcctgccagaactgaaagtcacaaggcttattttggggcatttttcttcccagagatctaagcctattcattgttaatgaacaccatcaacaaaggaggcaatgttttctatttgaaatagttccgggttaaatgtcagaagacaagtaggctccaaatgtctctgccaaagaattattcaaaatctttttagcaagatactcaaagcgaatgt

SEQ ID NO: 239988 - DNA, 599 bp, Homo sapiens
aatatcacttgaacccctaaaacatatacaaatattatgtatcaattaaaaataagtacataaaaataaaaaggtaaaaaatgcaagccaaaaatgaatccgaaccttaagatcaacaagactgattatatgttttcccctctcccaggcagcaacagccccagtttactcattttcctctctagtttttaatttcctcttcattcctggtacccaaggagatcccattcactgttaagtgtttatgaatttaaaatcyttttggttatatcttatctagaatttccaggtgcttatagaacaaaatcagaaaataaaatatgacttttggctcctgatcccggcaggatgggaaaataagataacctcaacacttacgtcatcatcctgccagaactgaaagtcacaaggcttattttggggcatttttcttcccagagatctaagcctattcattgttaatgaacaccatcaacaaaggaggcaatgttttctatttgaaatagttccgggttaaatgtcagaagacaagtaggctccaaatgtctctgccaaagaattattcaaaatctttttagcaagatactcaaagcgaatgt

SEQ ID NO: 239989 - DNA, 642 bp, Homo sapiens
ttactcacaggatgacagcttactactccacagcaaaagatgaaataggtcgaatagaaggctctacacatatccacaaaaaagggctaacacattttctgagatgggaaagatagggtaagtaatgaacagggttttgagaggcaaaatttaagcaccccaattggacgtgttaaatttgaggtgtttttgagatactcaaatgaagtggtaagtaggaatgagacacarggttctaggaggaaagatcagagcctttggctatcaccagcaagaattaggtgttggaaattaatgaaatcactctgtaagacacctctaagcacatttgtatgcattatattatttatttgtttgtctgtgttacattatttaatccccacaaaaacccaatgatgtatatgttttagtgtcataattatttcatacataagtatggaggcttacagaccttaaggcatttgcccaaggttacagtacgtggtagaaactagagttgactctctgtgattcagctcttactcagtgtgactggtctttcatgtagtcatttattgccttcctagaacatacattcacagggtaacaggttttttgtgggttttttttcacttacttgacccccctatattttctatgact

SEQ ID NO: 239990 - DNA, 642 bp, Homo sapiens
ttactcacaggatgacagcttactactccacagcaaaagatgaaataggtcgaatagaaggctctacacatatccacaaaaaagggctaacacattttctgagatgggaaagatagggtaagtaatgaacagggttttgagaggcaaaatttaagcaccccaattggacgtgttaaatttgaggtgtttttgagatactcaaatgaagtggtaagtaggaatgagacacagggttctaggaggaaagatcagagcctttggctatcaccagcaagaattaggtgttggaaattaatgaaatcactctgtaagacacctctaagcacatttgtatgcattatattatttatttgtttgtctgtgttacattatttaatcyccacaaaaacccaatgatgtatatgttttagtgtcataattatttcatacataagtatggaggcttacagaccttaaggcatttgcccaaggttacagtacgtggtagaaactagagttgactctctgtgattcagctcttactcagtgtgactggtctttcatgtagtcatttattgccttcctagaacatacattcacagggtaacaggttttttgtgggttttttttcacttacttgacccccctatattttctatgact

SEQ ID NO: 239991 - DNA, 642 bp, Homo sapiens
ttactcacaggatgacagcttactactccacagcaaaagatgaaataggtcgaatagaaggctctacacatatccacaaaaaagggctaacacattttctgagatgggaaagatagggtaagtaatgaacagggttttgagaggcaaaatttaagcaccccaattggacgtgttaaatttgaggtgtttttgagatactcaaatgaagtggtaagtaggaatgagacacagggttctaggaggaaagatcagagcctttggctatcaccagcaagaattaggtgttggaaattaatgaaatcactctgtaagacacctctaagcacatttgtatgcattatattatttatttgtttgtctgtgttacattatttaatccccacaaaaacccaatgatgtatatgytttagtgtcataattatttcatacataagtatggaggcttacagaccttaaggcatttgcccaaggttacagtacgtggtagaaactagagttgactctctgtgattcagctcttactcagtgtgactggtctttcatgtagtcatttattgccttcctagaacatacattcacagggtaacaggttttttgtgggttttttttcacttacttgacccccctatattttctatgact

SEQ ID NO: 239992 - DNA, 460 bp, Homo sapiens
tgtaacaaatgtgacctggctccagtttgtagtaagttcctcaactccatctgagacctcctcagcctgaatttcattatccatatcactatcagcactttgatcacaacagtttatcaggtcactatgaagttccaaactttccctcaccctgttgtcttctgagtcctccaaactggtccagcttctgcccagttccaaagttgcttccacattttcaggtataggtattgcaatgccctactcctaactaccaattttctgtattagttcrttcttgcattgcaataaagaactacctgagattgggtaatttataaagaaaagaggtttgatttgctcattgtttcatagctgtacaggaagcatggctggggaagcctcagaaaacttataatcatggcagaaggcaaaaaggaaggaggcatgccttacatggctggagcaggaggaagagagt

SEQ ID NO: 239993 - DNA, 442 bp, Homo sapiens
taatagactaggattttgagtgaaatgggtttggcgtatctatactgtttgttacctttgttgaagattgtatgtggaaaccatgaacagtttagtatagaggctaaaatgggaggaaggaaatggtgagggatgtgtgtgcatacatacggatacatacatagatacatacatacatagccagaactagtatgtcaagcctgtttgtgaagctaaggtgctgggctttatcctgtagaaatggagaaccattaaaggatttaagaagatttgtggttaagaaatatccagagagacaagttatgaagctgttttaaagtacagatatgattycactcataggagttatctaaagtagtcaaattcatagaagcagaaaatataatggtggtttccagtagttggggagaagagggaagagacaagttattttatgggtaca

SEQ ID NO: 239994 - DNA, 419 bp, Homo sapiens
gtactccagtgtgactttggttaatacatagcccctacatggtgaattaccataggacatcattgctctgtgatgtaaagaggttatttagtaagaggcttcatcttaacacattttagttttcttaatagaagcaaggtagatttcctcaagccgtggtatgcagctaccatgtaattgggaggtgacactaaggggatgtgggtgttgggctcagtgtatggtatttagctgtaattatagcatctgctaacctctcttgccattgtagatgattggtataaaatgtgaaggcatgccagagagcttcatcatcrttttggtctggaaggttaggggtaacctgagaataggaagaataaaatgaggtcttcagatgctaagcaggtccagggacatctgcctgggggttaggttta

SEQ ID NO: 239995 - DNA, 619 bp, Homo sapiens
atccctatgtaacaaacctgcacgttcagcacatgtatcccagaacttaaaaaaaaaaaaaaaaaaagcagtgagagagaatgttgtattctatctcagcccagaataagctgtcctgaggtcatctattcactcccctgtgcttctgttgtcttcagttacaatgcaattttratgatcccaaagtcactgttttaagagggcaagttttgcattaaatgcttatttactgttgctctggtatatttagaaaacagagcagcctgttgagaagtaagcatctattcaaatctcccttctgattttaaacttcaaccatcaggagccacacaacctactcacaccactctgtgtgcggacttccttgtatctgccctttcttttccctcttcctggaaggtcctctcaactctctcccatccctaacacccagacatttatacctagagaatacttcctagtcctttagccctgtttctaaactttctcctgctctccaggtacagacagatacctgtcttctttcctccagcacttggtgttaccatttatctcacaactctcaaattttctgtttcattggcagaaggacagaaagtgtttgcaggcaaaaggagga

SEQ ID NO: 239996 - DNA, 446 bp, Homo sapiens
agggatattttaatttggccattacttgccactcctgaaccagtaatggatgaacaggaaaaataacagtagaaaagaaaaccttacgacacacagaattttgtgagacccctttatttctccctggtaaagtcagaaaaggcacacaagtttaacaaaaaaatatatctttagcattaggctagtgtgaaggaccaagagataagattatgccaaccatcctacrcccattctaaaacttacatcctcttggaaggtttttccgtactaacccatattacattaacctctcctttttgccatctcatcagtacttttatattccacttgttttacattaatgtacacttgctgaggttttaactcataggtcttctttttaggctttatatatatatatatcatacatatatatgatttatgttttcctttgattcacttcttat

SEQ ID NO: 239997 - DNA, 457 bp, Homo sapiens
aacttttttctacttttctacttttttcyggggtagactttggtctgcaaccctgtaatctcaaacttctactattgtactgacaaactttctggaaaacaattttgcaatgaatttcaaaagcttaaagaaaaaaaaagtcttaaaaatatatttgcaaatatactcagcaatttcactgcttagaacttaatagaaataattaaggatattcacagagatcaggataatcatcacagtattagaaaactggaaacaactcaactgtccaatcatatgtaactgattaaacaccttatggtacttctatacaatgtaaataacatacaatcactaaaaatcatgttttataaattatgtaagttaaaatgatatatcttgcttaaaattaacaattataaaagggtatgaacaatatgatcggtatactttaaaaaatatagatgggtctatacca

SEQ ID NO: 239998 - DNA, 467 bp, Homo sapiens
ttttttctacttttctacttttttccggggtagactttggtctgcaaccctgtaatctcaaacttctactattgtactgacaaactttctggaaaacaattttgcaatgaatttcaaaagcttaaagaaaaaaaaagtcttaaaaatatatttgcaaatatactcagcaatttcactkcttagaacttaatagaaataattaaggatattcacagagatcaggataatcatcacagtattagaaaactggaaacaactcaactgtccaatcatatgtaactgattaaacaccttatggtacttctatacaatgtaaataacatacaatcactaaaaatcatgttttataaattatgtaagttaaaatgatatatcttgcttaaaattaacaattataaaagggtatgaacaatatgatcggtatactttaaaaaatatagatgggtctataccaaaacattaatggt

SEQ ID NO: 239999 - DNA, 424 bp, Homo sapiens
tggtctgcaaccctgtaatctcaaacttctactattgtactgacaaactttctggaaaacaattttgcaatgaatttcaaaagcttaaagaaaaaaaaagtcttaaaaatatatttgcaaatatactcagcaatttcactgcttagaacttaatagaaataattaaggatattcacagagatcaggataatcatcacagtattagaaaactggaaacaactcaactgtccaatcatatgtaactgattaaacaccttatggtacttctatacaatgtaaataacatacaatcactaaaaatcatgttttataaattakgtaagttaaaatgatatatcttgcttaaaattaacaattataaaagggtatgaacaatatgatcggtatactttaaaaaatatagatgggtctataccaaaacatt

SEQ ID NO: 240000 - DNA, 595 bp, Homo sapiens
ccctccttctgtccagtgaggggcaggggcgtccaggcctctggaagctcattcagcccctccccgcatgtgcgcttttgtcaggtgctatttccacaatgtcttcattacctcctaattggccaaatctcttttctttatttttcttgttaaagacagatttaaagaatgagttcagcagctcagccattttcagaccatcattaatttcccaccttcttatttattaatggggcaacttccttgctggtatttcttattccctggatatctctgtaaaagcctgccttgctcgtgcaacccctgggaccagtgctaactcactctgactttgtgctgccctcagctgctctgsaattccctccgcagccctgctgcgctcacagtcctaccacccacagcttgcagcgaggagagtctagaacgcccctgcattctaggcacagaggcttccttcctctgcacagagtggaacgagactcccagttctctcctccacccttaccttcttccactgtattccaggtcctacactaagctgaacatgtacagtctcattcactcaagaccttaaggaacaaaaggggaagcagaa

SEQ ID NO: 240001 - DNA, 595 bp, Homo sapiens
ccctccttctgtccagtgaggggcaggggcgtccaggcctctggaagctcattcagcccctccccgcatgtgcgcttttgtcaggtgctatttccacaatgtcttcattacctcctaattggccaaatctcttttctttatttttcttgttaaagacagatttaaagaatgagttcagcagctcagccattttcagaccatcattaatttcccaccttcttatttattaatggggcaacttccttgctggtatttcttattccctggatatctctgtaaaagcctgccttgctcgtgcaacccctgggaccagtgctaactcactctgactttgtgctgccctcagctgctctgcmattccctccgcagccctgctgcgctcacagtcctaccacccacagcttgcagcgaggagagtctagaacgcccctgcattctaggcacagaggcttccttcctctgcacagagtggaacgagactcccagttctctcctccacccttaccttcttccactgtattccaggtcctacactaagctgaacatgtacagtctcattcactcaagaccttaaggaacaaaaggggaagcagaa

SEQ ID NO: 240002 - DNA, 490 bp, Homo sapiens
cagtttaaatcccacttgaaccrtgtggtttctgagtcctgaaccttttgaggttcaagttgagtgcactcttgacaaaacatgattttctggttcacatcaaaaaggctttaaaagacttcgaagtcttttccttaggacatcaaacagtccacaacaaagcagggtgctgatgagatgcgtgcaaatgaacagattaaattctctcctgaggattagattctccttaagaagcatgtgaagttggaaacttgggagatggggcaatgccaaaacatactcacactcttgggaccccagagcgccctctcgtctgtttacccctggcacctccctgggcctggaagctgaccttatttgttatgaagttcacacagaagtgcccagggaattagaaactgaaaacaaactcttcaggattctctatcttgcctaaggcaacacttatgtcccccagtaaaaggtgtaaattaacttagaaaagataggt

SEQ ID NO: 240003 - DNA, 585 bp, Homo sapiens
tagctaggtgaagagtggggaaatacatttcacgcaggtaagtagcaaatgcaaagacttacagtctagaactataagtcatggtagccactggccatgtgggtatatttacatctaaattaattaaaattaaataaaattaaatttttatttcatcagtcccatcagctacagctcaaaggctgactacccacatgtgactagtggctactatattggacagagcaggtactgaaccttttcatcattgcagagggttctgttggacagctctgtccagaaagagcttgatgcattcagggaactgaaaagggttcactctagccaggtatgcagtgtgcaagggtggagagtggcaaaagatgaagaggacatggcaaagaatggagggacttagtcaaagctgaccctggcattggggctaatgttcctagccagttgctmttacagagaaagtaaagaggaaataaatttaaaatttactgtttaacagccctgcaggtagacattgtctccattttatatagtgcagctgagactcagagaatttaagacatttgaccaatatacagctagttagtggca

SEQ ID NO: 240004 - DNA, 585 bp, Homo sapiens
tagctaggtgaagagtggggaaatacatttcacgcaggtaagtagcaaatgcaaagacttacagtctagaactataagtcatggtagccactggccatgtgggtatatttacatctaaattaattaaaattaaataaaattaaatttttatttcatcagtcccatcagctacagctcaaaggctgactacccacatgtgactagtggctactatattggacagagcaggtactgaaccttttcatcattgcagagggttctgttggacagctctgtccagaaagagcttgatgcattcagggaactgaaaagggttcactctagccaggtatgcagtgtgcaagggtggagagtggcaaaagatgaagaggacatggcaaagaatggagggacttagtcaaagctgaccctggcattggggctaatgttcctagccagttgctattacagagaaagtaaagaggaaataaatttaaaatttactgtttaacagccctgcagrtagacattgtctccattttatatagtgcagctgagactcagagaatttaagacatttgaccaatatacagctagttagtggca

SEQ ID NO: 240005 - DNA, 608 bp, Homo sapiens
ggtaagtttaagtttgactttataagaaattgccaagccattttcctgtcattctctgttcactagatttgcttactatttgttttgctctttcctttgcttctgtcaaatctctgtttttgggatgtgagtttagactccttactatgattccctttagcgagggcataggacacaccaaaatgcctcaagcacaaaatgccaaggaggacacctcagtgacaggatgggaaaatggartcataggagggagaggagaaaaataagaaagaggaaaacggagagcaaaagaaggggaagaaaagaaatgaaaataaaatgatgcataggaaggcagcggtgagtgcatggagctagcagtgagactttctaatagtcttgttgccagtctcctgggggctcatggggctctcaaagaaaaatttatgggatggaaaaaatgtggtagggatttaataaatatttgattaactgattgattaattcattaaggagcttggtattttaagtaggttataagaaacaagtttgttagaactgcaaaggcatgaactggagacagtaaaaacattgaaaaccacatggaaagatgaataagttgagagaga
